United States Patent Application Publication US 2014/0004565 A1 - sequence listing, part 5

SEQ ID NO: 5729 - DNA, 1161 bp, Cricetulus griseus
gctggttccgcggcagcatcgcggtggttcctgaggccaggggatcctgggggacctgcgaagggtccccggccggtggctgctgtcaccagagcaaagtttcgaacccgaggccgaatccggagcccgcagtcgtagaggagcgcggagagggcgggatttccgccgggagggatccggccgctcagggggtggggcttcccggcccgggctgcgtttcccgcgtgcggggcggggtgccgtgggtccctgctgacaccctccgcgccctcccccaggcggccaaggatgaccacgctcacgcgccaggacctcaactttggccaagtggtggccgacgtgctctccgagttcctggaggtggccgtgcacctgatcctctatgtgcgcgaggtctaccccgtgggcatcttccagaagcgcaagaagtacaacgtgccggttcagatgtcctgtcacccagagctgaaccagtacattcaggacacgcttcactgcgtcaaaccactcctggagaagaacgatgtggagaaggtaatggtggtgattttggataaggagcaccgtccagtggagaagtttgtctttgagatcactcagccgcccttgctgtccatcagttccgactccctgctgtctcacgtggagcagctgctgcgagccttcatcctcaagattagtgtgtgtgatgctgtcctggatcacaaccctccaggctgcacattcacagtccttgtgcacacaagagaagctgccacccgaaacatggagaagatacaggtcatcaaggacttcccatggatcttggcagacgaacaggatgtccacatgcatgatccccggctgatacccctaaaaaccatgacgtcggatattttaaagatgcagctctatgtggaagagcgagctcataaacacagctgagggtgcgcctgccactcggtgcccagctgtctggggccccagcccagggcggtgctgcagggctccctgcctccaagtgctcttatcgccttgacatgtggccgcccctctggttgggcttctcagtcctgcttgacttcgtgaggcagccttcccaggagactagggaacgatgccaggacagacaccatttctcagcagcctcctggggcttagccggctaacactgtccatctg

SEQ ID NO: 5730 - DNA, 1161 bp, Cricetulus griseus
gcgacctccgggaagatggcggcgccctggtggcgcgccgcgttgttcgccagcgggagaggccggggcttcggcacctcgggcgccctgagccgccggacgccccccctggggcccatgcccaacgaggacatcgacgtgggcgacctggagcggctgcagaagtaccggagcttcgagcggtaccgccgccgcgccgagcaggaggcgcgggccccgcactggtggcggacctaccgggagcacttcgtcagggagacagatcccaaagacaaaattgacattggactgcctccatctagggtcattcgggcccaacagctaaaggagcggaaacagtttatccgggagcttcgagccaatgtggaagaagaacgggcagcccgccttcgcacagccagcatcccactggaggaagtgcgggcagagtgggagaggaccagtggtccctaccacaagcagcgtctcgcggagtattatggcctctaccaagacctgttccacggtgccacttttgtgcccagggtcccccttcatgtggcctacgctgtgggagaggaggacctggtcccagtgtatcatgggaatgaagtgactccaactgaggcttcccaggccccagaggtgacctatgaggcagacaaggactccttgtggacactactacttactaacttggatggacacctgctggagccggatgctgagtatgttcattggctgctgaccaacatcccaggcaacagggttgctgaaggccaggagacatgtccttacctcccccccttccctgctcgaggctctggcttccagcgctttgccttcttgctcttcaagcaggacaagccaatcgacttctccgaggacacccgtccctcaccctgctaccagctggcccgtcggaccttccgcacttttgacttctacaagaagcaccaggaagccatgactccggctggcctggcctttttccagtgccgctgggatgattcagtcacccacaccttccatgagcttttagacatgcgggaacctgtgtttgaatttgtgcggccacccccttaccaccccaaacagaagcgcttccctcaccagcagcccctgcgatatctggacagatacagggacagccatgagcccacctatggaatctactgagag

SEQ ID NO: 5731 - DNA, 1161 bp, Cricetulus griseus
ttgaaattgatggagatataagaaattttgaagtgtttctgtcttcaaggaccccagttcttgtggctcgagatgtaaagacctttttgccatgtacagtaaacctggaccccaaactacgggagatcattgcagacgttcgagctgcaagagagcagatcaacataggaggccttgcataccccccactccctctgcatgaagccccctcctcggccaccttctgggtacagtcagcctgcatctgtctgctcctcctcagcatcattcaacgggccataggcacaacactgttactgagttcaatgactgtggatgtcatttctgagaaactaaggcaaatagaaggactggaccagaccatgctgcctcagtattgcacaacaatcaaaaaaggcaaaacataaaatggccgggtattggctcagtgcaatgttgatgagctgaagaaagagatgaatatgaactttggagactggcatctttttagaagcatggtcttagaaatgagaaatgtggaaaaccaggtggtcccgaagacccacgtttctcaatgaaaactcgagtgcccagttcctcatgggaagctgctcgccgagcttctcacagtgaactgcctcacacagagctttccagccagactccctacacactgaacttcagctttgaagaactgaacacggactcccagctggaaaaggcaaatctcatagagcttgaagatgacggccacactgggaagcgtgggatgccacacagtgatgagatggagggaagtcagggaaacttctcaggtcattttgaggcctgggcccagtcccaacgctacagctattcagaatgaaaatactgaagggacgtggcgcacaagcgaagccaacggtccagttacacaaggctctcccaaagaatgcggccgagctgcatgcagcttctgcagacagcacgggctttggagaagagagagagagcattctgtaagggaaagagtcatgaagtatgcaatatcatgtaattggtacttgagaagccgtttggcttctttccaggtgagtggctaagctccccgtctcaggagccctttattcacactgtctgtgaagtcattactggagtgccacgtgcacacgtagacaaggaacaataaagaattgcatgcca

SEQ ID NO: 5732 - DNA, 1160 bp, Cricetulus griseus
tcgcctttccctggcaggtaaaagatgcctcctttccgcagcgtacacggacagccaccagtgggaagcaagagagaaggagcggtgccacctggctgatcttgcatccttaatggacaaagcatatgaaaggaagttgcctgttagctctttatcaatatcacggtttgtggacaacatttcatctcgagaagatatagattctgcagagtactatctttacaaatttcggcacagtcccaactgctggtacctgagagactggaccatccacagctggattagacagtgcctgaaatacggtgcacaagacaaagccttgtacacccttgttaataaggttcagtatggaatttttccagataactttacattcaatttactgatggattctttcataaagaaagaaaattacaaagatgctttatctgtggtttttgagatcatgatgcaagaagcctttgaagtgccatccacccaatttctctccctttatgttttataccattgcctggcagagaagacagacctcacatgggaagaggaaaggaactttggtgtgtccctgttgcttccaggcctaaaacaaaaaacacagtgggcttgagttcccaactgtatggctatgcacttcttgggaaggtggaactgcagcacgggctgagggctgtgtaccaagacatgcctctgatatggacaccaggctaccttgacagagcccttcaagtgatggaaaaggtggccgcctcccctgaagacctcaagctatgtagagaaccgcttaatgtgctggacagagtcctgaaggaggtgacatctccagctgaccaagcctcagagacagagccccaggaaggtgaaggtagcttgggctcagcaaacctggtggagcagctagacatcgaggaaccagaacattccaagcttccacgatacctggagcgatttaaggcctctcaatctaaactgcaggagttgggcagagttgaatcagaaagtcttttgactctgaccacccagcttgttaaagaaaactcccagcatgtgaggccgaggacctggccgcttatgagcagaagttgcgtgagtggcacctggagcaggtgcagttgatccagagggaacaggagcagagggagagagctaagcaagaataccag

SEQ ID NO: 5733 - DNA, 1160 bp, Cricetulus griseus
ctggaagcggcatgctggtcaaccggctcctgacaggggcgcgagcccgggcgcctctgcaaacgagtctcctcgagacgtggcgcctccgcggccggaccgcctcctcctactccgcttcctctgagccgtccaaggtgcgggcgctgatctatggcaaccacggggatccggccaaggttatccaattgaagaacctggaactcactgctgtgggaggatctgacgtccatgtgaggatgctggcagcccctgtcaatccagctgacataaatatgatccaagggaactatggcctccttcccaagctgcccactgttggagggaatgaaggcgttgggcaggtggtagcagtgggcagcagcgtgtctggattgaagccgggagactgggtgatcctagcaagtgctgggttaggaacctggcggactgaggcggtgttcagtgagaaagcactgatccaagtccctaaggacgtccctctccagagtgctgccaccctatctgtcaacccctgcacagcctacaggatgttgatggacttcgaacagctgcagccaggggactctgtcatccagaatgcgtccaacagtggagtggggcaagcagtcatccagatcgcctcagcccttcgcctaaagaccatcaacgtggtcagagacagacctgatatccggaagttaatggacaaactgaaggacctaggagctgactatgtcctcacagaggaggagttacggatgcctgagacgaaaaccatcttcaaggacctgcccctgccccgactggctctcaactgtgttggtgggaagagttccacagagctgctacggcacctagcgcctggaggaaccatggtgacctatggaggaatggccaagcagcctgtaatagcctctgtgagcctgctcatttttaaggatgtcaaacttcggggcttctggttgtcccagtggaagaacaaccacagtctagatgagttcaaggagatgattctcactctgtgtaacctcatccaccaaggccaactcacggcccccacctgttctgaggttccgctgcaggactaccagaaagccttggaagcctccatgaagccctttgtgtcttcaaagcagattctcaccatgtgattatcccagaggaccagggggaagcag

SEQ ID NO: 5734 - DNA, 1160 bp, Cricetulus griseus
tatatcaaagaacattctacttccactttaagaacctccgctatgccaaccttcgaagaataccttcttgtgctacgaagtgaataggatggagtgcaatgaacttgtcccctttgccaaggggtcgtttagaaaagaagagcatcaacctccatgctgaagtgtgcttcctctactggttccacacccaagtgctgggggtgctgccccctgatgaaaagtacaagatcacctggtatgtgtcctggagcccctgcaatgaatgtgcagagaaagtggccagcttcctggacacacaccgcaacctgagcctggccatcttcagctcccgcctctactatttttgggatccggactaccaggacaagcttcgcaggctgaatcaggcaggagcccagatagctgccatggacttcccagaattcgaaaagtgttggaacaagtttgtggacaatgatggcaagtcattcaggccttggaagagacttaaaataaattttagattccaggataacaagcttcgggatattctcagaaacccagtgagtctgctgagagaagacatattctccttgcagtttaacaataggcaccgggtcaagccagtccagcatcgatactaccaaaggaagacctatctatgctacctgctggagcagcacaatggccagcagccactcaaaggctgcctgcaaaacaagaaaggcaaacacgcagaaatcctcttcattgatgagatgcgttcgttggaactcggccaagtgcaaatcacctgctacctcacctggagcccctgcccgaactgtgcccaggaactggctgcattcaaaagcgatcacccagacctggttctgcgcatctacacctcccgtctgtacttccactggagaaggaagtaccaggaggggctgtgttgtctgtggcgatcagggatccaggtggacgtcatggacctcccgcaatttgctgattgctggacaaattttgtgaactcccaaagtccgttctggccgtggaataatctggagaaaaacagcaggtgcatacaaagacggctccaaaggatcaaggagtcccggggtctgcaagatttggtgaatggccttggaaatctacaacttggacccccattgtcctgaatggaaagaagagattcaaga

SEQ ID NO: 5735 - DNA, 1160 bp, Cricetulus griseus
agtgggtggcatggcgtcttctgggaaaagcaggtgttctgctcttgtccagggactctgtggacatggacattcctcagcatgctaatgtggccttcagaagagcagagaaggaagtgcctgtggaatttctggtgttaaatgatgttgatttaatagtttcctatgtggaaaataatatgtacattgaagagatacaggaagatgaagatggagtccagaaaggtccagatctggctattcaagatgatgaagtggcagaaactgtttacagagataggaagaggccattacctttggagctgacagtggagttaacacaggaaacatttaactcgacagtcacaacttctgacagcttagtgctcttctatgctacttggcatgcagtgtccatggcatttctgcaatcctatattgatgtggcaattaaattgaaaggcacatccactatccttctcactagaataaattgtgcagattggtctgatgtatgctcgaagcaaaacgtcactgcatttcctgcggtaaagttgtataaggaaggcgagagcccagtgtcttacgagggcatgttgggaactaaagacctcctgaagttgtccagctaaacaggatctcttgtccagtgaacatagcatctatccaagaagcagaaaaatatttaatgtggagagctataataaagacctgccatatttaagacttcaaagaccattgctcatcttgttcagtgatggcagcataaaccctcagtataggaacacaactctggcattggtgagacagaagcagttggactcatttaccccttgttggttaaatttaaagaatactccagtaggaaggggaatcttgaaggcatattttggccatctgccccctcttcctcagctgcttttagtgaatctgcattcaggtggccaagtgtatgcatttccttcagcccagtctataacggaacaaaacttgatactgtggcttaaaaaattagaagcgggactcgaaaatcctatcacaattttatctgatcaggaatggaagccacctctcccagcttttgattttctaagtatgatggatgcccctacatctcaagctcccacaaagaaagtcgaggagtgtatgaaagaagcaggaggggcaggagactgccgagc

SEQ ID NO: 5736 - DNA, 1160 bp, Cricetulus griseus
cggaagtgtgtccctggcgtccggccgtggggccgcgcgatttgaggcatggctttccggcaggcgcttcagctggcggcctgcggtctggcgggtggctcggccgccgttctcttctccgcggtagcggtgggcaagccgcgcggcggcggggatgcagacacgcgcgcaacggagcggtcgacctggacaggaatctcgcggcccgggcccagcgtctgggactccaactgggacaggcgagagccactgtctctcattaacctgaagaagaggaatgtggaatctggagaagaagaactggcatccaggctggaccactataaggcaaaggctacaagacacatattcctcatccggcattcccagtaccatgtggatggctccctggaaaaggaccgcaccctgaccccattaggtcgggaacaggctgaacttacagggctccgactagcaagcctgggattaaagtttaataaaattgtccattcctccatgacccgtgctgtagagaccacagacattattagtaaacacctgccaggtgtctgcagagtcagcacagacctgctacgggaaggtgcccctattgaaccagatccacctgtctctcactggaagccagaggctgtgtattatgaagatggagcccggattgaggctgccttcaggaactacatccaccgagctgatgccaagcaggaggaagacagctatgagatcttcatatgccacgccaatgttatccgctatattgtctgcagagcactgcagtttcctccggaaggttggctccgcctgtccctcaacaatgggagtatcacctacctggtaatccgacccaacggtcgtgttgcactcaggacccttggggacacaggattcatgcccccagacaagattacccggtcctgagattgcctgtaggactgcaccctttcctctgctggtggcctggctgcagccttcccttgtcttccctgtctaggctatgctgtggcttcatgttgtctcgccccccaaaaatcctaatacagtttctatgaagtggttgtgagcattttctgtaatcaatacaatgaattggaatatttgacccatctctttgttctctttagaaactagtatgtaataaaatattacttctttgttgtttgttt

SEQ ID NO: 5737 - DNA, 1159 bp, Cricetulus griseus
gaatcctttgaagcccctgtactactcctgcatcagtgtggaaaagtgttaccagcaaaaagactggcagcgtttactgctttctcccctgcaccatgcagatgactggcatttgtatttcaacatggtgtccatgctctggaaaggaataaagctggagagaagactggggaccagatggtttgcctatctcctcaccacattttccctacttacaggggtggtgtatttggtcttgcagttcactcttgccgaattaatgaatcaacccgacttcagaaggaactgtgctgtcggtttctcaggagttttgtttgctttgaaagttcttagcaatcattacttccctggcggctttgtcaacgttttgggcttccttgtccccaacagattggcttgctgggcagagctggtggccattcacttttgcaccccagggacttccttcgctgggcatctggctggcattcttgttgggctgatgtacactcagggtcctttgaagaaggaactacgatgtctacacagcaggactgagcgaggaggagcagctggaaagagcattaagagctagcctcagggaccgaggaaataccagaaatggtccaacaccctacgggttccgactcacgccagaagaagaaatgaggagacagcgcctccacagatttgatggccagtgaccgtggcaccaagtgtatgttgctttcagaagactaatttatataataaatcaagaaccatgtaaccagtaaaacagacttaagtactatatgtccattaagaaaattcacaggcctagcagagtggcacacacctttaatcccagcactcaggacaaaggggaaggaagatatctgagatcaaagccagtctggtttacatatgaagttctaagccaggcagaacacacaaaggaaagaaattcacagtgtataaataaaaactacaaacacatgctcaactttaaaatgagctggtgcccagggttgacattttgaggctattaacatctcaattttccgttgtatacatttgacacatctggtgcatgccaactgtgcacctccatgtctagttgttaataggaatccacctggaatgtctttgacacttgcatataaatgggctaagcaaatccatgaagtctgagagcatt

SEQ ID NO: 5738 - DNA, 1159 bp, Cricetulus griseus
agtatggccatgagaactcgtttgacgtggttgcaagaaaagtgcctgcagaattattttggagaaaaaacggttttgtcttctttataaagcgagtgtgcagaagttctgtaagcaggatttgttctggaaatgttgggataatggtcctaccatggttgtgctatacagcgaaaactgtgttgttggtgcctacttgcaagaaggcttccagaaaagagagatgtctatcaccccttttgcactccaggagactgaagtttcagcatgcctaataggaccatatttgccagctttattgttctattctcgactgtgaaacttttcgatgcgaagagtttttggatgagaaaaagaggagagacattgctgtgatacagaataatttattgcaaaccctgagaacatataagccttatggagacctggttccgcaagcacggattctgctcctgggtccgactggagccggaaagtctagctttgtcaactcagtcaagtccgttttcagaggcagcatcacacaccaggccttggtgggctgtgacgtaaatggggtatctgacaagtttaggacatatcccgtcacatatgggagtgatggtttccccctgccgtttgttctgtgtgactcaatggggctgagtcagaaagctggcttgcatgtagatgacatagacttcatattaaaaggccacattcctgacagataccagttcaattccatgaagccaatcacatcaaaccatccaaactacattcatgactccctgctgaaggacaaaattcattgtgtggtgtttgtgtttgatatcaattctgttgaacagctctcttatggactggtcacaaagataaaaaggattcgaaggacattgataagatgtggtgttctgcatgtggctttgcttacacacgcggatagcctggatctgattacaaaaggagaccttatagacatatacagctgtaagcctctgaagctcaagctagaagcagtccacagagactttggttttgctttttctgacatcttggtggttagtaattatgtctcggaatggcatctggaccctgtgaaggacaggctaatcctcttggcactgagacagatcctgaatactgccaatgacttcttagaagacttgccattggacaa

SEQ ID NO: 5739 - DNA, 1159 bp, Cricetulus griseus
ccatgggacagcaggatgtgtggcggctcctgtcgaggttcaactcactcaaaagaagccaatgttatattgcagcatctgagaatgtccatgcatacagaagcttcggaagtgctgctggagaggagaggctgtgcgggagtcataacactgaacagacccaagttcctcaacgctctgtctctgaacatgatccggcagatctatccacagctaaagaagtgggaacaggaccctgagacattcctgattatcataaagggagctggaggaaaggccttctgtgctggaggtgacatcaaagcaatctcagaagctaaaaacacaaggcagaatttgacacgagattttttcagagaagaatatatactgaacaatgccattgcttcctgtcagaaaccatatgttgcccttattgatgggatcacaatgggtgggggagttggtctttcagttcatggacgattccgagtggctactgaaaggtccctctttgcaatgccagaaacaggaatagggctatttcctgatgtgggcggaggttatttcttgccaagacttcaaggaaagctgggttacttccttgcactgacagggttcagattgaaaggaagagatgtgcacagagcagggatcgccacacactttgtagattcggagaagttgcacaagttagaggaagagttgttggccttgaagtccccagcagcagaagatattgcaggtgtcttagaaagctaccatgcagagtccaagatggatcaagacaaatctgtcatatttgaggaacacgtggacaaaataaacagatgtttttcagccaatactgtggaacaaattattgaaaacttacggcaggatggttcaccatttgccatagaacaactgaaggtaattagtaaaatgtctccgacatctctgaaaatcaccctgaggcagctcctggaaggctcctcaaagaccttgcaagaggtactgaccatggaataccggctaactcaagcatgcatggaaggtcatgactttcatgaaggcgttagagcagttcttgttgacaaagaccagagtccaaagtggaaaccagccaatttaaatgaagttactgatgaagatttgaatagttattttaaatctctgggaagcagtgatttgaaattct

SEQ ID NO: 5740 - DNA, 1158 bp, Cricetulus griseus
gggacatgtggatgcggatgccggaacagcgccaaggccgagagtggcatcatcccagatgtttcccgatcatatcactttggcatcgtgggcctcaacatgaatggctacttccatgaggcctacttcaagaagcacaagttcaacacggttccaggtgtccagctcaggaatgtagacagtctgaagaaagaagcttatgaagtggaaattcacaggctgctcaatgaagctgtagttttggatcacagcaaggacccttgtgaagactcctttctgccagacacagagggccatacctatgtagccttcatccgaatggagaaagatgatgactttaccacctggactcagcttgccaagtgcctccatatttgggacctggatgttcgtggcaaccaccagggcttgtggagattatttcggaagaagaaccactttttggtggtcggggtcccagcctccccttactcagtgaagaagccaccatcagtcacccctattttcctggacgccacccccaaaggaacgaaggagccccaggggccgctgaacaaacatgaagcctcctccaggaccctgcagggctgggtactgtgtacccccaggcaggctagcccgtcgccctatcctgtaggattttgtagatgctggtaggggttagggctggtttgtttttaacatgagatttaattactaactctgaggggaagggtcccctgatccaacacccctgttcctgaggttaaggtctatttattacttccttgttggagaagggcaggagagcacccaggacctcttttggatctctgggcagccgatcctgccctttttacaccccatcctcccaggcctgactcagaatctaacctatttattgaccgtcctgaaggccttgggaataggcccgaactgcggcctttattcccctctggaccaggacactgccctgagggtgggactggctcatactcaggaaactgctgtgcccaactgatgacaggcccagttgggcccatgtgctgacagattcactcagagacccttagacactggaccaggcctcctctcagccttctctttgtccagatttccaaagctggataaaggtggtcattgattaaaaaaggagaaaacctacaaaaaaaaaaaaaa

SEQ ID NO: 5741 - DNA, 1158 bp, Cricetulus griseus
atcacagtgcgtgtcagaccccggtgcagaatgagggctcctggaattcttacgtggactataagatattccttcatacaaacagcaaggcccttaccgccaagacctcctgtgtgaggcgccgctaccgtgaattcgtgtggctgaggaagcagcttcagaggaatgcgggtttggtgccggtacctgaacttcctgggaagtccactttctttggcagctctgatgagttcattgagaagcgacggcaaggtctacagcatttcctagaacaggtcctacagagcgtggtccttctgtcagatagtcagttgcatctcttcctccaaagccagctctcagtgcctgagattgaagcctgtgtccagggccgaggctccctgactgtgtcagatgccattctttgctatgctatgtcaaattgcggctgggcccaggaagagaggcaaagcacctctcacctggctaaaggagaccagcttaacagttgctgctttcttccaagatcaggcaggaggagctctccttccccaactcccagtgaagagaaggaccacttagaaacgtgggctccagtgatcgactctgagggcccatccttagaaagtcccatgctgccacccaactcttcaccatcatgctgtgatattgcaagacccgatgagggactctctgtgacccagcctgtgagaaggactgtgggaggggaccatgctgtgcctttggattcctgggtcagctagacacagtgtggggaaagtgaactgtggctgagccctaggttctcttgggtggtggagaagatgcaggccattgtggctgcctgctatatctcctccatgggaataaacaccacatgggtgtttgtaagttaagcacagggtccagaagctgttgattttaaatagaactgtatttacttcctcaggagctgagtttcttcaggtgtttgtttagacacagggcactgccatgggtgaatggtttggggaacctcttcatggcagatttatctgccgtattgaatactgtcccaacagaatgcttctgttgttatattcccatcttggcaggctgcagtttttgttgcagtccctggagcattttggttgtgggaggctggcctcttacctgtctccttgtgtggacagggtggtg

SEQ ID NO: 5742 - DNA, 1158 bp, Cricetulus griseus
atgaaatgctaggcggctttgtgatttgtattatgttaactctcctgaactagaacttgaagaactaaatgcgatttcaccaggacagacaatacaagtggtttatgttaccatcccatctctatcacatggtgtttgaactgttcaagaatgcaatgagctgggtgaggaggatttgactgtgaagatgagtgaccggggaggtggtgttccactgagaaagattgacagactcttcaactacatgtactcaactgcaccccggcctcgttttgagacatcccgtgcagtgcccctggctggttttggttatggattgcccatatcacgcctctatgcacagtacttccagggggacctaaagctgtactccttggagggctacgggactgacgctgttatctatattaaggctctgtcaacagaatccatcgagagactccccgtgtataataaagctgcctggaagcattacaaaaccaaccatgaagctgacgactggtgtgtccccagcagagagccgaaagacatgaccacattccgaagctcttagatgcacatggggcacctggaaaatccaaaatgtggttttgctaagtttggaagagatgtgtttggagccacattataaccaaatatgtcatttgtgattttcacaaattcatgttgctaaaagctcctaaaaggatcaattataccaaactttattctgataatgtttggttaattggtgcttggctacttacctggagggatctgggggtttggtttggaaagtgctgtgagttaaagcatctcactcttgataggatttatctggtacaaaatagaattcttgtaccaaatgatagaaacttgtaggttgaggatgcccagggtggtcaattcaggaccctcatgtgagaggtgaggggcctgaaactcaggtcctgttggtccagggtttttagctaatacaaccaaatgttggaaaagacataccttatacccgctgttcctaactgaggactttgtaagaaataatagactatgttcatgagtgacatttattccgtgtattacacttattagctttaaattacattttcttgcaatgatgaaatattttggaatcttttgtacaactgtcaataaatgtactatttttacttgtgtaaa

SEQ ID NO: 5743 - DNA, 1158 bp, Cricetulus griseus
gttggtgctattttcacttgtccgctagaggtcattaagacgaggttgcagtcttcccgactagctcttcggacggtgtattaccctcaagttcacctggggaccattagtggagctggaatgatgagaccaacgtctgtgacacctggactcttacaggttctaaagtcaatcctggaaaaggagggaccaaagtcactttttagaggcttgggtccaaatttggttggagttgcaccatcaagggctgtgtactttgcatgttactccaaagccaaagagcagtttaatggcatttttgtgcctaatagcaatactgtgcacgttttctcggctggctctgcagcttttgtcacaaataccttaatgaatcctatttggatggttaaaacgaggatgcagctagaacgaaaggtgagaggctgcaagcagatgaacacactccagtgcgctcggcatgtgtaccagacggaaggcatccgtggcttctatagagggctgactgcctcgtatgctgggatctcagagaccatcatctgctttgctatttatgagagtttgaagaagtgtctgaaggaagctccgttaggctcctccccagacggggctgagaagagttcctctggcttttttggactcatggcagccgctgccgtctctaagggatgtgcctcctgcattgcttacccacacgaggtcatcaggacacggctccgggaggaaggcaccaagtacaagtcgtttgtgcagacggctcgcctggtgttccgggaggaaggctacctggccttctaccgaggactctttgctcagctcatccggcagatcccccaacactgccattgtgctgtccacctatgagttcatcgtgtacctgctgggagagcgtgccgagtgacaggccacacggctgtgctctggaagaataaaactgaaaaccctagagattttcttttccgttgatgtttagtgttcaaagctgaaacagcaaaggccatagagtacctggctcgtctcacctgttggacatttccttttggattcatgtttctggaaggttttaattcattaacgttaatagttaattataaaactcttttttaacttaagaggtattgaggtattgagcagcaagtaaattaaatcatgctatttaat

SEQ ID NO: 5744 - DNA, 1158 bp, Cricetulus griseus
ggagcatctggcgaaggcagagaagtatctgaaaactggttttttaaaaatggaagccagactatgacagtgccgcttctgaatataggaaaagcagctgttgactttttaaaaaatgaccaaactaattttgagcaagcaaaagatgcctgtctacgggaagctgttgcccatgaaaataacagggccctttttcatgctgccaaagcttatgagcaagctggcatgatgttgaaggagatgcagaaactgcctgaggccgtccagctgatcgagaaagccagcatgatgtacctggagaatggcaccccagactacagcagctatggccttggagcgagctggaaagctcatagaaaatgtagatccagaaaaggctgtacagttgtatcagcagacagctaatgtgtttgaaaatgaggaacgcctccggcaggcagttgaacttctaggaaaggcctccagactgctagtacgaggacgaaggtttgatgaggctgcactgtctatacagaaagaaaaaagaccaagatcaagtgtcagaggtctgcaactcaccccttttcaaatacatggacaatgactatgctaagctgggcctaagcttagtggtcccgggcgggggaatcaagaagaaatcaccagcaacaccccaggccaaacctgatggagctgccagcacaactgctgaggaggaggaagacgagtattcaggaggcctatgctagtaccctgcctgcagaggagatgagaagatggaaatcctggcaagccatcttcatgggattaggactcattctgtgcccatctgaaattatatcataagcaaggcaggaaatagtgcatatttactcttttctcttgggttcttgtaatttattgttaaaataattttcattgcattgaaagtctgcatgaatatgctagaatcatctagtgtttagttattatatagtgagtgaagtcagtatacagaacacatttaatatattgaatttgtaaatatgcagagtatggtatttgtgtatggaatctgtgcattatcatatttttccagctttttggtgagtaaaatattaatatgttgttaatagaaattagatgattgcttctgaagaaagataattatgaaaataaaacccaaggacaatatgaaaa

SEQ ID NO: 5745 - DNA, 1158 bp, Cricetulus griseus
ggtggagaagctgggtgtggggtgcacggagccggtggggaagccgagctgcagcgagcgtagggtcggatcggactggggttgcggccgagggccagcccggagcccgcaggagaggatcccgactgtgagacccgccttcccggccccggcccctcccagctcccccagcgacggctgcttcctggtccccgacgcagccatggccgaagaacaacctcaggtcgaactgttcgtgaaggctggcagtgatggggccaagattgggaactgccccttctcccagaggctgttcatggtgctctggctcaagggagtcaccttcaacgtcaccaccgtggacaccaaaagacggacagagacagttcagaaactttgcccgggtggacaactcccattcctgctgtacggcaccgaagtacacacagacaccaacaagatcgaagaattcctggaagctgtgctgtgccctcccaggtacccaaagctggctgctctgaaccctgagtccaatacctcagggctggacatatttgccaagttttcggcctacatcaagaactcaaacccagcactcaatgacaacctagagaagggactcctgaaagctctgaaggttctagataactacttgacatcccccctcccggaagaagtggatgaaaccagtgctgaagatgagggcatctcgcagaggaagtttctggacggcaatgagctcaccctggctgactgtaacctgctgccaaagcttcacattgtacaggtggtgtgtaaaaagtacagaggcttcaccatcccagaggcgttccgtggagtgcatcggtacttgagcaatgcttatgctcgggaagagttcgcctccacctgtccggacgacgaggagatagagctggcctatgagcaagtggccaaggccctgaaatgagcacctcttagaggctccttcacccactctgtgctcgccatagaggctctgggaggctaccacaatgcgacacaatccacacacaccacaacagccagtggtcaggaaacccgggtacacaggtgtggggctgggggaggaatggagggaaaggataggcgacaagggtaagatttctattgcggggtggggtgggtaggacagcgtatttcggtaataaaatacagaat

SEQ ID NO: 5746 - DNA, 1157 bp, Cricetulus griseus
taagaaaagtgaccatggagaacaatgaaacctcagtagattccaaatccattaaaaattttgaagtaaagaccatacatggaagcaaatcaatggactctggaatgtatctggacaatagttacaaaatggattatcctgaaatgggtgtgtgtataataattaataataagaactttcataaaagcactggaatgacacctcgctctggtactgatgttgatgcagccaacctcagggagacattcatgcgcttgaaatatgaagtccggaataagaatgatcttacttgtggagaaattgtggaattgatgaaaaatgtttctaaagaagatcacagcagaagaagcagtttcatttgtgtgattctaagccatggtgaagaaggagtaatttttggaacagatgggcctgttgacctgaaaaaactaactacttacttcagaggggactattgccgaagtctaactggaaagcccaaactcttcatcattcaggcctgccgtggtacggaactggactgtggcattgagacagacagtggaactgatgatgacatggcatgccagaagataccagtggaagctgacttcctgtatgcttattccacagcacctggttattactcctggagaaattcaaaggacgggtcctggttcatccagtcactttgtgccatgctgaaactgtatgcacacaagcttgagtttatgcacattcttactcgagttaaccggaaggtggcgatagaatttgagtccttctcccttgactccacttttcatgcaaagaaacagattccgtgtattgtgtccatgctaacaaaagaactgtacttttatcagtaaggaaatgattggtgtcaatgatggtactatcattatagaggaaattacaaatttactttttataattagcaagatttggtggtactataaatttttaagttaattctgaagaagttaaactttcaggtgtaattttatactccctacacacattaaaaatgccattctaggttttgttaaattacagcaatgatggtgtcaaatgataatgtcttagaacttgaatccatgggcagagtcaaaagcttggacctttattttggaagtgatatatggaaatgaagcattggaccaccagtagcattcatt

SEQ ID NO: 5747 - DNA, 1157 bp, Cricetulus griseus
catcagattcagcatcgactttacctgacactccggggaccagtgatactctaccatcacccgactttacctgacactccggggaccagtgatactctaccatcaccccaaacaaatactttaggaagacaacctatgagtggaacacttaaagaaagattaaagaaaacaaggtcttcatctcattctttttgtagtgtggtgaaacgacttaaagtagagaaggaggaaaattatgagacctcttcagaaccaggagcatcatcaaaagaaaaaagctgttccgaattccaaggaagtttgaaacacaaagacagtgcgtctgaaaaagacagctcagagaatgcaaatgcatgcaaatctaagtcacttggtactgggtcctccagtgccctccaaaatgattttgagagtgagaatactaaagaaaaattaaaggaagaaaaagcaaaattggcaaagcaggttcaagagaaggaagaacttcttcggagattaaaacttgtcaaaatgtatagaataaagaacaacctggctgagttagagatgttaataaagaagtggcggaagtgcagccagcagctactgtatgagctgcaggcagtcatgtctgaggaggacgagaaactcagcctcactgagctcatcgactactacggggtagatgagaaagttgtgcactatgatagaagtgaagaagaatttacaggggtttgatattttctaggcttttttccccctcctccttttgaggtgatgggatcatgcccagggcctcagatgtgctctatttctgagctatactcttggcccctctacagaatatctttgagaatggcaatgtgaaaagagtgttttgaagggaagaaagatataagctgtttttgtggcttagagaaaggtatcttgaacagtttaagatattctgatacataaaattataacacgaagcttcgtattttggatatgtttgctaaagaaaatatttaaatattaaaaaaaaaatgatgtttaaaaggaagtttggataattctggaaaccaggtttagtaaattgattttgtggcaaaaagagtttatattcagtgttaaaaagtattttattcaatgtctaaacctcacctggcctaaatgtaacctgcccctcctgagtttat

SEQ ID NO: 5748 - DNA, 1157 bp, Cricetulus griseus
aggccggaactcaagatggctgcgctcttgctgagacacgttggccgtcattgcctccgagcccaccttaattctcagatctgtctcagaaatgctgttcctttgggaaccacagccaaggaagagatggagcggttctggaataagaacacgagttcaaaacgtcctgtttctccccacctcactatctacagatggtctcttcccatggtaatgtccatttgccaccgtggcactggtgtggccttaagtggaggggtctctctttttggcctgtcggcactgctgcttcctgggaactttgaatcttatttgatgtttatcaagtccctgtgtttggggccagcattgatccactcagctaagtttgtgcttgtcttccctctcatgtaccactcgttgaatgggatccgacacttgatatgggacctagggaaaggcctgtcgatctcccaggtctatcagtctggagtggctgtcttgatgcttgctgtgctgtcctctgtagggctggcagccatgtgaagagctgaaattcccatcatcgtcctatacattatcacactgatttatattcccatttatcactcttatccccagtcaccaaggttcccctgatttgtttagatgccatgtgcttcagatcccactggagctcagtagagaggcttgaagacctgtagtagtagaaaaaggtcattttccctgggcctggagcccttactcccaatccacatttgactttgatttgtgctgagggtcagctttcgactccttcttgctgagacagtggaaacaatggcagtcctgtggctgcccttggtgccactgcctgtgggctgctggcttaaaggacagttcggttcattggtcagctcagggcctttagcgcccacacagtgtgcctgagagaagagaggtggagggagggaatggctctgcccagctagagggagagaaagagcgagttggatctggggagctcatgcttgggaaaagatatagatggagctttgatggatgaggaagatcaagatccaatgtgttttctgttctgtttttcacttctagtaaaacacacctttaatgtcatgttttctaatctaaattcttgtaccatcttctttggaaatgattaaaatacttctcatttcatg

SEQ ID NO: 5749 - DNA, 1157 bp, Cricetulus griseus
agctactgcttctttggaaggctctgccgagcccattgttagtaagtggtcggagagcagtgagccaccagctgcagatctcaaggagtatccagaggctcctgttcagaggagacagaagaagataaggccacctcctgagttggagacttccttcgctgaaaagccatcatctagtccatctttcctacgcaatgaaaatggtgtcaatgtggagccaccggcagaggcagtcattccaaaaccacgaaggaaggccaagaaaacgcagccagcagagctacagtatgctgatgagttaggggtagaagatgaagacataattacagatgagcagcgtaccctagagcagcactccaggttcacagcacccacgggaattagccagcctgtcagcaaagtatttgtggaaaaaagccggagatttcacgcagcagatcgttcagagttgataaagaccacagaaaacatagatgtgtcgatggacatgaagccatcctggaccacccgggatgtggcgctttcagtgcaccgagctttcaggatgattggtctgttttctcacggcttcttggctggctgtgctgtgtggaacattgttgtgatctatgttcttgcgggagatgagctgtctgacctctccaaccttctgcagcagtacaagcacttggcataccctttccagagcctcctctacctgcttttggccctaagtacggtttcagcgtttgacaggactgactttgctaaaacctcagtagctatccggaactttttggcccttggagccaacagctttagcttctttttgtactttgctgctctaatactgtctctgagtcagcagatgacaagtgataggatccacctttacgcaccgtctgttaatgggagcctctgggcagcagaaattgaggagcggtttctccagccatggatcattgtgaatctggtggtggcccctttctggttggattatcctggcttctttttgtcttacaggccatccgtggatcttagtgaagagctaatgttcttctctgatgttgaggagtaccctgataaaggaatccaagcatcctcatagtgccaactccttcactgcagtaaagacctgcatttccccactcttgtttttaagtatatttttataagat

SEQ ID NO: 5750 - DNA, 1157 bp, Cricetulus griseus
cccacagcagggcatatccccaccccagacaaagatggcaaggaggtggatacgaccctgttttcagagttccaggcttggagggcatcacctaccctggataaggactgccccttcctagaaagggtgtaccgggaggatgtgggcccttgccttgacttcacagtgcaggagctctcagctctggtgcgggctgctgtggaggacaacacactcaccatcgagcctgtggcttcacagactctgcccactgtgaaggtgcccactgttgaatgtaacaacatcaacacgtgtgccctgagtggattggcccgtacctgtcaccaccgaatccgcctcggggactctgagagccattattacatctcaccatcatcccgggccaggatcactgcagtgtgcaacttcttcacctacattcgctatatccagcaaggcttggttcggcaggatgctgaaccgatgttctgggagattatgaggcttcggaaggggatgtcactagccaagcttggcttcttcccacaagaggcctagggcatggccccaggcctgaagtaggctctgagctagagcaaacagctgccttgggacagacagacaagaaatcctggagccagcttgagccagaagctgaaaggacagagccctgggtcaccagcacccccttgtggccatctctcaccctgttcccaagtggcctcagattgctccagaggtagggcaagtgtctccaatctgagcatggcagagggacaactgccacaaagtgctctgaaaatgagtcctagataaccgccccccccatttctctgcatagaggcctctcctgttcccctccctccctacttcaaccccatctccaggagtcactgatcctaaaattgccaggggtctgggctctttcttcctaaagtgtgccaccaggggaacctcaggatgtagttgtgggcagccatccagactacagggaccctgtatgtgggactgcatggagtgggcaggccacccaggatctggaccctgccttatccatcatagcccaccaggaactgcacttgggggatccaacctggacatatccctcaccacgcccctatttccttcaagtggaatgtaacacgatctctatttaataaaggaaggctttgttggta

SEQ ID NO: 5751 - DNA, 1156 bp, Cricetulus griseus
  modified_base (1150)..(1150): a, c, t, g, unknown or other
tggaaagacagcaggtgatcatcgatgagctaataaagaaactggacatgaatctcaatgaggacatcagttccctgtcaaccgaggagctgcgccagcgtgtggatgcagcagtggctcagattgtcaacccagctcgggtgaaggaacagttggttgagcaactgaaaacccagatccgagaccttgagatgttcatcagcttcatccaagatgaagtgggaagccccatgcagacaagtggacactgtgagtgcaaggccagcgggaagtcaggaaacggcttcaccagaaccggcagcagctctgtgcccccaggagctggcaaaacaaaggcagaagacgtgaagagagtccgggaaacagggttacacctgatgcgccgagcgctggctgtgctccagatctttgctgttagccaattgggctgtgccacaaggccagatccctcagtccttgtggcaggagggaccaggcagacagagactaccagccacatgaccatgtcatcacttcggccaacctccaggacctctctctaggaggcaaggacgagctaaccatggctgtgcggaaggaactgacagtggccgtgagggacctgctggcccatggcctctacgccacctcctctgggatgagtcttgtcatggcccccattgcttgtttgttgccagccttctcctcagcccctgagaccatgcatccctgggagctctttgtgaagtactatcatgccaagaatggccgtgcatatgtggactccccagcccggaagctctcacagtcctttgcgctgcctgtaatgggtggtagtgctgttgctgacagtagcattgaccctttcaagcgaccagtgctgactcggacggctgaaggctttggtgtgcatggcccgtgaatgagcaacgcctggtgtcctgggtgaacctcatctgcaagtcaggctccctcatcgagtcccattaccagccctggagctacatggcccacacaggttttgaaagtgccctcaacttgctcagccgcctcagcagcctcaagttcagccttcctgtggacttggcggtgcgccagctcaagaacatcaaggatgccttttgatgagagagaaccctgaccttggaccccacatgccttgctctcaagnggtaga

SEQ ID NO: 5752 - DNA, 1156 bp, Cricetulus griseus
ggggcaagctgagaagagtttgagaagaaaaggccccgtggagaggtctgaaaacagcatgtactcacccattcctcagagcggctcttcattcccagcctcagtccaagacccaggcctacacatatggcgtgtggagaagctgaagccggtgttaatagcacgagagaaccatggcatcttcttctctggggattcctacctagtgctacacaatggcccagaagaggtctcccatttacacctgtggataggccagcaatcatcccgggatgagcagggcgcctgtgctgtgctggctgtgcacctcaacaccctccttggggagcggcctgtgcagcaccgtgaggttcaagggaacgagtccgaccttttcatgagctacttcccacgtggcctcaagtaccaggaaggtggtgtggagtccgcatttcacaagacatccttgggggccaccccagcagccgtcaagaagctctaccaggttaaggggaagaagaacatccgagccactgagagggcactgagctgggacagcttcaacaccggggactgcttcatcctggacctgggtcagaatatcttcgcctggtgtggtggaaagtccaacatcctggaacgtaacaaggcaagggacctggccctggccatcagggacagcgagcggcagggcaaggcccaggtggaaattatcactgatggagaggagccagccgagatgattcaggttctgggccccaagcctgctctgaaggagggcaaccctgaggaagacctcacagctgaccagaccaatgcccaagctgcggccctgtataaggtctctgatgccactggacagatgaatctgaccaaggtggctgactccagcccctttgcctctgaactgctgatcccagatgactgctttgttctggacaacgggccttgtggcaaaatctacatctggaagggacgaaaagctaatgagaaggagcggcaggcagccctccaagtggccgatggcttcatctctcggatgagatattcccccaacactcaggtggagattctgccccagggccgagagagtcccatcttcaagcaattcttcaagaactggaaatgagggttggtgcccctagccctcctctcctgccttctaccaccggcctgc

SEQ ID NO: 5753 - DNA, 1155 bp, Cricetulus griseus
gaccccacctacacgagctcccgtgggaggaagatccctatccgctggacccgcccagaggccatagcctacggaagttcacctctgccagtgatgtctggagctatggaattgtcatgtgggaagtcatgagctacggagagcgaccctactgggacatgagtaaccaggatgtcatcaatgccgtagagcaagactaccggttgccaccccccatggactgccccactgccctgcaccagctcatgctggactgttgggtgcgggaccggaacctcagacccaagttctcccaaattgtcaacacactagacaagcttatccgcaacgctgccagcctcaaggtcatcgccagtgccccctctggcatgtcccagcccctcctggaccgcacagtcccggattatactaccttcaccacagtgggtgactggctagatgccatcaagatggggaggtataaggagagctttgtcagtgctgggttcgcatcctttgacctggtggcccagatgactgcagaagatctgctaaggatcgggggtcaccttggcaggccaccagaagaagatcctcagcagtatccaagacatgcggctgcagatgaaccagacactgcccgtgcaggtctgctgctctccagtggggaatcttcacaactcagatttggctgtgcttcaatagtggaggtcctggtagggtcgggtgggggtaagcctgggttcctcaggccccagccctggcaggggtctgcccccaccaggtaagcagggagtattccctcccccaggaagtggatgaggggactccaggaatggggaaatacagtgccccaccctgaagccagctggtacctccagtttgcacagggacttgttggggctgagggtcctgccctacccctgcccttggtgctgtcataaaagggcaggcaggagcaggctgaggagcagcccttgcctcccagagactgactcacagagccagagatgtgtgtgtgtgtgtgtgtgtgtgtgtgtgtgtgtgtgtgtgtgtgtaaaatacggggcacatgcttggctgcacagagagcatgagtgtgtacaagcttggccctgtgccctgtagtgggccagctgggcagacagcgaaataaaggcaataagatagaaaaaa

SEQ ID NO: 5754 - DNA, 1155 bp, Cricetulus griseus
atgaaggtcacgtcgctcgacgggcgccagctgcgcaaaatgctccgcaaggaggccgaggcgcgctgcgtggtgctcgactgccggccctacctggccttcgccgcgtcgagcgtgcgcggctcgctcaacgtcaacctcaactcggtggtgctgcggcgggcccggggcggcgcggtgtcggcgcgctacgtgctgcccgacgaggcggcgcgcgcccggctgctgcaggagggcggcggcggcgtggcggccgtggtcgtgctggaccagggcagccgccactggcagaagctgcgcgaggagagcgccgcgcgcgtcgtgctcacttcgctgctggcctgcctgcccgccggcccgcgggtctacttccttaaaggggggtatgagaccttctactcgcaatatcctgagtgctgtgtggatgtgaagcctgttccacaggagaagattgaaagtgagagaggcatcctcagccagtgtggaaagccggttcttagtgtcacctgcagaccagcttacgaccagggtggcccagttgaaatccttcccttcctctaccttggaagtgcctaccatgcatccaagtgcgagttcctcgccaacctgcacatcacagccctgctgaatgtttctcgccggacctctgaggcttgtgccacccacctacactacaagtggatccccgtggaggacagccacacagctgacattagctcccactttcaagaagcaattgattttattgactgcgtcagggaaggaggaggcaaggtcctagtccactgtgaggctggggtctcgaggtcacccaccatctgcatggcgtacctcatgaagaccaagcagttccgcctgaaggaggccttcgactacgtcaagcagaggaggagcgtgatctctcccaactttggctttatgggacagcttcttcagtatgagtctgagatcctaccttccacacccaccccccagcctccctcctgccaaggggaggcagccagccccacgtttacagaccatttacagacactgagccctgacacgcaggctccctactgcacgttcactacctcagtgctggcgccagtgcccacccgccccacagtcgcagagttccacaggagccctgtggccacagccacgtcctgctga

SEQ ID NO: 5755 - DNA, 1155 bp, Cricetulus griseus
tggggacctgcagccggatggcaggatcctatggcaggaaactgggcaaatcttcaactcgcccagcgcctgggcgacacattgcaagaagctcgtcaacccggccaagaagtccggctgtggctgggcatccgtcaagtacaagggccagaaacttgacaagtacaaggctgcctggctccgccggcacccagcctgcatatgccagtagctgctgctgatgagagtcccaccagcaaaggggaggaggaggagctgctgttggaggaggaggaggaagatgtacttgccagggtctcagcagaggagaaaggtcgtagaccccctgggaagggctcctctgagccagaggtcacagccctgggcaagcgtgtggacaaggtccaggtgccagtacgttactgcatgctgggcagtcgtgactctgccaggaaccccccacaccctggtagaagtaacctcctttgctgccatcaataagttccagccattcaacgtagctgtatccagtaacgtgctgttcctcttggacttccactgtcacctgacttggagtgaggttgtgggctaccttggtggtcgctgggacatcaacaatcagatgctgaccgtgctgagagccttcccctgcaggagtcggcgtgggggaccctggatactgcagccactgttgaggaggagatccatcaggtgctattccttcgaggcctatccctggtgggctggtaccacagccacccgcacagcccagcagtgccctccctgcaggacatcgatgcacagatggagtaccagctgagactgcaaggctccagcaatggcttccagccctgcctagccctgctgtgctccccgtactattctggcaacccaggccccgagtccaagatctgccctttctgggtgatgcctccccctgagcaaaggcccagtgactatggcatccccatggacgtagagatggcgtatgtccaggacagcttcctgaccaatgatatcctccaagagatggtgctgctggcagagttctacaagggtgcccccgacttgtgaagttccaggaggcctggagtccagagcacacctacctggacaagctcaagatatccctggccagcaggaccccaaaggccagggcatgtgccacatgctgga

SEQ ID NO: 5756 - DNA, 1155 bp, Cricetulus griseus
ggttccgagacatcgccgccaagctgggcaccggggagatggccgagacggaccccaagaccatgcaggacatcaccttggtggtggagacgctcttgcagcagatgcaagacaagtttcagatcatgtcggatcagatcattggaaggatcgatgacatgagcagtcgcattgacgatctggagaaaaatatcgctgacctcatgacccaggctggtgtggaagaactggaggggaaaacaagattgctactgcacagaaaagttgaaggtgctgacattcacaccgagtccagaacatctttttcccaagccaagagaaaaccaactggctttctgcaactaactactatgtgttgacaggtttatgaagcgtgtattcttatcacagcctacatagtccatagagtcccctgcatccccagtttctcaaacttggtatattcacatcttggtcagttgtcttaattattaaacactaaaactttggcggtttctgcataaaattgtcaaactttttagtgatttttgaagtcctttcctgctgttcttcttgtggtagttactgtttgatgacatgacagagtacttcccagttaggtgactagtgactcctccccttggcagaagccgtgatgtgagatgtgtacgtttagggttctttctttcagcacaaagtgactgttgaactgacactagagtgtcagaaatacttttccaaatgccgagaacatttaacagagttttgcatgagattctagtagcattggttgggcctacagtgctcatctggcaggatgtcagaacccagtgaccctggcctcccttcgagctactgtctaaaagggaagagaccaaaagacccaagtaagttcactgcaggtcacatggctgagaaatgcccagtggctggtaggaggcactggtttttaagaaatactattttacttgaactatttcttgcctaaattcttgcacagtgagttctattattgattaaagacagataaactctacatttggaattccagtgtctgtaggcttagcctccaggccacttttaatgacctggaaggcaatccatgtcactgtcccaacaaagtgatttcatacaataaaaaccatgaataattaaagaaaaaaaaaaaaaaaaaaa

SEQ ID NO: 5757 - DNA, 1155 bp, Cricetulus griseus
gaggctttgtccacttcggagctccttgcgtctaggtgtttctacgcgctcggcggtttgtggtctcatcacatccgttaacaggtcaaaatgcaaatcttcgtgaagaccctgaccggcaagaccatcaccctagaggtggagcccagtgacaccatcgaaaatgtcaaggccaagatccaggataaagagggcatccccccgaccagcagcgactcatctttgccggcaagcagctggaagatggccgcactctttctgattacaacatccagaaagagtccaccctgcacctggtcctccgcctcaggggtggcatgcagattttcgtgaagaccctgaccggcaagaccatcaccctagaggtggaacccagtgacaccatcgagaatgtcaaggccaagatccaggataaggagggcatcccccccgaccagcagcgactcatctttgccggcaagcagctggaagatggccgcactctttctgattacaacatccagaaagagtccaccctgcacctggtcctccgcctcaggggtggcatgcagatcttcgtgaagaccctgactggcaagaccatcaccctagaggtggaacccagtgacaccatcgagaatgtcaaggccaagatccaggataaggagggcatcccccctgaccagcagcgactcatctttgccggcaagcagctggaagatggccgcaccctttctgattacaacatccagaaagagtccaccctgcacctggtcctccgcctcaggggtggcatgcagattttcgtgaagaccctgaccggcaagaccatcaccctagaggtggaacccagtgacaccatcgagaatgtcaaggccaagatccaggataaggagggcatccccccgaccagcagcgactcatctttgccggcaagcagctggaagatggccgcactctttctgattacaacatccagaaagagtccaccctgcacctggtcctccgcctcaggggtggctattaattcttcagtctgcattcccagtgggcaatggatggcattaatctgcactatagccatttgccccaatttaagtttagaaaatccaagtttcagtaatagctgaacctctgttaaaaatgttaataaaggttttgttgcatggtaagcat

SEQ ID NO: 5758 - DNA, 1155 bp, Cricetulus griseus
gggtgccctgggcgcggtggtctaggaactggcgggggtcccggcccaagtagtagacctgcgcagcgacacggtgacccggccagggccggccatgaggcacgccatggccgaggcgctcgtgggagacgacgattacggagaagaccccacggtccacgaactgcaggaaaaggctgcgaagctgcttggggtggagcggaccctgtttgtgcccaccaacaccatggccaacctcatctctgtgatgggtcactgccggcgccggggttcccaggtcctccttgggcaggaatgccacctccacgtctatgagcagggcggggtggctcagattgccggggtgcactcccagcccctcccagacatgccccatggcaccttggacctgaatgagctggagagagcactcactcggggctttgggagttcctaccatccagtctgcgagctcgtgtgcctggagaatacacacagcagcgccgggggccgggtcctccgactacctccgccaggtgcacctcttggcccacatgcatggagctcgggtccacctggatggggcacggctgatgaatgcagctgtggctctgtgtgtgccccctgctcgcctcgtggagcactgtgactctgtgtccttctgcttctctaagggcctcggtgcaccagtgggggctctgcttgggggagccaaggacttcattgaagaagcctggcgcctccgcaaagccctgggtggaggcatgcggcaggctggcgtactggctgcggctgccctggtgggcctggctgaggcagaggaggtgctgccaagggaccacgagaatgcccagagatttgctaaaggactccaggacctggcatcacccatttgttctgtggatcctgtcactgtggagaccaacatagtgctggtgcaggtggctgggctgcctcccgcagagctgtgccagcgtctacaggctgtgagcgctgaggaaggtggctcagactggctgtgccgtgagcgtgttgctgtttccctggacagaacactccgtgcgggttgtgtggcaccgagacgtgtctgctcaggacacggaactggccctgaggaagtgggagtttgtgctgagacagttgaggccctgaggtcagggaaccagggatcctgtg

SEQ ID NO: 5759 - DNA, 1154 bp, Cricetulus griseus
agggtctgtcaccgctggaagaggctagtggacgaccggtggttgtggcgacatgttgacctgacgctctacacgatgcgtccaaaagtcatgtggcaccttctgcgccggtacatggcatcccggctccactcactgcgcatgggtggctacctgttctctggctctcaggccccacagctgtcccctgccttgatgcgagccctgggccagaagtgccccaacctgaagcgcctgtgcctgcatgtggctgacctgagcatggtgcccatcaccagcctgcccagcacactgaggaccctggagctgcacagctgcgagatctcaatgatctggctgcagaaggagcaggaccctacagtgctgccgctgctggaatgcatcgtgctggaccgagtgcctgccttccgtgacgagcacctgcagggccttacccgattccgagccctgcgctcactggtgctgggtggtacctaccgagtcaccgagaccgggctggatgccagcctgcaggagctcagctacctgcagaggctagaggtgctgggctgtaccctgtcagccgacagcaccctgctagccatcagccgccacctccgagatgtgcggaagattcggctgaccgttgggggcctctcagcccaaggcctggtcttcctggagggaatgcctgccctggagagtttgtgcttacagggtcccctcatcaccccagaaatgcccacacccgctcagattgtgacctcctgccttaccatgcctaagctcagagtgcttgaggtgcaagggctgggctgggagggccaggaggcagagaaggtcctatgcaagggcctgccccactgcatggtgattgtcagggcctgtcccaaagaatccatggattggtggatgtgaaggtaccacccatccatccctgggacctatcctagcttttaaagttgaccttgtaagcagcaaactgaagcatgtaaattaaccaggcttgaggaaactggaggtcacaagaaaaagaagacaggaccttggggcctgcagagctggggttgtctgccatttggatgacctcagccttgtcacccagcctctgggaggcccagttcacacatttagaaataggcatcatagctacctcatgattcatttgcaaatct

SEQ ID NO: 5760 - DNA, 1154 bp, Cricetulus griseus
caagatgcaggttctccatcgctctgaacacaccctaaagaaagctctcatctctaagaacccagtgcttgtatcacagtatgacaagttagatgctggggagcgacgtttaatgagtgaagcctttcagccatccagtaatctctttggacctattattgtgcattcacagtcagattggatcaactcccaccccgaagttccccaagattttgagcagtttttcactgatagccacagaaaagcacctggtccagaaaaacacattatctatatacaatccattggctctctaggcaacaacaaagttatcagtgaagaatatattaaatggctcaagggctactgtgaagcatttttctatggtttgaccgtaaaattcttagaaccagtttcaatctctgaaacgaagtgttcctttagagtgaacgagcacacacaaaacctacaaatccatgcagggcatatcctggcattcttgaaaaagaagaaacccgaagatgctttctgcatcgtggggataacaatgattgatctttacccacgggactcctggaattttgtctttggacaggcctctttgacagatggtgtggggatattcagctttgccaggtacggcaaggatttctacagctcacggtatgaaggcaaagtgaagaagcaccaacaaacatcttccagtgactattccatttttgataactattacagtcctgagatcactagtatattgctgtggcgatcctgtaagactctaagccatgagattggacacatatttggacttcgacactgccagtggcttgcgtgtttaatgcaaggctccaatcacttggaagaatctgaccggcgtcctctaaacctttgccctatctgcttacgcaagctgcaatgtgctattggcttcaacattatagacagatacaaagcactgctgaggtggatcgatgatgaatctaacggctcatcaggagcagcgccggtaaatagctctgaccctgcgaatttgaagaaacctgtggaagcttttaaggattggagagaatggttaataaaatgcattgctattctggaaaaataaggactttcagataggagtaaccttaataaatattggcacactgggtgtttgtgggtagagtacttcattg

SEQ ID NO: 5761 - DNA, 1154 bp, Cricetulus griseus
ggcggtgtctgatgtgcacactgtcaaggaagaccgggagaattctgatgacacggaagaggaggaggaagtctcttacaaaagggagcagatcatagtggaggtaaaccttaataaccaaaacattaaaatgtatctaaaggggaaaagggtgtctcttctcagtccaaagagactcctgttcttaagacgagcagcgaaggaaggagaggaagagagtgaggaggccacagatgacagcaatgactacggagagaacgaacggcagaagaaaaaggagaagcgcgcggagaaagtcagggttacacaaaggcgaacccgaagaactgcctctgttgccgcagctgccacttcccctacacctcgcacaactcgaggccggaggaagagtgcagagctacccaagcggaagaagcgggccaccaaggagcccaaagcggcagtccagaaagctaagtgtgaagagaaggagaccctgacctgtgagaagtgccccagggtcttcaacactcgctggtacctggagaagcacatgaacgtgactcacaggcgtctctgggttctccttgtctccatggcctccttcaggaccttccccattgtcctggccgaccatcagactgaccagagggagccaacaagaattccgccctcacaaccaggggaaccaccaaactaaagcccaatttgcttgcattttctgatgacttttataaatttcagatactcagactgtgggattttataatttcatatcagcggatgaggtatgcttgctttcatatcctggtcttctcctcaacgaggggcaggcctggttttgttatactgatcgggaaggctgtgagattaatccagagcattaactgtatcactgtgtattgtaatgaattcttttcagctttggtgctggctgcagtcaagctggccatgtttcacacaatatcaagcattatagagaagatgggaattttcttctttgtgtagctcttttaacacactctttattttactacagaaattattttagagtttttgtatagactttagtagtctgtttctaaaatgaaatgtatttcaataagctgtgttaattttttcagtgtagctaaacccatgttgtaaaatagataaatttttataatcatcaaaaa

SEQ ID NO: 5762 - DNA, 1153 bp, Cricetulus griseus
ccttcacgcaggagcaggcaggcgccggctgcgctacctgcccactggcagcttcctttcctcctcttgctgctgctgctctgcatccagctcggggcggacagaagaaaaggagaaccttttgactgaaaaggtggaacagttgatggaatggagctccaggcgctctatcttccgaatgaatggcgacaagttccgcaagtttgtgaaggccccacctcgaaactactccatgatcgttatgttcactgctctccagcctcaacgacagtgctctgtttgcaggcaggctaatgaagaatatcaaattctggctaattcctggcgttattcatctgctttctgcaacaaactgttttttggaatggtggactatgatgaagggacagatgtttttcaacagctcaacatgaattctgctcccacattcatgcattttccttcaaaaggcagactgttagtatcccttgttggtggcttgctctatctaaggaggaacaacttggagtttatctataacaagactggttgggccatggtatctctgtgtatagtctttgctatgacgtctggccagatgtggaatcatatccgtggaccaccatatgctcataagaacccacacaatggacaagtgagctacattcatgggagcagccaggctcagtttgtggcagagtcacacatcattctggtactgaatgctgccatcaccatggggatggttcttctaaatgaagcagcaacttccaaaggggatgttgggaaaagaagaataatttgcctcgtgggattaggcctggtggtcttcttcttcagttttctactttcaatattccgttcaaagtatcacggctatccatacagctttttaattaaatgaagcctagtgggatttgcataaagtgagtgtttactgtgaagagaagctgttcctcacattatcttctttggaattcttgagttcattctttgttgattgtgatacgctagcttattcttgtataattttttaaactgtgggttttcctaaaaacttaatttatagaagtgcatatgtgacattcagtaatccacagtggaacatccaagtgttttccagtattctcagtgtatgccacaggagtgaaatgaatgacagtgtaactatgaa

SEQ ID NO: 5763 - DNA, 1153 bp, Cricetulus griseus
agccatggcgtcttattttgatgagcacgactgcgagccgttgaaccctgagcgcgaggcccgcaacaacatgttgctggagctcgcgaggagagtgcgcggggcttggagctgggccccgggcagcagatcactctttaataggatggactttgaggacttgggattggtggattgggaacatcacctgcctccaccagctgccaaggctgtggtggagagcctccccagaacagtcatcggtagctccaaggctgagctcaagtgccctgtgtgccttttggaatttgaggaggaggagactgtcattgagatgccctgccgtcacctcttccattccagctgcattctgccctggctaagtaagacaaattcctgccccctgtgccgccatgagctgcccactgatgatgacagttatgaagagcacaagaaagacaaggctcggaggcagcagcagcagcaccgtctggagaatctccacggagccatgtacacgtgaggcagcggttagggctgagagctcagcctctgtgacatcttcccctttgcactttgatcttcattaaaggtttctttacccgccctgcagctgcactgctcacacgctggaacagggctctgcatcctcaaccctgctgctaatgaaaaagatggcaaaggtgtcaaatggcacaaggtgccagactgcctttctctctgcttgcctctagactctgggtggtggggccctgggaatagccagggcttgggtctgagtattctcagttagaagtcagactgtgtcggcctggccctttgtagctgtttaaaactgataaactaacttgcaccaccccccttccggaagactctagttaaccttggaacctttagttaacattggaatcctgggggtgttctttagttcctctgagaaaacttttaacattgtaaaagttgctctctgcatcctgtccctgtaggcccccatatcaaggaatcaaagttcaagccagctgacaccctcaagaatctttcctggacgaaagggcttcttttcatccctacctactggatcagaccctctctgattctccagaacagactgcaaacatgcaaattagaattcttttaatagataaaaaaaagtactaaaataaaaaaaaaaaaa

SEQ ID NO: 5764 - DNA, 1153 bp, Cricetulus griseus
tgcagagacgcggtgctgcagatactcagtcgcgcgggcagcttgcagctggacgggacctacctggcccgcgagcaagagtacaagcgtttaaatgcagaattagaggcaaaaactgccaatctggttagacaagctgatgaagcaataagagagcagcaagaagttcgagctaggcctttttcaacagtaattacatcatgcaaagaggaagatggctacagtacaagagatctgttgtcatctgaagggatggatcatacatggtcagaaaccaagccaaagaccaaaaacactggtcctgtaaacaaggctcaaaacagactctactctgcagataaagaaaggaaaacaaatccaagtgttaaactgaaacatccccgtgtgcagactgccagtgatgtggccatcccagatgatttctcagacttctcccttgccaagacaattagcaggattgaggggcagctggaagaggacagcttgccagagtgcagagatgacattttctgtggtgttagtaatgacattgggacagaggctcagatcagatttctgaaggccaaactccatgtgatgcaggaggaactggacagcgttgtgtgcgagtgcagtaagaaggaggatgaaattcaggatttaaagtccaaggtgaaaattttgaagaagactgtgtgagacagcaacgaacaattacttcacagcagtctcaaatagaaaaatataagaatctttttgaagaagcaaacgaaaaatgtgatggactacagcagcagctctcatcaatagagagggaattagaaaataaaagaaaattacaaaaacaggctgccacaagtcaaagtgccacagaagtccgcctgaaccgagctctagaagaagcagaaaagtataaaagaggagctgaataaactaaggcaaagtaacaaggatattgcaaatgaagatcaccaaaaaaattgaagtgttaaaatcagaaaacaagaagctagaaagacaaagaggggaattaaatgacagggttcaagaaacaattgaaattaattgacattttgaaaaggcagaagatgcatattgaagctgccaagatgctgtctttcagtgaggaggagtttatgaaggctcttgagtggggcagttcatgagtgagcaa

SEQ ID NO: 5765 - DNA, 1153 bp, Cricetulus griseus
ccgagtctgcggcccgtcagcgtcgcccgcggtggcgcgtgccccgtcggggcgcgcggggccgggctaggaggcgcggacggccgggcgcaggctgctttcctgtttgcgcttttgataccgtttcctagactctgcttcatgattaatttggaattctgaaatgaagatggaggagacagtgggaaaagtagaagaactcattgagtctgcagccccaccaaaaaacctctgaacaagaaacagtcaaggaggaagatggttctgtagaactggaatctcaagttccaaaggatggtgtagctgactctacagttctttcttcaatgccctgtttgttgatggaactgagaagggactcttcagagtctcagttagcatccacagagagtgacaagcccacagctggcagagtttatgagagtgactcctctaatcattgcatgctttccccttcctctagtggtcacttggctgattcagatacgttgtcttctgtagaagagaatgaaccctctcaagcagaaactacagtagaaggagatacttcaggagtgtctggtgccactgttgggcgcaagtctagacggtcccgttctgaaagtgaaacatctactatggctgccaaagaaaaaccggcaatccagtgataagcagaatggccgagtcaccaaggttaaaggtcatcggagccaaaagcacaaggaaaggatcagactactgaggcagaaacgggaggccgctgcaaggaagaagtacaacctgctgcaggacagtagtaccagtgatagtgacctgacttgtgactcaagcacgagctcgtcagatgatgatgaagaggtttcagggagcagcaagacaatcactgcagagataccagatggaatggctctggcacgcagtatgtttggctcccggcaaacacagtcatggactgctgtgactccgcagcagacttgggcctcaccagcagaagtggttgaccttaccttggatgaggatagcagacgtaaatacctactgtaatgcaatgtcactgtttctctgcactgttccctcccacttcctcctctttgtgacatggaagttcattgtcatagcttcagcttcagaagctgtttgtggcatttgtggaattgaaattcatggtaac

SEQ ID NO: 5766 - DNA, 1153 bp, Cricetulus griseus
  modified_base (975)..(975): a, c, t, g, unknown or other
agatttaaaactattttgtatacatgaggagtgactccataccaatcacaatatgtcaagaaaaaaaaaaagacccaaatggaaatgtttctaatctggacaaatggtaaaaatctgtgccccaatggttcggtattcaaagttggcttttagaacactagtaagaaaatactcttgcgatctgtgttatacaccaatggatagttgctgctgattttgtcagatctataaaagcaagagacagtgaatttaccacaaaccaaggtgaattgcccattggattgttcagtttgctgctaatgatgcaagccctatgcaaacggaatagatattaactgtggttgccctcagaggtgggcaatggcagaaggttatggagcttgcttaataaacaagccagagcttgttcaagatatggtgaaacaagtaagaaatcaagtggaaaatcctagattttcagtttcaattaagataaggatccatgatgaccttacaagaaccatagatctttgccagaaggctgaagcaacaggagtgtcctggattacagttcatggaagaaccattgaagaaagacaccaaccagtccactatgaggccattaaaataataaaagaaagtgtgtctatacctgtagttgctaacggagacataagaaacttaaaagaagcagaaaatgtgtggcagatgtctgggacagatggtgtgatggttgcaaggggacttttagcaaacccagctatgtttgctggatatgaagaaaccccactgaaatgtatctgggactgggttgatattgctcttgaacttggaactcctttatgtgtttccatcaacatttaatgtacatgatggaaaagataacatccaggcaggaaaaaagagtatttaacgctttgtcaagcacatcagcagtcctggagtacctgacagacaattatggtgtttgactcgactttctaaatcattgtagtntaatttgatacctacatggaacccctatgaagttacatcctggtatttcttttaaacctgtagcttttaacttcagtacagcagcagtcgctggggccagacatcatggcacatgtctttaatccaagcatttggaaagctgaaggaaaaagactggaagttctaggccagtaagact

SEQ ID NO: 5767 - DNA, 1152 bp, Cricetulus griseus
agccggaccctactactcgccatatgcgctgtatggacagagactagcctccgcctcggcgctcggataccagtaacctacacgctcctggcccctccccagccccttccccacccaccccttcctctcatgtcccactgccctcgacgctgcaacctccactactgcttacccctaccaggatacagcccagcccctccccatcggactgtgtatttatttactataatgttagcttacaagctgggaatataagtgcattaatggcccacatgagtcaatggtatgcaaaaagtctgtctccccaaataataatattaaccacccagataacgacatgatcccttccctctcccttccttttttattttctttttcttaggtatatgttttaagggagatttggttggttgattttgtactggtttgcttttaaggaatgaagggagagttggggttctacacttttagttttccccattttgggcagtctcttgcatgactctcaactgttaaaactgcatttcttcccctttccttccacccctcttgtttctctccatgtgaggttttaattattttttcctttgtacaaaaatattgtaacaatttttggggggtcgagggggcagtggtcccaaaggcctccaacagagcctgtcatccattctgccttcctgacccttcagggacccacacctcgctgggcagtcagattgccagctgatggggacctggcacatcccgccaaacgtcttaaaagcccctgctggcacaaaattgctctctatattttatgaagtactttatcgtcattattttttctctccctagttgggactgtgacccccatcctcccctggtgataggggcagggcccggggacccttgatggatccctccaaagcagactagtcccaaagtcatcagaccagacaacattagtagctctgtagggggcaggctggggactcagggagccctaggatcacaacactcccttcgccctgtcccagacctgagccagcaatctccaaagctggcggtgggtttctgtgggttcctgcggtggctaggattaaagacaacccgggtcttctccccacaccttccctccttcccggtcttacgcagcagcgcccgggctgcggg

SEQ ID NO: 5768 - DNA, 1152 bp, Cricetulus griseus
agtgtttaataaagttagattatgaacgcctcagggatgttgggccctgacagggcagcatctggaagtggctacttcggtgtggggccaaagtacgctactgtggccatcagaagtggctacaggactacaacagcatcccaggaggctccatggacaaacacaagattcaagcaatttgatgccaccgattcttgtatcatggacattggattcgatcacatggagggcctagagcttgttgaaaaaataacactgtgcaagtgtcattatattgacgataactgtttgcagaggcttagtcaatttgaaaaattacggaaaagcctattagaaatggaaataattacctgtgggaatgtcacagacaacggcatcattgctttgcgacattttaggaacctccggtatttgttcttaagtgatcttcctggagtaaaagataaagacaatcttgtccaagtctttaagacagcactgccttctctagaactgaaattaaacctgaagtaaaataagtgtctgatctcactatacagggtcatttgaaattactgatattaaatagctagctacaaaatgctacagaatcaccaagagaactgagaactgatggcttaggaatggagaatagatgttaggtagaaaataaatattcaaaagtgactcactaaagttacttagttagaagtgagaaattatgtacattgaatcactgtaaaaatatgatgtaacattttaattctaatatattcctaattgacatatatagcttcccagggtctgcatgcattgttcaaactcctgcattgctgtgctcctcatagtacacacttttttaaaatgccctttctcagaatgaaagtgctggttaattcgtccttcttttaagtgtggactactgctggctaaaactgaacacaggttcttgtctatagccaactagtttttctggtaaaacaaatcaggaaccagactatccttactccccacctgcttcaaacaaaatgttagtgttgattaaaagctaatttttgctgttcctcaaatatttttgaggaatgctacctcctatgaactcaagggacataaaaatataaatatgaaaatgaattttatatatagaaaaacactaataaagaatgtcacaag

SEQ ID NO: 5769 - DNA, 1152 bp, Cricetulus griseus
gcgctccggccccgcagccgtcgccgcggctggaagacttggcgccccgcgcggacctgctgcagccggccgagcgctcccaccccgcctcccgcactctgggaccggtccaacgggcgctcctccaagccgagccttggagggcaaggccggcaccattacctccaacgagtggagctctcccgactcccccgaggggagcaacatctctgggggcagccaggcactggacaagcccatcgacaatgatgcagagggcgtttggagcccagatattgagcaaagcttccaggaggcactggccatttacccaccctgtggccgtcgcaaaatcatcctgtcggacgaaggcaagatgtacggtcggaacgagctgattgctcgctacatcaagcttcgcacagggaagacccgcaccaggaagcaggtctccagccacatccaggtgcttgcccgtcgaaagcccgggagatccaggccaaactcaagttttggcaaggagctttgccaggccaacccgggaacaatcccatgattgtaaaagaaacctttctctcagaacacctacagagaggaagggtggcctcaaggagctatttgaacgggggccttctaatgccttcttccttgtgaagttctgggcagacctcaataccaacattgacgatgaaagcaacgccttctatggggtctccagccagtacgagagcctggagaacatgatcattacctgttctaccaaggtctgctcctttggcaagcaagtggtggagaaagttgagacagagtatgcgcgctatgagaacggtcgctacctgtaccgtatccaccggtccccgctctgtgagtacatggtcaacttcatccacaagctgaagcacttaccggagaaatacatgatgaacagtgtgctggagaacttcaccatcctgcaggtggtcaccaatcgagacacacaggagaccttgctgtgcattgcctacgtcttcgaagtgtcagccagcgaacatggggctcagcaccacatctaccggcttgtgaaagaatgagagacttggagaacgatggtggggggacagatccaggaaatggggacctgggagggaaccttcagggccagccccccagaagtgccaagagagccgagcagag

SEQ ID NO: 5770 - DNA, 1152 bp, Cricetulus griseus
tcagagaactacaagacagccgtcacgaaaaccaattttaatttactgtgaagtctgtcacctctgacacaattcatatctcctggagacttgctctgcctatgactgctctaagactcagctggcttaaactgggccacagcccagcatttggatctataacagaaacaatagtaacaggagagcgcagtgaatacctggtcacagccctagaacctgattcaccctatagagtatgcatggttcccatggaaaccagtaacctttacctgtttgatgaaactcctgtttgtattgagactgaaactgccccccttcgaatgtacaacgcccccaaccatacctttggcggccatcattggtggggctgtggctctggtgaccattgccctccttgctttggtgtgttggtatgtgcataggaatgggtcactgttctcccggaactgtgcatacagcaaagggaggagaagaaaggacgactatgcagaagctggcactaagaaggacaactccatcctggaaatcagggaaacttcttttcagatgctacccataagcaatgaacccatctccaaggaggagtttgtaatacacaccatatttcctccgaatgggatgaatctgtacaaaaacaaccacagtgagagcagtagtaaccgaagctacagagacagtgggattccagactcagaccactcacactcatgatgcaggcggttccatgccagactgcttcggggtttttaaacctaagaaaggtgatggtgggaactctctgttctactgcaaaacactggaaaaaagagactgaagaaaagcaatgtactgtacatttgccatataatttatatttaagaactttttattaaaagtttcagatttcaggttgctgctgcggttgatgtagtggagatgcctgaacacaattctatattttagtattttttagtaatttgtactgtattttccttgcagatattgaagttataaaccatttactttgtgttctactgagtaagatgacttgttgactgtgaaagtgaattttcttgctgtgttgaacaatcaggactgcgttcacatgagatccttgtagtataagcacaggccgtttttcactttggtaaatacaatggaaaaaaaaaaaaa

SEQ ID NO: 5771 - DNA, 1151 bp, Cricetulus griseus
agcggagcccggcgagtgtgcggcggccaggagtcgagatggcaactggacaaaatggacatgaagagtgggtaggcagtgcatacctgtttttggagtctttgatggacaaggtggtcctgtctgaagcctacacagatcctcagaagaagctgtcaatatacaaggctctgcagactgcattgtcagagagtgcggacagccctgacgtactgcagatactcaagatccactgcagcgaccagcagctaatcgtgcagttacggttctgcgggcgtctgctgtgcggccggttcctccaagcctaccgcgagggggcgctgcgcaccgcgctgcagaggtgcatggcctcggcacttgcccaggaagcggtgcggctgcaactggagttgcgtgctggcgcagagcagctggacacttggctgaccgacgaggagcgctgtttgaattacatcttagcccagaagcccgaccggctccgggatgaggaactcgccgagctggagaatgaactccgcaagctgacgtgcgactgcactggccagggtggagccatacaggttgattcagcctcttcgaagtcccttgttccctctccagccgaagagaagctattgccggtggcctgccagacttttctgttccatggtcagcccgtagtgaaccggccattgaatctgcaagaccagcagacattcgcgcgttcagtgggcctcaaatggcgcagagtggggcgctcgctgcagcgtagctgtcgagcactgagggatcctgccctcgactcgctagcctatgagtatgagcgagatgggctatacgagcaggctttccagctgctgctccgcttcatgcaagccgagggccgccgtgccacgctgcagcgcctggtggaggcgctggaggagaacgagctcaccagtcttgcagaagatctgctaggccaggcggagccggatggtggcctggcctaggtctggtactgtggggagggcggtcaaccagctggccagccagggtttggtccccactggtggctattggggtctttttactgctgctgttgctactgctgaccgctttccacccactggactcagagcatacgtactacccccactttgccgagctgctggagtggagctgacttcccc

SEQ ID NO: 5772 - DNA, 1151 bp, Cricetulus griseus
gctccgggctgcggggtcggaactgaaggagatgcccctccatgtgaagtggccgttccccgcggtgccccggctcacctggaccatagccagtagcgtcgtcatgggtctggtgggcacctacagctgcttctggaccaagtacatgaaccaactcaccgtgcacaacaaagaagttctgtatgagctcattgagaaccgaggccctgccacccccctcatcacggtctccaaccaccaatcctgcatggatgaccctcatctctgggggatcctgaaactccgtcacatatggaacctgaaattgatgcgttggaccccagcagctgcagacatctgcttcaccaaggagctgcactcccatttcttcagcttgggcaaatgtgtgcctgtgtgtcgaggagatggtgtctaccagaaagggatggacttcattttggagaaacttaaccatggggactgggtacacatctttccagaagggaaagtaaacatgagttctgagttcctgcgcttcaagtggggaattgggcggctgattgctgagtgtcatctaaaccccatcatcctgccactatggcatgttggaatgaatgatgtcctccctaatagcccaccctattttccccgatttggacagaaaatcaccgtgctgattgggaagcctttcagtgcactccctgtgcttgagcggctccgggcagaaaacaagtcagctgtggagattcggaaagccctcacagacttcattcaagaggaattccagcggctgaagatgcaggcggaacagctccacaaccatttccagcctggaagataggctttgcctacccagtctgtgccccaaagtccttagccaagggagcattgggccctccagggtttggaaagtggtggtacaggaccctgcccaagcttgcttggctctgtactgcctttgagtttcttccctgcacaaaactgaggctgggagatggaccaatgcttttaattcagatagattggctcataatccctgctaagatttgtgcttgggtggccccggacaagaagacaaagtcttggccaggattcaagcccagctaaacttaactagatgtttctgttagctggcagaaaaagggcccctaagacctgaccatgaacacccc

SEQ ID NO: 5773 - DNA, 1151 bp, Cricetulus griseus
caaatttatagaggaacttaagaagtatggagttaccacaatagtaagagtatgtgaagcaacttacgacactactcttgtggagaaagaaaggacaattcgtagttcttagactggccttttgatgatggtgcaccaccatccaaccagattgtagatgactggttaagtcttgtaaagattaagtttcgtgaagaacctggctgctgtattgctgtccattgtgttgcaggccttggcagagctccagtgcttgttgccctagcattaattgaaggtggaatgaagtatgaagatgcagtacagttcataagacaaaagcggcgtggagattttgtgctgttatgggaaacctccatttgaaaatcaactttgttacagaagcacatatcttcaataatgtctccagacaaaaagccttatagttaatttaatgtttgcactcaaaggtgcgacttaaacagggagggcctgataaaagaatgggaggaggctattaaatatttttagtaaaatgttgcctttgtcttgtgcagaacatgtagaatatgctctttaatttagtaaatatttttaaaaggtagagatacattgttgtagctaaccaattcttaatcaaaaatttctgaaattcttgtttttccatacctatcagaagttgttttttcaacttgcttgaattatggttttcccttcttttatatgccttttcagctatgtaacttaataattggatacttgatcatttgttttattatgtaatcgataaaatggtgatgtgtattaatgttagttcaaccatatatttatactgtctgggaatgtgtggttatagttctgtgggagaaataatttgtcagtgttcaccagcttgtaaaaacttgtgcaagagcttcaacatctaaataaagaatgaaatgcgtttgtcactgaggttattttgcttaaaattaacttattttgtagaaaacaatggattcagttatttcaacttatgaacaaatttgttagggttatgagcactgttgaataccaagtgctttttattgtaaattttgctcttttaagaaccagttgaatgttgcgtactgagggaaaacagtttgtaatagatggtgaccttgatttttaaaactcagttccatcagtca

SEQ ID NO: 5774 - DNA, 1151 bp, Cricetulus griseus
ggaagcagctacaggaactcagtggacagcaccagcaggaactggccacccagctggctcagttcaaggtggaaatggctgaacgggaggaacggcagcagcaagtggctcaggactatgagctcagactagcaagggagcaagctcgagtgcgtgacctgaagagtggcaaccagcagctggaggagcagcgggtggagctggtagagaggctccaagccatgctgcaggcccactgggatgaggtcaaccagctgctcagcaccacgctcctgcctcccaaccctcaggctcctccggctgagccctctagtcctggggctctggagccagagaagggggagaggaggctctgggccatgcctccaatggctgtggccctgaaacctgtgttgcagcaaagccgagaagtgagggatgatctgcctggagcatcttctgttctccgtagtgcctccccagatcttagcctcctgctgggaccctctttccagagccagagctccttccagcccctggagcccaagcctgatctggctccacccacagctggacccttctctgtattggaggccttcactgctgaccacagggcagagcgaccatttcctgaggaagaccctggatctgatggtgatgggctgccacctgcttctcagctggaaggccttaagaattttttgtcagcagctgctggagacagtgccacagagcagtgaaaacccctctgttgacctgttgccccctaagtctgattctcggactgtctcatcttgggaggaagctcctcaagtgccacgccttccccctgctgtccataaaactaaagttcccttagccatggcgtctagtcttttcagggcccatgagcttccctcatcccatttacaaggcagtggtctcagcactggctccccagagagctagaacatggcgggactgatggtcaaggggaacttatccccagaagaaacacagactcccgcttgggtgagatcccccggaaagagatcccttcccaggctgtccctcggcgccttgcttcagcccctaagactgaaaagccagcacggaagaaaagtgggcaccctgcccctagcagcatgaggagtaggggaggcatctggagatgagccccccccttctcctct

SEQ ID NO: 5775 - DNA, 1151 bp, Cricetulus griseus
gggaggtccaacacaatccagctgacaaggatggactatgccatgaagtctctcagcctcctgtaccctaagtcactgtccaggcatgtagcagtgagcactgcagtggtgacccaacagctggtgtctaagcccagccgggaagtccccagggcgaggccctgtcgagttagcacggcagatcggaaggttcgcaaaggcatcatggctcacagcctggaggacctcctgggcaaggcccaggatatcttgaaacttaaagacaagcccttctccctcgtgctggaggaagacggcacgattgttgagacagaagaatacttccaagccctggcaagagatactgtgttcatggtcctgcagaaggggcagaagtggaagcccccatcagaacagcgcaagacgagaccacagctatccctttcccagaagccaacaaagaagattgatgtggcccgggtaacctttgacctatacaagctgaacccccaggacttcatcggctgcctgaacgtgaaggcgaccctctatgacacatacacactttcctatgacctgcactgctaccgggccaagcgcgtcgtgaaggaaatgctccgctgggccctcttcagcatgcaggccacaggccacatgctgcttggctcctccagttatatgcagcagttcctggatgccactgaggaagaacagccgtccaaggccaagacctcctccctcctccccgcctgtctgaagatgctgcaatgaaggcccaagtcctcagatgccgtccccagccaaggatgtgactggagaccttgcactctgctagaagcacccacaagcctggcagctggagagcttctcaccaacctgcacccctctcacagcacagcaccaaggaaactgcaggaagggctggagctctggggtgggctggtcacgggagaacttcctagcctggctcagttccttccttcatgtcacaggtagtttaggggacaaacacttgtccctggcaggcaccaagtctgccactcggtcttcacatgccatccctatgtgccactccctctctcgcacccctccctcctgccttgaccatgctcatcaagcaacagacattgctatggtggcctccagaatactttgacctgaatcaagacaac

SEQ ID NO: 5776 - DNA, 1151 bp, Cricetulus griseus
cgacgccccgaaggccagcttgggctttggtctggcggggcggtggcggcgagtgaggccgggaagatgccagtggcggtgatggcggacggcgccttcagtttcagaaagctgctggatcagtgcgagaaccaggagcttgaggctcctggaggagttgccacaccaccagtgtacggtcagcttctagctttgtatttgctccagaatgacatgaataatgcaagatacctttggaagaggataccacctgctataaagtctgcaaattctgaacttggggggatttggtcagtaggacagcgaatctggcagagagatttccccgggatctataccaccatcaatgcccaccagtggtcggagactgtgcagccaatcatggaagcccttagagatgcaacgaggagacgcgccttcgccctggtctctcaagcttatacctccataattgcagatgattttgcagcctttgttggacttcctgtggaagaagctgtgaaaggtgtattggaacaaggatggcaagccgactctgccacaagaatggttcttcccaggaagccagcctcgggagccctggatgtttcccttaacaggtttattcctttatcagagcctgccccagttcccccaatccccaacgagcagcagcttgccaggctgaccgactacgtggctttcctggaaaactgatagatcactctgagttcaagatccaccttcagcccctgtcactggcaaacggacgtggagtcttgttctgagttcactgaacagggtgagcaccacagtgtcctttgggtgtgataaaatgcacccagaagatgaagcgcattgtatgtccagtttcctctcaggcactgctgcatgtcctggagcagtgctcgtttgcatggatcactttggttggagccatcagtattaatgcatctagtttctgtcaacaactggactctgaacacaagacattctgcttcgagtagcagagagagttctgtggcacacaccaccctgtgtagaaatgctgaatgcatctgtttttgttcctgtatgaagcccttgaagatttgaggtggttaatggatcttcaggttcaaacagccctggttcatttactctgcatttgttcaataaatatttaattagaa

SEQ ID NO: 5777 - DNA, 1150 bp, Cricetulus griseus
gtcctctcacactcacctcttccactggcagtgggaagccacaaggtactgaaagtcagccacaggaagcagggcttcagaattcccatgagggccacagaaatgccgagattctgactccaaagccagattgcaaagtggagaaaaagaaaatggaattgcaagaaaaatctcgttgggaagtcctccaacaagaacagcgactaatggaagagaaaaataaacgtaagaaagcccttttggctcaagccattgcagaaagatctaaaaggacccaagcagagaccgtgaaactcaagaggatccagaaggagttacaggccttagatgacatggtgtcagctgacattgggatcctcaggaacagaattgaccaggccagcctagagtattcctatgcacggaagcggtttgacagggctgaagctgagtacattacagcgaagctggatttacagcgcaaaaccgagacaaaagaacagctcacggaacacctttgtaccatcatccaacagaacgagctccggaaggccaagaagctggaggagctgatgcagcagctggacgtacaggctgatgaggaggcgctggagctggaggtggaggttgaacagttgcttcgagaacaggaaacagaaacaggcaaacaagtggttcctgtagagagtcccggtcagcctgctggggagagtgtatcttcagggttggctgatggcaacaaagagcctcaactgcaaactacttctccagaggcaaacaagcctggcaaacattctagtagccctccccttagactagactgcccaggtcaaggagccaagaacttttcagctgctgtagccacatgaggggctggtgtttgttcagttaacatatctctgtggtaaattacagcctgtcagtgataagcattctttaaacctgtttgtgtttgaatccatgcttagtgttagcatgttaatatatctggtcattcccaagtacagactgtgacagtttcatatcaagggagtattgactactcagtgttccttccgtccttattactgagttaaaataagtaaagcaaaggatggaagagcctggggccctgagtttgatttccaacactacaaaaagagcaaaatggtagaagaaaaactacatggct

SEQ ID NO: 5778 - DNA, 1150 bp, Cricetulus griseus
  modified_base (409)..(409): a, c, t, g, unknown or other
cccctttcctccccgctgcctacacgccgcttgccgcctgctccccatatcccgtggctcctcgccaaagactgaatttgtggagctggagggcggcaccccctccccagtttcctccctgagacaggcgagagtcgtggggccaatgccagtctagaggcccgggcagcctctgatgttccctcccttggtcccccatctgcaggtcctgcctggggacccagctgcctactgagtgctctgaagatgggccttgctgcctagtagcaggtccttagagctacgtctcccagacaccaggtcctggagcagggctggagtcacgtgggctctgttgttcctggcgcttttctgccctcttctgacttggaccccaaggccctttggcttccctaactcgtccttggcncttccgctccaccagcccaacctgtgtgtgtgtgtgtgtgtgtgtgtgtgtgtgttggcctgcgcacctagttagacatcctgcccactccaaggccggggccactagctgacctcaccacctcctttcccatgagcccaagcagaaagctgcagctgtcttccaggcagtatccaaaagttggaagtgttaggacccaggacctgtcatccttcaagactgccctcccttgccgtggtcttgccttttggggcaagagaggggctgcgcagaagaggctttatcaacatcagttagggaaccaaagttgcactacctgggcccagactctggttggcaagagcaaagtttccgttgatgaaaacaaacaacatcccacaacaaaaccccaagttttctgtgctccatgtgcaatatttgttatgaaccttgtgtcgttcaagtcacctttataatcttgtagctagatgttccatgtccatccaggtgacttttactctgagtgcaatatttcaatagcctggtagtaagaaggagtgttgcttttgtttcagccgacctatgtgcagggcaatgcaatgcaagtccaaaacccttgtaaataggagaggttgcaagccaaatcaagagtatttatcgttattactattattattaggcctgtcctttaattttagtgttttggtatttcgcatcctgcctcggtattgatcttgtgttctttgtgccaatatgcaaagg

SEQ ID NO: 5779 - DNA, 1150 bp, Cricetulus griseus
  modified_base (443)..(443): a, c, t, g, unknown or other
cccgccagacgctgttgtcgggagcagaagtccttcctcagccgcctgtgccaaggcgaagaagcggtgcgagtcggaccgggatgagaccggggcctacctcattgaccgtgaccccacttacttcgggcccatattgaacttcctcaggcatggcaaactggtgctggacaaggacatggctgaggagggggtcctggaggaagctgaattctacaacattggtcccctgatccgaatcatcaaagacaggatggaggaaaagactacacagtgaccacggtgccaccccaaaccaatgtgtaccgcgtgcttcagtgccaggaggaggagctcacacagatggtctccaccatgtctgatggctggcgcttcgagcagctggtgaacatcggttcctcctacaactacggcagcgaggaccaggccgagttcctgtgtgnggtgtcaaaggaactccacagctccccacacggcctaagctcagagaagctattacaagccagaggcacccggatgtgagcccccagatcacctccagggacttggggttccgatctgaaatcctttatttttgtaccacggggtgggcccccggcccgaggaggaagacttgccctctcccttatcactgctgcctgcatctgctgggctgggactcaaccctgcctccaggcccaggcctggggccctctgggaccttggaaggcctgaggtgggccctggtgtgtccaggcagagtcatctgcccatggccaaagtgtggcactgcccacccatatctcccaggcccgtttgtcccctcgcctgggcccccttgctgcatggcggatccactccctcccagcccagtcatagcacctccttgagcctctgtctccatggcaccatggcacccctcctcccacctacctcacaggggtgttgtgaggatcagggaggaatggggttcctggagccctaagtgtctagggctgcaatcgttacttttggggggagggaactctagccgagcccccaagtgggacactatggcttcagatactggtgggggacaatgcgaggactaagccaagcaggaagccaggtacaggattggcatcaccttggctgcccttcccctttgccaccacgtgtttggcagcagagt

SEQ ID NO: 5780 - DNA, 1149 bp, Cricetulus griseus
tgacctgccttccagtgctgaggagccaaccagtgccaggcctgcagagaatgatacttccagtgatgagggtcacaggagttggaagaaacaatcaaagttgatgccatctccatggagacattgagtcactgtagcacagcttcatacaagaagtctctccgtctctcttcggaccagatagcaaaattgaagctccatgatggccccaatgacgtcgtattcagtattacaacccagtatcagggtacctgtcgttgtgcgggtaccatttacctgtggaactggaatgacaaagtcatcatttctgacattgatggaacaataaccaagtctgatgctttgggacagatcctcccacaactgggtaaagactggactcatcagggttgttctctgccttccacagggaagtgatagaaaagaaaccagagaagttcaaaattgagtgtctgaatgatattaagaacctgttcgccccgtccaagcagcccttctatgctgcctttggaaaccgtcctaacgatgtctatgcttacacacaagtgggagttccagactgtagaatattcaccgtgaatccaaagggtgaattaatacaagaaaggaccaaaggaaacaagtcatcgtatcacaggctgagtgagcttgtagaacacgtgtttccacttctcagtaaggaacagaattctgcctttccatgcccagagttcagttccttctgctactggcgagacccaatacctgatgtggacctggatgacctagcttgagcagggcctgtatggctaggttggggcactgtcactaagcctgtgttccattacacgtgggcccttacatacttcctgtggagttgtgtgctgggcaccactcaactgcataacttaaatggaagaatttagaatccaagaaagagtggaccagcacattactgcacaaagtaaagagttaaaatctccactggtcaattgaggtcgcttctctatataaccagggctttctccagaggtccagttagtgttgctggctacgagtccatgtcctcctgggacacttccactcttgctcgctgagctaggacagctgcttcctgtcgccgactacacagaagaaaccctgtctagaaaaaaaaaaaaaaaaaaaaaa

SEQ ID NO: 5781 - DNA, 1148 bp, Cricetulus griseus
  modified_base (697)..(697): a, c, t, g, unknown or other
catgcctactcactccatcaagacagaaattcagccacacggctttgctgtgggaatcccccaatcggtgtaccatccagagcccaccgagcgtgtggtggtatttgaccgcaacctcagcactgaccagttcaactccagcactcagccacctaacgctcaacggaggactccagattccaccttctcggagaccttcaaggagggcgttcaggaggtttttcttcccctcggacctcagtcttcggatgccgggcatgaattcagaggactatgtgtttgacagtgtttctgggaacaactttgagtataccctagaagcctctaagtcacttcggcctccgtgaactgcttgagcaccgacttctcttctcagaagggtgtgaagggcttgcctctcaacatccagatcgacacctacagctataacaaccgcagcaacaagccagtacaccgggcctactgccagataaaggttttctgtgacaagggagctgaacggaaaatcagggacgaagaacgaaagcaaagcaagagaaaagtttctgatgttaaagtgcaactgcttccctcacacaaacggacggacatcacagtgttcaagcctttcctggatctggatacccagcctgtcctcttcatccctgatgtgcattttaccaacctgcagcgggcagtcatgttcttccatcccctntgaagaactggaaggtgaagggtctgtcttgaaaaggggccattcggaaccgaagatgacttctagttcctccacctgctagatgacccggacagaagagccgaagagagtgctgctgtatgtggtgtctgtgtacagatagtgggggcgatcaggaagatctgctttgaaaaaccctccccagagaagaagttaagttatttttgataatgtggaccaaccaggtagaatacaatttcccaaacacaagcaagtgttccctagctagcaaaaagccatctcaagcatcagagccgcccgctcttgagattgtcgccaccataggggtttctgtgccctgagtggagctaatggagggaggactcagctgcagctactatatgaggtgtgtatgcgagtgtcagcaagctgtgcccatgcagtgtcacagctgtcatcgtgagccagtgat

SEQ ID NO: 5782 - DNA, 1148 bp, Cricetulus griseus
gagtagcgcaggcgccttccagcgtccgcgcctgcgtactcggcgacctcccgcctgcaccatgaaggtacttcggcgcgcttggcggcgccgagtggtgctgaccctaagcggcctagcgttttgcagcaccactctgttgtatttggcgcgctgtgcttccgagggcgagacgcccgcagccgctggagccgctcaaccccgcgctaaggccttcctggcagtgttggtggctagtgcgccccgcgcggttgagcgccgcagcgcggtgcgcagcacgtggctggcacaagggaggcgcggcggccctaaggatgtgtgggcgcgcttcgctgtgggcaccagtggcctgggctcagaggagcggcgtacgcttgatctcgagcaagcacagcacggggacctgctgctgctgccctccctgcgcgatgcctacgagaacctcacggccaaggtcctggccatgttgacttggctggatgagcacgtggacttcgagttcgtgctcaaggccgacgacgactcctttgcgcgcctggatgctctactggcggagctacgcgcacgtgagcctgcacgccgccgtcgcctctattggggcttcttttctgggcgtggacgagtcaagcccggaggtcgctggcgagaagctgcctggcagctctgcgactactacttaccctatgctctgggcggtgggtacatcctctcttcggacctagtgcattacctgcgcctcagtggtgaatacctgcgcgcgtggcacagtgaagatgtatcgctgggtgcctggctggcaccagttgatgtgcagcgggagcacgacccacgctttgacacagagtacaaatcacggggctgcaacaatcagtacctggtaacacacaaacagagcccggaggacatgctggagaagcaacagatgctgcttcacgagggccgattgtgcaagcaagaggtgcaattgcgcctctcctatgtctatgattggtcagcgccaccctcccagtgctgccagcgcaaggagggtattccctgatgtcattgcatgtgttgtggcctcttcggacacaggccaagctgcctggacaatctggccaattgtctggggtgagctggtttatccaattactgtttaggccatggga

SEQ ID NO: 5783 - DNA, 1148 bp, Cricetulus griseus
cgagtgaggaagagagtggtgattcccgagagaggagagatggctttcttcaacacccaagctccctacgtgaacccgcccatcccgttttctggaataatccatggaggactgcaagagggacttcagatcaccatccacgggaccgtccacgcctctgcaaataagattactgtgaactttcagactggcctcaatgaaaacgacattgcctttcacttcaatccccggtttgaagatggagggtatgtggtctgtaacacaaagcagaaaggaaactgggggcctgaggagaggaagatgcagatgcccttccagaaggggaggccctttgaacttaccttcctggtgcagaggtcagagttcaaggtgatggtgaacaagaacttctttgtgcagtactcacaccgtgtaccctaccacctcgtggacaccattgctgtctcgggctccttgcagctgtccttcatcaccttccagagctcccctgcagtccctgtccagcctgtcttctccacagtgcaattctctcagcccatccagttcccacggaaccccagggggcacaaaccaaaaagcgttcggcctgtccaccaggcacctgtggctcaaactgtcatccacacagttcacaccgcccctggaccaatgcttcctactcctggaatccagcccgtggtataccccactacagtctatcctgcacctttcctcacctccatcccaaacgggctttacccatccaagtccatcatcatagcaggcattgtcctgcccaatgctaagaggttccacatcaaccttcgctctgggatggatgtcgcttttcacctgaatccccgtttcaatgagaatgttgtagtacgaaacacccagatcaacaacacctgggggcccgaggaacgaaatctggttggaaaaatgcccttcagttgcggccagagcttctcagtgtggatcctgtgtgaaagtcactgcttcaaggtttccgtggatgggcaacacctgtgtgattacgtccaccgtctgaagcacttgccaggcatcaacaatctagaagtggcaggtgatgtccagctgacccacgtacaggcataggcaaggcccctggcctagaaaggagggctggggcaccctatctgtgtctt

SEQ ID NO: 5784 - DNA, 1148 bp, Cricetulus griseus
agacatggcgcagctgggtcgcgcgttcttggctcgggtgtctcgcctaccctgcgaaaccgggcctctgaggtttttcagtcatggaacaaaaacactctatcaaagcatcgatgctccacagtctaaattcttcctgccccttttaaaacctatgctaccacctaatacttttcaaggaaaagtggcttttgttactggaggaggtaccggtcttggcaaggcgatgacaactttcctttctagcctgggtgcccagtgtgtgatagccagcaggaatatcgatgttttgaaagctacggcagaagagatttcttctaaaacaggaaataaggttcatgcaattcggtgtgatatacgtgatcctgatatggtgcataacacagtgctggagctgatcaaagtggcagggcatcctgatgtggtgataaacaatgcagcagggaatttcgtttctcccagtgaaagactgtctcctaatgcttggaagaccataactgacatagttctcaatggcacagcctatgtgactctagaaattggaaagcagctaattaaagcacagaaaggagctgcatttcttgctatcactaccgtctatgctgagagtggatcaggcttcgtaatgccaagttcttcagctaaatcaggcgtggaagccatgaataagtctcttgcagctgaatggggtagatatggaatgcgattcaatataattcagccggggcctataaaaaccaaaggtgcctttagccgtttggacccaactggaagatttgagaaagaaatgattgaaagaattccctgtggtcgactggggactatggaggaacttgcaaacctagccactttcctttgcagtgattatgcttcttggattaatggggcggtcattagatttgatggtggagaggaagtatttctgtcaggtgaattcaactctctaaagaaggtcaccaaggaggagtgggatataatggaaggactcatcaggaagacaaaaggctcctaagatgagcagttgtaaaaaaaaaaaaaaaaaaaaaaaaaaaaaaaaaaaaaaaaaaaaaaaaaaaaaaaaaaaaaaaaaaaaaaaaaaaaaaaaaaaaaaaaaaaaaaaaaaaaaaaaaaaaaaaaaaaaaaaaaaa

SEQ ID NO: 5785 - DNA, 1148 bp, Cricetulus griseus
ctggaatcaccgtgggcttgagctactggcaggatcctgaggttcgaagaggaggcagccatggaattgggcgagctgctgtacaacaagtccgagtacatcgagacggcatctgggaacaaagttagtcgccagtctgttttgtgtggaagccagaacattgttctcaatggcaagaccattgtaatgaatgactgtatcatccgaggagatctggcaaatgtaagagttggacgtcactgtgttgttaaaagccgtagtgtcataaggccaccattcaagaaattcagtaaaggtgttgcattctttcctctacatattggggaccatgtctttattgaggaagactgtgtggtcaacgctgctcagatcggttcttatgttcacgttgggaagaactgtgtgattgggcgccgatgtgtcttgaaagactgctgcaaaattcttgacaatacagtattacctccagaaactgtggtcccaccattcaccgtcttctcaggctgcccaggactcttctcaggagagctcccagagtgcacgcaggagctgatggttgatgtcaccaagagctactaccagaagtttctgccactgacccaagtctaatgcctctgctttatatcttgaattcctttgaactctaagatgaactgggagataaagtgagcagtcagtaactacaagagctgccgtacttttgaccacttctactctccttgttttttttaagttgaattcttcaatcctccaagattctgagcatttaggaatttaataggaaggctggagagatggctctgttgctaagagtactggctattctttcagaggacccaggttcagttctcagcacccacatggcacctacacctgatctatccaacagttgttgtaccattgtctgaggggggcagaaaggtcagttcccaacactccagccctgtggtcctgcagatggctggaacctggctggcacgggcctgcagagcaatagtatcctcttagcatgggggtcacatgccccaggtgctgctcacaaccatgttctaccctcactgcacaccaccccactcagatgacatccagctatcctgctgctaacataggaccagtggccacaatttctcctaccttgagaaaagtgt

SEQ ID NO: 5786 - DNA, 1148 bp, Cricetulus griseus
ggtggcaaggaactgtgaggactctttcttcctgctccttcaaccaagccagactctgggtgtgggctgtggcttccttgcagaacgaaccttcatcagcctcccgaactgtgtctccatacacctgcgccttctcccccgctgggaccctccctctgcagctatggtctggaggacgctgggcgcaagcaacttttccatgtgccccaatggctccatccagtggatctgggatgtgtttggtgaatgtgctcaggatggctgggatgaagccagcgtggtcctgggcttggtctccattctctgctttgccgcatccaccttcccccaatacatcaaggcctgcaagacagggaacatggaccaggctctatcgctgtggttccttctaggctggatcggtggagattcctgcaaccttattggctccttccttgcagaccagctacccctgcagacttacacggctgtgtactacgtcttggccgatctcatgatgctgaccctgtacttccattacaagttcaagaaccggtcttctccgttgtctgcccctatcaactctgtgctcttgttcatcttggggacggtgtgtatcacaccactcttacgcgttgctgatcctgtggctgtctccagggaaggcttccggggacggacactcttgtctgtggagccaggcaataagccctttacaaagaaggaggtcatcggctttgtcatcggctcggtctccagtgtgctgtacctgctctcaaggctgcctcagatccgcaccaatttcctacggcagtcaacccaaggcatttcctactcactgtttgcgttggtgatgctggggaacacactgtacgggctgagtgtgctgctcaagaaccctgaggtgggccagagcgaaggcagctacctgctgcaccacctgccctggctcgtgggtagcctgggtgtgctgctgctggacaccattatctctatccagtttctggtgtacaggagccaggccactgctgccgcctcagagacagagcccctcctcccaagctgacctgtgtcccggatgatgggaacctcagctgccatcccaggaagggcaaggtgtgggctgtgatactgccaccatcgctggactgggcctaggatgcggcctg

SEQ ID NO: 5787 - DNA, 1148 bp, Cricetulus griseus
aaaaaagcagaactcctaattaaacaagacagacaagcaaccatttaataaactcatttaccagccagcctgtgcatgttacaacttattctaaaaacgacttcgcggttccaagaacaacatctgccacgaaatcgaatcgggaggatgttgacaagacaggttcttctcatgcagtggttgagactgggtccgtagctgtgttttcccagatcgaaggcatcctcccaagttaaaaatgaaaagtttcagagtgtttggaacaactgcaagagcagcttgacaacttaaatgctgcccatgaaaccactaagctggaaatgaagctagccactcagagaaagtagaattgctgaagaaaacctacgaaacttccctttcagaaatcaagaaaagccatgaaaaggaaaagaagttgcttgagaatctccttaatgagaagcaggaatcactagagaaacaagtcaataatctgaaaagtgaaaatgatgctttaaatgaaaagctgaagtcagaggaacaaaagcgaatatcaagagagaaggctaattcgaaaaatacctcaggtcatgtatctggagcaagagctagaaagtctgaaagccgtgttagagatcaagaacgagaagctgcatcagcaagaacacagcgttggttgacaaactgaagcgattccagcaggaaaacgaggaattaaaagctcgaatggacaaacacatgacaatttcaaggcaactttccatagagcaggcagcactgcaggagtccctggagaaggagtccacggtcaacaagagactatccatggagaacgaggagctgctgtggaagctacacaatggggacctctgcttagctttctggaatttccacaggataactggaaagcagccaccaccgtatcggctacttacgagtcaggagttccggaggaaggcttttgacttggtccagaagcctcctccaaaaaatagattctggaattgatgtggacatagttgcacagagcacttaaggaatgagggaaccttgttcttttgccttccttcacctaaccataaggggaaactctcagggccctattaagataaagatttataacctttataatattcttcaccagagacaccttcttgtgattttttttt

SEQ ID NO: 5788 - DNA, 1148 bp, Cricetulus griseus
tgctggtatttagagcgcagcggctgactggcggggtcgccttcgcttcagccgcctcggggatcttcgctcgcttgcccgctcgctctcccgccgtcctacccccgccgccggctgagcttgccctgttcccgcttgcagacatgactgacatcaagaacagccccgaatatgctgcgtttttcgctgtcgtaggcgcttcgtccgccatgatcttcagcgccatgggagctgcctatggcacagccaagagtggcaccggcatcgctgctatgtcggtcatgaggccagagatgatcatgaagtccatcatcccagtggttatggctgggatcattgccatctatggcctggtggtggcagtacttatcgctaactccctgactgatggcatcaccctctacaggagttttcttcagctgggtgctggtctgagtgtggggctgagtggcctggctgctggctttgccattggcatcgttggggatgctggtgttcggggcactgcccagcagccacgactgttcgtgggcatgatcctgatcctcatcttcgctgaggtgctcggcctctacggtctcatcgtggccctaatcctctccacaaagtagccctttaccaccaccagtcacgggataggatgtaaagaccacccctcctcattccagaacgaacagcctgacacacacgcacgggcagctaccccctcagtagttggtcttgtaaatgcgcagtgtcctagtgcccattgtctgttgcccccgcctggcccctgccgccccgtgctgtggacatctgggcccactcatctcccatccaggcccctgaccactgaggatgtcagcctctggctaccccacccatcgccctagagtgctctgtgtataaggatgaattagagttgtcatttttctcttcactggatgtttatttataaaagatttgacctattcatgcgtctgtggagcagccctgtctcccaactatatagtaatcattagtaaagtgctgccttgtggggttcctgttgctgagactctttggatggagccaccctcccccagccctggacagccagggtagagggcagagtgttactgctcgccagtgctggctcccagctgtgtccaataaagttctcggatgtg

SEQ ID NO: 5789 - DNA, 1147 bp, Cricetulus griseus
gttgtcgcaggacagcaatgatgacactgaagatgtctcactgtttgacgcagaagaggagacaaccaatagaccaagaaaatctaaaatcagacacccagtggcatccttcttccatctgttctttcgagtcagtgcggttgtagtctatctcctctgtgagcttctcagcagcagcttcattgcctgtatggtgacgattatcttgttgctgtcatgtgacttttgggcagtgaagaatgtcactggtagactaatggttggcctacgttggtggaatcatattgatgaggatgggaagagccactgggtgtttgagtccagaaagtcaactcctcaagacaacaagactgtttctgaggctgagtcaagaatcttttggttaggactcattgcctgtccaatcctgtgggtgatctttgcctttagtgcgctcttctccttcagagtgaagtggctggctgtggtgatcatgggtgtggtgctgcaaggtgccaacctgtatgggtatattcggtgtaaagtgggcagtaagaagaacttaaccagcatggctacctcatatctcggaaagcagttcctaaaacaaaacactggggatgctcagacttcatgagtgaagatggagcctatgtgccatggactctggggacaacagaaagattcttgacattcagagctcagtctgtgctgcagagtggggtgttgtgttaacttctctggaaattgtctaaaatctcttagtgctcattgggttaatgaaataattaccttttaataagaatattattcttatgtaataatgggagtaattgtttaaatacttggcataataaatgcctatgaaacattctaagatctatttttttcttgttataatgggggtattataaatcatacatttgtattaaggatatttcctaagaaaagcaatatacttcagactaaaccaaatgtaaactattgtaggcagctgaattcttttgtagctactgtaaattttgttggaatctttagattatgttgtgaatacatttgtccatttttgacattttttaaatgtcttatttattgaataagggtctttattagagtgtagcttggcagtgtataactttatatttatataaaactgcagtttacaaag

SEQ ID NO: 5790 - DNA, 1147 bp, Cricetulus griseus
ggatttcctagctgacccagatactgtcaatcatttgcttatcatcttcatagatgacagtcctcctgaaaaagcgactgaaccagcttctcctttggttccattcttgcagaaatttgcagaacctagaataaaaaccatctgtactgaagttagaattaaagcaaatcagagaacaacaagatcttttatttcggtttatgaactttctgaaacaagagggagccgtgcatgtcctgcagttttgtctgactgtcgaggaatttaatgatagaattttgcgaccagagttatcaaatgatgaaatgctatctctacatgaggaattgcagaagatttataaaacatactgcttggatgaaagtattgacaaaattagatttgatcccttcattgtagaagagattcaaagaatccccacttactagaaaacaaacaaagaagacttttcaatgatctatataagaataatgcaaaccgtgctgagactacagagcggaagcaaaatcagaactacttcatggaggtgatgactgtggatggagtctatgattacctgatgtatgtaggacgagttagttttccaagttccagattggcttcatcatcttttaatgggaactcgaatcctctttaagaacacattggaaatgtacactgactactatcttcagtgcaagctagagcagctcttccaggagcaccggctggtttctctcataacgcttctcagagatgctatattttgtgaaaatactgaacctcgctccctccaagataagcaaaaaggagcaaaacagacgtttgaagaaatgatgaattacattccagatctgatagtcaagtgtattggtgaagaaaccaagtatgagagcatcagacttctgtttgatggcttgcagcagccagtgcttaacaagcagctgacctaatgttttgttggtacattgtgatacaagaactgtttccagagctaaataaggtacaaaaggaagctacctccatgacatcctggatgtaaacactggtatagaataacataccagtataatagaagtgtactttttctttctctttgtatatttttataaatatcatgtactttagtgtttgaaatatattttttgttttaataaagactaacaaa

SEQ ID NO: 5791 - DNA, 1147 bp, Cricetulus griseus
gccacgacacccactctgaccacacccctcgttgcctgcggagctgggctcaccgcactccactgaggtagatgagtcgctgtccgtgtcctttgagcaggttctgccagcaggtgactcggggcttagccttcccctgcgccttgctcgccgctccacatccccacatgatgtggacctatgcctggtgtccccttgtgagtttgcgcaccgcaagccgccccctcctgcatctccgggcagctcggacagcagcgctcgttcgcaggagcggccaccggagacgccgcctacgtcagtgagtgagtcactgcccacgttgtctgactctgatcctgtgccggttgcagactccgacgacgatgtgggtagtgagagtgcagccagggacccgctgcccacaccccgtgtaccaccaccgctgcccgatgcccccggcatctgcatggtggaccccgaggccctgctgccccgagccaggcagccgcccaaccccaccaatcctggtcgcagccgcaaggcccctgcaaggccgagctccgcctccgctgcccccagagctgcatctgtagctgccaagaccaagggccctgcaggggaccgagtccggccactaagtgcccgcagtgagcctgcagacaagccaggccgtgtgcccctcaccaggaagccctcagtccccaagactgtctcaaaagtgtctcctgccacgaggacctcctctgggctcagtggccgcccagtgccacctggggctggctcccctgtctacctggacctggcttacctgcctgggggtggcgcgggccacctggacccggactttttccttcgagtacgtgcactctgctatgtcatcagtgggcagggccagcgccaggaagagggcctgcgggccgtgttggatgcactgctggctggcaagcagcagtgggaccttgacctgcaggtcacactgatccctaccttcgactcagcggtgatgcacaggtggtatgaggagacgcacgagcagcaccaggcgctgggcatcagggttctgggcagtggcagcatggtgtccatgcaggacgaggccttccctgcctgcaaagtggagttctagccacgggccacagcacaccctgaggacagcagctcctcactg

SEQ ID NO: 5792 - DNA, 1147 bp, Cricetulus griseus
  modified_base (1139)..(1139): a, c, t, g, unknown or other
gatgatgatgaacatggacaagtagttccaaaggttacaacttgtttattgttgctgcccatgagcttggccactccctaggtctggaccactccaaggacccaggagccctaatgtttcccatctatacctacactggcaaaagccatttcatgcttcccgatgacgatgttcaaggaatccagtctctctatggtccaggagatgaagaccccaatcctaaacatcccaaaacaccagagaagtgtgacccagccttatcccttgatgccattaccagtctccgaggagaaaccatgatctttaaagacagattcttctggcgtctgcatcctcagcaggtcgaggcagagctgtttttgacaaaatcattttggccagaacttcccaaccatgtggatgctgcatatgaacatccatcccatgaccttatgttcatctttagaggtagaaaattctgggctctcaatggttatgacattctggaaggttatcccaaaaaaatatactgacctgggatttccaaaaagaggtgaagagaataagtgctgccgtgcaccttgaggacatgggcaagaccctcttcttctcggggaaccaggtgtggagatatgatgatgctaatcagactatggacaaagactatccccgattcatagaagaagaattccctggaatcggtgataaagtagatgctgtctacgagaaaaatggctatatctactttttcaatgggcccatacagtttgaatacagtatctggagtaatcgcattgttcgagtcatgccaacaaattctttgttgtggtgttaagcatcttttcagaattgttatctaactcctggagagcatcaggataacaatttccatcctggcgggtggggtggggaatcaccaggaaacttcctcctgggaacagggttcaggaagctatcttcaagcatgcagtgcctatgtgactatttgtggctgggaccacattgaagaattttaaagtaatgaaattgagaaccccaaggatcgactgattcttgggagcagtgaagaaacaagattgatattttccacagcaaacatgggatccatctgtgatgagagtaaacataattattaatatatttattcagcagaaaaaaanaaaaaaaa

SEQ ID NO: 5793 - DNA, 1147 bp, Cricetulus griseus
tgcattctgccattacttcaacaacatgaacaaatctctgttgcctctctttgcggtgctatgtggaaatgaccatgttaatctgtccatcatagaaacaatcctaagcaaagcacggcttcctcttagttctaaggggaggagatatcaccgagttcagggacttctgaactggttgtctcattttgataaccctgccgaagcactagataacgttctgaagtatctccccaaaaagggccgagaagatgttaaggaacttctctactgttccatggaagagtaccagccctcccaggtgaagctgcaggacttcttcctttacggtacttatgtctgtccagatgctttgaatctgggcttaccagagtgggtactagtagctttagccaaaggccagctaccaccgttcatcagtgacgctttggtactccaaaggacctttcttcacacacaagtagaaaatatgcagcgaccaaatgcccacagaatagctcagcccatccggcaaatcatctatgggcttcttttgaattccccatcacttccagaaagtacccggaatgcagtgccttctcagcgtctggctttcaacgaagtggaaaggattagtaaaaatatcaaaacatcagttgtttatgcaaagcagctgctcaaggatcattctgacttaagcaaattgactgagctccccttggctaggcggcagatacttctgttagaagccctgaaggtcaatcaggttgtcctggagtccatccctgctttgctgaagctgcccattgctgtcacctgttactggttgcagtccacagaggccaaggcaaagctccatcatctgcaggctttactgctggggatgctgatggagcccttgcatgccatcatcaactgctctggtgaggaagatctacaggcaggcggggccaagatgctgtatgaagagttacaacgagcgaaggcacccatgcggccagttgcaagattggatttagacacagctcacgtcttctgtcagtggcagtgctgtctccagatggggctgtatctcaaccagctgctgtccaatccctctcccagagccagacctaactcagttgtacagtggaagcctggtgcatggactctgccagcaactgctaacatc

SEQ ID NO: 5794 - DNA, 1147 bp, Cricetulus griseus
gatggctggctgtggtgaaattgatcactcgataaatatgcttcctacaaatagaaggcgagcgagtcctgttccaatgctgcaccttctctatcagttcccgagtgtgccatttgtctgcaaacgtgtgttcatccagtcagtctgccctgtaagcatgttttctgttatctctgtgtaaaaggcgcttcatggcttgggaagcgatgtgctctttgtcgacaagagattcctgaggacttccttgacaagccaaccttgttgtcaccagaagaacttaaggcggcaagtagaggaaatggtgaatatgcgtggtattatgaaggaagaaacgggtggtggcagtatgatgagcgcactagtcgggagctggaagatgctttttccaaaggtaaaaagaacacggaaatgttaattgctgggtttctgtatgttgctgatcttgaaaacatggttcagtataggagaaatgaacacggacgtcgcaggaagattaagcgagatataatagatataccaaagaagggagtagctggacttaggctggactgtgacactaatactgtaaatctagcaagagagagctctgccgatggtgcggacagtgtatcagcgcagactggagcttctgttcagctgccagtgccatcttcctcaaggcccctcacatccgttgatggtcagctaaccagccctgtaacaccatcccccgatgcaggcacttctctggaagactcttttgctcatttacaactcagtggagacagcatagctgaaaggagtcacagaggcgaaggagaagaagaccatgaatcaccaccttctggcagagtgccagacacttctgttgaagagactgaatcggatgccagcagtgatagtgagggcgcccctgtggtggttgcacagcactccttggcccaacagagtacttttggtttcaaatgcaaaccagacagtagctgaccggtcagaccgatccgggattgaccgatcagcagccggggctggaaccatgagtgtcaatgtcaggtcgagaaggcctgatggacagtgcacagtgacagaggtttaagtaaacgtcttcagtgccacactcaagggtgaaaatggatacctgtaaatttctgcccacataacattatac

SEQ ID NO: 5795 - DNA, 1147 bp, Cricetulus griseus
ggcaaggtcagagcagagagcggcaaggtgggcccagccccgaaagccgcaagcaggcaccatggattggaagaagcttcaggacctgttgagcggtgtgaaccagtactccacagcattcggacgcatctggctgtcagtcgtgttcgtcttccgggtgctggtgtatgtggtggcggctgagcgtgtgtggggtgacgagcaaaaagattttgactgtaacaccaggcagcctggctgtaccaacgtgtgctacgacaacttctttcctatctccaacatccgcctctgggccctgcagctcatcttcgtcacgtgtccttcgatgttggtcatcctgcacgtagcctaccgcgaggagcgggaacggaagcatcgcctgaagcacggggatcagtgtgccaagctatacagccatcctggcaagaagcacggcggcctgtggtggacctacctgctcagcctcatcttcaagctcatcattgaattggtcttcctgtatgtcctgcacaggctctggcatggcttcaccatgccacgtctggtacagtgtgccggtgtggacccctgccccaacaccgtggattgctacatcgctcgacccacggagaagaaagtctttacctacttcatggtaggcgcctccgctgtctgcattattctcaccatctgtgagatcttctacctcattttccacagggttatgcgaggcctgagcaaggtcaagtctacaaagagcagcagctccccaaagtcctccagccgagcctccacctgccgctgtcatcacaagcttctagagagtgaggacccggaaccaggcaatgccaagccacgggcttcagcacccagcctgacccccatttgaacagcacgatggaggaggagtgaagcagggaggtgctgcgggtggagggatcccgggggtgctgggggtgcccactttgaattcactaagctagccaattaatgtttgaagcagatatttgtgggtgctgggctctgtgctggctacctggtataggtaacacggcaaacccagcttcagaaagatatttagattaacaaattaactacatgcatgcaagggtctacttagctgagctggtaaacagggcttctacctaccccaggggactgtccaggc

SEQ ID NO: 5796 - DNA, 1147 bp, Cricetulus griseus
tggatggttgctccgacagagtacgatttgaagcgctggaagaagaattggtttgacctgtggtctgatggtcacctgatctactatgatgatcagactcggcagagtatagaggataaggtccacatgccagtggactgcatcaatatccgcatggggcatgagtgtcgggatatccagcctccagatgggaaacccagagactgtctgctgcagatcgtctgccgagacgggaaaaccatcagtctctgtgcagagagcacagacgattgcctggcagcctgccaatcaagtcatcatccgtgagcggtaccgagacaatgacagtgacctggccctgggcatgcttgctggggcagccacaggcatggccctggggtctctgttctgggtcttctagagccttcaaggtgttctgtgcatcgcttctgttagtcctgtgtgcaataattgatttgcagggcatttctgtttgtgacaagtgtctttcataataatttaaatagttcttttgaagatagtaatctgatgattgtgaccgacctgcatggtaccacagagaaggcctggaagtatgctgtgagtgagaaccggagttcctcagggtactgccttgcaccaagtctttcttagagagctcttggatgaccttgtgtaaacacacccgtttaaaaggccattttctgtttagttaggtatagtacttaattaagggacgactctccctgctatgccaatactaatctgatggaggaggaggatatgaatgagtgtggtaagaagattcaacttcttgacattaactgtgaaatctcactctagacctcagttcaagtcttgaacatatctccatatgagacagttgccaagcagatgtgatggtgcccacggcgttttcctggctactcctaggggacttgttgacacagcaatgcccatttctggctgaaatgtgctttgtcatctctggtagatggatgtgtgacagcatggttctgatggcttgtagtgtcaccctgtaaatgtaatgttgattttacatcctgtgttgtaagaatggctttttcctcacaatgttaccattcttaaagctccatgctttacttacaaaacattaaagtaagtttataagtgaacttattaaaat

SEQ ID NO: 5797 - DNA, 1146 bp, Cricetulus griseus
gcggacatggcgaaccaggtgatcagatgcaaggctgcagtcgcctgggaggccggaaagcctctctccatagaggaagtagaagtggcccctccaaaggctcatgaagttcgaattaagatcattgccactgccgtctgccacaccgatgcctataccctgagtggagctgatcctgaggggtgtttcccggtgatcttgggacatgaaggtgctggaattgtggaaagtgttggtgaaggggtgactagggtgaaggcaggtgatactgtcatcccgctttacgtcccacaatgtggagaatgcaaattttgtctgaatcctaaaacaaacctttgccagaagataagagtgactcaggggaaagggttaatgcccgatggcacgaccagattcacctgcaaaggaaagcctcttttccatttcatgggaaccagcacattttctgagtacacagttgtggctgacatctctgttgctaaaattgacccttcggcacctttggataaagtctgccttctcggttgtggcgtttcaaccggctatggtgctgctgtgaacactgccaaggtggagcctggttctacctgtgctgtctttggcttgggaggagttggattggcagtgatcatgggctgtaaagtggctggtgcatcccggatcattggcatcgacatcaataaagataaattcgcaaaggccaaagaatttggagccactgaatgtattaacccccaagagttcaataagcccatccaggaagtactcattgagatgacagatgggggagtagacttctccttcgagtgtattggcaatgtgaaggtcatgagagcagcccttgaggcggcccacaaaggctggggagtcagtgtggtggttggtgtagctgcttcgggtgaagaaatctccactcgtccattccagctggtgacaggacgcacatggaaaggcactgcctttggaggatggaagagtgtggagagtgtcccaaagcttgtgtctgaatatatgtccaaaaagataaaagttgatgaatttgttactgacaatctgtccttcgaccaaattaacaaagccttggacctgatgcactcggggaaaagcattcgaactgttctaaagctgtaagttcagaagagaaca

SEQ ID NO: 5798 - DNA, 1146 bp, Cricetulus griseus
gtggcattgctgtgcatgagcagcgtcatcactgcctttcttgcggccttggccctaggaattctaatgacctgcatagtggttggtgctcggaagtttggcatcaaccctgataacatcgccacacccatcgcagccagcctgggagacctcatcacactatccatcttggccctgataagcagcttcttctacagacacagagacacatggtatctgacaccactggtctgcattggcttcatggctctcacccctctgtggatcttcattgccaagcagaacccgcccgtcatgaaaatcctgaagtatgggtggttccccatcatcctggctatggtcatcagcagtttggaggcctcatcttaagcagaaccatttctaaacatcagtttaaaggcatggctgtcctgactcccgtcatatgtggtgttggtggcaacctggtggccattcagaccagccgcatctccaccttcctgcacatgtggagcacacctggggtcctccctgtccagatgaaaagattctggcctaacccatgctccactttctgctcctcagaaatcaactccgtatcagctcgagtcctgctctttctggtgatcccaggacatctgattttcttcttcctcatctgcctggtggaaggccagtcagtgacaagcagcaagatcttcctggtgctttacctggtggcaggcatgttccaggtgataatcctgctgtacctggcagaagtgatggttcgactgacctggcaccaggccctggatcctgacaaccactgtatcccatacctcacaggcctgggggacctgctgggcaccagcctcctggcactttgcttcctcctggactggctaatgaggggcagagctgattttgcagatctggtttcagagctggtttctgcacctccctgaccgaggctgccacctgcaggcctccgtgggacttttccctcatgtccacagtgtccagcaggctattcctcctgctggggcctcgagctgctagatatctgcctgggcagtggcctcatcagtctgccaaggagactagcacacgccttgattctgaagttggtagcgtgtgtgtgtgtgtgtgtgtgtgtgtgtgtgtgtgtgtagtgcagtctgctct

SEQ ID NO: 5799 - DNA, 1146 bp, Cricetulus griseus
tcctgagggacagacagaatttggttccctccaagcactgcctaccagagccatctgtggtttatccagaaacttctgtcttctgatgacctacagcaaggagcaaggtgtgagaagcatgaataatacagacattcagtggtctgctatcctgagctggggatatgctgacaacatcttacgattgaaaagtaagcagagtgagccaccaatcaacttcatacagagttcacaacagcaccaggtgaccagttgtgcctgggtgcctgacagttgtcagctcttcaccgggagcaaatgtggtgtcatcacagcctataccaacagactcaccagcagcacgccctcagaaatcgaaatggagagtcagatgcatctctatggacacacagaagagataaccagcttgtgtgtctgcaaaccatatagtgtgatgataagtgtgagcagagatgggacttgcatcgtgtgggacccaaacagactatgctatgtacaaagtctggcaggacacaaaaagccctgtgacagctgtctctgccagtgaaacatcaggtgacattgctactgtgtgtgactcagctggaggggcagcgacctgagactctggacagtgaatggggacctcgttggacatgtccactgcagagagatcatttgttctgtagctttctccaaccagcctgagggagtatccatcaatgtcattgctgggggactagaaaacggcattgtgaggttatggagcacatgggacttgaagcctgtgagagaaattacatttcccaagtcaaataagcctatcataagccttacattttcctgcgatggacaccatttatacacagccaacagtgatgggacagtgattgcatggtgtcggaaggaccagcagcgcatgaagcagcccatgttctactctttcctcagcaactacgcagctggatgaagagaagggccttccccagagaacatgagcaccatactgtggagctggctccagccactgcagaaacagatgactaagcagatatccaataatgacacctgtccctaggcacgcttccacagcctccatgtcctgaaagtaaagccctgccccattccataacggtgtggaaggctgggtcagcacgcaccaaccaa

SEQ ID NO: 5800 - DNA, 1145 bp, Cricetulus griseus
catggcatccctgtggctgctcagagttcccttcctgtgtgccctgctctggacctcttgtactccaggtaccagggcccatgagcctggggccggcagccatcacagcagtgtgggcctggacaagagcacagtgcatgaccaagagcatatcatggaacatctagaaggtgtcatcgacaaaccagagacagagatgtcccctcaagaactgcagctccactatttcaaaatgcatgattatgatggcaacgatttgcttgatggcttagaactgtccacggccatcactcatgtccataaggaggaggggagtgatcaggcaccagtaatgagtgaagacgaactgattaacataatagatggcgttttgagagacgatgacaagaacaatgatggatacatcgactatgctgaattcgcaaagtcactgcagtagatgttatttggcgctttagttatatgcaaatgtgacccttgataatgtgatgggacgtgtctggtaatgcaaaacaactctttccgtctactgctacacacttgggtaagatcctgtggcagtttgttacactggggtggggaaaaagccatctcaggaactggactgcagattgccactctaattcttgatgttaattcatgctacctgaaatgtaaagacaatatgcttgccaagtggaccactttcagtaatagtggaaggacagtgtgaaagccacatgttctccctggtgggtcccatctccaggtagatgtggtcagtgttctgttcccctggcatacagtatcaagaattcttttcctttcagggaaaatcagaaaaggaagcctaaaaccctttagcattgtgaatcttagtagtagctgaaagagaagcagccttggggtataaattgctttgcaggatgtaatagacatactatagaattgaatccagaatgatggcaggatgggaagaagaagctgaatcaaatttgctttaagacgtatagagacttatttctttattaaagtattcttgtgagacagtttcctgtgtcaagtatttgtgcaatcagagctgacttgtaaactattcttgtaatatctcattattttggaagatttatataatgaactatctgacaataaaatggataaaaaag

SEQ ID NO: 5801 - DNA, 1145 bp, Cricetulus griseus
tttcatagaaagtttaattgctgtatggactggcctccagattcctgctgtgttagggaattcccaggatgctccaagcaggcccaccaggaagacctcagtgacctttaccaagagggttgtggagaaatgtatcctttttgagaggaaccaaacagttgcaagtgctaaggtttctggggatctccattggtgtgacacaaatcctggccatgattctcaccattactctgctctgggctctatattatgatagacgggagccggggacagaccaaatgctgtctctgaagaatgatacttctcagcacctgtcatgtcactctgtggaactgctaaaaccaagcctttccaggatctttgagcatacatcaatggcaaacagcttcaatacacactttgagatggaggaattatgaagaatggcaaagaatcacaaacctgtggcactcatgagtttgggggtacacagctatctgtttcagaaatttttaaacatggggaacttctgcaagaagaatgtctaagcagataatttccactctttaaaacaaaatgaaccattcatgatggcattggagctactgtgaaggtagcttcttctggctagcctataaactctcagctgactgctaacataggaatttagacaatactaatgatctttattacccaatgatgtattgttttgaggatgatttgaatttatataaaaaaacctttcaagattggtgactacctaaatatggtttttgttggttactaaagtaatcttattaacacttgtaagagataacacattgtcttaagcttatcagggatatatatgtatataagtctgtgctgtgtctgtataattcagtaggtttcagttcttataatgttatgaataacgatatttgaagatgatgaatttgtcttatatagcaccattactttttgtattttccaccaacagagcttttaaattctgtcttggatctatattacatctgtaactgttaatttaagttcttaaccactaattttggaaattactggtatgatatgtaagaatcattgtaaccctggctgcaagaagtattaactagggaatttacacatagttgattcagcagaaattcggatgaagcaacaacttgaag

SEQ ID NO: 5802 - DNA, 1145 bp, Cricetulus griseus
gagcacttccggtagtgcgggcgcggggtcgcgctgagcgggcttggaggctggctgcggcgcgatgaccacgctccgggccttcacctgcgacgatctgttccgcttcaacaacattaacttggatccacttacagaaacttatgggattcctttttacttacagtaccttgcccactggccagagtatttcatcgttgcagaggcacctggaggagaactaatgggttatattatgggtaaagcagaaggctcagtagctagggaagagtggcatggacacgtcacagctctgtctgttgcccctgaattccgccgtcttggcttggctgctaaacttatggagttactagaggaaatttcagaaagaaaaggtggattttttgttgatctctttgtaagagtgtccaatcaagttgcagtcaacatgtacaagcagttgggttacagtgtctacaggacagtcatagagtactactcagccagcaacggggagcctgacgaggatgcctatgatatgaggaaagcactttccagagacactgagaagaaatccatcataccattacctcatcctgtgaggcccgaggacattgaataaccataggcagtggttcttaggcaggtgttccagacaagtttgtggacatattattttcataggatgatcttggagctctattaggaggaaagtaatcatttaggtcttaaagacttcatgaaaatacaggctataaacttacttcaaatctcatcgttccaatgagcaatagcatacatgttcaaactgtttgccatagtaaaattcaatcaaggcagctaagtcagaaggacacgttccactatcatggttgacagtatgcagtatatgccaaggaaagactccctccctcctcctaaatcctgtgcctgagaaccactgctgcacatatataaatatatatatatattttattttgtattgaattgttaattgaagctttaaaagcatatatgaaatgtataaatctgagatgtatagtaaaatacactgttgactatgaatgttttctggaagtttgttgtcttttaattcaggattatggagggttgtttaggatgtggtgtctctgttttgacttttatataaaacatttgtaaatgca

SEQ ID NO: 5803 - DNA, 1145 bp, Cricetulus griseus
tcacagatcagacaaatctaccacacggagctggagaagtatgagcaggcatgcaatggattcaccacccacgtgatgaacctccttcgagagcaaagccggaccagggcccatctccccaaaggagatcgagagaatggtcagcatcatccaccgcaagttcagctccatccagatgcagctcaagcagagcacgtgtgaagcagtcatgatcctgcgctcccggtttctggatgcgaggcggaagagacggaatttcaacaagcaagccacagaaattctgaatgaatatttctattcccatctcagcaacccttaccccagtgaggaagccaaagaggaattagccaagaagtgtggcatcacagtctcccaggtatcaaactggtttggaaataagcgaatccggtacaagaagaacataggtaaatttcaagaggaagccaatatttatgctgccaaaacggctgtcactgccaccaatgtgtcagcccatggaagccaagctaactcgccctccactcccaactcagcgggtggatacccttgccatgttatcagccagacaggaggatacagtgacggactcgcagccagtcagatgtacagtccgcagggcatcagtgatatgtcaagaacctactgatgctccctcatctaggatcttgtgtcattattggtagcatagagcatctctacattgtctaatgtcatactctgtcattagacagctcagtgatcaacaacaaattctgaagacctgagttttaatcctggcttcatcctcaagcagtgggctgttgggcaaatcatgtacataatggagttaataatactacctcagggtctctgcccttattgttcattctccttgggacagttcccattcatccacaaggtcacccttatacctctttcaggtcttactcaagttacccattagctaggcctcccttgaacacagtctctaaacgtgcaaaccacattttccattttctattttctttctcatgctattgttttcattaacactcaacacctaacattctatacagagcacttgattatcttatttattgtcctgtttccaccttctaaataaataaagacagacagtatctaagaaaaaaaaaaaaaaaaaaaaa

SEQ ID NO: 5804 - DNA, 1145 bp, Cricetulus griseus
tggattgattcctgcaccaacatctctaatcacagttgtaatatctatgaacaaattaaatatccccaattatctgtctgggccagagttaaagctaattttggacagaaagaatctgcctatgcagtgtcaagagagtttattatgtgccgacagggaaaagttggagcaccgagcctggacatcagagagaagggcgacaagctcattctcaatgtttttcacctgaggttattataaacggagaatggcatggggtcatgtttgatgatgacagcacctgttacacgttcagctacaacatatacgtgcacagaaacagaagtgggcagatccaatatacagcacatagaatcaatatggacgattgcgatgaaatcctgtgccagttcaacatttcaatgtccacactggattccagatactgtgtctcagtagatggagtctcagattactggggcattacaacagaaaaatcaaaagaaatctgtgtttctcctgtccataacatcagaaaagattcaatttggattctgattgttgttcctttgatcctctttctaatggttatcatggtatttgcattttggcatattaagaagaatccatttaagagaaaaagcataacgctacctaagtccttgctctctgtagtaaaaaatgccacttcagagacaaaacctgactctaagtatgcatcacttggcacatcgtaccagccagctgtccttgagaatgagacggtgatctgtgaagagcagctgtccacagtgacacttccagacaacccgggagcaacaaaatatggagaatttttaagtgaaactgaggctatgatccccgaaggaagtacttctgctgtggccctcgatagtcctccatctccaatacagagacgcagttcttcccttttaagtagtaaccagtcggagccctgtagcatcaccacctatcactccagaaacggctccagctccgacagtggcctcgtggggtcaggcagctccatggctgactcggatttcctcccacacaataacccggaaacaaagaccacagagccagagcccaccaccccgtgaggaaggcccccacctcctttggttatgataaaccacacgtgctggtggatgtgctggtggatg

SEQ ID NO: 5805 - DNA, 1145 bp, Cricetulus griseus
ggcggccctacgcccccgggcaggtcaagtggcagagtcacctgagaaagccacacagctagcggcgtcccactgctgcccgggcttcgcaccagactagtggtccaggcccgggaggaggcgtcacaccagtgaggacagagcatatcgagctagtggacatggccaccccgttcctacccgcaggggccaccacaggcgacagcggtggggaactgagctccggggacgactccggtgagatggaatcctcccagaaccctgagaccgaggcatcccggaacctggacgagctgtttgagaaggctgctgcacacgtccaaggcctggttcatgtggccagcagggagcagctcttgtacctgtatgccaggtacaagcaggtcaaagttggaaactgcaatattcctaaaccaaacttctttgattttgaagggaagcaaaaatgggaagcatggaaagcccttggtgactccagccctaggcaagcgatgcaggaatacatcgcagcagttaaaaaactagatccaggatggaaacctcaggtatcagagaagaaaggaaaagaagccaataatggttttggtggaccagtcgttagttctctatatcatgaagaaacaatcagggaagaagacaaaaacatatttgattactgcagggaaaacaacattgaccatgtaaccaaagccatcaaatcgaaaagtgtggaagtgaatgtgaaagatgaagagggcagagctatgctccactgggcatgtgaccgaggacataaggaactagtcacagtcttgctacagtatgaagctgacattaattgtcaggacaacgaaggtcagacagctcttcattacgctgctgcctgtgagtttttggacatcgtggagctgctgctccagtctggcgctgaccccactatccgagaccaagacgactgtctgccagaagaggtgacgggctgcaaagcagtttctctggtgctgcagctgcacagaactaacaaggcttgatccagagactggaaaagcacagtctcataggataggacttgagggtaaaagaaactgtagaaataatacttctttaccacccgtctttggtatgcattggctaataaaatcagttcggggaactgggaaaaaaaa

SEQ ID NO: 5806 - DNA, 1144 bp, Cricetulus griseus
gcatttttcccatttttatatcgacttttccgagaaaagagtcttgaccaactaaagtccatctcagcagaggaggtcctgaccctcttctgtggtgcaccaccggtcacacctgttgttgttttgtctataattaattttttgaaagattgtgtcttacttggatgtttttttttcatgatgtgtgtggcagagagaacatataagcagagatttttatttgcaaaactcttcagccatattacttctgccaggaaagccaggaaatatgaaatacctcattttagacttaaaaaggtggagaacattaaaatatggttatcgctgcgctcctatctgaagaggcggggtccacagcgctcagtggatgtggttgtgtcatctgtcttcttgctgacactttcaattgctttcatttgttgtgcacaggttcttcaaggccacaagacattcctgaatgatgtttacaactgggagttcttgatctgggaaacagcactgttgcttttcttgcttcgcctggcctcactggggtcggaaaccaacaagaaatacagcaatgtttccattctgctcactgaacagattaatttatatcttaaaatggaaaaaaagccaaataagaaagaacaactcactctagtaaacaatgtattgaagctgtccactaagttgttaaaggagctggacacaccatttagactctatggattgactatgaaccccttaatctacaacatcacaagagtagtcatcctttcggccgtctcaggggttataagtgatcttctaggattcaacatacgactgtggaaaattaagtcctaagctgagtcgtgtgcttggactcttttccggctggtgtcactgctcgcccactgaggacaaagatggctccctgaaacgagtgactccacctgccagctcacatgcataagcctctctgctcagccagcctaaggagtggagtttccagaggggcacaccctttccctggggcatgtgtgctaaaggcctgcacttccatggttctcaagcaacgtgaatagtcagcaaactaaagcctgcctgatggtgacgcaggaccgtctgagtcaggacatttatcctggaccctccagtattgtgctagttatatttactg

SEQ ID NO: 5807 - DNA, 1144 bp, Cricetulus griseus
acaacttggttcacctcctgctgctagcccgctgggagcacacacccctcgtcatcctgggtgttgttgcaggggctctcgttgctgacttcctgtctggcctggtacattggggtgccgatacatggggctctgtggatctgcccattgtggggaaggccttcatcaggccattccgggagcaccacatcgaccctacagccatcacgaggcatgacttcattgagaccaatggtgacaactgtctggtgacacttctgccgctgctgaatatggcctacaagttccgaacccagagtccagagaccctggagcagctgtacccctgggaatgcttcgtcttctgcctgactatctttggcaccttcaccaaccagatccacaagtggtcacacacatatttggggctgccctactgggtcactgtcctgcaggactggcacgtgatcctaccacggaaacaccatcgaatccaccacgtggcgccccacgagacatacttctgtatcaccacaggctggctcaactaccccctagaggtgataggcttctggcgtcgcttggaggacctcatccagggcctgacgggtgagaagcctcgggcagatgacatgaagtgggcccagaagatcaagtagcgtttgcagctgcctggtcgccaactttccccagcctgaactgaagccatctgccaaattctggcctctttgagctgcccttccagtgaagagtcccctgggctgggcccgggtaccccagccccagcccacccccagtgacacagaatacttgagccaccaagttttcatttcttcttttctttccttgggccttcctggccattgagctgctccaaggccaagcctgactgcagaaggggaaatccccccctcctgctggccagcccccacccttgcacgcctgacccctgccatggccctcactggtatgggggtcgctgactcacttggtctgtccccggtgatccagagagcccccaggacatttaaatgtccctgcatcatggtcctccctcagccctgcacacctaccccagaggcctaggtgggcagtcgaccctggctgccacccaagggaggcagagctgggcaatggtcagtgggcagcggacagggagaggcca

SEQ ID NO: 5808 - DNA, 1144 bp, Cricetulus griseus
ctgaccgaatgaaaaatattggtgtcctgaattatttaaagatttccttacaacatgcattgtatcttatacatcatggaaaagcttgagggatgcaaacagaaatctcagtgatgcagagacatggagatacggtgaaaagtcgtcctctcaggaagtgttaatcaaccttgttcaggcctacaaagggcttttacaatatcacacttggtccaaaaagaaaacggaactgtcagagattgataaggatgattatgcttacacctcagaaactggaaactcgggcaaccagagctgcaggacgtctacaagcatctgtgcactgctaaaaactcctggggtttgggatcctttcgtgaagagttatgtggagatgctagaattctgtgaggatcgagatggagcccgagagatactcaccaattatgcgtatgatgaaaagttcccctacaaacccgaatcgcccacatatacttatatgaatttctcaagagagagaaggcaccaagagcaaaactgataagtgttctaaagattttgcatgagattgtgccatcccatccactaatgttggaattccacacgttgcttagaaaatcagacacagaagaacaccagaagttgggcctgagcgtgttatttgaattccttgattttgccggatgcactaagaacataactgcttggaaatacttggcaaagtgtctgaagcagacattaatggaaggccatctggtatgggttgaagaagagtggatgtctagaagaagctggtggcccacctttcacttcagcttcttctgggcaaagagcgactggaaggcagatgctgacttggcgtgtgagaaagcttttgtagtgggaatccttttaggaaaaggttgtagatattttcggtatattgtaaaacaagatcatgaaaccttgaagaagaaaattaagcggatgaagaagtgtgtcaaaaatatagtattgtaaatccaggtagtttgcacctagattgtaagttgttttacatgtgataaaaaaaaaaaaaaaaaaaaaaaaaaaaaaaaaaaaaaaaaaaaaaaaaaaaaaaaaaaaaaaaaaaaaaaaaaaaaaaaaaaaaaaaaaaaaaaaaaaaaaaaaaaaaaaaaaaaaaaaa

SEQ ID NO: 5809 - DNA, 1144 bp, Cricetulus griseus
tctggatggcttccagcacttcctgaagagcctgcagtctgggcctgctgatgactccctggaggagggcctggccaccagccccgcgacctgcctccccgctgatgcacattgaggcctttctggcagctctcaccactgccaaccaggatggcagggttatcctgagccgccaaggcagcgttgggtgaaaggcagcctcaaattcttgctcttgaacccagccgtgcactttgcccaggtggtgagggagtgccgagcagtggtcattgaaggtggcaccatgcagccggtgtctgactttcgggatcagctgctggcatgttctggagtggaagctgagcgggtggtggagttctcttgtggtcatgtgatccctccagacaaacatcttgccccttattatatgcagcgggccctctaaccaacaactggaattcacctaccagagaagagatctgcctcagatgatggaggagacaggccgcgtcctctgtaacctgtgtaacgtggtccctggaggggtggtgtgcttcctcccttcctatgagtacctgcgccagatacatgcgcactgggacaagactggcctgctggcacgcttgtccgtcaagaaaaagctattccaggagcccaagagagcaagccaggtggagcaggtgctgatggcgtattccaagtgcattatgtgctgcggtcaggcaggaggccatctgacaggggccttgctcctctctgtggttgcagggaagatgagtgaaaggattaacttctctgatgaccgtgggccggtgtgtggtgatggtggggatgccgtaccccaacattaagtctccagagctgcaagagaagatggcttacttggatcagaccctgcctaggacacaaggtcaggcccccccagggaacggtgttggtggagaatctgtgtatgaaggactgtaaaccaatccataggcagggccattaggcaccagagagacttcgccagcattgtgtttcctggatcatcggtatgcccgccctccctgtcctggcgaagctgccagcatggatacgagaccgtgtggaagtcaaagccacctttgggcctgcctttgctgctttgcggaagttccatcgggagaaggcacaaccctgtctg

SEQ ID NO: 5810 - DNA, 1144 bp, Cricetulus griseus
aaggcactagggtgccacctacgcgctgatgccccgagtgctcacagggcttccagctaaccatgctgcacctaccttggcgctgcccctgctactactattactggtggtggtgtggaccccgctccccgttagcgcggggcggggcaccgattacctgcggcgaggctggctgcggctactagccgagggcgagggctgtgctccctgccggccagaagagtgcgctgcgccgcggggctgcctagcaggtcgggtgcgcgatgcgtgcggctgctgctgggaatgcgccaacctggagggccagctctgcgatctggaccccagcgccaacttctacgggcgctgcggcgagcagctcgagtgccagctagacttgggcggtgacctgagccgaggagaggtgccggagccgctgtgcgtctgtcgctcacagagcccactgtgtggttccgacggccatacctacgcgcagatctgccgcctgcaggaggtcgcccgcgctcggcccgacgctaacctcactgtggtgcatccagggccctgcgaatcggaaccccagatcgtgtctcagcctcacaatatttggaatgtgaccgggcaggatgtgatctttggctgtgaggtgttcgcctatcccatggcctccatcgagtggaggaaagatggcttggacatccagctgccaggggatgaccctcatatctctgtacagtttaggggtggacctcagaagtttgaggtgactggctggctacagattcaggctttgcggcctagtgatgagggcacctaccgctgccttgcccggaatgcccttggccaagtggaagcctctgctactctgacagtgctcacagtggaccagctgaacgccacagggttctcccagctgcaatcaatgaatctggttcctgaggaggaggaggaggcagaaagtgaagaggattactactaggtccagatctctgatttgggagtgagggtgtgtggatagagtgagcacagtgggactaactcagttcagtgcagcgagaggggtggggcaaccccatgtcttgaaccattgtagtggacaaagcccacctagcatatgactagacacagtgggcagtaataaaaaaatatacaaacaaactgaaaa

SEQ ID NO: 5811 - DNA, 1143 bp, Cricetulus griseus
ccctcaaatggagcctcctgctgctgtccctgctgagtttcctggtgatcgtggtacctcagccttccccactacaatgtcattgaacgtgtgaactggatgacttttatgagtatgagccaatttacagacaagactttcgcttcacactccgggaacattcaaactgctctcatcagaacccattcctagtcatcctggtgacctcgcgcccctcggatgtgaaagctagacaagcaattagagttacttggggtgaaaaaaagtcctggtggggatatgaggttcttacatttttcttattaggccagcaggctgaaaaggaagacaaaatgctagcgctgttccttagaagatgaacaccttctctatggcgatatcatacggcaagattttttggacacatacaataacttgaccttgaaaaccattatggctttcaggtgggtaattgagttttgccccaatgccaagtatgtcatgaaaacagacaccgatgtgttcatcaacacgggcaatttggtcaagtatcttctaaacttaaaccactcagagaagttcttcacaggttaccctctaattgataactattcctatagagggtttttccacaagaaccatatctcataccaggagtaccctttcaaagtgttccctccctactgtagcgggctgggctacatcatgtccagtgacctagtgccgaggatctatgagatgatgagtcacgtgaaacccatcaagtttgaagacgtgtatgttgggatttgcttgaatttgttaaaagtgaacattcatattccagaagacacaaatcttttctttctgtataggatccacttggatgtatgtcagctcaggcgtgtgattgcagcccatggcttttcttccaaggagatcatcacatattggcaggttatgctgaggaacaccacgtgccactactaagaagggttttgctaataaatcaaaggaaaagagtctggatgactcagtctgtaggttagaatttcttaagatttccctgaagaaaagctaactagtccacagcaacaaatcagtgtggagttgtatttattagatagtctagtcacataatggttcagtgtgtaccttaggtgtttattattaatatatatatat

SEQ ID NO: 5812 - DNA, 1143 bp, Cricetulus griseus
gaatttcttcaagaaaaatattacagagagcacccaccatttctgaaagatctaaaaaggttcggagagtaccaggctccagtggccgtctccataagacagaggatggaggctgggagtggagtgatgatgaactggatgaggaaagtgaggaaggaagagcagcaatttcacaactcaggtctccccgagtgaaagactcactgtccaattctgagctcttttcagcaggcgaccccatgggcactttgctccacgttcccgaacagatttctgctcatctacctcagccagctggccagatgcctacacagcctgctcaagtatctctccagccctctgcagagccagcaaaaacagcacaggctcagtctccagcagaccactccacggagaccaaggtccctatcagtcttgtgctgaggttaaggaattccaaaaaagaactaaatgatattcgatttgaatttactcctgggagagacacagcggagggggtctctcaagagctcatttctgctggcctggttgatggaagggatttagtaatagtggcagctaatttgcagaaaattgtggaagaacctcagtcaaatcgatctgtcacattcaaactggcatctggtgttgaaggttcggatattcctgatgatggcaaactaataggatttgcccagctcagcatcagctaaaccacagccctggaagagtcagcctaaggaggtgccacacatgcatatctgttgcttctgttggcctgaacctacaactgccaaagagccccagcaaacaaacttcccggcttggagctttagacacctatatatgatcttcttctgccatcaacacccacacctttccacaaggaaagagaagttggattgccagtggccagcatcccctcagagagttccgttagtagatatgctgctcatgtccccctcttcctccatctgagaagcagctggtgtgcctcagggcccaggatggaaatctctcagcttactcttgccttactacagcagtggccgagcgggcagtagcagctgcgttgggcatcctcatcttgcctgctctcccgtacctgccggggcctgagcatcttggggtatctctttaacactgaagtagcaattaaaagtt

SEQ ID NO: 5813 - DNA, 1143 bp, Cricetulus griseus
ccagcccctcaccttagcctgcccctgctgacggactttacccagtctgagcgacctgctggctcctcacacatccatagccgacccaagaagaagtccaagaagcacaaggacaaggagcggcccccggagcacagacccccagccccacagtctgatgtccctgccacccctgctctgctcccagatgcactaggtctgaatggagcctgtgccagtgcccccacgcccacttcagagagcccggactacttgctgaaataccccgccatctcatcgtcagagcagcgtcagagctacaagaacgacttcaatgccgaatacaatgagtatcggagcctgcatgcgcgcatcgagcagatcacgcgcaggttcacacagcttgatgcccagctcaggcagctgagccaaggctccgaggagtatgagacaacccgtgggcagattcttcaggaataccggaaaatcaaaaagaccaacaccaactacagccgagagaagagacgctgcgagtacctgcaccgcaagctggcgcacatcaagcgcctcatcgcagagtatgaccagcggcagttgcaggcctggccctagcacgccagtgggctgtgctgatggctctgcctgccttttctacttttctatgaactcggccctttggctgccgcagagactgtctatttttgtaccttttctactctgtgcctcctccacggcccacacctccagggttagaggctccagggacagtcagcagagtgccaggtcctgctgccttcagatccgtactggcaaggtcactgcagctcccaggcagtgcccaaagccctccgcattgacctcaacaacatatggtcttcagcagctgcgtcccccacctgctgttcatgtcacactgaggctgtgtggtcctgtgctgtgctggcaggttaaagatagtctaacttattggtggtctctgcctttggactgtacagtgggtagtctactttgagccatggagttggtgtttacagtcttcacttttgccaaaacaattgacaggagaggcagcgcctccccgggaccctttctgggaacctgtcttttgtgcactaagcaggtgaaccgccgacttttaaagtctataataaatttgatggaatt

SEQ ID NO: 5814 - DNA, 1143 bp, Cricetulus griseus
tgtggcgggaaccgaggcagcatctgagggacggtggcgactgagaagaaaccatgcaggcattttctaaaaggcacatctgtcagcactaaaccacaattcaccaaggaccgggcaatacctacaggaagcagtggagaaaccaagaaagtcaagccagttccttgggtggaaaaatatcgtccaaaatgtgtggatgaagttgctttccaggaagaagtggttgcagtacttaaaaagtctttagaaggagctgatcttcctaatctcttattctatgggccacctggaactggcaaaacatccacaattttggcagcagctagagaactctttgggcccgaactctttcgattaagggttcttgagttaaatgcatctgatgaacgtggaatacaagtagtccgagagaaagtgaaaaattttgctcagttaactgtgtcaggaagtcgttcagatgggaagccatgtccaccctttaagattgtaattctggatgaagcagattctatgacctcagctgctcaggcagctttaagacgtaccatggaaaaggagtcaaaaacaaccagattctgcctcatctgcaactatgtcagtcgaataattgaacccctcacttctagatgttcaaagttccgcattcagcgggagcgattactggatattgctgagaaggaaaatgtcaaaattagccatgaggtaatagcttatcttgttaaagtatcagaaggagatctacggaaagccattacatttcttcaaagtgctactcgacttacgggtggaaaggaagtcatgagggatgtgatcacagacattgctggggtaataccagccacaaccattgatggaatattcactgcatgtcaaagtggctcttttgacaaactagaagctgtggtaaaggacctaatagatgagggacaagcagctgttcagcttgttaatcaacttcatgatgtggtagtagaaaacgaagacctttctgataaacagaagtctatcattacagaaaaacttgctgaagtggataaatgtttagcagacggggcagatgaacacctgcagttgatgagcctttgtgcaactgtgatgcagcagctgactcagaattgttagaccacccatacaaaaaaaaaa

SEQ ID NO: 5815 - DNA, 1143 bp, Cricetulus griseus
  modified_base (1060)..(1060): a, c, t, g, unknown or other
agggtcgtcctggcaaccagttgctcagccaatcagcacttggtactacgatccgccctcaacatctggagcaatggcggtaagaagagccctgattgtattggcccattcagagaggacatcgttcaactacgccatgaaggaggctgctgtagagactctgaagaagaaaggatgggaggtggatgaatctgacctctatgctatgaactttaaccccatcatttccagaaaggatatcacaggtaagctgaaggacgcagagaactttcagtacacttcagagtcaacactagcatataaggaaggccgcctgagcccagatatcgtggctgaacagaaaaagctggaagctgcagacctcgtgatatttcagttccctttgcagtggtttggagtgcccgccattctgaaaggttggtttgagcgagtgcttgttgcagaatttgccttcacatatgccaccatgtatgacaaaggccctttcaagaataagaagaccttgctttccatcaccactggggccagcggctccatgtactctgttcacggtgtccacggggacatgaacgtcgtcctgtggccaattcagagtggcactctacatttctgtggcttccaggtcttggaaccacagctggtgtacagcattggccacaccccaccagatgcccggactcagatcctagaagggtggaagaaacgactggagactatctgggatgagacaccactctattttgcgccaagcagcctgtttgacctaaatttccaagcaggattcttactgaaaaaagaagtccaagaggagcagaaaaagaacaaatttggcctttctgtgggccatcacttgggcaagtccattccagctgacagccagatcaaagctagaaaataaggagatttgtttcttttaattacctctctgtggtttagggcagaggggaattgctctgagaaaaccatgactgagggactgactcgttttagcaggttagcaagctgaagcctgtttatgatgcgtcctggtttcaattactgagcagtgactggcttgtcnccgagggggtttctctcttctcttctctgttcttgtacacagtgcacacaggtcttagggaaatgaataattaaaacaggtct

SEQ ID NO: 5816 - DNA, 1143 bp, Cricetulus griseus
  modified_base (1134)..(1134): a, c, t, g, unknown or other
ccgcacccgccgccgccgccgccgcgtgagacaccttcccggcttctccgctgatttccagagaggtaacaaacatgactgagttctggctcatatctgctcctggggagaaaacctgtcagcaaacatgggagaaactccatgcagcaactaccaagaacaataaccttgcggtctcttccaagttcaacatccctgacttaaaggttggcacattggatgtcttggttggcttgtcggatgaactggctaaactggatgcgtttgtagaaggcgtggtcaagaaagtggctcagtacatggctgatgtgttggaggacagcaaagacaaagttcaggagaacttgttggccagtggagttgacttggtcacttatataacaaggttccagtgggatatggccaaatatccaatcaagcaatctctgaaaaatatttctgaaataattgctaagggagtgactcagattgacaatgacctgaaatctcgagcgtctgcatacaataatctgaaagggaatcttcagaacttggagcgaaagaagcggggagtttgctgactcggagcctggcagaaatcgtgaagaaagatgactttgttcttgactcagagtacctggtcacgctcctggtggtagtccccaagttgaaccacaacgactggattaagcaatatgaaaacgctctcagagatggtggtcccgaggtcgagcaatgttctttcagaggaccaagacagttatctttgtaacgttaccttgtttagaaaagacagttgatgatttcagacacaaagaccagagaaaacaagttacatagttcgtgacttccagtataatgaggaggagatgaaagcagataaggaagagatgaacaggctgtcaactgacaagaagaagcagtttggaccacttgtgcggtggcttaaagtgaatttcagtgaggcgtttattgcatggattcatataaaagcactaagggttttcgtcgagtctgttttaaggtatggcctgcccgtgaacttccaagcgatgctccttcagcctaacaagaagtcagtgaagaagctcagagaagtgctgcatgagctatacaagcacccaagacagcagtgtagtaaaactaaaaaaaaanaaaaaaaaa

SEQ ID NO: 5817 - DNA, 1142 bp, Cricetulus griseus
tttgaaacacagctcagcaccactacctggccctcgccaccccagggacccccaggcccaggaccccctacgcctcctaaagagtctgcccgaagcctgacccaaaaggggagtcttaatgctgcctcaggccggaccagcgaacctaaggagataacagggcctagcctctgggctcaagatgtctctgaggagccatccaaggactcagatggagaggacccagagatagcagctgccaggggcggggcctctatgcccagccaagccccagcaggaggaaccagagcggaaggaaaggggcctctctcagggtcaacaatgcccactccactgcccctaggattcccctgtggaacagtcagcccctacttccacacaggcaccatgcagggactcttcacggatgaaaccacagcccctgaggatgtcaacaaatggactgtagatgatgtctgcaacttcgtggggggcctgtctggctgtagcgagtatgccaggatattcagagagcaaggaatagccgctacagccaccaagcctgcaagcccctgagctcagcccaggacagcaactcctgtccccagcaaccaccacctccccatatgatgggccccacctgcccacaggccgagcctcacctaagcaggagaatggatcagggaccatagctcttctcccaggagccccagatccttcccagcttctctaatgatctagcaggcaaccatcatactccctgatacccatgaaatttaggggtaactgcagaggtctgcagacaaaccaaagtcagataaagtggagaggccatggagccaccctcccaactgtgaactgggactactctgcaggtcagggtcagcctcctgcaacagaaggctatgcagaaccagttccctttcagggtcaaaacaactcttagcacagttggttctgttgtgctgtaacaataaagccctgtgtctgctgccctcttgctgcacagttgttggcctcaagcctctgagacctgtcaggaggccctcagtcctcttctgagagctgaagatcctccagctcatcctgtggtccctgagccagctgccacagttcacttcgggtccacccttgtgtctgggtcttcatctacaagaaagaag

SEQ ID NO: 5818 - DNA, 1142 bp, Cricetulus griseus
gttggcctgggcggcggggccgggccatggcccgcgcgtccccaccgggtccccaggactccggaccacgggacccgggtgccccagacccgcgcctctagcgcgcccccgtcggccgcgggcacgcgtgggaaagttggcctggaaccggcccgaccagttcctgccgggcgcgcggaccggccgcaggaagttgccgcaaaacttttttcggggggtgcgacccgagcccccgagcgcgcgggctgcatgcgcgcggggtagccgggtccccctcggggtcgccaggcgtgcccggaggggacggactcgccccggggcgccccggccccgccgtcccgggggctatggccatgggtgaccagcggctggggcggccccggaggcgacacgaacggcgtggacaaggccggtgggagctacccacgtgcaaccgaggacgactcggcgtcgcctcccggggtggccagcgacgcggagccgggagacgaggagcgcccggggctgcaggtggactgcgtggtttgcggggacaagtccagcggcaagcactacggcgtgttcaaccaggtggcgctgctgcggctcagctggagcgagctcttcgtgctgaacgcggcgcaggcggcgctgcctctgcacacggcgccgctgctggccgccgcggggctgcacgccgcgcccatggccgccgagcgcgcggtggccttcatggaccaggtgcgcgccttccaggagcaggtggacaagctgggccgcctgcaggtggacgccgccgagtacggctgcctcaaggccatcgcgctcttcacgcctgatgcttgtggcctttctgacccagcccatgtggagagcctgcaggagaaggcacaggtggccctcaccgagtacgtgcgtgcccagtacccatcgcagcctcagcgctttgggcgcctgctgctgcgactgccggccctacgcgctgtgccagcctccctcatctcccagcttttcttcatgcgcctggttggcaagacacccatcgagacgctcatccgggacatgctactgtcagggagcaccttcaactggccttatggctcgggctagtgatggatatcatccaggacacacacggatgctgggaccttgtagggactctg

SEQ ID NO: 5819 - DNA, 1142 bp, Cricetulus griseus
ggcccagagcatcatgggcagcgaggcctctcgcgcttcctccttccaggtgctgctgcttctgcttctgctcctgctccgggccgagcgactgcggggcgccgagctcaccttcgagctgccggacaacgccaagcagtgtttccacgaagaggtggagcagggcgtgaagttctctctggattaccaggttatcactggaggccactacgatgtggactgctatgtggaggaccccttggggaacatcgtctaccgggagaccaagaagcagtatgacagcttcacgtacaagacgatggtcaagggcgtttatcagttttgcttcagtaatgaattttccaccttttctcataagaccgtctactttgacttccaagtgggtgacgagccccccattctcccagacatggggaatagggtcacagctcttactcagatggaatccgcctgcgtaactattcatgaagctctgaagactgtgatcgactcccagacacattatcgccttcgagaggcccaggaccgagcccgagctgaagaccttaatagtcgggtgtcttactggtcggttggagagactattgccctgtttgtggtcagcttcagtcaggtgctattgcttaaaagcttcttcacagagaaacgacccattaacagagcggtccactcctagccgtgctgtgcggctccatggcccctcacaccctagggtctccagttcttgccgggatgggggtgtgacacagggtgaagggagagctgaagggagatctaactgtattgtgtgtgtaacattgccaaaatgtttacgggtcagcctagggattggccactatttggggtaacagtgatccagcatccagtctgtgggagaactccaagtacctgggcctccagggaagcttagggttctgccactacttcatgatacatgggtcattgggttgtgtcctcttccatctgggggagaaagggactctcagttcttgcctttcttcccctgggcctctctgtaccttaggatatcagatctaatctggaagcagtagggtcagctgtacaaccaggacccaaaaggagagtgagtgcctttggtgatctctatctcctagggcagaattgtgctaataaaaaccaag

SEQ ID NO: 5820 - DNA, 1142 bp, Cricetulus griseus
  modified_base (444)..(444): a, c, t, g, unknown or other
ctcagtcagcatcagagaatccacactggagagaaaccatttaagtgtgttgattgtgggaaagctttccgtttgagctccaaactgatacagcatcaaagaattcatactggagagaagccttacagatgtgaggaatgtgggaaaacctttggtcagagctcaagccttatccatcatcagagaatccacacaggagaaaggccctatagttgtcaggagtgtgggaaagccttcagccagcaatcacagctggtcagacatcagaggactcacactggagagaggccctaccctgccataagtgtggcaaggccttcagccagagcgcaactctagctcagtatcatgaggagtgtgggaaagctttcaggtggatctctcgcctgagtcagcacaggctgattcatactggagagagaccttataagtgcaacaagtgcncaaaagcctttggttgtagctcacggctcattcgccatcagagaactcacactggagaaaaaaccatttaaaatgtgatgaatgtgggaagggctttgtccagggctcacatcttattcaacatcagcgaattcataccgggagacgaagccttatgtgtgtgacgactgtgggaaagccttcagccagagctccagtctcatttaccatcagaggattcataagggagagaagccatatgcatgcatccaatgtggaaaagcctttagtatgagcacacagctcactatccaccagagggttcacactggggaaaggccctataagtgtagtgagtgtggaaaagccttcagtcaaaattcaactcttttccagcaccagataattcatgctggagtgaagccctatcagtgtagtgagtgtgggaaggccttcagccggagctcataccttattgaacaccagagaatccacactcgagccaagtggtactgtgaatttggaaacactgttgaaagtagctcctttttgaacgctaagaaagtgaacactgtaaaaaaattgcaccagtgtgatgactgtgataaaatatttaggtggcgttcacacctaattatacaccagaggattcacacaggagagaagccttacaaatgtaatgcttgtggcaaagcttttaatcggagctcaaggctcac

SEQ ID NO: 5821 - DNA, 1142 bp, Cricetulus griseus
cgaagcggtccggtccgcggcggctgttccagagcttggtgatctcaaatggcggagcagctttctccagggagttcggccggccaggtatgcacgttcctcttcaaaaagcctgggcggaaaggggcggcgggtcgccgaaagcgccggcactgtgatgaggggtccggggacagcggcagcagcagcgacgaaggcagcgctgtggtccgaccggagaagaagcaggcgacccacaatccgatgatccagaagacgcgtggcagcgggaaacagagggcgaactacggcggcttgagtagcgaggacgagaatgaacaggagcagctcggcgtggtctacaagtcgacccgttcggcaaaacccgtggggcccgaggatatgggggcgacggctgtctacgaactggacactgagaaggagcgcgatgcacaatccatctttgaacggagccagaagatccaggaagagctgagaggcaaggaggatgacaagatctatcggggaatcaataattaccagaaatacgtgaagcccaaggatacatccatgggcaatgcctcctccggcatggtgaggaagggccccatccgagctcccgagcatctacgtgccaccgtgcgctgggattaccagcccgacatctgcaaggactacaaagagactggattctgcggcttcggggacagctgcaaattcctccatgaccgttcagattacaagcacgggtggcagatcgaacgtgagcttgatgagggtcgctatggtgtctatgaggaggaaaactacgaagtgggaagcgatgatgaggaaataccattcaagtgtttcatctgtcgccagaccttccaaaaccctgttgtcaccaagtgtaggcattatttctgcgagaaatgtgcactgcagcatttccgcaccacctctcgctgctatgtctgtgaccagcagaccaatggcgtcttcaatccagcgaaagaactgattgctaaactgggaaagcatcgcacggaagcaccgggaggtgcttctgatttcctagaagaccccgaggaggaaagtccaatgcccactatttagatttgccataattcccagtctcaaaataaacattttgttgtaacttaaaaaaaaaaaaaaaaaaa

SEQ ID NO: 5822 - DNA, 1142 bp, Cricetulus griseus
gccaggttgggcatccttgctggaaagcgagttcaccgtgcttctcgaacccaggcctggtaacgggagtaaaggaccgacgatgtggcgatggtcgcttctgttgcttttcttgctgctgaggtggtgggccctggggaagccatcccctgacgccgggcctcatggccatggcagggtgcatcagggagcccccttgagcgaggccccccacgatgacgcccacggcaatttccagtacgaccacgaggcattcctaggacgagacgtggccaaggaatttgaccaactcagtccagaggaaagccaggcccgactcgggcggatcgtggaccgcatggatcttgctggagacagcgatggctgggtgtccttagccgagctccgcgcgtggatcgctcacacgcagcagcggcacatccgtgactcggtgagcgctgcctggcacacctacgacatggaccgcgacgggcgcgtgggttgggaggagttgcgcaatgccacgtatggccactatgagccgggggaggaatttcacgatgtggaggatgctgagacctacaagaagatgctggctcgggatgagaggcgattccgggtggcggaccaggatggggactccatggccacccgggaagagctgacggcctatctgcaccctgaggagttcccacacatgcgagacatcgtggttgctgagaccctggaggaccttgacaagaacaaagacggctatgtgcaggtggaggagtacatcgcggacctgtactctgaggagcccggggaggaggagcctgcctgggtacagactgagcggcagcagttccgggacttccgggatctgaacaaggatgggcggctggatagcagtgaagtgggttactgggtgctgcctccatcccaggaccagcccctggtggaggccaaccacctgctgcatgagagtgatacagacaaggatggccgtctgagcaaagctgagatcctaagcaactggaacatgtttgtgggcagccaggccaccaattatggtgaagatttgacaaggcaccatgatgaactctgactcagtcatcttctctccctgagacccctgtccccacccctcgggctgcctgggaacaataaaagccattgctggg

SEQ ID NO: 5823 - DNA, 1141 bp, Cricetulus griseus
ccagattttgatccagaagaggacgaacccacactggaggcctcttggcctcacatacagctggtatatgaattcttcttgagattcttggagagccctgacttccagcccagcattgcaaagcgatacattgatcagaagtttgtacaacagctcctggagctttttgatagtgaagatcccagagagcgcgacttcctgaagacagtcctgcatcggatttatgggaagttcctggggctgagagcgttcatcaggaagcagattaacaacatcttcctcaggtttatatatgaaacagaacatttcaatggtgtggctgaactccttgagatattaggaagtatcatcaatggctttgcattgccgctgaaagcagaacataagcaatttctaatgaaggttcttattcctatgcatactgcaaaaggactggctttgtttcatgctcagctggcgtactgtgtcgtgcagttcctggagaaagacaccacactgacagagcctgtgatcagaggactgctgaaattttggccaaaaacatgcagtcagaaagaggtgatgtttttaggagaaattgaagaaatcttagatgtcattgaaccaacacaattcaaaaaaattgaagagccactttttaagcaaatatccaagtgtgtctccagttctcattttcaggttgcagaaagagcactgtacttctggaataatgaatatattcttagtttaattgaagagaatattgataaaattctgccaattatgtttgccagtctgtataaaatttccaaagaacactggaatcagaccattgtagcacttgtgtacaacgtgctgaaaaccctgatggagatgaacggcaagctctttgatgatctcactagttcctacaaagccgagagacagagagagaaaaagaaggaattggaacgtgaagaattatggaaaaaattagaagagctgaagctgaagaaagctctggaaaaacagaacagtgcttacaccgagcacggtattccctctcctagagaggtggtggggtaagaagcccagcctctttaaagatactgccatactctgggtttttggcaacaccttagttttccaggcttctgaaggcccaaagtattaaagctgaggg

SEQ ID NO: 5824 - DNA, 1141 bp, Cricetulus griseus
  modified_base (1128)..(1128): a, c, t, g, unknown or other
gtgcacaagcggtgagtgagaggctcttctactacatggcagtgtccctgatgtccaccagaccttgggcagatggaggaagcaatggaaaacatgcagcctttgctacccatccttcagtggctcaagcatcctggggctagtatttataaggatgtcacgtcagtacatctggaccaccttcgagtctattggcaggaacttcttgacctgcatatggaaatgggcttgagcatcgaagaagcattgatgtactccttccagagactggattctgatatctcactagaaattcaggctcctctggaagatgaggtgacaaagaacttatccctccaggttgcttttttctggggcaacagcttgcatggcccatgtccatggaattcacctgcatgtagcaaatgctggtgactgccgggctatccttggtgtccaggaagataatggtgtgtggtcctgcttacctcttacccgtgaccacaatgcttggaatgaagctgagctgtcccggcttaagagagaacaccctgagtctgaggacagaacactcatcatagatgataggctgctgggtgtcctcataccctgcagggcctttggggatgtccaactgaaatggagtaaagagttgcagcgtagtgtcctggagaggggctttgatactgaggccctcaacatctaccagttcacaccaccccactactacactccaccctatctgactgccaagcctgaggttacataccacaagctgaggccccaagataagttccttgtgctggcctcagatggtctgtgggacatgctaggcaatgaggatgtggtaaggctggtggtggggcacctatccaaggttggttgccataaaccggacctggaccaaagaccagccaacctgggcctcatgcagagtctgctgctgcagaggaaagccagtggcctccatgcagctgaccaaaatgtagccacgcatctgatcagacatgccatcgggagtaacgagtatggggagatggagccagagagactggctgccatgctgacattaccagaagatgtagccaggatgtaccgggatgatatcactgtcatggtggtgttttttaactcaaaataaataaaaanaaaaaaaaaaaaa

SEQ ID NO: 5825 - DNA, 1141 bp, Cricetulus griseus
cgccgccagccgcgccttcgcagcgaactccatgcatccggagccctgccccgcccccgagcagcagcaaccccgagcttcccttgagcggcggcagcagcaccagcggcagccgccggagccgccgccgcagcggggacggggagccctcgggggccccaccgctgccgtctccgcccgccgtcagctacccggactggatcgcccagagttactccgaggtgatgagcctcaacgagcactcgatgcaggcgctgtcctggcgcaagctctacttaagccgcgccaagctcaaagcctccagccggacctcggctctgctctccggcttcgccatggtggcgatggtagaagtccagctggatacagaccatgactatccaccagggcttctcattgtcttcagtgcctgtaccacggtgctggtggccgtgcacctctttgcactcatgatcagtacctgcattctccccaacatcgaggctgtgagtaatgtccacaacctcaactcggtcaaagagtccccccacgagcgcatgcaccgccacatcgagctggcctgggccttctctacggtcatcgggacgttgctcttcctggctgaggtcgtgctgctctgctgggtcaagttcttacccctcaagagacactcaggccagccaagccccactaagcgccctcctgaaccagctgtcgtcgccaacagcagcagtggcatcaccccgggtgaggcggcggccatcgcctccactgccatcatggtcccctgtggcctggtttttatcgtctttgctgttcacttctaccgttcactggtcagccataagacggaccggcagttccaggagctcaacgagctggcagagtttgcccgcttgcaggaccagctggaccacagaggggaccattccctgacacctggcacccattatgcctgagtcctcgccttcccactggcctgtggagcttcaccttacgcccttccccatgaccttgtcctggcccagacctggaggacagcctgcacaggcgactgggctttaccggggcagagtgtggagggaagaggtttaaaaaaaaaaaaaatacactagcactttgagactttcttctgtgagaataagcactccctcgttcttcc

SEQ ID NO: 5826 - DNA, 1141 bp, Cricetulus griseus
cgggaaggacaaccaaggctcccgagtccgcgagaagccgccctggagggtgctgttccttggcaccgaccactttgcgagggagacgctgcgggctctgcacgccgccagagacaacaaagaagaaaagttaattgaaagactggaggttgtcacagtgccttcactgtcccccaaaggactgcccgtgaaacagtatgctgtacagtcccagctcccggtgtacgagtggcctgacataggatctggagaatatgacgttggagtagtggcttcctttggccgacttttgagtgaggctcttattcttaaatttccctatggcatattgaatgtacatcccagttgcctcccgaggtggcgtggtcctgccccgatagtccatacagtgcttcatggagacacagtcactggcgtaacaattatgcaagttagacccaaaaggtttgatataggcccaattctcaagcaggaaaccatccctgtgcctcccaagagcacatcaaaggaactggaagcggtgttgtcaagactcggtgccaacatgcttatttcagttttgaaaagtctgcctgaaagtctgaacaatggaaggccacagccaactgagggagtgacgtatgcccctaaggtttctgctggtaccagctgtgtcaagtgggaggagcaaacctcagagcaagtactcagacttcacctcgccattggggatatagttccattgcagacactctggttggaaaacaccattaaacttctggatctagtagaagttaacaacaccatcattgcagatcccaaattaaaaggacaaactatgactccgggatcagtggtataccacagacagtcacagatgctgctggttcattgcaaggatggctggattggtgttcggtcagtaatgcttaagaaaacactaacagctactgatttctacaatggatatttgcatgcatggtaccagaagaatccccattctcatccaagccagtgcagatttcagactctcagacttccagtgaagatgcatgagaaaaccaagttgttgctatgcaacagtgcattaagtagctagggagaagactgacaaggacctattgcacacttgtaatttattaaaagctttatttacaagcaa

SEQ ID NO: 5827 - DNA, 1140 bp, Cricetulus griseus
gacaaaccaccagatccccgtcatctcccccaccgaacctcggaggccccccatcctcggtgccccatactgcccagcgtggggagcagaggtatccgtttgaagctctcttccgcagccagcactacgcgctccttgacaattcctgccgggagtatcttttcatctgtgaattttttgttgtgtctggcccagctgcacatgacctgttccatgctgtcatgggtccgcacgctcgccatgactctgaaacacctggagtcctacctggccgactgctatgacgccattgctgtttttctctgtatccacattgtcctccgattccgcagcattgcatcgaagagggatgtccctgctctggacaggtactgggagcaggtgttggccttgctgtggcctcggtttgagctgatcctggagatgaacgtccagagtgtccgcaccaccgacccccagcgcctcggaggactggacacgcggccccactatatcacgcgccgctatgccgagttctcgtctgcccttgtcagcatcaaccagaccatccccaatgagcgcaccctgcagctgctggggcagctccaggtggaggtggagaactttgtcctccgagtggctgcggagttctcctccaggaaggagcagctcgtgtttctgatcaacaactacgacatgatgctgggtgtgctgatggagcgggctgctgacgacagcaaagaggtggagagtttccagcagctgctcaatgcgcggacacaggaattcattgaagagttgctgtctccccccttcgggggtctggtggcgtttgtgaaggaggctgaggctttgattgagcgtggacaggctgagcgacttcgaggggaagaagccagagtcactcagctgatccgtggctttggtggttcctggaaggcgtcggtggagtctctgagtcaggatgtaatgcggagtttcaccaactttcgaaacggaaccagcatcatccagggggcgctgacccagctgatccagctctaccatcgcttccaccgagtgctggcacagccgcagctgcgggcactgccagccagggccgagctcatcaacattcatcacctcatggtggagctcaagaagcacaagcccaacttctga

SEQ ID NO: 5828 - DNA, 1140 bp, Cricetulus griseus
gagcgagcgcggggctggcgccgcgcactgggggggcaggagcagcccgcgcgccgcgtgagggactcgcacttgcaatatgactttggaggaattctcggccgcagagcagaagaccgaaaggatggacacggtgggagatgccctggaggaagtgctcagcaaggcgcggagtcagcgcaccatcaccgtcggcgtgtacgaggccgccaagttgctcaatgtcgaccccgacaacgtggtactgtgcctgctggctgcagacgaggacgacgacagggacgtggctctgcagatccattttaccctcatccaggcgttctgctgcgagaacgacatcaacatcctgcgggtcagcaacccgggccggctggctgagctgctgctgctggagagcgacgcgggcccggcggagagcgggggtgcctcgcagccccctgacctgcactgcgtgctggtgacgaacccacattcatcacagtggaaggatcctgccttaagtcaacttatttgcttttgtcgggaaagtcgctacatggatcagtgggttccagtgattaatctccccgaacggtgatggcatctcaatggaaataactgaaccaaattgcactgaagttttgaaatacctttgtagttactcaagcagttactccctacgctgatgcaaggattacagaaactgatgtcaaggggctgagtgagttcaactacatgggggctaggagatgactttgcagatggacagaggtgaaaataaagaaggaagctgtgttgaaacagaaatctaagtcaaaagggacaaaaactacaaagaactgtgcaagaaagaaaactgttgatttaggatggctgagttacattaaataagccaaatattgctttgttgaaaccttaaatgtgtagcaatagtttggtttttttttttgttttttttttttggtttttatgccctcaagtaaaaggaaagtgaaaaggattaattgtattttaaagctacaggttaatgtattttgatgagatgttaaattctcagaaattttattataaatcggactaagttattttatgatatgaaaggttatttatgataaagtttttgaagcacaatatctaaaataaactggtatggaataattg

SEQ ID NO: 5829 - DNA, 1140 bp, Cricetulus griseus
gctggaggaagtgttctgccagtcatgccaaagaggaaagtgacttttcaaggtgtgggagatgaggatgatgaagatgaaatcagtgtccccaaaaagaagctggtggaccctgtggctggagcagggggtcctgggagccgcttcaaaggcaaacactctttagacagtgatgaggaggatgatgatgatgaagggtccagcaagtatgatatcctggcctcaggaggatgtagaaggtcaggaagcagctacatggaggaaggccactttgatgcttgatggcaactacttcctgaaccaggatgcacagatccgagacagctggctggacaacattgactgggtgaagatcaaggagcggccacctgataagcaccaggtttcagactcagaggaggaagacagcctgggtcagactccgatgagtgcccaagcccctcctggagggactttttggagctgctgttagccaagaggagacagtgggcttggggcacttaggcgtttgggggcccgaggaggaggcaaaggggacagcaaggggactggacggcccaattccccacagcgcctagaccggctctctgggttggctgatcaaatggtggctcgaggcaaccttggtgtataccaggaaacaagggaacgattggctatgcgtctgaagggtttggggtgtcggactcagggatcccatgaccccacacctccaccctccctggacatgtttgctgacgaagtgacagagggagaactggaaaccccgacccctgcgcataaaggagaagcagagtcagcgggagatggtctaatggatgtgatgtgggaatataagtgggagaacacgggggatgctgagctgtatggaccattcaccagtgcccagatgcagacctgggtgactgaaggctacttcccggatggtgtttattgccggaagctggaccctccaggtggtcagttctacaattccaagcgcattgattttgatctctacacgtgaacctgctaagggcccagtgtggtagcccctttttcttggacttggcagaggaggccccagctgccctgggcagtgaggatcttggaagctactcttcagccactttccctttcccaataaagccttgagtgtgc

SEQ ID NO: 5830 - DNA, 1140 bp, Cricetulus griseus
ggatgggcacaccgcagaaggatgtcactatcaagtccgatgcacccgacaccctgttgctggagaagcacgcggattacatcgcttcgtacggctccaagaaggatgactatgaatactgtatgtctgaatacttgagaatgagcggcatctattggggcttgacggtgatggatctcatggggcaacttgatcgaatgaacagagaagagatactggtgttcatcaagtcgtgccagcacgagtgtggaggaatcagcgctagcattggacacgacccgcatctgctctacactctcagtgctgtccagattctgactctgtatgacagtgttcatgccatcgatgtagataaagttgtggcctatgtccagagtctacagaaagaagatggttcctttgctggagacatttggggagaaattgataccaggttctcattttgtgctgtggcaactttggctctcttgggcaagcttgatgctattaatgtggaaaaggcaattgaatttgttttgtcctgtatgaactttgatggtggatttgggtgcagaccgggctccgaatctcacgccggccagatctattgttgcacaggattcctggccataaccagtcagttgcatcaagtgaactctgacttgcttggttggtggctttgtgaacgccagttgccctcaggcgggctcaatggaagaccagagaagttaccggatgtgtgctattcctggtgggttttggcctcactgaagataattgggaggcttcactggattgacagagaaaaactgcgcagcttcattttagcgtgccaagatgaagagactggaggctttgcagacagaccaggagatatggtggatcctttccataccttatttggcattgctggattgtcccttctgggagaagaacagattaaacctgttagtcctgtcttttgcatgcccgaagaagtgcttcagagggtgaatatccagcctgaactagtgagctagagtcagataggaaagataagtgcaatcccaacactgctgtatttgaagtgtttatcaaacctagaggtgactgttaatattttgtatatcatgttaatgataaattatataattaaatgtattgtaaaataagtatgttgta

SEQ ID NO: 5831 - DNA, 1139 bp, Cricetulus griseus
gccggttggtcccagtcccctcggcgttctccctgcgccagcctacctcgccccttggcgccatgaccactactaccaccttcaagggtgtggaccccaacagcaggaacagctcccgggttttgcggcctccaggcggcggctccaatttttcactaggcttcgatgagccatcagaacagcctgtgaggaagaacaagatggcctctagcatctttggaacacctgaagaaaaccctccctcttgggccaagtcagcaggtgccaagtcgagtggtggcagggaagattcggagtcgcctggagcacagagaagtgccccctctgaagcaagctctggagacttcttagacctcaagggagaaggtgatatgcatgaaaacgtggacacagacttccaagccagcctggggcagattgaagagaagcctgtgcccgctgctcctgtgcccagcccagtggccccggccccagtgccatccaggagaaacccccctggcggcaaatccagcctggtcttgggttagcttcctttgttggaactctgtccttctgtctgtttttccgtgcttgtgaactgcacaccgtgagcctgactgtacatctttgcatttgttcattaaaagagaagcactttatgtactgctgtccttgtttttccttctcctgctttctgttccttttcttctgtctgacttctgggtctgtgggccatggcatgaatgttttctagtagtaggctggaatagtagactgtttttaagaacaaatgatctgggtcctgatgttgttagagacgcttttgtaccagggtttttgatgctgtatttggcttagtgtggtgagacagatgacagccacaggtgctgcccttcagcccctgtagagtggtctgtgacacagcacggtagctccttggtattcccaccgtcagtgtccttcgctaagtgcgccttcctgtgccgtgtgggatgataagcacgtgcacctcaccctgctgtctgcatgccatgtgcatgacgctggtgcttgaccatgaagaaaagtctcgtccttgaaacttgtacttctcagtcctggactgttgcttaaagtaaacaatacccaccttgtgaaaaaaaaaaaaaaaaaaaaaaaaa

SEQ ID NO: 5832 - DNA, 1139 bp, Cricetulus griseus
cccttacggtcatggcggctactgcccccagtgccggggcttcagctgcggagtcggcgacttccgccgaagctccgctgcaatacagccttcttctgcagtacctggtgggcgacaagcgtcagccccggctcctggagcctggcagcctgggcgggatcccgagtccctccaagagcgaggagcagaagatgatcgagagggcgatggaaagttgcgccttcaaggctgtgctagcctgcgtgggaggatttgtcttgggaggtgcgtttgggatctttactgccggcattgataccaatgtaggctttgaccctaaggacccttaccggacaccaactgcaaaagaagttctgaaagacatgggacaaagaggaatgtcctacgccaaaaattttgccattgtgggcgcaatgttttcgtgtactgagtgtttagtagaatcttaccggggaaagtcagactggaagaacagtgtcatcagcggctgcatcactggaggagccattggtttcagagctggtgtaaaggccggggccataggttgtggaggttttgctgctttctctgctgcaatcgattattacctacggtgaaagaaatggcctgaaaggaaggaggatgccagccaccttcagagctgttctttggagcactttctacacacttggcattgcttcaggggcgaagccagttgtttccctctcggtgatatgaggaaactaccttgttgttctttgcctccagccattggagcagctgtacttttctacttctgaattccaaccaggtttttcagggctgtgaattcttcatctaggaacatcttgaagcaaagatggtttctacctggtacctgtcaaagggctcaggtgcctaggatctttgaccagctggtcttccacatgaatcccaatataagaaatgttgccatcacaactgtcttggcaaagaggagcctccaggctgtcagtagacaccagttgaacaagacaagccttgtccacgtggactgttcaatcaagagataaatagcttcctgttttacatggctgggggggtcagtatgagcgcataaaccaaacagtaatttgcagacacatctgttcctgatcttcggaataaacagtgtccaatgg

SEQ ID NO: 5833 - DNA, 1139 bp, Cricetulus griseus
gtcgctgttgctgtgtcggccttgcgtcccgccagggcagcagcatgtaccacagcagcagccagaagcggcactggaccttcgccggcgaggagcagctggcgcgcctgcgggccgacgccaaccgcaaattcaagtgcaaagcggtggctaacgggaaggttcttccaaatgatccagtgtttcttgagccttatgaagaaattacactgtgcaaatactatgagaaaagattgctggaattctgttcggtgtttaaaccagcaatgccacggtctgttgtgggtacagcttgtatgtatttcaagcgtttttatcttaataattcagtaatggaatatcacccccggataataatgctcacttgtgcatttctggcctgcaaagtagatgaattcaatgtgtctagtcctcaatttgttggaaatcttcgagagagtcccctgggacaggagaaagcgctagagcaaattttggaatatgaattactacttatacagcagcttaattttcaccttattgtccacaatccttatcgaccatttgaaggcttcctcattgatataaagacgcggtaccccatgttggagaatccagagattttgaggaaaacagctgatgattttcttagtagaattgcgttgacagatgcttatcttttatacacaccttcacaaattgccctgactgccattttatcgagtgcctctagggctggaattactatggaaagctatttatcagagagtctaatgctgagagaaaatagaacatgcctgtcacagttactggatataatgaaaagcatgagaaacctagtaaaaaagtatgagccacccaggtctgaagaagttgctgttctgaaacagaagttggagcgatgtcattctgctgaccttgcacttaatgtggttacgaagaagaggaaaggctatgaagatgatgactatgtatcaaagaaacccaaacaagaagaggaggaatggactgatgatgacctggtagattctctctaataatttgaaatgactacggcagtgctaactaagcaacagaagtaggaagcatgtctggcatttaactttctttaaagtactacaatgtgaaaacatcaaaatatattaaacttttctaattgt

SEQ ID NO: 5834 - DNA, 1139 bp, Cricetulus griseus
gatgctcgggcatgggggttacgactctgattttagtgatgatgagcaaggtggagaatcaagcataaagaagaagaagaagacagtcgaagatgagttgctgcttacaaaaccatttcaaaaagaaaaacatggaaaggtggtccataagcaagttgcggcagacctgctggacagggaagaagcgagaaatagaaggtttcatctcatagctatggatgcttatcaaaggcacacaaagtttgtcaatgactatattttgtactatggtggcaaaagggaggacttcaggcgcttaggggagaatgataagacagacttggatgttatacgagaaaaccatagatttctatggaatgaggaggatgaagcagatatgacttgggagaagagacttgcaaagaaatactatgataaattattcaaggaatactgcatagctgatctcagtagatacaaagaaaataagtttggattcaggtggcgaatagaaaaagaagtaatttcaggaaaaggtcagtttttttgtggaaataaacgttgtgatgaaaaagaaggcttaaagagctgggaagttaactttggttatattgagcatggtgaaaagagaaacgcacttgttaaattaagattatgtcaagaatgttcctttaagttaaattttcatcacaggagaaaagaagtcaagtcaaaaaaaagaaaggctaaaaccaagattgagtatgatgattcaccacataagaaatccaaatcttcttcagaggctgccaaggggaaagatgaaggacattcatcctcaaaaaggtcggaagattctagaaacagagatacagatgaggaagacgatgcttcagaatcggagctctggaagggtcccctgccagagacagatgaaaaatcacaggaagaagaatttgatgattattttcaggacttgtttctgtgagcagggagagagcctcactccttgggaaggaagcgtactgtgaagctccatgagcatgcccgtgctgttgggtctgcgcagccgccggacagaggtttcaggggctcagggactgtttcagacacttcctccctcctttgtgtagcatctcggttgcttatatgtaaatctgttttgtccacagctctccagt

SEQ ID NO: 5835 - DNA, 1139 bp, Cricetulus griseus
aggcaacgctgtaaacactgcttcggtgctccaggcgcctaagggctttcgtcacagggatgccaaagcgtgggaagagagcggcggcagaagacgggaaagaacccaagtctgagccagagaccaagaagagtaaaggagcagcaaagaaaaacgagaaagaggctgcaggagagggccctttcctgtatgaggacgctccagataataaaacgtcacccggtggcaaacttgccacactcaagatatgctcctggaacgtggatgggcttcgagcctggattaagaagaaaggtttagattgggtaaaggaagaagcaccagatatcttgtgcctccaagaaaccaaatgctcagagaacaaactccctgcagaacttcaagacctgcctggactcacccatcagtactggtctgctccatcagacaaagaaggatatagtggcgtgggcttactttcccgccagtgccctctcaaagtctcttatggcattggtgaggaagagcatgatcaagaaggccgggtgattgtggcagaatttgactcctttgtcctggtaacagcctacgttcccaatgcaggcaggggtctggtaaggctggagtaccgacagcgttgggataaagccttttgcaagtttctgaaggacttagcttcccgaaagcctcttgtgctatgtggggatctcaatgtggctcatgaagaaattgaccttcgtaaccccaaaggaaacaagaagaatgctggctttactccccaggagcgccagggctttggggagttgctacaggctgtaccacttactgacagcttccggcacctctaccccaacaccccctatgcctataccttttggacttacatgatgaatgctcgggctaagaatgtcggatggcgccttgattactttttgttgtcacactcccttttgtcttccttgtgtgacagcaagatccgctccaaagctcttggcagtgatcactgtcccatcaccctttacctagcactgtgacacccctgctgaagtaacttacacctgggaaatagcctcctctcaagtccagtgtcctttaggccccggggttttgattttttgtgtaccccctgttttaaatgttaaaccaagcttctggcttcc

SEQ ID NO: 5836 - DNA, 1138 bp, Cricetulus griseus
ttctgttcctgtcgctgtgggcagggccacttaaaaaaggacacagactggtaccaggtaaagcggatgcaagatgaaaaaaagaagaagtctgggtcagagaagaacacagcaaggcctccaggagatgctggggaggaaggcaaaaaaaatgcagaacccctagaacaagccccacaccctctggttactctatcctttccccagcccactttagtggtccccgctcctccagataccttggagagttcttaaagaatgccattcatcttgagcctcacaaaaaggccatgtctgggggccatgtgttcagaaatgcccattttgattacagttcagctgggctgtctgtacacagggcagggcactttgacacccctgtacagtttctgcggcgactggacctctctgaactgctcgctcacatccccaggcataagctgaacactttccatgttcggatggaagatgacgcccaagtaggccaaggcgaggatctaaggaagttcattcttgcagccctcagtgccagccacagaaatgttgtaaactgcgctttgtgccaccgggcacttcctgtgtttgaacagttcccactagtggatggaactctgttcttaagtccctcaagacatgatgagattgaatgtctgaactgcaagcattgtggcaagcctgtgatcgatgtacggatcgggatgcagtacttctctgagtacagcaatgtccagcagtgtccacactgtgggaacctggactaccattttgtgaagccattctcttccttcaaagttctcgaagcttattgatgaaagctttgctttagtaatagctattttattgatataattactttactacatatcttttataggggaacattctgtgacattaatttcttttctaatttaaagcagagtttactttgtatatttgtgccactaaaatcgagggctgccccttgccctgtcttgattcccaaatgtcagtgtgtggttaagactggagcctaaatgggaagtcatgcagattttggtagggtttcagtctcctgcagaatctctgacacagttctgaggtagtaggaagaatgggtgacatttaggtgtgggttctgtggtgagactaaaggtgtggt

SEQ ID NO: 5837 - DNA, 1138 bp, Cricetulus griseus
  modified_base (472)..(472): a, c, t, g, unknown or other
gacacggagcctgaggacgagagagttcttcctctctcaaagcagacaaaccggcctccggagataccgtctgggaacctgatggtggtgcagccggaccgcattcgctgtggggcagaaaccactgtgtatgtcattgtgagatgcaagctggatgagaaggtggcgacagcagcaggagaaacatggcttcagggtacctgcgccagttcatcgacgagtatgtggagactgtggacatgctgaagagccacattaaggaggagctgatgcagggtgaggaggccgatgatgtgtacgaatccatggcccacctgtccacagacctcctcatgaagtgctccctcaaccctggctgcgatgaggagctctacgagtccatggctgcctttgccccagaggctacagaagacctctatgttgaaatgcttcaggccagtgcaggtaacccagggctctggagaaagtttcnctcggcccactaaggactcaatgatccgcaagttctgcacttcaaagaatggcaactcaaccagaagaaacgatccgagtcctttcgcttccagcaggaaaatcttaaaagactaagagacagcatcacccgacgacagagagagaagcagaaatcgggaaagcatgcagatctggagatcacagtccccatccggcattctcagcacctgcctggaaaagtggagtttggagtttatgagagcggccccagaaagagcgtgtttccgcccaggacagagctgagacgtggagactggaagacagacagcacatcaagcacagcaagcagcacgagtaaccgatcgagtacgaggagcctcctcagtgtgagcagtgggatggagggagacaatgaggataatgaagtccctgaaattactcgaagtcgtagcccaggtcctacccaaatggatggagcacctgctgtgaccggaacaccagtcatgacccttgagaggccccccagggtacctcctcgagctgcctcacagaggcctctaacccgggagcccttccctcctcccccaccagttccctcccagaggtcgctgataccaccttctaaatgtacttcacgacttttaagactggcaattttcagcctgttaatggagtcttcatattg

SEQ ID NO: 5838 - DNA, 1138 bp, Cricetulus griseus
ggccgcactaaagagggccgatatggcggcggcggcggcttcgcttcgccggtcggtgctgggcccgcgaggcgtgggccttccaggagctagtgctccgggcctgctgggcggcgcgcggtcccggcatcttccattacggacaccgcaggcagtatccttgtcctcgaagtctggcctttcccggggccggaaggtgatgctgtcagcgttgggcatgctggcagcagggggtgcggggctagctgtggctctgcattctgctgtgagtgccagtgacctggagctgcaccctcccagctacccatggtctcaccgtggcctcctctcgtccttggaccacagcagcatccgaaggggtttccaggtatacaagcaagtgtgctcttcctgccacagcatggattatgtggcttaccgccatctggtaggagtgtgctacacagaggatgaagcgaaggcgctggctgaggaggtggagttccaggatggccctaatgatgaagggaagatgttcatgaggccagggaaactgtccgactactttccaaaaccataccccaaccctgaggctgccagagctgctaacaatggagccttacccccggacctcagctacattgtgcgagctaggcatggtggtgaggactatgtattctccttgctcactggttactgtgagccccccactggggtgtcattgcgagaaggcctctacttcaacccttactttcctggccaggccattggtatggctcctcccatctacaatgaagtcttggagtatgatgatggtaccccagctaccatgtcacaaatagccaaggatgttgccaccttccttcgatgggcatcagagccagagcatgaccatcggaaacgaatggggctcaagatgttgttgataatgggcttgctgctgcccctgacctatgccatgaagcggcataaatggtcagttctgaagagtcgaaagctggcatatcggccacccaagtgaccctgtccagtgtctgcttgtcctcttgcctgaagaagccctcaacagcccaggaagtcctaggccttttcaggcctggctccttttcatcagaaggaaatggggtaggagaccaggctcttgcttctgatcttcctt

SEQ ID NO: 5839 - DNA, 1138 bp, Cricetulus griseus
cattactctttctaacttaggttattggatgatgataaggactttgtggagaggcgagatagctgttcacacatcataaatcatccatctatgggcttttagtaggaggtgaagaactctggccagtcgttgcttttctaaggaatgatatgatatatgcaagtgttcccctggttgaacaaactctgtcccctgcccatctttaattagtattagtggagtttcacaaggcttggaactgctttttgggatacaggattttctttactcaagtcagaaaaatgacactgacctaaacacaaaattgagtcagctgcctgacttgcttctccaggcttgtccattgggtactttattggatgctaacttgcagaattcattgaatagatccctgtgtgccttgtctggagaagaagcacaactaaaaataacagttaatttaaaacttcatgaaagtgtaaaaaataattttgaaatctgtgaagctcatatacctttttacaacagaggtccagttacccatgtggaatacaaagttagttttggtcaacttgaggtatttcgagaaaaaagtttattggtctggattattggccagaagttccccaaatcaatggaaattagtctttctgggactctaacgtttggagtcaagggccataacaagcagccatttgatcacatttgcattggaaatacagcatatgtaaagcttcattttaggatctcagattatacgctcactggctgttatgcagatcagcattcagttcaagtttttgcgtcaggaaaaccaaagataagtgcatatcggaaactaatttcttctgactattacatctggaattctaaagcacctgctccagtaacatatgcatcattgttaccatgattttcttatattcaaatgggatttatttgatggtaaccttctatagtagaatcatagtattttaatttcttagatgtgttcatatgatccgtgactgaaaaatcaccgagtgattcctttgtcaaaacattcatatctaatgtttttagtctgattaagtgtgaaagaatattttcaaggctaatgtcttccatttttttgttacccttctgacttcatgccattgtgactcagaacatataaaag

SEQ ID NO: 5840 - DNA, 1138 bp, Cricetulus griseus
cccagagaaaagcgaccagaggctgcagccttagggctgtatcaccgcctcccggcattgggaagagcattgggccacagcattcagcaacaagcgacctccacagccaaggcttggtgggacagatatgaagagtttgtgggactcaatgaagttcgagaggcccaaggaaatgtaaccgaggcagaaaaggtgttcatggtggctcgtagccttgtccgagaggctcgggagaatttagaggctcagcaggctaagctgaaggaggtgagggatcgtttggaccgagtctccagggaggacaaccagtacctggagctggctactctggagcacaggatgctgcaggaagagaagaggctccgagtagcctatatgcgtgcagaagactctgagcgggagaagttctctctcttctctgcagctgtgcgggagagtcacgagaaggagcgcacacgggctgagaggactaagaactggtccctcattggctcagttctcggagcgctgatcggtgtggctggctccacctatgttaaccgtgtccggctacaagaactgaaggccttactcctggaggcacagaaagggcccgtgagtctccaggaggccatccgtgaacaggcttctagctactccctccagcagagagacctcaaggacctcatggtggatctgaggggcctggtgcatgctgggcagggccagggctctgggtcaccaacaggtacttcttctaccagaggaaaagacatagatgccctttcagctgccatgaaagagcagctcagtcattcccagcaggtccattcctgcctggagggtttacgagagcggcttgatggcctggaaaagacttacagccaaatggctgggttggttcagcttgcaaaggctacagcacatccaggcctggaggagccagcagacggggccctgcccagctctttgctggaacaagggagcatgatcttggccctgtctgatgtggagcagaggctagaagcccaagtcaacaggaattctatctacagcacactggtcacctgtgtgacatttatggccacgttgcccgtgctctacatgctgttcaaaaccagttagccttgggggcctcttcagaggggcctgagggtga

SEQ ID NO: 5841 - DNA, 1138 bp, Cricetulus griseus
caaggaagtgctgggatccctggccttttggcccaagaggtcctccaggaccagtaggtccttcaggcaaagaaggaaaccctggaccacttggacccattggacctcctggtgttcggggaagtgtaggagaagcaggaccagagggacctcctggtgaacctgggcctcctggtcctccaggtccacccggccatcttactgctgctcttggtgatatcatgggccactatgatgagaatatgccagatccacttccagagtttactgaagaccaggcagctcctgatgacacaaacaaaaccgaccctggggtccatgctaccctgaagtccctcagtagtcagattgaaaccatgcgtagccctgatggttccaagaagcacccagcccggacttgtgatgacttaaagctttgccattccaccaagcagagtggtgaatattggattgatcctaaccagggatcttctgaagatgcaatcaaagtttactgtaatatggaaacaggagagacatgtatttcagcaaacccagccagcgttccacttaaaacctggagaggatctcagttcacatacggagattaccagtcacctaacacagccatcactcagatgaccttcctgcgcctcttatccaaagaagcctcccagaacatcacctacgtctgtaggaacactgtgggatacatggatgaccaagccaaaaacctcaagaaagctgtggtgctcaaagggtctaatgacttagaaatcaaaaggagaaggaaacattcgatttagatacacagttcttcaagacacttgttctaagcgcaatggaaatgtgggcaagaccatctttgaatatagaacacagaatgtggcccgtttgcccatcatagatcttgctccgtggatatcggcaacacagaccgacattgagcactgccatcaatgaccgccaccgttcacaagaactttgcctgtttgaggttgatcctgagactcttgaagtgatggctggttctgcaccagctttgtacatatggtctgaagtgcctggcctccttaatccttcagaatatttattttacttacaatcctcaagttcaattgacttaaaatatttttcaatacggcagtttaaatttaag

SEQ ID NO: 5842 - DNA, 1138 bp, Cricetulus griseus
agacggggaggaggaggaggaggaggaggaggagacagaagaggctttggaggccgcagagcagagacggcgagccaagcagatctccccagaactctcagcactggctgtgtattgctgtgccagccgactgcggaccctggaccccaggccccagcccacctcagccttacaaggttggctccctcagcgagcgcaaggctaggaagtttacccgggaggcagggacagctttgccagacacaacactcagcaactgaccagagtgtacccgatgggctgcggatgaactcagccaactataacccccaagagatgtggaacgcaggctgtcagttggtggctctgaactttcagacccctggctacgagatggacctcaacacagggcgattcctcataaatggacagtgtggctatgtcctgaaacctgcttacctgaggcaactcgacaccacctttgaccctgagtgccctggaccccccagcactactctgacagtccaggtactaacggcccaacagctgcccaagctgaatgcagagaagcccagctccatcgtggatcctctagtgcgcgtggaggtccatggcgtgcctgcggactgtgcccacaaggagactgactatgtgctcaacaatggcttcaacccctgctggaagcagactctgaagttccaactacgggtcccagagctggtgctggtcaggttcgtggtagaggactatgactccacctctcccaatgactttgtgggccagttcacactgcctctcaacagcctgaagcaagggtaccgccacatccacctgctttccaaggatggagcctcgctgtccccggccacactcttcgttcacatccgcattcagaactcttgagggtctcactcacttaccctaggatcagtgagcgctggtatcatggcacgagccctctctagagcaagggaccatgggagtgccagcccctcacacgtgacccgtcctgatcaccaggtgctgagcatacctggtgctgagagctgttcagtccctcagtgagacacagggccataatcggcgtctcatccagtgacccactggacttcaggagcctccaaccctggggccttgaggtggttccagctccctggtc

SEQ ID NO: 5843 - DNA, 1138 bp, Cricetulus griseus
aaaggagccttttccaaagggcagatcctttacggccgagtcctttggaatccggaacagaaccttcattctgcttacaaactgcagctggagaaagtctatctttgtactggcaaggatggctacgtgcctttctttgatcctactgggacaatctacaatgaggggccacagtacggatgcatccaaccaaacaaacacctgaagcacagattcctgctgctggaccgcagccagccagaggtcaccgacaagtacttccacgatgtgcctttcgaggcccacttcgcttctgagttgcctgacttccatgtggtcagtagcatgccaggtgtggatggattcaccctcaaagtagacgccctctataaggtggaagcagggcaccagtggtatctccaggtgatctatgtcattggccccgacagcatctcgaggccccgggtccagcgctctctcatagcctctctgagacgccaccaaagggacctggtggacccccgtggctgggatgcccacttcttaggcagggagtgttaagaggtgtgaggctgagatttgcctgactgatgttgacttgttcatttcattttatgttttctatttcatctttggattgatggtagatgactcatgtggattctatttcagtgaaagctccgctttcagtgtttcttacttattcactaatgccttgtgtgtgctttactaaccttttataccataccttcaggtgggcaggaacagaactcagcagggttgctccttgctgtcagatgctggctgtgaaggtcaaaagaaataattgtctgcaccatttttctgccttgcctgcccctttattgtaccagggtcttctgaaagctcctgcaggtttcctattgttggataggaaattgtgtgggaaagcatttgcacagtcttaacaataatcgctctcagtctcccgtaggtatttgttaaccctggttatttctcacctactcagactgaggaaaacatctgtggtgctgtcaacctgagttcttgaccctcaaatgatttttttttttttgtatttccagtatgaatttgtgtgttatgaatttctgtatttctccaatagcatatgccactatataaattttatcaataataa

SEQ ID NO: 5844 - DNA, 1137 bp, Cricetulus griseus
cacacacacacacacacacacacacacaccaatccctccctccgtcgtgtgtgtgtgtgtgtgtgtgtgtgtgtgtgtgtgtgtgtgtgtgtgtgtaaactctcctgtttcctcttagtgttgtatatattttgactatttattagattaggaagtcgtgttttattcatcaactgagccaaatgtctgtgtgcaattgtgtttcctttactttctttgtaaaattttgtacggcataaatgagtgaaaaaaaaaatcactgtttttctaaacttctcagaattaaggattgtaaatatcgtaggttctttttctgtgtaatgtgccctactgtttcataatgctgtaacttgtagaaatggtgtatatttattttctgcttatttaatgtcttaagttcttgaaagtgttgacatccctgtcccccatacccctgccatcccgtgaattacttcagctcctgaggtgtggggagtggtgactgggtccactctcccaaggtggcctcccgctttggctcctggcattcagttcttggattctgccacctttctgatgaaattagtattttgctgcccatgagataccctagatgtggtaagctgaaagattggactactaaaaaaagctctaggggcatgttacttaatgtagatggctctgtcctccctgcggatttagcctggtgcctgtgtgtgtcggctcggtacggtggcgtgtgtgcgggtcgtgtccacacgtgtcgctaaattagcggggaatccctcccaaacagcatttgcagagcatcctcaagcctcccagcaaagtacttgactgtctttcaaataggttttcatgtctaggttctttgaccactggttactgtatccaaacctgtcaggtaccctttaataaacagcactgatctctgtgtatagtgccctatcactaacgtgtccaaggacccagcgtatgtagcatttgtattgcagtttccctggcttcctttatgtttttgcactgatgaattttgacagggtaattgccactgtacttgtgcaatactgctgtaaataactgcagtattttttttaagaaactcaattcttttatgttcctaatgtaattttataattaaataaaacttgcaactag

SEQ ID NO: 5845 - DNA, 1137 bp, Cricetulus griseus
tgaaaagcccaacaaagaagaaaattcagaggttatggtttggaaagaatttgacagggccaagctgtacaccgcagacttggagtcgggacttcactacctgctgagagtggagctggctgcccacaagtccctggctggaactcagctgaagacatttagggacttcatgactgtcattgccaagctgttccccggccggccgtcagtcaagaagctttttggagacagtgcaggagtggctggccaacctccccctagacaagattccgtacaatgccatcctggacctagtcaacaacaagatgcggatttctggaatctttcttaccagccacataaagtgggtgggatgtcaaggaagccgattggagttgaggggctacccatgctccctctggaaactgtttcacactttgacggttcaggcctctacccatccagaagcactggttggcacagggtttgaagatgacccccaggctgtgttgcagaccataaggagatacattcatacattctttgggtgcaaagaatgtgctgagcattttgaagaaatggctaaggagtccatgaattctgtgaaaaccccagaccaagctgttctctggctttggaggaaacacaacatggtgaacagccgcctggcaggccatctgagtgaggatcccaaatttccaaaggttccatggcccactccagacctctgcccagcctgccatgaggaaattaaaggcctggacagctggaatgaggaccaggtacttgtgttcctgaagcagcactatagcagggacaacctggtagatacatactctgtggaccagggcagtcctgggggctgccacagtaccccacaaggcctaacatggctgatgtttgtagaagcccaccctgggcagagcctactttcagatgcacttgtagagtcccaggccatcccttctgggggacaagcttgccacatacatctgtttggactgtcagttctgcagttagaaggcttgcctaaagggccctgcctctgggacctacctttaggccatgtaagtctcttcttttaaagtctgaagtattatgagatgtattgcaattaatggatataatagttcaataatttaaatgtttatttatttt

SEQ ID NO: 5846 - DNA, 1137 bp, Cricetulus griseus
cggcgatgtccgcctggagctttcgccttcgccgccgctaccgctacctgctctgagcgggtctccggccgactcgtccgtgcgtctcatggccgctagcagatccctggtgcccgaccggctgcgcctgccgctgtgcttcttgggtgtctttgtttgctatttctactatgggatcctacaggagaagataactagaggaaagtatggggaaggacccaaacaggagacatttacctttgccttaaccttggtcttcatccagtgtgtgatcaatgctatgtttgccaagatcttgatccagttttttgacaccgccagggtggatcgtactcggacctggctctatgccgcctgctctgtctcctatgtgggtgccatggtctccagcaactcagcactacagtttgtcaactatccaactcaggttctcggtaaatcctgcaagccaatcccagttatgctccttggggtgaccctcctgaagaagaagtacccactggccaagtacctgtgtgtgttgctaattgtggctggtgtagctctcttcatgtacaagcctaagaaaatggttggggtagaagaacacacagttggctttggagagcttcttctgctcttgtctctgactctggatggactgacaggtgtttcccaggaccatatgcgggctcattaccaaacaggttccaaccacatgatgttgaacatcaacctttggtccacattgctgctcggtgctgggatcctgttcactggggagctctgggagttcttaagctttgctgagaggtacccgactatcatctataacatcctgctctttggcctgaccagtgccctgggtcagagctttatcttcatgacagttgtgtactttggtcccctgacatgctccatcatcaccacaacacggaagttcttcaccatcttggcttctgtgatcttcttcgccaaccccatcagctccatgcagtgggtgggcaccgtgctggtattcctgggtctcggtcttgatgccaagtttgggaaaggaacaaagaagacctcccactaggaagagagaggctgctccagaaacacttaagttattatctccaacggtgacatcttgggaaaatggactcagtcacgata

SEQ ID NO: 5847 - DNA, 1137 bp, Cricetulus griseus
cttctgcggatgagcctgccaaagcggctctaaagggtgactctcgccagcagaagcagaagcgcgagacccaagatgaggcagaactcctcactgtccctgatggctggaaggaaccagcttttctccaaagaggacaatcccagagggctcttggaggaaagcagctttgcaaccttgttcccgaaatacagagaggctttacctgaaggagtgctggcctttggtgcagaaagctttgaacgaacatgaacatgcagtacggatacttcaggatgatgttgcatgtgacatcattaaaatcggttccctagtgagaaataaagagagatttgttaaaagaagacagcggcttattggtcccaaaggatctacattgaaggcattggaactcctaacaaactgttacgtcatggttcaggggaatacggtttctgccattgggcctttcagtggcctgaaggaggtacgaaaagtagtccttgataccatgaagaacatccatccaatttataacattaaaaccttgatgattaaacgggagttggcaaaagattccgagttgcgatcacagagttgggaaagatttttgccacagttcaagcacaaaaatgtgaataaacgcaaggaaccaaaaaagaagagcattaagaaggagtacacaccattccctcctccgcaaccagaaagtcagattgataaggagttggctagtggtgaatactttctgaaggccaatcagaagaagcggcagaagatggaagccatcaaggccaagcaagcagaagctcttacgaagaggcaggaagaaagaaacaaggcattcattccacctaaagaaaagccagctgtgaagccaaagccagcttctactgaaacaaagattgatgtggtggctatcaaggaaaaggttaagaaagcaaagaccaagaaactgggcgctcttacagcagaggaggttaaacttaagatggaagccgacgaaaagaaacagaagagaaaaaagtaacattggaaaaaaatctggaactgccaggcagtggtgttgcacacctttaatcccagcactttggaggcagaggcaggtggataactctgagttcgaggccagcatggtctacagagtgagttctagga

SEQ ID NO: 5848 - DNA, 1137 bp, Cricetulus griseus
ggtttctgtggctttgggcaagtgctgggctctgggaatgggtgccattcggtgcacagtcctgaaccactgtgtgccagtgatgacatttgccgagtgagtgcaagctggagctacaccgccctggtaacctgtggaggccgagtggagctctcaggttctgtgaacagctcagcaggtggctgcagggacgcgtgggcttcagaaggactcttggtggtgctgcacatacaagggcgggtcctgcacagagctgcaggcctggacaccaggctcggcccttcagggggagcccctctgggtccagaacctggttactgggacagaggaccaaggagaaaatgaacccagcagtgaggctagggcgggcaccctgccgctgctgccttgtgccagtgcctatgtaaccccgcagccacccttctgccagcctctggccccagagcttcgggtgcgccagctggagctgggtgcagagcatgtgttgctgctttgcgaagctggccaggtgttctcctggggtggaggcaggcatggacagttgggccacgggacgctggaggcagagctggagccaaggctgttggaagcactgcaaggcctgcggatggctgaggtggctgcaggtggctggcactctgtgtgtgtgagtgaaactggggatatttatatctggggctggaatgagtcagggcagctggctctgcccataaagagctctgcagaggacaagatggcagtgagaagggaagccacagaattgaatgaagattccctcaaaggagaggaagcagccatggctgatgttggagctcctgccctcttcatagccatccagcccttcccagctctactggatcttcccacaggctcagatgcagtcaaggccagctgcggatcccgacacacagctgtggtgacacgaacaggagaactctatacctggggctggggtaaatatggacagcttggtcacaaggacagcagcagcttggatcgaccctgccgtgtggaatacttttcagaaaaacaactcgaagtaagggctgtcacctgtggaccctggaatacctatgtgtatgcaacagaaagagagaaatatatatatatatataaataaaaaaaaagagaaaaaat

SEQ ID NO: 5849 - DNA, 1137 bp, Cricetulus griseus
cgggatagatggcgctgcgcgtgctgcggaacgccgtccgcggagcggcggcgctgcccaggctgaaggcatccctcatggccagtatctgcaggcctggttatagctccttgtccaatcacaagtatgttcctcggagggcggtgctctacgtgcccgggaatgacgaaagaaaatacggaagattccatctctgaaagtagactgtgcagtgctggactgtgaggacggtgtggctgaaaacatgaagaatgaagctcgactgagaatagtaagaactcttgaagactttgacctgggcccaacggaaaagtgtgtgagaatcaactcggtgtctagtggtttggctgaagctgacctagagacaattctgcagtcccaggttcttccctctagtttgatgctgccgaaggtagaaggtcctgaagaaatccggtggttttcagacaaattttcattccacttaaatggccgaaaacttgaacaaccaatgaatttaatcccctttgtggaaactgcaatgggtttgctcaattttaaggcagtgtgtgaagaaacagtgaggattgggcctcaagtgggcctgttcctagatgcagttgtgtttggaggagaagattttcgagccagcataggtgcaacaagcaataaggacacccaagacatcctctatgcccgacagaaaattgtcgtcatagcgaaggcctttggcatacaagccatagatcttgtatacattgacttccgggatggagatggacttctcaaacagtcaaaagaagctgccgctatgggcttcactggtaaacaggtgatccaccctaaccagatagctgtggtacaagagcagtttactccaaccctggaaaaaattcaatgggctgaagaactgatcgttgcctttgcagagcaccagcgactgggaaagggagcctttactttccggggaagtatgatcgacatgccattactgaaacaggcccacaacattgttacgcttgccacatccatcaaggaaaaatgatctgttaaatgaagccctcctcaggcgggctgaacggatacagtgggtttcttaaagacaagccacagtacccagggtggcttgctagcataccggatcaggaccttgtttca

SEQ ID NO: 5850 - DNA, 1136 bp, Cricetulus griseus
ttggctgatgttagaaatcaggtgatatttgctgttcgtcaagagtatgtcgagcttggagatcagcaactcctgcttcagcccggagacgaaattgccattatccccccaattagtggaggatagtgcatcggagccatctagggaagatgtggacgaggttgaagagaaacctaaggacataatacagttcagtgccaagaagctctcagtggatgaagtctcacagttggtgatctccctgctgtgtggtgcggtgtctctctttgtagggactacaagaaataactttgaaggcaaaaaagtcattagtttagaatatgaagcatatctaccgatggcagaaaatgaaatcagaaaaatttgtagtgacataaggcagaaatggccagtcagacacattgcggtgttccatcgacttggtttggttccagtgtcagaagcaagcacaattattgctgtgtcctcagctcatagagccgcatcccttgaagctgtgagctatgccattgactctttgaaagccaaggtgcccatatggaaaaaggaaatatatgaagaatcagcatcatcttggaaaagaaacaaagaatgtttctgggcagctggtgattagtcacttgatttttggtactctaagtcttaaatgtggtaaataatcttaggttatgccaatggaggaatagcagaatgcatgagtgtgtgagatgaggagctgtctactaaagatgggaaaaatggcttactttaaatatgagataaggtgtctgtgctagagcatccttcagtgactaactccattagttatcagtattcttatgtctgtacaaactagcataaaattgttgtaaaactaactagtagcaaagaggttttaatatggtgtctgatgtttaaaagttggctcacaactatttagagagattatgtaataatttattaaagtaatttggatagttttcataatgtttatataacattagcctatgtgaagttattactaaagaaattaaattttctgcaagattattataccaaacatctagtttttgattatggctcagcagttaagaacaatagttactcttccagaagacccagatttaattctccgcaccccaatgtggcagctcaca

SEQ ID NO: 5851 - DNA, 1136 bp, Cricetulus griseus
agcccctggacaagttacgtagcttcgagagacaaagcggcgtctgcagcagggcctggacagcagccagcagagcccgctgggtccgcgggcctgctcccacctgtccccactgcgactccgtgacccgttctgcgctgcctgccaacccccatgcctgctgcctaccagcccccacttggactacttgcccctgtggctccagagggtgcctcagccccagccccagagtccgtccccgaaagcgccgccgccgccccaggatccgccgggctaagtcgccccctgtcctccctgctgtcagtgtctccttacaccgatgggggggctgtggtccccactgcaaactgcgggctgaggccatggtggccctgcacatgctccccaagacccgctggaccccacagcaggactggtactgggcccggcgctacgggctaccgtctgtggtgcgtgtacaccttacccgcctagccccagccctaccagctgctcctgcccctgctgggagcccagccccctgcccctacccctgacccttatccccaagcagacccttgccttcgctcctttctgcccacctaagcgcctccggctagtggtcagtcatggttccattgatctggacatcaacagtggcgagccatgatgggctgccccaaccaagcagggagccctggccatttgatgttcccctccccatccctgcccgcacctcagaactgtaggagtcttcctccccagggagcaaagccataaggggtgggggccactccatggcgactctctacaattctgctcaagcctcaggaggtggaactgacttgggggtttgccctcccaagccacccccacaaggggagtggcttgactctctctcagctctgcagttgttggaggcaggagcagtcagatggggtgggtggtacccaggggcacatccttggccctgccccatgggtctcagggaggccaggtgtgacctcatctttctcacggtgctatccctggtgctactggggtggtaggggaggctccctctcctccccacaccaggaacgggggtgtgagtggggggggattggaagaacttgaactttttattaaaaccttttaagcccccaaaaaaaaaaaaa

SEQ ID NO: 5852 - DNA, 1136 bp, Cricetulus griseus
aaaatggcgcttgctcagaagctgccgaggctataggagttgccgaagcaggtccggaagctaccgagcgagtccggaagttgccgaaagagagcagcggggaaagaggatggcggatctcatcgcaagacttcgagaggacgggatccaaaagcgtgtgatacaggagggcagaggagagttgcctgactttcaggatggcactaaggccacattccactttcggacgctgcatagtgatgatgaaggctccatactagatgatagcagaacccgaggaaagcccatggagctcatcattggcaagaagttcaagttgcctgtgtgggagaccatcgtgtgcaccatgcgtgaaggggagatcgcccagttcctctgtgatgtcaagcatgtagtcctgtatcccctggtggccaagagcctccgcaacatcgctgagggcaaggacccccttgagggccagcggcattgctgtggaatcgctcagatgcatgagcataattccttgggtcatgcagacctggacgccctgcaacagaaccctcaacccctcatcttccacattgagatgctgaaggtggagagccctggcacatatcagcaggacccatgggcaatgacagatgaggagaaagctaaggcagtgccactcatccaccaagagggtaaccggttataccgtgaggggcaggtcaaagaggctgctgccaagtactatgatgccattgcctgcctcaagaacctgcagatgaaggagcagcctgggtcacctgactggatccagttggacctgcagatcacaccactgctgctcaactactgccagtgtaagctggtggctcaggagtattatgaagtgctggaccactgctcctccatcctcaacaagtacgacgacaatgtcaaggcctacttcaagcgaggtaaggcccatgctgctgtgtggaatgcccaggaagcccaggctgactttgccaaggtgttggagctagaccctgccctggcacctgtggtaagcagagaactgcgggccctggagacacggatccggcagaaggatgaggaggacaaagcccgcttccgaggcatcttctctcactgacagggcctcagtcctgttctgctctgccaagccc

SEQ ID NO: 5853 - DNA, 1136 bp, Cricetulus griseus
ctgccacccacacacatgcagcctccatttgtgcccgcctacccaggcctgggttatccacccatgccccgggtgcctgtggtgggcattacaccttcacagatggtggccaacgccttctgctcagctgcccagctccagccccaacctgccacactgcttggaaaagccggggccttcccgccacctgctgcacccagtgcccctggcggtcaggcccgtccacgccccaatggggccccttggcccccagagccagcgcctgccccagcccctgagttggacccatttgaggctcagtgggcagcattagaaggcaaacccgctgtggagaagccctccaatcccttctctggtgacttgcaaaagaccttcgaaattgaactgtagcccaagttgccctgctcccactccatcagccccaggtgcagcacactcaggaggggaggcccagcctctccccctaatgctgctccccgggctgtgccccccaccgctccctctaagcccttctctccgccacccccctcacaaaccactacagaaccaatattgtgatgcctaggttgcgccaagatggaattcagggatggacccagcctggctaggggaaccatttcactgccggacttaggctggcgatgcccctgccccagccccagacacggaatgccctcggttcaagctaccctccccggtttctgttgccctttccaccttccagtgttgggcaggatgaaggtgggatgcccacttaagcctggtcatcccctccccgccccatacacacagcacaagccaagggctcccccctgcccacgctgcgttcactgccaatgctgtgcttgcccggccctcctcccccgttcggggttcgggggccgtgtcttccggagggccgaggtctcacggggcggggcccgattggggacccaggagagggggtggggggagggataaagacgctcagttacctcatgttggtgcccgctggggaggggtcccagaagaagaggaaggggtgcctggcgggtacttttctaccttttatttccagattttttttttgtatctaaaacttgcagatttgtattatacaaggacagccaataaaggaagaatataatgctaggcca

SEQ ID NO: 5854 - DNA, 1136 bp, Cricetulus griseus
  modified_base (268)..(268): a, c, t, g, unknown or other
gtgattctgtcactaaaaaggggcctctagcaagccaaatctgtatcacttacatttgtaaagaagactgctacctggcgggagttctggagctggaatccggtccaccagctgaaaattccatgagaacggatgatttccagggaggatatccttcttcctcagaacaaaggaagaacagaaaaaagaaggcggcacatgtccaggaccaagtgggagcctgaagttatgctccttagaaacagcccaaaagatacggaaagagaanccttcagagatttaccctataatggatacatccacgcgtacacgtcttgctctcattatctgcaacggagctgatgtggatctcaagagaaatgaggtcgctactgcaggatctgggatatactagtgaaagaaaaggaaaacctcacagctctggagatggctaatgcagtgaaggaatttgctgactgcccagagcacaagacttctgacagtacttttcttgtattcatgtcccatggtatccaggaaggaatatgtgggaagtcatattccgataaagtagcagatgttttaaaagttgacactatctttcgaatgttgaacactttgaagtgcccaagcttgaaagacaagccaaaagttatcatcattcaggcctgccgtggagagaaccgaggagtggtattagtgaaagattcagtagaagacactggaaagaaattcttagtggatgcagatttggaagatgatggcattaagaaagcgcacatagagaaggattttattgctttctgctcttcaacaccagacaatgtttcttggagacatcctctcaagggctctcttttcattgtggaactcatcaagcaaatgaaagaatatgcatggtcttgtgacttggaggacattttcagaaaggttcgattttcatttgaacaaccaagttatagtttacagatgcccaccactgaaagggtgactttgacaaaacgtttctacctcttcccaggacattaaaacaaagaagccaagagttccattattctgtacctgttttaggaatcatgccaattagaagtgacatttctctgaatgatgcaataaagattaaaataaaacaaaacaaaaaaaaaaaaaaaaaaaaa

SEQ ID NO: 5855 - DNA, 1135 bp, Cricetulus griseus
gagtggctgcaaggtgaagaaatacgaaactcagtctctcgatttggatacatgtcctcaggacgaaggagccgtgatctcacagatctcagacatttctaatagggacggccacgctactgatgaggagaaactggcgtccacatcctgcagtcagaaatcagctggggcagaggtgaaaggcacagagaaggagacatgccagaagacagagaaagaggagtcagctgggcatggaccactggaatcctcttcggaaaaggctccagtgtctgtggcctgtgggggtgagagccccctggatgggatctgcctcagtgaagcagacaagactgctgtgctcactttgatcagagaggagataatcaactaaagagaattagaagacaaacgaataggaaagaaaaaataacgaaagagacctcttgggaagagagaatgtaggtattgaaagagtaaatgattcaggcaaggaatttaaagatgtatatattatgaagactttcaagggtaggagaatactatttacttactaaagaacagataaagtctgggaatcccatgacaccaagccaaaggtctaagaaatcatcttttaaaaagtttaataaggaagttatttaaaggaaactaatgttcaaaagggtttgactggcctccagattccaattattttaaaaacaatttgccagggccggggatgtagctcagttggtgacacacttgctcagcatgtggttagatctggacaaataagattcctgaggaatgagtttcttaactatactatggtttcagctttatgtaaacgcatatattctggctatagttccaatatatggagatgctgctgcaatgctggccttatgtagtctgtatgatgctttaactgctcagaagaggccaagcatgggctggggtatggcctgacccttccctatatggaagtaacttcagtaccaattgtatggaataatcatcctcatagatttttattacacatagtaatttcccttttaatatgtcaggtaaatatttgtaaaagttatactcacacaaaagaattattatgataattactaatatatttttcccatgtttcattgcctgaataaaaactagtttaccactagtt

SEQ ID NO: 5856 - DNA, 1135 bp, Cricetulus griseus
  modified_base (35)..(35): a, c, t, g, unknown or other
caaattttactgttaaagaaaataaacaaataagngaaaaatagtgcaagaattcctgtccctgactggaattgagagtgcagacaagctgctatacacagaccgatatccagaggaaaagtctctgatcaccaacctaaaacggaagcatgcattcagactgcacattgggaaaggcatcgctcggccatggaagcttgtgtactatcgtgcaaagaagatatttgatgtgaataattacaaaaggcaggtacaatgaagaagacactaagaagctgaaggcataccattccctccatggaaatgactggaaaaagatcggggcaatggtggcccgaagcagcctctctgttgccctgaagttctctcagattggtggtcatagaaaccacggtacttggagtaagacagaaacccagagactaatcaaggctgtggaggatgtgatcctaaagaaaatgtctccccaggagttaagagaactggattctagactccaggaagaccctgaaggtcgcctgtcaattgtccgggaaaaaactgtacaaggggcatatcatgggtggaagtggaagctagagtggagaccagaaactggatgcagtgcaaaagtaagtggacagagattctcaccaaaaggatgacccatgggggattcgtgtatcgtggggtcaatgctctgcaggccaaaatcacccttattgaaaggttgtatgaactaaatgtgaatgacgctaatgaaatagattgggaagatcttgctagtgccataggggatgtccctccaccttttgttcaggcaaaattttataagctgaaagctgcctgcgttcctttttggcagaaaaagacttttccagagatcattgactacttatatgagaccagtctgcctttgctgaaggaaaagttagaaaagaagatggagaaaaaaaacagccagatccagactccctcagctcccaaacaagacttcctgttcaaagacatcttctattgtgatgatgacagtgacggggagggcgcagaggagcccagtgcccctggtgtgccgtgactatggatctcctcctcctcagacttgtctctgttcccttggacctgaaattagttatttaaaaaaataaaaaaaaaa

SEQ ID NO: 5857 - DNA, 1135 bp, Cricetulus griseus
gcacgagaaacacttgtgcagatgagctgacgcctgagcagtaccgcatgtgcatccagtccaaagccatgaacgaggcttctcactcccacctgggaatgatggtcttcagggaggaaatagagatgcatcttcgcaaacaggcatacagaacaaacagcgacaccgccgggtgacagccatcaacacaagaaagtctgaaccacaaaccagcactgtttattcagccttaattcaaatcccagattctgtgcctcttagaggcatagaagatatggacattacagtgggttttgtatggctcctgttttgcattgtcttatttagcatgggtacatatatatttattttctaatatgttaatatatttgccacaactgtatttgcatttatattatacttttctgttgaaggaatttcattgaaaaaatggtttaatgcattatataataagatcactctgatttgagaaaagggaaggaaagtaatcatagaaatatgaattatggagtactttaaaaattatgtacagattgaatgttattttaattgaagtgtaaattatattaatgaggtaagaggaacaagaaattatattctaataagactgtactatagtatttatcacatggatattttattagtgggccatttactagaaaaggcatgagtaattgttttaacccttgacttttaaaagggacctgttatttgtatataacccatgaaaactcagaaaaagtcattgttgttcagtaagtcatacactttcaaatgttacaaatgccaaacttctaggtgctaaagtgaatccagtttcataataactaattgatgagggttctagctgggattgtgtctaggtgttttgtttgttttttaagatgtgtaatgtgctttgtgcagaataggaaaagccagcatctcctttgtacacttttattgtgaagaccaagaacatggtatttgaaattagggaacttaattatttgcaaaggtggatttttggcttggttttaagataatcaaataatttttacttaacatctattttttaaaactagcttttatctgaagatggaagctaggctatgagagcattactatatttttacattaagtggtaccaataaag

SEQ ID NO: 5858 - DNA, 1134 bp, Cricetulus griseus
cgagatgaagcactgatcctgcctatcaactcctctctgagtgttacactgcaccaggaccagttgaaaaccatcacaactgctgccattagcaaggacttcacagaagaccgcatctggctgaatggtcgagaggaggatgtggggcagccacggctccaggcctgcttgagggagattcgtcgcctggctcggaagcggaggagcacaggagatggggatgcacttcccctcagcctcagctataaggtgcatgtggcctcagagaacaacttccccactgctgcaggcttggcatcctcagcagcgggctacgcctgcctagcctataccttggcccgggtctacggggttgagggagacctctctgaagtggcccggcggggctcaggcagtgcatgccgcagcctttatgggggcttcgtggagtggcagatgggggaacaggcagatggaaaggacagcatcgcccagcagatagcaccagagtggcactggccccaactccgagtccttatccttgtggtgagtgccgagaagaagcagatgggcagcactgtgggcatgcagaccagtgtggagaccagtaccctgctcaagttccgggctgagtccattgtgcctgagcgcatgaaggagatgacccactgcatccaagagcgggacttccaggcctttgcacagctgaccatgaaggacagcaaccagtttcatgccacctgcctcgataccttcccacccatctcctacctcaatgacacctccagacgtatcatccaactagtgcactgctttaacacacaccatgggcagacaaaggtggcatacacctttgatgcgggccccaatgctgtgatcttcaccctggatgacaccgtggctgagtttgtggcagccgtgaggcacagctttccccctgcaacaaatggagacaagttcctaaaggggctgccagtgacgcctgttcttctctctgatgagctgaaagctgcactagctatggagcccagccctggaggtgtccagtacatcattgccactcaggtcggaccagggcctcaagtcctagacagctcgaatgctcatctgctaggcccagatggcctgccacaacaggacccctgacctcttcca

SEQ ID NO: 5859 - DNA, 1134 bp, Cricetulus griseus
accgccatgcaagcgaccccggccgctctggaacatctggaccaagagcagattaaaagggcggtagaagttctgtttgcacactccaagtcaaggaaaaaaaatgagttgcttatgaatgggaatgagaatttatttttaatggtgatattatggaaaattccagcgaaagaactgcgagtccgagtgcctttgccttatagtatcctatcagattcgtcagaagtctgtttgtttaccaaagatgactgtgaatcacctgaacaaacagaatgtttctataaaaaacttttgaaaaagcatggagttaaaaacatctctcggattattccttttaaaactttaaaaacagaatataaagcctatgaagccaagcttcgcctcttgggtagctttgacatcttcattacagatgaaagaattcgaaggcatttgcccacacacataggaaggcatttctatcagaggaagaaagttccagtatctgtgaaccttctggccaagaatctgtccaaagagattgaccgatgtatcacagggactgtcttaaatatctccaaacatggttcttgcagtactgtgcgtattggtcacactggaatggagactcagcacattgttgaaaacatcctggctgtctcaaaagtgctttcagaaaaattgccagagaaatggccaagtgtgaaactcttgttcctgaaaactgagaagtctgtttcccttcccatcttttcctcatttgtcacatgtcaggatgaaaacaccttatccttccgtagcatgaaaagaaaggaactaaagaaaaaatgaagcatgaaaaagaaaagttgaaaaagaaaagcaaaagtgttaaggaaaatgtccaagaaggatgacttagcaagtgaaaccagcagtactccagggacggccacaagatcccaggaggaaaagcccagcaaagtaaaagcacaacctgaaagaacagacgagtgtgaagaaacaattccacaactggtaccaatagaagtaaaaaaccaaataaagaaaacatgaagatgcaagaaaatggcacagggaaaaaacctccaaaaaagagacctgatccagatacccttaagggcaagaaaaggaaggccctgccagctacagaga

SEQ ID NO: 5860 - DNA, 1134 bp, Cricetulus griseus
gcgcgcgttgcgtgggttctgggcttgagccggtgcgccttggccgaggggccgcgcacacgaccctggccgccaatctcggcgcagagttgggccggcttcaccagggcggcggcaggaagcccgggccccgcggtccgcaaggggagcccgcggttgctgggggcggcggcgctggccctgggcggcgcgctcgggctgtaccacaccgtgcggtggcacctgcgcgcccaggacctccgcgccgagcgctcggctgcgcagctgtctccatccagccacctgcagctgaccctgtaccagtacaagacatgtcccttctgcagcaaagtccgtgccttcctcgacttccactccctgccctatcaggtagtggaggtgaaccctgtcagaagggctgagatcaaattctcctcctacaggaaggtgcccatcctggtggcccaggaaggagacagcttgcaacagctgaatgactcctcagtcattatcagcgccctcaagacctccctggtttcagggcagcccctggaagaggtcatcacctattacccacccatgaaggccatgaatgaccagggcaaggaggtgaccgaattctgcaacaagtactggctcatgctggatgagaaggaggcccagcggatgtatggtgggaaggaagccaggacggaagagatgaagtggcgccagtgggccgatgactggctggtgcacctcatctcccccaatgtgtaccgaacacctgccgaggccttggcttcctttgactacattgtccgtgagggaaagtttggagctgtagaggccaccatggccaagtatgtgggtgcagctgccatgtacctcatcagcaagcgcctcaaaagcaggcaccacctgcaggatgatgtccgtgcagacctctatgaagcagccaacaaatgggtgacagccgtgggcaaagaccggccattcatggggggtcaaaagcctaaccttgctgacctggcagtgtatggtgtgctgagagtgatggagggtctggaagccttcgatgacctgatgcgacactcacgaatccaaccttggtaccttcggatggagcgggccattgaggaagccccctcagtgcactgtgtcccccctaactgc

SEQ ID NO: 5861 - DNA, 1134 bp, Cricetulus griseus
gtctctacgccatggcggccttgcgtgctctgctaccccgagcttgcagctcgctgttgtcctcggtccgctgtccagaactccggcgcttcgcctcgggtgctaactttcagtacatcatcacagaaaagaaaggaaagaatagcagtgtggggctgatccagttgaaccgccccaaagcactcaatgctctttgcaatggcctgatcgaggagctcaaccaagccctggagacctttgagaatgatcctgctgtgggggccattgtgctcactggtggggagaaggcatttgcagctggagcggacatcaaggaaatgcagaaccaaacattccaggactgttactccagcaagttcctgagccactgggaccagatcacccgggtcaagaagcccgtcattgcagctgtcaatggttatgctcttggtgggggctgtgaacttgccatgatgtgtgatatcatctatgctggtgagaaagcccagtttggacagccagaaatcctgctggggaccatcccaggtgcggggggcactcagagactcactcgtgcagttggcaagtcactagccatggagatggtccttactggtgatcgcatttcggcccaggatgccaagcaagcaggtcttgtaagcaagatttttcctgttgaaacactggttgaagaagccatccaatgtgcagaaaaaattgccagcaattccaaaattatagtagcaatggcgaaagaatctgtgaatgcagcctttgaaatgacgttaacagaaggaaataagctggagaagaagctcttctattctacctttgcaactaatgaccggagagaaggaatggctgcatttgtggagaaaaggaaagccaacttcaaagaccactgagggctggcagctaagccttgtgccatcctgaagaggaaagctcagcctgtcaattgagagggaaataaattgtcctaaagggtagtacaggccacagttcctcccgaaggctttggggctgtggccacagctcaggtactcgtactcgtggtgtggcctgcaaccatcacagtgatggaaaccaatctctcagtcttctaaatcagaaatctgggaagcgttcaaggtgtcttgattttttattttactt

SEQ ID NO: 5862 - DNA, 1133 bp, Cricetulus griseus
  modified_base (449)..(449): a, c, t, g, unknown or other
caggagccatgcggggccagcggaatctgcttttgggtcctgcccgcctctgcctgcgtctccttctgcttctgggttacaggcgtcgctgccctcctctgctccggggcctggtacagcgctggcgttatggcaaggtttgcctgcgctccctgctctacaactcctttggaggcagtgacactgctgttgatgctgcctttgagcctatctactggctagtggacaatgtgatccgctggtttggagtggtgtttgtggtgctggtgatcgtgctgactgggtccattgtggccattgcttatctgtgtgtcctgcccctcatccttcgaacctactcagtaccacgactctgctggcatttcttctacagtcactggaatctgatcctcatcgtcttccattactaccaggccatcaccacgcctcctcggataccaccccaggcngaaatgacattgctacggtttccatctgtaagaagtgcatttaccccaaaccagcccgaacacaccactgcagcatctgtaataggtgtgtgctgaagatggatcatcactgcccctggctaaacaattgtgtgggccactataatcatcgctacttcttctctttctgctttttcatgactctgggctgtgtctactgtagctatggaagttgggaccttttccgggaggcttacgctgccatcgagacttaccaccagactccaccacctaccttctcctttcgagaaagaataactcacaagagtcttgtctacctctggttcctgtgcagttcggtggcactggctctgggtgccctaaccatatggcatgccattctcatcagtcggggtgagactagcatcgaaaggcatatcaacaagaaggagagacgtcggttacaggccaagggcagagtatttaggaatccttacaactatggctgcttggacaactggaaggtgttcctaggtgtggacacaggaaggcattggctgacacgggtgctgttaccttctagtcacctaccccatgggaatggaatgagttgggaccctcctccttgggtgactgctcactcagcctctgtgatggctgtgtgagccacaacttgaacattgtttgatgcttgttatgtctctc

SEQ ID NO: 5863 - DNA, 1133 bp, Cricetulus griseus
gaagctggacatctggcgaccgcggggtcctaaggtggccaccgctttccgcacgttgcttttcagcgtcctccttctcaccttaaggccgccgccatgaaggattcgctggtgctgcagagccgtgtctcggcgcacccggactcccgctgctggttcctggcctggaaccccacggggaccctgctggcctcgtgcggcggcgaccgtaaaatccgcatctggggcaccgagggtgacaactggatttgcaagtctgtcctttctgaaggccatcagcgcactgttcggaaagtggcctggtccccctgtggaaattacctggcctctgccagctttgatgctaccacttgcatttggaagaagaaccaggatgactttgagtgtgtaaccactcttgagggtcatgaaaatgaggtcaagtcagtggcttgggcaccatctggcaacctcctggctacctgcagcagagataagagtgtgtgggtctgggaagttgatgaagaagatgagtatgaatgtgtcagtgtcctcaactctcatacacaggacgttaagcatgtggtttggcacccaacccaggagcttttagcttctgccagctacgatgatacagtgaagctgtaccaggaagaaggggatgactgggtctgctgtgccacccttgaaggtcatgagtccactgtatggagcttggcctttgaccccagtggccagcgtctggcatcttgcagtgatgaccgtactgtgcgcatctggcgccagtacctaccaggcaatgaacaaggggtggcttgcagtggctctgaccccagctggaaatgtatctgcactttgtcaggcttccacaccaggaccatttacgacgttgcttggtgtcagctgacaggggccctggctacagcctgtggggatgatgccatccgagtatttgaggaggatccaggctcagatccacagcagcctaccttctctctgacagctcatctgcatcaggcccattcccaggatgtcaactgtgtggcttggaatcccaaggagccagggctcctggcttcttgtagtgatgatggggaggtggccttctgggagtatcaccagactgcaggcctctgagctatagcttgacttgg

SEQ ID NO: 5864 - DNA, 1133 bp, Cricetulus griseus
acctaacaatgttagaccttttcaaagccatgcatgagcctaaagaagagaaagtgtgtagtactgctgttcttatttggaggtgtataatgaacagaatcatgacctcttgacaaatttggggccacttactgtccaggaagatgcccccaaaaggagtggttgttcaaggtctcactttacaccagcccaaatcctcagaggaaatattacagctactaggcaatggaaacaaaaacaggacacagcatcccactgacatgaatgctacatcttctcattcccatgctgttttccagatttatttgtgacaacacaaataagaatcaatcaaaatatctgtgtagccaaaatgtcactcattgacctggcaggatctgagcaagccagaacttctggtgctaaagggacatgatttgtagaaggcacaaatattaataaatcctgtttagcccttgggaatgtcatcaatgccttagcagatacaaaaagaaggaatcagcatattcctttacagaaatattaagcttgctcgcttattgaaggattctcttggaggaaactgtcaaactgtaatgacagctgctgttagaccttcctctttgttctctgatgacacatataacactcttaagtatgctaatcatgcaaaagtcaattaaacctttaaagagtgatgtccttaattatgtaaagatctgtaatgtgcagaaaacagagattttaatgctgaaagaaaaactaaaagcctatgaagaacagaaagccttgactgacaaaaacaacagtgtaaaatcagtacatcaaacactcaagacaaagaaattaaaagacttcaagaaattcggaaatgcttgttccagagtcgagaagaaatcaggcaagaatatctaaagttagaaatgttgcttaaagtaaatgaactcaagtcattctatcaacaacagtgccatcaccaaatagagatgaagcattcagaagacaaagtagaaaaggccacttgctgtaattttaaaaaaaaaaaaaaaaaaaaaaaaaaaaaaaaaaaaaaaaaaaaaaaaaaaaaaaaaaaaaaaaaaaaaaaaaaaaaaaaaaaaaaaaaaaaaaaaaaaaaaaaaaaaaaaaaaaaaaaa

SEQ ID NO: 5865 - DNA, 1133 bp, Cricetulus griseus
  modified_base (33)..(33): a, c, t, g, unknown or other
  modified_base (37)..(37): a, c, t, g, unknown or other
ccggtcgcggcgggagcgtgcgtcgctcgcacnggcngcgaggaggaggggcggcggcgcgagtcatggccggggacagcgagcagaccctgcagaaccaccagcagcccaacggcggcgagcccttcctgatcggcgtgagcgggggcacggccagcggcaagtcttccgtttgtgccaagatcgtgcagctcctggggcagaatgaggtggattaccaccagaagcaggtggtcatcctgagtcaggatagcttctatcgagtcctcacttcagaacagaaggccaaggccctaaagggccagttcaactttgatcaccctgatgcctttgacaacgaactcatcttcaaaacactcaaagaaatcaccgaaggaaaacagtccagatacctgtgtatgactttgtctcccactctcggaaggaggagacggtcactgtctaccccgcggatgtggtgctctttgaagggatcctggctttctactcccaggaggtccgagacctgttccagatgaagcttttcgtggacacagatgcagacactcgtctctctcgcagagtattgagggacatcagcgaaagaggcagggaccttgagcagattttatctcagtacatcacattcgtgaagcctgcctttgaggaattctgcttaccaacaaagaagtatgcggacgtgatcattcctagaggtgcagacaatcttgtggccatcaacctcatcgtgcagcatatccaggacatcctcaatggagggctctccaagcggcagaccaatggctatctcaatggctacaccccttcacgcaagaggcaggcatcagaatccagcagccggccacattgacccccgtgccctgactccaaatcccagcccccagctccaagacacaggagggtcgagaggctttggtcatctgtacatacgcctcctgtgaaaattactgtatttaagaaaacagcgcggagatgaaatgccttgaccttccttgttttcctttttgtactttggaacagcaaatcaaacagaacttgaccccgagcttaagtgacaaactgtgccaactactactggtgatgcctaattatgaatccaacgtgtaaccagttataaatacacacatacatac

SEQ ID NO: 5866 - DNA, 1132 bp, Cricetulus griseus
acagacgctgacccatgaggttatcgtaccccactcaggctgggagcgagaacccaatgaagactacgaaagcccccgggaatgctgaagtggacaaacggtcttcaagaacacatcaggctgcctgaggaatgtgagctcagatggtgcagaggcccggcggcgactccgtgagtgcgaagggctggtggacgcgctcctacatgccctgcagtcagctgtgggcaggaaggacacagacaataagtcagtggagaaactgcgtgtgcatcatgcggaaaggctttgagctgctgtaccagcctgaggtggtacgtctctacctctcactccttacggagagccggaacttcaacaccctggaagccgcagctggtgccctgcagaatctaagtgccggcaactggacgtgggccacgtacatccgcgccacggtgcgcaaggagcgtgggctgccagtgctggtagaactgctccagtcagagactgacaaggtggtgcgtgctgtcgccattgcgcttcgcaacctttcactagaccagcgtaacaaagacctcattgggagctatgccatgacagagctggtgcggaatgttcgcaatgcacaggcacctgctcaccctagtgcccacctggaggaggatacagtggtagccgtgctcaacaccatccatgagattgtgtccaatagcctagacaatgcgcgttccttctgcaggcccgtggtgtgcctgcactggtggcactggtggcctccagccagtcagtgcgggaggccaaggcagcgtcgcacgtgctacagacagtgtggagctacaaggagcttcgtggagcccttcagagagatggctggaccaaggcacgcttccagtctgctagcactgccaaaggacccaaaggaatgccaagtcctgggggctttgatgacagcacactgccactggtagacaagaaccttgatggggagaagtcagccacccgagatgtgattcccatggatacacttggtccagatgggtatgccacaattgatcggagggagcggaggacactgggcagtgactccacaggggagacctctgagaaggaactgttgaacctgaaaaaaaaaaaaaaaaaaaaaaaaaaaaaa

SEQ ID NO: 5867 - DNA, 1132 bp, Cricetulus griseus
  modified_base (1104)..(1104): a, c, t, g, unknown or other
aacagtatgtttcctgtcagtccatgctgttgtggggcttggtatacgaaaaccaggcttctccccttgcttttgaagtaaccccaggcctgacatgtaactgattctgctcaggactttagctgagtaaagagactacaaaaagtctctttagagataacaagggagaaggagaaatcacgtgtgaatttccaagttttagttcattctcagtgtagagttttcttttaaatcaaactagcaccagaggtcttgagaatgccaaacaaatattttttatcactctggaaatcattgcctttgcatggaaaattaaattcagggaccatgaatttagtgtgaatgtctgagaaggggctgaggttttgttttattttgcttttaacaattcatttggtctgaaaaaagcctgaatgttggtgtgtgacactgaggtggcttggggctgcctgtggctgttagcggacaggtggcaggctttagcaatatccagttttgatcagttgcattaggtacagaattttgagtgacggtgaaaattgttgtctttggaaagcacaaaagaaacctggaaaggcgtttcggctcaggtagctacccagaatgtgtgtgatttgtacgtcacagctgtctgcagagaaagcagctgcccaaactactatttacattcccagatgacgagagcaaatagcttttcatggccttgcgtatttgggggcccttttctctgtcctgaccccaggtgtggatgaaattggaaatgattcctctgtgagaagtgtatccccggcgcagcagagtgtctttcacaaatgcagtggaaccgaaggaggttcccaagtcacttgctgtgtgctgattgagtgaagttccagaaaaatctaactgtctttcgtccacgttatcttgatttttaaattgaataaaaagaaaacaaactgtcaagcaagttatatgacaactaacaacattgcactttctgtatatgaaatcaatatttaaataacttattttctccattgctgttcttaaaacattagtaagtagctgtaatataccaataccaatacgttcttgcaattgcttcagcccaagaaagctgtntattgtttaaaaattagtaaaaaaaaaa

SEQ ID NO: 5868 - DNA, 1132 bp, Cricetulus griseus
gccagctgccacagtttaccagtcctgagctagaggccccatacagcagagaggaggagcgacagcgactgtcagacttgtatcaccgcctgcatgctcgcctccatagcacctccggccctgcgcctcatttaccacgtggctgagaaggagacactgctggcctgggtgacctccaaatttgagctctatacttgcctgagccccctcgtgaccaaggcaggtgccatcttagtagtgacgaagctcctgcgctgggtgaggaaggaagaggaccggcttttcatccgttacccacccaagtattccacaccaccctccacctcagtggaccaggcctccgtgggcagatgggcaagatctcagggtttgcccacaaatgggagaagggtgacagcagctaggggcacaggttgcactctgagccccctcatgcacctccctccacatctaggaaggtcaaaagcctcctctgccctctgtctcacctccttaaataacaatgccacacaccctccatcattagctggcctctccacgcctcctctaagcagcacaggttgccaccctgtccatcttccaagcagacctgagactgggctgaggctgccctcaggataggggtggtaacccacaagggctctagaatttggaatgcagggctagcctatgcttaaaaccagcctagggctcttctgtggcacatgcgcagatgcccctcattgggaaatggctgcggatctggagcctttgatggcagagtggctgggagctgagaagactgaggaaacccgaggtaatgagggcccacagggtggaagggagagaggctttggcccattataataatcaagagtttaattttttagaaaaaaatgtttttaccctattgaaatttttaacttccacacagtggcaataaataatatacgtgttcttatcaccaccttctgttcctgcatgccaggcctgtcgctacatgaccaaaacatggggaggggacgtcttgccagacctgtccattcagattccaaaacaatgggtgtgaccttccagagcaagacctgcagtttccctgggcacctgaaacattgcttggtgcttggtacacagtgatttttcttttcttttc

SEQ ID NO: 5869 - DNA, 1132 bp, Cricetulus griseus
cccctctccaatgggctcagttttgctgaataatcacgtgtgaatcaaggggcgggcttttggcaggccgaccttactagtatttactaccaagctctactctagattaaccatcccagtccttctgtcagcctccgatgccatcatgcagcctgattaggagcaaaggaaagggggaaaggagaagcaactaatcgtcttttcccgatcgtcaggaccctaaagaatggccgagccttgggggaacgagttggcgtccgcagctgccaggggggacctagagcaacttactagtttgttgcaaaataatgtaaacgtcaacgctcaaaatggatttgggagaactgcgctgcaggttatgaaacttggaaatccagagattgccaggagacttctactcagaggtgctaatcccaatttgaaagaccgaactggtttcgctgtcattcatgatgcagccagagcaggtttcctggacacggtacaggctttgctggagtttcaagctgatgttaacatcgaagataatgaagggaacctgcccttgcacttggctgccaaagaaggccacctccctgtggtggagttccttgtgaagcacacagccagcaatgtggggcatcggaatcataagggggacaccgccttcgacttggccaggttctatggaagaaatgaggtcattagcctgatggaggcaaatggggtgggggaagccacaaatccacagtgagcgtgggggggagggctttcccacattgcctttactttgtcagttagttggttggctgtcctgactggcttactatcacttgttaaaataaataagattttgttttgtttcttattttaagcagctggttaaagtctttgaaattgtctaattggaaatctcactacaagtttatgaaatatttaaacatccttttcactgtcaaaaactctgatttctaacatgtaattgcaaatagctatgcctttcttctggatattttatctatgattttttttttctttgcttaccctttgccacactcagaatcttacctgaagtctttgttttaaaaattctttgtcctgatgcatcttttgcctaattaaaactttttcataagaggaaaaaaaaaaaaaa

SEQ ID NO: 5870 - DNA, 1132 bp, Cricetulus griseus
ctggagttaacaaagacagagatgttgaaagaatccatggcagtggagttaacactcttgacattgagcctgttgaaggaagatacatgttatcgggtgggttcagatggtgtgattgtactctatgaccttcgagaactccagcagacaaccctattacacatgttaaagcagtgtgttccgttggcagaagccatccagatgtccacaaatacagcgtggagactgttcagtggtaccctcatgacacaggcatgttcacatccagctcattcgataaaactctgaaagtgtgggatacaaatacattgcaggctgctgatgtgtttaattttgtaagaaacagtttatagtcatcacatgtctccagcagccaccaagcactgtctgatagcagttggtactagaggacccaaggtacaactttgtgatttgaagtctggatcctgttctcacattctccagggtcacagacaagaaatactggcagtttcgtggtcaccacgccatgactatatcttggcaacagccagtgctgacagtagagtgaatttatgggatgtgagaagagcatcaggatgtttgctcactcttgatcagcataatgggaagaagtcacaggctgtggaatcagcaaatactgctcacaatgggaaagttaatggcctatgttttacaagtgatggacttcacctgctcactgttggcacagacaaccgaatgaggctctggaatagctccaatggggagaacacactggtgaactatgggaaagtttgtaatgacagtaggaaaggactgaaattcacggtctcctgtggctgcagctcagaatttgtttttgttccatatggtagcaccattgctgtttatgcagttcactcaggagaacaactaactatgcttaagggacattataaaagtgtcgactgctgtgtgtttcagtctaatttccaggaactttacagtggtagcagggactgtaatattcttgcttgggtaccatctttgtatgaaccaattccagatgatgatgatgaagctacaactaaatcccagttgaatccagcatttgaggatgcctggagcagtagtgatgaggaagggtgactgccagcccttgctccttgtc

SEQ ID NO: 5871 - DNA, 1132 bp, Cricetulus griseus
acttctccaagacactcttcttggacctggtagagctacagagtggcctgatccagggagaccacagtgtcaggcaggcagagcttggacgtgagatccatgcactggcatcggctggcaagcccctagcctcgtggacagctcaacgaggaatccaggagtgccgtgaagcatgcgggggacacggctatctgcacataaatcggcttggtgacctcagaaatgacaatgatccaaactgcacctagtggactttctggaagcgtatcctggaatcttgggccagaagttcatgggctccagcaaagcagactggctggactccgcagctctcctggcagcataccactggcttgtctgctacctgctccaaggaagtcatcagaaattctgtcaagagaaaaagtctagaggcagtgactttgaagcaagaaaccacagccaggtgtactactgtcggcccctggccctggtcttcttggagctcactgtggtgcagcgattccacgtgcacacacacagctccagcgtgcctccatctctgcaggctgtgcttaagcggctcagcacactctatggcctgtggtccctgagccagcatacagccctgctctaccaaggtggctacatttctggtgaacaagcaggaagagcgatggaggatgccatcttggcactgtgtatgcagctgaaagatgatgcggtggccttggtggacgtgatcgccccttctgactttgttctgggctccccaattggcaaagctgatggtgagctctataaaaacctgtggtcagctatcctgcagcaggacggtgtgctggagcgtgccacctggtggcctgagttcactgccaacaaacctgtggccaacaggctgaagtcccagctgtagacgtggtgggagaggtggccacagcagaagcagccgatccagtggcctggacccagactccactcctcagtcccgagggtgaggctggtggcatgtgaaacaggcctctgggcaggggccacattattaagacaaacttgtaaagggcccttaaaaatgaaacatttgtaaacagcagtaaaaacttgaaaaattgcaataaagtgttgaaattgaaaaaaaaaaaaaaaaaaaaaa

SEQ ID NO: 5872 - DNA, 1132 bp, Cricetulus griseus
gcgatggcgaacctgggtcgcctgctgtgcgtcctgggtttgctgctgtgcgggcccgcgagccccgggctgtccagactttacgaaagcggcatcaagaagcccatcatcggaatattaatgcaaaaatgccatacgaaggaaatgagaaagttgggaaaatactacattgctgcatcctatgtgaagtatatagaggctgcaggtgcaagagttgtacccataaggattgatcttacacaggaagactatgctgggcttttcagatctattaatggaattctttttcctggaggaagtgttagcatattgaattcagattattcccacgtggccaaaatattttacagcaaggccatagagagttatgatgatggcgaccattttcctgtgtggggaacatgtcttggatttgagacgctctcctttctggttagcggagagaacttgctaacgcttacagacacggtatcaatttcattgcccttgaacttcactgaaggtgccttacagggccgaatgttccagagttttcctgctgagttattggtgtcactagcattagaacctctgactgcaaattttcacaaatggagcctctctgtgaagaactttacagaaaacaaaaagttaaacaagtttttcaatatattaacaacaaatacagatggcatcacagagttcatttcatccatggaaggacgtaaatatccaatctatgctgtccagtggcaccctgagaaagcaccatatgagtggaaaggattgaaaggcatttcccatgcaccaaattctgtgaagacggcattttacttagcagatttctttgtttctgaagcccggaaaaacaatcatcgctatgagaacgtatttgaggaaatgcgatccttgatttatcaattcaaaccagtttatactggaaatatttctacatttgagcagtgttacttgtttcgctgagagtcttcaatatggtaacaaggcaacttagagcaattcagtgattgaattgctaactcactgctaatggcaacatgaggaagccatacagattccttttctgtacctggttctgattcttcacttagtacatgattatttttatcatatttgataactccacaatgaaaaa

SEQ ID NO: 5873 - DNA, 1131 bp, Cricetulus griseus
  modified_base (58)..(58): a, c, t, g, unknown or other
ctgtacccagacattcttgatctctggcacaagtgtcgccagtagtattcggtgtatnagaagagctgtcctgagcgagactttcagggtctctgatccagccactcgccaaatgctggttggtacgattctccatgaagtctttcaaaaagccataagtgagagctttgccccagaaaagctgccggagcttgctttccaaactctccaagaagtaaggcatttgaaggaaatgtatcgattaaatctgagcccagatgaaatgaaatgtgaagttgaggagttttttgtcgctttgggttctagtctcataaggtccatgcagatatccagaagtttacagagagagctctgggcatgagcgagagcttgtttaagcgactggagcagaacaagaacgccgttgtgcagttgacagtgcagtacagaatgaacagtaagattatgtccttaagcaataagctcacatacgaagggaagctggagtgtggttcagaccgagtggccaatgcagtgataaccctgcccaacttcaaggacgtcaagcggagcctggagttttctgccagttattctgataacccctggctggctgcagtgtttgagccagacaatcctgtttgtttcttaatacagataaggtcccagctccagaacaaactgaaaatggtggtgtgagcaacatcaacagaagccagactggtcgtctttctaacctcggtttttattaaggctggctgcagcccctccaatattggcatcattgcaccatacaggcagcagctaaggatcatcaatgacttgctggcatgttcttctgtcgggatggtggaagtcaacacagtcgacaaataccaaggaagggacaagagtctcgtcctggtgtcctttgttaggagtaataaggatggaactcttggtgagctgctgaaagattggcgacggctcaatgtggcgataaccagagccaaacacaaactgatcctgctgggcagcgtgtcctccctgcagcgcttccctcctttggagaagctcttccaccatctgaacacagagcagctaattgtggaccttccatcaagggagcacgagagtctctgccacgttctgggtgattttcaaagagaatga

SEQ ID NO: 5874 - DNA, 1131 bp, Cricetulus griseus
cttcaccattcacggtggtagtgaggcctagtccccagccatggagagcgctctcccggcggccggcttcctgtactgggtgggcgcgagcactgttgcctacctgaccctgcgtgtctcctactcactcttcagagccttccaggtgtggtgcttgggcaacgagtcctgggtcggcccgctgctcggagaatgggcagttgttacaggtggcactgatggaattggaaaatcatatgcagaagagttggcaaagcgtggaatgaaaattgtcctaatcagcaggtcccaggataaactggatcaggtttccagtgagatcaaagaaaaattcaaagtggaaacaaggaccattgctgttgactttacattggatgatatttatgataaaattaagacaggcctggctggtcttgaaattggcgttttagtgaacaatgtgggtatgtcatacgagtatccagaatactttttggaagttcctgacttggacaataccatcaagaaactgataaatattaatgttctttccgtttgcaaggtgacacgcttggtgctgcctggcatggtagaaaggtctaaaggggtgattgtcaacatctcatctgccactggcatgctcccaattccactcttgaccatctactctgcaaccaaggcttttgtagatttcttctctcagtgcctccatgaggagtataagagcaagggcatctttgtgcagagtgtcctgccgtactttgtagctacaaaactggcaaaaatacggaagccaactttggataagccctctccagagacgtttgtgaagtctgcaattaaaacagtgggtttgcaatcccgaaccactggatatgtgatccatgctctcatgggttcaataaactcaatcttgcctcgttggatttattttaaaataaccatgggtttcaacaagtccttgagaaatcactatctgaagaaaaacaagaagaactaaatgttgatgggtcattgaaccgcttggccagattcttggcctgtatatattcttgataaaaccaggagtaatttgaagtttaatgtaaatgctcttgaaaggaacaaatcccagaatgacttagtaagtaaacatagaacccatctggccca

SEQ ID NO: 5875 - DNA, 1130 bp, Cricetulus griseus
gacagaaagatggcggcgcccgtggggcgtactctgttaggggcgactagaggctggcggcgtctcgacagtctctgggcaggtagcccgcgttctcgtggcctgtcccttgaggcagcgccgtcgggcagccggtctccatggcgcttgtggggcgccttgtgtctgcagcggccaccgctgatcaccaagccgctcaccccattgcagcaagagatggcggatctactacagaaggtggagacagagagaagtctgtattcagatcacgagcttcgtgctctggaggaagctaagcaactggcgaagaagaaagctgacctttatgatgatggccaagatgagcagggcgttacacttgtacaggacttagaagatatatgggagcaggcattcctacaattcaaacctggagctcgagtaacagaagctgataaaaaaaatgaccgaacctcgctgaatcgtaaactagacaggaaccttgtcctcctagtcagagagaagcttggggatcaggaactttggatgctccctcaagtacagtggcagcctggggagacccttcgagggacagctgagcgaatcctggccacactctcagaaaacagcatggaagccaagttcctagggaatgcaccttgtgggcactataagttcaaactccccaaggcaattcggacagagagtgacattggggtcaaagtcttcttcttcaaagctctgctgctcacaggagatgtccctcagactgggaagaagtcccatcatgtgtgggccagtaaggaagagctaggtgactatctgcagcccaagtacctggctcaggtcaggagatttcttctggacttctgatggatgcagcagctgcctgtggacgatgcacacacaagtcaagtgctaggacctcagaaacaatgctgatgcccatttacagggaccgtcaagcaccaaatgaaattctgtgaattaaatgtgtttgttattgtgtagaaaaaaaaaaaaaaaaaaaaaaaaaaaaaaaaaaaaaaaaaaaaaaaaaaaaaaaaaaaaaaaaaaaaaaaaaaaaaaaaaaaaaaaaaaaaaaaaaaaaaaaaaaaaaaaaaaaaaaaaaaaaaaaaaaaaaaaaaaaa

SEQ ID NO: 5876 - DNA, 1130 bp, Cricetulus griseus
acttaggtggcctgacttggtcgagggaagactaaaggaacggacaaagaaggggcggggcatccggagggctactgagagccccggaagtgcaattctcgcgggttcctcagagtcaggtctatctgaagccggctgacggcagctgggaacaccggtggtctgaggccaggcgtccaaaccggcgcgaccgtcgtgaccacctgccagtcgcatttctttgcttttgttgactccgtcttgaagtgagtcgtagacgagctgcgttcagcgtctacctggaaaacgtagcttgcttgtgtaacgccgagcggggcaaggtggcacttctcttataaggctgcttctcctgagagcagtcctggcttctaagactgccatccacataactctggaagagctgacgttgtctgcgtcctaacaaccctggacagaacccagcatgtctcaggccaccaagagaaaacacgtggtgcaggaggtgctgggagagcacatggtgccctcagaccaacagcagatagtgaaggtcctgaggactcccggcaacaatctgcatgaggtagagacggcacaagggcagcgcttcctggtgagcatgccctccaaataccgaaagaacatctggatcaaaagaggggacttcctcattgttgaccctattgaagagggagagaaagtgaaggctgagatatcttttgtgctctgcaagaaccatgtccgttctctgcagaaggagggccactggcctgaggccttctctgaggtagctgagaaacaaaacagtatgaacagacagagtcagccagaactgcctgctgaaccacagctgtcaggagatgagtcaggttctgaagatgattctgacctctttgtcaacaccaatcacagacaatatcatgagagtgaggaggagagtgaagaagaggaagaggacgaggacgaggaggcagcctgagccccacggacccacttctctacttgctcagggactaccccttggcttttctgggcttggacattcccagggtgccctgcagatcttttcttttggatggggacaaggcatggcccctttctgaactgacctagaagaattaaacccctggtgggtaatgacttgacactgg

SEQ ID NO: 5877 - DNA, 1129 bp, Cricetulus griseus
ggaagaagcctgtggtaatgggtgttacatgagacatccggtatcaatggtaaaagtagaacagtcacctgcaccagcgactcccaagagcatccaccgaagacaccgggagacatttttcaagacccctggcagtcttggagaccccgttttcaggagaagagaaaggaaccaatcacgaaacactagctcagcccagagacggctagaaatctcaagcagtggacctgactaacctggtgcttcagcggatggagtgatctcagcacctgaaggtccctgtgtcccagacaatgtcctaaagtggagcacaggccatcccggtcctcagcttgtgtccttgctctctggcatccactggttctgctaacttcccaatatcatgagtcagctatttcctgaaagtaattattactaattatgaatttaataccagctagttcctcttttcttcctgtggtcttttttctctttagacggcttagatctagagtcttaatataaggctacattttctctgtatttctgtgccctgtgaaataccatataaaagaataaaaaatattaatttaagagactctgggagtctgatcaaagtagctttttatatgaagtacaggacaccttttaatcttgctaccctaacaacagctttttgaaaacttgagatgagtggccagattttaatatgttggctacttatctaaaatgtttatcaaacactaaagcttctaaagttggtcggcactgagggggtgtgctgccttgagccacgctgtccagggtttgtgaaacccttgcgttctggtacaagagtttggggtataactttatacttgaacctacctaccaagtttacattgctcaatgtaaggtgctatttctgtatttaaataacttggatgtaaagctgctttctgcttaccttattgcactgctagctttttgtagacgttaactttattgctgcttactgctttgttttcatgggttttggctctgttctttcctaatggctgtattatctgtagccaactacttgcaactttactacatgtaaaccaatcttcccttttagaaaatactaagctttataaagtagcaatgaaaataaaggcatttagtaaga

SEQ ID NO: 5878 - DNA, 1129 bp, Cricetulus griseus
tccagactttggctcagggacgattggaagtgggagatggagatgccagaggaatccaccaatagtgggcattcgttacccccggtttatatttatagtcccgagtatgtcagcatttgcgactccctcaccaaggtccccaaacgggccagtatggtacactctctgatcgaagcatatgccctgcataaacaaatgaggattgtgaagcctaaagtggcctccatggaggagatggcctccttccacactgatggctatctgcaacatctccagaaggtcagccaagaaggtgatgaggaccatcctgactccatagaatatggactaggttatgactgcccagccacagaaggatatttgactatgcagcagctatagcaggagtgacatgtctgatgttggcctggaaagggacggtactacagtgtcaatgtgcccattcaggatggcatacaggatgagaagtactatcacatctgtgaaagtgtactaaaggaagtataccaggccttcaatcctaaagcagtggttttacagctgggagcagataccatcgctggagatccaatgtgctcctttaacatgacaccagtggggatcggcaagtgtctgaagtatgtccttcagtggcaattggccactctgattttaggaggaggaggctataaccttgccaacactgctcgttgctggacatacttgaccggggtcatcctagggaaaacactatcctctgagatcccagatcatgagtttttcacagcatatggtcctgattatgtgctggaaatcacgccaagctgccggccagaccgcaatgagccccaccgaatccagcaaatcctcaactacatcaaagggaatctgaagcatgtggtctagttgacaaaaagagaccagctttgcagcgctgggaagcagtgcctataatgaagacagtgtgttgatgcaagcagtttgtggaatttgtgactgcaggggaaatttggaagaaattacttcctgaaaattccaaggggcaccaagtggcagctggcctcctggggtgaggaggcaggcaccccagagccaggcctagggggaagagcaaggtatccagcatttaaagtgtttattttaaaacaca

SEQ ID NO: 5879 - DNA, 1129 bp, Cricetulus griseus
gatgcccgccccaacgtgctcctcttgccacgcggcccgcgctcgccctccgccgcccgcgctcggggcaggcgttatgcggctcctgcttctgtgccacctttgaggccgaagtgctgcacaccgtgctcgcagggcacctgctgccccgggtgcagtggtggccgtgggcgcttcgggcggcaaggactccacagtactggcacacgtgctgcgcgagctcgcgccacgcctgggcatcacgctacacctggtggccgtggacgagggcatcggcggctaccgtgacgcagcgctggaggccgtgagcagccaggcagcgcgctgggagctgccgctcactatcgtggcctatgcagacctgttcgggggctggacgatggacgccgtggctcgcagcactgccggctctggccgcagccgctcctgctgcaccttctgcggggtgctgcggcggcgtgcactggaggagggcgcgcgcctcgtgggagcttcacacatcgtgacaggccacaatgccgacgatatggcggagacagtgctcatgaatttcctgcgcggtgatgctgggcggctggcgcggggcggagtgctgggctctgcgggcgagggatgcgctctcccgcggtgccggccactgcagttcgcttcgcagaaggaggtggtgctgtacgcgcacttccgccgcctgcgctacttctcggaagagtgcgtgtatgcgcccgaggctttccgtggccatgctcgagacctgctcaagcgcctggaggcagctcggccatcagcagtgctggacctcgtgcactcggcggagcgcctggctcttgccccggcggctcggccccctcctccaggcacctgttctcgctgcggggcgttggccagccacacgctctgccaggcctgtgcgctcctggatggcctcaatcgaggcctgccacgcctggccatcggcaagggccgccgcgtgttggaagacaagcctccactgtcggggaacccaagcagtgaccctgcagcttcacagggaccttgcacctgtgagcaatccagagatggagccaccctgtgcggggatggaggggaccgggcagaagccacctgtgtcctgcagagtgaccttagcccc

SEQ ID NO: 5880 - DNA, 1129 bp, Cricetulus griseus
cgcagggtgccgcgccagccgtgctgtcggccagtgggactgccggtggccgtagcaggatggagaagctgcggcttttgggcctccgctaccaggagtacgtgactcgtcacccagccgccacggcccagctggagaccgcagtgcggggcctcagttacctgctggcaggtcgcttctccgattcacacgagctgtctgagttggtgtactctgcctctaacctgcttgtgctgctcaatgacgggatccttcggaaggagcttcggaaaaagctgcctgtgtccctgtcccagcagaagttgctgacatggctgagcgtgctggagtgtgtggaggtgttcatggagatgggggctgccaaggtgtggggtgaagtaggccgttggctcgtcattgctctcatccagctagccaaggctgtcctgcgcatgttcctgctgatctggttcaaggctggcattcagacctcaccccccattgttccactgaacagggagacccaggcgcagcccttggatggtgaccacaacccaggcagccaggagccatcatatgtggggaagaggtcaaacagagtggtgcgaaccctccagaacagcccatccctgcactcacggcactggggagccccccagcaacgggaaattcggcagaaacagcagcaggaggagcttagcacacccccaacacctctggggttgcaggagaccattgcagagtctttgtatattgcccggcccctgctgcacttgctcagcctgggcttctggggtcaacggtcatggacaccctggctactctctggtgtggtggatatgactagtctgagtctcctgagtgacagaaagagtctgacccgaagggaacggctagagctgaggcgccgcacaatcctgctgctgtactacctgctacgctccccattctatgaccgcttctctgaagccaagatcctcttcctgctccagctccttgcagaccatatccctggcgttggcctagtggcaaggccgctcatggactacctgccctcctggcagaaaatatatttctacagttggggctgacagacatgcaggagtgggtacagagtgggttatatggtgtgctctgttgctctgggcag

SEQ ID NO: 5881 - DNA, 1129 bp, Cricetulus griseus
ggggcagggcaaataggtcctctaccaggaccccggaatcccaaaatccagcctcccacctccacagaacagcctgttaccccaaaccccacacctcaggccactcggggcaggccacataggtcttccatccagaccccagaaccacttactcccactggtcctgacctccagcctcccacctccacagaacagcctgtcatacctaaacccacatctcggctgctcgggcaggtcacgtaagtcttctaccaggaccccagaaccagctgtccccactggtcctgacctccagcctcccacctccacagaacagcctgtagtgaaggaagagcctcaggagatagcaattccaacacccggcaaaagaaagagggaccgtgtagaggatgagacccagggaaacccaagtcggagccggcgggctaaacctaaccaagaagcagcagcagccccaaggtactgttcacaggagttgtggagttctcggggagagcgtgcagtcctggctctgggtggcagtctagccagctcagtaaatgaggcctcccacttggtcactgatcgcatccgaagaacggtcaagttcttgtgtgccctggggaagggcatccctatcctctccctgaactggctgtatcagtccagaaaggctggtcacttcctgccacctgatgactacttggtgactgaccctgaacaagagaagaactttagcttcagccttcgggactccctgagccgggctcggcaacaaaaactgctggagggctatgagatttacgtgacccctggagtgcagccacccccacctcagatgggcgagatcatcagctgctgtgggggcaccaacctgcccagcatgccccagtccctataagccttaccgagttgtcataacttgcactgaagacctacctcgctgcgctatcccatctcgactggggctgcccctctctctcctgagttcctcctgactggagtgctaaagcaggaatttcttaagacaggttctctctgtgtagcctggctgtcctggaactctgtgtagaccaggctgacattgaactcacagagatctgcctgcctctgcctcccgagtgctgggattaaaggcgtgtgccaccac

SEQ ID NO: 5882 - DNA, 1129 bp, Cricetulus griseus
tagtccgagtggagcgggcgagccgagcggttgtgtgttcgcgtctcggaaaccggtagcccttgcagcatggctgaccaactgactgaagagcagattgcagaattcaaagaagccttttcactatttgacaaggatggtgatgggactataacaacaaaggaactggggactgtgatgaggtctcttgggcagaaccccacagaagcagagctacaggacatgattaatgaagtagatgcagatggtaatggcacaattgacttccctgaatttctgacaatgatggcaagaaaaatgaaagatacagacagtgaagaggaaatcagagaagcattccgtgtgtttgataaggatggcaatggctacattagtgcagcagagctccgccatgtgatgacaaacctgggagagaagctgacagatgaggaggtggatgaaatgatcagggaagcagatatcgatggtgatggtcaggtaaactatgaagagtttgtacaaatgatgacagcaaagtgaagacattgtacagaatgtgttaaatttcttgtacaaaattgtttatttgccttttctttgtttgtaacttatctgtaaaaggttttcccctactgtcaaaaaaatatgcatgtatagtaattaggactcgattcctccatgttttcttcccttatcttctgtcattgtccttaaaccttactttagagaattgatgaagtaacatgttgcatgtggcttactctggatatatccaagcccttctgcacatctaaacttagatggagttggtcaaatgagggaacatctgggttatgccttttttaaagtagtttttaggaactgtcagcatgttgttgttgaagtgtggagttgtaactctggactgtggacagtcaacaatatgtacttaaaagttgcactattgcaaaacgggtgttttatccaggtactcgtacactatttttttgtactgctggtattgtaccagaaacattttcttttattgttacttgctttttaaactttgtttagccacttaaagaaaaatctgcttatggcacaatttgcctcaaatccattccaagttgtatatttgttttccaataaaaaaaattacaatttacccaat

SEQ ID NO: 5883 - DNA, 1129 bp, Cricetulus griseus
ttttgaggagagcggaagtggagtcacttagaggtagtcagaatggaaagaaaagtgagcagaatctctcttgcttctgaacccaacataacttactttctgcaagtttcttgggaggaaacagtgggatctggttttgttattaccctgactgatggccattcagcctggactgcgacagtttctgaatcggagatttcccaagaagctgatgacatggctatggagaaagaaaaatatgctgatgaattgagaaaagcattggtttcaggatcaggatctgacacatacaaattcatcttttctagagagtcgtgccatttctcccttgagaaagaactgaaagatgtctcatttaggcttggttccttcaacctagacaaagttccaaactcaaccgaagtcattagagaactcatttgttactgcctggacaccattgcagaaaaacaagccaaaaatgagcacctgcagaaagaaaacgataggctcctgagagattggaacgatgttcaaggccgatttgagaaatgtgtgattgccaaagaagccttggaggctgatctgtatcaaagatttatcttggtgctgaatgagaagaaaacaaagatccgaagcttgcataagttgttagatgaaatccagcagctggagaagaacttgaaacctgaaagggaaactaaatgttctgaaaaaacaactgaccaagatgcaatttatgatggaagtactgatgaagaagctggagcttctgtgttggctgaagccgctgtttgtaaagaagattccttattttcaagtcctgatgtcactgacattgcacccagtaggaagagaagacatcatatgcagaagaatcttgggacagaacccaaaatggctccgcaggagcagcagctgcaggggaaggaaaggcttgcctcctcactgcctcacaccttgaaagaggagcacgaacacacatccgctggaaacatgtctttagaaaccctgagaaacagcagcccagaagatatctttgattagatacaaaatctagaaccagacttggtgttcattaagctacattctttatccagttctttctaatgaagacaggctttcagcttagtagcaatggttactatgt

SEQ ID NO: 5884 - DNA, 1129 bp, Cricetulus griseus
gaagaatgagagtttgtggagtgtggcgagaggggttatcagaatgctgcggaaaaactacggctatgtcagagtggattttgcacaaccgttttccttgaaggaatacttagaaagccaaagtcagaagccaacgtccgctcccctttctctggagcaagctctgctaccagccattcttcctgcaaggcctaatgatgctgctgaaagtgaagacacgtccagcaatgagcccagaaacacagcagatgaggccttccgaagacggctgattgcaaacctgggcgagcacattctcttcactgctagcaagtcctgcgccatcatgtccactcacattgtggcctgcctgcttctctacagacaccggcagggaatccacctctccacattagtggaagacttcttcgtgatgaaggaggaagtcctagctcgtgactttgacctgggattctcagggaattcagaagatgtagtcatgcatgctatccagcttctgggaaactgtgtcacaatcacccacactagcaggaaagacgaattttttattacccccagcacaactgtcccatcggtctttgaactcaacttctacagcaatgggttcttcatgtctttatcatggaagccatcatagcctgcagcctgtatgcgtacgctgagagtgccacttactgtcttgtgaagaacgctgtgaaaatgtttaaggatatcggggttttcaaagagaccaaacgaaaagagtctctgttttagaactgagcggtactttcctacctcagtgcaaccggcagaaactcctggagtatattctgagttttgtggtgctgtagggatctcttggcacctatggcgagggaggagctgagtctgacccagagtggcaggtgtcgtggtgtgacccagcctgccttaccccgaggagacctccaggaagatgcgtgccttctgcccaccccatggacctgcgctcctcccaacacagtcacagtggcctgtgcagagcacttggggccggtgccatctgtgattcatgatcactaggttactaggtgaaatctcagtaagttattttggagttgattaaagattcacttttaagtagggacgagatttgtaaaaaaaaaaa

SEQ ID NO: 5885 - DNA, 1129 bp, Cricetulus griseus
agaggcaaggaggtcagcgtggtgcccaaaacatctgcctccactgactctccctggatgggacttgcaaagtacgcctggtctgggtatgtgatcgaatgtcctaactgcggtgtggtctatcggagccggcagtactggtttgggaaccaagatcctgtggatacagtggttcggactgagattgtacatgtgtggcctggaactgatggatttctaaaggacaacaacaatagctgcccagcgtctgttggatgggatgaacttcatggctcagtcagtgtctgagcttagccttggacccactaaggctgtgacttcttggctaacagaccagattgccccttcctactggaggcccaactcccagatcctgagctgcaaccagtgtgccacatccttcaaagaaaatgacaccaagcaccattgccgggcctgcggtgagggtttctgcgatagctgctcatcgaagacgcggccggtgcctgagcggggctgggggcctgcacccgtccgcgtgtgtgacaactgctacgaggccaggaatgtccaattagatgtgactgaggcgcaggcagatgatgaaggtggaacactgattgcccggaaggtgggcgaggccgtgcagaacaccttgggagccgtggtgacagctattgatataccactaggcctggtgaaagatgctgctaggccggcctactgggtgcccgaccatgagatcctgcactgccacaactgccgcaaggagttcagcgtcaaagctctccaagcaccactgccgagcgtgtggacagggcttctgtgatgagtgctcccatgaccggagggctgtcccctctcgaggactgggaccatccagtccgagtctgcttcaattgcaaataaaaagcccggtgaacctttaaaccccatccctcagtggaggcgagcctggctgtagacctgaaggcatgaaccacctcagggcagaggaccgagcatctctcagtaaaggctaatggacccgagtccattgcatttatttcagttaaaataatgactatctacctgtatctccatatatccatgttgaggggatttggagtgactgggctgcttcttaaataaataaatatatatatatata

SEQ ID NO: 5886 - DNA, 1129 bp, Cricetulus griseus
gctcaacagcctctgccctaagtatgagcttacccagaagaaacccttccctgattctgacatgaattcttatgcttgctgaaccccaactgctggcttccaggatcggtactagggagccctgaggagtcgctgctcaggagcagccagcccttgcgtccaccatgaactggagcgtctttgaggggctcctaagtggggtcaacaagtactccacagcctttggccgcatatggctgtccctagtctttgtcttccgagtgctggtgtacctggtgacagttgagcgtgtgtggggtgaagaccagaaggattttgactgcaacaccaggcagccaggctgtactaacgtctgctttgacgagttcttccccgtgtctcatgtgcgcctctgggctttgcagctcatcctggtcacatgtccctccctgcttgtggtcatgcatgtggcctatcgcaaggctcgagagaagaggtaccaagaagaagttggcaagggacacctttacctgtaccctggcaagaagcggggtggactctggtggacatatgtctgcagcctgttattcaaggccggcatagatattgtcttcctctacgtattccatgtgttctaccccaaatataccctcccttctgtggtcaagtgccatgcgacaccgtgccccaacatagtggactgcttcatctctaagccctcggagaaaaacatcttcatcatcttcatgctgatcactgccatcatctgcattctgcttaaccttgtggagctagcctacctggtgattaagcggtgttctgagtgcatggaatcgaggcgagcgctcactgcacacccagagcatgacccaaactgggtcaactcttccagcaaacagaaggacctcctagccggagacctcatctttctgggctctgacactcacccacctctcttaccagaccacccccgagcccacgtgaagaaaaccatcctgtgaagggtctctaggctggactagcagggtgagcatgaattggaaggttccagtgtttctcaagaatgtatctggtgggggggaggagctgagctggaactggagccaggcaaaaagggagacccccacagcttgggatccaattgtccctc

SEQ ID NO: 5887 - DNA, 1128 bp, Cricetulus griseus
tctcgcgcggcgcggtctcccggacgccagaccggccccggcccggatatggctcgtggacagcagaagattcagtctcagcagaaaaatgccaaaaagcaggctggacaaaagaagaaacaaggccacgaccaaaaggctgctgccaaagctgccttaatatatacctgcacagtctgtaggacgcagatgccagacccgaagaccttcaagcagcactttgagagcaagcatcccaagactcccctccccccagagctggccgatgtgcaggcatagagtggtttacaggtgaattcatgacacctttgactcttctactgtctcagaccttaggtaacaaacctgcagctgcttttttaaacaccactgttagatcagcagaaataaaggggctacagaaacactcatttttacgttccctctgggcttcatgcaaagagagttccgtgtaaatgtacagttgactctgatttggaaatctgaagaatcagtccattcttgttaattaaaatttttttacaaattgtaattatattgatgtttgaaaattgttccaattctttagtttgaattgaaccataatttttgagagaaattttaaaaattatttagttaattttgtgatcactgtctgtaattcagaataaagcctttcgatcttgtatttactgttgtgtaagcactaaagacaccatatttcagtctgtatctcggatagggaatagttgacggctctcccttagcacagggattgccagcatggtcctctttcgtgtttcagttaaatttgctgtaaggagatgacaactcaaacctttttgtcatttaattccgagattctttaacagacagatctgtttaaaaactgttacggtgtcttcaaaggtgatacaaaatatcgagagggatttgatttgtttgtattctgtattcgtgttagctgtcaaaaggaatggggttcacactaagcttgtttccatgctcacccccatgtttacgtgacacacttgggatctcatgtgtgctgtaatgtcttattaaagaagatgttaaaagaaaaaaaaaaaaaaaaaaaaaaaaaaaaaaaaaaaaaaaaaaaaaaaaaaaaaaaaaaaaaaaaaaaaa

SEQ ID NO: 5888 - DNA, 1128 bp, Cricetulus griseus
attgatagtgatggctgggtccgagatgtcactcagaggtatgacccagcctggatgaccgcaacccgcaaatgccgggttgacgctgagtggtgggctgagaccttgagaccctatcagagcccacttaaggaaagggagaagaaggaagaccaggagtttcaggcgaagcacctggaccagcctttgcccacctccatcagcacatacaagaaccaccctctctatgccctgaagcgccacctcttgaaattccaggccatctaccctgagacagctgcagtccttgggtattgtcggggagaagctgtctactccagggattgtgtgcatactctgcactccagggacacatggctgaagcaagcaagagtggtacggcttggagaagtgccctacaagatggtgaaaggcttctccaaccgtgcccggaaagcccggctttcggagccccagctgcatgactacaatgacttggccctctatggtcactggcagacagaagagtatcagccccctgtggctgtagacgggaaggtacctcggaatgagtttgggaacgtgtatctcttcctgcccagcatgatgcctatcggctgtgtccagatgaacctacccaacctgcaccgtgtggcccgcaagctaggcatcgactgcgtgcaggccatcactggcttcgatttccatggaggctactgccatccagtaactgatggttacattgtctgtgaggagttcaaagatgtgctgcaggctgcttgggagaatgaacaggacatcattgaaaagaaggagaaggagaaaaaggaaaagcgggtgctggggaactggaagctgctggtcagaggactgctcatcagagagaggctgcaactccgatatggggccaagagtgaggcagtagctccccatgcaaatgcaggaggtggactctcttctgatgaagaggaagggaccagctcacaagcagaagcagcaagagtcctggctgcctcctggcctcaaaaccgagaagctaaagaagagcagaagcctgagtactctaagatgacccggaagaggcgggctgcagaggcttcccacctcttcccatttgagaagctgtgaagtgagtgtccaccaggccag

SEQ ID NO: 5889 - DNA, 1128 bp, Cricetulus griseus
gaaatcctcccacgccatttgcaatgtccaacaagagcagcttcccttgccaaccccagcacagaaggagtctcgggaagaaaactggcaggagtggagacagagggatgaacagctgacatctgaaatgtttgaagctgatcttgagaaggcattgttgctgagtaaattagaatatgaagagcacaaacaggattatgaaaatgctgaaaatgcttcaactcagtcaaaagttataaataaaaaagataaaagaagaaccagcagggaaaagacaaacctctcacagtgtccctaaaagattttcagtgtgaagatcatactagtaaaaagacagaggaatcgaattcttctcagactttatcacatgatgggggattcttcaatagactggaagacgatgttcacaagattcttattagagaaaaagaagagaccaacttacagagtataacggaacagaccattgtcctgctcccgagcacaaccaggaagtggggtctgaaagatgggagaattgagagactgaagctcgaacttgaaaggaaagacgctgaaattcagaagctcaaagctgtcatcacccagtgggaggcaaaatataaagaagtaaaagcaagaaatggacaattgttgaaaatgctccaggaaggagaaatgaaagacaaggcagagatacttctgcaagtggatgagtcacagagcatcaagaatgagctgacagtccaggtgagttcacttcatgccgcattggaacaagaaagatctaaagtgaaagtattacaggcagaattagccaaataccagagcggcagaaaagggaaaaggaaccctgagtctgaccagtgtaggtgattactacagcagcctttgagatcagcacacaggactttcagaactttgcagaaatgtgtatatttaattctgtgcaactgctgaattgtgcagtttttgttgaaggaactaaaagcaactagctcactcatagtctacaattttatgttcttttggcttattaaaagaaaatatagaataccagcaggacttgattattgctttctgtccaaacttcttatgactttagtttttcatcagtcaataaaattaatttactcttccaaaaaaaaa

SEQ ID NO: 5890 - DNA, 1128 bp, Cricetulus griseus
ggctgccagctgaccagcacaccagtgacagccgccagcacggtgcagtttgtgtcggaggagacagtccctgccgcccagacccagaccaccacaagaaccatcagttcggagacccagaccatcacagtttcagctccagaattcgtctttgaacatggctatcaaacttacctgcccacggaaagcaatgaaaaccagacaaccaccgtgatctcgctccctgccaagtcacgtgccagaaagccctccactgcccctgtgcagaagagacttggctgctgctatccgggttgccagttcaagactgcctacggcatgaaggacatggagcggcacctgaagatccacaccggtgacaaaccccacaagtgcgaggtttgcgggaagtgcttcagccggaaggacaagctgaagacgcacatgcgctgtcacacgggcgtcaagccctacaagtgtaagacgtgcgactacgcggcggccgacagcagcagcctcaacaagcacctgcgcatccactcggacgagccggccctacaagtgccagatctcgcccctacgccagccgcaactccagccagctcactgtgcacctgcgctcgcacacgggggacacgcccttccagtgctggctctgtaacgccaagttcaaaatcagctcggacttgaaaaggcacatgatcgtgcactcgggggagaagcctttcaagtgcgagttctgcgacgtccgctgcaccatgaaggcgaacctcaagtcgcacatccgcatcaagcacacgcctgcaccagtcggagcacccggagaagtgccccgagtgcagctactcgtgctccagcaaggccgcgctgcgcgtgcacgagcgcatccactgcaccgagcgcccgttcaagtgcaactactgcagcttcgacaccaagcaacccagcaacctgagcaagcacatgaagaagttccacgcggacatgctcaagacccaggccccggaaaggaaggacaccagcaggcagagcagccggcaggtcaccaagctggatgccaagaagacgttccactgtgacagctgtgacgcctcattcatgcgggaggactcgctccgcagccacaagaggcagcacaatgagtaccac

SEQ ID NO: 5891 - DNA, 1127 bp, Cricetulus griseus
gacctggttgcctctacataccatgtagaatctgttgttggtctgaaggcactagcccagtcatccatgcaagaccccctccagggatgaggatgagcacagtgacccagaggagttcctgaggagccatgggctgggtcttccacctgagtggtcctgaggtggacagtgcccaggtttctgagatgctccatagccgacacattacctttgcagggaagtttgagcctgtgcagcaccagtgccgggccctgaggcctaatggcaagctctgcgaacgacaggatcggctcaagtgcccattccatgggaagatcatccccagagatgacaaggggcagcccctcaacccagaggacagagcccgtgagcaaaggcaacagcttcagcggcagcaggcacatccagattggcaggaccctgagtttatgaaggatgtggaggcagccacaggggtggacctcggctcatcaaagtacagcaagaagggcaaagggaaaaaagaagaagcaccccaatctcactgaccttcgagagcatgccaacaccaccagggcccgcctagagaagaagatctttgccaaggcagctgtgcagagagtagttgctgccatgaaccagatggaccagaagaaacatgagaagtttgcaaaccaatttaattatgcactgaattaaaggggtatgggaggcaggtggatctatgagtttgagcccagcctgctcacagagtgacttccaggacagccaaaagctacacagagaaaccctgtctttttgaccaagaatacattacagttctgtatgcaccaaactctggcccacccaatttcataagaaacatactattgaacttaaagacacagattactccaagtcagtagtagtgggtgatttcagtaccccactttctccagtagacaggtcatctggaataaaaaaaataaacagaaacatcagaattaagtgatattgtacatcaaatggaactaaccaatatatacagaatgtttcacccagacactaaagaatatacattctacacagtaggccatggacacttctctaaaatagatcacaccaggagttggtggcacatgcctttaatctaagcactcgggagacag

SEQ ID NO: 5892 - DNA, 1127 bp, Cricetulus griseus
cttcggggctgctcggaagctggacgacgaggagaagtttgtttcggtctatggttggagtggagctatagcctccccatcacctgcagattgtccatggggctgcagaaccagttggtacccatcctggccaacatcctggaggtagagcaagctaagtgctggggcttcgaccagttctttgcagagaccagtgacatcctgcagcggattgtcatccatgtcttctccctgccccaggcggtcttgcatcatgtctacatccatgcccacaacacgattgccatcttttttgaggctgtatatgagcagaccaacgtgccccccaaacaccaggagtacctctttgagggtcacccttgtgtccttgagccaagcctctcagcgccgcacattgcccctacagccgccagcagccccctggttctgttcagcatggccagtgacacacccaagggccctgaccttcagggacccgctggttaccaggccctgtggctggcgcgggtcctgctggatgggcaggtgctgatgcttcgagggttacactgggtcctggagatacttcagagcacgtgccagcagaccctggaggtcacgcggacagccctccccttcctcagcagcagcctgggcattgaaaggctcagcagtggggctgagatgcccgacttccaggaactaaaggaggccacagaactgaggtccaggctacagactttctcagaggtcctctctagatgttcccacagtgtcacagaaacccaagtgagcctgagttgcctgggtggagagcttctgaagaaccgaaatcagctccacgatgacagtagaagtatccagaagattcggtattgtttggacaagatgcacttcatctacaagcagttcaacaaagctaggatgaggccaggactcagctacaatgaggagcaaatccacaagctggataaggtgaattttagccatttagccaagaggctgctgcaggtgttccaggaggaatgcgtgcagaagtatcaagtatcgctggtcacacatggcaagcggataaggcaggtgcagaaggccaagaaccacctgcatctcattggccgatctgtggctggctgtaacacagaagcccg

SEQ ID NO: 5893 - DNA, 1127 bp, Cricetulus griseus
  modified_base (384)..(384): a, c, t, g, unknown or other
tggcgatctccttcatctctgcggtcaaccgcaaacggaaaaagcggcgcgaggcgcggggcctgggcagcagcaccgatgatgactccgagcaggaggcacacaaggccgcggcggggacgcaggagccacccgaggagcagctgccggaccccgcagccgtggaggcccctggtcgcctcagccccccgacggcacccgaggagcggcctgcggcggacacgcgctccatcgtctcgggctactccaccctgtccaccatggaccgcagcgtgtgctcgggcaccggcgggcggcgcgcggcaggcgacgaggcggacgacgagcgcagcgagctgagccacgtggagacggacacggagggcggcgcgggccccggggggncctgtcccgccggccgtccttcagctcacaccaccttatgccgtgtgacacgctggcgcgccgtcgcctgtctcgcagccgcgcggatggagagagtcccgggcgccggcacggcccgggcgggtccccgcggtccccgagcccccgagctcggcgtcgtccagcagccaggagtcgcttcggcccccggcggctgccccggcgctcgggtcacgaccgtcgcgcgtggaagccctgcggctgcgtctccgtggcaccgccgacgacatgctggcggtgcggcttcggcgcccgctgtcgcccgagacccggcggcgccggagcagctggcgccgccacacggtggtggtgcagagcccgctgaccgacctcaatttcaacgagtggaaggagctgggcggagggggcgccccggagcccacgggcgctcgaccgcacagtgacaacaaggactcaggtctcagcagcctggagtccaccaaggcacccctcactcattccagggaagccccgctggggatgccagccctgcacccaaagcccttcagtctccttggtttatgcaaagatttgctgtaaagtctctctccctcctctcccttttactgtaaatattgtctctaatgtgtaacatattataaagaatttataaggatttttaaagatgttttgctcattttaaaaagtgttgtaacagtgttggataaagccccctatgtctgcatggctcctcccacgtgtcc

SEQ ID NO: 5894 - DNA, 1127 bp, Cricetulus griseus
ggatgtgagtggcctgccatagtttctgatggacgaggcccttttcctttcgaaggcaaagacagagtcctggcagcagtccaggctgcccagaatgccaacatcttcgtcatttttgttgtgttggataatcccaattcacgggattctatcttggatattaaagtaccaatatttaaaggaccaggagagatgccagaaatccgatcttacatggaagagttcccatttccattttacatcattctccgagatgtgaatgcacttccagagaccctcagtgacgctctgaggcagtggtttgagctggtgacagcatctgactcatagagcagaaacagtctgtagtgaggctgtcatcttcccctggtgctccctttagacaactgtttgtgaactcagtgctctgataggacttcgtcttgatctgattttttttttaatgtataaagcggttatataaaaaatacttattgcactatgtttgtatttacatcatagcagagcttaacacaagctctcgaactccctgctgtgctgagcaaagatgatcatagagctgtgcaaaaaaacaaagcagctttgtgcccttcacagtggctgcttgggagactatgcaatagtagaaaggtgactctccctttcttcattctgactgccgtagccccttgctgtaatttatttctttagccacctttccccactgttaagaggaagaactattcctcatactgctttcggcttaccctgagccagtctcactgtggaaaggaataaaagaatgctgtatccacaagagctaaatagccccatcccccctcactcacacagagcacagtaatgttgggttttgtttgcttgggggtggggacagttttacttggccagaaagcagtgtttgaatacttgaaatcatgtgctgtgttgtatttgaatgttgtttgtaaacattgtgctgtacatctgtctccatgtctgtttgcaggctacactgtgaagtgtgtgctacctttatatggtggtcatcaaagacagattgcttattgtttaacaaagtgtcctgaagcatgtacttaaagttatattatttttattctaaaaacgctatgcagcttatattctagaaa

SEQ ID NO: 5895 - DNA, 1125 bp, Cricetulus griseus
cccgcaggcgcacgcgcacccgcacccatcgccgccgccgcccgggtgcgcaggaggggccggcccgggcccgggccaggactacttccacgccggcgcggggcagcccggccgctgcctaccaggccgccccacctcctcctccgcaccctccgcctccgccgccgcctcccccctagagacagccgatttttacgacccagcaagaggccgagctggtacaatatcctgactgtaaatcgtccagtggtaatattggcgaggacccagaccacttaaatcagagctcgtctccttctcaaatgtttccctggatgagaccacaagcagctcctggtagacggagaggaagacaaacctacagccgattccaaaccctagagctggaaaaggaattcctttttaacccttatctgaccaggaagagaagaatcgaggtctcgcacaccctggccctcacggagagacaggtaaaaaatctggttccagaacaggagaatgaaatggaaaaaggagaacaacaaggacaagttcccagtttcgcggccggaggcgaaggacggagaacccaaaaaggaagcccaagagctggaggaagatggagccgaagggccccacaaattaacttctaagcttatatttttttaccacagactattaagactaacgatcagcatatgctggtggaaacctcctttcccctctcttcttttttggaaaggactttacctgtgtttcaagctaccttaatgtcactgctcttgagggttctgcgctttgaaagggatttgggcggtttttttgtttttaatagtttgtagtatcgcatagaagcagcctttgagctgccctacagaagggtaatttgataccgaccttgtagctatatttttataatggtagtttttaatgtctgagctggtgatttgcctcaacaacgtaaacttcctaacgatcaacactaaatgattgaatataaaatgctttattaatcaaacaagtgcacttgaacattttaaatctttatggtgagtaaatgagtaaattaaaagaagtctattcataattttaaaaattatgcctgcagaatatttactttatattatgtgattaaatgtattattt

SEQ ID NO: 5896 - DNA, 1125 bp, Cricetulus griseus
  modified_base (845)..(845): a, c, t, g, unknown or other
ttgccatttccaaagcccatgaagaacaggatgaagaaagtcaaaataacttgttctcttctgaccgggcagcacaggcattcactgtccagattgcttgtgccttttgagcagctcgtggttttgttcaaacactggctggatgattttccacctggtaccagctcaacgaggcttgaagatgaattgagacaagatattaaaaaactgggaggctatttactattgtttttgcaggggtgctgttcagatatttcatcaatgatacaagaggctcaaaacaaagtcgtccagattatacagcaagctgctcagtgtgtgggtcagctagccgttttgaaagggagcaagctttgtcttctggagaatagcagcaagattcctggcgcccgggagttcacagctgccctccaggatggcatggccttggggataaaagcctcttagcttctgggctggaaaaagtccaggacctggagggaaacctctcacggcagagtgcacatgaggaggtcaccaggcggatgaaggctaatgctgtggaactggtcaggtctctggcaaacatctttgctgaatggagactaaaaagacttcagaaatcaagtacaagaaaattctagacaacaaggttccaagatgttaactcttgcatcagaattcttgaagttaaaatattgcttggagaaaactattgagattattacatctgcactgagagggtgccccagtgacctgcattgtctcagaagctatactgaaactctctgcggcctggctcacaaacttcacagtgacttcactgagccccctgcttctgctggcaactgtgggaatcttttttnttttttggttatgttatttatttcacatgggggatcagaggctggccctttttttgatagtgcttgttttgccaaagggaaatttgtttacatgttgttcaatggagattaaagatccttgtatttcacagctttaaaaactccttcacctacaatcaagtaataaagataatatcctactttagggtttaacttaaggaaatagtttaacattttgaccacaagaatatgtataatttgtctgtgagttcaatgtcagcctggtctacacagagataac

SEQ ID NO: 5897 - DNA, 1125 bp, Cricetulus griseus
  modified_base (451)..(451): a, c, t, g, unknown or other
gacactcctgggcctcgagaggcactgagccagcttcgggtgctctgctgtgagtggctgcagccggagatccacaccaaggagcagattctagagctgctggtcctggagcagttcctgaccatcctgccccgagagctccaggcctgggtgcagcagcactgtcccgagaacgcagaggaggccgtcactctcctggaagacctggagcaagaactcctgtatatccaagagactggtgaggaggaggttttcactcaggatccaagaaagcgtcaaggtttgaaatcgaatcctcagaaggaggactcagcagatgagcagagaagttctgaagaggagtctcacgcagacggactcaaaagggacatcatccctgtgattgctgccaataagtacagtagatccaggtcacaaaagcagtgggccaacagtctgggaaagggggagngggagcaaaagcttctctgcaagacacaggttccaggaaaggggcagaaccagtgtctgctaaagcccgccccaggagagaagcgttacatatgtgcagagtgtgggaaggcctttagcaatagctcaaacctcacaaagcaccggagaacacacactggggagaagccttatgtgtgtaccaagtgtgccacagctccaaccttacccttcattacagaacacacttagtggaccggccctatgactgtaaggtgtgggaaagcctttgggcagagctcagacctccttaaacatcaaaggatgcacactgaagaggcgccctaccagtgtaagactgtgggaaagccttcagtgggaagggcagcctcattcgacactaccgcatccacacgggggagaagccctatcagtgtaacgattgtggaaagagttttagtcagcatgcaggtctcagttcccatcaacgcctgcatacaggggagaagccctataagtgtgaggagtgtggcaaagccttcaaccatagttcaaattttaataagcatcatagaatccatactggcgagaaaccctactggtgtaaccactgtgggaaaaccttctgtagcaaatcaaatctttccaaacatcagagagtccacactggagagggggaagcactgtaactggtcc

SEQ ID NO: 5898 - DNA, 1125 bp, Cricetulus griseus
cctggcagcatccagtgacgttagggacagcgccctcgccttctttctcactgcagcagtcttccttggtctctgtgcggggttctacctactgctgtcccggctggagtatgccaggtattacatgaggccagttgtcccagtccacgtgttttctggtgaagagcacccatcacaggacactcccagcacctcctcagtggcccctgggtccagagtggtacacacaccacccctcggacctatcctgaagaagacagccggccttgggttctgtactgttttcatctactttatcactgccctcatcttccctgccatctccaccaacatccagtccatgcacaagggcactggctctccatggactgccaagttcttcgtgcccctcactgtcttcctccttttcaactttgctgacctctgtggccgacaggtcacagcctggatccaggtgccgggtcctaggagcaaggtgctccctgcactggcactgctgcgtgtctgcctcgtgcctctcttcctgctctgtaattaccagcctcgatcacacctgaccgtggtgctgttccagtctgacatctaccctgtgctcttcacctgcctgctggggctcagtaatggctacctgagcacactggtgctcatctacgggcccaagatcgtgccccgggagctggctgaggccacgggcgtagtgatgtctttctacatgtctgtgggcctgatgctgggttcagcctgtgcagccctgcttagtacaccttatctaggagggagcatcgaggacataggtacggtgtgagtgcttgtttagcattcatgatgccccgaatcccatccccagcactgcataaaccggacatgttagtgaaagcctgtaatcctagcacttgagaggtggaaacaggaggatcagaagttcaaggtcatcctcagctacatagggagtttgaggccaacctgggctacatgagacactgtctcaaaaaaaaaaagatacaattgtaaagaggggtgtgttatctttgtggctaataagcagcctatgtctgacctgcgttgtcacaggtcagaacccagcctctctttccaactgacagcaaggtaggagaggatcttcag

SEQ ID NO: 5899 - DNA, 1124 bp, Cricetulus griseus
  modified_base (21)..(21): a, c, t, g, unknown or other
actttctgcaacgccatcctntcctgcaggcaaggatgcgagcagttctctggattggctaatggaggtgtgcgaagtctataagcttcacagggagacattctatctggcgcaagacttctttgatcgttacatggcatcacaacaaaatatactgaaaacacttttacagctcattgggatttcagctttatttattgcttctaaacttgaggaaatctaccctccaaagttgcaccagtttgcttacgttacagatggcgcttgttccggagatgaaattctccagatggaattaatgatgatgaaggcccttaagtggcgtttaagcccaatgaccattgtgtcctggctgaacgtgtatgtccaagtggcttatgtcaatgacacaagcgaggtgctactgcctcagtacccacagcaggtctttgtgcagattgctgagcttttagatctgtgtgtcctggatgtcggctgcttagaatttccttatggtgtccttgctgcttctgccttgtatcatttctcctccatggaactgatgcagaaggtttcagggtatcagtggtgcgacatagagaaatgtgtcaagtggatggttccgttcgccatggccttccgggaggtgggaagctccaagctcaagcacttccggggagttcccatggaaaacgcccacaacatccagacccacgccaacagcttggatttgctggacaaagcccaggcaaagaagccatatgtcagaacagccaaagacagtgttgtggaagcagctgcctggagctcctttgctgcctaggaggttgggagcccctgctgatgctctgcggaaaggcgtatctcttccagagcagcgggcgtcttcaaaatggcctcggacagaagtgcttgtatggaatgctagttgttttaacaatagggttgaggacaccagccacctccagaacgccgctgagtgctccagaagctgctaaggagggtgctacttgacccactggactcttcacacatgacaaaagcttagaaattaaggaggccacggttgctgctggcctctgcccgggtgtttctttgaaaaaaaaaaaaaaaaaaaaaaaaaaaaaaaaaaaaaaaaaaaaaaa

SEQ ID NO: 5900 - DNA, 1124 bp, Cricetulus griseus
caaaaacatggcatcttgggtagtgtgaactatgatgaggagaccgacaatgaggacgaggaaggagacaatctcagctccccgtcagctcattcagagagagagagttctgcagctagccagaaagcagcctcggagacaggagcttccggtgtcacaggccagccaggtgatgcccagcttggagaagtggagaatttagaggacttcgcatacagtcctgcccctcggggtgtcacagtgaagtgtcgagtgacccgggataagaaaggcatggaccgaggcctcttccccacctactacatgcacctggagaaggaggagaatcgcaagatatttcctcttgctggtaggaagcgaaaaaagagacaaaacttccaactacctggtttccacagacccgacagatttgtctcgtgaaggggaaagttacatcggcaaactcagatccaatctcatggggaccaagttcacagtgtatgaccatggtgtcaacccagtcaaggcccagggtctggtggaaaaggcccacacccgacaggagctggccgccatctgctatgaaaccaatgtactgggttttaaaggtcctagaaaaatgtcggtgatcatcccagggatgaatatgaatcatgaacgcatcccatttcggccacgaaatgaacacgagagcttgctttcaaagtggcaaaacaaatccatggagaacctgatcgaactgcacaacaaggcccccgtgtggagtgacgacacccagtcctatgtcctcaacttccatggcagggtcactcaggcatctgtgaagaattttcagatagttcatggaaatgaccctgactacatagtcatgcagtttggacgagtggctgatgatgtgttcacacttgactataactacccactgtgtgcacttcaagccttcgccatcgggctgtccagctttgacagcaagctggcatgcgaatgagaaccagcaagtagggaacgtcctcaccacagagccttcaggagcagaaagcggctgccctgaccttgagaattccaaaacttttggccctgcattcagtggtataaataacaaataatttatataaagaaaaaaaaaaaaaaaaaaaaaaaaaaaa

SEQ ID NO: 5901 - DNA, 1124 bp, Cricetulus griseus
  modified_base (1111)..(1111): a, c, t, g, unknown or other
gggagtagacatggcggcctccttggtggaaggctgtagggtgtccctgaacctggcccggagcttccgaacggccagaccgcggctcgctgcagtcgcgtcagatacctcctgtgtccgcacgggatcgagccggcttcagagcaccgggccttccgaacccggtgggttcaagccacctccgaaacctgtcttggaggaccggcgccgagccgcggacgaaagtacaaggttcctgagtcccgaattcattcctccaaggggaagaacaaaccctctgaaatttcagctagaaagaaaagatatgctagccaggaggaaggtgcttcacattccagagttctatgttggaagcatactgcgtgtcacctcagctgaccggtatgccagtggaaaaaccatccagttcctggggatttgcatccagcggtcaggaaaagggcttggagctactttcacccttaggaacattattgaaggacaaggtgtggagatttgctttgaactgtataatcctcgaatccacgagatccaagtggtgaagttggagaagcggttggacgacagcctgctgtatttacgagatgccctccccgagttcagcacctttgacgttgacatgaagccggtcccacatgagtcctgccaggaagtgcctgttaacaagctgaaagttaaaatgaagccaaagccatggtccaaacgctgggaacgtccgaacttcaacattaaaggaatcagatttgatcttgctttaactgaagagcaaatgaaagaagcccagaagtggagccagccatggcttgagtttgatatgatgagagaatatgacacttcaaaaattgaagctgcattgcgggaagaaatagaagcatcaaagaagtcttgatcttgggacttgtgagacagctcagcaggtaaacaaacatgcttcctgctcaggctgaagacctgagttcagctctggaacctggggtggacagagaactgactcttgaaagttgtcctttgccttttacgtgtacacttgacaaaccaaaaaaaaaaaaaaaaaaaaaaaaaaaagtattcctcattagctgatctgtaagcagtggttagcaaaaaaaanaaaaaaaaaaaaa

SEQ ID NO: 5902 - DNA, 1124 bp, Cricetulus griseus
gctggatccctgcagtggaggatctgggtgccgcgtgtcgacatggaccagtactgcatcctcggtcgcatcggggagggtgcccacggcatcgtctttaaagccaagcacgtagagactggagagatcgttgccctcaagaaggtggccctgcgacggctggaggatggcattcctaaccaggctctaagggaaatcaaggctctgcaggagatcgaggacagtcagtatgtggtacagctgaaggccgtgttcccacatggagcaggatttgtgctggccttcgagttcatgctgtcagacctggcagaggtggtgcgccacacccagcggccactggcaccggcacaggtcaagagctatctgcagatgctgctcaaaggtgttgcgttttgccacgccaacaacattgtgcatcgggacctgaagcctgccaacctgctcatcagtgcctcaggccagctcaagatagctgactttggcctggcccgggtcttctctccagatggtggtcgcctctacacacatcaggtggctaccaggtggtaccgagcccctgagctcctgtatggtgctcggcagtatgaccagggcgtcgacctatgggctgtgggctgcataatgggagagctgttgaatgggtcccccctgttcccgggagaaaatgacatcgagcaactttgctgtgtgcttcgcatcctgggccacccccagtcctcgagtctggccggagatcacagagctgcctgactacaacaagatctccttcaaggagcaggcaccggtgcccctggaggaggtgctgcctgatgcctcccaccaggccttggacctgctaggcaagttcctcctctaccccccacaccagcgtatcgcagcgtcccaggcccttctgcatcagtactttttcacagctcctctgcctgcccatccatctgagctgccaattcctcagcgcccaggaggacccacacccaaggctcacccaggccctccccatgtccatgacttccatgtggaccggccccttgaggagtcagtgctgaacccagagctgattaggcccttcatcccagaggggtgagatgctcgcctagtcctgcctgcttgccccaggagcacct

SEQ ID NO: 5903 - DNA, 1124 bp, Cricetulus griseus
ctcaggtgcctaagcagaggacaagctgtccagataacctgtacatagccagtgagcagataattggtggtcagagctgcagctccagctgggttcctgcattggcggcagactgagcaccaggtctgcttcagctgagaatgtgggcacacagtcttgttagccagttcccgccattgggagggagcagtgctagctgtcagttccctctctctgctcggaaatggagttgctctgtttccctggcctgtgcttatcctccagtgttggtcttctatcacaagtgtctatacagcagccatccaagttgcctgcccctttgtgatctcactgcccctgactcagttgggctagggagttgcttccttagaggtctggtgtccccaagaggagcccttggtggtgggtgagcggtgattctttggttttcactgtttgtttgaagggacagttatgtagccacttctccacagagcgggggttgggggtggaggtgtcctgtgttcataagtcagtttcttgttttgcacgatgtaaaaaacagtcttgtccccaggctattgtctggctctgactggattaaacacccagcacaagttagaggaatttgccaaagacctgccccatgacagtacttgtccagtgtcttcaccctgagaataaccaaagttccagtagtttttttttttttttaagttgcatttgagaatgtggttttgttgtggaccggtatagctggccattgttgtgtgtgctcagagatttgtcgcctctgtgatatgtcggcacatctcaatttctgtttgcttgctttgtgtttaaggggatctttccctgtgggtggtgtcagaagttggacaccttggtttgggggtagattgagctgggcagctgtaatcagcttctttatgcaaactgggcgtgaccctcctaggggctcctggttggtggttaatgatgtgagggaatggtgtcacccccaaaggagacccctcccgtcagctttggccaggccagatgcaacatcgtttacatggttctgtgtaattacaaagtttatgtgtataaagcaagctgtttctgtgaaactgtatattttgtaaataaagatattgctactttga

SEQ ID NO: 5904 - DNA, 1124 bp, Cricetulus griseus
  modified_base (564)..(564): a, c, t, g, unknown or other
ctgcttctgtggggcactgcggaggatggtagaggcgctgccacaccagccactcctgggccagggctacagggcgccccttagtgccaaagtcttctcctcctgggacttctgcatccgggtgtgggaagctgccactatcaagaaacacgaaatcagcaatgaactgaaggtggagctggaagagggccgccgcctggagctggctcagcaacagacccgggcccagaaggcctgccacctgctggcctacctacgtaccaatgtcctcattgtactcctagtggctggagccatcagcgccatcttctgggccaccaagtactcacaggacaacaaggaggagtcccttttcctggtgctgcaatacctgccccctggagtcattgccctagtcaacttccttggtccccaactcttcacagtcgtgatccagctggagaactaccctcccagcaccgaggtcaacctcaccctgatctggtgcgtggtgctgaagctggccagcctggggatgttcctccttctcgctgggtcagactgtgctgtgcgtaggcagaaacngaaccagctgcgagtcctacggctacaacgcctgcgaataccagtgctgggagaattcggtgggtgaagactcctgggcttgctttctggccgcggttcctctgggctacgtgaccagcagcacccactcctcctgggactgcggcctcttcgccaactactcagccccctggcaggtggtcccggagctggtggccctccagctcccgccttccggccagcgcgccctccgttacctcagctcccacgccttcagtttcccgctcctcatcctgcttcagcctcgtcctcaccgtgtgcgtctcccagtcccgggcgaatgccagagccatccacgggctacggaagcagctggtgtggcaggtccaggagaagtggcacttggtggacgacctgtcgcggctgctgcccgagctgagtccggagcccgagtcccctcgctctcgagcttcgcgtccgcggtccttctgccccggattcccgtgcccaggctcgccaggccccaggacaccccggctaggatcctccaccaggctgagctcctccagccccggaacccc

SEQ ID NO: 5905 - DNA, 1123 bp, Cricetulus griseus
ggtttgcggagacaatctgatcgcctggaattagagccggtccagaaactttctgtttcaaaatgatggaggaagatatggaagtagccatcaagatggtggtcgtagggaatggagcagttggaaaatcaagtatgattcagcgatattgcaaaggcattttttacaaaaagactaacaagaaaactattggtgttgactttttggagcgacagattcaagttaacgatgaagatgtcaggctaatgttatgggacaccgcaggccaagaggaattgatgcaataacgaaacctcgctctgaaagctgacattgtaatgttgccctgcagcgcttctcagaatgtagatggagacctctgctggaaaattactgccttgtacactcattctagttctttacaattagacgaagcttctcctgtttttgaaggggacactataggacatgtcaaaaacgggttttgctgaattttaaatgctgaaacaaaaatgagatgactaaatatattgggtccagttttactcttatggaccaaggagagatagcaagcattctttttctggaacggatcgtctagcttttctggaatgttcattctgaatgcttaaagaaagtactgaaggaaagattcagactttgtcagcctgcactagcgtgtgttgtcagtgggcctcgtgcaatgtctgtaaagtgtagatgtgggagtgtgcatgcagacacctggcatcatacaaaggaagttatctgcatataggtaggtacataaaccacagtggggtctgaaatacccaggcaccaagctcccagataacggaatgatttggccactggactttttgttactactccttttctgttgtctcttgaaatatctatagtaggatgttgataaatggtattttaaaaataaaatctttggatcaaaggaaaacttaaccccttctatatttttgttactaataaataatgcttttgtaaatctgaatgggaaactgctggtatgtatttatactgagtggtacttacgcctttgggattaatttaaaaatgtactacttgattacagtttcaacagagatgaattccaataaccaaaataataaaacatttacaaagacta

SEQ ID NO: 5906 - DNA, 1123 bp, Cricetulus griseus
cctcggggactactcccacggccttgcagagtgctggtgttgctgaaccccggggcggcaaggggaaggctttgcagctcttccggagcttcgtgcagcccctcctggaggaggctgaggtatccttcaaactgttgctcactgagcggcagaaccatgccagggagctggtgtgtgcagaggaactggatccctgggatgccctcgtggtcatgtccggcgatggtctactgcatgaggtggtgaacgggctcatggaacggcctgactgggagactgccatccggaagcccctgtgtagcctccccggaggctctggcaacgcactggcagcttccgtgaactactatgctgggtacgagcaggtgactaacgaagacctcctgatcaactgcacactgctactgtgccgccggcacctgtcacctatgaacctgctgtcgctgcgcaccgcgtctggactgcagctctattctgtgctcagcctggcctggggcttcgtcgctgatgtggacctggagagtgagaagtacaggcgcctgggggagtttcgtttcactgtggggaccatctttcgcctagcaaccctgagaatctaccagggccaactggcctaccttcctgtaggaaacgctccctctaagatgcctgcatctcctgaaccggcgcagaagggccccgtggactcgtaccttgttcccctggaggagccagtgccctctcactggactgtggtgccggaacaggattttgttctggtgctggtactgctgcacacccacctgagcacggagatgtttgtggcacccatgggccgctgtgaggctggtgttatgcatctgttctatgtgcgtgcaggggtgtccagggccatgctgctgcgcctcttcctggccatgcagaagggcaagcatatggagtgtaactgcccatacttggtgcacgttcctgtggtggccttccgcctggagcccaggacccggaggggcatgttttctgtggatggagaactgatgctgtgtgaagctgtgcagggccaggtgcacccaaactacttttggatggtttgtgggagtagggatgccccgtccagctgcgagccccagcagaggccacctccaga

SEQ ID NO: 5907 - DNA, 1123 bp, Cricetulus griseus
tcagttactgtttaccatggaggcgaacgggatgggacggcagaattttccggagctgaagaatgacacgttcctgagagcagcgtggggagaggaaacagactacactcccgtttggtgcatgcgacaagcaggccgatacttaccagagtttagggaaactagggctgcccaggacttcttcagcacctgtcgttctcctgaggcttgttgtgaactgactctgcagccactaagaaggttccctctggatgctgccatcatcttctccgacatccttgttgtaccccaggcattgggcatggaggtgaccatggtacctggtaaaggacccagtttcccagagccattaagagaagagaaggacctggagcgtctacgggatccagcagcagtggcctcagagttgggctatgttttccaagccatcacccttactcgacaacagctggctgggcgtgtgccactaattggttttgctggtgctccgtggaccctgatgacatacatggttgagggtggcggttcaagcaccatggctcaggccaagcgatggctctaccaaagaccacaggccagtcacaagctgcttggcatactcactgatgctctggtcccctatctaataggacaagtggctgctggtgctcaggcattgcagctctttgagtcccatgcaggacatcttggctcagaactctttggcaagtttgcactgccctacatccgtgatgtggccaaacgagtcaaggctgggctgcagaaggcaggtctggcaccagtgcccatgatcatctttgctaaggatggacattttgcactggaagagctggcccagtctggctatgaggtagttgggcttgattggacagtggcaccaaagaaagcccgggagcgtgtggggaagacggtgaccttgcaggggaacctggatccctgtgccttgtatgcatctgaggaagagattggtcgactggtgcagcagatgctggatgaatttgggccacaacgctacattgccaacctagggcacgggctttatcctgacatggacccagaacatgtaggagcctttgtggatgctgtgcacaaacattcacgtctccttcgacaaaattaagta

SEQ ID NO: 5908 - DNA, 1123 bp, Cricetulus griseus
ctccttaaccagcacacggacatctgctctctcaggaaggttttggcagcaaccatgtccactttcgtggagctcagtaccaaagccaagatgcccatcgtgggcctgggcacctggcagtctcccccaggccaagtcaaggaagctgtgaaggtggccattgatgctggataccgccacattgactgcgcctatgcgtattacaatgagcacgaagtgggagaggccattcaagagaagatcaaagagaaggctgtgagacgggaagacctcttcatcgtcagcaagttgtggcccacctgctttgagaggaaactgctaaaggaggcctttcagaagaccctcacggacctgaaactggactatctggacctgtatcttattcactggccacagggacttcagcccggaaaggagttatttcccaaagacgatcaaggcaacgtcctcaccagcaaaataacgttcttggatgcctgggaggtcatggaagaactggtggatgaagggttagtgaaagccctgggtgtctccaacttcaaccacttccagattgaaaggatcctgaacaaacctggattgaaacataagccagtgaccaaccaggtcgagtgtcacccatacctcactcaggaaaaactgatcgagtactgtcactccaagggcatcactgtcacagcctacagccctctgggttccccaaataggccttgggccaagccagaagacccttcactcctagaggaccccaagattaaagagattgctgcaaagcacaagaaaacctcggcccaggttctgattcgattccacatccagaggaatgtggtggtgatccccaagtctgtgacaccagcacgtatacatgagaactttcaggtctttgacttccagttgagtgatcaggagatggccaccatccttggcttcaacagaaactggagggcctgcctgctgcctgagacagtaaacatggaagaatatccctacgatgcggagtattgaagctaactcgcctgatgaggcttccctctttgctgatgcacacctcaatcatttctggtgtgccatttgagccaagcctgcctgatgtcatgctctaggcaacgctgtacttaaatcc

SEQ ID NO: 5909 - DNA, 1123 bp, Cricetulus griseus
ggccgcggccaagatgaacattctggcgcccgtgaggagggaccgcgtcctggcggagctgccgcagtccctgaggaaggaggccgctttgcacgtgcgcaaagacttccacccccgcgtcacttgcgcctgccaggagcaccggacaggcaccgtgggatttaagatatccaaggtcatcgttgtgggggacctgtctgtggggaagacctgtctcattaataggttctgcaaagacaccttcgataaaaattacaaggccaccataggagtggattttgagatggaacgatttgaagtgttgggtgtccccttcagtctccaactttgggacactgctgggcaggagaggttcaaatgtatcgcttccacctactaccgaggagctcaagccatcatcattgtcttcaacctgaatgacgtggcatccttggaacataccaagcagtggctcgctgatgcactcaaggaaaatgacccatccaacgtacttctcttccttgtgggttccaagaaggacctgagtactcctgctcagtattccctaatggagaaggatgccctcaaggtggcccaagagattaaggctgagtattgggcagtgtcctccctcactggtgagaatgtccgggaattcttcttccgtgtggcagcattgacctttgaggccaatgtcctggctgagcttgagaagtcgggggctcggcgcattggagatgttgttcgcatcaacagtgatgacaaaaacctctatctaactgccagcaagaaaaagaccacatgttgtccctgaagagtgaggattatccagaaactgcccattcctggggtactgtgccaccccaacttcagaattcaacccctggacgtttgcactgacttttcagaccaaagagcttccccttgaaggcagtgcccccagagtgtaactgggaccatgctagtctcttcctgcccatggcaccatgccaaagactggatgatcctgtactcctctggggctggggctctccagggtgcctgggggagtgtcagtgttcgtgctgcttttgctcagcctgctggccctttattatgatgatgcttaataattccagccttatactgtgccttatgcattaaa

SEQ ID NO: 5910 - DNA, 1122 bp, Cricetulus griseus
gcggtatttccagctgtcccccgggagggacattgcttgggcccccagacactgtggttgatgtggggaagttctctcaacgccatttggacaagcacttcggcccttcctggactccatccagatccagcctcctggagggaactctgtgggcagacccaatggccaaagctaacaggactgcacgggaccgcccgcctctccagggcttttcctttttaaacaaaacaaaccctaccagatttctattttataattttacatcagagctaacggggacggctttttaaatttcccagggaaggagcttgtcaggctgcacgtaggacaatgctcctaagaaacagaacaaatgccatcccttctaatagtattatactaatttattaaggctgtcttgtctgtgagttcacttttgacgctgttgcctgagcgtcctctacactggagagagagggggcgctttttaaacagaaagcaagagttacaatctgggagaatcctgtcctggaccctctttccaaaggacacccacattccacccaggttgccacacctgtgggacctgggtgaggttttttccgagaattttgcctgagaattttagtcacttggttgcttgaatagcctcgtgtcatgtccagtagccatctgtattgatgcctgtgcccgtggctcgcagggagataggactggacagcttctcagacctctgcaggaaggcaagctcttcctcccctatgcaaatcccaggccaggaacccctcctcccaccgtcacatatctctgtcccaatatctcaggagcatactattaatgaccagctgactccacctgggcatgtacaagcgagccgagagggaccttggtcatgttcatgtcatatgacagacaccctgtggagttccattggtcaagggacaagggaagtggaggcataagaccattgtcctctcctatataaaatgaagcgtgttcctttgagattccttcattacttccttggaatcaaactaatgtctaatatggaggtgtttgctggttttcattggcatcttttctaatgcaataaactcatttatgctgcaaaaaaaaaaaaaaaaaaaaagaaaaaaaaaaaaa

SEQ ID NO: 5911 - DNA, 1122 bp, Cricetulus griseus
ggcaatcattggttctgatatgcaggaagtcattggctcagccatcgccatcaatctcctgtctgcaggaagggttcccctgtggggtggagttctcatcaccatagcggatacttttgtatttctctttttggacaaatatggcttgcggaagctggaagcgttttttggctttctcatcactattatggccctcacgtttggatatgagtatgttacagtgaagcccagccagagccaagtgctcaggggcatgttcgtgccatcctgttcaggctgtagcactccacaggttgagcaggctgtgggcatcggtgggagctgtcatcatgcccacacaacatgtacctgcattctgctttagtcaagtctaggcaggtaaaccggccaataagcaggaagttcgagaagccaacaagtactttttcattgagtcctgcatcgcactctttgtttccttcatcatcaatgtcttcgttgtctccgtctttgctgaagcattttttgggaaaacaacgagcaggtggttccatcatcccactctgcttgttgctgtcttccaagatgtagagcatctaacagggatgaatgacttcctgaatgttctgcagagctttacagcttcccctttgctctcatacccatcctcacgttcacaagctttgcggccagtaatgagtgagttttccaatggaataggctggaggatcgctggtgggatcttggtcctcatcgtctgttccatcaacatgtactttgtagtggtatacgtccaggaactagggcacgtggctctatatgtggtggctgcagtggttagcgtggcctatctgggctttgtgttttacttgggttggcaatgtttgattgcattgggcctgtctttcatggactgtgggcacaggtaccacctgggattgacagctcaaccagaactctaccttctgaacactgtggatgctgacccatttgtgtctagatgactaacggccagagagactttaagaacattttctctaagcccttttgtgccaagtgtctgttaacaaatctctgttagttcagaggtgagtttgttcaaatgttttgaacaaaggtaatagctaaaaaaaaaaaaaaaaa

SEQ ID NO: 5912 - DNA, 1122 bp, Cricetulus griseus
aagcgaactcccatgtgtgcccactgcaaccaagtcatcaggggacctttcctcgtggctctggggaagtcttggcacccagaagaatttaactgtgctcactgcaaaaacacgatggcttacattgggtttgttgaggagaagggagcactgtattgcgagttatgttatgagaagttctttgctcctgaatgtggccggtgccagaggaagatccttggcgaagtcatcaatgctttgaagcaaacctggcacgtgtcctgtttcgtgtgtgtggcctgtggaaagcccatccgcaacaatgtttttcacttggaagatggagagccatactgcgagactgattattatgctctttttggaacaatatgccgtggatgcgagttccccatagaagctggcgacatgttccttgaagctctgggctatacctggcatgatacttgctttgtatgctcggtgtgttgtgaaagtttggaagggcagacgtttttctccaagaaggacaagccgctttgcaaaaagcatgctcactctgtgaatttctgaaaagtcaacagttccaggaaatgggagaaatttgaagaaaaggggggaaactaaaattaccgtttaattttagtttaatatttatatggagttctaaaataatagtagccctggatggataaactctaacattaaaaccaagtctgtgagaaagtgtttgccttcagaaagtcacagatggtttgggatttattatgactagcctgtgttttctgcccatgaagtagcctttataagaatcaatttcctgattactaaattcatcttagaataaattagcaaagaattacattttagaattaaaattctgatctaaatatccagttttgactatactacaaaataagttggtgacttttttatgtaaaagttttggtttgtcttttagatgatatgccatgataatatttgacaactcattggtatttgcatattcaaagaattttctttgacttggatttcttacgaagtttatctttctttaaggatctcatttttattgaacctttatttctctgttatttgtggaatacaatgctgcattttataatgttgtatttctctaaatttaat

SEQ ID NO: 5913 - DNA, 1122 bp, Cricetulus griseus
  modified_base (531)..(531): a, c, t, g, unknown or other
cttaccgagacacaaaacttggacagccagtaattaagcattttaaacaaaaggatacccagctgaatgtgacggtagaagacacacaaacagcggtccgaaggaacggcacattcctcaccttgcgggaggtttttggcaaggatttgagttataaacttctttattggagagactcaagctcaggaaagaagcaagccaatacaaaaactaatgatttctccattcttgtggatcaaccagtaagctactgcttctctgtacaagctctgattaactccaggaaagatgaccagcagagcccacaaagcgacaccgagtgctcggacgaatgggagagtataatgggagaaacactcatcattgtgggagcagtggtgtttgtgctcatcctctttgtcatcttcctgtccatatatctgtgcaagcacagaaagggcagagcagggcagaaaaggaagcctgatattccagccaacactctgattccaacactagcatttgtcactttagagtgtactgaagggtacngacaggttaacactacagagtcttttgcacaaatgctttagattgtctattctacactcaggaagacactaggtcaccccaggggacagatgcctttcgtataactggggtggacttttgggagagcctttaagaagctgatttcattggctatagaacagttaaaatggaaattgggtagacttttctgacagctgtccttttgtaaagtggtatttggtttcttttttcccccttctaggtactgttgaaagttcaaagaaattggcaaactttcatattaatgtgttaaatgcagtatatttctgcatggggcatctttctgttatgtattacaatttagcactttaactacaatggtggggattaaatatttggtagccaactctatttttataagactactatacaaaaaaactacattgagtttatgacttaaggtacttaaagtgtctatggttaacactgcgtatatttatataaattttaaaggtttgtatatgggatttctatgtatatagcttctatttgtatatattgagattatttatttaatatacttttatataaataaaggtgaatggaaattga

SEQ ID NO: 5914 - DNA, 1122 bp, Cricetulus griseus
cagaaggaagcgcagcgcatcatgaccctgtcggtgtggaagatgtaccactctcgcatgcagcgaggtggcttgcgtctccaccgcagtctacagctgtccctcgtcttgcgtagcgctcgggagctctacctttcagccaaggtagaggctcagcagcccgagttcgcgccatctgacagcactctggaccctcgcctgcacccgccgcgggcggccgaagctgcggggagagcggcgccccccgacgccgagcagcagctcccggaggccatggacacgcaagaggaagcgctgcgaggccaggagacccccgcgccctgcgacccgcctcccgccagagccagccgcaagcgccggggcagcagccacccgagcgacggcgctgacgccgggctggtcccaagcaagaaggcccgcctagaagaggtggaaagggaggagacgtcggaggtcgccgatcgcctgcaacttactcccgcacaggccgagggtgccttccctagcctcgcccgcgtcctccaaaggcgcttctccagtctgctgaactgtgggccgcccccgccggcgccccccgcctgcgaggccacgccagcctgccgcccggccgacagcatgctcagcgtgctggtgcgagccgtggtggccttctgaggagtccgagccgcgtcgccggagccgaaaacgcacacccgtggccagggccggctggggaaggtcggcgggaccggtggagaagagccgcggcccgggctgccagaggcccggggaaggactgaggagctgagggcgcgggcgcctgccttctcccacagtgcgtccacaggtgctgttaaggactgtcccctccctggctgggagaagggacacctggatcttgaatctcagggtcggactttcttggcccggctgcccgtgcaaggccgtttcactagcgtacgcgcttcgggccctacaagtggcacgcttgtgcaagcgctcgtggttgcgtcatggggcagacgcggtgcttcctgctgccttgcgtgggtgtggggcctgggaggaggccagggtgtggacccgccctggggaccgggaagtgatttgagtcacctcgcccccacaggctgctgtggttga

SEQ ID NO: 5915 - DNA, 1121 bp, Cricetulus griseus
cgagcacggagtaggtgctgcaccctctaccctaccggcgtgtccgcccgcccatggcggggcaggcgctgcagagctcgggcgtgggcctgcgcaggatcctggctcacttccccgagaacctgagcctggccttcgcctacggctccgcagtgtaccgccaggcgggacccagtgcacagcaggagaatcccatgctagacttggtgttcacagtagatgaccctgtctcctggcacgaaaagaacctgaagaagaattggagccactactccttcctcaaactcttggggcccaggatcatcgcttcagtccagaataactttggtgccggggtctacttcaacccgctgatcatgtgtgacggaaagcttatcaaatatggggttattagcactggcaccctaattgatgacctcctgaactggaataatctgtatattgctggacgcctccaaaagccggtgaagatcgtgtcaatgagtgagaatgtgacgcttagatcggccctggaaaagaacctgaagagtgcggtgaccgccgcctgcctcatgctcccggaaagcttctccgaggaagacctcttcatagagattgctgggctctcgtactcaggtgactttcgcatggtgattggcgaggaaaaagcaaaagtcttgaacatcgtgaagcccaacgtagcccatttccgagagctctatgggaacatattacaggaggacccccaggtggtgtataaaatgcagcaaggccgactagagatagataaaagcccagaaggacagttcactcagctaatgacattgcccagaaccttacagcagcaaatcaatcatatcatggaccctcctgggagaaacagagatgtggaagaaaccttgctgcaagtggctcaagaccccgactgtggtgatgtggtgcgcttaggggtctcgtcaattgtcagaccttcaagcatcagtcagagcaccaaaggcctttttactgctggtgtgaagaagtcggtgatttatagttcacggaaactgaacaaaatgtggaaagggtggttgacaaaagcaccctgacttgctggtgtttgtgttgtgtgtagattttgaataaatggctccgtgcttttt

SEQ ID NO: 5916 - DNA, 1121 bp, Cricetulus griseus
atgaacaaactacggcagagttttaggagaaagaaagatgtttatgtcccagaggccagtcgtccacaccagtggcagacagatgaagaaggagtccgaactggaaagtgtagcttcccagttaagtaccttggccacgtagaagttgatgagtcaagaggaatgcacatctgtgaagatgctgtaaaaagactgaaagctgaaaggaagttcttcaaaggcttctttggaaaaacgggaaaaaagcagtgaaggctgttctgtgggtgtcagcggatggactcagggttgtggatgaaaaaactaaggctctagcacctgtagcaatgcctgtgcgtgaaaccaacccttgggcccatgcccctgatgctgctaaccaggaaattgcagccatacgtccggggactgagtggggtcagtcctcgggtgctgcctctccaggtctcttccaggctggtcacagacgtactccctctgaggctgaccgctggttagaagaagtatcaaagagcgtccgagcccagcagccacaggcctccgctgcccctctgcagccagcccttcagcctcctccacctgctgccattgccccaccaccagcaccacctttccaaggaaatgcattcctcgcctctcagcctgtaccagtgggtgtggtcccacccctgcagccagcctttgtccctgcccagtcctaccctgtggccaatgggatgccctatccagcctctaatgtacctgtagtgggcattaccccatcccagatggtagccaacgtgtttggcactgcaggccatcctcaggccactcatccccatcagtcaccaagcctggccaaccagcagacattccctcagtatgagacaactagtgctaccatcagtcccttctttaagcctcctgctcagcacctcaatggttctgcagctttcaatggtgtagatgatggcaggctggcctcaggaagcaggcatgcagaggtccctgcaggcacctgcccagtggatcctttcgaagctcaatgggctgcattagaaagcaagtccaagcagcgcactaacccctcccctaccaaccctttctccagcgacttacagaagacgtttgaaatagaactttag

SEQ ID NO: 5917 - DNA, 1121 bp, Cricetulus griseus
ggatccgtcagtatggttcgcagagaactggtttcgtctgctttggccgtgacaaggcggccgggggcgttaagaaacgcttctccttgatcgcggagaggggatctgaggtttgtggccacccgggtgacccgatccgggcttgcaggagggattagccatgtcccagggccccgccatcctgtggagcccgatggtgatcgtggaggctgcgggtggagccctgccccaggtttctcattattcaatgaaatctcccaaccaggaagagggctgtgtgtcctttgaggatgtggctgtgtacttctcctgggaggaatggaaactgcttgatgactcccaaaggctcctgtaccagactgtgatgacagacatctttgaacttgtgtcctcgctgagacttgagctttctgggatgacataactcaggtggaatcttgcggagatctctccgccctgcactgagattcacgactccgtgctcgggtctcctcgggcatcaggtgacttacacggttggggaggcacccaagagccctgagagcgcagaggccctggccactgagaagaaaactgcaaatgcacttactgtggcaaagtgtttactagtatatctcatcttaaccgccactggaagatacacactggagaaaagcctttccagtgcagcgagtgtggcaaatccttcagccagaaagccttcctcattaagcatttccgaatgcacaccggggaaaagccgttataggtgtggggaatgtggcaaagccttcaagcataacatctccctcatttcccatcaaggacttcacacaggagaaatgccctttaagtgcagcgagtgtgggaaatcgtacaggagcagggaaggcctcaaagtccattatcgctttcacacgggcgaaatgccctttgagtgcagcgagtgtgggaaggcgtacagaagccgcgaaggccttctgaaccatttctacagccacactgcagaaaagcctttcggttgcagtgaatgtggggaatatttcacccaaaactctgacctcattgagcacctaaccgtccatggcaagccctttaagtgcaatgagtgcgggagagtctttaattccagttacaacttc

SEQ ID NO: 5918 - DNA, 1120 bp, Cricetulus griseus
ttggcggggtgtggagctgtcacagggtctcgtggcccagtggcggcggccctggggaggggcgcggtcggtccatagcggccttccgcggcctgggcaccggggtaggccgcagctgcgcacggggtgtggcgcggactaacgggaaccgtgagccctgcgctaattagagccgactcggcgccggagggatcggcgggaaatggcggacgaggcgttgtttttgcttctccataacgagatggtgtcgggagtatacaagtccgccgagcagggggaagtggaaaatggaagatgtattactaagctggaaaacatggggttccgagtgggacaaggattgatagaaaggtttacgaaagatactgcaaggttcaaggatgaattagacatcatgaagtttatatgtaaagacttttggactacagtattcaagaaacaaattgacaatctaaggacaaatcatcagggcatctatgtacttcaagacaacaaatttcgactacttactcagctgtctgcaggaaaacagtatttagaacatgcatcaaagtatctagcatttacatgtggcttaatcagaggtggcttgtcaaacttgggaataaaaagtattgtaacagctgaagtatcttcaatgcctgcctgcaaatttcaggtaatgatacagaagctgtagagactcctgtacaaagtattgcaagtactgatgtcacctcatcgttgctgtctgtgctggagcaaaggtgttctctcaccagattcacatagaccaaatcaaagtagataaaaggtcctcccaccgtgacataaactaactgaactgttcaatgatttcaatgaactagacacccaagatgtaaggttctttattttaaacatctttatttccttagtgtaatatgtatttaaccatagattgagaagtgaaactcagggtgtgttgaattgctgtatagaaaagtatgcatcaatcagaatagtttgtgttcaaatgaccaaaatttgttaaagtataaatctgttttagttatttaaaaacaaatgactatgctaaattaagcttaatttttacattgtgtatatgtgtatatataaataacatatgttactctctaaa

SEQ ID NO: 5919 - DNA, 1120 bp, Cricetulus griseus
aaggctctttgccttccggtttctctcggcctttctctgcgcgctggtttcgacttgcgctatgtggtgtggagaaggggcggggtccctcctcctttctgttcctactggaagcgtccacttcgtgcttggctggaattgaggagtccgaggtgtcagctttaggcttggtgaagcgtggtggctccatggccccactcggaggcgccccgcggctggtgctgctgtttagcgggaagaggaaatccgggaaggacttcgtgaccgaggcgctgcagagcagacttggaggtaacatctgtgctgtcctgcggctctctggtccactcaaggagcagtatgctcgggagcatggcttggacttccagagactcctggatgccagcacctacaaggaggcctatcggagggacatgatctgctggggggaggagaaacgctgtgccgatccaggcttcttctgccggaagattgtggaaggcgtgtcccagcctatctggctggtgagtgacacacggagggtgtctgatatccagtggtttcaggaggcctatgggcctgtgacacagacagtccgggtagtagcctcggagcagagccgacagcagcggggctgggtgttcacaccaggagtggatgatgctgagtcagagtgtggcctggacaactttgggaactttgactgggtcattgagaaccatggagacgagcagagcttggaagatcagttggagaaccttctggaatttattcgtgccacactttagtgatcaggcttcagggctgagcagagactgcttcactggggcggatactggttctgtcagatgtggctccccagtcctggctgaggtcagagcaggtggactggctctagatttccagaggtgtagggaggatgctcacaggcagtgggcaagtttagaatcctctggtgtgcttgtcttccctggagaggacgccctgcctcttcaggacacttacaggacaaaggaaggtgcattagtttgtttgaggcaggagcattaccatgccctgggtggccaggtctgctgagctgtgatggtttgcgtcctgtgtatgttccggcctggatcctaataacctccttggaacacaa

SEQ ID NO: 5920 - DNA, 1120 bp, Cricetulus griseus
atggctgcgaagagcttcgcgtcccgcttccgggcctcgcggcggtttctgaacggcttcttggccggggctgtggtgggcgccgcgggagcggggctgacggcgctgcagttcctcccgcgtcgggacgcgacggagccggagccggagccgaagccggagcagcacgaatccacagaaaaagttatcttggaaaaatttggatttcctttaactggagcggagaccaggcattacactaatcatgctttgtcttacgatcaggagaagcgggtgcccagatgggtccttgagcacatatccaaggacaagatcataggtgacgcggacagaaaacattgtaaattcaagcctgaccccagtgtcccttcagccttcagtgccctcaatgaggactacattggaagtggctggtcacgaggacacatggccccagcaggaaacaacaagttttccagtaaagccatggcggaaaccttttacctttctaatattgtgcctcagaattttgataataattctaggctattggaatagaatagaaatgtattgtcgtgagctgacggagagatttgaagatgtttggatagtgtcgggacccttaaccttacctcatactggaagtgatggaaagaaggcagttagttaccaggtgatcggtgaggacaatgtggcagtcccctctcatctttacaaggtgattgtggcccgcaggagcccggaatctacggagccgctggccctgggggcctttgtggtaccaaatactgccattgggttccagtcccagttaactgagttccaggtgagcctccaggatctagaaaagatgtcaggtctggtgtttttcccccatttggacagaaccagcaacatccggaatatttgctctgtggacacctgtaagctcctggatttccaggagttcactctctacctgagcacgaggaagattgacggggccaggtccgtggccaaactggagaaggttctagaaactctgaagagctcaggtgtggaacctgacgattacttcctgagtcgctatgggaagaagctacaggaactgaaagccaaggagcaggcgggcgcccagctggaaaagccgtcctagtgcctg

SEQ ID NO: 5921 - DNA, 1120 bp, Cricetulus griseus
cgctctcgggtggcgtgttccgcgtttcctgtccgcaccggtgcaccggtgcagctccggcctcgggcccgaccgccacaccatggcttccgctttggaggagttgcagaaggacctagaagaggtcaaagtgttgctggaaaagtccactaggaaaagagttcgtgatactcttacaagtgaaaaatccaagattgagatagaaataaagaacaagatgcagcagaaatcacagaagaaatcagaacttgacaatgaaaagccagctgctgtggttgctcctcttacgacaggatacactgtgaaaatcagtaattatggatgggatcaatcagataagtttgtgaaaatctacattaccttaactggagttcatcaggttcccactgaaaatgtgcaggtacacttcactgagaggtcatttgatcttttggtaaaaaatctcaatggcaagaattactccatgattgtgaacaatcttttgaaacccatctctgtggaaagcagttcaaaaaaagtcaagactgatacagttatcatcttatgtagaaagaaagcagaaaacacacgatgggactacttaactcaggtggaaaaagaatgcaaagagaaagaaaagccttcctatgacactgaaacagatcctagtgagggattaatgaacgttctaaagaaaatttatgaagatggagatgatgacatgaaacgaaccattaataaggcatgggtggaatccagagagaagcaagccagagaagacacggaattttgagacttttaagtcctttgggaactgtgatgtggaatgctcatgtttccagtaagggaatgttgttgaactgcacatatttacacagccttctaagtaaagacaggcgaaattactccatttcttactggaggatttgattttaaataaaatatgcttattaaactttctccttcattagcatcccagtcatttttggtaagtactgccatggatcagttggcttataaaactataaccacgatgcaaaagtttgaaaattcatctattcctttgttcaataaagttgaaattttacttaaaaaaaaaaaaaaaaaaaaaaaaaaaaaaaaaaaaaaaaaaaaaaaaaaa

SEQ ID NO: 5922 - DNA, 1119 bp, Cricetulus griseus
gtgcttgcgggccgcgcgctgcgagggatgtgggccggggccgcggggctgaggggctcctgcgcccggctgcaggcccttcggggcggccatggggccgctttttttcccggtccgcgcgcaggccctgcacacctctgttgcttcccacgggagcaagaacttaactcaagaaatttgcctcgaaaaccagaaagaaattctggtatgaaggtccgtccctcgggtctcatttgactcacaagccatccaagtttgagttcctcatgaaaagtaccttaaagaagaccaggaaggaagacactgtacgcctcagagtcctgaatggccttctctacaaagcattgacagaattgctgtgtactcctgcagtgagccaggaggtctatgacctgaatgtggagctctccaaggtctctgtgacttcagacttctccgcctgccgagtgtactggaagataggtgtctctgcagaccagaacaggcacacggaggctgtcctgcagaggagtgctgcctacataaggcaccttctcatgtctcagcagaccctgagaaatgttccacccatagtgtttattcaagacaaaaaagacatacttctggctgaggtagaccggttactagcagtggctgactttggacccccagatgaaagggatggcttggcactggattgtttgaggaaccctgaagctctgtcatcacatgatgcccaagaaccagccacacacccaaatctgtgtgggattgaccatgaggccctgaataagcaaataatggagtataaacgcaagaaggagaaagggctccagtgcatgaacctggcacagccatcagggcaggagctggtccctgacctgactcatttgctgagaaggagaaagaagacatcatcccgccggcaccaggacacttccccaagaagcttccttttgggtgaggaggctgaggacgaggacaacaccacagagtatggatgccaggctcatgaggcagaagaggactgggaagcagaggccagaggtgatggggtacagcaggggccctgtggcaaaagagaacagaggtaggggtgaggcctcgtgctgcctgtccctgcctgtggtcagactgcag

SEQ ID NO: 5923 - DNA, 1119 bp, Cricetulus griseus
tgaggatgtgggggatgaggattgtgagaaaaaacgcaaaggggcctttttctcttggtcaaggaacaggagcaccgggcggtcccagaagaagaaggaccatggtgaccatgcccatgatgcccttcatgccaatggaggcctctgtcgtcgggagtcccagggctctgtgtcttctgcagggagcctagacctgtcagaggcctgcaggatctcagcactagagagagataaggctcgaccaaacactgctgtgtccacctcccagatgggacatcctgtgtggttgctgtaaagtccgggttttccatcaaagagatcctgtctggattgtgtgagcggcatggcatcaatggggctgctgtggacctcttcctggtgggcggagacaagcctctggtgctgcatcaggacagcagcatcctggccaccagggacctgcgcttggaaaagcgtactttgtttcggctggatctcgttccaattaaccggtcagtgggactcaaggctaagcctactaagcctgtcacagaagtgttacggccggtggtagccaagtatggcctggacctgggtagcctgctggtgagactgagtggggagaaggagcccctggaccttggtgcccctatatcaagtctggatggacagcgggtcatcctggaggagagggatccttgcagagggaaagtgtccacagacaaacagaaaggtgctcctgtcaaacaaagctcagctgtgaactccagccccagaaaccactcggctatgggagaggagagaacactaggcaagtctaactctgaccagcgtgggctgctaagaaaggaagacctggtgctgcctgagtttcttcgcttaccttctggttcctcagaactcgccttgtccagcccagccccagtcaagggctttagcaagagagctgttacaggcctcatccaggaaggagctgctcagacagaggagaactacagtgacagcccagcaaccagccctgcctcagcccatagccccagctcagcctacagtccaggctccacccatagccctggctccacccatagcgtgccatgaagtggccctgcgtgcatgcttgggcacctctgtcatgccaca

SEQ ID NO: 5924 - DNA, 1119 bp, Cricetulus griseus
taatgggtattgttcatggggcagctacttatttacccgactttttagactacttttcatataattttcccaattcaccagtgaaaatggagatattgggaaagaaagatatagagacaacgactatgtccaattttcatgctcaggtaaaaagaacatattctcatggtacttacagagctggccccatgcgacaggtaagcttggtgggagccgttgatgaagaagtgggagatttcttcccggagttcctggacatgttggaggagtcaccattcttaaaaacaggacgagagctcatgcagatcacataggacaaggctttgagcgacaaactacagcttgccgttggagtgctgaaggccgtgcactgtggacacaggcctgatcaacctcgaataaccaaagatgtaatttgttttcatgcagaagatttcttagaagtagttcaacgaatgcaattagatttacatgaacctccactgtcgcagtgtgtccagtgggttgatgatgcaaaacttaatcagctgaggagagaaggcattcgttatgccaggattcagctgtatgataatgacatttattttattccgaggaatgttgttcatcagttcaagacagtttctgctgtatgcagtttggcatggcatgttcgacttaaattataccacgcagaggaggacacttgtcacagtacaagtttctcatgaagcatgcatctcatcaggtcccacatcatcagttctcgggcctcacactgacaacagatgtaattgatctgacaaatgcatacctctctgtgaaggtgaggtgtgagtaaccaacaggctcaagatctcaagataaagccttacagacttgaattacatttatggccctggtcttacgggttatttttaaaaatcctcctcagatgccatctgagaacttgttgactacctttgttacacacaaatacctattttaatactgcatgttaatgttttttttttcagttagtacgctcccattctccatgtgaataaagattttttatttccaatatcttggaccagaacaataaagcacttaagataaagttttaataaggtcatatattatacagagtgattgttatat

SEQ ID NO: 5925 - DNA, 1118 bp, Cricetulus griseus
aatcaacgaaacagacactccagcccagctggagatggaggacgaggacaccattgacgtattccagcagcagacaggaggaacagcttcccgagggaccatccccacaccccaaccattgtcctgacatttgctattgaatggtgaacatgcagccacgcccaccactcacagaagagtcagcagaagccagagtcactgaaggagtctccttttccgatgggcttggagtgaagcagaccataatgcagggatgagagtattagggaacttggccaacaaaagtgtttgcttatgggaaatgagatgtgagctcttgggtatttgtttttgttttctatttcttgttaactgtagttacctctggtttgacttgtcctaatcaagtagagcttgtggtcacattactcagtgggcatgcctacggatgttgagagagaggagaggaacagaattccacctatttgttgtgggcatcgattgttaaaatgtgaaatactgtaaatttgagctttgtcaaagatatggtaaagttaaagggagaagaccaatgctttttaaagatgaaaggagtccttagtccttgacccagccactcctgcacgtgcccctttgtacttggtacctggtcatgcatacatgggaaggctggtacagtgagacccactctcttccctccatataatgtagaagaaagtaattgccatgtctcatttggaaactgaatgtggcctcagatattttctagtacttggttccgatacacaattatggtttctgtataagaaggtaattggttaagtatcaagtttacagtgacgttgtggaaaagacctgctttaaagtgtggttgcaaaagaaagccagggaaaggtgacctcattctcatggattatgctctgccgctttccacatgtgtattaaagtgatgcaccagtgggtgacattggtcctgcatcgtggggtctgtaccagttaaatgttcgtagttctgcctgtcatccttctgtaaggattcattgctgcttggtggccatctctgccttttatagtcacccgacactgacctaccgtctctcgcttgcttaaaatcctgaggaaaatgttcttgtttcctg

SEQ ID NO: 5926 - DNA, 1118 bp, Cricetulus griseus
ggtacaccaggggttggaaaaaccacactaggcaaagaacttgcatcaagatcaggactgaagtacgttaatgtgggtgatttagctcaagaagtctgatcaccggatatcatggagtctggcaagatggcttctcccaagagcatgccgaaagatgcacagatgatggcacaaatcctgaaggatatggggattacagaatatgagccgagagttataaatcagatgttggagtttgccttccgatatgtgaccacaattctagatgatgctaaaatttattcaagccatgctaagaaagctactgttgatgcagatgatgtgcgattggcaattcagtgccgtgcggaccagtctttcacttctcctcccccaagagattttttattagatattgcaagacaaagaaatcaaacccctttgccattgatcaagccatactcaggtcctagattgccacctgataggtactgtttaactgctccaaactataggcttaagtctttgcaaaaaaaggcatctactcctgcaggaagaataacagttccccggttaagtgttggttcagtttctagcagaccaagtactcccacactaggcacaccaactccacaaaccatgtctgtctcaactaaagtaggcactccaatgtccctcacaggacaaaggtttacagtacagatgcctgcttctcagtcccctgctgtgaaagcttcaattcccgcaacatcagcagttcagaatgttctgattaatccatcactaattgggtccaaaaacattcttattactactaatatggtatcccaaaatacagccaatgagtcagcaaatgccctgaaaagaaaacgtgaagatgatgatgatgatgacgatgatgatgatgatgatgactatgataatttgtaatccagcctggatgcttgtaacatgtatacttggtcttgaatccattgtactgagattaaacaagcatgttagatgttttaaagcttgtattttagaaaatggtatttaagaagtatacataatatgcttttccattgaaatgttcagttttagtagaagtagtaatggtttttcatctacctttatgcataaaaataaaattgtcattt

SEQ ID NO: 5927 - DNA, 1118 bp, Cricetulus griseus
ccctcgtgttccgatccagcccttgctggttccacagccttgacctggactgggcttggggctgggtgggtttcacagaccacccgcgtcacgatgctcctggaagaagtccgcgtcggcgaccggctgagtggcgcagcggcccgtggcgacgtgcaagaggtgcgccgccttctgcaccgggagctggtgcatcctgacgctctgaaccgctttggcaagacggccttgcaggtcatgatgtttggaagtccagcagttgctctggaactcctaaagcaaggtgctagccccaatgtccaagatgcctctggtaccagtccagtgcatgatgcagctcgcactgggttcctggacaccttgaaggtcctggtggagcatggcgctgatgtcaatgccctggacggcaccgggtcactccccatccatctggcaataaaagagggccatagctctgtggtcagcttcctggctcccgaatctgacctccatcacagggacacttcgggtctcacccccctggagttggcccagcagagaggagatcagaaccttatggacatcctgcagagacacatggtgatcccaatgtgacccagggccgctgtctccagccaaggagcctcactgggttacaagtcaacagagaagaaaagaaactttcgctctttattcccatccattgaagaagggagtgggaggagcattttgtggtttattggtgttggtttcttgagtgagtgtgtttgggggactttctcatgtgtttttctcaccccgtttggtgtgttggacagagcaggggctcctacaggcaacagccgcctaaacggttcagttttccctgcacctggccgcagagacctcagggcagaggtttaaagccctagcctcagagtgaggtcatcgtctcctgagctcctggaagctggtgaccttggaaggctgtgctcagagagccctaagtgtgagccacctactttgggcatgggagggagaggggaaaacgtttcgaatcagttaaaaagatagtgtgggttaatttttttcttggaagcttgttttccagtctgttgtacagagtttgaaatatatatatatttattgctttatggaaa

SEQ ID NO: 5928 - DNA, 1118 bp, Cricetulus griseus
  modified_base (1110)..(1110): a, c, t, g, unknown or other
cccggaagtgcccgaggggccgcgatggagctagtggagctgggcgcttggtagcacctctggtaactcaggtgccatggccttgattgaaggggtaggtgatgaggtgactgtcctttttcggtgcttgcctgccttctggtgctggccgttgcctgggtctcaacacataccaccgagaatacagaccccctgccacagacgtcagggaccacagcaccagcacagcccagtgaagccatggcagccacagacagcatcagagaggaggccccaggggctgagagccccagcctgagacacagaggtccatctgcacagccagagccggacacaggggtcacagcaactactccacctgcagactccctacaggaacccctagtgctacggttgaaatttctcaatgactctgagcaggtggctagggcctggcctcaggataccattggctccctgaaaaggacccagtttcccggccgggaacagcaggttcgactcatctaccaaggtcaacttctaggagacgacacccagacactgggcagcctccacctaccccccaactgcgttctccactgccacgtgtccacgagagccggtcccccaccatcccccctgcccaccggggtcggagcccggcccctccgggctggaaatcggcagccttctgctgcccctgctgcttctgctgctgctcctgctctggtactgccagatccagtaccgacccttctttcccctgacagccaccctgggcctggccggcttcaccctgctcctcagcctcctggcctttgccatgtatcgcccgtagtgcctccgcgggctgctggcagtgcagccagcccctctggacctcagtccccaaggcgcaaaggggctgctgtctgcccaggccctcctcacccgcggcctgccttttcccgctgccctggagcccagccttgcgtcgcagaggactccaggggcggaggcttctccctgtcatcttcacagctctgggctgtctcctggggctgctggcacgcagccttcgcagacagcggggtcttctggatcaggcccttgctgtcgctgccttggcctgtgcctttgtcctaaaaaaanaaaaaaaa

SEQ ID NO: 5929 - DNA, 1117 bp, Cricetulus griseus
ctgactgtggctgctgtggacttgctgaaccatcactccagggagtttgatgccacccaggtcctacagctactgcctgatacctggtcagtgcagcttctctgcccgttcctcacaggggctatgagggacagcatccatgccaggaggaccacacaggtggctcttggcctggccaagtcagaaaacctgatttacacatatgataagatgaagctgaagggaagtgcagtccagctctctgaaaaaaagctttgccagctctgccagaaccctttcagtgagcctgtgtttgtcagatacccaaacggagggcttgtgcacacccactgtgctgccagcagacacacgacccccagctcacccagccctggtactcggacttgaaagagctggttccaggctgcaacggggattctgagttcttttccaaacctgctttgtgccagccagctagaacaaagggaaggcatctgggtgccagggaaatgctgtccctgggaaagtgtccagggtgcagagtcctgaggtgggcaccttgccttctgaggcggtatgctcttcacagaggctccgcatctgccactaaaatggacatagtttttgttcttcccacccagctgtcgacctcggaaaccctttgccttgttcacttaagcactcagttggtgtaaggtcctatgcttctgactgcctagcacatggagagctatttagaaacagttaaagcttgaagcaggctggatgctgaaatggttcagtgggcaaaggcacttgccaccaagcctgacaacctgaattcagtccccagagtgttaatgcgggcctgtcacctagtctgtgggcaccggatgtgagcacagagctgagaggcttcatgagccatgcttgacgctactggagcacagagaagtgagcgctcggtcacactgtcacctggcacctgtcgcacagctggggcagcccttgctttctgcttgctttcccaaaggaactttgtcctcgtagcttcctttgcctcttaatgggtcccaaatccacaagatgtacaaatgtaaacttgttgattttattaaaattcttctaattcttaaaaaaaaaaaaaaaaaaaaaaaaa

SEQ ID NO: 5930 - DNA, 1117 bp, Cricetulus griseus
acaagggaagtggccgtcgcgggagcaagagccttcgactccggacccccgcgccatgccgtccgagaagaccttcaagcagcgccgcagcttcgaacaaagagtagaagatgtccggctcatccgggagcagcaccccaccaaaatcccagtgataatagagcgatacaagggtgagaagcaactgcctgtcctggacaaaaccaagttccttgtacccgatcatgtgaacatgagtgagctaatcaagattattagaaggcgcttacagcttaacgccaatcaagctttcttcctcctggtgaatgggcacagcatggtgagcgtgtccacacccatctctgaagtgtatgagagtgagaaagatgaagatggatttctgtacatggtgtatgcctcccaggagacattcggaacagtactggctgtgtaagactagaacaatgcctaatgtttgttaagcccttatcaaggaaaaagggatgttaccagcagatgctggtcagcttaccattcacagatcagaatataggcgcccacctagggtgttaggaactgtttgtcagcaagaaactgagcttcatgcaagcgcattcagcttggaaactcatctaaactaggctctcttgtgttcaaactttagaagtttcaaaaataaaatactttgcatcttaagttgccaataaaacagaccaagttattttgacatttttctcctcagtagggatttaaaatggaacagcagcatcaggggtacattcttttcctgggatctgctgccttctccaaaagggcttccactcagtagagaaggtgatctgagaatctcagaactgcctgctgtcatggagggaagccaatatagccacgtgatgcccaagctccttacaggcacccctccccgtccctgcatgcaactgtctacttgctttcaatgtgattttatttacatcattctatctaactaccctgtcttgtgtaggttgtgtacgtcaatatgtccctggtttttataactacggtgcgatcaataaggattcctgtaatactgctttaaaaacgctgctcagaggggcggccttcatttatagaacacctgtacacttcgatgcactaa

SEQ ID NO: 5931 - DNA, 1117 bp, Cricetulus griseus
actgagaacactgctccaaggcctcaaggacccgtggttcgaggaggcagatccagcgcttggagcagctgctggcgctgtatgtggcagagatacggcggctgcaggagaaggagttggatctctcggagctggacgaccctgactccacgtatctgcaggaggcccgtctgaagcggaaactgatccacctctttgggcggctgtgtgagttgaaggactgctcctccctgactggccgggtcatagagcaaagaatcccctaccgtggcacgcgctacccagaggtcaacaggcgcattgagcggctcatcaacaagccagggcctgatgcctttcctgactatggtgacgtgctgagggctgtggagagggcggccacccggcacaatctcggccttccccgacagcagctccagctcatggctcaggatgccttccgggatgtgggcgtcaggttacaggagcgccgacacctcgacctcatctacaactttggctgccacctcacagatgactataagccaggctttgaccctgcactctcagatcccacgttggctcgtcgccttcgggaaaaccggagcttggccatgagccggctggatgaggtcatctccaaatatgcaatgatgcaagacaagagtgaggagggcgagaggcagaagagacgagccaggctcctaggcaacacttcccattcttcgggctcccctaaagtctccttggattcgggtgagggtcctagtggactggcatcccaggagtgccctactacctccagggctgacactgacgacgatgaggaaagtgaggaggaggaggaggaggaggaggagggagagggaggaggaggaggaggaggaaggaggtgccttgaggagaaggacatttcctcttctaggaaacagtcagaagattccctccccactgtcttggaaaacggggcagatgtggtcacctctacatccttcaatgggcgtgtctcttcccacacttggcaagattctggtcccccatgcaagagatctcggaaggaaaagaagctgctggattctgaaccattagaaaacagcaatgtagagaagcaaaaggctcagcagggaaatgggaagaa

SEQ ID NO: 5932 - DNA, 1117 bp, Cricetulus griseus
ttggattggcttcaaagatcagttgctttgtaaatatttaaattacattatgggattgctggacaaactttctggtttacttggcctaaaaaagaaaggaggttcatgtgttatgccttggactggataatagtggcaaaactacaatcattaacaaacttaaaccgtcaaatgctcagtgtcaggatattgttccaaccataggattcaccatagagaaattcaagtcctccagtctgtcttttacagtgtttgacatgtcagggcaaggaagatacaggaatctctgggaacactattataaagatggacaagccattatttttgtcattgatagtagtgataaattaagaatggttgtggccaaagaagaacttgatacccttctaaaccacccagatattaagcaccgccggattccaatcttgttctttgcgaacaaaatggatcttagagatgcagtaacgtctgtgaaagtgtctcagttgctgtgcttggagagcatcaaagacaaaccgtggcacatttgcgcgagtgatgccatcaaaggagaaggactacaggaaggtgtggactggcttcaagatcagatccaagctgtgaagacatgaaaagatagtctctggaaacttcagcaattttcaattaaaggagtctatgtaaggcatactgaataatctcaaatttattttaaaatatttatgcaaccaaggatattttacaatgttctgcttgctcttatggactctggaagaagtctttaagaatttaggacctgaacattgttaatctattaaccatatgaaaactaacattacctcggaacgccttagttacctgcttcttgtaaaggtctacatgttgctgtaattagaatgtgtaaataagttataagccatctcaatatcctatcatgatttatgatatctttaatgtattttcatttttaattgtcttctaaaagtttagtttatagtatgactttgaagctcaaattgtgttaaggagacagctttaaagcattataagggatcacaagtaattggtatatgtgtaattttcattgtgccactatcaataaaaaatgaaataataaaccaaaaaaaaaaaaaaaaaa

SEQ ID NO: 5933 - DNA, 1117 bp, Cricetulus griseus
ggcgcggtgggcgctggtgctgcgcggaggagcaggcggtgggccgcgtgggctctcacgaggcagctcgcggcacgtggccgcgcgggccggctcaggatgtcgtacatgcttccgcatctgcacaatggctggcaggtagaccaggccatcctctcggaggaggaccgcgtggtcgtcattcgtttcgggcacgactgggaccccacttgcatgaagatggacgaggttctgtacagcatcgccgagaagaaatggaagatagtgggagatctttctcatcttgtatgagtcctgtttggatatcccagctgttttaaagcaaacggtgttggtgtcgcttgtgctccgtggcatcctctcttgttctctggagcctgataggcctgtctgctgccaaaatgaacatccgccgtgctcggccagatgacctgatgaacatgcagcactgcaacctgctctgcctgccggagaactaccagatgaagtactatttctatcacggcctctcctggccccagctctcctatattgctgaggatgaggacgggaagattgtgggttatgtcctggccaaaatggaggaggatcctgatgatgtccctcacggacacatcacttcactggctgtgaaacgctcccaccggcgtctcggcctggcccagaagctgatggaccaggcctcacgagccatgatcgagaacttcagcgccaagtatgtatccctgcatgtcagaaagagcaaccgcgcagccttgcacctttattccaacaccctgaacttccaggttagtgaggtggagcccaagtactatgcagatggagaggatgcatatgctatgaagcgagacctctcacagatggcagatgagctcagacggcagctggtgctgaagaaaggcagatatgtggttctgggttccaaggagaatcagggcaacactcctggttctgaagaggcctgtcagcaggagaacctggccggagatgatagtggcagtgacagcaaagacatcactgatgtccaagacagcctgcaggacttggattccacctcttagagcctgcttgagcattataacttcttgtatttctagccacatttttcctggtaacc

SEQ ID NO: 5934 - DNA, 1117 bp, Cricetulus griseus
tctgtcgcacgcgaccccggctgcagcagcggtcacagcacttggcgcgcagagagagttgcagccatggctgtcgctgtggagggcacccgcaggaaagagcgcatcctctgcctgtttgacgtggacgggaccctcacgccagctcgccagaaaattgaccctgaggtgtcagccttcctgcagaagcttcgaagtagggtgcagattggcgtagtgggtggctctgactactcaaagatcgctgagcagctgggtgatggggatgaagtcattgagaaatttgattatgtgtttgccgagaatgggacagtgcagtacaagcatggacggctactctccaagcagacaatccagaaccacctgggggaagagctcctgcaggacttgatcaacttctgtcttagttacatggctctgctcagattgcccaagaagcgtggaaccttcattgagttccggaatggcatgctgaacatctctcccatcggccgcagctgcaccctggaggagaggatcgagttctctgaactggacaagaaggagaagatccgggagaagtttgtggaagccctgaagacagagtttgctggcaaggggctaaggttctcgcgaggaggcatgataagcttcgatgtcttcccggaaggctgggataagcgctactgcctcgacagtctcgatgaggacagcttcgacatcatccacttctttggcaatgagaccagtcctggtgggaatgactttgagatctatgcggacccccggactgtcggccatagtgtggtctcccctcaggatactgtacaacgatgccgagaactttttttcccagagacagcccatgaggcatgacggtgatcacagctaagcattgggaccttcaaagagctctggctaggcctgaagagagaaccatggagtgccaaggttcccattcctctggaccagcatgtagcatcatgtggggcaccacgaggcccactcacacaggaccagggtctgtggcaactgtcccaagccaggtggctccccataaataagacttattcctgcactccactgatggcccctggcttctgatgctgctggtttctgtaacagaataggtttcacc

SEQ ID NO: 5935 - DNA, 1117 bp, Cricetulus griseus
tctcctttccccgacatggcttgtgcccgtcccctcatatcggtgtactcggaaaagggggagtcatctggcaaaaatgtcactttgccagctgtattcaaagctccaattcgaccggatattgtgaactttgttcacaccaacttgaggaaaaacaacagacagccgtatgccgttagtgaattggcaggtcatcagaccagtgctgagtcctggggtactggcagagctgtggctcgaattccaagagtccgaggtggaggaacccaccgttctggccagggtgcctttggaaatatgtgccggggaggccgcatgtttgcaccaaccaaaacctggcgtcgttggcaccgcagagtaaacacaacccaaaagcgatatgccatctgttctgccctggctgcctcagccttgccagctttggtgatgtctaaaggtcaccgaatcgaggaagtccctgaactccctttggtcgtggaagataaggtggaagggtacaagaagaccaaggaggctgttcagctgctgaagaagcttaaagcatggaatgacatcaaaaaggtctatgcctctcagagaatgagagcgggcaaaggcaaaatgagaaaccgaagacggatccagcgcaggggaccctgcatcatctataatgaggataatggtatcatcaaggccttcaggaacatccctggtattactctgctcaatgtgagcaaactgaacattttgaaacttgctcctggtggacatgtgggacgtttctgcatctggaccgagggtgccttccgaaagttagatgagttgtatgggacttggcgtaaggctgcttccctgaaaagtaattacaaccttcccatgcacaagatgatgaacacagacctaagcaggatcctaaaaagcccagagatccaaagagccctccgagcaccacgcaagaagattcatcgtagagtcttgaaaaagaacccactgaaaaacctgagaataatgttgaagctcaacccgtatgcaaagactatgaggaggaataccattcttcgccaggccagaaatcacaaactgcgggtgaagaaactagaagcagcagcagcagcgctagcagcaaaatcagagaagg

SEQ ID NO: 5936 - DNA, 1116 bp, Cricetulus griseus
ctgaggggagggagaggccggttcgggtctggccgctaccgctgctcgcctgaggtgtccggcccggcagcagctccgtcctcagttcctgggtaccgtcagcgaggccccgccgagccagcgtgggagggccgcaggcggcaggcgccgcatcatgtcagccaaggacgagcgggccagggatatcctgagaggcttcaaactaaattggatgaatcttcgggatgctgaaacagggaagatactctggcaaggaacagaagacctatctgtgcctggggtggagcatgaagcccgtgtgcccaagaaaatcctcaagtgcaaggcagtgtctcgagaactgaacttttcttctgcagagcaaatggaaaaattccgcctggaacaaaaagtttacttcaaagggcaatgcctagaagagtggttcttcgagtttggctttgtgatccctaactccacaaatacctggcagtccttgatagaagcagcacccgagtcccagatgatgcccgccagcgtcctaacgggcaatgtcatcatagagacaaagttctttgacgacgaccttcttgtcagcacgtccagggtgaggcttttctatgtctgagagaagaacttgggtgcacttgaagaatttggaacgggggcaggaggaagctttacttttgctccactcgtttgatttttgatacttcagctgattccttcaacacagaacccacctgtgacaccaggaaaccagctctgtataggtagccagttggctttttctcccaaaacctccatctccactgacaagactaaactcccaaccccagccgagtgcaggggacaagcctcgactccatcctggtgcaagcatgggaacaaacccacaccaggaaccacactgcgtcgtcacctgccccgcctcttccttgggccctacaggctttctttggcctctggttttgaaaaaatttacccacctgacccatctagttttttcctaccacttctatttcatacattctcatacctttaacttgtaaaatagactatgatattattattacataatgtaattaaagcattaaactattcctacagtactttaaaaaaaaaaaaaaaaaaaaa

SEQ ID NO: 5937 - DNA, 1116 bp, Cricetulus griseus
gaaaagcatgttgatgagtggaatattggccggctgaagaccatcctggatctggtggagaaggagagtgggatcaccattgaggggtgaacaccccatacctgtacttcggcatgtggaagacatcgtttgcctggcatacggaagacatggacttgtacagcatcaactacctgcacttcggagagccaaagtcttggtactctgttccacctgagcatgggaaacgcctggaacgtcttgccaaaggctttttcccaggaagtgctcaaagctgtgaggcctttctccgctacaagatgaccctgatttccccattaatgctgaagaagtatggcattccctttgacaaggtgacccaggaagcgggagagtttatgatcactttcccatatggttatcatgctggcttcaaccacggcttcaactgtgctgaatccactacttgccttacccgtcgatggattgagtacggcaagcagatatggtgaagatctccatggatgtgtttgtgaggaggttccagcctgagcgctacaaactgtggaaagctgggaaggacagcactgttatcgaccatactctgcccacaccagaggctgctgagtttctgaaggacagtggactacccccaagagctgggaatgaggagtgcccagaagaggacatggaaggaaaaggagttcaatgagatcatggcccaacaggcccctcactgtgctgtctgtgtgatcttcctgacctaccatcaggtggaatttggaagctttagtcagaactgtgagaaagcttcggagccagctgctcagactcagaggaccaagccattgatcccagaaatgtgctttaccacaactggctgcagcacagacatcaacctgtctaccccttacctggaggaggatggcaccagcatgctagtgtcctgcaagaagtgcagtgtccgggtccatgctagttgctatggggtgcctcccacaaaggcttctgaagaatggatgtgttcccgatgctcagccaatgccctggaagaagactgctgtttatgctcattgcgtggagggccctgcagagagcaaacgatgacagatgggtccatgtttcgtgtgctgtggc

SEQ ID NO: 5938 - DNA, 1116 bp, Cricetulus griseus
atccccatgaggtgccacagatctccatccgtaacccccgagggctttcagatgagcagatccacaagatctcacaggcactgggccatgtggccaaggagggactaggcacagccatgctctatgaactcattgagaaagggaaggaaattctcacagacaacaacatcccccatggtcagtgtgtcatctgcctctatggtttccaggaagaggaggcctttaccaaaacaccctgttaccactacttccactgccactgcctcgctcgctacatccagcacatggagcaagagctgccccaaccaacccatggagctgtaccaacccagtgcagagagcttgcgccaacaggaagagcttaagcggctatatcagagacagcaggaaaaaggtggcatcattgaccttgaggcagaacggaaccggtacttcattagccttcagcagcctcctactactctggaacctgagtcagctgtagatgtctctagaggatcccaaccatctaatgccctttctgcagaacagtctacttccctagctgcccagtcaactgtgccaactctacccatggctacccagtatgtatatgagaagattccaggggctggcccaaatcagcagaggctgggtgagactcagaaatctatgctagatcctccacgatctggtcgtggctcctggcgacagtatgatcggaggcaccaaaaaggaggggagtactgtgccacaaaaggtaccagtaacatccaagaactgccaccttctgggaagcctctcaaggagactgtggacttaaagccagaaccccgtaacaaagggctcacaggtcttcctcaggaaaaggggcctggtagctggcagggccccacagctcgaaggactcgggactgtgctcgctgggaacgctccaaaagccgtacaccaggttcttcttactcccacctacctccgggccaaggagcatacaggtctggtactcacagggagcccatgggcttggaatccgaggaaggttcctagcagtactggtggggggacaggggaacgtggggggtgggagggaggcgaataaagagatttggccttcgcttaacagacaaaaaaaaaaaa

SEQ ID NO: 5939 - DNA, 1116 bp, Cricetulus griseus
gaaccttcgaacacaagtgcgatactaccctgtgaggaagcgttccagcgactctcctgttcccgccatcgcagttgccagcgcgacgtgcttttttaccccagactcgatgtccttcacagacccgtcccatggccctcgtgtctgctgattcccgaattgcagagcttctcacagagctgcatcagctgatcaagcaaacccaggaagaacgctcgaggagtgagcacaacttggtgaacatccagaaaacccacgagcgaatgcagactgagaacaagatttctccttattaccggacaaagttgcgtggcctctacacaaccgccaaggctgatgcggaggctgagtgcaacatcctccgaaaagcattggataagatagctgagatcaagtctctgctggaagagaggcggatagcggccaagatcgcaggtctctacaatgactcggagcccccacggaagaccatgcgcagaggcgtgctgatgacactgctgcagcagtcagccatgaccctgcccctctggatcgggaagcctggtgacaagcccccacccctctgtggagccattccagcctcaggggactatgtggccaaacctggagacaaggtggctgctagagtgaaggctgtggatggggatgagcagtggatcctagctgaagtagtcagttacagccatgctaccaacaagtatgaggtagatgacattgatgaagaaggcaaagagagacacaccctgagtcggcggcgcatcatcccactgccccagtggaaagctaaccctgagacagaccctgaggccttgtttcagaaggagcagctggtgctggccctatatccccagaccacctgcttctaccgtgccctgatccacacacccccacagcggcctcaggatgactactcagtcctgtttgaagacacttcctatgcagacggctactcccctcctctcaatgtggcccagaggtacgtggtggcttgtaaggagcccaagaaaaagtgaagctggctggctggcttgagtctgccactgccgacctcatgggagaaggcaacaaacgagttcctgtaataaaataaatactcttccctctaacaaaaaaaaa

SEQ ID NO: 5940 - DNA, 1116 bp, Cricetulus griseus
gatgtgggccgcgctgtggctgctgtgcgccggggcctggctgctgagtgcccgggccaccaccgagctgaccgtgaacgccatagaaaagtttcacttcaagtcatggatgacacagcaccaaaagacatacagctcagtggaatacaactacagactgaagacatttgccaacaactggaggaagatacatgcccacaaccagaggaaccacacatttaaaatgggattgaaccagttttcagacatgacctttgctgaaataaaacgcaagtacctctggtcggagcctcagaattgttcagccaccaaaggtaactacctccgtggcactggccccttaccccctccatggactggcggaagaaaggaaattttgtctcagcagtgaaaaatcaggggtcctgtggcagctgctggactttctccaccacgggggccctggagtctgctgtggctatcgccagtgggaagatgctgtctctggctgagcagcagctggtggactgtgcccagaacttcaataatcacggctgcgaaggaggtctccccagccaggccttcgagtacatcctgtacaacaagggcatcatgggagaagacacgtacccttacagaggcaaggatggtcactgcaagttcgacccccaaaaagccatcgcattcgtcaaggacgtcgccaacatcacactcaatgacgagaaggcgatggtggaagctgtggcactatacaaccctgtgagctttgcctttgaggtgactgatgattttatgttgtatcaaaaaggcatttactccagcacttcctgtcataaaactccagataaggtaaaccatgccgtcctggctgttggctatggagagaaggatggaataccctactggatcgtgaaaaactcttggggcaccaactggggagataaagggtacttcctcattgagcgtggaaagaacatgtgtggcctggctgcctgtgcctcctaccccatcccccaggtataagccaaggctgcaaaggcaactaatggtaggcaaagtgaggagccagcccttcgatggaaatcccaccctggaggaaactgtggggaaattcacccagagctcccctcagtcctg

SEQ ID NO: 5941 - DNA, 1116 bp, Cricetulus griseus
  modified_base (298)..(298): a, c, t, g, unknown or other
ggcgggcggcggccggggcggcccaggggctgccgcggggccgcggggcccggacacggcaggttcgaggccgggcccccgcgcgaggagccgcggggtggagactttgcggcgcggcgcggagcaggcgggagccggcgggggcctcgggagccccagggcggccgggcccggatcccgggggaggctcgcgagcccgggccggagcctcagcgtgtgcattcccggcggggccccgggctgcaggagcacagagcagccgggcctcgcggagctcagagcgcgtctgacccggggncaccgtgggactcgggcgcggggctgacggagagctgccccgcggggctcacagcggcggagtggcctacaatgaacggcttcagcaccgaagaggacagccgcgaagggccccctgccacccccgccgccgccccgggctacggccagagctgctgcctcatcgcggacggcgagcgctgcgtccggcccgcgggcaacgcctccttcagcaaaagggtgcagaagagcatctcgcagaagaaactcaagctggacatcgacaagagcgtcaggcacctgtacatctgcgacttccacaaaaatttcatccagagtgtcagaaataaaaggaagaggaagacgagtgatgatggtggagattcccctgagcatgatgctgacattcctgaggttgatctgttccagctgcaggtgaacactctccgacgctacaaacggcactacaagctgcagaccagaccaggcttcaacaaggcccagctagcagaaactgtgagccgacacttcaggaacataccagtgaatgagaaagagacgcttgcctacttcatctacatggtgaagagtaacaggagcagactggaccagaaatcggagggcagcaagcagctggagtgaggcaccagaggcctggtgaggcggaggccttggggagaggacagcagtgcgatgcttaatgacaggtggtgtctgcacatctcagcccataaggactgttcacatctactgtaaataaagtttgaatgatggatactgtaaatctctctgtcaggaggattatattcttacaggttagcatgtatatagaaagacttt

SEQ ID NO: 5942 - DNA, 1115 bp, Cricetulus griseus
tgtctgcgggcgcgcgccgctgcggtactcaagaccagcccatggaagaatcatatgaagaagtggtgattaaagtcatagagcaggagtggacatgtttgggtttccaacagctaccctgctggactgtcacggaagatatgcccagaatgtagcatttttcaatgtgatgacggaagcccacaagtatgatcattcagaggccacaggatcgtcaagctgggatttccagagttctttcagaagagagaaggtggaacaaaagtccccagattcaaagacactacaggaagactctcctggagtgagacagaaggtctatgattgccaggaatgtgggaaatctttccggcaaaaaggtagtctaacgttgcatgagagaatccacactgggcagaagccctttgagtgcacccagtgtggaaaaagcttcagggccaaaggcaacctagttacacatcagcgaatacacacaggagagaagccctatcagtgcaaagagtgtggcaaaagctttagtcagagaggcagtctagctgtccatgagagactccacactggacagaaaccctatgaatgtgccatttgccagagaagcttcaggaatcaaagtaaccttgctgttcaccgaagagttcacagtggtgagaagccctatagatgtgaccagtgtggaaaggctttcagtcagaaaggaagcctaattgtccacatccgagttcacacaggtctgaagccctatgcgtgttcccactgcaggaagagcttccacaccaggggaaattgtattctgcatggaaaaatccacacaggagagacaccctatctctgtggccagtgtggaaagagtttcacacagagagggagcctggctgtgcaccaaagaagctgctcccaaaggctcaccctgtaaccactctcgtcaaaggaaggtcttaggaattaagaatacaaaaccctctgtaaccaagaagtttatctaattctatagggtaagtggaaattcttccggaaggaccagcatttgatagggcaaactgactttttccccctcccccaaatgaatatgaaaaataaatgtcttgctttatacaaaaaatttaaaaaaaaaaaaa

SEQ ID NO: 5943 - DNA, 1115 bp, Cricetulus griseus
gcggatcccagcaaggctcccggaggccgccgagccgcggcccagccgggcacccaggagcaggcaccatggattccttcaaggtagtgctggaggggccagcaccttggggcttccggctgcaagggggcaaggacttcaatgtgcccctctccatctctcggctcacccctggaggcaaagctgcacaggctggcgtggctgtaggagactgggtgctgagcatcgatggtgagaacgcagggagcctcacacacattgaggcccagaacaagatccgcgcctgtggggagcgcctcagcctggggcttagcagagcccagcctgttcagagcaaaccacagaaggccctgacccctcccgccgatcccccgaggtatacttttgcaccaagcgcctccctcaacaagacggcccggccctttggggcacccccacctactgacagcaccccgcaacagaatggacagttgttcagacagctggtccccgatgccagcaagcagcggctgatggaggataccgaagactggcggccacggccagggacaggccagtcccgctccttccgcatccttgcccacctcacgggcacagagttcatgcaagacccggatgaggactacatgaagaagtcaagggaaaagtatgtcctggagctacagagcccacgctatacacgcctccgggactggcaccaccagcgctctgcccacgtgctcaacgtgcagtcatagcctggccctttccagcctgctgccctctgctttcctttctctgttaccctcccagggcacccattggtgcctccagcttctgcctaccgctttcatgcccctggtctgaacctcctactggcctggtcctggcagcccgcctggcacagggcctggcttcgtctgacactgccttccctcttggccctgtggttctactgtctgccaggtctgcactgccttgagcatgccctgctaaaaaaaaaaaaaaaaaaaaaaaaaaaaaaaaaaaaaaaaaaaaaaaaaaaaaaaaaaaaaaaaaaaaaaaaaaaaaaaaaaaaaaaaaaaaaaaaaaaaaaaaaaaaaaaaaaaaaaaaaaaaaaaaaaaaaaaaaaaaaa

SEQ ID NO: 5944 - DNA, 1115 bp, Cricetulus griseus
ctgagacacctcaggagacatataggaaagttatgagctggaaggaaacactggcattcccctccagaagtgcctgtctctgagaaagccaaggacttgattctcaggttttgtaccgactctgaaaacagaattgggaacggtggtgtagaagagatcaaagcccaccccttctttgagggtgtagactggggccacatcagggaaaggccggcagccattcctatcgaaatcaagagcattgacgacacctccaactttgatgacttccctgagtctgacatcttacagccggtgccgaataccacagagcccgactacaaatccaaagactgggttttcctcaattacacctataaaaggtttgaagggctgacgcagcgcggctccatccccacatacatgaaagctgggaaattatgagtgatgttcacagtcacccacagccaagaactcaggtagctgcatctccaggctggatggcatcagcaccagacattccgaggacgctggcgctcaccagcctgagaaacttccacaggtcggattctgagactactacaggaatcgctcggctttctttcttctttttttttgatggtagagttgagtttcagaaatggccatgaaagctgcttgtagaacctagtgtattttttatttatgggatattaaaatattctttggttgctaagacttaagatagggctcatttattcctgtaacagcatagctttttaacacatgcataactttgtacaagctgagcatttctaaggattttaaagcatgttttggtgtttcgatatagaagaccttagaaagtctatgctgtcaggaataatagctacctgtcttttggtggtctacaagtaagttacttgagggtcagaaaagaccctggctacatgatatattctctctttgaattgttaaaactcggaaaatgctaaagcagctgttttgctatggtgacagttatttttcatttcatttcaaattcattttctctgtagaagtgcacttatttctgaaaaagcttatgaagccaacacttaataaatataagacacttggaactactagaaatatttaggttttattacaaaatatga

SEQ ID NO: 5945 - DNA, 1115 bp, Cricetulus griseus
gcgaatgctgaaccctggctgtatctgacagggtagcgcaagctggcagtcgagtggttctcatgtcctgccgaagtttaaagtttctagggcacctacaggaatgagcttctttgaccttttccggggctttttcggctttcgtggacctcggagccacagagatcccttcttcggagggatgactcgagatgatgacgatgacgatgatgatgacgaagaggaagaagacagaggcacgtggggtcgagggagctataggtttgatggttctcagcctccggaggaattcggtttcaacttcagcccagaagaaggcatgcgattccacgacaactttggctttgatgatctagtacgagatttcaatagcatcttcagtgagatgggggcctggaccttgccttcccactctcctgaacttccaggtcatgggtcagaaacacctggtgagagaccgcgggaagggcagacgcttcgggactcaatgcttaagtacccagacagtcaccaacccaggatctttgagggggtcatggagagtcatccaagacctgaatcccccaaaccagctccagattgggggtctcagggaccttttcataggttggatgatatatggcctgtgactccccattctagagccagagaggacaatgatcttgactcccaggtttcccaggaaggtctcggtccacttcttcaaccccaacccaaatcctatttcaagagcatctctgtgaccaagatcactaagccagatggggtagtggaggagcaccgcactgtggtagacagtgagggacggagagagaccacagtgacccatcaggaagcacaggacagttccagaagtgatccagtctcggaaagatcttcagctctggatgaccccttttccatcctggatttgttcctaggacgttggtttcggtcccggtagctttgtgaacctttgtgagccttcaggtcctttccactcccttcctgttgcccattgtcaataagtttagctttttgtgtcatcctaagggtcttgagtgtatgaaacaattaattgagcttttgccagtctgtcattcgtccaacctgaccaataaagcctttatttatgc

SEQ ID NO: 5946 - DNA, 1115 bp, Cricetulus griseus
gtgcgtccggcgtccgtccgccgcgggatggcggctctgagaagttggatgtcccggagcgtagcctcccttttcaggtatggacagcgtgtcccggtcgtggctaattctaagaaacgctgtttctcagcattgataagaccatggcacaaaacgatgatggctggattcggcatgaccctgtgtgcagttcctattgcacagaaatcggagcctcaatctcttagtaacgaagcattaatgaggagggctgtgtctttggtgacagatagcacctccacctttctgtcccaaaccacatatgctctgatggaagcaatcactgagtatacaaaggctgtttatacgttagtgtcactgtatcgacaatacacaagtttacttggaaaaatgaattcacaggaggaagatgaagtgtggcaggtgattataggagccagagttgagatgacgtcaaagcagcaggaatacatgaagctggaaaccacttggatgactgcagttagcctgtcagagatggctgcagaggctgcctatcagactggagccgatcaggcctctataaccgccaggaatcacatccagctggtgaagtcacaggtgcaggaggtgcgccagctctcccagaaagcagaaaccaagctggctgaaacacagacacaagagttgcaccagaaaatgcaggaagcgggtgaagagagggctgaccaggaagaggatgcctacctgcgtgaagattgagggcttgagcccactgccctctctacccaatcagtggggaaagcaggtgatggcctccacctagtgtcaccccaactcttaggagacaacaggttctgcccttgccagtcagaccagaagccttttgtgagctgtgcctgttctttctggtctcagtctttatgggcctggttcttagcccttgagcgtgattcattgaacactgtcccactcggctcctctcttgcctatctttttacctcatacccaaagcatttcaccaacctgggccagaagagaaggggccttttctgccgtaccctcaagttcaatagctgtttagctacagtttttaatattactcatattttcaagtataatttaatgtttgcttc

SEQ ID NO: 5947 - DNA, 1114 bp, Cricetulus griseus
gtgctcgagatgcggctctcgtctaccataagctgcaccagctgcatgccatgggcaaatacacaggagggcacctcattgcttctaacctggcactgagtgccctgaacctggccgagtgcgcaggagatgctgtatccatggcaacgctggcagagatctatgtggctgctgccctgagggtcaagaccagtctcccaagagccttgcactttttgacacgtttcttcctgagtagtgcccgccaggcctgcctggcacagagtggctcagtgcctcttgccatgcagtggctctgccaccctgtaggccaccgtttcttcgtggatggggactgggctgtgcatggtgccccacaggagagcctgtacagcgtggctgggaacccagtggatcccctcgcccaggtgactcgactattctgcgaacatctcttggagagagcactgaactgtattgctcaacccagcccggggacagctgatggagacagggagttctctgacgcacttggatacctgcagttgctaaatcgctgctctgatgctgtcgggactcctgcctgcagcttctctgtcagctccagcatggcttccaccaccggcacagacccagtggccaagtggtgggcctcactgacggctgtggtgatccactggctgcggcgggatgaagaggcagctgagcgcctatacccgctggtagagcgtatgccccacgtgctgcaggagactgagagacccctgcccaaggcagctctgtactccttcaaggctgcccgggctctgctggaccacagaaaagtggagtctggcccagccagcctggccatctgtgagaaggccagcgggtacttgcgggacagcttagccgctccaccaactggcagctccattgacaaggccatgcagctgctcctgtgtgatctacttcttgtggcccgcactagtatgtggcagcgccagcagtcaccagccctggacagcaaaatgagcattgttggctgaggcagcacgcactgtagagaagcttggtgatcatcggctactgcttgactgccagcagatgcttctgcgcctggggcggtgggaccactgtcacttccagctaaacc

SEQ ID NO: 5948 - DNA, 1114 bp, Cricetulus griseus
gagcgagcaggctggaaaaccaacttccgctgtgcactccacagcacagggcgctttatcttgcatcaagacaattcaggggaccctgttgacccccacaaggtgtatagacttaacccggagcttggatgcactgaaggccccgccatggaaaatagggaagaagagaccctcagcaatgccttacctacacagggtgtgtccttgggaccattctctgcaagaggaaatgctgggctccaaaccccaagccctctgctttctggtgatgctggggacctcttgcttcaggttctgcagtacagcctcctggataaccacctactgggatctgactcagtcccatcacaggatcctggccaggagcaggaacatgcttctgaggatcctcatgcaacatggcaggtggaagctgtccccagcccgaggcttcaacacccagctctaagcgagcgcaatctagggtacctggatgtgaccatcatgtacaagggccgcacagtgctacaggcaatggtggggcaccccaggtgcgtgttcctgtacagccccatgagctcagcgataagaacctcagagccccagccagtgatttttcccagccctgctgagctcccggatcagaagcagctgcattacacagaaacacttctacagcatgtgtctccaggccttcagctggaggtgcaggggctgtcactgtgggccctgcgcatgggcaagtgcaaggtgtactgggaggtgggcagccccatgggctccaccagttcctccactccagcccagctcttggagcgcaactgccctaccccaatcttcaacttcagcactttcttccaagaagtggaagagtttcaggcccggaggcgacaaggatcaccacactacaccatctacctgggttttgggcaagacttgtcagcagggaggcccaaggagaagagcctgatcctggtcaagttggagccatggctatgcaaagcatacctggaaagagtgcagcgtgagggtgtgtcctccctggacagcagcagtctcggcctgtgcctgtctagcaccaacagtctctacgacgacattgagcacttcctcatggagctgggtcagtgagcct

SEQ ID NO: 5949 - DNA, 1114 bp, Cricetulus griseus
aggcgcctgcgggccgcccggctccacccatggcgggggccgcaccggccacggccttcggccaggcggtgatcgggcccccgggctcggggaagaccacgtactgcctgggcatgagcgagttcctgcgcgcgctcggccggcgcgtggcggtggtgaacctggacccggccaacgaagggctgccgtacgagtgcgccgtggacgtgggcgagctggtggcgctgggcgacgtgatggacgcgctgcgcctgggccccaacggcggcctgctgtactgcatggagtacctggaggccaacctggactggctgcgcgccaagctcgagcccctccgcggccactacttcatcttcgactgccccgggcaggtggagctctgcacgcaccacgccgccctccgcagcatcttctcccagatggcacagtgggacctcaggctgacagctgtccaccttgtggactctcactactgcacagacccagccaagttcatctcagttctctgcacctccctggccaccatgctgcatgtggaactgccccatgtcaacctcctctccaagatggaccttattgagcactatgggaagctggcctttaacctggactattacacagaagtcctggacctctcctacctgcttgagcacctggcgtctgaccctttcttcagtcactaccgtcagctcaatgagaaactagtacaactcatcgaagactacagcctagtctcttttatccctctgaacatccaggacaaggacagtatccagcgagtcctacaggctgtggataaagccaacggctactgttttgggattcaagagcagcgaagcctggaggccatgatgtctgctgcgatgggagctgacttccatttctcctccactctgggcatccaagagaagtacttagcatcctcggaccagacagcagagcaggaagccatgcaactgtaacagctggggctgggtgatgggcagctgggtacggatccagaagctgtgtccagccagagcagaggctgggaggaagcatccatccccgatgaggacttttggataaaaagccaggcatatcaccctcagtggtatcttcaaactcagagccc

SEQ ID NO: 5950 - DNA, 1113 bp, Cricetulus griseus
tcggcctggcagcggcttaggcgatgccgctgctggtggacgggcggcgagtacggctgccccgctccgctgccgagctggtccgagagcacccgtcgctggaggaaagagccagacttctcagaggtcagtctgttcaacaagtgggaccccagggccttctgtatgttcagcaaagagagcttgcagtgaccaccccaaaggatggctccatctccattctgggttctgatgatgccactacttgtcacattgtggtcctgaggcatacaggtaatggggcaacctgcctcacacattgtgatggaactgacaccaaagctgaagtccccttgataatgagtgccataaaatccttttctgatcacactgagtgtggaaggctggaagtgcaccttgtgggaggcttcagtgatgataggcagctgtcacagaaacttactcatcagcttcttagtgaatttgacaaacaagatgatgacattcacttagtgacattatgtgtgacagaattaaatgaccgggaagaaaatgaaaaccactttccaatcatttatggcatcgctgtcaacattaagactgcagagatttacagagcctcctttcaagatcatggtccagaagaacagcttcgtgctgccagagctttagcaggaggcccgatgattagcatttatgatgcaaagacagaacaacttcgaataggcccgtattcctggacgccatttccacatgtggatttctggttgcagcaagatgacaagcaaatactagagaacctttctacttctcctctggctgagcccccccactttgttgaacatattagatctaccttgatgtttttaaaaagattcccatctccagcaaatatactgtttcctggaaataaagctcttctctacaaaaaaaatgaagatggtttatgggaaaagatctctccagggaactaacatcaaagttaccaaagaacacaactttttgatctgatagagaccattggtggtttggaatctacatctgcgcagttttacttcttccttgcttacggtctttcaaaataaagtcttattttggcaaaggaaaaaaaaaaaaaaaaaaaaaaaaaaaaaa

SEQ ID NO: 5951 - DNA, 1113 bp, Cricetulus griseus
gtctgtgccatctgtctcaagaagttcgtcagctccatcaggctgcgctcgcacatccgagaggtgcacggggcagcccaggagaccctggtcttcaccagctccataaaccagagtttctgcctcctggagcctggtggggacatccagcaggaagccttgggggaccagctgcagctggcagctgaggaatttgtgtgtccggaagtggatgtgctcaaggagggtcccggggaagctcagcctgaggtggctccgagggagctggaggccccgggagaagcaacacggcggcccagaagccacagctgcttcggcacatggagcagcacgcctccttcaagcctttccgctgaagccgcggtggctgctcttcaggacctgagatacacctccgagagtggtgatcggcttgatcccacaagctgtgaaccatcctgcagcagatcattgagttgggttcagagacccatgatgccactgccgtggcctcagtggttgctatggcgcccgggactgtaactgttgtgaaacaggtcaccgatgaggagcccagttccaaccacactgtcatgatccaggagaccctgcagcaggcctcggtggagctagccgagcagcaccatctggtggtgtcctctgatgacgtggagggcattgagacagtgaccgtgtacacacaaggcggggaggcctccgagttcatcgtgtatgtacaagaggctgttcagcccgtggaggagcaggttggggagcagccggccccagaactctagaggaccttagtctccttcagcagccttggctttgtgggcaccggggaccgcctaacccaccagcccagccctttgctcccgccctcaccccaggtgctcatcctcctctgggcccactgtattgtctgtgaaagagagacaaacaccacacagcaagtggccttatgtttttagagtcaaccactgggtagggtgggttaggaccattcaggcattatccactgggccccaaactcctcagtgcaggagccctggggacaaatgaggggtccccacaccgctctatcacaagggcccagcttggagtcctttctgctttaaataaatgcattttctc

SEQ ID NO: 5952 - DNA, 1113 bp, Cricetulus griseus
cctctctccgtcttgctcttccacttcccgcaaggtcttcggctacccgcagagcctcacgcgccaccgccaggtccaccggctgcagctgccctgcgccctggccggggccgcgggccaggggaccacgggggcctgcgggcccggggggcggcgggcgccgccggtggccccggcgacgggctgagctacgcctgctcggactgcggggagcacttccccgatctcttccacgtcatgagccacaaggaggcgcacatgtccgagaagccctacggctgcgacgcctgcggcaagaccttcggcttcatcgagaacctcatgtggcacaagctggtgcaccaggcggcccccgagcggctcctcccgcccgcggcccccacgcggccccccagtcctctgatggctccggcggcggcggcggtggccggcgggggtggcggggccaccgcgggcgccgagcgcttcagctgtgccacctgcggccagagcttcaagcatttcctggggctggtgactcacaagtacgtgcacctggtgcgccggaccctgggctgcggcctgtgcggccagagcttcgcgggcgcctacgacctgctcctgcaccgccgaagccaccggcagaagcgcggcttccgctgcccggtgtgcgggaagcgcttctgggaggcggcgctgctgatgcgccaccagcgctgccacacggagcagcggccctaccggtgcggcgtgtgcggccggggcttcctgcgctcctggtacctgcggcagcaccgggtcgtgcacaccggcgagcgcgccttcaagtgcggcgtgtgcgccaagcgcttcgcccagtcctccagcctggcggagcaccggcggctgcacgccgtggcccggccccagcgctgcggggcctgcggcaacttcaaggatcctggctacttccggaagcacctggctgcccatcagggtggcaggcccttccgctgctcctcctgcggcgagggcttcgccaacacctacggtctcaagaaacaccgcttgatgcacaaggctgagggtcttggcgggcccggaacagggggcagcaccttggcagggaaggatccctgaccagggggattcagt

SEQ ID NO: 5953 - DNA, 1113 bp, Cricetulus griseus
gggatgggagcgggaggccgccgcgggtcatgtgaccggaaagactcctgacggacgccgtccctcctcggcgccgcctgagcgcccggcccgaccccgccatggggtgctgctatagcagcgaaaacgaggactcggaccaggatcgggaggagcggaagctgttgctggaccccagtagcacccccaccaaagccctcaatggagccgaacccaattaccacagcctaccttcagctcgcacagatgagcaggcccttctttcttccatccttgccaagacagctagcaacatcattgatgtgtctgctgcagactcccagggcatggagcagcatgagtacatggaccgggcaaggcagtacagtacccgcttggctgtgcttagcagcagtctgacccattggaagaagctgccaccgctgccatctctgaccagccagccccatcaagtgctggccagcgagcccatccccttctctgacttgcagcaggtctccaggatagctgcttatgcctacagtgcactttctcagatccgtgtggacgcgaaagaagagctggttgtacagtttgggatcccatgaagagaggggtcctgggacagctcttccctcctcttcgtcccgtctccaccccacctcttctggcccccagcctcactgtggctttctacagtacttaacctgctactaatcacggagaagaatgtggaggaaaagaataaggctagaagcctgagcaagtgaggactgagcgcaagggaggggagaaccgatcgccattggccttcaagtcctggctggggtgaggttggggccaagaggactgggcctggcagattttcatagtcatcgggaaaatggagataccactgtaggggtgaacaccgggagacctaggggatccccccttcccaccctctctcttggcctccaattcactcctgtcccattccctcatttggtgctcataggcacctcactagggattatgaccagggtctagatgagcttgaatctgaattgagtttgtatttctagtgccctgggtttttacatgtttggtctttttgtttttgtttgtcacccctcgataaaggaagtatattca

SEQ ID NO: 5954 - DNA, 1112 bp, Cricetulus griseus
agcatgttactagccacgtttaagctatgtgctggaagctcctacagacatatgcggaacatgaaaggactgaggcaccaagctgtgctggccattggccaggagctgaaccgaagaacactgggagactccagccctggatggatcagtcaggttcggcgtcggagttctctgcttggttctcagctggaagtggccctctacagtgagcaggagctgtcctatatccatcagggagaggttgctatgcagaaggccttgggcatcctcagcaaccaggaaggctggaagaaggagaaccagcaggaaaacggggataaagtgctaagcaaagtagtcccagatgtgggcaaggtatttcggttggaggtagtggtagaccagcccatggacagactctatgaagaacttgtggaccgcatggaggcaatgggagagtggaacccaaatgtcaaggagatcaaggtcctgcaaaagattgggaaagacacagtcatcacccatgagctggctgcagcagcagcaggaaacctggtgggaccccgtgactttgtgagcgtgcgctgtgccaagcgcagaggctccacctgtgtgttggcaggcatagccacacattttggggagatgcctgaacaaagtggtgttatcagagctgaacacggtcccacctgtatggtgcttcacccattggctggaagtccctcgaagactaaattcacttggctgctcagtattgacctcaaggggtggctgccgaaaaccatcatcaaccaggtcttatcacaaacccagatggagtttgccaaccacctgcgcaagcgcctggagtccagctctgcctgaggccggtgttaaaggctgtacccactacatcaacctgcatgccatcagcagcctcccgaaggaagactgcaagtctgtttaaaatcttcagttgatgactatgggaggggtagtagttatcagacactaggactgactggtgaaaaatgaccatcaggaaattagaaatgaggctgagaggaagagacctcagtctctcactgattagctgtgaagtggagctaagagatagacatctgttaaaccttttatctaggcctgaatatgct

SEQ ID NO: 5955 - DNA, 1112 bp, Cricetulus griseus
gaacttcctgtagcgatggccgcggcggtggcggggatacttcgaggcggtgtcccgccccgggcggcttggctacccaccctccagactgtgcgccatggctccaaggctgtgacccgccaccctcgtgttatgcactttgagcggcagaagctaatggctttaactgagtatattcctcccaaacctgccatcaaccctagatgcctgccacctcctcccaagccccccaaggaggagtccggcctcatccatctcctgcgtcgggatatagtagcagtttttcgagacaaccgaatgatagccgtctgtcagaatgtggccatgagtgcagaggacaaacttctcctgcggcaccggttgcggaaacacaatatcttgataaaaatcttccccaacgaggtcctgaagccttttctaggagattccaaataccaaaacctgcttcccctttttattgggcacaatatgctgctggtcagtgaggagcccaaggtcaaggaaatggtgcggatcctaaagagcgttccttttctgccgctgctgggtggctgtgtggatgacaccatcctcagcaggcagggattcgtagagtatgccaagctgcccagcctggacctgctgcaaggggagctggtaggaggacttactggcctcatggcccagacccactacctgcttcagcaccagcctgcccagctgacttccctgctggatcagtatatcaaacagcaacaggagggagagtctaccacgtcagccagtgggacaccacctccttctgacctgactccagattcctagcccacctgttttacccagttctgcccataaatacactctgtccctgctgtctgtgttgtctggcagaggtctaaaagaatcaggagtgtgggaatggcatgtgtgccttggctctcattcacaatgacctccttggggacaggcctcttggaagaatcagagaaattccatttcaaattgaggctgtccattgtcttcagtttcactagtcactgtctttagttgtcccaacaagggacctaataggaatagtctccttcagttctccaggtacaaagcagacagggatggagagtcttgcccagcct

SEQ ID NO: 5956 - DNA, 1112 bp, Cricetulus griseus
atgttcgctgccatccagccagggcttgcagagggggcccagttcctggggggcctgcctcctggaatatgtcaaccagagctccaaccagacaataattccaactttgtggacagtgctaaggatgccaataagaactggcatggtgtgccaggcaaagtggaacccctcctgaggagttcctctgagtcaccctctgacaaccaggtcttccaagccactgggctcctcgaggcgggagtccgaagccccccggagggtgcagagatctgtggtgctgagcctgagaagtcgagtggtgccagcaatgtctgctctcctctggaaggaacattggctatgccagcagttccttgagcactcgacagccttagcagcagtcctcgaggcccgagccctctggattccccttctgccctctgtggcccgggctgtgcagcagctgcaggctcaggagcgctacaaagagcaggagaaggagaagcaccatgtacacttggtgatgtaccgtcgcttggcactgcttcagtggatccgggctctccagcaccagctggttgaccagcaggcccgactgcaagagagctttgacaccatcctagacaaccgaaaggaacttatccgctgtctctaacagagggaagcaccttgcaggcaccaggaccattgctaaggctgtgcacaagtgtgtgtagagagagagagagagagagaaagagagagaaagaaaaggaagagcagagaggaaggcaaggaaagaaggaaggacccctttgaacagggatggacaggccccagcagaggcttcaagccttggagatgaatgcatattgggtcaaccaataattaaggtagtagaggcttttgttttgtttctgggtgccaagagaatgcagggtcctagtgggtgagcgatgacatgaagaggggaatggtggcagagacacagaaagcacagatggtgcctctggccctcagtctccccacctgcaaagtgggggcccttccactctatctccaaagagttttcatcctcaatgggttggtgggtgaaatgtgggcccgggggacttctatagttcttgcatgttgaatgtgaacctggcctctgg

SEQ ID NO: 5957 - DNA, 1112 bp, Cricetulus griseus
cggcgcgccccgggggtccggtacggtggccgagccggggcctgggctcccggagcgacggggcgcggggcgtcaatggatcgccactccagctacatcttcatctggctgcagctggagctctgcgccatggcggtgctgctcactaaaggagagattcgatgctactgtgatgctgcccactgtgtggcaacgggttacatgtgtaagtctgagctgaatgcctgcttctccagacttctcgaccctcagaacaccaattctccactcactcatggctgcttggactcacttgccagcacagcagacatctgccgagccaaacaggcccaaaaccactctggccccgccatgcccacgttggaatgctgtcagtgatagcagtccccattgctggtgggctgattttagtgttgctcattatgttggctttgcgaatgctccgaagtgagaacaagagactgcaggatcagcggcaacagatgctctctcgtttgcactacagctttcacggacaccattccaagaagggtcaggttgcgaagttggacttggagtgcatggtgcccgtcagtgggcaggagaactgttgtctgacctgtgacaaaatgaggcaagcagagctcagtaatgagaagatcctttccctcgtgcactggggtatgtatagtggtcatgggaagctggaattcgtatgacagagtcatatctgaactgtaaactgaacccttgaaggccttctgagttctgctggacaggagcacttttatcgagacaaactaactcgcttagtcattttggagagaccaaatgacctctgcaaagagaatcttgggtatttcttctgaaggattatttgcacagactcaaatacagtcaaatggattaatttgctttaaaattataaaaagcaaagaagaggaactctgcacacactttcccagggctctttgtatcccagggagccacgactgaccgaaataaacagttgtgctctctgtaagctcctacatcttcatttattgtaaagtaatttttaaaatatattattttgtaccgaaaactacacaggaagttccaggatagccaggctagagtgagactctgtctca

SEQ ID NO: 5958 - DNA, 1112 bp, Cricetulus griseus
gataaataacccaaaacaaagtagccaaattcctgtcttcatcagaattcttgatataaatgatcacgctccggaatttgccatgtactatgaaacatttgtttgtgaaaatgcaaaatctgggcagctaattcaaacaattagtgtcatggacaaaagatgaccctcccagaggacacaagttcttctttgagccagtgccagaatttcctctcaacccaaatttcaccattgtagacaataaagataatacagcaggaatcataactcgaaaagatgggtacagccgcaccaaaatgaacacctacctactgccaattttaatactttgtacaatgattaccctattcaaagcagcactggcacgctcacgatccgtgtgtgtgcatgtgataaccaagggaacatgcagtcctgcaatgcagaggccctgatgcttgctgcaggcctgagcacaggagctctcatcgctaattttactttgtgtcatcatcctgctcactctaatcgtggtgtttggctgcattgaagaggcaacgaaaaaaggaagacctctaatcatttcaaaggatggatgtccgggacaatattgtgacctataatgatgaaggtggtggagaggaagacacccaggcttttgacattggcactttaagaaacccggaagcaagagaagacagtaaacttagaagagatgtcatgcctgatactatttttcagataagaaggactgtacccctttgggaaaatattgatgtacaagattttatccaccggagattaaaagaaaatgactcagatccaagtgcacctccctacgactccctggccacttatgcctatgaagggaatgattccgtagccaattcgctcagctccttagagtctctcacagctgattgtaaccaagattatgattaccttagcgactgggggcctcggttcaaaaaacttcgcagatatgtatggaggtgatgacagtgacagggaatgagtcctgtatgacttgatcaacgttagtggaaatactctttgataccagattgagtggcctgtactattccttttctggaggtaagttttaaaatcaactaccaaacaatacataagtg

SEQ ID NO: 5959 - DNA, 1112 bp, Cricetulus griseus
ccaacttacgcctgtcagcgtcccacagcactcacacaccacaatgttatcctctcagaggctctggagacactggcagaggctgcaggttttgaaggcaacgagggccgccttctctccttctacagagcagcctcggtgctcaagtccctgccctgccctgtgacatccctgagtcagctgcaggggctgccccactttggagaacattcctctagagtaatccaggagctgctggagcatggagcatgtgaggaggtggaacgagttcgctgctcagaaaggcatcagaccatgaagctcttcacccaaatctttggggtcggtgtgaagactgctaaccggtggtaccaggaaggattgcgaacgctggatgagctcagagaacagccccagagactgacccagcagcagaaagcagggctccagtactaccaggacctgagcaccccagttgggcgagccttatcactcaccctgaggagggccaagaagtggggctgctgcccaaagtgatgaggcacctacagagccagggacttgtcctgtatcaccagcaccatcgcagccacttagactctacccacctcctacggcagaactataccatggacgcttttgagaggagtttctgcatcttgtgcttgccccaacccccacatgcagctttaggggggaccctgcatccctgtccaacatggaaagctgtgagggtagatcttgtggtcacccccaacagccagttcccctttgctcttctaggctggactggctcccagctttttgagcgtgagctacggcgtttcagtcggcaggagaaggggctatggctgaacagccatgggctgtttgatcctgagcagaagacatttttccatgcaacttctgaggaagacattttcagactcctgggcctcaagtaccttcctccagagcagagaaatgcctgatcctgcctgctggccaccacacccacccacaaaagatgaggagttgcctcatgtttgaccaggaatatttctagacagaaagtgggcttccaccccatgacctaacgtatgcaaatggaattttcagctgctggaacactggcaagatgtgaccttgagtca

SEQ ID NO: 5960 - DNA, 1111 bp, Cricetulus griseus
gagcgggagcggtcgagcgagcagccggcgccatggtggagaaggaggaggccggcggcggcggcggcggcggcggcggcatcagcgaggaggaggccgcgcagtacgaccggcagatccgcctgtggggcctggaggcccagaagcggcttcgtgcttcccgggtgctgattgttggaatgaaagggcttggggctgaaattgccaagaaccttatcctggcaggagtgaagggactgaccatgctggatcatgaacaggtatctccagaagactgtggagctcagttcttaattcggactgggtctgtaggccaaaatagggctgaggcctctctggaacgagcccagaatctgaaccccatggtggatgtaaaggtggacactgaggacatagagaagaaacctgaggcattcttcactcagtttgatgcggtgtgcctgacttgctgctccagggatgtcattgttaaagtcgaccagttctgtcacagaaacagcatcaagtttttcacaggagatgtctttgggtaccatgggtacacctttgcaaatcttggagagcatgagtttgtagaagagaaaaccaaagttgccaaagttagtcaagtagtagaagatggacctgacaccaagagagcaaagctggattcatctgagacaaccatggtcaaaaagaaagtgcttttctgccctgtaaaagaggcgctggaagtagattggagtggagagaaagccaaggccgctctgaagcgcacagccccagactactttctgctgcaagtgctgctgaaattccgcacggataaagggcgggaccccagctctgacagctacagcgaggacgcggagctgctgctgcacatcagaaacgatgtgcttgactcgctgggcgtcagccccgacctgcttccccatgactttgccaggtactgcttctctgagatggccccagtatgtgctgtggttggagggatcttggcacaggaaattgtgaaggccctgtctcaacgggaccctcctcacaacaatttcttctttttcgacggcatgaaggggagtggaattgtggagtgcctaggtcccaagtgagctttataagaagaagattt

SEQ ID NO: 5961 - DNA, 1111 bp, Cricetulus griseus
cgcagtcgcttggggccgccgccactccgcggttggggctcttgggaataaggtatctggacccaccgaagttcgttccaaccgccgcccgccccaggtagtcgtcctgccgaagaccatgttcgacaagaggcggctgccctacgtggccctcgatgtgctgtgcgtgttgctggctgctctgcctatggctgttctaaatttgggccaaatatatccatttcagagaggctttttctgtactgacaacagcatcaagtatccataccatgacagtaccgtcagatccattttgctcgtcatagtggggcttggcttacccatttcctctatgattgctggagagagtctgtctgttcactttggcaccttgcagtcaaattcctttgttggcaatcactatatagccactatttacaaagccattggagccttcttgtttggagctgcagctagccagtccctaactgacattgccaagtactctgtaggcagacttcgtcctcacttcttgtctgtttgtgacccagattggtcaaaaatcaactgcagtgatggctatattgagaactacatatgtagagggaatgcagcaaaagtcagggaaggcaggttgtccttctactctggccactcttcgttttctatgtactgcatgatgtttacagcactttatcttcaagccaggatgaaaggagactgggcaagactcttacgccccacactgcaatttggtcttgttgctttatccatatatgtgggcctttctcgaatttctgattacaagcatcactggagtgacgtgttggctggattcattcaaggagctgtggttgcaatattagttgctgtatatgtatcggatttcttcaagaccagacattcttcttacaaagaaagaaaagaggatgactcacacaccactctacatgaaaccactgccactgcacacacgtattcaagcaaccaccagccttgaaggggttagggaactggccagctttcaaaggaaccattggaagcagaaagcaggaggatgcatattactttctggtgtataggccattacaggactgctgctatctacaaaaaaaaaaaaaaaaaaaaaaaa

SEQ ID NO: 5962 - DNA, 1111 bp, Cricetulus griseus
tggggcctaggctcagtcctgggcaagtgcccatgatcctgctgctgtgggaagtttgatagggcatatggctcaaatttcaaaaggcctcacccctgacttttatttctagaagctcctgtagttctagaaccctccaatctcttacctgactggttgcaaggcttatttttcttttgtactttcctatagattctgtagcatttgagtgtggcaatattttaattgtgtatagatttcttaagaaccaacactactcagtctcctgctagtctgcctcctgaagcatcagaccttgtcatactgtattgactgtgtatgtgcctttcaccttgagcatgcttcaggatttttttttctttaaaccacagaacttgaatacacaagggaaccagaattcacaaagtcctatgcaacctagacaggaggaggttagagagtctgtcttgattgatttcagagaccctagagaaatttgtaccagtttgtattaatgtcaatactaccagcactttgccaaaactaaggatgtcagagggacctgtttctagagtgagtcccaattacatcaaagggcaacttccagctttctccaataagtctgagtggttctcttgagctggtgtcactttctaacctttgccagtctagccccagcagggcactatgtgtgtgtgagtgctgtttggtgctgttttggagtatgcctgctccccagcctggaaccctctgatcaacttgctgtgacctataatgtcttaggtgcaacaaggaccctaccagagctcctgggtggctttgtgtgaggggactgaatgcagacaaaccacagcctactctaaaaccttcttaccctaccacctagttccaaatggaaccaacaagttgagtgcagatctgttgggtgttttgtgttgagactggctgaaatgaaaaatctttgaccgatcatgttgtgatgtgtcgacagactcaaggacacaaccacctcgacctggtcatgtggcatgcctgtgtatgtgtgtaacaggattctgaatgttagattgtaatgctattcctgtatgggagaaaaaataatataaacaaataaaaatctaatttaaaagca

SEQ ID NO: 5963 - DNA, 1111 bp, Cricetulus griseus
  modified_base (242)..(242): a, c, t, g, unknown or other
  modified_base (1083)..(1083): a, c, t, g, unknown or other
  modified_base (1101)..(1101): a, c, t, g, unknown or other
tgacccagtcacgttgaatgtaggtggacacttgtacacaacatcccttaccacattgacgcggtatccagattccatgcttggagctatgtttgggggggacttccccacagccagagaccctcaaggcaattacttcattgatcgagatggacctcttttccgatatgtcctcaacttcttacgaacttcagaattgactctccccctggattttaaggaatttgatctgcttcggaaanagctgatttttaccagattgaaccccttgattcaatgtctcaatgaccctaagcctttgtatcctatggatacttttgaagaagtttgtagagctgtctagtactcggaagctttctaaatattccaatcctgtggctgtcatcataacccaattaaccatcaccaccaaggtccattccttactagaaggcatctcaaactatttcaccaagtggaataagcacatgatggcaccagagactgccaggttcctcaccttgggaccagtgtgattatcaccaggaagtctctctccgggtccacctgatggaatacattacaaagcaaggtttcacaatccgcaacactcgagtgcatcacatgagcgagcgggccaatgaaaaacacagtagaacacaactggactttctgtagactggcccggaagacagatgactgatccctgttttgttcccaagtatgcatgtgctgttcagagtccagaaacctttttttaaaaagagatctgaaaatcattatgatatataatctacccttaacagtgctaaaatgatttctgataatgtggtccctaactcaactggaaggctaaaaaatagtaatgaaagtttaagcagactattcgtgatgtctttgaaaaaaaaatcagaatatcatgtagggtgagctcgattccagaccagtaggcaagtagtgttttaaaggaaaactggccagtcatctgccagtacttgttaaggactgcttcctacagttttgacaacttgtttctttctatgcatataaatcaagcaaccaaatatctgtagccattgaaatgtctgattagaaaaatatganattattaaaaaaaaaaanaaaaaaaaaa

SEQ ID NO: 5964 - DNA, 1111 bp, Cricetulus griseus
tgctgctgtggcacagtgcactctggacaggacaagaggccattcccctggtctctgtcacctctcggccacaccctgccttggcccggagcttcctgctgaagtccttggagcaagtgaggaagattcagaccaggaactcggagctgctggagcagttgtgtgctacttacaagctgtgccacccggaggagctggtgctgctcggccactctctgggcatcccgccaggctcctctcagccgctgctccatccaggccctgcaactgacaaagtgcctgagccaactccacagtggactcttcctctacccaaggcctcctgcaggccctaacaggcatttcccctgagctggcccccacccgtggacatgctacagctggatgttgccaactttgccaccaccatctggcagcagatggaatccctgggggtggctcccactgtgcagcccacccagagcaccctgccaaccttcacctctgccttccagcgccgggcgggaggtgtcctagccgcttcccacctgcagagcttcctggagacagctcattgcaccctgaaccatctggtctaggcctgagcaaagccatttgcagcaggtttatttatctctatttaatatttatgcttatttaaacctactatttaaagacggagaagagaaaacggagctccaagcttctaggcccttctctccactcttgagttttgttctcctgcttgtagcagtgaggacaagctcttgtgtcctcctgtccccagggctggagggagataggtaaataccaagtattgattcctgaggctgctccaggcacccagctctgtggtggttacaaagggccactgtgagcccccaccacccccatttcaggggcctcagcagcatcaggaggtctcccttttgggagacaagacaaccctgtttaatatttaaacagccagtgttcccaaactgggttcttcatcccttgctctggtcagccaggtcgcaagtttccctgtctgtccccatagatgaaggcatggcatgaagcagaggcagccaggtttggtcctggtaatttactggtatttctttttggaggtccttgctgggctgggagt

SEQ ID NO: 5965 - DNA, 1111 bp, Cricetulus griseus
  modified_base (405)..(405): a, c, t, g, unknown or other
tggtacagcagaggccgaacccgcagccggagcagttcctatggaagtttccatagccacaggacatccagcaggagcaggtccaggagcagctcctatgacccccacagtcgctccagatcctacagttacgatagctactacagccggagtcgcagccatagccgcagccagaggagcgacagttaccatcgaggtagaagttacaacaggcggtccaggagcggaagatcctacggttcggacagtgaaagtgacagaagctactctcgtcaccggagccccagtgagagcagcagatacagctgaggcagctttgtacacaaattgtatcttaattgtaaatacctgctaacttaaagcttaagacactggatggcagtctgtttgtttcagtattagagntcaagtccagcagtggctattcttgtcacttaaaagttccctgcaaacaagaggtttgaaatctactggctggtgagaagaatgcattcagagcccaaacagactgccaaatgcaattagtaaggaaaggtcgctgttgggcaatgtatttgttttgttagctgtgttaacaaattatcccaaatttctacagcctaacagggttcctttgagtctttgtctttcttcaaaacgtctgccttcctcctgtttcaagggtccatgtgactagatcaaacgagatcagagagcagtccctgtctgcagtcccgtggccagaggagttgcaggtactggcagggctctgggggttggcacaggaagagacagggctgctacctgctgccaccatggacagagcttaacctgcccagcacaggctctcgtcctcagcattgtctgcctggctgtttatactcaagtgaacgacagaaatggattttcttcctaaccaggatcattctgtattttgaagttatttttttaataaattaaattatgttgtgtaacgtgcttaatagaaaatgctttattggacagttttgtaacatcctgtttactgcaaatggcatagttgatattgtcaaaaatgtagaaaatacttttgtacatactaagcaatgtttaatttgtatatatcaattaaatttccctgcaacttagaaaa

SEQ ID NO: 5966 - DNA, 1110 bp, Cricetulus griseus
gacagcaagacagtggagaactgtgtgtgtaccctgaggaacctgtcatatcggctggagctggaagtcccgcaggcccgactgctcggactaaatgaactggatgacttactaggaaaagagtctcccagcaaagactcagaaccaagctgctgggggaagaaaagaagaagaaaagagaactccacaagaggatcaatgggatggagttgggcctatccctggactgtccaagtcccccaaaggggtggagatgctgtggcacccgtcagtggtaaaaccgtacctgactctgttagcagaaagttccaacccagccaccttggaaggctctgccggatctctccagaacctctctgctggcaactggaagttcgcagcatacatccgggcagctgtccggaaagaaaaagggctccccatccttgttgagcttttgaggatggataatgacagagttgtgtcttctgtggccactgccttgaggaacatggcactggtacgagctgtactatcaagatgactccaccaggaagaccttggatgcatacaggttgtacttgcagtctcctcgtagctatgaagacccttattttgatgaccgagttcactttccagcttctactgattactcaacacagtatggactgaaatcaaccacaaattacgtagacttttattccactaaacgaccttcttacagagccgaacagtacccagggtccccagactcgtgggtgtagcatcaagacgcctggcgagggactctttcttgctaacttttgcttggattgaggtgaaaagtccgtcttgctgatttgatgatgaaatgtggaaagtgaaatggaaggaatgagtgaagtgtttatttttttttttttttttttttttgatgtgatgagaggtttgagaaatgggtgaaatgagatggggtatgtgtaggtcaaatcaaaattacagatgatttttttaatgtgaataaagttatgttcagatagtttgtacagaaaaaaaataataaaatggatgcccttcatgctgccattttctatgcacatggaagaataataaaatagtggaaatttcataccttaagaaaaaaaaaaaaaa

SEQ ID NO: 5967 - DNA, 1110 bp, Cricetulus griseus
  modified_base (1066)..(1066): a, c, t, g, unknown or other
  modified_base (1074)..(1074): a, c, t, g, unknown or other
catggctcgcagggctcttgggcctgcgcgctccctgctcgctgcccttctggctccggcgttggtggcactgttggtgtcgccggcccggggtcgcgggggcctggaccacggggactgggacgtggacaggcgactacctccgctgccaccccgcgatgacgcgccgcgcgtggcccgcttcgtgacgcacgtctcggactggggtgcggtggccactatctccacgctggaggcggtgcgcggcaggtccttcgcggacgtcatttcattcagtgacggtcccccgggagcaggcagcggtgtgccctacatgtacctgagcccgttgcagcaactagtgagcgacttgcaggaaaatccacaggctacattgacactgtctttggcacagactgtcttctgtaggaaacatggatttgatccccagagtcccttgtgtgttcatataatgctgtcaggaactgtgaccaaggtgaatgagaaagaagcggactatgcaaagaattccttattccttcgacaccctgagatgaaaacttggccttccagccataattggttctttgctaagttaaatataaccaatatctgggtcttggactactttggtggaccgaaagtagtgacacccgaagaatattttaatgtcacattgcagtgaagcagagcatggtgaacccgcgcacaccagcagagagtgtcctacatggctcacacatgcttaaaggacatggtgttgcctgcaacttctctgggctgtcagcggactctgctgccccttggttgattttgtctgcttgcttgtctatagaatgttgttggtcctagactagatctcttggaagatgtgatttctggatttaaaacatgtattttgaagccattttcataggaaaatgccattcattataagcaaggatgttttctttcatctattcccagtggtttttcctcaaaggtgcccatatattggcaacataaaccaggtgttagattgcccattgacactggaggtacagaagtccaggcactttattcctgagagccactgtgcctgagggtnctcccctnacccagttgtctgtggagcctgtgcaggaggagcct

SEQ ID NO: 5968 - DNA, 1110 bp, Cricetulus griseus
cccctgagcagcacaaggagtgtgcagagcctgccctcggcctcctagcagaaaaggacagcaattactgtctctgcaggacaccctgcaacctgacccgctacaacaaagagctctccatggtgaagatccccagcaagacgtcagccaagtacctagagaagaaatttaacaaatctgaaaaatatatctcagagaacattctggttctggatatattttttgaagcactcaattacgagacaattgaacagaagaaggcgtatgaagttgctgccttacttggtgacattggtggtcagatgggattgtttattggtgctagtatccttacaatactagagctctttgattatatttatgagctgatcaaagagaagctattagacctgcttggcaaagaagaagaggaagggagccatgatgagaacatgagcacctgtgacacaatgccgaaccactctgaaaccatcagccacactgtgaatgtgcccctgcagacagctttgggcaccctggaggagattgcctgctgacacctcaggcaacgcagcacctccaaatagaccttaaggcccaagacccaggacaggggacagcaagctcaggtggaatggcccctgatgacagaaagaagcaagagcccccccatgcacacattgtgaacttctgccaaacctcactctggccacatctgacatgaaccgtcccgggccctgccacttgtcccttgtaggaccaatgagtcccactccggaactgtccaagaactaacctgccatcacatctcactgccaagatgtacaaagcacctgcatgctcagacttcttacggcgccacctccacttttgtcttgtacatggtattttctccatgcagtttccagagcccactctgctgcccatgcagtgggaccaggttccagccccgaagccaccctgagcccagctctggaatcaaaactgctcggtcaataaggaaaccacagaactctctacaacgttcggtccttgtgttgtttgtgaaggttcttaacctgcccacaaactttggcgtttatttattcgtgcttcgaaccactgtcatattaaaagctggtcttgtggaag

SEQ ID NO: 5969 - DNA, 1109 bp, Cricetulus griseus
ccgatttcgcagacggcagtgggaactcgtttgtgaactcttggaacaggacaggcgggtgtggctggaggagtgtgcgctgtccacggtgctgcaaaggcagctgcgggatcaccaggagagcaccatccatgaggtcctgagccgcttcactggcctctctgaagagtctacacgaggcatcctgcagggccaccagctgctgctgtgttctgctatgcgcagactagccctccgaggtaccaccatcactgccctggctcagatgaggctgtctgggaaaaagaggctcctgcaggagctgcgtgagcaactggctccgggagccgagggagcatccccatgcctggaggaacatcagtggcagctgctcagagcccctggaggcacggatggaggcagggcgagctgctacagttgcactcagagcgggccattggacaggcattgctggttcatgcaaggaatgtggccagcaagggccggaccaggggacaaggaagacttcaagaggacgctagtggagacagttgtggagagtgtgtatgtgaccagcaccagtgtcagccgccttgtgcaggcatattaccagcgtatcgggaagctcttgcaggcccatgaggagcaagtgctgcagcacctgaagaccctgcagggtgagagaatcaacacttacaagctgtggaagaagcaagaattcagtgaccctacccgtggagctaaccaggcggtgcagcagaggatgctgtcacagcagaagaagttcctggatcagttcacacagcaccagcagggccgcctgaactctcaaaagcagaaggctcaagagctcaaccagcttgaagcccagcttgagacccagctgcaggaagctgagcaaacctttatctcagagctggcaacattggcccgagtgcctcttactgaaaacaagccattctccaacaagcgaggacttccagagaagccagtaaggaccaaaagaaagaagcccctgcctcaggagagagaggacctggggccacccaacaatgatcaccctgccttgacagaccatgccacaggaccactcagtcctcccatccatgtccacagcagcagaaggctgg

SEQ ID NO: 5970 - DNA, 1109 bp, Cricetulus griseus
gctgcaacatggcggatgtgctgagcgtcggggtgaacctggaggccttctcacaagccatcagtgccatccaggcgttgcgctccagcgtgagtagggtgttcgactgccttaaggatggcatgcgcaacaaggagacgctggagggccgcgagaaggccttcatcgcgcacttccaggacaacttgcattcggtcaaccgggacctcaatgagctggaacgtctgagcaacttggtaggcaagccatctgagaaccaccctcttcacaacagtgggctgttaagcctggatcctgtgcaggacaaaacgccactctacagccaacttctgcaagcatacaaatggtccaacaagctgcagtaccacgcaggtctagcgtctggccttttgaaccaacagtccttgaagcgctctgcaaatcagatgggcgtgtctgccaagaggagaccaaaggcccagccaaccactctggttctaccgcctcagtacgtcgatgatgtcatcagccgcattgacaggatgtttccagaaatgtccattcatttatccagacccaatgggacttccgcaatgcttctggtgacattgggaaaggttttgaaagtgatcgttgtcatgaggagcctgttcatcgaccgcacaattgtgaaggggtacaatgagaacgtctacacagaggatggtaagcttgacatatggtccaaatccaactatcaagtgtttcagaaggtgacagaccatgccaccactgccctgctccactatcagctaccccagatgccagacgttgtggtcagatccttcatgacctggttgagaagctacataaagctgttccaggccccgtgccagcgctgtgggaagtttctgcaagatggccttcccccgacatggagggacttccgaaccctggaagccttccatgacacctgccggcaatgaccccagcccagctactgcctagcctgcagcaccagcaccttcccaggccagcgcaatccattcaccacgcaagtgtctgtcagcctgggcccctctgctggcagaactgtcacccattggcagggcatcatgagaggatggtctgctccttctctgtgtgctggc

SEQ ID NO: 5971 - DNA, 1109 bp, Cricetulus griseus
gtgtctcgtgcggcagggcggcaaccgagctgcagcggagcggcgccatcctgtggaggagccatgaagcactacgaggtggaaattctggatgcgaagacgagggagaagctgtgcttcctggacaaggtggagcctcaggccaccattgctgaaatcaagaatctcttcaccaagacgcacccgcagtggtaccctgcccgccagtccctccgcttggaccccaagggaaagtccctgaaagatgaagatgtgttgcagaagcttcctgtgggcaccacagccacactcttcttccgggacctgggggcacagatcagctgggtgacggtcttcctgactgagtatgctgggccccttttcatctacttgctcttctacttccgggtacccttcatttatggccacaaatacgacttcacgtccagtcggcacacagtggtgcacctcgcttgcatctgccactcatcccactacgtcaagcgtctgctggagaccctcttcgtgcaccgcttctctcacggaaccatgcccttgcgaaacatcttcaaaaactgcacctactactggggctttgctgcatggatggcctattacatcaaccaccctctctacacaccccctacctacggagcccagcaggttaagttggcgctgaccatctttgtgatctgccagcttggcaacttctccatccacatggctcttcgggaccttcggccagctgggtccaaaaccaggaagatcccatatcccaccaagaaccccttcacctggctatttctgttggtgtcctgtcccaactacacttacgaggtggggtcctggattggctttgccatcatgacgcagtgtgttccagtggccctcttctccttggtgggcttcacccagatgaccatctgggccaagggcaagcaccgcagctacctgaaggagttccgtgactacccacccctgcgcatgcccatcatccctttcctgctctgagcagttctcatgggctcagccaggagcactctctaccccaatgcccctctgtcctggggtgatcgtggctctctagcagcaacaataaaatctgcttacccaaaaaaaaaaaaaaaaaa

SEQ ID NO: 5972 - DNA, 1109 bp, Cricetulus griseus
gccatggagcacgccgaggaacctctgtccgcgcgccctgcgctggagaccgagggcctaagattcctacacgtcacagtgggctccctgctggccagctacggctggtacatcctcttcagctgcatctttctctacattgtcatccagaaacttgcagtccgactgagggcgttgaggcagaggcagctggaccaagctgaggctgttctggaacctgatgttgttgttaagcgacaagaggctctagcagctgctcgtttgagaatgcaggaagatctaaatgcccaagttgaaaaacataaggaaaagctaagacagcttgaagaagagaaaaggaggcagaagattgagatgtgggacagcatgcaggaaggcagaagttacagaagaaacacaggaaggccacaggaagaagatggtcccgggccttctacttcatctgtcacccccaaaagaaaatctgataaaaagcctttgcggggaggtggttataaccctctgactggtgaagggggtggaacctgctcctggagacctggacgcaggggcccatcatctggtggatgaagctaagactcttgttagtgtcacttgacattagcaagatgaacccttaaccctcaactcaattgccttacgcacactttcacagtgactagccaagggagaggtgggcttatttacattcttaactatctgtattttaagggctttggttagtatgagatatagacattgccattaggtccacactctatttagagatgaaacagccattaatttcatggcttcttgctagttggtaggtgaaggcctcttgctgttcagcagactttctaaaggaggcctagtgatgatcttttggggtagaagtccttgctgataggacagtctctgtgacaggatgcgttgaatgatgtcttccttataaatggtgagcccaccagtgaggattactgatgtaaacagttgatggggtttgcttctgtatatttattttatgtacagaactttgtaaaaaaaaaaaaaagttaaatacttgaaaagtaacatttttagcatctttattaaactcaaggaaatttctttgtgagcttgactttgtc

SEQ ID NO: 5973 - DNA, 1109 bp, Cricetulus griseus
gcggcagggacctgggcgcggcgcggcggtgactgagctgcgagcctggcgggcgtgcgccgagcctcgtgccccccacccccgggctcgtcaccctgatgctgcgcgggtgctgagcccgcccgggtcgggacgatggtgaagtatttcctgggccagagcgtgctccggagctcctgggaccaagtgttcgctgccttctggcaacggtacccgaacccctacagcaaacatgtcttaaccgaagacatcgtgcaccgcgaggtgactcctgaccagaagcttctgtcccggagactcctgaccaagaccaacaggatgccacgttgggcagagcgactgtttcctgccaacgtcgcccactcggtgtacatcctggaggactcgattgtggacccacagaagcaaaccatgaccaccttcacctggaacatcaaccacgcccggctgatggtggtggaggaacgatgtgtttactgtgtgaactctgacaacagcggctggaccgaaatccgtcgggaagcctgggtctcctctagcttatttggcgtctctagagctgtccaggaatttggtcttgcccggttcaaaagcaatgtgaccaagacaatgaagggctttgagtacatcttggccaagctacaaggtgaagccccttccaaaacacttgttgagacagccaaagaggccaaagaaaaggcaaaggagacagcgctggcagctacagagaaggccaaggacctggccaacaaggccgccaccaagcagcaacagcagcagcttgtgtagctccctcctcccttcccattgtacttgattattaaaaatccacctccagccctctctgctgtctggtggtggtgggtcagggtccgcatctgcagtacgcctgctggctactgagcccagactccttttaccccattgggcagaaaggtgcagtgacttgcccagggtcacaggcagtgcgcaggtgatagactgtacgctcctcgagggcagggctcttgttttattctctgatgtgtcccgagtaccctgaacaatattcagcacataacaggcactcaataaacacttgatttgattggccccaaaaaaaaaaaaaa

SEQ ID NO: 5974 - DNA, 1108 bp, Cricetulus griseus
cttggggagaccaaggcctacgtcttcttcgagaaggactttggggacatgcactcctatgtgcgaagccggaaaaggcttcgggaagaggaggccgctcggctcttcaagcagatagtctccgccgttgcccactgccaccagtcggccatcgtgctgggggacctgaagcttaggaagtttgtcttctccacggaggagagaacccagcttaggctggaaagcctggaagatacacacatcatcaagggagaagatgacgccctctcagacaagcatggctgcccggcctatgtgagccctgagatcctcaacactactgggacctactcagggaaggctgcggatgtctggaatttcttgatgatgggcaggccctcttacacggtgccagccagatttgggacggagcactattgtccctatggggctcagtgtggtgccacctctctaggctgagtgacttgatttgagcagcacacactcagattagctcctcgccaggggtgtccccttctcgatgaaccgtcatgactgtcccagcgtcaaaataaaaaaaaacagatgaaatagcagtcactgtctgggacagtgctgaaactaggtggtttaaacgggtaacagaaatgctgtgttttgtgaactggcacagcagcaggcagacatcttcaagggctatgccttggcaaactactaacgttgtgagaatgccttgtatacctcacgtactgtgtactttatatttgtacatacattttaccttttatacataatgtccggttgttgtcgtttggctctgaagcttgttttgtcgtctgtgtctgtctgaggaacctgtgtgtccagggccatgtgaaatgtgaatgattgttggccgtacgaccttggcagatggtgggactcggggaggagcagggacaggcctctgttggggttgtccagctcttgcatctgtgatacgttccctggctgaggactcgggctggcctgggcatttgcccggacagctggaaacactaggtctcctgtgcgcgtgtggaaaggtggtagtggcacactgttggtgacttagagagaacttttaataaatctggtttacgtaaaaaaa

SEQ ID NO: 5975 - DNA, 1108 bp, Cricetulus griseus
gcgtcccgagccgtggtccgcgctgctgctcgctccgcgcgtcgctccgggccttccgtagcgcgtcctctcgccatgtcccggcctccgccgctcggcgccacctcgggcgcccctctccggcccgccacggttctgggcaccatggagatggggcgccgcatggatgcgagcgccagcgccgcgacggtacgtgccttcatggagcgcggccacagcgaactggacacggccttcatgtactgcgacggccagtccgagagcatcctgggcggcctggggcttgggctgggcagcggcgactgcacagtgaaaattgccaccaaggccaacccttgggatggaaagtcactaaagcctgacagtgtccggtcccagctggagacgtcactgaagcggctgcagtgtccccgggtggacctcttctatttacatgcacctgaccacagcacccctatagaagagacgcttcgtgcctgccaccagctgcatcaggagggcaagtttgtggagcttggcctgtccaactatgcctcctgggaggtggcggaggtctgtaccctctgcaagagcaacagctggatcctgccaaccgtgtaccagggcatgtacaacgccaccacccggcaggtggagaaggaactcctcccctgcctcagacactttggattgagattctatgcctacaaccctttggctgggggcctgctgacaggcaaatacaaatatgaagacaaggatgggaagcagcctgtgggccgcttctttgggaatagctgggctgagacctacaggaaccgcttctggaaggaacaccacttcgaggccattgccctggtagaaaaggccctgcagaccacgtatggcagcagcgcccccagcatgacctcggctgccctgcgctggatgtaccaccactcacagctccagggcaaccgaggggacgcagtcatcctgggcatgtccagcctggagcagctggaacagaacttggctgccactgaggaagggcccctggagccagctgttgtggatgcctttaaccaagcctggaacctggttgcccatgagtgtcccaactacttcagatagactgtcctggcccaag

SEQ ID NO: 5976 - DNA, 1108 bp, Cricetulus griseus
ctgtccactgtgagcccggcccgtgtggcagcggttcctcctggtgattctattgctccttcttggctgctcgttgtcgcgttctccatctcaccatgctgtctctagattttctagatgatgtgcggcggatgaacaagaggcagctatactaccaagttttaaactttggaatgattgtctcctcagcactaatgatctggaaggggctgatggtgataaccggaagtgagagtccaattgtagtggtgctcagtggcagcatggagcctgcgtttcacagaggagacctccttttcctcacgaaccgagttgaagatcccatacgagtgggggaaatcgttgttttcaggatagaaggaagagagattcctatagtgcatcgagtcttgaagatccatgaaaagcaaaatgggcatatcaagtttttaaccaaaggagataataatgccgttgatgaccgaggcctctataaacaaggacaacattggctagagaagaaagatgttgtagggagagcgaggggatttgttccttatattggaattgtgacaatcctcatgaatgactatcctaaatttaagtatgcagtactgtttctgctgggtttatttgtactggtccatcgtgagtaagaagtcggctgcactgttcctggaagatgctgtgctttttgttgctggatgtttggagtagatcctggtctgtgattggcggatatttggagacacacatgttggcgcttcttggtagcactggtttgcattagtttctgtttccacacctaaggctgtgtgggcgggtgcatgtgcaccatggagtgcacccaaggggactttcaatcacaggatttcatatgttgtcattgtcactctttcacatttttgtacatcagtgaattttttatattaaaaggttgagccaaagcccccagtgtttgtattttgaagccaagcttcacttctaaagtgcctacagagttctgtaaatgaagacagctctgtgtgagtgagttcacacctgtcatccttccttactgtagggtggcacacattgaggtcataagtcttaacttttcagaattttaaataaaagactttgcacattg

SEQ ID NO: 5977 - DNA, 1107 bp, Cricetulus griseus
ggcttcacgcggctcggcaccgacctgatgaccagcattccggtaaaggaccgagtgaaggtgtctcagaactggagactggggcgctgccgagaggggattctgctgaagtggaggtgtagtcagatgccctggatgcagctggagggtgcttctctgtacatatctcaggctaatttcatcctggcctaccagttccgcccagatggtgccagcttgaaccgtcggcccttcagagtcttcgctgggcatgatgaggatgtttgtcactttgtgctggcaaactcacatattgtcagtgcaggaggagacgggaagattggtgttcataagctccacagcaccttcactgtcaagtactcagctcatgaacaggaggtgaactgtgtggactgcaaagggggtatcattgtgagtggctccagggacaggacagccaaggtatggcctttggcctcgggccgactggggcagtgcttacacaccatccagactgaagaccgagtctggtccattgccatcagcccgatactcagctcttttgtgacaggaacagcttgttgtgggcacttctcacctctgagaatctgggacctcaacagtggacagctgatcacacatctgggcagtgattttcccccaggggctggggtgctggatgtcatgtatgagtccccctctacactgctgtcctgtggttatgacacgtatgttcgctactgggacctccgcacaagtgcccggaaatgtgtcatggagtgggaggagccccatgacagtaccttatactgcctacagacagatggcaaccacttgctggccacaggttcctcctactatggtgttgtacgattgtgggacaggcgccagagggcttgcctgcatgccttcccgctgacgtcaaccccactcagcagtcctgtatactgcctgcggttcaccaccaggcatctctacgctgcgctgtcttacaatctccacatcctagactttcaaaacccatgacacaccacccctgcctttgagctaggcaagtaagctactcagggacctctcttgcctggcaggtgaagtgactgatacctccctgtcttcccagccctgctg

SEQ ID NO: 5978 - DNA, 1107 bp, Cricetulus griseus
cgtggagtccggggacgctgctgattgcgggagccgcgcggccgggagggacgcagcgatgaagccaggtttcagtccccgtgggggcggctttggtggcagaggaggctttggtgacagaggcggtagaggaggaggccgaggaggccgaggaggctttggtgggggacgcggaggctttggaggtcgaggtcgaggtgaggcggtggaggtggaggcttcaggggacgaggaggtggaggaggaggtggacgaggcggaggcttccagtctggaggcggccggggtcgaggtggcggccggggaggaaaaagaggaaaccaggcagggaagaatgtgatggtggaaccccaccggcatgaaggtgtcttcatctgtcgaggaaaggaggacgcccttgtcacgaagaatctggtccctggagaatctgtgtatggggagaagagagtctctatttcagagggagatgataaaattgagtaccgagcctggaaccccttccgttccaagctggcagcagcgatcctgggcggtgtcgaccagatccacatcaagcctggggccaaggttctctaccttggggcagcctcaggcaccaccgtctcccacgtctctgatatcgtcggcccggatggtctggtctatgcagttgagttctcccaccgttctggccgtgacctcatcaacttggccaagaagaggaccaacattattcctgtgattgaagatgctaggcacccacacaaataccgcatgcttatcgcgatggtggatgtgatctttgcggatgtggcacagccagaccaaacccggattgtagccctgaatgcccacaccttcctgcggaatggaggacactttgtgatttccattaaggccaactgcatagactccacagcctctgcggaagctgtgtttgcctccgaagtgaagaaaatgcagcaggagaacatgaagccccaggagcagttgacgctagagccctacgagcgggaccatgctgtggttgtaggtgtgtacaggccacctcctaaggtgaagaactgaaaccccgagctgtctggattggaagaaatgtgtgttgctactgttgcacgtgtagtttgt

SEQ ID NO: 5979 - DNA, 1107 bp, Cricetulus griseus
cgcccttatgtgtggaggtgcagttcggaggtggtgcagagctcctgtttgatggagtaaaaaaacatcaagtcacgttgcctgggcaagaaggaccctgggacatccggaacctccttgtctggatcaagaagaacttgctaaaagagaggccagagctgttcatccagggagagagtgtgcggccaggaattctggtgctgattaatgatgccgactgggaactgctgggagagctggactaccagctgcaggaccaggacagcatcctcttcatctccacactgcacggcggctgagggttcctctgtgagcccaagcacctttgcaaggggagcatgggaccaaccacacctctccttggacactgcttccaggtccttagtcccctttggctgcctccttctctgctatacccatgagctcccttaggcagggaaaagaggccaggtgctaaaaatgagcagagggagagcagatgcccagcccagcactccttccagcagctgaggtgggggagggtgctcctgtgatgtcagcagtggagggggctctatgcccaggtgacccagctgcttgccattccttgtgtcttggtctaagcactaagtgactgcctggaaggcgctccattttcctgagacatcttcatggggaagatggatgaactggagtaactgatgagaagctcctctcttgccaaacattagaggggcctccgcctcagtttccccatctggacactgaggactctgcttgtcccccactgatgtcattatggaaccccagctggggtcccctattcagagttcacctccctcccctccacccagcagctgctctcctagccacacccctcctccagcccttgaccctggctggcctccctccctacataggctaccagatgggctcctgagacactctccaggctgcctacaactccttctgctgagggtagagaatggaaggaagtagtctaaccttagacacgggggcggggcctcagtgtgtgcaactcccagcttcctgagacaagcagggtttgggtgtgcagcacctgctagatagagagctgtcgcccccctttcctctatcccttctgga

SEQ ID NO: 5980 - DNA, 1107 bp, Cricetulus griseus
ctgagaggtccgagagggcggggtctgagggagcgaggtgggttgaccggctcctgagagggtctgtcgtcccagaaccctgcggtcgcgcagcccccaggcttccatggcggtcagagcgtcgttcgagaacaactgcgaggtcggctgctttgccaagctcaccaacacctactgcctggtggctatcggagggtcagagaacttctacagtgtgttcgagggcgagctctctgaaaccatccccgtggtgcatgcatccatcgccggctgccggatcatcgggcgcatgtgtgtggggaacaggcatgggctactagtacccaacaacaccacggaccaggagctgcagcatatccgaaacagccttccagattcggtgcagatacggcgggtggaggagcggctctcagcccttggcaatgttaccacctgcaatgactatgtggccttagtccacccagacttggacagggaaacagaagaaatcctggctgacgtgctcaaggtggaggtcttcagacagacagttgctgaccaggtgttagtaggaagctactgtgtcttcagtaatcaagggggtctggtgcaccctaagacttccatcgaggaccaggacgagctgtcctcccttcttcaggttcccctggtggcaggcactgtgaaccgagggagcgaggtgattgctgctggaatggtagtgaacgattggtgtgctttctgtggtctggacacaaccagcacagagctgtcagtggtggagagcgtcttcaagctaaacgaggccaagcctagcactattgccaccagcatgcgggattccctcattgacagcctcacatgagtcaccttccatgctgctgtgtgggctcctggctctggactttggctcatttaccatgcctgagctagtatgtaccaaacgctggcagcagggcgtggcagagcttaccagagctgaatggttgagcgcgccaacctcttcatccgtgccatctctagactattgttataaaaggcttgccgtgtcatgctggctttgagttgtggctcctggatgagagttctgctgtcttgtgtcccaccccattaaagtactgcctaccc

SEQ ID NO: 5981 - DNA, 1107 bp, Cricetulus griseus
cgggtgctggtctccaaatcagaacagcttcaagaaagcaatggacatttgatttctgagcctaaagatcttggtaacctgcagggagcacagagacttcagaatgctggagcagactggagcaatgccagagattgtgttcctgttggaaagagtctggacacgcactccagggccaatccagaagtgtcaaggaatcaaagcccacaagttcatataggagaatggagtccctgcaaaggacaagaaacagctgggagcatggcagagaagctgtcctccagcagcctactcagggacagagctaaagcagccagccttgcacaatcggtcagtcaggacctggcaggccacgaggactgggaagtggtgtctaggcactcatcttgggggatgttggtttgggtggcagtcttgaggcctcagcaggtcaacatccagttcaaggcagttcattgcagtaacgggagaccatgagaatcttgggggatggaccagatacatcccactccactattgtaaggatgggctgtggtctcattctgtcttcctgcctgcggacacggtggtggaatggaagtttgtgttggttgagaacagggaagttactcgctgggaagaatgcagcaacagactcctgcagactggccatgaggataaggtggttcatgggtggtgggggattcactgactcacagtgcaaagcatcctagcgagaggctgagtcagaatgtggaagaggctaaggctgtagagcacactgcataatttaaaggcagtgtgaacccatttgtagccatcagagttctttcagagttgttagtgtggcttttgtccaaaatgtaggaagatttatgcatgcccatgatgcttcctctgagctgggacttttcccttattgcactgactggtttgtgctgacacatcatcacttgaggggttgatggtcccttgaggggtagttggcttggctaagactgaggtatggactatgggcaagggagaaactaaccaactgcacaagtacaaggtagagccctgtagctcttagaatagggagatggcagttaagtctcattaaatacagctaaagcaacatgtttacat

SEQ ID NO: 5982 - DNA, 1106 bp, Cricetulus griseus
gagacatttaccctaagactctcctggggaaaattgtggggggtctctgctgcatcgctggggtcctggtgatcgctcttcccattcccattattgtcaataacttctcggagttctataaggagcagaagcggcaggagaaagccatcaagcggagagaggctctggagagagccaagaggaatggcagcatcgtgtccatgaacatgaaggatgccttcgcccggagcattgagatgatggacattgtagttgagaaaaacggagagaatatggccaagaaggataaagtacaagataaccacctgtctcccaacaagtggaaatggaccaagcgggcactctctgagaccagctcgagcaagtcctttagaaaccaaggagcaggggtcccctgagaaggccagatcgtcttctagtcctcagcacctgaacgtccagccaattggaagacatgtacaataagatggccaagacgcagtcccagcccatcctcaataccaaggagatggcaccacagagcaagccgaaggaagaactagagatggaaagcatgcccagccctgtggccccgctgcccaacacgcaccgagggcatcataggacaccccctcgctcccctgagaaacacacagcaatagcattcaactttgaggcgggcgtccaccagtacatagacacggacacagatgatgagggtcagccgctctacagcgtggactccagtcctcccaagagtctccatggcagcaccagccccaagttcagcattggaactagaacggagaagaaccattttgaaagctctcccctgcccacctcccctaagttcttaaggcccaactgtgtctactcctcagaagggttgactgggaaaggccccggagctcaagaaaagtgtaagctggagaaccatacctcccctgatatgcgcatgctgcccggaggaggagcgcatgggagcactggggatcagagcatctgagatgtccactgcagagaggagttggcaggagaaatcaaggagtatggatgcttggcttgctgccgctgagttctacatgaccttggagacgcaactttttttttctttcttgttttgtttc

SEQ ID NO: 5983 - DNA, 1106 bp, Cricetulus griseus
cagacagctgccctagcacgcgtggagagacaccggtggccagcgtaccctgaccgtggggcggagacccggcagacccgagcagggctgtgcagaccgcatgaaaaccaggtgtcaacatgactgaacgctttgactgctaccactgcaatgagtctctgtatggcaagaagtacatcttgaaggaggagaacccacactgtgtggcctgcttcgaagagctctacgccaacacatgtgaggagtgtggcactcccattggctgtgactgcaaggacttgtcctacaaggaccggcactggcacgaaggctgcttccactgctccaggtgcgggagctcgctggtggacaagccctttgccgccaaggaggagcagctgctgtgcaccgactgctattccaacgagtactcgtccaagtgccagggatgcaagaagaccatcatgccaggtacccgaaagatggaatacaagggcagcagttggcatgagacctgtttcacctgccagcgctgccagcagcccattggaaccaagagcttcatacccaaggaggaccagaacttctgtgtgccctgctatgagaagcagtatgccctgcagtgtgtgcagtgcaaaaagcccatcaccacaggaggtgtcacttaccgggagcagccctggcacaaggagtgctttgtgtgcactgcctgcaagaagcagctgtctgggcaacgcttcacagcaagggatgagtttccctactgcctgacctgtttctgtgagttgtacgccaagaagtgtgctgggtgcaccaaccccatcagtggtctcgggggcacgaagtacatctctttcgaggaacgtcagtggcacaacgactgctttaactgtaagaagtgctccctgtccctggtggggcgaggcttcctcacagagagagatgacatcctctgccccgactgtgggaaggacatctgaaggcagctcggaagccacaactttgtgacgtagagatttggatattttctttcttaaccaggcagtgctgtgttctggttcccaccagccaccacgaggtttcctcttgctgtcccagcttcacgttaattgaaatcttttagttct

SEQ ID NO: 5984 - DNA, 1106 bp, Cricetulus griseus
tttttgtctggacctaggctacgaatatggcttccctctatggacagctggatacaaccaagaaaactacagagatttcttcacagtcacggacctgaggatcaggctattgagaccagccgttggggaaatatttgtagacgagctacatttggcacgttacttttatgctatctcagacataaaggtgcgaggaaggtgcaaatgcaacctgcatgccactgtgtgtgtatatgacaacagcaaactgacttgtgaatgaattcgaatcagcaaagactgacatttgagttttgtcctgtttggttttgtttgtttcattgtgcagagattgctctgtatgggcaacgagcgtgctggcatcaaagaatatcagtttacatatatagcaagtgtaataagattccaccaaaggacattctaaatgttttctgttgctttaacactggaagattttaaaagaataaaaattcctgcataaatgcaagattatgccaaagcctgttggcagagtactaagagacttttattttaagtcatgctattttcacagatttatggtgatcatgtgactctagggatgctgatctatgtatccttccaaatacagtgtttacatggagtattgtaagaggccacctggggaaccaggacagcagcagggaaattgagtgattagcaatttgactttgaatatattctaagtattaaatgaaatatcaaaatatacagcagcaagtagacataactgctgttcctgagaataaagtctgtttcaagtactgcccaaggtgtaataaattcttgttgctgccttttattaggccaattactgtataagacagtaaagggagctgggcaggggagaaacactgacaaaacaacaggaagggctggaactgtgtgcattctatcccagcatactgccaccccacaggtgacaagtgtgtcagcagcagcatctcttagaatcagaaacaattatgaggccaagccagcagcttaaggacaatgaagtcctatgtgacctggtggaacaataacctatgacagtattaggtcagaagccgagttccaggctgaattcttcaccctactgccagtct

SEQ ID NO: 5985 - DNA, 1105 bp, Cricetulus griseus
gcgctcgagctgcggcgccggctgcagccgcctgggccccggggcccggctcctcccgcgccgcccgggcgatgagaagctgcttctgcgtgagacggagccgggacccgccgccgccgcagccgccgccgccccagcggggaacagaccaagccaccatgcctgaagtcaaagaactctcagaagccttgccagagacaccaatggaccccatcacgggagtcggagtagtggcttcccggaaccgagccccaacaggctatgatgtggttgcacagacagcagatggtgtggatgctgacctctggaaggacggcttattcaagtccaaggttaccagatacctgtgtttcacgagatcgttttccaaagaaaatagtcacttggggaatgtgctggtggacatgaagctcatcgatgtcaaggacacattgcctgtgggcttcatccctatccaggagacggtggacacacaggaggtggcctttaggaagaagaggctatgcattaaatttattccccgagattcaactgaagctgccatctgtgacattcgcatcatgggccggaccaagcaggcacctccccagtacacatttattggggaactgaacagcatgggcatctggtatcgcatgggcagagtgccaagaaaccacgactcgtctcaacccaccacgccctcacagtcatcagctgcttccaccccagccccaaaccttcccagaaagggccttgtatgcatcgagccatgaagtgctgaactcacaaaattggtttgcatcctgactcccagagcctgatggagaagctgggcttctccctgtacccagctccctctaggagactcatcagggtggcccagctttcttcctctgctctgggtgtaaacctctgagcagctgcagccatcagcactcgttcaggctttgtgccccttcaaaggctcctgagcagttgggccactgtgtggcgctgggacgaggaccttaggcacagctgccttcctgtgtatttattcaaggtgactgcttggcaaagggaggtttcactgtgtgattgtattcttaatataatttgttaaataaatgtttgttttaacctc

SEQ ID NO: 5986 - DNA, 1105 bp, Cricetulus griseus
gtcccagcgcgacaggtcttctgggggttgaaatgtctgtgattttatctgcctccgtcattcgtgtcagagatggactgccactgtcagcatctaccgattatgaacagagcacaggaatgcaggagtgcagaaagtacttcaaaatgctctcaaggaaacttgctcaacttcctgatagatgtacactgaaaattggacattataacatcaattttattagctctctgggagtgagctacatgatgttgtgcactgaaaattacccaaatgttctggccttctctttcctggatgagcttcagaaggagttcattactacttataacatgatgaagacaaatactgctgtcagaccatactgtttcattgaatttgataacttcattcagaggaccaagcagcgatataataatcccaggtctctttcaacaaaaataaatctgtctgacatgcagatggaaatcaagctgaggcccccttatcaaattcccatgtgtgcactgggatcagccaatggagtcacatctgcattttctgttgactgtaaaggtgctggtaagatttcttctgcccatcagcgactggaaccagcaactctgtcagggattgtggcatttatcctcagtcttttatgtggagctctaaatttaattcgaggctttcatgccatagaaagcctcctgcagagtgatggtgaagatctcaattacatcattgcatttttccttggaacagcagcctgcctttaccagtgttatttacttgtgtactacaccagctggcggaatgtcaaatcatttttgacttttggcttaatctgtctgtgcaacatgtatctctatgaactgcgcaacctctggcagcttttctttcatgtgactgtgggagcatttgttacactgcagatctggctgaggcaagcccaaggcaaggctcctgaccatgatgtctgacatctcccttcagatgtattgcctttgccttcaggggacgaaggagaggacatatattaactgacactgtgatgaagaaaccagttgccacacacgagaagctgttttctttctgtccccatcttccttcttgttttacaatcagcctg

SEQ ID NO: 5987 - DNA, 1104 bp, Cricetulus griseus
ggtgtggtccacggcgcggcagcgtcctgggacgccgagtttgagcagctggatgggctaagaggcggcgtccccacttctgctcacctggatgcagattgaggatggatgcccgaagatcctcaagacagcttcactgaaagtgaggagcagtgtcaggcccagctgcccagtgttggccccggggacacctctggcatccagattaggatcatgactcctgtgagcaaccatggcatggcagagagcatttttgacctggactatgcttcctggaagattcgctcgaccctggcagtggctggctttgtcttttacctgggcgtctttgtcgtctgccaccaactgtcatcctcccctgaatgccacctaccgctctctgctgaccaaagagaaagtcttctggaacctggcagctacccgtgcagtcttcggtgtccagagcacagctgctggcctgtgggctctgctgggggacggctgtgcgtccacgctgacaaagctcttgggcagcagagctggtgctggtttcacatcaccacagccactgggttcttcttctttgagaacgtggctgtgcacctatccaatctgttcttccggacgttcgacctgttcttggttgtccaccacctctttgcctttcttgggtttctgggttcagccgtcaatctgagagctggccactatctggccatgaccactttgctcttggagatgagcacacctttcacctgcatttcctggatgctcctgaaggctggctggtcagactccctgttttggaaggtcaaccagtggctaatgatccacatgttccactgccgaatgatcctcacctaccacatgtggtgggtgtgcttccagcactggggcgccctagtcgacagcctgtacctgcctcactttgcactgttcctatgtgggctggccctgctcacactcatcattaacccctactggacacacaaaaagacccagcagcttctaaatcctgtggattggaacttcacccagtccgaaaccaaggtgccaggcaagaaaggaccaaatggccaggtgcctcagaaaaagaggctctagcgtgaggagactgatgtctgg

SEQ ID NO: 5988 - DNA, 1104 bp, Cricetulus griseus
gcctcaggtccagggacatggcgggcgttaaagctctggtggcactatccttcagcggggctattgggctgacttttcttatgctgggatgtgccttggaggactatggcgtttactggcctctgttcgtcttgatcttctacgtcatttcccccatcccctacttcattgccaaaagggtcacctatgactccgatgcgaccagcagtgcctgtcgggaactggcatatttcttcactactgggattgttgtttctgcctttggatttcctgttattcttgctcgtgtggctgtgatcaagtggggagcctgtggccttgtgctggctggcaatgctgtcatttttctcacaattcaaggctttttcctcgtctttggaagaggagatgacttcagttgggaacagtggtagccctttactctgatggaaagcattgagttttttagaatttgtactgtatgtataagtgtacacatatggtggtttcttacagatcagaatataattaagctgagttttatacctttatatcatagaccatcttagggaagatgttgtaaacaaaagatgaattttattcctagcaaatagatcactccattgactcattacacaatggtgcactttttgttctttgtactaaatttgatgtcacctccacaggaaacacggggacccatgtcacggtggttctaataaacagtttttctagcttaccctttttatctgctacctatgaggagaagggagtgaaaacagccacctcatcaggatgttgtcggcggcggcggcggtggttaagcattaatgttggtagctggtgagggtccagagccctcttctctgaagcttgtggtctgagggaccagcacaccctccccaggctacagtgacactgcaaccggcggatgaatggacagtggacagcgtgcaatgttactttttggccttgtgcatgatattatgttttcaatattttgtgtacatatcgagttgttgtcatttctagtatttacattagaaaagttatttagatacttgaccattttaaccagcatttttaatcatggcacttgctattgtaataaatttgactttaaac

SEQ ID NO: 5989 - DNA, 1103 bp, Cricetulus griseus
tgggaaggaagctgatgataaccgccttgtcatggagtttgatgaccgagccactgtggagatcaataattctggctgttattccactgtgtgcatggaactggacattcaaaatctggcagtcaacagcatcctccagtcccatcatttctgcagttttttgccacaggcagcctcttgtcagagctacttcctcatgattgtttcagcatacatcgtggctgtgtaccatagcatgaagaatgagttgagacacagtgccccaggaagtactcctgtgaagaggaagggggctagccagttctcccaagaggctaaaggggcatctggagcccttcctggaatggtcaccttctctcaaaattatgtggcaaatgagctcactcagagcttcttcaccatcactcagaaaattcagaagaaagtcacaggctctcggagctccactgagccctcagagatgttccctgtcctccctggttcacacttgctgctcaataatcctgctttggagttcactcaaatatgtgtgcaaggtattgtctctggacacaaacatcacaaatcaggtgaataagctgaacagagacctacttcgcctggtagacgttggtgaattctctgaggaggcccagttcagggacccctgccactcctacgtgctccctgaggtgatttgccacagctgtaatttctgccgagacctggacttgtgcaaagattcctccttctcgcaggatggggccattctgcctcagtggctctgttccaattgtcaggccccctacaactcagctgtgattgaatcagccttggtggaagccctgcagaggaaactgatggccttcacactgcaggacctggtgtgcctaaagtgccgtggtatgaaagagacccatatgcctgtgtactgcaactgtgcaggggactttgttctcaccatccacacaaaggacttcatggaacagattagaatcttccagaacattgccaagcactacaatatgtcatacctccaggagaccatagcatggctgctacagacaagccctttatcaaactgttagcaagcctaggcttaagacactttgatatcccatacc

SEQ ID NO: 5990 - DNA, 1103 bp, Cricetulus griseus
gaccaaagcagaccgcttggtgcagatgagcatatgctcttccctggcacgcaagttccctaagctgaccataatagggggaggaggacctgcctccgggggaagtggaccaagagctgattgaagacgggcagtgggaggaaatcctgaagcagccgtgtccctcgcagtacagcgctatcaaagaggaagaccttgtggtttgggttgaccccttagacggcaccaaggaatacaccgaaggtcttcttgacaatgtgactgttcttattgggatcgcttatgaaggaaaggccattgcaggcatcatcaaccagccatattacaactaccaggcaggccctgacgctgtgctgggcaggaccatctggggagttctgggtttgggtgcctttgggtttcagctaaaagaggcaccggctgggaagcacatcatcacaaccaccaggtcccatagcaacaagctggtcacagactgcgtttcagccatgaaccccgacaacgtgctgcgagtcgggggagcaggaaacaagatcatccagctgattgaaggcaaggcctctgcttatgtatttgcgagtcctggctgtaagaagtgggatacttgtgccccggaagttattttacatgctgtgggagggaagctgacagacatccacgggaacgccctgcagtacaacaaggaggtgaagcacatgaactctgctggggtcctggccgcactgaggaattacgagtactacgccagccgagttccagagtctgtgaaaaacgcactgactccctgaagggccgtttcactcactcacccggaggacttggttctttttttttttcttttccattatttgttttcaagacagggtttctctgtgtagctttggctgtcctggaactcgctctgtagaccaggctggccttgaactcacagagatccgcctgcctctgcctcccgagtgctgggattaaaggcgtgcgccaccaacacccggcacttgtctgtttgtgtttgtagacagggtttctctgtaggatccgaggctgtcctggaactaactctggagaccaggctggcctcaaactcacagagatctgcctgcctc

SEQ ID NO: 5991 - DNA, 1102 bp, Cricetulus griseus
gtaaccgtacctttagcctcagctctacccttcttcgtcaccgccttacccatgtggagccccagggctttagtttctcagcctaccctgtagctcccctcatccccagcccaccacctcctcttggcactagcccctcactgacccctcgaagcccttcacattccagtgatgggccctttggcctgcctggcttagaaccagagcctgtgggcccacaggctggggaacccacccccaccactggcaggtgacaagcctcacaagtgtcctgagtgtggcaaaggcttcgccgaagctctgatctggtcaaacaccatcgtgtgcatacaggggaggaaaccctaacctttgtcctgaatgtggcaagggttttgctgacagttctgcccgagtcaagcacctccgcacccatcagggtgagcgcaccagaccaccaccatctactctcctgcggccacataacccacccggtccagtacccatagtccctcagtctcgagggcggggccaggcctctacacccagccagcttcatgtgtgtggtttctgtggaaaagagtccccccggagctcagatctagtgaaacacaggcgtacacatactggggagaagccatacaaatgtgcagagtgcggcaagggcttcagcgatagctctgctcgaatcaagcaccagcgtgggcacctggtcttaaggccctttggaataggggatggtcggtcaaggcccctcctccaggaggggtcaccagctggaatggagtgatggacagtccagggagggtagagggcccagaagtacctggagggggggtatttgctgctgaaggcagagaaaggcctgggaaatggtgggagggatggaggaggatgagaacagatagaaacagactgaagaccataatgttcatactcaggaaacccagctaggtgttgggaaccttgccagtatgagttgtaccacagcttctagaacactgcctagcatagagtagagttcaaggccagcttggtctacagagtgagttctaggacagccaggcctataacacagagaaaccctgtcttgaaacgaaaacaaacaaaaaaaaaaaaaaaa

SEQ ID NO: 5992 - DNA, 1102 bp, Cricetulus griseus
gcgcgctttctgaggccgggagtcaactgcgatgagtggagaaagcgcctaagcgacgggtggatcccgaaggggatggattttgagcatcaggcgttcgtgagtatttatcattgtaattgtactgtttaaatcaaaatgcctggtaaagcaaatgcttctaagaagaaatctcaacagttaaagagaaattcaaaacgaagagctaatgaggaagtggatttgccagagaatgaggttggaaacacagtgaaaagaaacaaaagtcattccgggcatctgtcctctaaaggaacaggagaagcaaaatgtattaaccgaaaacaggtaagagtagcatccaaaaagagaacaaactggcagcctcttccaaagacgactgaagaatatttgcaaaatatgatggaatcagcaattctagaaattttaaacaaaaacattaaaggaaaagaacaaattcagtatcacctcaactgcttaaagaaaagattactacaacagtgtggaacagtgaaagtccctcccagacagctgaactatttaactaatgtgtcaaatctgctgaaaatggaaacggcacagcaaagagctaataaagcggaactggctttactacaggaagaaatagacaaaatagtagagactacagaatcaatgactgagacgattcagagcctaaagcaccaaattgagattctgacaaatgaggtagaagaggaggagcagcaggtgaaagagaaatttcacgtggatagtaatagggtactgtctcttccagaacttcctcagaaaagtcttaaagcacccatacttcaaaaagaaattttggcagtaattccaaaccagaaagctcttctgaaggacttggatgtccttcataattcatccccagtgaagaacatgtcagcattcattcaagaagcctataagaaacttgatggctcttaaagagttggtttttgtttttgagcattgttccattttaacttactgtttttgaatcgtaagacttgccttctttaagacagagtctccctctctgtgtagcctgggctggctctcctgcctcagcatcctgagtgctgggattactggtgtgagc

SEQ ID NO: 5993 - DNA, 1102 bp, Cricetulus griseus
ggatacgggtgtgggcaaatcaagcatcgtatggcggtttgtggaagacagttttgatccgaatatcaatccaaccataggggcatcttttatgaccaagactgtccagtaccaaaatgagctccataaattcctaatctgggatacagctggacaagaacgattccgtgcattggcaccgatgtactatcgagggtcagcagcggccatcatcgtttatgacatcacaaaagaagagacattttcaacattgaagaactgggtgagagaactccgacagcatggcccccctagcattgttgttgccattgcagggaacaaatgcgatctcactgatgtcagagaagtcatggagagagatgctaaggactacgccgattccattcatgccatctttgtagagaccagcgcaaaaaatgcgataaacataaatgaactgtttatagaaattagccgaagaattccatccacggatgccaacccgccgtctggcggcaagggcttcaaactccgaagacagccatcggagccaaagcgaagctgctgctgacgacccagggccccacactgatgaagaagcaggtggtcctgggtgttgcaggagggccagtccttgcctctggcagctcatgccctggagtcttcttcatgcaaaaaggactcagaggagctggctgctgggctctctgagaagactgcagcaggcgtctcctctgcagacctctggtgcagactctggcgtggagagggaccacatcactggctgttgacctagcttttggtttttgggcccaggtattttggtggggggaaaaatgtgctctgcctagcatatgtaaatttgtagtctatatttatgagaccattgcttaaaaattataaattatgtaaatacattaataacttctgagttctgtttagtactccatttagccctgtgccccgtcttcatgtgtgcccgccgactttccagttggtcacaggaggtgtggaagtgcattcaccttgtgcaaaggcatggagcacttagctcacagcttccgtcttcctcccttgcccctctgcctcccacctggagatggtaacaaagacttgtgcctcc

SEQ ID NO: 5994 - DNA, 1102 bp, Cricetulus griseus
  modified_base (503)..(503): a, c, t, g, unknown or other
aaatattaggagaaatctgagcactcatgtgattaaaggattttatgaatttcaacatggcattcaatatggagaagcccaccaacagattcgagagcatattgttaatgagtgcatgcctcctgggatagtagtatatgaaaacagtgtgtgtgaaaatgatgccattggtctttcacagtcagctatgcacctcagaggtccaactgtagagaaaccatatgagtaccaggaatgtatggaaaagccttttaaacataaattttggaaaaattttacatattctgagtcctttcttacccttgagaatccttccagaaagaacccctatgaaaacaatctatctaatgaacattgtaggagtctcatttctgaacaagattatgaactggagacagaccttatgtatgcaagcaatgtgggaaagcatgtattcattcttaccaccttctgcaacatgagagaagtcacaccagagaaaaactttatgcatgtaagcagtntgggaaagtatttggacgttcttcataccttcgtaaacatgaaagaattcacactggagagaaaccttatttatgtaagcattgtgggaaagccttcagtgatcccacaacccggaacaatcatgaaagaactcacactggagagaaacactatgtttgtaaacagtgtgggaaagccttcattcgttcctctcagcttctgatccatgaaagaattcacactggagagaagccttactcatgtaaacattgtgggaaagccttcacctattccagtgcctgttatattcatgaaagaattcacactggagagaaaccctatgtttgtaagcagtgtggaaaagccatttacatgttccacatacctccacaaacatgaaagaattcacactggagagaaaccttatacatgcaagcaactgtggcaaaacctttgccagtccaacatagggcttgtaacaatcatgaaagaaatcacactggagagaaaccatatgtatgtgtgcaatgtgggcatcgcattcactttttcaaagtcccttcaaatccatgaaaagaaaaccacactggagagaaaccatatgtatgtaagcaatgtg

SEQ ID NO: 5995 - DNA, 1102 bp, Cricetulus griseus
gctagcgcagctgtgctgccaggcccggatctgccatggcgtcccccgcagcaggcggggtggtgatcgtaggcagtggactcattggtcggagctgggcaatgctgtttgccagtggaggcttcaaggtgaaactttatgacattgagcaacagcagataacaaacgccctggaaaacatcaggaaggagatgaagttgctggagcagtccggctctctcaaaggctccttgagtgcagagcagcagttgtcactcatcagtggctgcggtaacctagcagaagcagtagagggcgccatgcacattcaggaatgtgttccagagaacctggaactgaagaagaagatttttgcccagctggatcgtatcgtggatgacagagtcatcttaagcagctccagctcttgtctgctgccttccaagctgtttaccggcttggcacacgtgaagcagtgtgtagtggctcatcctgtcaatccaccatattatgtcccactggttgagctagtccctcacccagagacagctccagccacaatggacagaacctatgccttgatgaagaggattgggcagtccccggtgagactcctgaaggagatcgatggcttcgttctgaaccgcctgcagtatgccgtcatcagcgaggcctggagaatgatggaggaaggaatagtgtctcctaacgacctggacctggtcatgtcagatgggctgggcatgcggtatgcattcattggacccttggagactatgcacctcaatgctgaaggtattgtaagctactgtgacagatacagtgatggaatgaagcgtgtcctcaagacttttggacctgttccagagttctcaggggccacagtggagaaagttaaccaggacatctgtatgaaggttcctgatgatccagaacatttagctgccagaagaaaatggagggacgactgtctcatgaaacttgctaaactgaagcaccaggtgcagccccagtaaatttcttgtaatgcctccatcactccttcctgggaaactctctttggcgagattagaagctcttgatccaatccctgtgcagcatcgagaagcctaggaagccggcc

SEQ ID NO: 5996 - DNA, 1102 bp, Cricetulus griseus
tatgaggagaataggaatgtgtctaatcagagtttgtatctccaagtgaatgagatcatccgtgctgaggagaaactatatccaggtgtggcgggcagaaaagatttcacacactgttcccagtttgaccctcgtcaccgagttcctgtggaagagactctctataaccctgcatgtggtaaccacttcagtctgcccccacatttccaggacttcccaacagtgcatcccagggaacagccgcataagcatccatacggtaccagcttcggtcaaaagttgtgtgttcaaggccatcagcaacttctcatcagagagaaacctttcagtaaacagggtagaaatggatgtaactggagttcccggtcaaaagatcatcagaaacagaagccacacaaatgcagcacctgtgggaaaggcttcagtcacagatgggttcttaacatccaccagagagtccacacagagtgcctactttgcatgcccaccagagagtccacaccggggagaagccatacaagtgtgaggagtgtgggaagtgcttcagtcggagtttctacctgcaaggccaccagagagttcacactggagagaaaccatacaaatgtgaggagtgtgggaagggcttcagatggaactctaatcttcaaattcatcagcgggttcacacagaagaaaaaccctataaatgtggacaatgtggcaaaagtttcagcaaggcctcaactctcctggcccatgagagagtccacactggagaaaagccttaccagtgtgatgagtgtgggaagggcttcagtcagaaatcataccttcaaagccaccagagtcttcattctggagagagaccatatatttgtgaggtgtgtgggaagagcttcagtcagagagcatatctacaaggccaccacagggtccataccagagtaaaaccatataaatgtgagatgtgtgggaagggcttcagccagagttcccgccttcaggcacatcacagggtccacatgcgggggaaaccgtaccaatgtgagatgtgcacggaaggatttagtaagagttcttgtctccaagcacatcagaggatccacacagaaggaagacc

SEQ ID NO: 5997 - DNA, 1101 bp, Cricetulus griseus
caggaggagactcccacaatggaaaccttgtcattccccagatacaatgtagctgagattgtggttcatattcgcaataaattactaacaggagccgatggacaaaaacctctctaagaatgatctttatccaaacccaaagcctgaggtcttatacatgatctacatgagagctttacaaatagtgtatggggtccggctggaacacttctacatgatgccagtgaacgcagaagtcatgtacccacatataatggagggcttcttaccagtcatcaatttattctttcatctggaatccttagaaaacgacagtgctgcaaggaaggaaattagacccaaaagaaatctgatatttttcttgagaaaaccaaagggtttgaatgaactaaagttgtcagtggtttctctgaaagaagttcaagacagcttgaaaagcaaaattgtggactctccagagaaggtgaagaactataaagagaagatgaaaaacactgtccagaagctccggaattctctgcaagaagtgatggagaagtatgaaatctatagagactctgtggattgcttaccttcttgtcagctggaggtgcagttatatcaaaataaaatacaagaccttgcagataacagggagaagctaagcaatatcttaaaggagaacctgaacttggaggaccagattgaaagtgattcatcagaactaaagaaactaaagactgaagaaaattccctccgaagactgatgactgtaaagaaggagaagcttggcaccacgtgctttaaaatgaacaagaagcgagaggactgggggcagtacaagcggacagtgatcgaaggctgcaataaagttcaagaagaaagaggtgctgtctgtgagcaagtgaccaccattaatcaagagatccagaagattaaatctgggattcagcaactaaaagatgttgtgaaaaaggagaaactgaagtcccaggaaatctttgtaaacttgaaaagtgctctggagaagtaccatgagcgcattgagaagacaacagaggagtgctgcaccaaaatagaagagaagactgcagagctcaagaggaggatgttccgagaatg

SEQ ID NO: 5998 - DNA, 1101 bp, Cricetulus griseus
cggtggctggccgcgagcccgggggccggcggctcgccgctgcgcctggcggggtggggcgggatggcggcgtccgcgtggctggaggccggcctggcccgggtgctcttctacccgacgctgctctacaccgtgttccgcggcagtgtgagaggctgggcgcaccgcgactggtaccaccgcatcgactccaccgtgctgctgggcgcgctgccgctgcggagcatgacgcgccggctggtactggacgagaatgtgcgcggggtgatcaccatgaacgaagagtacgagacaagattcctgtgcaacaccgcgaaggaatggaagcaagcaggagttgagcagctacggctcagcacagttgacatgactggggtccccaccttggccaacctccacagaggagtccagtttgctctcaagtaccagtcaatgggccagtgtgtctacgtgcattgtaaggctgggcgatccagaagtgccacaatggtggcagcatatctgattcaggtgcacaactggagcccagaggaagctatagaagctatcgccaaaatccggacacacatctccatcaggcctaaccagctgcaagttctcaaagagttccacaaggagattactgcaagagcagcaaagaatactgataactgataacatctcccacactgacatttcaagactatgaagtctgtggatgacaaagaacttggctgtacccaagtaaaaagtttaaaggacaaaggggcttaagccaggacaacaccccgaatatgctgagtaatagataatgtgcctcctttgccttccttccctgaaataacactgtcagatggctacagagaacaagattgtctggctaaatcttattttcttcgacagggtcaaggaaatattaattttaacagaaatcaattatgtatctgatattttgtgtaatggcaccataacagaagttaaatgctagaaaaggaaagaataaatacttagatctgttctttgttactgtcagaatcccaatttcaattgtataacttggcaaaatgcttgccagcatgtataaggctacgagtttggtccctagcacttccaaaaataaaa

SEQ ID NO: 5999 - DNA, 1101 bp, Cricetulus griseus
  modified_base (1055)..(1055): a, c, t, g, unknown or other
gaattatctggcccctggggggctttcagattcccaacttcttctggaacctggggatcggtcacactggtgcgtggtggcatactgggaggagaagacgagagtggggaggctctactgtgtccaagagccctccctggatatcttctatgatctacctcaggggaatggcttttgcctcggacagctcaattcggacaacaagagtcagctggtacagaaagtacggagtaagattggctgtggcatccagctgacgagggaagtggatggcgtgtgggtgtacaaccgtagcagttaccccatcttcatcaagtccgccacactggacaacccggactccaggacgctgttggtgcataaggtgttccctggtttctccatcaaggctttcgactatgagaaagcatacagcctgcagcggcccaatgaccatgagttcatgcagcagccatggacgggcttcaccgtgcagatgaggcagtacctgggcagactggcagcaggtgttccagcagctgccaaactttgccccagcctgccgaagcccctgccctgcctccccccttttaggacacgggcctatccacaggcttctgagaagccagcctgctagaggctgaaccagaaccaattgttttcatccctgtcttactgcctcctgtcaccccgctgccattgtcatgtctgtctttttggccatctgctcctggatctctttcttgagatgggcttcctaagggctgcagggacagcccagtcacagtattgctaacccaggaccctcgggcccttcagccggtccccctgctgtggtttttcattcaggtttctcccagatgtggagagtcagctcagcaccccatccccagcctgtatgttgagctctatagaccagggaggggcatccctgggagggaactgctcagtggcccccttcccaacaagaagggtgtggcctgtcatagcgaaggtaccatcctaggctgactcccagctcttctctcaactcatacactcgtatgatactttgacactgttcttagctcaatgancatgtttagactttaacataagctcaaattaaaaaaaaaaagttaa

SEQ ID NO: 6000 - DNA, 1101 bp, Cricetulus griseus
atttggggttcctactggacttcatctcctgccctgtcattaaaggcttcactctgccaccatcaccattggctttggacagatcaagaacctgctgggattgcagcgtatcccccggcagttcttcctccaggtgtaccacaccttcctccacatcagcgagaccagggtgggcgacgccgtcctggggctggcctgcatggtgctgctgcttgcactgaagctgatgcgggaaggagtacctcctcccgaccctgagacgcccctttgtgtgaagctcagccgtgggctggtgtggactgtcaccacagctcgcaatgccttggtggtctcctttgcagccctgattgcttactccttcgaggtgacaggccatccatcctttcgttctgactggaagatagctgaggggctccctcctgtgcgggcccaccctctcagtgaccacagacaataagaccctatttgacctcgctgttctactacattcccaagtctgcactggctgccgtcatcatcatggctgtggctccgctgtttgatgccaagatcttcaggacactctggcgtgtgagaggctggatctgctgccactctctgtgacattcctgctgtgcttctgggaggttcagtacggcatcctggctgggactctggtgtctttgctcattctcctgcactttgtggctaggcccaagacccaggtgtcagaaggacgcattcttgtcctgcagccagccagtggcctgcacttccctgcaattgatgccctacgagaggcaataatgaaccgggcactggaagcacccctaccacgctgcgcggtcctggagtgcacgcatgtcagctgcatagactacaccgtggttgtgggactcagtgagctcctggaggacttccaggaaacggggtgtcaccctggccttcgttggcctgcaggtgcctgtgcttcgcacactgttggctgctgacctgaaggggctccagtacttcactactctggaggaggccgagaaatgcctacagcaggaaccagggcctcagccccacgccgacctcgaagactctgtccagagcccaggatcctccctgctcaagtct

SEQ ID NO: 6001 - DNA, 1101 bp, Cricetulus griseus
gcaagatgaatatgacagaattcaggtggctgacataatggaggacacattcccacaagatgctggactggacaaactgataaaagtctgtgaaggcattaaagaacttgaagaccttgctaaaaagcttaaaaaagagaaggcaaaagttaaaaagcaaaaatcttcaaagaaaaagagaaaaacacccacaaaaactgaaggtggcaataaaaagaagctcacccaggagacaactcaacttccagaaccttcacaaggcagcacacaaacagatcaaggatgtctccagactcctcaaaagcctccaccaacaccatccagcagttccacaaacaagataccaaaggagccttctaaggaacaaggacatcagcatggacccaaagaagtgatggttttgaaagtaacagaaccatttacttatgatttgattgacaacaaaatgatgttccatgccaccgtggctactgagactgaattcttcagagtgaaggtttttaacacagccctaaaggacaagtttggagatacacagcactacctctgtgtctgatgtgaatgttaaccaaatgatggttatctcaaatgcactgaagcaaagagccagtgcaacccctaaaatcaaggatcttttctcactaccaaaagggacatatatgaacggagagtttgtggtaattaagaaaactgagaggaataacttcatttactatggtatagaagatgataccgggaaaatggaagtggtggtctatggacgactgaccagtgtcaggtgtgagccaggcaataaacttcgacttgtctgctttgaattgtcctcaagtgaagacacatggcagctgaagtctgtaaggcacagttacatgcaggtcatcaatgaaggaaagtctgtcaacactgatgcagttatgaaaagctccctagaaccatactcctgaaaacctggatgcgaaggataatgttagcagatgtaagattcaagtccaaaatgtaaatgtacatattacctttgaaatactctgtctctgtctgtctgtctctgtctgtctgtctctgtctgtctgtctctctgtctctctgtctctctctctctct

SEQ ID NO: 6002 - DNA, 1101 bp, Cricetulus griseus
ctttttctccgcggcgtcgctgtggctgccgctgtggtgcttggctctctgagctatccggtgccatccttgtcgctgcggcgacactcgtatcagctgcagccatgacggagcagatgacccttcgtgggaccctcaaaggccataacggctgggtaacacagatcgccaccaccccgcagttcccagacatgattctgtctgcgtctcgagacaagaccatcatcatgtggaagctaaccagggacgagaccaactatggcataccacagcgtgcgcttcgaggtcactcccattttgtcagtgatgtcgttatctcctctgatggccagtttgccctctcaggctcctgggatggaacactgcgcctctgggatctcacaacgggcaccaccacgagacgatttgtaggccatactaaggatgtactgagtgtagccttctcctccgacaaccggcagattgtgtctggatctcgagacaagaccataaagttatggaatactctcggtgtctgcaaatacactgtccaggatgagagtcattcagaatgggtgtcttgtgtccgcttctccccgaacagtagcaaccctatcatcgtctcctgtggatgggacaagctggtcaaggtatggaacttggctaactgcaagctgaagaccaaccacattggtcacactggctatctgaacacagtgacagtctctccagatggatccctctgtgcttctggaggcaaggatggccaggctatgctgtgggatctcaatgaaggcaagcacctttacacactagatggtggggacatcatcaatgccttgtgcttcagccccaaccgctactggctctgtgctgccacaggccccagtatcaagatttgggatttggagggcaagatcattgtagatgaattgaagcaggaagttatcagcaccagcagcaaggcagagccaccccagtgtacctccctggcatggtctgctgatggccagactctgtttgccggttacacagacaacctggttcgagtgtggcaagtgactattggcacccgctaaaagtttatgacagagtcttagaaataaagtggctttctagaaa

SEQ ID NO: 6003 - DNA, 1101 bp, Cricetulus griseus
cccggtgggtcatggtgctgggtcgcgggccgcggtgcctctggagactgtcagcgctgggagtcgcctgcgcgcgccgtggcctgggtcaggccctgctgggaatctttctgtatcacacagatttcaggaaaagtctgactgtggagcaagacaagatgaaggttgagctactgcctgccctgactgacaactacatgtacctggtcattgatgaggacaccaaggaggctgccattgtggatccagtgcaaccccagaaggttatagaagccgtgaaaaagcaccatgtaaagctgaccacagtgctcaccactcaccaccactgggaccatgctggtgggaatgagaagctggtgaagctggaacctgggctgaaggtttatggaggtgatgaccgcattggggccttgactcacaaagtcacacacctttccacactgcaggtggggtctctcattgtcaaatgtctgtcaacaccatgccatacttccggacacatctgttactttgtgagcaagtctggtagctcagagccctctgcagtgttcacaggtgacacgttgtttgttgctggctgtgggaagttctatgaagggactgcagacgagatgtacaaggcactgctcgaagtcttgggccggcttcctccagacacaaaagtctactgtggccatgagtacaccataaacaaccttaagtttgcacgacatgtggaacccaacaatgctgccattcaggagaaactggcctgggccaaggagaagtatgctgttggggagcccacggtgccatccaccctggcagaggagttcacctataaccccttcatgagagtgaaggagaagactgtgcagcagcatgctggggagacggaccctgtgaccaccatgagggccatccgcagggagaaggaccagttcaaggtgccacgggactgaggcacatggggatgggaacttttaagtgactgtctggttgctcatgcaggatctagtctgcttttaagttaatccagagcccttagcttatgttatcaaatgttctaatgcatatttataagagaaaaaggttaaaagtatttattcccaataaaaaaaa

SEQ ID NO: 6004 - DNA, 1100 bp, Cricetulus griseus
gccagattggagtgctctggttattaagtaactagatactacctaagcaggtcaagacagtctcaaaagaactgtaacttttcagactcaagaagaaatatttcaaattaagttgctacctctttctgctgatctctggaaaaagacagcactaagagattaaaatctgggaaatgagacatttctctctgacttttctttcaagggtatgagttgctactaatgaaataaatcaacttgaagatgtttaaggtcatagttaatttcaaaaaaggttctttattggcataaaaatgaaagtgtaaataaaatggcaccagatatcccaaactgagggtcaggtcaggtcaaaaacctattttatccctctttgctgtttttccccttctgcccactttcctgggtgttgggggagctcgctgacaacagtcacaaatccagcgacctaggagaaaaattgttagttaatatggagtggaattttatttttataggactgagtacaaaccacctaaactcattcctgagctgtccatagtgataactctctgggatttttttcagtggggagggaagtactgagctccttaagccaagggagaaaatgtaaacaacccttaatcagtgtaaccaatacaattcggaattcaatgcacagacaagatggggaaagggcacaaaacaatcatttgtaccttaaaaaatatgtaatcctaaaattcaaataccatcatgcttttaaaacctcaacaacacaatcctaatgtagaacttgttaatggatctggctttgtgtggcctgttccactagcacctgcaccacacacttgagctgaattactgcagaacctgagtgattattcacatccttacggagggattccaggaaactgagttttatagagaactatacagtgttaactatgcaacttaagtccttaaaattgcacaattacctgtataatgtttcaataggattactgtgatttactatttgattctgtgtccatcctaaagtttttctggaattgtcatgctgcctcacttttataggaagatgtcttagtatatatataaaggcatagcagtcactttgttaa

SEQ ID NO: 6005 - DNA, 1100 bp, Cricetulus griseus
  modified_base (187)..(187): a, c, t, g, unknown or other
cagtcatggccatgcaaaaaatctttgctcgagaaatcctggactccaggggcaaccccaccgtggaggtggacctgcacaccgccaagggtcgattccgagcagctgtgcccagtggagcttccacaggtatctatgaagcactggagctaagagatggagacaaatctcgatacctggggaaagngtgctgaaggctgtggagcatatcaacaagactctagggccagctctgctggaaaagaactaagtgttgtggatcgaaagaaaaagttgacaagctggccatgcaggagttctagatccttcccgtgggggaaggacgccaccaatgtgggaggacgagggaggcttgcacccaacatcctggaagaacaatgaggccctggagctgctgaagacagccattcaggcagctggttacccagacaaggtggtaattggcatggatgtggcggcatctgaattctatcgcaatgggaagtatgatctggacttcaagtcacctgacgaccctgcacggcacatcagtggggagaagcttggggagctgtacaagaacttcatcaagaactatcctgtggtctccattgaagacccctttgaccaggatgactgggccacgtggacctcattcctctccggagtggacatccagattgtgggagatgaccttacagtcaccaaccccaagaggatcgctcaggctgttgagaagaaggcctgcaattgcctgctactgaaggtcaatcagattggctcagtgacagaatccatccaggcctgcaaactggcacaatctaatgggctggggggtgatggtgagccaccgctctggggagactgaagacactttcattgctgacctcgtggtgggactctgcacaggacagatcaagactggtgccccgtgccgttcagagcgtctggccaaatacaaccagcttatgaggattgaggaggctcttggagacaaagctgtctttgctggacgaaagttccgtaatccaaaggccaaatgagaagctgaaggctccaggactccaaagaacagaaccaggccttcaagcccttctccctgaaataaaacactgaccaaa

SEQ ID NO: 6006 - DNA, 1100 bp, Cricetulus griseus
gtcgagaggttgtgtcgcgcctagagccctctgggacttgtagttctgaagatggatcacgtcgcaccgtcgccggtgcctctgggtcaggctgaggtagcgcaggccctgcagcgcctgcacatgaccatcttttcccagagtgtctcgccctgcgggaagtttctggcagctggcaacaattacgggcagattgccatcttcagtttgtctgctgccttgagttcagaggccaaagaagaaagcaaaaaacccatggtgaccttccatgcccatgatgggcctgtctacagcatggtctccacagatcggcatctgctcagtgctggggatggggaagtgaagggctggctttgggcagagatcctcaagaagggctgtaaggaactgtggcgtcgtcagcctccatacaggaccagcctggaagtgcctgaaatcaatgccttgctgcttgtccccaaggagaattcactcattctggctgggggggattgtcagctgcatactatggacctggaaactgggaccttcacacgggccctccggggccacacagactatatccattgcctggcactgagggatcgcagccctgaggtgctatctggtggtgaggatggagctgtacggctttgggatctccgtatagccaaagaggttcagaccatcgaagtctataagcatgaggagtgctcgaggccccacaatgggcgctggattggatgtttggctactgactcagactggatggtctgtggagggggcccagccctcaccctctggcacctcaggtcttctacacccaccactgtctttccgattcgggcaccacagaaacatgtcaccttctaccaggacctgatcctgtctgctggccagggctgttgtgtcaaccactggcagctgagtggggaacttaaggcccaggtgcctggttcctctccagggctgctcagcctaagcctcaaccagcagccagcagcacccgagtgcaaggtcctgactgcttcaggtaacagctgtcgagtggatgtcttcaccaatctgggctaccgagctttctctctgtccttctgacatcatgatcctccatctcagga

SEQ ID NO: 6007 - DNA, 1100 bp, Cricetulus griseus
tgggctactacgatggcgatgagtttcgagtggccgtggcagtaccgctttccgcccttctttacgttacagccgaacgtggacacgcggcagaagcagctggccgcctggtgctctctggttctgtccttctgccgcctgcacaaacagtccagcatgacggtgatggaagcccaggagagcccgctcttcaacaacgtcaagctacagcggaaacttcctgtggagtcaatccagattgtattagaagagctaaggaagaaagggaacctcgagtggttggataagaataagtctagcttcctgatcatgtggcggaggccagaagaatgggggaaactcatttatcaatgggtttccaggagcggccagaacaattctgtgttcaccctatatgaactgactagtggggaagacacggaggatgaagagttccatgggctggatgaggcaaccctacttcgtgctctgcaggccctacagcaggagcacaaggctgagattatcactgtcagtgatggccgaggagtcaagttcttctagcagagacctgtctccctctacttcttacctcccatctttccagggctctcaaaaggagacagaccaagtgtcccacagactagatcgactagtcactccatcagactcaaagggctcaaagtcctgaaagcttggatttagggatgtttgtcacttaatccagtctacctgtccctgggatagcgtgagcccacggtgcccgggaggaaggatacatttcttgccctacctcctttcccatcctagcctgtccctggaccagggtctataaacctgatgatttacaagtgttctcacacgtaagtacacacccacatgcgcctgcactagcttctcctccacctcccactcatttagctgctgctgcctcccctctcaggctggtgctggatccttcctaggggatgggggaaaccctggctgcaggcagccttccaggcaatacgaagataggaagccccagaaggggcctggcagtgaaaagcgggcccactctgatttatgatattaaaatctctactcccaaaaaaaaaaaaaaaaaaaaaaaaaaaaaaaaa

SEQ ID NO: 6008 - DNA, 1100 bp, Cricetulus griseus
ccctttcacccaggcatcacagctctcagcagctccatcagtttgaagttagcagaaagcaaacggcttggcgctctactgctctccagcttccagttctctgttgagaaacttgaacctttcttaaagagcactaaggacttcagccttgaatgcttcagagcgaaagtatcttctctctctgaagaattggaacattttacagagaagctggaaagtgatggaactctacaaaagtgttttgttgaagattcaaaagaaaaagcaccagatttttcacttgaaacatcagtggctgaggtgaaaaaatatatagcaaagttttctttagaacgtcagacttgggatcagctcttacaacagtaccagaaggaggttccacccgaagagatgcccaggggatcaactgaaactgaaatcactgaagttaaagtggatcctacatcttatcttgggtcttcccagaaggaagtccttaacacaaagcccgactaccaggaaatcgtacggaatcagaaccaagtctttgcctgcatggagttagtgatggatgagctgcaaggatctgtgaagcagctgcaagccttcatggatgaaagtactcagtacctccagcaggtgtcagtacagctcaagaagagaagcatggaacaattagatacttcacctgctcgaaaactgctcagactccacctgcagaagtcatctactacacagtgatcaggatcttgtcaccaaagacatttagatccaaccttaacaaaatgttttcggggccaagttgggttcttgtcatcagagaatgaagctaaagttttcaagtgtggcactaaaggtcgagtgtagaatgttgttgcatgataggtatattggatcacttcacaaaatgcccattttctgaagtgtcttaatgtctatagtgtgctttagtttttaagattgaattgacctactacaatctaaattattgcaagaaagatctgagactatttaatttttttctctggaagttcccctttgctcccctaagaattgaccccagggctttgcaggtactaggcaaacattctcactgagtttcatcttcagtccccatattt

SEQ ID NO: 6009 - DNA, 1099 bp, Cricetulus griseus
  modified_base (1089)..(1089): a, c, t, g, unknown or other
gcagagactaaggacccatccaacttaggctgctcagcctggagctgctgaaacagctgtgggctgggcatgatgccatgtgccggtcagtggccagagccgtgtcaagagccaaaacaggactgtagcaacagcagcaacttagagatgtcactgtcccaagagagttcttgcacctcctcagtggccccaagctcacaggacaaaagacacgtgtggaactcactggacaatcatcgaggaaacacagctgataaaacctggtatgacaaggagaactccagggtgaactctatcccacctgccacgtgccaacaccccagagccccagaatggactgtggcccccctcagtacccttgctagcccctgaagctgtgaaggggccaaccgaaaggtatgggaccgcaaaagacacaggtcccaaagtctgtcctgtcaagaccaagcaagccatctaagcccaaagtgaccttctcccaagagtctgtaatgcctgagagcagccggcgtttcctgccatacctgggctatgattggattgcagggtccctggacagtaactctccagtcaccagtaaaccggatgccttcttctctgagcttcagaggtttcgagaaaccaacaaagaggactgcatttgcgactcccctgaagctgtgttcccaggcctgcaggagagcagctgtgtggaaggggaccacgagtgtgtgtactgttaccgtgtcaaccggcgcttgtttccagtgccagtggatctgggtaccacttgccgcctgtgtgggatatctcgagaccaacagggccctgagactctggcggagccctcgcaagtcagggtgagcatcccactatccattctggacccaccacatcagtatcggattcatagacggaaaagctttgatgcatctgacactctggctctccctcagcactgtctactgggctgggacatcctccctccaaagtctgagaaaagctctgtacccaagagtcttgacctctggtcctctgtgtcctgtgaaggagcccagcgccgacatctgtcagccaccagctcatccctcttccggtctccaaaaaaanaaaaaaaaaa

SEQ ID NO: 6010 - DNA, 1099 bp, Cricetulus griseus
ggcaaaggggacctgagtgagctgcctgagcttcacgccctcaccgctgggcttaaggcttttactacctggacagccaatgctggtatcgaagaatgtcggatggcttgtggtggacatggctattctcacagcagtggaattccaaaatatttatgtcacttttaccccggcctgcactttcgagggagaaaacactgtcatgatgctccagacagccaggttcttgatgaaaacctatgaccaggtgcactctgggaagttggtggggggcatggtgtcctacttaaatgacctgcccagtcagcgtatccaaccacagcaggtggcagtctggccaactctggtggacatcaacagcctggacagcctgactgaagcctacaagcttcgtgcagccagattggtagaaattgctgatgtcacaagtaaatagccggatcctggagttgctcacactaaacccgcccaacgccgttgctctggtggatgcctttgactttaaggatatggcgctcggctctgttcttggccgctatgacgggaatgtgtatgaaaacttgtttgagtgggctaagaaatccccactaaacaaacggaggtccacgagtcttactacaagcacttgaaacccctgcagtccaagctttgagcttccccaggagaagtctgacttgctcagagagtggcaggaaatctctcctccttgattcactaatccttgtgaaatcttcatcaaatttgtgtagctatagagcaactggtgggttggccttttccctctataagtaaagagaaatgagcagactgtagagatgaaatgggccattgcccaggcttcagtcatggttgctgatgtcctacctttcctgcttgccttctcctaaaagagatactaaagacagtaactattcctaccttgtgggttaagtatagggagagccctcagctgtggcactgatgtattttggttacttcattaagtaaatttcctgggacaatccagatttgaaagactggaaaaaaaaaaaaaaaaaaaaaaaaaaaaaaaaaaaaaaaaaaaaaaaaaaaaaaaaaaaaaaaaaaaaaaaaaaaaaaa

SEQ ID NO: 6011 - DNA, 1099 bp, Cricetulus griseus
cagaacttatatgacctagatgaagatgatgacgttgcagcacctgttcctacaaaacagatgaagtttgcagctacaggcagctttgtccatcacatgactggactgagcagttccaagctgtccatgtccaaggccctccctctcacaaaagtggttcagaatgatgcctacacggctcctgttcttccctcctctgttcgaaccaaagccttgaccaacatgtctcggacgctggtaaacaaggaggagcctcccaaagagctgccacctgctgagcctgtgctcagccccttggaaggtaccaagatgactgtgaataatctgcaccctcgagtcacggaagaggacattgttgagcttttctgtgtgtgtggagccctcaagcgggcacggctggtccatccgtggggtagcgaggaggttgtcttcgtgaagaaggatgatgcagtcactgcgtacaagaagtacaacaaccgatgtctggatgggcaacccatgaagtgcaatcttcacatgaatgggaatgtcattacctcagagcaacccatcctgctgcggctgagtgacaccccctcggtgaagaaggagagtgagctgcctcggcgggggaatgctgcctcctcttccaaccctcctgctgaagtggatcctgacaccattctcaaagctctcttcaagtcctcgggggcctctgtgaccacacaacccacagaattcaaaatcaaactttgaggaggggagtgaggcagccagaaacagggcagaggagggtggctctgtttcccaaggcaaagcttgtgaccaatgggccgttggactgaagcccctgagcaagggtcaaggcacctagggagtgcttcctcactggacgggacccaccttttctgtattgttccccatacctttgcccttctgtgggttacatttctatcgtatgtttcctctttcctccactcatcatggtaggctgtgtttgtccgtgtgtctcccctcccctcggcccaagctgatttcttccctaggaatggtgcactgttttcctgggtagccctttttttttttttttaatttttttaaaattttttttatttttgtt

SEQ ID NO: 6012 - DNA, 1099 bp, Cricetulus griseus
ctgacgctgcggcgagcagccatgtcggaggcgtatttccccgtggagtcgggcgctctgggacccgaggagaacttcctgtctttggatgacatcctaatgtcccgggagaagctgccggtgcgcgtggagacgcccatgccgcgcctgggcgccttcttcctggagcgaggcgcgggcgccgagtcggactacgcgctccctcagggaacaaaacttgagcttcccttgtggctggctaaaggactctttgacaacaagcggcgcatcctttctgtggaaattcccaagatataccaagagggatggaggactgtgttcagtgcagatgctaatgtcgtggacctccacaaaatggggccctatttctatggttttggctcccaacttctgcattttgacagtccagagaatgcagatatctcccagtctctgctgcagacttttattggacggttccgccgcatcatggactcctcccagaattcttacaatgaagacacttcagcactggtagccaggctagatgagacagagagaggcttatttcaaatagggcagaaagggctgaatgactttcagagttgggaaaagggtcaggcttctcagatcacagcatccaacctcgttcagacttataagaagagaaaattcactaatatggaagactgaaagtggaaacgaactacaacttgtggatttatctctgtgtccctgataaaacctagttaacttcatgggtgacccaactgtgtcttgcttcagggcttttaaccttcagcaatctccgagcttggaactgtttggttggggcagatgtggatgcccttgatcctgaaagtgggtcatctctgcctgttcatgaatttctcttaagcttatttgccttgccttcctcatggttggacaaaggacagcatccccaccatgccacctacctgctgggacttaccccaatttccaaaacaggaaattgggaagaaaagggaaagtcatgaatggcatagcagaagaagacattgagcttttgtgtcctgtatgtaatcagggcttttgaactaaaatcacatccctccagtccacccagaggggccatgta

SEQ ID NO: 6013 - DNA, 1099 bp, Cricetulus griseus
tgaagaaaaagatggtaaccttccagacattgtgaacagtgggagtttgcatgagttcctggttaatttgcatgaaaagatatgggcctgtggcctctttctggttttggcaggcgtcttgtggtcagcttgggcactgccgacgtcctgaagcagcacttcaaccccaataaaacttcggacccatttgaaaccatgttgaagtcattactagggtatcactctgtggcgggagtgtgagtgaagaccacatgaggaggaaactgtatggaaatgccatgacggctgctttgcaagatgcctcatgcagttggaatactattttaaagaaaatcataaaggaacgaaaaggaaggaacttcggtcaacacatcttcattgacttcttaatgcaaggaaacctcaatgagcagcagatcctagaagacagtatgatattttctctggccggttgcataataactgcaaagttgtgtacctgggcaatctgttttctgacaacatctgaagaagttcagaagaagctatataaggagatagaccaagtttttggaaagggtcctattacttcagagaaaactgagcagctaagatattgccagcaagtgctttgtgaaactgttcggactgccagactaaccccagtttgtgcccggcttcaagacattgaaggaaaggttggcccatttgttattcctaaggagaccctcgtcctttatgccctcggtgtggttcttcaggaccccagcacttggccatcaccgcacaagtttgatccagatcgctttgctgacgaatcagtgatgaaagtgttttcctcacttggcttttcagggacatgggaatgcccagaactgaggtttgcttacacggtggccacagtgctagtgagcgtgctggtgaggagactgcacctgcttgctgtggagggacaagtttttgagatgaagtatgaactggtcacatcatcaagggaagaagcgtggatcactgtctccaaaagacactagacattagtctttattaagtagatggagggaaatgcctatgtagaatctgtgctgagtccttttacaaacccagcatcattttgtaatgt

SEQ ID NO: 6014 - DNA, 1099 bp, Cricetulus griseus
tgtgcgacctggaactatggcgcctgcagcggcccaccctgcggccctgcgactgcggctgctcctctctcccctgaggtccaggatccccgcgcctcagacgaagcctgcagccgccttcggcactgcagtaacttctgccaaggtggctgttaatggtgttcacctgcattaccagcgaacgggagaaggggagcacgcagtccttctgcttcctgggatgttgggaagcggaagcaccgattttgcaccacagctacagagccttaataagaaacgcttcacagtggtggcctgggaccctcgaggatatggacagtccagacctccagatcgagacttcccacaggacttttttgaaagggatgcaaaggatgctgtcgacttgatgaaggtgctgcagttcaagcaggtctccctcctgggctggagtgacgggggtataactgcactcattgctgctgcaaagtacccatcgtacatccacaagatggtgatctggggagcaaatgcctacgtcactgaggaagatagcaggatttaccagggtatccgtgatgtttctaaatggagtgagaaggcaaggaaacctctggaagccttgtatggatatgactactttgccaaaacctgtgagaagtgggtggatggcataaaccagtttaaacatctgccagatggtaacatctgtcggcacttgctgcccctggtccagtgcccaaccctcattgtgcacggagagaaggacccattggtcccacgttttcatgctgacttccttcacaagcatgtgaaagggtcacggctgcatctgatgccagaaggcaagcataatctgcatttacgttttgcaaatgaattcaacaagttggcagaagactttctacaatgaaattataggaagtctttggtttctgggtgaatctgtattgaaggatcatgtccttgtctgttaccagtgtgctccaaaatgccttccttgcttttatcctcagtacacagacagacctaccaggctttctacatttcccatgatatctgactttgtgcaagcaggaaaaatggcatacccaaatcaggttatagctttaatagctga

SEQ ID NO: 6015 - DNA, 1099 bp, Cricetulus griseus
  modified_base (24)..(24): a, c, t, g, unknown or other
gtagccccgccccggcttcgggcnccgcctcccggcttcatttccgccgggaggcccgtgccgggaggcggcgctgccgtaagtcaggtcggcggtttgccgcgtcacggaagatggcggcggcggcggcggtgagcggggcgcccggcggcgtcgcgagctcggggcccgcgggcacttcgggcgcgatcttgcaggcggcggccggcatgtacgagcatctcaaggacgagtggaaccgcaagagcccgaacctcagcaagtgcggcgaagagctgggccgtctgaagctggttctgctggagctcaatttcctgccaaccacagggaccaaactgaccaaacagcagctcattctggcccgtgacatactggagatcggggcccagtggagcatcctatgtaaggacatcccctccttcgagcgctacatggcccagctcaaatgctactactttgattacaaggagcagttacctgagtcagcctacatgcaccagctcctgggcctgaacctcctcttcctgctctcccagaaccgagtggcggagttccatacagaattagaacgcttgcctgccaaggacatccagaccaatgtctatatcaagcaccctgtgtccctcgaacaatacctgatggagggtagctacaacaaggtgttcctggccaagggaaacatccccgctgaaagctatactttcttcattgacatcctgctggatactatcagggatgaaattgcaggatgcattgagaaggcctatgagaaaatccttttcgctgaggctacccggattctcttcttcaacacacccaaaaagatgacagactatgccaagaagcgaggttgggtcctgggacctaacaactactacagctttgccagccagcagcaaaagccagaagacaccaccatcccctccactgagctggccaaacaggtcatcgagtatgcccggcagctggagatgattgtctgagcctcggccggggaggtggacatgactagtccaacaaacccagtataggctggccttcaataaaggcggattaacctcttatgggccctagtctccccgtggaacggtgggagata

SEQ ID NO: 6016 - DNA, 1099 bp, Cricetulus griseus
  modified_base (1092)..(1092): a, c, t, g, unknown or other
cgcgtgtgtgcgccttatctcagctggtctgcccgagacccctgagcgcgaaccctagtcccccgcgcggccccatttccactccgacaaggtacaaaaaggctgtggacgccggcgtgggaggaggacgggagcgggggcgggcagttcccggctggagcgagacagggagggacagggctgaggagaggaaagcgatgcgacggacaggcgctcccgctcaggctgactctcgggggcagggcgagccaggggcggctgccccgggggcgaggcgacgccgtctcttcctccacttctcggcggaacccgaggacaaggagcctcagatgaaagaaacgatcatgaaccaggaaaaactggccaagctgcaggcacaagtgcgcatcggtgggaaaggaactgctcgcagaaagaagaaggtggttcacagaacagccacagcagatgataaaaaactgcagttctccttaaagaagttaggggtgaacaacatctctggtattgaagaggtgaacatgtttacaaaccaaggaacagtgatccattttaacaaccctaaagttcaggcgtctctggcagcaaacactttcaccattacaggccacgctgagacaaagcagctgacagaaatgcttcccagcatcctaaaccagcttggggcagacagtctgactagtttaaggagactggctgaagctttgcccaaacaatctgtggatgggaaagcaccacttgctactggagaggatgatgatgatgaggtcccagatctggtggagaattttgatgaggcttctaagaacgaggcaaattgaattgaggcgacttctgaagaaggtgacacttgcagaagtcacaggagctgctattttatatcatgactgctttttaaaattcttttgttatggatctgataaaatctagatctcttaatatttttaagcccaagcccctggacactgcagctcttttcagtttttgctaaaacacaattcattctttgcagcaaattaagctgaagaagcctaaggaattaaagtttggaaagggttaataaattcttagaacctaaaagtaaaaaaaaaaaanaaaaaaa

SEQ ID NO: 6017 - DNA, 1099 bp, Cricetulus griseus
atcatggacgaaccatctcctgatgtgcgagctttcctgcgccagcaccccagcctgaggcttctgcccaacactcacaaggtgcgctgctccctaactggccatgagctaccctgccgtctgccagagcttcaggtctacacccgcggcaagaagtaccagcggctgtccagagcctcctcggccttcgattacacagcgttcgagccacacatcgtgcccagcacaaagaatccgcaccaactgttctgcaaactcaccctgaggcacatcaacaagtttccagagcatgtgctgaggcacacccaaggccggaggtatcagagagcacttcatcaatatgaggagtgtcagaaacaaggtgtggagtatgtccctgcctgcctactgcacaagaagaggaagagggaggaccacatggacggagatgggctatctggccagagaacagctttctgggagccagcttccagtgatgaaggaggatccttgagcgatgacagcatgacagacctatacccacctgagctattcacagaaaaagatatggacaagtctgagaatgatactcctcaagactttctgacagaccaagaggaagagaagccaaagcagtcaagagagaagggcactggggagagaagagagaccaaaatggaccacaagaggcgccgtaaactcaggaagaaggagttcacctcattgaccaagaaattcaagagccatcatcaccacaagcccaagaacttcagttccttaaacagctgggaaatgaagccactgatatcctgacattggctgtttgttgcccagagtgggcatggaggttgtgttcagaagatggcaacagcagggaattgaagattcctctctgtgcatggtctgctgtggcccttgctgatgtagcatcctgagcttggccaggcccccacccctggctggtcaccacataggctcacagtatataccacaaatgccattatttattttgatgttttcaaagatcaaaacatttttcaaacacaactaagatataaaatacagcataaaaatgaggtttatacctattcccacataaagctaaaagcattttcagaaa

SEQ ID NO: 6018 - DNA, 1098 bp, Cricetulus griseus
tcccatccatggcactggtacttcagtcaagggtttccagttgtcctgggaacccacttgcccttcttcattcacggctgctttctggccccaaggaggctgcacatactactgctgaccgtgctgtggacattgctggtgtacagcatgttgggccacaaagaattcaggtttatctatccagttttaccatttttgcatggtgttctgtggatactcactagcccacctgaaggcatggcggaaggcagctgtgagtttcctgcttttgtcaaatgtgctgctggccctctatactggcctagttcatcagagaggcactctggatgttatgaatcacattcagcaagcctgccctaggggtcctgacccagcttccgtctccgtgctcatcatgatgccttgccactccactccttactacagccatgttcactgccctctgtccatgaggtttctccagtgtcccccagatttgactggaaaaactcagtatcttgatgaagcagatatgttctacctaaatcccttaagctggttacaacaagagtttcgaagcaatgcatcactgcccacttacttggtcaccttcagtgttctggagaaggagatctatgccttcctcacttcagggagctatgagaggactgctattttcttccatactcattggccagagggtcgaattggaagtcatgtacatgtctacgaacgaagattaaccagcagagtcaacacaggagggaactgaactgtaaagacgtctacagagaagttggcataactgagggaaacttcaggtgattcgtgaaatgaagaggaagccactgggtacagctgtaccatataccatattgaggcattctgagaaaacactaatgcgaacaccagatttgaaagagaccttttgttttcctcacgatgcagtttattgttcttccatagtgttcaggtgtgcaagagcgttcacaagaacaagtcagcaagttcttacacaagccaatgggctcttgatcccccagagagacaaaagcgtaagagtagaatatgttagaggagagtcccagctcagctcactcaagccatactgcacacctc

SEQ ID NO: 6019 - DNA, 1098 bp, Cricetulus griseus
ctctctgctcgcgtcaccgccgggatgaagcctatcctgctgcagggccatgagcggtccatcacgcagatcaagtacaaccgcgaaggagacctcctcttcaccgtggccaaagaccctaccgtcaatgtgtggtactctgtgaatggcgagaggctgggcacctacattggccatggtggagctgtgtggtgtgttgatgctgactgggacaccaagcatgtccttactggctcagctgataacagctgtcgtctctgggattgtgaaacagggaagcagctggccctactgaagaccaactcagccgtccgaacctgtggctttgacttcgggggtaacatcatcatgctctccacagacaagcagatggggtaccagtgttctgtgagcttcttcgatctacgggatccaagccagattgacaccaatgagccctacatgaagatcccctgcaatgactccaagatcaccagtgccgtctggggacccctgggggagtgcattattgcaggacatgagagtggtgagctcaaccagtatagcgccaagtctggggaggtgttggtgagcgttaaggaacactcccggcagatcaatgacatccagctatctagagacatgaccatgtttgtcaccgcgtccaaggacaacacagctaagctctttgactccacgagtcttgaacatcagaagactttccgaacagaacgtcccgtcaactcggctgccctctctcccaactatgaccatgtggtgctaggaggtggccaggaagccatggatgtgaccacaacttccaccaggattggcaagtttgaagccaggttcttccatctggcttttgaagaggagtttggaagagtcaagggccactttggacctatcaacagtgttgcctttcatcctgatggcaagagctacagcagcggtggtgaagatggttacgtccgcatccattacttcgacccgcagtactttgagtttgagtttgaggcctgaagctggatctccatccaccggggaggctgctcaagagggttttagactctttagaaataaattagtttggtaaaaataaaaaaaaaaaaaaaaaaa

SEQ ID NO: 6020 - DNA, 1098 bp, Cricetulus griseus
  modified_base (814)..(814): a, c, t, g, unknown or other
tgtcatgtagaaaaaaaaaaaagttaaaaattaaaaataaaacgaaaacgaaaaaagtgggctcagaaaaaagatacttaatatatttatctcattgttttacataaacttttacagtttcagacctcagcagctataaggccagtcccagggaaactctccctccctcccaggttcttccgagttcacccttgagcagctcaagggcagaggcagccctgggtgctgggtaaggactagaagcccctccccctagcttcacctgagccctaatccccattttgggggcctcttcaagctcagctgccaccaaagagcatgcaccaagctgaccagcccccaggcctcctggctggatccaaggggtgatgtcagccccgcctgtgagccttgtgttactgtgagagtcactcaagccaaaaaaacaggaagctttattgaagctcagctgactctatcatctcacacaccccaccccaggcagcagaagggtctgacttgagtctggtcctcaccaacagatggtgcgaacactctcaacagtgttgtttttgttatccatgtttgtgcagtgatgaatgtatttatttctcagacttagggttagctggtggaagcaggcccggctctgccagtgcccactcccactggaccgagctactgcaagggctcttccaagattgcaaaaaaagaaaatgatgaacttgtggacatgtaagacgcagacttgcagcatagccatacacctcagcctgtggcttctgaccccacatggcccgggaagtgtgtttccgtccatcaacgctgagggganccaggtccccacctgctgcccatactgtcagtattcactggacctcaggtccttgtgcaggagtgcgatctgccgagctgtcagcaggcacactgctgagagtctggatggatgcattcaggttagagctctgtgcagctctccaatgtcagagtgatttatccatgactgatctctccattcaaaagcgtgcagtcttaatgtacagtgatgagaaactgttattttatgatcttttcattaaaagcttgattaagaaaaaaaaaaaaagaaaaaaaaaaaaa

SEQ ID NO: 6021 - DNA, 1098 bp, Cricetulus griseus
gtctgcccgaccttcaaggttccaccatgttctcgcgggcgagtgttgccgggctgtcggcctgcgccgtgcaaccacaatggggacccaagttcgaaacatggcaactttgaaagatattaccaggagactgaagtctatcaaaaacatccagaaaattaccaagtctatgaagatggtggcagctgcgaagtatgcccgggctgagcgggagctgaagccagctcgtgtgtatggaacaggctccttggctctatatgagaaggctgaaattaagggacccgaggacaagaagaaacaccttcttattggtgtgtcctcagatcgaggactgtgtggtgctattcattcatcagtggctaagcagatgaagaatgaggtggcaaaccttacagcagcggggaaagaagtgatgattgttggaattggtgataaaatcaaaggcatactttataggactcactctgaccagtttttggtgtcattcaaggatgtgggacggaagccccctacttttggagacgcatcagtcattgcccttgaattgttaaattctggatatgaatttgatgaaggctctatcatttttaatcagttcaagtctgttatctcctacaagacagaagagaagcccatcttctctcttaataccattgcaagtgctgagagcatgagcatttatgatgacattgatgctgatgtgctgcagaattaccaggagtacagtctggccaacctcatttactactccctgaaggagtccaccaccagtgagcagagtgccaggatgacggctatggacaacgccagcaagaacgcttcggaaatgattgacaaattgacattgacgttcaaccgtacgcgccaagctgtcattacaaaggagttgattgagatcatctctggggctgctgctctggattaatgaaaatcaagttgcatccacaaataagaggtaaagcaaaacagcaagctgattttaactgattgctgtctttgtcggaagaaacttggtccactaagttacaaagacagcaagttgtttgtaaattatcttacaataaacaacttacgatgaagaaaaaaaaaaaaaaaaaa

SEQ ID NO: 6022 - DNA, 1097 bp, Cricetulus griseus
aagttcctggaagttggccttatctgaagcccatgaacaggaaccactgctcagagtggatctggattcgacagacttcggctatgctgtgggtgaggtagaggtcatggtgcgtgagaaggctgaagtaccagctgccctggagaagatcttcagcttcagtagaatgcttggagtgccagcacaggagaaggcacctgccaagctcttggtatacctacagcgcttcaggcctctggattatcagcgcctgctagaagcaaacagttccagtgaagccacaggggacttaacatcgtgacaacagggctcactttctaggagggaagggagctctctgaagctgctatccgcacctggacccaccgtgccccttcccttacaacagagccacttttgtctccagttctgcctggtctttcacccattctcagctactcttccttgggccctccctcactgcttccctcatccgtcagatgcaatctgtgggccgcccctctcccctggccgctaagcagcctccattgatttccgctcgtgtttataggatttccacttagccgtgatcagtagttaagcacaggaaaatcccttgccaccccccctcccgtggtcgatgccattgattctgccagcagctctgaagccgccttacagctgagttagagatgcggggaagcagcagggatttccctgccttggggtgtagggaatagcaacaaagtggggaaatggttgggaacctctgttagaaatctggaaattctgctgggtctgccactgtgccctgagggtagagcgccctgtgtaccagtttagagataaatttgctctccaacctagagaggggtagaaagaaaatcatcattgttgagacaggttctggggtttcaggaagtctccacttcctgtggagaaggctctacccttgtgtggacattttctttctcactaggtcagaatatgctttcctgcctcccctcaggtttcctaggcttccattatttgtcgggaggaggcagtctcttcagattgtggtgacgaatacagggctggagtgccacctgctgtcagccctcagggctgtgttccca

SEQ ID NO: 6023 - DNA, 1097 bp, Cricetulus griseus
gacacaaaaagattttgagtccggaaaagaagagtcatgaaagttagaattataggaagcttacaactttttttccgtctataagcatctcgacccggaaggtaatcatctaaagctagcggagtttctacgggtgccgggaggaggacgtgtgcacatcctcattgcaccacgagaggcgccggtgtctctagtggtggcgcctgcttctgcggagactgcggcttctgtctgattgtttttcctctcctcctccatcccttccacatcccacagcctagtgtagagaactttcaacggaggactgtggagaccatctatattgaaatggagaaccaagaatcaacagattcgtctcagagcgccaaacagcacattatttcagaggagttgatttcagaaggaaaatgggtcaaatttgaaaaaacaacttacatggatcctactggtaaaactagaacttgggaaacagtgaaacttacaaccaggaagggacaatctgctgacgtcgtgtcaatcatcccagtgctgcaaagaactcttcattatgagtgtattgttctggtgaagcagttccgacccccaatgggtggctactgcctggagtttccagcagggctcatcgatgatggtgaaagcccagaagcagctgctcttcgggagctggaggaagaaactggctacaaaggtgacgttgctgaatgttctccagctgtgtgtatggatccaggcttgacaaactgtaccacacacgtggtgacagtaaccatcaatggagatgatgcagaaaatgtaaggccgaaacccaaaccaggggatggagaatttgtggaagtgatttctttaccaaagaatgacctactgactagacttgacgctttggtagcagaagaacatattacagtggatgccagggtctacgcctatgctctggcactgaaacacgccaactggaaaccattcgaagtgcccttcctcaaattttaaggccaaggaggacactggccgtgttttgtaaatgagacgacaaggccttcactattcaatgtgttcaattaagtttaatgtagattggaaatcattttttattcataaaa

SEQ ID NO: 6024 - DNA, 1097 bp, Cricetulus griseus
gccaggtgacacacacagagctgccactatggttcatcaagtgctctaccgggctctggtctccactaagtggctggcggagtcgattcggtctggcagcctggggcccggcctgcgggtgttggacgcatcatggtactctccggggacccgccaggcccgcaaagagtaccaggaacgccacgtgcctggcgcgtccttctttgatatagaggagtgccgggacacgacttcgccttatgagatgatgctgcccagtgaggcccactttggggactacgtgggcagtctgggaatcagcaacgacacacacgttgtggtgtacgacggagacaacctgggtagtttctatgcacccagagtatggtggatgttccgtgtgtttggccatcgcacggtgtcagtgcttaatggtggcttccggaactggctgaaggagggccacccagtgacatctgagccctcacgtccagagccagccgttttcaaagctacactggaccgctcccttctcaaaacctatgagcaggtcctggagaacctccagtctaaaaggttccagctggtagactcccgtgcccaaggacggtacctgggcacagaaccggagccggatatcgtaggactggactcgggccacatccgtggttcagtcaacatgcccttcatgaacttcctaaccgaagatggctttgagaagagcccagaggagctgcgtgccatattccaggacaaaaaggtggacctttcacagcccctcattgccacatgccgcaagggggtcactgcctgtcatattgccctggctgcctacctctgtggcaagcctgatgtggctgtttatgacggctcctggtcggagtggttccgcagggcacccccggagacccgcgtgtcccagggaaagagtgggaaggcctgagtgtgcacagcctcctctgcacaccaacttcagttagttcccttaagagaggccagtgtgatctgtcacagcttcacacctcttaggcaatgaagactgacaggattttagaattgctgtgagtgcctccttcccttcctaccatactagaaaataaagtgtccttttctcagaa

SEQ ID NO: 6025 - DNA, 1097 bp, Cricetulus griseus
ctcactaggaatctacagattaagccatgggaattgagtgaacacaggactatgcggtttagatcagacagcatgactttttcctgtttgaccagaaaaaaacttacaggcccccttggaaacacgtatacagtacttcacaaacaaccgttgacagcaaggagataaaaaccttcctggccctggctcacaagtggtgggatgagcaaggaacatttgcacctctacattctatgaatgacctgagggtgccattcattagagacaatcttttgaaaaccagtgctagtcaccatccaggaagacctttgtgtgggatgaagattatagatgttggctgtggcggtggtttattaactgaacctctagggcgactgggggcttcggttattggaattgatcctgtggctgaaaacattaaggtagcacagcaccataagtcatttgatccagtcctggataagaggatagagtacaaagcatgtgccctggaggagattgtcgatgagactgcacaagtttttgatgctgttgtggcttctgaagttgtagaacacgtgatcgaccttgaaatgttcatacagtgctgctatcaagtattaaaacctggtggctcgttattcattactacagtcaacaaaacacagctgtcctatgccttgggaattgttttcgcagagcaaattgcaggcattgttccaaaaggcactcacacatgggagaagtttgtttcacctgaaaagctagagagtattctggaaccaaatggactgtcagttcaaactgtggcaggaatgttctacaatcccttctcagggcactggcattggagtaaaagtagcagccttaactatgcagcccatgctgtgaaatccagtgcacaggaacacccggagcctactgagtctgctttaaagggggacacagaagtggcccaagctgatgcctccagtagctcaagtgtacatgaggaggcaaagaagtgagatatctctgaggacagtagtaatatgcttaaaagttcattgtttacaaattcataaagcttattttttgagatcctgaagaacaaaaggtcaataaaaaaatctaaatca

SEQ ID NO: 6026 - DNA, 1096 bp, Cricetulus griseus
cttgtctgtgagacgcgcttcttcggccgtgccccggcgctggctgattgttgggcggccggcgccatgtctgtgagcgagatcttcgtggagctgcagggctttttggctgcggagcaggacatccgagaggaaatccgaaaagttgtgcagaagtttaagaaacaaactgctcgagagtattttgcaggacattccaaagcggtgcttgaaagctcgagaacattttggtacagtgaagacacacctcacatctctgaagaccaagttccctgcggaacagtattacaggtttcatgagcactggcggtttgtgctccagcgtcttgtcttcctggcggcctttgtagtatatttggaaacagagaccctggtgactcgagaggcggttacagagattcttggcattgaaccggatcgggaaaaaggatttcatctggatgtggaagattatctctcaggagttttaattcttgctagtgagctgtcgaggctgtctgtcaacagtgtgactgctggagactactctcggccccttcacatctctactttcatcaatgagctggattcaggtttccgccttctcaatctgaaaaacgactccctgaggaagcgctacgacggcttgaagtacgatgtgaagaaagtagaggaggtggtctatgatctttccatccgaggcttcaataaggagacagcagcagcttgtggtgaaaaataggagcctctccctgtggctggccttgccgactaggcatttgccagggagggctagcacagtgcctctcctctagttagcacgccagttgctaaacactgcgctttatttcgtaaccagctgtgtggcgtgaatatcagaattgagatactttttggatctaaaaaaaaaaaaactcccaggtacacaagaggctaaggcaagaggatggcaaattcatggcctcaaggcttgcttgactaattgagtgagaccttgtgacaaaaatctggtgttgtaattccatttgagagtttagaagtgtcatgttgataattagttgtgttccttgctggcttgtaaagacaataaaactagtttttggttctctttgttaaa

SEQ ID NO: 6027 - DNA, 1096 bp, Cricetulus griseus
aaatgccagtgagaatgaaagctcaccagtggctgggcctttcgggatgctctcgaccatctcaacagcagtgcagagcacgggcaagagtgttatcagtgggggtttggatgccttggaattcattggaaagaagacaatggatgtcatagcagaaggggacccctggatttaaaagaaccaagggcctgatgaaccgatctacactgtcacaggttttacgagaggtgaaggacaaagaagagcagtggccctccaatgaggtaaccatggaaacagacaagaaaactcattatgggctactctttgatgagtttcaaggcctttcacatctagaagctctggagatgctttcccgagaaagtgaaataaaggtgaaatctatccttagttctcttagtggagaagaattacagaccacaagacttgagctagagcagctcaaagaagcgttttccctggcggagttctgtgaggatgaggaggaggagagacaaggggatgaaaaagttaccaaggagataacagaactgtttgctcagcttcatgtctcatccagaccagagaaacttgcaatggcaagaaatacagcctacgaatggatcaggacatctctggctaagccagtaacagagaaagaagaaggggaaaaacagtcggagacagagaatattgaggaagtcaaaagaagttcaatagaggatatccatgcatttgcaatccggagcttagcagagttgactgcatgctcaattgaactgttccacaaaacagcggcattggttctgcatggccagaagcagggggtgacagccttagagaggagccagatgctctcccagttgacagtcatgctgtgtaaagacctgggctctctgtctaaagagttcaccacctgcctcactactgctggggtcagagaaaaggcggatgttcttaatccattaatcactgcagtgtttctagaggcctcaaacagtgcctcctacattcaagatgccttccagcttctcctgcctgtgctgcagatctctctagttgagagcaagtcagagtcacccaggggtgagccaccagcccagagccctctcacaga

SEQ ID NO: 6028 - DNA, 1096 bp, Cricetulus griseus
ggcggagcttgcaggcgtctagtcttgctggctcagcaagcctgataagcatgaagctgctgtgtttggtggctgtggtggggagcttgctggtgcccccagctcaagccaacaagagctctgaggatatccggtgcaaatgcatttgtccaccttacagaaacatcagtggtcacatttacaaccagaatgtgtctcagaaggactgcaactgcctgcatgtggtggagcccatgccagtgcctggccacgatgtggaagcctactgcctgctttgcgagtgcaggtacgaggaacggagcaccaccaccatcaaggtcatcattgtcatctacctgtctgtggtaggggccctcctcctctacatggccttcctgatgctggtggaccccttgattcgaaagccggatgcttacactgagcagctgcacaatgaagaggaaaatgaggatgcacgctccatggcggcggcagctgcatccattggaggaccccgagcaaacactgtcctagagcgagtggaaggtgctcagcagcggtggaaactgcaagtgcaggagcagcggaagacagtcttcgatcggcacaagatgctcagttagatgtctggcacggttgcatcagggacccaggccatggcaaccagcttccggggctcattgcagtcttccctgggtcttcccttcaaaagcccatggcatttgttctcctccctctctagaagtgtactcgactgttataactagggagagtgattgggtctctgtaggtctccggggtggtaggggagggaaggcaaggcagaagggaacagagacatttgaggtagccacaagactgggtgcaatccaccccttcttgttcttctccactcctccaagctccaatctttcccaccactcctcagtgactgcgactgctgagccatcaggttggaccataggatagggagctgagcaggggacttgaataccatggctcctgtccttggatgaccacgtgtccctgaatttcattgtaccatgcatggagagaaatgtttgtctttctgttgtctgtaaatcaaggaagccattaaattgttttatttctacaa

SEQ ID NO: 6029 - DNA, 1095 bp, Cricetulus griseus
cagaatcacagattggacttcctggaactcaggggtatggataaattgggacagatcatcgccttaggcgatctcatctataaaaagtgtgaagagatgaagtactgccggaaacaatgcaaacgtctagggaaacgcatacaaggtctgctactgcctctccagaggctcaagacccaaggagtggacaacctgccagatgacataattgctgccctgggccgttttgaggctgtcctggaggaggcaaggcagcagatagaaaagttcagcaataagtccaatttagtggaagtttgtgacttcgggcaatgacaagatacttttccttgaagtgaatgagaagctgggagatgtctgggaggagctattgctgctgctccaggttgatcaacggaactctgctccaaatgtcagccaaagggcctcctggctacaggaagatcaacaggatgcagaggactgaagaacaataacctcagcacactttacagaggagagtaccacagatctccagttaccatcaaagtattcaacaaaccccaaaatggcagtggaatagtgagggacatcttcaataacgagatcagagccatgaagaaatttgactctcccaatatcttacgtatatttgggatctgcattgatgaaacagtgaagccccctgaattctccattgtcatggagtactgtgaacatggaaccctgagggaactgctggataaagaaaagaatctcacatttaatgaacgcatcttcctagtcctgggagcagctaaaggtttatacaggctacaccacacggaaacacctcaactgcacaaaaacatcagcagctcgagcttcctggtggctggaggctaccacgtaaagcttgcaggatttgaattaagtaaaacacaggcttccatcagtgggagacaaaaaccactaaaggagagaaaatctattcatcaccgtatacctctcctcagagactggaaaatctgcattgtaaatatgaaaaacaagatgaaatatatagctttggaattgtactctgggaaattgccactggaaagatcccaatttgaaaggctgtaattctaagaagat

SEQ ID NO: 6030 - DNA, 1095 bp, Cricetulus griseus
gcagcgccgggtcccaggacttagtcctgcgccacggttctgaccacgggtggcccgctgcccagccggctctgcaagccggtggtccgcgtgtccctccgacatgtcgtcctgcagccgcgtggcgctggtgaccggggctaacaagggcatcggcttcgccatcacgcgtgacctgtgtcgcaagttctctggggacgtggtgctcaccgcgcgggacgaggcgcggggcaaggcggctgtgcagcagctgcaggcagagggcctgagtccccgcttccaccagctggacatcgacgacctgcagagcatccgcgccctgcgcgactttctgctcaaggagtatggggggctcgacgtgctgatcaacaatgcgggcatcgccttcaagaatgctgacccaactcccttccacattcaagcagaagtgacaatgaaaacaaacttttttgccaccagaaatgtctgcaacgagttactacccataatgaaaccacatgggagagtggtgaatgtcagcagtctgcagggctcaaaggctcttgaaaactgcagtgaagatcttcaggaaaggttccgatgtaacacacttacagagggggacctggtcgacctcatgaaaaagtttgtggaggacacaaaaaatgaagtccacgagagggaaggttggccagactcagcttacggggtgtccaagctgggggtgacagtcctttccagaatcctggcccagcagctgggtgagaagcgtaaagcagacaggattctgctcaatgcctgctgccctgggtgggtgaagaccgacatggcgagggaccagggctccaggactgtggaggaaggggcggaaaccccagtttacttggccctcctgcctccagatgccactgagcctcagggccagctagtctgtgacaaagtcgtgcaaacatggtgaacatctgctttgggacttaatggtttagtaactgttggagagggagacaaatggaggctgctgtagtttgattctctttgcacattgagaaggaaggtccgtcatacctgtgaggttctacaatctgaatctgaatgatgtgcaatgtccaaactctc

SEQ ID NO: 6031 - DNA, 1095 bp, Cricetulus griseus
tccatgtttgaagatgccagctacagcatatgaaagactagtttacaagagcccctcggagtaccactacatgaaagtctgcttagagtttcaagaacacggagttggactgaatacagcccaattcaaacaactgcttgtttcagccctgaaggacctgtttggggaggtcggtgctgctttacctgtggacatcctaacctatgaagagaagactttgtcagccatcttgagagtatgcagcagtggtctggctaaattgtggagctctttgaccttgtttggaacctataaaaacaagaagtgtgccttcagagtgattcaggtgtctccctttctccttgcattatctggtaatagcagggaacaagtgttgggttgaatactcttaaagttccagaaacttcccactctgaacagtatcttttgatgtctacatagactgaaaaaagaagcaggctaaagcccctattgatgacatttggagataccgaagatgtggagtgggcttcagaggagactgtggctaaattgcctggtaccaacagggcggtgctttcagcatgtgcacacacgagttggagaccgtgctgagctcagcagagccttcacacagcaggatgtagctactttctcagagcttacaggagatatcaatcctttgcatataagtgaagattatgcaaaacacaccaagtttggaaagacaattgtgcatggagttttgataagtggacttatttctgctctcctgggtactaaaatgccagggccaggctgtgtgtttctttcccaggaaattaaatttccagcccctttatatattggagaagtggttttagcatctgcagaagtgaaaaggctgaagcagtttgttgctgttgttgcagtgtcctgctgtgtaatagagagtaaaaagacagttatggaaggttgggttaaagttatggtcccagaagctcctgatactaaaatacaaatttaaagttgtatgttcaaactcctgtgttcttgttattacgacatctgaggaagtgggacgttgttcttcattaaggagtgtctggtatacctggaagccatgtggggaagggg

SEQ ID NO: 6032 - DNA, 1095 bp, Cricetulus griseus
gggcgggggcgccctacggcgtctggggcccgcggcggcgcgaggcctgaggggaggggacgcgatgctggagaccctgcgcgagcggctgctgagcgtgcagcaggatttcacgtccgggttgaagactttaagtgacaaatcaagagaagcaaaagtaaaaagcaaacccaggagtgctccgtacttaacaaagtactctgctggactggaattacttagcaggtatgaggatgcgtgggctgcacttcacaggagagcgaaggagtgtgcagacgctggagagctagtggacagcgaggtggtcatgctctctgcccactgggagaagaagaggaccagcctgtccgagctgcaggagcagctgcagcagctgccagctctcctccaggacttggagtccttgatggcaagcctggctcatttagagacgagttttgaagaggtagaaaaccacttgctgcatttggaggatttgtgtgggcagtgtgaattagaaagacacaaacatgcacagtcccgacacctggagaattacaagaaaataagaggaaggagcttgaagccttcaaagctgaacttgatgcagaacacacgcagaaggttctggaaatggagcacacgcagcaactgaagttgaaggagcggcagaagttctttgaggaagccttccagcaggatatggaacagtacctgtccacaggttacctgcagattgcagacaggcgagagcccatgggcagcatgtcatccatggaggtgaacgtggacatgctggagcagatggacttgatggacatctctgaccaggaggctctggatgtcttcttgaactccaatggagaggacaacactgtgctgtcccctggtttagagcttgaatccaacccctgtcataatgaaatgactcttcagattccaaattcctcagaatcagcactccagccacctgcctcaccctctgcctgcactgacctggacaccgctgaagctcccctcatccagtccgatgaggaggatgtacaggtggacactgccttggtcacattacacactgacagaaagtctaccccaggtgtcagtgatgacagtgac

SEQ ID NO: 6033 - DNA, 1095 bp, Cricetulus griseus
  modified_base (1061)..(1061): a, c, t, g, unknown or other
actagggagagctccagccaccgctgaccagggctcaaccaaccatcaggccagagaacatgaggcagtcccacatccctgccctgctgctgctgccactgctgctgagatctgggactgatggggccagcactctgagagcctgcgggcacccaaggatgttcaaccggatggtaggcggggaggacgccttagaaggtgaatggccctggcaggtcagcatccagcgcaatcgggacccacttctggtgggggcagtctcatcgcaccaacatgggtcctcaccgctgcacactgcttctccaacacttccgacatatctatataccaagtcctgctgggagctctgcagctgcagcagccagggccacacgccttgtatgtccgtgtgaaacgggtggaaagcaacccccagtaccaaggcatggcctccagtgctgatgtggctcttggtggaggctgcaggtgcctgtgaccttcaccaactacatccttcctgtgtgtctgcctgacccctccatcatctttgagtcgggcatgaactgctgggtcactggctggggcagccccagtgaacaagaccgactgcccaacccacggatcctgcagaaacttgctgtgcccatcattgacacacccaggtgcaatctgctgtacagcagggatgctgattccgacttccagctcaaaaccatcaaggacgacatgctctgtgcaggctttgcagagggcaagaaggatgcctgtaagggtgactctggaggccccttggtgtgccttgtggatcagtcatgggtgcaggctggggtgatcagctggggagagggctgtgcccgccggaaccgcccaggtgtctacatccgtgtcacttcccatcacaaatggatccatcagatcatcccagaactgaagtttcaggggaaggccaacagccagcagcagcaaagagaccctcgaggttggcagcacctggggaactctgccccctgcctggtggcccatgcagtcatgttggtcctggtgacactgcttactatcctctgagcctgcccaggccaggnaggtagagccctatccactgtacatttgtaaata

SEQ ID NO: 6034 - DNA, 1095 bp, Cricetulus griseus
atgccgaaagtcgtatccaggtcggtggtctgctccgacacgcgtgaccgtgaggaatatgatgacggcgagaagcccctccatgtctattactgtttatgcggccagatggtcctggtgcttgattgtcagttagagaaattgcccatgaggcctcgggaccggtctcgggtgattgatgctgccaaacatgcgcacaaattttgcaatacagaagatgaggagactacttatcttcgcaggcctgagggaatcgagcgtcaatataggaagaagtgtgcgaagtgtggcctaccactcttttaccagtcccagccgaagaatgctcctgtgaccttcatcgtggatggagccgtagtgaaatttggccaaggactttggaaaaaccaatatatatactcagaagcaagagcctcctaagaaggttatgatgaccaaacgcactaaagacatgggcaagttcagctccgtcactgtgtctaccattgatgaagaagaagaagagatagaggctagagaagttgctgactcgtatgcacagaatgccaaagtgatcgaaaaacagctggagcgcaaaggcatgagtaagaggcgactacaagagctggctgaattggaagccaagaaagcaaaaatgaaggggacactgatcgacaaccagttcaaataatccagatctttctgagttcaaactggaggccagcacttagattgtggctgggggtggtagctcggtagtggaatgcatgcttggtcatgtctgagtcttcacctcatttgctgtcctagttgtgagacagaatttacattgtatgaatgaccacctgtgtcccagcagacaatgacctctacctttactccactttatcctccaattcctatgtgcacagcttggatatacctacaccacctcggaaattcaggcttctagtctctggccacagctgctgctaattattgctagtcttacttgcttacttcttatagacctttttaggtgtgtttatagattcaaggggcgcttattttcttagtaataatgaaaaataatagtaatagcaacattaataatcattgctgtcctgagtacttggt

SEQ ID NO: 6035 - DNA, 1095 bp, Cricetulus griseus
acaggagagaaacactacaagtgtgaggaatgtggcaaagctttccgaattccatcattactttcagaacacaagagaattcatacaggagagaagccttacaagtgtgaagtgtgtggcagagtctttagagtttctcggaatctttctgatcacatgataatccattctggaaagaaaacccacaagtgtgaggagtgtggaaaagccttctcatcattgctttctgtacataagagaatccatacaggagagaaaccctataaatgtgaagtgtgtggcaaggccttccgtgttccatcagtgctttctaaacacaaagtaattcacactggagaaaaaccctacaagtgtgaactatgtggcaaggccttccgtggtccatcactactttcagtacacaagaaaattacacacaggagtgaaaccctacaagtgtgaagtatgtgacaaggccttccattatccttcaatactttctaaacacaagaaaattcatacaggagagaagccatacaaatgtgaagtgtgtggaaacaccttccgttttccatcattactttctgtacacaagagaattcatactggagagaaaccctacaggtgtgaagtatgtgacaaggatttccattgtccatcattactttccaaacacaagagaattcacacaggagataaaccctacaagtgtgaaagttctacagcacgttctaaacaaccggataattcatactggagagaaacgttacaagtgtgaaaatagtggtaaagctattaccagtcttctggtcttaagcaacatcaaagaattcatttgtgagagaaaccacacaagtgtgaagatgtgcctagatcttttgtattcactaagaacttttgaaaagacctgataattcttactgggcattaatgccacaagtgtgaatagtgttacaaaccctttaataagctttccaatatttctcaacacatggtagttcatattggagtgaaatggtacaaatcttaaaatgttcatgaaatgtttacactgcttgataccattaaaacatacatacatacatacatacatacatacatacatacacacacaca

SEQ ID NO: 6036 - DNA, 1095 bp, Cricetulus griseus
gaggtccctgctgaactggcagactgccctaagctcaaagagatcaacttccgaggaaacaagcttcgagacaagcgcctagagaagatggtgggtggatgccagacaaaatccatcctagagtacctgcgtgctggtggccgcggcggtcggagcaagggccgtcaagagggctccgagaaggaggaccgaaagaagaggcgggagcggaagcagcgtcgggaaagcggggagggtgaggacgaggtagcagactcagcccggatgattctcaagatcttgcacgtctctgagaaccccacacccctgaccatcagggtaagcccggaggtcagggatgtacgcccatacgtcgtgggggccattgtgcgaggcatggacctgcagccaggaaatgtactccggcgctttctcaactgccagaccaagctccatgatgacctctgtgagaagaggacagcagcaaccattgcgacccacgacctccaggcagtgcgtgggcccctgctgtatgcagcccggccacccgaggacctcaagattatgcccttggggcggagagaagccaaggccaaggagctggtgaagcagctgcagctggaggcggaggagcagagaaagcagaagaagcgacagagcgtctcagggctacacaggtacctccacttactggacgggaaggaaaactacccttgtcttgtggatgccgaaggggacgtgatttccttcccacctataaccaacagtgagaagacgaagattaagaaaacaacatgcaacttgttcttggaagtaacaagtgccactagcctgcagctctgtaaggacatcatggacaacctcattctgaaaatggtggaactgaacaaaagcacttcagaaaacaaagaggaagacacactctcggatacagagcctggtgccagccatgggctttctgatcccaacttggatctgagatctgggaaggatggacagtgctccctggtggtggagcaggtccgagtggtggacctggaggggagcttgaaggtggtgtacccatccaaggccgacctggtcaccatccctgcctatgtgactgtggttcgctga

SEQ ID NO: 6037 - DNA, 1094 bp, Cricetulus griseus
  modified_base (941)..(941): a, c, t, g, unknown or other
  modified_base (1011)..(1011): a, c, t, g, unknown or other
ggctgcagcagggctcagcatcccctcaggacacgagaaccaggatctggagcggcagcatgcgcacattggtgtcttggtggagttcagcatggccctgatgagcaagctggatggcatcaacaggcactccttcaactctttccgcctccgagttggcataaaccatgggcctgtgattgctggagtgattggagcacgaagcctcagtatgacatctggggaacacagtcaatgttgccagccgaatggagagcttccgtgggaaagcctgtgtagagagggcttggataatctgtgtacctcctgacctttctccagtcttctgagctgagtgcagagctacaaggaccatccatctatctggcaggaacatgtgttgaggtccctgacctgtaaaattgagccccttgacaaatgccaagctgttttccctcaaatgagtcaaggcaaaagctagctttgtgtgatggggccttagtgctttagctccagaccactctaagtgagagatgaccaaacatcccactcccttttggaagtgacttcactacacactcctactctcccaacatcccagttatttttccctccagcaacagaaatcctagcctaagtttaaaaataattggctaaagctcacacattgttctctattttcaaccgaagcactgtgttaggagcatttttaagttattgttcaggtcgtaaaagtgtaactgacaaaaaaatatcacttgggacttatgcacatacttgtttttgaatttccaagtaatttcttcacaagtgtcttgttttatcataggaactttaaaaaaacccaaagccttctgtgggtcaaggattcacttcagtatccactaaggtggccctcactgactacagaaagtaataccctaggtcttccgacttaacttagggacacttcctgacaaagntgattatactgtgtacttcatggagaacaggccaatgcttggagcaggtgaaacaaacaactatggtttntctgtatgtttgtttcattttcataaattggtgcctggctcctttttatatgtccaatcaataattaaaaaacctgaatgtcc

SEQ ID NO: 6038 - DNA, 1094 bp, Cricetulus griseus
gttactggcaaactgtcatccaaggaacttcaggagcaagctgacaaagaaatgtactccttgtgtcttttagcaacattaatgggagaagatgtatggtcttatgcaaagggacttcctcacatgttccaacagggtggtgtattctacaatattatgaagaaaactatgggcatggctgatggcaaacaattgcactttttcctacatctacctggcaaaacttttgttttattaatgcttctgaagatagactggagttgtgtgtcgatgctgcaggacatttccccattggtcctgatgttgaagatttagttaaagaggctgtaagtcaggttcgagcagagtctactacaagaagtagggaatcaagcccctcccatgggttaattaaaactaggtagtggtggagtagtagaaaaagaaaatctgagcaacttcacaatgtaactgcctttcagggaaaggggcattctctaggaactgcatccagtaacccacacattgatcccagagctagggaaactctggctgtaagaaaagcataatacagggacagattttagtaatagttccattaaaacagaacctcctgtgttcacagctgctcctagtaacagtgagcttattcgaatagctcctggagtagtaacaatgagagacggcaggcagcttgatcctgatgtggttgaggcccagcgaaaaaaattgcaggaaatggtttcttctattcaggcttcaatggacaagcacttgcgggatcaaagtacagagcagacaccatctgatctttctcaaaggaaagtagaagttgtgagttctcggagagcccgggagtcttcagactggcttgcctgaatcttttcataactggtggcacggagaatttgaatactgaaacaactgatagttgtgtggcagattcactgggagcagcatttgccacaaggccaaaaagcaacaaaaagaaattccaatggaggaacctagaagagatggatagtcaagatgctgagacgactaacacaactgaggttgaatttgaatgaatgaaagacaaatgtatgttaatataatctcttagagcattcaaa

SEQ ID NO: 6039 - DNA, 1094 bp, Cricetulus griseus
agaaaggaagaggttttatcagaacgtcagcatctcacagggtgaaggtggatttgagataaacctggaccacagaaagctgaaaactccccaagccaagctttttactgtccccagtgaggccttggccatcgcagtggccactgaatgggactcccagcaggataccatcaagttctacaccatgcacctgaccacattgtgcaacacatccttggacaatccaacccagcgaaacaaggatcagatgatccgggcagctgtaaagttcttagacactgacaccatttgctacagggtggaagagccagagacattagtggaacttcagaagaacgaatgggatccagtcatagaatgggctgagaaaagatacggcgtggagatcggctcctccacaagcataatgggacccagcatacctacccagacccgagaggtgcttaccagccacttgtcctcttacaacatgtgggccctacaagggattgagtttgtagtggcccagctcaagtccatggtgctgaccttgggcctgattgaccggcgcctgactgtggagcaggctgtgcttctgtcacgtctggaggaggagtaccagatccagaagtggggcaacattgaatgggcccacgactatgagctccaggagcttcgggctcgcactgccgctggtaccctttttgtccacctctgcttggaaagctctacggtcaagcacaagctcctacaagagtgaggcctgggttgcaaatgctggctgaaaggaactgcacagacacagggtctctgatctgggcttccctggctgttggaactctgtacccagtgaagctcttttggcctgtacctaatagagactttctcttgaccctgattttattaaatgttttttcattctggaaaatatcaagcctcattttcatctgagtctcagcatttctccattcttgttttatctaagctctgtcaccattttacatctgctaccaatggctggaaacctcacggcagggaagggcaagaacaagccatcaccacaataattaaataaatcttttaaaaaaaaagtaaaaaaaaaaaaaaaaaaaaaa

SEQ ID NO: 6040 - DNA, 1094 bp, Cricetulus griseus
gtcctcagccggaagcagccccaaccaggcggggcgcggggaccatgggttcctggacctccagggcccgggtccccaagccggagcccgacccccgggagacgctggacctgagccgcctgcccccggagctgctgctggtggtgctgagccacgtgcccccgcgctcgctgctgctgcactgccgccgggtgtgccgcgcctggcgcgccatggtggacggccaggccctgtggctgctggtgctggcccgggaccgcagcgcccagggccgcgccctgctctccctagcccgccgctgcctgcccccggcccgcccagacgggccctgcccgctgggccacttctgcgcgcgaagacccataggacgcaacctcatcagcaacccctgcggccaggaaggcctgcgcaagtggatggtgcagcacggcggggatggctgggtggtagagaagaacaagaaaactgtgcccggggccccctcacagacctgcttcgtgacttccttcagctggtgtcgcaagaaacaggtcgtggacttggaggagaagggtctgtggccagagctgctggacagtggtggtgtggagattgctgtctctgactggtggggagcccgacatgacagtggctgtaagtaccgtctccttgtcaaacttcttgacgctcaccagaatgtcctcgataagttctcggctgtgccggaccccattgaacaatggaacaacaatatctacctgcaggtcacccatgtgttctccaatatcaggaggggcgtccgtttcgtgtcttttgaacactggggccaggacacgcagttctgggctggccattatggggccagagtgaccaactccagcgtgaccgtgcaagtctgtcagtcctaggcgaaggccaccaccgtttgtcgagacagctgactgtgccttccaggagctggggctgttgactggaatccttcatgaatcaagcgctggttccctcctggcacgtgtaactctaggatccggtggagggtcctgcttggccttgttcagagtcttaaacactggagtcctgcaccagatctatccattgctgctccttggtagagc

SEQ ID NO: 6041 - DNA, 1094 bp, Cricetulus griseus
gcctgtttatgtctagaacatctatcaacgggttgctaggaagaggctcgatgtttgtgttttcaccagatcagtttcaaagactgcttaaaattaatccggactggaaaactcatagacttcttgacttaggtgctggagatggagaagtcacaaaaatcatgagccctcattttgaagaaatttatgccactgagctttctgaaacaatgatctggcagcttcagaagaagaaatacagagtgcttggtataaatgaatggcagaatacagggttccagtatgatgtcatcagctgcttaaatttgctggatcggtgtgatcagcccctgacattgttaaaagatatcagaagtgtcttggagcccacccaaggcagggttatccttgccttggttttgccctttcatccctatgtggaaaacgtaggtggcaagtgggagaaaccatcagaaattttggaaatcaagggacagaactgggaagaacaagtgaatagcctgcctgaagtgttcaggaaagctggctttgtcatcgaagctttcactagactgccatacctgtgtgaaggagacatgtacaatgactactacgttctggatgacgctgtctttgttctcagaccagtgtagacatatggaggcctaagccttcagagtccaccctggaatctgccctccagaagaggggctgtgtgcagtgatgtgagggggactgcctctgggggctgccattctcagtatcgtgtaggaattttaaaagccaaaatactaattctttctttgtagtgtgtaaaggagtgtttttaaaaacaaaacgccaactctttgtgtatttttaatcaactctttactcagagtcaagctccaatgcaggtcactctccaattatgatggaagatattttttatacttaattgctgtagggactcattcccagacaaagcaatagtcatgatgtcatggaactgataaatggattgtttttaataaatgaagactggcaataaagctgtccattgaattccaaatattggttataaggtagagccactgataactctttcatgtttagaaactccttctgttactatt

SEQ ID NO: 6042 - DNA, 1093 bp, Cricetulus griseus
cccggctggccttttctgtgtctgtactggacctggacctcaagccctacgagagcattcctcaccagtaaaaactagacaagcaagatagtcaactattactcaaagactgtgcatgccaaagacgacactgtcaggtcgactcggttcaaggaacatgaagattgcacattagttctccacaaggtctaactttcccctgcggtgtctttgaaacttgaatgtgaacgttgaatgacagagctatttttcggttgtgttgggtgacttggctgtgaatgtttttgcttttaacccctgctgaggttagacttgcctctcagagacaaggaattgaagagcactagaatcttctaggacaaggaatgtaggacgtgagtgctgtgtcccagcaagccatctgttttctagagtggaagtgtccgttaagacccaggaaaacatcccgggtagttcttccaagcagaactcacgtctaattctctaatgcaaaagccttatctttaagacccaaggtttggatctcctcccaccagactcttgacactcaggtcaggatggacaccactcgcatgagccttgctttttatttttaaattcttctttaatgattttaactctaggggagctgaggcgttttttttcctacctgaaattgctgctgctgtagaggctggaagcagagctgtaactcacagctgctgtggtcagctgggtgggtgcccaacagccccggagtttttcctggcactctggtgtctcggatggttgaggaacaaggttcccttcctcctgagccacattcacccccaggttagctctggggcacgttgggtatgtgggtctagggccttgctgttttcatcagggctatagaaggctcctagctggcacttgaggattcttattggggtcaccaaaagtgtgcctggctgctatgaaatcattgggagttttggcttcattttttatcctatggtaggctgtacagactgattatttatatcatcctttcgagagactaatgaaggcttattgtaacataagtaaaaccataggaactgtatgaaaatgctacatagaaaaatagaag

SEQ ID NO: 6043 - DNA, 1093 bp, Cricetulus griseus
atggctgctctcaggacttgcgttgttggtgtggaggttccagttaggctctcggcgtgcacagcgggtctgtcctcgggccgcagcccagcgcctccccgatgctctgctcgcgacgcggccccagcccttcgaggtggggcagccgtgccgcccgctcagctccgaggcagattctcatagctcagaagtcaagaaacctacatttatggatgaggaagtccagagtatcctcaccaagatgacaggcctggacttgaagaagacttttaagcctgctgtacaaccactgaagccaccaacctataagctaatgacccaagcacagttggaagaggctactaggctggcaactgaagcagctaaagtacgattaaagatgccaccagttctggaagaacggacaccaataaatgacgtattagctgaggataagattttggaaggaacagaaacacacaaatatgtgtttactgatatatcatataacataccacatcgggaacgttttattgttgttagagaaccaagtggcacgctacgaaaagcttcgtgggaagaacgggatcgagtgatacaaatttatttcccgaaagaaggtcgtagagttttgccaccagtaattttcaaagatgaaaaccttaagaccatgtacagccaagaccggcacgaagatgtcctcaatctctgtgttgcccagtttgagccagattccactgagtatatcaagattcatcatcagacctatgaagatatagacagacatggaaagtatgatcttttacgttcaacaagacactttggtggaatggcttggtattttgtaaataaaaaaaagattgatggtctgctcattgaccagatccagagagacttgattgatgatgccaccagcctagtccagctgtatcacatgctccatccagatggccagtcggctcaggaggccaaagagcaggatgctaagggagtaaatttaattaaggtcttcgcaaaaacagaagcccagagaggaccatatatagaattagcactccaaacttaccaagaaatagtcatcagccattctgcagcatcctgacaacaaataaaa

SEQ ID NO: 6044 - DNA, 1093 bp, Cricetulus griseus
gctgagtaaagcggcgctgatctgcacccctcactgtcttttcctccggagttacataaagttcagaagccatgtctcgaagatatgactccaggaccacaatattttctccagaaggtcgtttgtaccaagtggagtatgccatggaagctattggacatgcgggcacctgtttggggattttagccaatgatggagttctgcttgcagcagagaggcgcaacatccacaaacttcttgacgaagtctttttttctgaaaaaatttataaacttaatgaggacatggcttgcagtgtggcaggcatcacgtcggatgctaatgttctgactaacgaactaaggctcattgctcaaaggtatttattacagtaccaggagccaattccgtgtgagcagttggttacagcgttgtgcgatatcaaacaggcttatacacagtttggaggaaagcgcccctttggtgtttctttgctgtacattggctgggataagcactatggctttcagctgtatcagagtgacccaagtggaaattatgggggatggaaagccacatgtattggaaacaacagtgctgcagccgtgtcaatgttgaaacaagactacaaagaaggagaaatgactttgaaatcagcacttgctcttgctattaaggtgctaaataagacaatggatgtcagtaagctgtcagctgagaaagtggaaatcgccacactaacaagagagaatggaaagaccatgatcagagtcctcaagcagaaggaagtagaacagttgatcaaaaaacatgaggaggaagaagctaaagctgagcgggagaagaaggaaaaagaacagaaggagaaggacaaatagacaacatcatggattttatagctccttagaggcaccacttcaggaagctgtcctggccttccaccccggaaaggttttttgttgttttttcttctctaacttgatcatcggggaaataggactgaattgggtccttgtcgtgtctgtccagttggatactttattgtaatgatggacatctttatagacatcttaatctcaacacataatttttggaataaaacttggaaagattg

SEQ ID NO: 6045 - DNA, 1093 bp, Cricetulus griseus
cacagatgacaccgccatggccagggccctggtgcagtccctgctcgccaaagaggccttcgacgaggtggacatggctcacaggtttgcccaagaatacaagaaggaccctgacagagggtatggggctggagtcatcactgtcttcaagaagctcctgagccccaagtgccgtgatgtctatgagcctgcccgggcccaattcaatggaaagggctcctatggcaatgggggtgccatgcgggtggcaggcatcccactggcctatagcagtgtcaaagatgtacagaagtttgcccgactctcagcccagctgacccatgcctcctccttgggttacaacggtgccatcctgcaggcactggctgtgcacctagctctgcagggtgtgtcatccagtgagcacttcctcaagcagcttgtgggccacatggaagagctggaaggtgatgcccagtcgatcctggatgccaaagagttgggtatggaggagcgtccatactccagcaggctgaagaaggttgcagagctgctggaccaggaggtggtgagccgagaggaagtggtgtctgagctagggaatggcattgctgccttcgagtctgtgcccactgccatctactgcttcctgcgctgcatggagcctgaccccgagatcccctccaccttcaacagcctccagaggaccctcatctactccatctcacttggtggagacacagacaccatagctaccatggctggggccattgctggagcttactatgggatggagcaggtgccagagagctggcagcaaagctgtgagggctatgaggagacagacgtcctggcccagagcctgcatcgagtcttccaaaagagtgtgtgagggtcacagcctcagcggccctgtcaggcccatcagaaccaaggacaacccagactgcatccagagtcacctgaagctggttctcctgccccagcattcctaagggcaggccaagggctcccttggggctggagtcttaggccggtctgtggaacagtgaggaactggtgccttcttggagctgcagctctggcttgctgcagggctgtgtgacaccccggg

SEQ ID NO: 6046 - DNA, 1093 bp, Cricetulus griseus
ggcagctgggaagatggcggcctgggttccttgtcggaggtggggctgggcggctgcgttcttcggccggcaccgaggcctgagcgcgtcgctagcccggaagaccccccgcgcatggtggctgccagcttgcagacaaaaggtatcactctctttcctcaatcgaacagaccttccaaacctggcttataagaagctaaaaggcaaaaatccaggaattatcttcatccctggctatctttctgatatgaatggtaccaaggcactggcaattgaggagttttgcaagtctctaggtcacgcctatataaggtttgactactcaggagttggaaattcagatggtaactttgcagaatgctcagtggggaaatggagaaaggatgtactttctatacttgatgatgtagctgaaggaccacagatactggtcggagccagctttgggggatggctcatgctgcatgctgcaattgcacggcctgaaaaggtcgtagctcttattggtatagctactgctgcagatgacatggtgacacagttccgtgcactttctgttgaggcacaaaaggaagtagaagtgaaaggggagtggtccttaccatctaaatacatcccagaaggattttaccgaattccatacggtttcattaaagaagcagaacaccactgcttgttacatagccccattcctgtgacctgccctgtgcgcttgctccatggcatgaaggacgacatagttccttggcacacgtctctgcaagtggctgacagagtaatcagcccagatgtagatgtcatcatccggaaacacagtgaccacagaatgaaggaaaagtcagatatccatctgattgtttgcactattgatgacttgattgacacgctctcaactgcagttcactagaatcacatttgtgattggtatgcactctaatgcatgcagaagattgaaagaatggtagtaaatcaaagacccagatacattagggttcccacttactttccctttgtaaataccgataagtatttatttaatgatgtctttgcacaaatatacaaattgtaacaaaagtattagctgctgtttgga

SEQ ID NO: 6047 - DNA, 1093 bp, Cricetulus griseus
aaacgggagctactgcttaccttgtactactggaaattatggaaaagagatataatttaggtgactacagtggagagatcatgtctgaggtcatggcacagagacagccggtgaagcctacgtacgccattcccatcatccccatcactaacagcagtcagttcaaacaccaggaggtcacggatgggaaggagttcaaagttcataagcaggataaggctgatcttactcgtccgaagcgcaaatacgagaagaagcccaaagtcctcccatcgtctgccgccactcctcagcagccaagccctgctgcgctgccagtcttcagtgctaaagcagcaagcaaatagtaattcctccaccgccgcgccacagggttttgtttctaagactttggattctgctagtgcgcagtttgctgcttctgctttgatgacgtcagaacagctgatgggattcaagatgaaggatgatgtggtgcttgggattggggtgaatggcgtccttccagcctcaggagtatacaagggcttacacctcagtagcactacaccaacagcgcttgtgcatacgagtccgtcgacagcaggttcaactttgttacagccttcaaatatcacacagacttcgggttcccacagtgcactgagtcatcaagtactgctgccaattctgcaacaactcaggttctgtttggaacaacattcgattaactgtaccttcatgtcaagtttccaaggtcccctcatcatcctctgtagattcagttccaagggaaaatcatgagtcggaaaagccagcactgaacaatatagcagacaacacagtagcaatggaggtgacgtagctccctgggagcaggactgcagcctggggacatgatcaggtgctatgcatcagaggcgttggaacgcgaggggaggatggaatgcacacatgcgtttccatggcagctgtggggactcggcagcactgcgcatctctcttgacaaactaaaaaaaaaaaaaaaaaaaaaaaaaaaaaaaaaaaaaaaaaaaaaaaaaaaaaaaaaaaaaaaaaaaaaaaaaaaaaaaaaaaaaaaaaaaaaaaaaaaaa

SEQ ID NO: 6048 - DNA, 1093 bp, Cricetulus griseus
cgacaatacatgcaaaaaatatataaagatgattactaatatcgtagtattgagcctgatcatttgcatttccctagcattctggattatgtcaatgaccgctagcacctattatggtaacttgcggcctgtttctccttggcgttggcttttctccattgttgttcctgttatgattgcctgtaatggctttaaaaagaaaagtctagatcacagtggggctttaggagggctggtggttggatttatcttaaccattgcaaatttcagcttttttacctctttgctgatgtttttcctctcatcttctaaactcactaaatggaaaggggaagtgaagaagcgtctagattcggagtataaggaaggaggccagaggaattgggtccaagtgttctgtaacggggccgtgcccacggagctggccctgctatacatgatagaaaacggccccggggaaatgcccatagactttgccaagcagcccactgcttcctggatgtgtttgtctctcttggctgcactggcctgttctgctggtgatacctgggcttctgaggttggcccagtgctgagcaaaagctcaccttggctaataacaacctgggagaaagttccagttgggaccaatggaggagtcacagtggtgggactcgcctccagtctcctcggtggtacctttgtgggcctggcctacttcctcacacagttggtgtttgtgagtgacttagacatctctgctccgcagtggcccattattgcctttggaggtctggctgggttactaggatcagttgtggactcatacttaggggcaacaatgcagttttctggcctggatgaaagcactggcctggtggtcagcagcccagcccgagagaccaagcacatagcagggaagcccatcttggataacaatgccgtgaacctgttctcctctgttttggtcgccctcttgctcccaacagctgcctcggggttttggcccagagagtgaactttcttttcttcccaattggttgatactggtgagtccagccaaattctcaatgtgtaaggttttttttatggaagcccaaagaagaaactcaac

SEQ ID NO: 6049 - DNA, 1092 bp, Cricetulus griseus
gaactcgtgagatcatgtcgaacatggagaaacacttatttaacttgaagtttgctgcaaaggaacttaataggaatgccaagaaatgtgataaagaagaaaaagctgaaaaagccaagataaaaaaggccattcagaaaggcaatacagaagttgcaagaatacatgcggaaaatgcaatccgtcagaaaaaccaagcaatcaatttcttgagaatgagtgctagggttgatgctgtggcagccagagttcaaactgcagtaacaatgggcaaggtgacaaaatccatggcaggtgtagttaaatctatggatgctacattgagaagtatgaatcttgaaaagatttcagccttaatggacaaatttgaacatcagtttgaaacattggatgttcaaacacaacaaatggaagatacaatgagtagtactacaaccctaacaacaccacagaaccaagtggatatgctgcttcaggaaatggcagatgaagctggccttgatctcaatatggagcttccacagggtcagacagggtctgttggtgcaagtgttgcttctacagagcaggatgaactgtcacagaggcttgctcgtcttcgtgatcaagtgtaacttaaacaattggcgcttctgtttcctccgagtgtgtctgaaacatcctttgtgtgtacatgtataaagttgcactctagctagaaaaacaccacacatgccagaatgtttgaacattatttatatatgatgttttcttttgacttgtgtattttgcagtgcattaagaaattccagtgaatttcaacattggcagattttatagttctgtatattatgtgtaaaggtgtatggggcatatttttgcagatgtctttgacaaagctagcattagttttctgtatattatacatcttcctcaaatattagagcaaacatctagcaccaaaatactactaagtaattttgtcagaataaaggctttggttcttccgtttttaaatttgtaaaagggaatttttaaagcattgtctgtgatgaaatgtgtattttgtaaaaataaaaaaaaggaaattcccaacacccacatggtggctca

SEQ ID NO: 6050 - DNA, 1092 bp, Cricetulus griseus
gcatcaaggatgctcactgtgaccaacgccttgaaagaggcgctgctccagcacttcatatacacaaagctggacattgcctacgccatcaacaagccattccccttcttcgaagccctccgggacaactccttcatcactgagaaaatgtacaaggaatctctgcaagcctgtcaaaatctggtccctctatccaaagtggtgcacaatgttctcaccagtctggagcggactttccaaccatcactgttaatgatactgttcagccaggtcaacctacgagaataccccagcctggcggcaattttcagaagcttcaaaaacgttcgtactgcctatgaagagaataagagagctgcttataccctacccaaagccccaaccgacccagcagaagggcactccttccggactctgctgccactgcccccacccgaaccatctccaccaagtcatctgtcctctgcaccaagagtctgtgagccccgagaagcttcacaccaaatcactgagatcctggatgagcagcccagcccttctcacacagccgtgcctccccctggcttcattcgggaaggaaagaccactgcagagtcttccagggatcccccgagaaatgataaagacgactctacagagacgccccccagtccctcagggaagtccaatgatgacactgcggattttctctctcctatacttcctgtgacctgtggtaaggtcaaagggattttgttcaaggagaaaatgaagcaaggaccctcaggaaaatgcattcagaatgaggcaggggatttgctcactccaagggaattttttaattaaaaggaggaaaggccaggtcaaaagactggaagaaaactatatggtgcaaggggaagacgttaagattcctggagcagaaggacttttgctctgcacctccaacagcaacctcaagaaaagggtgacgagcagatgaagtcctgacgtctctctctctctctctctctctctctctctctctctctctctctctctctctctctctctctctctctctctctctctctgtgtgtgtgtgtgtgtgtgtgtgtgtgtgtgtgtgtgtga

SEQ ID NO: 6051 - DNA, 1092 bp, Cricetulus griseus
gctggtccgagtgattgaaggcaagatgcaggaccccaatgcagacaccgagtggaatgacatcttacgcaaaaagggcattctgcccccgaaagaaagcctgaaggaactggaaaaggaggaagcagagaaggaggagcagcaactcctccagcagtcagtggtgaaaacatatgaagatatgactttggaggagctggaagagaatgaggatgagttcaacgaggaggacgaacgagctatcgagatgtaccggcagcaaaggctggctgagtggaaagcaactcagctgaagaacaaatttggagacgttttagagatctcagggaaggattatgttcaagaagttaccaaagccggcgagggcttgtgggtgatcttacacctgtacaaacaagggattcccctctgttccttgataaaccagcacttgagtggactcgccaggaagtttcctgacgtgaagtttgtcaaagccatctccacgacctgcatacccaattaccccgacaggaatctgcccacagtattcgtgtatctggatggtgatatcaaggcacagttcattggtcctctggtgttcagtggcatgaacctgacgagagacgagttggagtggaaactgtctgagtcaggggcaatcaagactgacctggaggagaaccccaagaagcccatcgaagacagattactgtcctcagtgcgaggctctgttcccatgagaagggacagtgattctgaggacgactaagatagcagccactgtaaatttttgaactgtcttgatatgacatattgtctggattttcaataaggaggaagaaacaaaaatttatcatattttggtttctaacctttttataattatttaaattttatacatttcagaaataatcatggccaaaaattttatttaattccttggaactctttaaattaataatgtctctttaagaaaaatttaaacaagctttatgtcaaatatgtgttttcctacctgtatttcagcaaatcatgaaattgtttagtactttttgacctgcaactgtgtagaaaggaatatggaagttttaaaaaataatagtgaataaa

SEQ ID NO: 6052 - DNA, 1092 bp, Cricetulus griseus
gtctcgctgggcgctgtcggcttgtcagatttgagtcgaaatgtcctacatcccgggccagcctgtcaccgccgtagtgcaaagagttgaaattcataagttgcgtcaaggtgagaacttaatcctgggcttcagtattggaggtgggatcgaccaagacccttcccagaatcccttctcggaagataaaacagacaagggcatttatgtcacacgagtatctgagggaggccctgctgaaattgctgggctgcagattggagacaagatcatgcaggtgaacggctgggacatgaccatggtcacacatgaccaggctcggaagcggctcaccaaacgctcggaggaggtggtgcgcctgttggtaacccggcagtctctgcagaaggccgtacagcagtccatgctgtcttagcagtcagccagtcttgacttgtgcccaccaaccttatgtatagtgacaacacatccacactatgtctgtatctccttctggcttctgctgtgtgctgggtcccagctctgaggggtaacaactgatcccaaggtccaagccaaccttcctccccctcaacccccagtctgaggccatgggaccagctttctctcttggatgctgaggattggaaataagggcttggagtagtatccagtctgcagtgaccataggttcggcctgagacccactacttggccacagcaggggctgggcagtcaggaaacacttcctgagagctgccaaagcttggaaatgccaggtagggccatgtttccccatttgctctggatgaagggcttggccctgtccttcctcagtgcctctctccatgcttcccccatcatggggcccagcctggggctggacccaaatatgccagagactgtatgaaggccacctggatggaagagggcaggctcccactaccttcatttccctaatgggtgctggcctctccatttagcttaactaattcacacacctggaagcagcaacttgtagcgtgtgactaagccaattggttactatggaaatggggcagtatgatgctaccccatgctcaacacttgtgcccaataaacaatactggaatt

SEQ ID NO: 6053 - DNA, 1091 bp, Cricetulus griseus
cctcttgctctcgactgttaatggcgggcggcggctgctgagcgggacgcagataaccgctgcccgccctgcggaagtctccgcaggccccggctttctgcacgtctcctgtatcggagctgttcagcatgtctgtggtgccgccgaaccgctcgcagacgggctggccccggggggtcaaccagtttggcaacaagtacatccagcagaccaagcccctaaccctggagcgcaccattaacctgtatccgcttaccaattatacctttggtacaaaagagcccctctatgagaaggacagctctgttgcagccagatttcagcgcatgcgggaggaatttgataaaattgggatgagaaggactgtagaaggggttctgattgtgcacgagcaccggctaccccatgtgttactgctacagctgggaacaactttcttcaaattacctggtggtgaacttaaccccggagaagatgaagttgaaggcctaaagcgcttaatgacagagatactgggtcgtcaagatggagtcctacaagactgggtcatcgatgactgcattggtaactggtggagaccaaattttgaacctcctcagtatccatatattcctgcacatattacaaagcccaaggaacataagaagttgtttctggttcagcttcaagagaaagccttgtttgcagtcccgaaaaattacaagctggtagctgcgccattgtttgaattgtatgacaatgcacccggatatggacccatcatttctagtcttcctcagctgctgagcaggttcaattttatatacaactgaattcctgcacagaagtaacgaagccgtctctgtgagcacagcttacacacatagaagaattgtagagaatttttggttttctcttgttccctaaattgccacctccttcctgtttgaagagtaaaattaatatgaactggatagtggtgtaaacatgtgacagtgttcattaattgtttgttctactcatacatttttttgtacattaaaaaaggtggacttcctatttgtattattattattttttaagtttcttcattaaactctagaaaaatctta

SEQ ID NO: 6054 - DNA, 1091 bp, Cricetulus griseus
caaacgtccgcacatgcgtggccctagagaggatgccgctggtggtgttctgcgggctgccgtcgagcggcaagagccagcgtaccgaagagctacgccgggcgctggccggcgagggccacacggtgcacgtggtggacgatgcttcggtgctgggcaaccaggacgcgacggtgtacggcgactccgcccgtgagaaggcgctgcggtccgcgctgcgggcggcggtggagcggcgcctgagccggcaggacgtggtcatcctggactcggtgaactacatcaagggcttccggtacgagctgtactgcctggcgcgggctgcgcgcacgacgctctgcctggtttactgcatacgcccggtctggccgggccgcggaggagccgcgcgccgccggctcactagcaaacggggcagtcccgcctgccgtctccagggaactggatccggaagaaatcccgccgtcaaacctaccagctgcaggcgctctggagtccgaggagcccgcaaagcctgcttccagtgcctttcctccccaactcttggagtccttggcgcagcgctttgaagatcccgactctcggaaccgctgggaccgacctttgttcaccgtggtgggtctagaagagccgttgcccctggctgagatccggtctgcgctgtttgagaacccggcccccccaccccatcagtctacgcagtcccagcccctagcctcgggcaactttctgcaccagttggatcaggccacgagccaggtgttgactgctctgatggaagcccagaagagcgctgtacccggagatgtgctaacacttcctggcaccacggagcacttcccgtttacccggcccttgaccttggcggaactgagtcgcctccgtcgccagtttatttcctacacaaaaatgcatcccaacaacgagaacctgccccagctgaccaacatgtttcttcagtacctgagacagagtttgcactaatagaggtagtgggatggcgctcctgtttaaatcccactgtgctttgtctaggaagaatggtcagaaagtgcgcagagcgcactgtagtagggttgctaagtttgact

SEQ ID NO: 6055 - DNA, 1091 bp, Cricetulus griseus
gccagtgcagacctcacggctcgacaggcggcgcgggcggcggtaaaatgtcggctccaggaccttaccaggcggctgcaggcccttctgcaattcccactgcacccccaacttatgaagagacagtgggtgtcaacagttactacccagcgcccccagcacctgtgccagggccagccacaggactcattacaggcccggatgggaagggcatgaatcctccttcatactatacacaacctgtgcctgttcccaacgccaatgcaattgccgtgcagacagtgtatgtgcagcagcctgtctccttttatgaccgtcctgtccagatgtgctgtccatcctgcagcaagatgatcgtgacccagctgtcctacaatgccggcgccctcacctggctgtcctgtggcagtctgtgtctgctggggtgcatcgctggctgctgcttcatcccattctgcgtagatgccctgcaagatgtggaccattactgccccaactgcaaagccctcctgggcacctacaagcgcttgtaggacttggccagccagccataggggagatggtagatgcatgctaccggaagtcacctgacccttgcccagcccttgatttcatctcttcatgggctccatcttcgtgtgtcttttggggggaagggtgtcaaaacagtaacaaacctccaaaccccagaagttgctgcttggagtcatgccctgcacatgcaaagacatggaccttgagtgtttcaagggcttcttgcctgcccaagtcacccccactaactgtgattgttaccccatttacctctccactgcttttaaacaaataaaatctttggtcactcggtgagcgcttcagttcacctgctatagaaaaaaagccttgtgttgtgtttccaggcattgcccaaagaatcttaagtttctctgtttagaaaatccttcgtgacccacacctcaggcttcagccacagcaagatgaccgttgctaacgagtggcattcgaagatttggctgttgggagcccacgggcatcatcgatggcagcaggccacggctttcaagttttaataaaatgccaagaagaaaaaa

SEQ ID NO: 6056 - DNA, 1091 bp, Cricetulus griseus
ctcctggtcttgccccggacggaggcggaagcaccgcgtttggagctggttcgctttaccggtgtgcatcagcccatggcggcctactcctaccgcccaggcccgggcgccggccccggcccttctgctggagctgcgctgccagaccagagcttcctgtggaacgtcttccagcgggttgataaagacaggagtggagtgatttcagacaatgagcttcagcaagcattatccaatggtacttggactccgtttaatccagtgactgttaggtcaatcatttctatgtttgaccgagaaaacaaggctggcgtgaacttcagtgaatttacaggcgtgtggaagtacatcacagactggcagaatgtcttccgtacctatgaccgggacaactctgggatgattgacaagaacgagctcaagcaagcactctcaggttttggctaccggctctctgaccagttccatgacatcctcatccgcaaatttgacagacaaggacgagggcagatcgcatttgatgacttcatccagggctgcatcgtcttgcagaggttgacagacatattcagacgctatgacacggatcaggacggctggattcaggtgtcttatgagcagtatctctccatggtcttcagcatcgtataaccaggccctgtgaacagcaagcacagcatgcaaaaaagactgaaaatgccaaatcccttccctgtgatgaaacagggcacaagtacagttagatgctgttcttcctgtaggctgtataattaatacttggggacctggctgtacatatgtgaataagctggttagtgattctgtagtggcaccctagctacactgttataatacaaacattgggtttgctgactaattgtgccatgaggggaaccgaatattggttcaggattctgctctcaaactatcatgttcttttctagctgtctctaattctgtagttgaaaatacttttattagccaataggattttaaaataatatggaacttgcacagaaggcttttcatgtgccttacttttttaaaaaaattggaatatgtaacataagcaataaagtaatgatacagac

SEQ ID NO: 6057 - DNA, 1091 bp, Cricetulus griseus
gcctccccggatctcttagtctgaacccgggcacactaaaaaaaaaatccctctaagaatgaaatatgactgatgactctcagagaaactttcgctcagtctactatgagaaagttgggtttcgtggagttgaagaaaagaaatcactggaaatcctcctgaaagatgaccctttggacattgagaagctttgcaccttcagccagaggttccctctcccatccatgtaccgtgcattggtatggaaggtgcttctagggattttgcctccacaccatgactctcacgcccaggtgatggcctatcgcaaagatcagtactctgacgtccttcatgccctgacagtagtccgcttcatcagtgacgccacccctcaggttgaagtgtatcttcgcatgtatcagcttgagtctgggaagttgcctcgaagcccctcttttccgatggagccggaggatgaagtctttcttgccatcgccaaagccatggaagagatggtggaggatagcattgactgttactggctcacccggtgcttcgtgaagcagttgcatagcaagttccgggattccttacctcagctgcccaaggctttcgaacagtacttgaatctggaagatagtaggctgctgagtcacctgaagacatgttctgcggtgtccaaacttccttatgatctctggtttaaaaggtgcttcgcgggatgcctgcctgagtccagtttacagagggtctgggataaagttgtcagtggatcctgtaagatcctagtgtttgtagctgtagaaatattattaacctttaaaataaaagtcatggcattgaacagtgtggagaagataacagagttcctggaaaacattcctcaggacagctcagacgctattgtgagcaaggccatcgacttgtggcacaaacactgtgggacacctgcccattcagcctgacaacttgtgacttcgtggacagtctgcaggcactccctgagcactctgtccatgtcacttggtcactaactggttagaaatgggaatcttgctgtggtgctcaaagtgccaaccccccaccccactcagtaaaataattcaatc

SEQ ID NO: 6058 - DNA, 1090 bp, Cricetulus griseus
tttccagccgactccacggcgtgctgatgcagcagctgagaggctccggtcagcggggccccggcgtcagcctgcgcgccctgagctcctctgcgcaggaggccttcaagggagcccccgaggaactctcgggccacaactatgagtctcttcaggtgacatcggcccagaagcatgtcctccacgtgcagctaaaccggccagagaagaggaatgccatgaacaaggccttctggagggagttggtggaatgcttccagaagatttcccaagactccgactgtcgggctgttgtgctctctggcgcaggaaagatgttcacttcaggtatcgacatcatggacatggcgcacctcctgcaggccccaggggatgatgcagcccgcacggcctggtatctccgtgacctcatcagcaaattccagaagaccttcactgtcattgagaagtgccccaagccggtgattgctgccatccatggaggttgcattggtgcaggtgtggacctcatcactgcctgtgacattcgctactgtgcccaggatgctttcttccaggtcaaggaggtggatttgggcctggctgccgacgtggggacactgcagcgactgcccaaggtcatcgggaaccagagcctggtcaacgagctgaccttcacggcccgaaggatgatggctgacgaggccctggacagtgggctggtcagccgtgtgttcccagataaggacaacatgttgaatgcagcctttgccctggcggctgagatttccagcaagagccctgtggctgtgcaggggtcaaaaatcaacctaatctactcccgagaccattccgtggacgagagccttgactacatggccacctggaacatgagcatgctgcagacccaggacataatcaagtccgtccaggcagccatggagaagaaggacaccaaaagtgccaccttctccaagctctgagtgccttcctgatcctgagagaggaaggctccgtggagggtcagtgccttcttccatgtggtcgcccattgtacaagcttacgacttagttcttcaggggccttatcttcactgtgaacaataaagtt

SEQ ID NO: 6059 - DNA, 1090 bp, Cricetulus griseus
tcggctcgtactgcgaatgcgacttctggcctgacttgccgggtctggaatgtgacctggcccaacacctggctggccagcatttggccaaggaccctcggtggtgaagtcactgaaggcctttgtacaggagctggccccacgcaaaccattggtcctttccctgcatggctggacaggcactgggaagtcctacgtcagctccctgctggcacagtatctcttccagggcggccttcgcagccctcacgtgcaccacttctcccctaccatccatttcccacatcccagccacattgagcagtacaagaaggagctcaagagctgggtccaggggaacctcactgcttgtggcagatctctcttcctctttgatgagatggacaagctgccccctggcctaatggaagtcttgcagccttttctgggcccctcttgggttgtatatgggaccaactatcgcaaagccattttcatctttatcagcaatactggtggtgagcagatcaaccaggtggccttggaggcatggcgcagtcgcagggaccgggaagatatcagcctgcaggagctggagccagcagtctcccgagctgtgttggacaaccctcaccatggcttctggcggtctggcatcatggaggaacacctgctggatgctgtggtgcccttcctcccactccagcggcatcacgtgcgccattgtgtactcaatgagctggctcagctgggcctggagccccaggaggaggtggttcaggctgtgctggacagtaccacctacttcccagaggatgaacagctcttctcgtccaatggctgcaagacagtggcctcccgaatcacctttttcctctgactactcccagggccatcactgcctcctctgtctggacagaaaaagcagggaaagcctggacgtctaccagagggctctttcctgtctggcagatgggacccagagcacagagctaagatgaagaagagtgttggccaggccaaagatgaacggcttggaaggccacttcaccaggaaactcctgggcaccctagaacctcacagccttgctgtggcctgcagcctgagcct

SEQ ID NO: 6060 - DNA, 1089 bp, Cricetulus griseus
tggagctgcgaggtttcctgggtctgtgtttcggcgcctgcagggacacgtccgcagacttctgggtaccagactccaacgactgaacccccgctgctccgtgagcgctcacgtcctctttccccgtctcagccgctgagccggctgctcggtccttcgttcgacgcagccttcaccccggcgccatggctcccaagaagggcagcagccggggcgccagagctaacgcgctgcggagccgcaagctcgcctccttccttaaggacttcgaccgcgaggtgcaaattcgaatcaatcaaatcgagtccgacagacagaacctcctcaaggaggtggagaacctatacaacatcgagatccttcggctccccaaggcgctgcgcgagatgaattggcttgactactttgcccttggagggaacaaacaggccctggaagaggcagcaacggctgatgtagacatcacagaaataaacaagttaacagctgaagctattcagacacctttgaaatctgtcaaaaagcggaaggtggtccaggtggatgaagtgataatggaggaggaagaagaagaaaagaaggaggaggaggaagaagaagaaaagaatcctaagaatcttcgatctactagagtcaaaagatgccctccatccaagaagagaacccagtccatacaaggaagaagcaggagcaaaaggttaagccatgattttgtgacaccagctgtgagcaggctggagccgtctatggtgaaaccaaccccaggcgtgacacctaggtttgattccagggttttcaagaccccaggcctgcgcactccagcagccagagagcagatttacaacgtctcgatcaatggcagcccccttgctgacagcaaagagatctccctcactgtgcctgtgggtggtggtgcgagcttgcggctattggccagtgacttgcagaggtttgatattgctcagctgaatccagagaccctaggaaacattaagaaactctcgaaccgccttgcccagatctgcagcagcatacggactggtaaatgagaagatggccgagcagcacaggtggcagcaggaactgtgg

SEQ ID NO: 6061 - DNA, 1089 bp, Cricetulus griseus
agcatttccgttagcggcggcgggaatcgcgctgctggctggcgactaggcctctgtggaagcgaatccggcgggcatctgagacatcggagccgccaccatgactgtgggtaagagcagcaagatgctgcagcacattgactacaggatgaggtgcatcctgcaagatggccggatcttcatcgggaccttcaaagcttttgacaagcatatgaatttgatcctatgtgactgtgatgaattcaggaagatcaagccaaagaactccaaacaagcagaaagggaagagaagcgagttctcggtctggtgttgcttcgaggggagaacctggtctccatgacagtagaaggacctcctcccaaagatactggtattgcccgagtgccacttgctggagctgctggggggccaggtattggcagggctgctggcagaggaatcccagctggtgtccccatgccccaggctcctgcaggacttgctgggccagtccgaggggttggaggcccatcacagcaggtgatgactccacaaggaagaggcactgttgcagctgctgcagctgcagccacagccagtattgcaggagccccaactcagtacccacctggtcgtgggggtcctcctccacctatgggccgaggggcgcctcctccaggtatgatgggcccacctcctggcatgaggcctcctatgggtcctccaatggggatccctcctggccgaggaactccaatgggaatgccccctcctggaatgcgacctcctcctccagggatgcgaggtctgctttgatcctcgaacagcattatggcagtagctccactgaggtgtgggtcccattcccttgggccgagttaatacagacctgtttgttgttcatggagttcatggagtctccctggatcgtctggttttcctttcagggctccctccctggggaatgtgccctccaaggccctagactcatcttggttctcctcagctccttgctgtttcccaaaaggctgtacatagtccctcccccccccccccccgtggcctatgaagctggtttataataaactcttaagagactgttcatacat

SEQ ID NO: 6062 - DNA, 1089 bp, Cricetulus griseus
cattgtggcttctagcagtttgcctccagctactattgcacctccaaaaccagcatcttgggctgatattgctagcaagcctgcaaaacaacaacctaaactgaagaccaagaatggccttgcaggatcaagtcttccaccgcccccaataaagcataacatggatattggaacttgggataataagggtcctgtggcaaaggctccctcacaggctttggttcaaaatataggtcagccaacccaggggtctcctcagcctgtaggacagcaggccaataatagccccccagtggctcagacatcagtagggcaacagacacagccattcgcctccgcctccaccacagcctgcccagctctcggtgcagcaacaggcagctcagccaactcgctgggtagcacctcggaaccgtggcagtgggttcggtcataatggggtggatgggtaatggagcaggacagtctcaggcaggttctggatcagctccttcagagcctcacccagtattggagaagcttcggtccattaataactataaccctaaagatttcgactggaatctgaaacatggccgggttttcatcattaagagctactctgaggacgatatccaccgttccattaagtataacatctggtgcagcacagagcatggcaacaagagactggatgctgcgtatcgttccatgaacgggaaaggtcccgtttacttacttttcagtgtcaacggcagtggacacttctgtggagttgcagagatgaaatctgctgtggactacaacacatgtgcaggtgtgtggtcccaggacaaatggaagggccgttttgatgtcagatggatttttgtgaaggacgttcccgaatagccaactgcgacacattcgtctagagaacaacgagaataaaaccagtgaaccaactctagggacactcaggaagtgcctctggaaaaggctaagcaggtgttgaaaatcatagccagttacaagcacaccacttccatttttgatgacttctcacactatgagaaacgccaagagggaaagaaggaaagtgttaaaaaggagcgtcaaggccgtgggaaa

SEQ ID NO: 6063 - DNA, 1089 bp, Cricetulus griseus
tgcagcaagaggtagggctgaggcgttgagaatttcatggacaggcggtcgcacaagaaagacacacagaggtgtcacactaattaaaagcatctactgagagagtaggagaagatggccactctgaaccataccaactgtaatacagaggcatcagctgccccggaggaggcaaagacctctcgttgcccgccgagcccccagacagcccatgagcctcgtgactttggtggttccttgcttctgccattagaaaaggagattcactcagaagatgaaggtattgcatcggctggggttggctcaggttgtaacaatagaggtcctcggacccagagcccacggtgctgttcagtggaggcagtgctggcccgaaagaagcaccgaaggcggccatcaaagcgcaagcgccactggcggccttacttggagctgagctgggctgagaagcaacagcgagatgagagacagagccagagggcctcccgggtccgtgaggagatgttcgccaaaggccagcccctggcaccctacaacaccacccagttcctcatggatgaccgtgacctggaggaacctaacttggatgtgctccacgggctctcccacccaggctccagtggtgagaatgaagcaggggacagtgatgggcagggccgagctcatggggaattccagcagagggacttctctgaggcttatgagcgataccacactgagagccttcagggccgcagcaagcaggagctggtgcgagactacctggatctagagaggcggctgtcacaggctgagcaggaaagtcggaggctccagcagctgcaggggcgccctagcagacaaccctgtcaacaggtggaagagctggctgctgaggtggagaggctccggactgaaaaccagaggctccggcaggagaacgagatgtggaaccgagacggcagctgctgtgaccaggagaagccagccacagaagggacccccaggcccaaggatgagaccccattctgtgcccatgcaggccagctgggtcacaaggaggcagatgacagatgaaagctggtgactcacaactgtctgtaactgcag

SEQ ID NO: 6064 - DNA, 1089 bp, Cricetulus griseus
ccgcgggagtgggcgctggaaactttcaaaggtgctcccgtcacacctcatcacttacaaactctcacagggcgcagaagatggagctgagcatcaccatcaccacgtcgccgagggatggaccggaggcaaagccaaagattcaggtcgcaaagccttgggcagctccagtggacggttaaagccacggctcaacaaaatccgattccgaacccagatcattcacaccactccctcattcaaggatgctgaacagacgctggaggaagaagaggaggaagaggatctgtgaagtagttattaaatcaacttaatatggttctcatataagagacatttaattttattaatacattcatagtctgtatgcttcctggcaacattttacaaatttttcacttctttcactttttctacatttctttgtatacactcaaagagctacggggtagttactgaaaggctagatagtttgcccatttaaaaatgggcaaggctcccaacccacttctcgtgcctgcactgcactacacacacacacacacacacaagttgttatccacttatgtgcctttatctttgttttaggatttaagaagtagatttcatacattatcggtaagcacttttttgtatatataagtgaaaaaccagtgtgaaaaagaaatccaaatgtgtcatgtataaatgctaactatattcagtgcagaataagcttacaattcccatccgggacttttaaattccacttaagataaggcaactatttgtcataatgtactttgtacagtaaaggtaacatttttaagctacttaactccattctttcttttttcaatttccaaatcaagagtagaaaaagtgatttgtataagttgataattgtgaagttatatctcccagtagtgacaatatattaaatattaacaagagactggtaattttaaaatgagtttgttcatttgtcttccaggtacacttgtaactatgaatgtcagtttgcttttatgttatataaaatgcagctaatgtggtactagtttattcacacctgaaatattggaatgtgatgtctgtcttttgcttttt

SEQ ID NO: 6065 - DNA, 1088 bp, Cricetulus griseus
caacaaaagaggtgtattgaacaatatcgtaagatcataaaaactgaacatgaagttcaagaatgtcggcaacagcagagtagggctgcctcagtgatacagaaggcagtacgccactttctcctgcgcagaagacaggaaaaactcaatagcagtgccactaaaattcaggcatggtggagaggctattcttggaggaagaaaaatgatggcacaaaaattaaagctatccgactaagccttagagctgtcaataggaacgttgatgaggagaacaagctctatagaagaactgagcgtgcgcttcatcacctgctgacatacaagcatttgtctgccattctggatgctctgaagcacctggaggtcgttaccagattatctccactttgctgtgagaacatggctgaaagtggagcaatttctacaatctttgttgtgatccgaagttgtaatcgaagtgttccttgcatggtaagttgttggctatgctgttcaagtattgctgaacgtagcaaagtatgagaagactacctcagcagtttatgatgctgaaaactgtgtggacacgctgctggagcttttgcaagtgtaccgagagaagcctggtgacaggctttctgagaaaagtgcgagcattttcacaagaacttgctgcctattagctgtgctgttgaagacagagcattgcgcttctgatgttcaaagtagatcaaaagttatcgatcgtatttatcgcctctacaaacttaaagttcccaagcataaagtgcatatggaaaggttatttgataagcagaagcagaatccctgtataggctttccctttacaccagcaagttctgtgaagaccagaatagtttcaagatttcagccacagtgggttttgaggcgtgataatatggaagaaatcacaaattcattgcaagctattcaactggtgatggatacccttggcattccttatcagcaaataaatggaaacatttttcagtgtaggactgtaaataattatgccaatcatggatacttagagcagcttttactgtcaatgtaaaattttgaatatgactttgtataaaataaaa

SEQ ID NO: 6066 - DNA, 1088 bp, Cricetulus griseus
cagtagcagctcagtcctgcaagagaagagtagctccgctccttccaggactcttttgggcgcgacataagtcgaggtgcaagaagagaggaaaatcttcagatacctacaggattaatttattcaaagcaagaaatactcaacatgcaaaagtcttgtgacgagaacgaagggacaccccagaacaccccaaaggcagatgaaggccatccttcagaagatacaccccagcaggcaggggggaatcttcaggcttctggagaaagtgtgggggaggaagcagatggaagccttagagcagagcctgctcaacccagcccggaacctaaagaggacactcccacaaggcatctgaaccctgaagaagtgataagaggagtcgatgagctggaaaggcttagggaagagatcagaagagtaagaaacaagtttgtgatgatgcattggaagcaaagacattcccgaagcagaccttaccctgtgtgtttcaggccttgaaatccctttctctgatatggaaatctggctgctgctttctttctcttagcatttctctgatgtatctttgaacttcatttcacttttaattacctggccgtattttcttttaggtagttttgttgttaccagcatctcattggattttggattttgacccattttccacatttatttttcagttggaaagtttaacacttctatgcatggaaatgtgttcattccatattagacaattaaaaagcagcatatttagtaccagctcacatatataggaaaattcctaattatgtgtgtacatgtataattatacgcatcaaaaaacttaactgcttatttttgtgtggtgtgttttaattttgccttttgttcatgtgtattttttaatgaatatgtgtctcacaaagaactgcagatttttaataagtgggagttaattaaaattaatttgtaaccagcttgtagaggcaataaaacactaaactcttgatgaaaaactattaaaaagaagtgtaaacctggaattacctctggatttgctagccagaggaataaaactggcaatcgttatagaaaaaaaaaaaaaaaaa

SEQ ID NO: 6067 - DNA, 1087 bp, Cricetulus griseus
aagggaatatagaacaaaaattaaataaatgcatatgtgcatttttgcccattcagaatgcagtccttgctctctcctagatgccaaccatgaatagtgcagttgtgtttaaatctcctcaggggtgctttttgattaagtaggtaatttcaaacacccctttaaatacagctagaaaataaaaccattttgtaaaagccacatttgcatttaatgctagcctcacacagagtatcttcccaaatccaggtatgcccatctttaataagatctttccagcttcctacatatgacaaaaacaaaaagagcaaagatttccaattactcctttgtcctcagacatttagtaatataaagtacctatttttatgctgaaatgtttatacaggtttattaacagcaagcgcaactaactggcggcatgccttgcaacacattttgatatattagccatgcttccaggtaaaggcacgctccaaactactcaccttttgcagtctctctgggattgggaaaagaaaaaaaatcatgtttgagaagtgggactgtaaatatgtaatgtatatttaactttgtgtagcccatgtacctaccttgtatagaaaaataatttttaaaacttgagcagaaaagggagtaaaataaggaagtcatgaagggttgtttttttttcccacttttatttaaatgaaggaatttcaaataattcacctgcagaattttagcacaaaaatagtcattggaaattgttaacatatacaattgttctttgggaaagagaagacaactataatatcatttacagttttctttttgcagttctatttacctgcagtagtactaaatcctattactggaataggttactaccaaaaaagtattctattcagaaaaaaaaaaatgaaaatatgtaacctattaaagtattgcatttaaatttcacaccaagcgcatgtactatgcagacacagatttttttctgttcattatatttttctttattgcagtggattgatttgatagacttgttgaattactactttgctgtatatattatttaataaactttattcagaattgcgtggca

SEQ ID NO: 6068 - DNA, 1087 bp, Cricetulus griseus
  modified_base (29)..(29): a, c, t, g, unknown or other
  modified_base (1014)..(1014): a, c, t, g, unknown or other
gccaaattgattccagcaatcaacccctntcccccccaagaatgaaaggcaagctacagaatcttctaagagtcagaaagacacaggattccttctgccagataagagaaggggaagaaaaaggcaacggtgaaatttcaagttttaaaatctaccaccccaggcaacagacatacccctgagtgctctgtgtgaacacctgggatgtactcactgcagtcagaaaccattctttctttattgaatgccaacttcatgatgaatgaaaacgctgggcattggtggcacactcctttaatcccaaacttgggaggcagaggcaggcgggtctctgtgagttcgaggccagcctggtctacaagagcgagtgccaggacaggctccaaagctacacagagaaaccctagtctcgaaaaaccaaaaaaaaaaaaaaccagtctaccgtggctgtgctattttagcatggccctgcttacagacaccaagtgcctgcctggtcacttatgagataaaatcaaaatcacagagctcttgcctacaaatgaaacctctgaaggacagcagtgcacaacatctaaacggcaaggaattaggaaatcctgaccaatgacacaagtgattattctagaaacctaatttcggcgttcctacttggacttccccttttttaacaccatgggagtcagtaaaaatgttaaaacacattgttcttgtgccttttaatagaccatagtgccagttaaactagtattttcgtttgttgctttggggaattatttcccttagggattcagccaatattacaataatgacaaggctcaagagctgttgagtgcagcccagggggtttctgacaagggaaaatcctgcaacactgaactgtaatgttgtggacagtacagggtaactagaggtggagccagggcctcaccactatgacaatgtctagtgaggctgcacatgggcccaggagtggcaccaagctgcagggacggccagccccactcagcttcnccttgaaacacaattgcagctgcattctgcatcactggaaactgcaacattaactattaaagccatcggtcta

SEQ ID NO: 6069 - DNA, 1087 bp, Cricetulus griseus
gtgggcggggcctggtgatccgggtcccgcgggcgcgctggcttcactgccgggctgtctgtcgtcatggtggggccctgggtgtatctggcggcggcggttttgctcatcggcgttatcttcttcctgacccgcagccggggtcgggcggcagcagctagtggagagccactgcacaatgaggaagagcgggcaggagcaggccaggtagcccagccttggccccaggagtctgaggagcagagaaccgctggaggcaggccccggcgtcggagggacttgggcagccgtctacaggcccatcgtcgagcccagcgagtggcctgggcagaagtggatgagaatgaggatgaagctgttattccagcccaggaggaagaaggtgttgagaagccagcagaaactcacccaacagggaaaattggagccaagaaactacggaaactagaggaaaaacaggctcgaaaagcccagcgtgaggctgaggaagctgaacgtgaggaacggaaacgcctcgagtcccaacgtgaggctgaatggaagaaggaagaggagcggcttcgcttgaaggaagaacagaaggaggaggaagaaagaaaggctcgggaggagcaggcccggcgggagcacgaggaatacctgaaactgaaggaggccttcgtggtagaagaggaaggtgttagcgaaaccatgactgaggaacagtctcacagcttcctggcagaattcatcaattacattaagcagtccaaggttgtgcttttggaagatctggctttccagatgggtctaaggactcaggacaccataaaccgcatccaagacctactcaccgaggggactctaacaggtgtgattgacgaccggggcaaattcatctacataaccccagaggagctggctgccgtggccaatttcatcagacagcggggccgggtgtccatcactgagcttgcccaggccagcaactccctcatctcctggggccaggaccttcctgcccaggcttcagcctgactccagcccccacttgaatgtatcatgtggcctacatacctcgacttccttccctgccatcttggggcag

SEQ ID NO: 6070 - DNA, 1086 bp, Cricetulus griseus
ctgagcacgcatcccagccactcctgcgcgctcccggacttggagcccgagcacgttctcgacgctagcggggctgaggctccagagctggggtagattgaagctgctggatcccctacgatcctggggccccggaaagcaccggttgctgcttgtcaagcctaagcggggatcggggtcggatcgaggggccaacatggatgctatcagccaatcacctgtggatgtcctgcttcccaagcacatcctggatatctgggccattgtcctcatcatcctggctaccattgtcatcatgacctctttgtttctgtgtccagccactgcagtcatcatttatcgaatgcggactcatccagttctcaatggggctgtatgagacccttgaaagtgggatgttgtgtgataaggacacaagtctctccctcggcctgttctccgaaagacagtggggaagactcaggagttgaacttttgttttagttttgattctgcagctagcccacagcgtggatttgatcaatgaacctaactttgtgggttccaaactccttagctttcaactaggggtcataatccctgccctcctacttcacagggttgaaagccatgtgacttagtggaggtgaaagctgtttgtgagcagtggaagccacacaggtgttgtgttgtgcaatgagaagctttgaagaatcaaagacccttgaagctgctgatggtaaaggaggcaaggcagactgtgaaagagcagctttggccagtgcccctcacgccctgagctacatccccagcccttctagctccagtaaacatctaaagtatgcattatttcaagagatttcccaggactcttgaacctgactcaaaacaacaatggttattttagatgctatggtttatatttatatagagatatttctagaccattaaagcttgccctttgacattcaactcaggggcattttgggatttattgttatgtaagaagataactgatattagggtagtattgtgtcaaatgatgcttactttgatcttacttcatggatatatgctttcaatttccaataaagtgccatattgaga

SEQ ID NO: 6071 - DNA, 1086 bp, Cricetulus griseus
aagatggcgacagtgcggagggctttcccgcggagactggtgggcttggcgtccctccgagcggttagcacctcctccatgggcactttccccaagcgggtgaagattgtggaagttggtccccgagatggtctgcaaaatgaaaagaacattgtgcctaccccggtgaagatcaagctgatagacatgctttccgaagcagggctccctgttattgaagccaccagctttgtctctccaaagtgggttccccagatggctgaccactctgaagtcttgaagggcattcagaagtttcctggcatcaactatccagtcctgactccaaatatgaaaggcttccaggaagcggtatctgcaggtgccaaggaagtaagcatctttggggcggcctctgagctcttcaccaggaagaatgtgaactgctccatagacgagagtttccagcgctttgatggaatcatgcaggccgcacaggccgccagcatccctgtgagagggtatgtctcctgtgcccttggatgcccctacgaggggaaggtctccccggctaaagtagctgaggttgccaagaagttgtactcaatgggctgctatgaaatctcccttggggacaccattggtgtaggcaccccaggactcatgaaagacatgctgactgctgtcatgcgcgaggtgcctgtggccgccctggctgtccactgccatgatacctatggccaagccctggccaacaccttggtagccctccagatgggagtgagcgtcgtggactcctctgtggcgggacttggaggctgtccctatgcaaagggggcctcggggaacttggctactgaggacctggtctacatgttgactggcttagggattcaaacgggtgtgaacctccagaagctcctcgaagccggggacttcatctgtcaagccctgaacagaaaaaccagctccaaagtggcacaggccacctgcaaactctgagcccttgtttgcctgagacctgggactgtgggaggtgacatgcacaaatgattccttgatgggagaaatggaatggggacaaatgaacaggtgtcacgaaggtcc

SEQ ID NO: 6072 - DNA, 1086 bp, Cricetulus griseus
gagaggatgaactgtcattgataaaagggacaaaggtgatcgtcatggagaaatgcagtgatgggtggtggcgcggcagctacaatggacaaaattggatggttttccttcaaactatgtaactgaagaaggtgacagtcctttaggtgaccatgtaggttctctgtcagagaaattagcagcagttgtcaataacctaaatacaggtcaagtactgcatgtggtacaggctctttacccgttcagctcatccaatgatgaagaactcaattttgagaaaggtgatgtaatggatgttattgaaaagccggaaaatgacccagagtggtggaaatgcaggaaaatcaatggcatggttggcctggtgccaaaaaactatgttaccattatgcagaataatccattaacctcaggtttggaaccatcgcctccacagtgtgattacattaggccttcactcactggaaagtttgctggcaatccttggtattatggcaaagtcaccaggcaccaggcagaaatggcattaaatgaaaggggacatgaaggagacttcctcattcgtgatagtgaatcttcgccaaatgatttctcagtatcactaaaagcacaagggaaaaacaagcattttaaagtccaactgaaagagactgtttactgcattgggcagcggaaattcagcaccatggaagaacttgtagaacattacaaaaaggcaccaatctttacaagtgaacaaggagaaaaactatatctcgtcaaacatttgtcttgattactcatcagcagtgactgctacacagcttttaacttcttactgtcttctttgctttttttttctctttccttctaacagttcaagttttgtattctgaaaaagaataatttggttcaaaaaatctttatatatggaagagttcttttattgatgtttcttttattttccttgtaaagacctcctgttctcccatagttccttttcacataaaatcctatctatatggcatatgctaaagtacatttcttgtaaagtgttaatcttttctgtgactaaatagccaataataaacaggaaactagaaatta

SEQ ID NO: 6073 - DNA, 1086 bp, Cricetulus griseus
tattgggaggaggagacgcggagagccaagggcaacgcgcagaatgaccgagtgagcctcaggaacctgctcggctactacaaccagagcgagggcggctctcacaccatccagaggatgtacggctgtcacgtggggtcggacgggcgcctcctccgcgggtacaaacaatcgcctacgacggcaacgattacatcgccctgaacgaggacctgaggacgtggactgcggcggacacggcggcgcagatcacccggcgcaagttggagcaggctggtgctgcagacagacagagggcctacctggagggcacgtgcgtggagtggctcggcagatacctggagcacgggaaggaccagctgctgcgcacagatcccccaaaggcacatgtgacccatcatcctggacctaaaggtgatgtcaccctgaggtgctgggccatgggcttctaccctgctgtcatcgccctgacctggcagaagggaggaggaagaacagactcaggacatggagctggtggagaccagaccttctggggatggaaccttccagaagtgggcatctctggtggtgccttcctggggaggagcagaaatacacatgccatgtgtaccatgaggggctgcctgagcccctcaccctgacgatgggagcctcctcctaggagaaactcaggtggaaaaggagggaactatgctccagctccagcgtgaagacagctgtctggcatggatggaatgacagacaacgtcttcagccctctcctgtgacatccacggttgactctctgcaacagtgtctgatgttccctgtgatcctatgagctcaatgtgaagaactgaggagcccagcccagccctgcacaccaggaccctgtccctgcactgcctgtgttcccttccatggccaacccttcctgttccagcagacaggaggggacatctccatcctgtcacctccatgctgccctgagctgcacccctgaccttcccctctgaaaataaggatctcaatttgaacttgattgttctcatccttgatctgacaggttgattgtacagttaaataaattattgagataactta

SEQ ID NO: 6074 - DNA, 1086 bp, Cricetulus griseus
  modified_base (990)..(990): a, c, t, g, unknown or other
  modified_base (1013)..(1013): a, c, t, g, unknown or other
gcatcccagatgccaccaccggaccacggagactggacatttgaagacagttcaaacagctctatgaactggacgcagaccccaacgaggaaggagttccttggatgacctgttcagcttcatgcagaagcgtggcacgccagtgaaccggatccctatcatggccaagcaagtcctggacctgttcatgctgtatgtgctggtgaccgagaaggggggcctcgtggaggtcatcaacaagaagctgtggcgggaaatcaccaaggggctcaacctgcccacctccatcaccagcgccgccttcacactgcggactcagtacatgaagtatctttacccctatgagtgtgagcgacgaggcctgagcagccccaacgagctccaggccgccatagacagcaaccgcagggagggccggcgccagagctttggaggctcactttttgcctactcacccagtggagcccacaacatgctgtcctcacccaagctgccagtgacttccctgggccttgcggccagcaccaatggcagccccatcactccagcacccaagatcaagaaagaggaagactctgccatgcccatcaccgtcccaggccgcctgcctgtgtctttggcgggccatcctgttgtggcagcccaggcagctgctgtacaagcggcagcagcccaggcagccgtggcagcccaggcagccgccttggagcagctccgggagaagctggaatccacggagccaccagagaaaaaaatggccttggttgctgatgagcagcagcgcctcatgcagcgagctctgcagcagaacttcctggccatggcggcccagctgcccatgaatatcaggatcaatagccaagcctctgagagccgccaggactcagctgtgagccttgccagtgccaatggcagcaacagtattaacatgtcagtggagagagagagaggagagagagagagtatatatatatatatatatatatatanatatatatttttttttttttttntttttttttttctttttttgtcaaaacaaaaaaagttaattttaaattaaaaaaaataaaaaaaaaaaaaaaa

SEQ ID NO: 6075 - DNA, 1085 bp, Cricetulus griseus
  modified_base (732)..(732): a, c, t, g, unknown or other
acaggtactacacctaacccaaacttctacatagcaacaggaggcctgtggaaagatgttgtgcattaagacagatagtcaggcccaagttccacactccactgtgtgtacaagggacaagccatttagccttagtgtgcctatatcttcatgtacacaataggactcatatatttataaaatatattgatactctcagggcaaaattactatatcaatatacaattaagatcagtattgtaaagtcacactgcatcctggtgagtcttcactgtcatacagttctagagaagttcatgctcttaacgtagacacacgggaaagtcatctgaacatcagttcctcacccaaccagatgtttcaccccaagcccagggctactctggatttcacaggctttgttcttctctaaaaaacaagaggaaaatgtaagacaaggcatccagactactgtatgagtctttgcaacaccatgaatgatcccatgtggggtggctaagtacagacatgggtctcacttgtcattggcacagcaagacagccattcttcagagacacacacagccctttctgaccatgcctatcagtgtggtggccttcccagggttccttggatatgagcctcagtgttggagtagacaaagaagataattgaggagttccttcctccccagagacttggggctcttccttcatttttatagtactatagcgttagacacacacacacanacacacacacacacacacaggcagcagcaagcatcagttgtattctatgtactcaaacttttcacttctatgtatataaaatctcaacgcaaatgacgtagcaattgggacagaacctctctgtgttgtctaaaatgccttgctttcgatatgagaagccaagagaattactaccatttttttgaaggttatgtatgactcttgacttagaatgcttttttaacaacttttctcccaatagtttaaaacttttagaaagtgacatgaaaccttcattgaaaagccttttcctatatttgttgtatacagaaattaggtaataaagtctctttataacaaaaaaaaaaaaaaaa

SEQ ID NO: 6076 - DNA, 1084 bp, Cricetulus griseus
gagccatgtccaggccgtccctcatcgcatttactccagccaccgactccagcgacctctggaaagatgggcagcagcaaccacagcctgagaagccagggccagtcctggatggggccgcagcccgggctttctacgaggctctaattgcagatgagagtagctcccctaagccccagagagctggccctgtcagaggacaaaagaggaggaaaaggagagggaccagggaggctgcgaggatgacgacaggatgacccagtggatcctgctggcagcccagaacggggatctgacagaacttcgaaggctgctggaaccccgggaggcagggggagctggagggaacatcaatgcacgcgatgccttctggtggactcccctgatgtgcgccgccagagcaggccaagcggctgccgtgtgctatcttctggaccggggtgctgcctgggtaggagtctgtgagctgggaggcagagatgctgctcagctggccgaagaagcgggcttccctgaggtggcccgcatggtcagagagagccgtggagagacaaggagccccgagaaccagagccggtctccccccaccgcctcccagttctgcgaggactgtggtgcccactttgaagactccaaccaccgcacatcaactgctcacctgctgtcactgtctaggagtccccatccctccaaccttccccttggggtgcccacctccagtcctggcttcaggctgctgttgaggggtggctgggaaccaggaatgggcctaggaccccggggtgaaggccgtgccaaccctattcccactatcctcaagcaggaccaggaaggactgggctatagacctgcaccccaaccccgagtcacacatttcccagctcgggatacccgggctgtgtctgggagagaaagagtacctcgagtcgccacactaagtcagagggagaacagaaagagagaagagaaggacagagcctgggagcgaaatctgagactgtacatgaaccttgaattatgactggttcggtccagcctgttgttacttgctggacttggacccctgacatgggcacttgaactt

SEQ ID NO: 6077 - DNA, 1084 bp, Cricetulus griseus
agtctcagcctccggcaccggccgcgcagctggaggcggaggagcggaagtttcagccatggctgcaatccgaaagaagctggtgattgtgggtgatggagcctgtggcaagacctgccttctcattgtcttcagcaaggatcagttcccagaggtctacgtccctactgtctttgagaactacattgcagacattgaagtggatggcaagcaggtggagctggctctgtgggacacagcagggcaagaagactatgatcgcctgcggcctctgtcctacccggacactgacgtcatcctcatgtgtttctccatcgacagtcctgacagcctggaaaacattcctgagaagtggaccccagaggtgaagcatttttgtcccaatgtgcccatcatcctcgtggggaataaaaaggatctgaggcaagatgagcacaccagaagagagctggccaagatgaaacaggagcctgttcgatctgaggaaggccgggatatggcaaacaggatcagtgcctttggctaccttgagtgctcagccaagactaaagaaggggtgcgggaggtatttgagatggccactcgggctggcctacaggtccgcaagaataagcgccggaggggctgtcccattctctgagtttcccaaggtctctccaattttccctccttccttttcaaaggggtacaaattatccccatcccactccatccttctaggactccatgctgccagtttctttttggttccttcctgcccaggactgcatgagtttgtttccccagccccaagtgggggctggtaggccctttcttccctgcctctgggaaccaggctggtgccctgcccttcctgtgcagggctcctcctgctgcgttggtccaggggtagggctcttagtcctttcgaccttccccatatcacacaccagcactttatatatttctggctcacaggaggcatctggggtagggactgggatttctgctttaggtagtagccttgtcaacgactttacttggtggggacatgaataaaggtcaaaggttgcaccatgaaaaaaaaaaaaaaaaaaaaaaaaaa

SEQ ID NO: 6078 - DNA, 1084 bp, Cricetulus griseus
catggcgatggcagtggcccagaagttcagccacctgttgtccagcctttggcacgtgggccagaagcctctgcagccagagcccgtgttcacagtggaccgggctgaggtgccgcctctcttctggaagccttacatctatgctggctaccggccgctgcatcagacctggtgtttctacttccgcaccctgttccagcagcacaacgaagccgtgaatgtctggactcacctgctggcggccctggcactgctgctgcgcctgggcgcaccttctgcaggccaagtcagagttttggtcactacagcttcttcttcctggactacgtgggcgtagccgtgtaccagtttggcagtgccctggcacacttctactatgccattgagcccaccctggcatgcccaggtgcaggccatcttcctgcccacggccgccttcttggcctggctttcctgtgctgggtcctgctacaacaagtacagccagaagccaggcctgctgggccgcacttgccaggaggtgccctcggcgctggcctacgcgctggacatcagccccgtggtgcaccgcatcatacgtgtcccctctccctgccgaggatgaccccgctcttctctatcacaagtgccaggtggtctttttcttctggctgctgcgtttttctccaccgtcatgccggagagttggttccccggcagctgccacatctttgggcagggacaccaagttttccatgtctttttggtgctgtgcacattggcccagctagaggcagtgacactggactatcaggcccggaggcccatctatgagcctctgcatgcccgttggccccacaacttctctggcctctttctgctcaccgtgggcagcagcattctcactgccttgctcctcagccagctggtccggcgcaaactccatcagaagactaagtgaaagcagggtgggcggggagctggcagggtgagagaaggtatttagggacaaaggcctggacttggctccagatgggaacgaggcctggtaaagttgtttgtatatggcaggccatgactccctgcctacaagctcactgcccaa

SEQ ID NO: 6079 - DNA, 1084 bp, Cricetulus griseus
taaactatgtgccactcgcgcaaccacgtccacaccatgactggcctgccagccccggcccccgctccctccaccggctcggaactccggcggggctccggtcccgagattttcaccttcgaccctctcccggagcgggcggtggcgcctgccgcgcgtctccacacttcccgcgggcaccgaaaacgcagccgaagggttctctaccctcgagtggtccggcgccagctgccaaccgaggaacccaacgttgccaagagggtcctctttctcctgctcaccatcgtcttctgccagatcttgatggccgaggaaggtgtgtcgcagaccctggctccggaggacgccaccagcgccgcgacacctgaaaccctctctgcgctcatgactgagcccccggtcctcgagcccttgaatctgacctcggagtcctcggactatgctctggacctcaaagctttccttcagcaacaccccgcggccttctgaatgcgcccggtcacacctggcccggaaaaaacaaaaaaaccagcaggcgtatctggtgcgccagagcgtatcccaaactgggacttataaggcgatgctaactcacaacactacagccaagacaccgtgggtcctggcgaggcctactgggaaggaccgaagccttctcagcgtcctaattaatatttatatatttatgtataacctcctaggtgaaggagggggtgtatgtaatatttattttaacttatgcaggggtgcgggatatgcccccttgccgtaacactgacatctggattatttattaatgatttatgggttcggtgagacagagcggtgggagggagggccggggtggggattagacttggtggttggtcatgggtttaggggcaacactccgtcttccagcccctcacttctgtagtctgttgtaaggctttcgggacacccttgggggatccggtctgtggcctttgatgtcttcctggttgcttctcaggagaggctgcgggagtcttgggtccacggattgtcagagggcggctgttgggggtcgccttagtatgttctgtgaacacgaataaacttgatt

SEQ ID NO: 6080 - DNA, 1084 bp, Cricetulus griseus
agatccagaagttagggagcctggacacggtggtatcctggtcccaacagttcccctatgcccatcctctctgggttggacaatttgttggttacctgaacatctatgagcctgactatgccaaggctgtatacagccgtggagaccccaaggctccagatgtgtatgatttcctcctccagtggcttgggaaaggcttactggttctcgatgggcccaaaatggttccagcaccgaaagctgctcacgcctggcttccattatgatgtgctgaagccctatgtggccatatttgctgaatccacacgcaaaggagacagtggcctaggccacagagacaacagctactaccgggcagtcagtgagctcacattgctgacacagcagcgcatcgaatccttccagtaccataatgacttcatttactggtgcactccacatggccgccgcttccttcgggcctgccagacagctcatgaccatacagatcaggtcatcaggcagcggaaggcagccctgcaggatgagaaggagcagaaaaagatccagcagcggaggcacctggacttcccatgtttgaaggccacgacaccaccactagtggtatctcttggtttctctactgcatggccctttatcctgagcaccagcagcgatgtagggaggaggtccgtgagatcctaggagaccaggactccttccagtgggacgatctggccaagatgacctacctgactatgtgtatgaaggagtgcttccgcctctacccacctgtgccccaagtgttccgccagctcaacaagccagtcacctttgtggatggccgctcgctacctgcaggaagcctgatctctatgcacatctacgccctccacaggaacagtgctgtgtggcctgacccagaggtctttgacccattgcgcttttctcctgagaatgtgacaggacgccacccgtttgccttcatgccgttctctgcggggcccaggaactgcattgggcagcagtttgccatgaacgagatgaaggtggtcacagccctttgtttgctgcgctttgaattctccctggatccctcaaagat

SEQ ID NO: 6081 - DNA, 1083 bp, Cricetulus griseus
ccctggacacagaacattctgggcccaacggcaggaggggctttgagctccccaagtaccacgtggccaggagtatcacctcgctgttaccatcagagtgtgtgcgcccatcacctgtgctgctccccaaagcccgcttcctgagccctggggaggtggagtcgcccagtgtgttgactgtgcagaagccctacagcacctctggacctctgtataactgtggacctggtgggggcacgcaggagccagccccgacccttgaaggaaagaggcctgtgtcgtatcagcagctatccagcagcatgctgcagaagagaagctacagtgcccaggcagtttgggattgagggatgacagccaccagctggttcactcagcattttaaacttgagttcctttgatgccttgagtttattcaacagttcatgggtttagcaaacccagaatcttttattaagaaactgtttgagaagtttgcactgctcggtctccttgccccgcccctcttggtaggacaaaagggtgaagagctcaaagaccccaacggctccccctcctgtgttgaaggggagagctgggttgagacgtgtctgctcttgcagacagtgtgtttgtatcaggaaccgtgtacactaggccctgttcccgtccacaagctgagccatatgtacataatctagactgttttgttaggttctgcacttttatagcctatttttgaagattaacacatttgcaagatgattgactcaatctttgcctaaatccagcgagtgtacaggaagctcgaggtttttttgtttttgtttttaaacagccctttgtacttcacagtgtgttcttgccatcagtattaactcttgggatactactggctttgtgtgtcttccctttgaggcaacagtacatgtgatagaggtacaattcgttggatttttgttaatgtatttatttcattccagtttgatttattttaattgttgacacttaagttgtcagactgtagacatgctttatttatgatatatttcagcttaaagttatgttattatatgtggatgtaaatatagatttggtgtttta

SEQ ID NO: 6082 - DNA, 1083 bp, Cricetulus griseus
gctctatccgctccatcacagccactgtggactcacatgtcgccataaccactgagctcccactccataagctttgcagcttaaatgcatcggaagcctttgatgatccaactaatgggaaccatgctggtgtaggaactcttcctgggggtgaaacgccccctggagaactgaattctggagtgacggtttctccctcttcagatcctctggatctgactcacatacatttcaaccaatgtcaagccagggagggctctcttatctgtgtaagtaaaaggactacttgacaggaactggtcaggattcttcactattttggtccttggttaacctttaagaaagcaatcaccatgaacaaaaaaggtcgccattccggggattctggttcctgatttaatagcatttaacctgaaagcacagctagtggccgtggcttccaatacgtgtaacatcattcttatctattcagtccttccgtcttctatgccaaacattcagcaaattcagttagagagtaacgaaagaccaaaaggcatatgtttcttgacagacaaattattattaatttctgtagggaaaccaaagcccaccgagacagcattccttccttcctcagagtctgatcagtactctgttcgcctggtatttagtagaaataaacgttggcaagagaaacttactggaatgcctactgaaagtcagggtgcttactctgccttcaacgtcctgttgaatagagcaaacagagaaaagttccttgagagcctttccccagggtggagtcccctgagccaaggattcttgctaacagatgacgccagtactctgagtgggaggtccagaagagcccttattcaagagattagaagtcccttgtcccctccatccagtgcctccattgtacaggaaacccctcacgggccctcctggcttcagccagcattacctacacctagccgggacaccagaccacaccaacaccccagaaccgaatttacctccaaagggagaactcacaacaagaaacgtgtgtgtgtgtgtgtgtgtgtgtgtgtgtgtgtgtgtgtgtgtgaggggggg

SEQ ID NO: 6083 - DNA, 1083 bp, Cricetulus griseus
  modified_base (1072)..(1072): a, c, t, g, unknown or other
cagcctggctcgtgtttgctgctgccggtcttatgaaacccgcacgactcatgaaggtcttcgtcactggcccgtttccccccgagggcatggctgctctcgccaaggccgcagactgtgaagtggagcagtggaattcggatgatcccatccccagaaagaaactggaggaaagcgtggcgggggcccatggcttgctctgccgtctcactgaccgtgtggaccagaaacttctggatgctgcaggagccaacctcagagtcatcagcaccctatcagtgggggttgaccacttggctttggatgaaatcaagaagcgtgggatccgggtgggctacacgccaggtgtcctgacagatgccaccgctgaacttgccgtctccctgctactcaccacctgccgccggctgccagaggccatagaggaagtgaagaacggcggctgggactcttggaaacccttatggatgtgtggctatggactctcgcagagcactgttggcattgtggggctagggcgcataggtcaggccattgctcgacgactgaaaccatttggtgtccagagatttctctacacggggcgccagcccaggcctcaggaagcagcagaattccaggcagagtttgtgcctattgctcagctggctgcagagtcagacttcattgtggtatcctgctccttgacacctgctaccagggggctctgcagtaaggagttcttccaaaacatgaagaacacagctgtcttcatcaacatcagcagaggagatgtggtaaaccaggacgacctgtatcaggcattaaccagtggtcagcttgcagcagcaggactggatgtgaccactccggaaccactgcctccaagccacccactgctaaccctgaagaactgtgtgatcctgccccacatcggcagtgctacctacaaaactcgcaacaccatggccttgctggcagctaacaacttgctggctggcctaagaggggagacgatgcccagtgaactcaagctgtagaggggctttcatgggctggagacatcttgctaaacaacatctgataaaaaaanaaaaaaaaaaa

SEQ ID NO: 6084 - DNA, 1083 bp, Cricetulus griseus
ggcgtgggtttgggaccatgagctggattccgtttaagatcgggcagcccaagaaacagattgttcccaaaactgtggagagagactttgagagggagtatggaaagctgcagcagctggaagagcaaaccaagcgcctgcagaaggacatgaagaaaagtaccgatgccgacctggccatgtccaaatctgctgtgaagatatccctggacttactctccaacccactgtgtgaacaggaccaggactttctgaacatggtgacagccctagacacagctatgaaacggatggatgccttcaaccaggagaaggtgaaccagatccaaaagacagtgattgaacccctgaaaaagtttggcagtgtattcccgagcctcaacatggcagtgaaacggcgggagcaggccttgcaagactacaggaggctgcaggccaaggtggagaagtacgaggaaaaggagaagactggcccagtgctggccaagctccaccaggcccgagaagagctgcggcctgtacgggaagactttgaggccaagaacaaacaactcttggacgagatgccacggttctatggcagccgacttgactacttccagcccagctttgagtccctgatccgggcacaggttgtatacttctcagaaatgcataagatctttggagacctcacccagcagcttgaccagccaggccactcagatgagcagcgagagcgggaaaacgaggccaaactaagtgagctccgagccctctccattgtggctgatgactgagcccctgtccctcaggagtcctcagactccttgggatacagatgacacctctatagtctttgctcttagcaggcatggattcatgggcctcccagtggcctgccagttggggacaggtggccactattctaccttgccagtcctctgacttaaatgtctccatttccttgagcctgatactgggatccttacaggctgttgtttcccctgcccaatgctaataagcaatgtagaaaaaccccaggggcctttttactcccagaaccgtccagagtgcactatagtgtctggccagcaggagcct

SEQ ID NO: 6085 - DNA, 1082 bp, Cricetulus griseus
agagcgtgcaagatggctgcgcccatggagctcttctgctgggctgggggctgggggctgccgtctgtggacctggacagtctggctgtgctgacctatgtcagatttacagccgcaccactgaaaatacacaagatcagcaatccttggcagagcccttcaggaactctgcctgcccttcgaaccagcactggagaggtgatctcagtagcacagaagatcatcacccatcttcgtaaagagaagtataacgctgattatgatctgtcagctcggcaaggagcagataccctagccttcatgtctctgctggaagagaaactactccctgtgctaatacatactttttggatagatgccaagaactatgtggaagtaacccggaagtggtatgcagaggctatgccctttcccctcaacttcttcctgcctggccgcatgcaacgccggtacatggagcggctacagctgctgtgtggcgagcacaaatcagagagtgaggaagaactagagaaagagttgtatcaagaggctcgggagtgcctaacccttctctctcagcgcctgggttctcagaagttcttctttggcaatgcccctgcctccctggatgcctttgtttttagccatttggtcctgctgctgcaggcaaagctgcccagtgggaagctgcaggcccaccttcgtgggctgcacaacctctgtgtctactgtacccacatccttaacctctactttccccgggatggagctgaggtgccacctccacagccgacaccagcaggccctgagactgacgaggagccgtaccggcgacggaaccagattctgtctgtgctggcagggctagcagccatggtgggctatgccttgctcagtggcattgtttctatccaccgggcaacccccactcggaccccaagcacccgggccttgggcatgactgaggaggatgaagaagaatgatgtattcgtgctcttaggactgatactgtcatgcattccagatgcccctttgtctccccattgttggagcagccaaaaatggggtgctatccctagaataaaactatttacactaa

SEQ ID NO: 6086 - DNA, 1082 bp, Cricetulus griseus
ggaagccggtgctgctgggcctccgcgacgcgccggtgcaggactgtcccccggggcccctccgattggaccacgagcaggctgggcggcgtgccggacgccctgccggccgttgccgccccggagccgcgctgtgacagctgcgcgtacccgctggcgctcgtcgtgcaggtgtactgcccgctcgaaggctcccccttccaccggctcatccacgtgttcgcctgcgcccgccccggctgcggaaaccgcgggacgcgctgctggaaggtgttgcgctcccagtgcctgcaagtgccagagaaagagactcagaacggccaggaacagggtcagggccttgcagctgagacctggtgtgaaggctcccaggactggggaaatgacagcaaggaggcgcctccaccacccccctcagacttgggaactgattgtaacagtgtcagaactggcgactgggctgcacagctccaggctctccacctgcaggacaccagtgcctcaattccagccctactacatctgtgtcgccaacgaggatgactacaggaaacctgcaggtcttgatcacgcccagagccttctgcaggactacaagcagagagaaggggttgacctggagcacctgctttccctgtgttctgctggtgatggggatgaaaaatatgagaagactaatattagaggtggagatcagacgttttacaagttcatgaagaaaattgcggcctgtcaggagcagattctgaggtattcatggagtggagagcccctcttttttacctgtcccacattggaagtctcggagatcccagcctgcagtggctgcggaggccacaggacctttgagtttcagcttatgccagcactggttagcatgctcagcagtgccgatctaaatcttgttgtggaatttggaacggttcttgttttcacatgtgagcagagctgctggcctgagactcaggagactcccatggaagaattcagtattgtacaagaagacccagatgtaagttttttttaagttagaacactttctcttatttatacaaaattaaaaataaattttcacactcaaa

SEQ ID NO: 6087 - DNA, 1082 bp, Cricetulus griseus
ggggaagggctgagcgaatcgctgaggctagcgggccgggcgggcgtcctcggccactatgagctgcacgatcgagaagatcctgaccgacgccaagacgctgctggagcggctgcgcgagcacgatgcggcggccgagtcgttggtggaccagtcggccgcgctgcaccggcgggtggcggcgatgcgggaggcgggcgccgtgctgcccgagcagtatcaagaggatgcacccgacgtgaaggacatgtctaaatataaacctcacattctgctgtctcaagagaatacccagattagagacttgcagcaggaaaacagagagctgtgggtttccttggaggaacaccaggatgctttggaactcatcatgagcaagtaccggaaacagatgttacagttaatgattgactaaaaagcagtggataccgaaccagttctgaaagctcaccagtcccactctgcagagattgaaagtcagattgacagaatctgtgaaatgggagaagtgatgagaaaagcagttcaggtggatgataatcagttttgcaagattcaggaaaaactagctcaactagagcttgaaaataaggagcttcgagaattactgtccatcagcagtgagtctcttcaggttggaaaggaaaattctgtggatcccgcttcccagcccatcaaataactgaacttctgaatgctggctgcagatggcccgacaaggagaggagtgactgtctctccctaagatgtgtccattcaagtgtcctgctgcagacttgattcagtgttgatcagagggatgagctagcaattcggaattgccacacacagacacacacacacacacacataccagctttcagtgccctgtgccatataaattctgcctggtgttaatgctttgaaggtaatagagagctagcatattgaatggagaaggaagttcttcactttgtgtgaagatgttaatgtctcttgcagtggatagaagaatttagtgtatgaaattttagtttgaaattatatttgctaataaaaacttctcgggaagatttgctaattttactgaataatgtgtctaa

SEQ ID NO: 6088 - DNA, 1082 bp, Cricetulus griseus
agcgataaggaaaaggttaaagagctgcctacgcttaaggatatggacttcctcaacaagaaccagaaagtatatattggtgaagaagaaaagaaaatatttctggagaagctgaagcgagatgtggagttcctagtgcagctgaagatcatggactacagtcttctgctgggcatccacgacatcatccggggctctgagccggaggaagaggggcccgtgcgggaggacgagtcagagtgggatggggactgtaacctggctggacctcctgctctggtgggctcctatggcacctcccctgagggcattggaggctacattcattcccaccggcccctgggccccaggagagtttgagtccttcatcgatgtctatgccatccggagtgctgagggggccccccagaaggaggtatattttatgggcctcattgacattctgacacagtatgatgccaagaagaaagcagctcatgcagcgaaaaccgtcaagcatggggcgggagcagagatctctactgtccatcctgagcagtacgctaagcgattcttggatttcattgccaacatctttgcctaagagcctgcctgactccgtggtgattgctgctttatgttgaaggtggtgggttctgagagtcttaggggaactggatgtggccactacttctcttccttgctaaattcaggctgcaggctccttccatccaaatcattccatcttggtggataggcttttcctaccagagaaacacactgtcctttcttcccgcgtccgtttttctgcccgctctcccggctcccagtaagccctcttgcttcattagagtgctgttgttgactcccaagtgccttgatctttgaaaattaccttgtttctatgaaatcagaggagctgggggtagggttgtttgccatcttcgggacctgacaagatggacagtggacgtggctccagcactttcactgctaatgtgtctcccagggacagatggccttctctgtcatcttcacttcccacccccagagaggagtcagagccataactcactcaccggatcccttccaaagatagctga

SEQ ID NO: 6089 - DNA, 1081 bp, Cricetulus griseus
aaggaacaactgccagagctggagaagatcgtcaaacaaatctcagaagacgtgaaagcccacagaagaagcacaaggtgctttgcaacagttcaacacaggcgatgagagggcccagaagcgccagccgatccgtggctctgatgaggttttgtttaaggtctactgcatggaccacacctataccaccatccgggtacctgtagctgcctcggtgaaggaagtcatcagtgcagtggctgacaaactcggctcaggggaaggcctggatcatagtcaagatgaactctggaggagaaaaggtggtgctcaaacctaatgatgtttcagtatttacgacgctcaccattaatggacgcctgtttgcctgcccgcgagagcaattcgactcactgactcccttgccagaacaagaaggcccaaccactgggacagtaggaacttttgaactgatgagctcgaaagacttggcataccagatgacaacatatgactgggaactcttcaactgtgtgcatgagctggagctaatctaccacacatttggaaggcataattttaaaaagaccacagcaaacttggatttgttcctgaggagatttaatgaaattcagttttgggttgtcactgagatctgcctttgttcccagctcagcaagcgtgttcagcttttgaaaaagtttatcaagatagcggctcactgcaaggagtacaaaaatctaaattcctttttcgccatcatcatgggactcagtaatgtcgccgtgagccgattggcactaacctgggagaaactgccaagcaaagtttaagaagttctaatgcagagtttgaaagcttaatggatccttccaagaaaccacagggcctacaggctgacagcagctaaactggactcccccccctcactccctttcatcgcccttgcttattaaagatatgacatttactcatgaggggtaacaagacgttcattgacaatctagtaaactttgaaaaaatgcgcatgattgcaaatactgccagaacagtgcggtactgcaggagccagcccttcaatcccgatgccgctcaagctaat

SEQ ID NO: 6090 - DNA, 1081 bp, Cricetulus griseus
gtaaccagccctggccatggccgcgtctttggcggggaagaagatcgtgtttgtgacgggaaatgcaaagaagctggaggaggtcattcagattctaggagataagtttccgtgcactttggtggcacagaaaattgacctgcctgagtaccagggagagccggatgaaatttccatacagaagtgcaaggaggcagctcgccaggtgcagggtcctgtactggtggaggatacctgtctgtgctttaatgctctcggggggctccctggcccctacataaaatggttcctagagaagctaaagcctgaaggtctccaccagctcctggccggctttgaggacaaatcagcctatgcactctgcacgtttgctctcagcactggagacccaagccagccagtgctcctgttcaggggccagacctcgggccagattgtgatgccacgaggctcccgggactttggctgggatccctgctttcagcctgatggatataagcaaacgtatgcagagatgccaaaggctgagaagaacaccatttctcatcgattccgggccctgctcaagctacaagagtacttcagtgtgactgccggtggccactaaggccatgggggaggggaggactggtgcagaactttccaggagacagacactcctggaaagtatttctctgggttgccctttgccggggatccaggcagcttcaacagccaggtatggaagagcggtttgctctgtatagggaattctgggccaattgatactacactcttgcccttggggattcaagagttgcctttggcctggcatagtggtgcatacctttagtcccagaattttggaggcagaggcagatagatctttgtgagttcaaggccagcctggtttacatagtgagttccaggacaaccagagctacatagtgagatgctgtctcaaaaaacaaacaaaaaaacaaataaatgtgtttcttttttgaaaaaaaaaaaaaaaaaaaaaaaaaaaaaaaaaaaaaaaaaaaaaaaaaaaaaaaaaaaaaaaaaaaaaaaaaaaaaaaaaaaaaaaaaaaaaaaaaaa

SEQ ID NO: 6091 - DNA, 1081 bp, Cricetulus griseus
cgtcaggtcccacggagaagccggtggctgaagccatactattttatagcaatcatggagaacattaaagatattacaaaccaagaagaactttggaaaatgaagcctaagagaagtctggaagatgacagttactcgactaagcacacgggagacccacacatgctgaaaaggcccatgctcttgcatttgcagcacaccgtccatgttaatgcgtttgactgcccctccgagcttcagcacacgcaggaattcttcccgaactggcgcttgccaattaaaattgcagcggttatatcctctctgaccttcctgtacactgttctgagggaaatcattcaccctttagtaacttcccatgaacagtatttttatagaattccaatcctggtcattaacaaagtcttgccaatggtttccatcaccctcttggcgctggtttatttgccaggagtgatagcagcagttgtacaactccgcaatggaaccaagtacaagaaattcccgccatggctagacagatggatgctgacacggaagcagttcgggctgctcagcttcttttttgctgtgttgcatgcagtgtacagcctgtcgtacccaatgaggcggtcctacagatacaagctgctcaactgggcgtacaagcaggttcaacaaaacaaagaggatgcctggattgagcatgatgtttggagaatggagatttatgtgtccctggggattgtaggactggccatcctggctctcttggctgtgacatctatcccatctgtgagtgactctttaacatggagagaattccactatatccagagcaaactgggaattgtctctcttcttctgggcacagtacacgctttgatttttgcctggaataaatgggtagatatcaatcagtttgtctggtacatgcctcctactttcatgatagccgttctccttccaactgttgtcctgatatgtaaagttgtgctctccttgccctgcttgaggaggaagatactgaagattcgatgtggttgggaagatcccagcaaagtaaacaggatggaggcggcctcccggctgtagaattact

SEQ ID NO: 6092 - DNA, 1081 bp, Cricetulus griseus
cgaccccgctgcagtccggccagcctttcaagttctcagtcctggaaatctgtgaccggatcaaagaggaattccagtttctccaagctcagtaccacagcctcaaactggagtgtagaaaagctggccagcgagaagacagagaaaggcactatgtgatgcacctgtccccccaggtcagcagctctgtcgtgtacggacgctcacccctgatggcatttgagtcacaccctcatctccggggctcatctatcaccctgcctggcatccccggggcaaagccggcctattccttccatgtgtctgcggacggccagatgcagccggtgcccttcccatcggatgccctggtgggcacgggtatcccccgccacgcgcggcagctgcacacgctgacccatggcgaggtggtgtgcgctgtcaccatcagcggctccacacagcacgtttacacgggcggcaaaggctgtgtgaaggtgtgggacgtgagccagccgggcagcaagacacccgtggctcagctggattgcctgaaccgcgacaactacatacgctcctgcaagctgctgcctgatgggcagagcctgatcgtgggtggtgaagccagcaccctgtccatctgggacctggcggcacccacaccgcgcatcaaggctgagctgacctcaatccgccccggcctgctatgcgctggctgtcacgccccgacgctaaggtctgcttctcctgcacagatggggctagctgcatagacatatcggactacgggacccggctgtggactgggggcttggacaacactgtgcgctgctgggacctgcgtgagggccgtcaacttcagcagcatgacttcagttcccagattttctcgctgggtcactgtcccaaccaggactggctggccgttgggatggagagcagtcacgtggaagtcctgcacgttggaaagcctgagaagtaccagctgcgtctgcacgagagctgtgtgctatcgctcaaattcgcttcctgtggacgctggtttgtgagcacaggcaaggacaacttgcttaatgcctggaggacacccgtacgggccagc

SEQ ID NO: 6093 - DNA, 1081 bp, Cricetulus griseus
gtggcgcctgcgcgcgctgggccggctgggctggggccgtggcggctcgtgccgggtgatgctaggcgtatccctgggctccaggctgttgcggggcgtgggtggcaggcacgggcagttcggggcgcgaggtgtcagcgaaagtggcgcagccatggcggcaggggagagcatggctcagcggatggtctgggtggacctggagatgacaggattggacattgagaaggatcagattatcgagatggcctgtctgataactgactctgatcttaacattttggctgaaggtcccaacctgattatcaaacagccggatgagttgctggacagcatgtcagattggtgcaaggagcatcatgggaagtctggtcttaccaaggcagtgaaggagagtacaattacattgcagcaggcagagtatgaatttctgtcctttgtacgacagcagactcctccggggctctgtccacttgcagggaattcagttcatgcagataagaagtttcttgacaaatacatgccccagttcatgaaacatcttcattataggataattgatgtgagcactgttaaagagctgtgcagacgctggtatccagaggattatgaatttgcaccgaagaaggctgcttctcacagggcactcgatgatattagcgaaagcatcaaagagcttcagttttaccgaaataacatcttcaagaaaaagacagacgaaaagaagaggaaaattatagaaaatggggaaaatgagaagactgtgagttgatgccagttctcaagccgtacagccacctagttctccagaagccactttagtgtctctttcctgctgataactcggcagaacaccttttctaaagaaaaaaaattttttttccagttaactttccatctccagactcctcaagcagacaagacatcactgtttgtttcttctaacctgctgtttccgttatgacacagcaactcttctgtaagcttcaggccacgcctaccccctcagtccatatctgcacttgcttataggccattccttttgtttgaataataaataaagctagttctattgaaatgc

SEQ ID NO: 6094 - DNA, 1081 bp, Cricetulus griseus
gcagcaatgcgggtagtggactaatgcattggaagtatggcttttcctgagccaaagccacgggccccggagctgccgcagaaacggctgaagacgctggactgcggccagggcgcagtgagagcggtgcgatttaatgtggatggcaactactgcctgacctgcggcagcgataaaaccctaaagctgtggaacccgctgcgtgggacgctgctgcggacgtacagtggccacggctacgaagtgctggatgcagccggctcttttgacaacagccatctctgctctggtggtggggacaagacggtggtgctgtgggatgtggcaactggacaggtcgtgcgcaaatttcggggccacgctggaaaggtgaacaccgttcaatttaacgaagaggccacagtcatcctgtctggttctatcgattccagcatccgatgctgggactgccgttctcggaagcctgagccagtgcagacgctagatgaagccagagatggcatatccagtgtaaaggtgtcagaccatgagatcctggcaggctctgtggatggtcgagtgaggcgctatgacctaaggatggggcaggtcttctcagactacgtgggcagccccatcacctgcacctgcttcagccaggatggtcagtgcactctgatatccagcctggactccactttgcggcttctagataaagacacaggggaactgctgggcgagtatgttggccataagaaccagaagtacaagctagactgctgcctgagtgagcgtgacacacatgtggtcagctgctctgaggatgggaaagtgttcttctgggacctggtagagggtgccctggtactggccctgtccgtgggttctagtgtggtacagtcattggcttaccatcccacggaatcctgcctgctgacagccatgggtgtcagcatccagtactggcgagaagagacctatgaggcagagggtggagcaggctgatgcttagggatctgacaccaagccaaaggacccacaccaactcagaagacccaacaaagacaatttattctagagatgctgctgaccaagaagtggg

SEQ ID NO: 6095 - DNA, 1081 bp, Cricetulus griseus
atgccgggtgccgcggagaaagactcggagttgtccgggaggatagagggcttcgtggaggctctgaagcgaggtggcgggcagcgcagctcggaggacatggctcgggagaccctggggctgctgtgcgggctcatcacggaccaccactggagcaacgcgggcgagctgatggagttgattcgcgtagaaggcaggaggatgacggccgctcagccctctgagaccaccgtgggcaacatggtgaggagagtcctcaagatcatccgggaggagtatggcagactgcacgggcgcagtgacgagagcgatcagcaggagtccctgcacaaactcttgacatccggaggcctgagcgaggatttcagcttccattatgccccactaaagtccaacatcattgaggcaattaatgagctgctaatggaactggaaggcacaacggagaacattgcagcccaagctctggagcacatccactccaatgaggtgatcatgaccattggctattctagaacagtagaagccttccttaaagaggcagcccgaaagaggaagttccatgtcattgttgccgagtgtgctcctttctgccagggtcatgaaatggctgtcaatttgtcccaagcaaacattgagacaactgtcatggccgatgctgccatttttgctgttatgtcaagagtcaacaaggtgatcattggtacgaagactatcctggccaacggttccctgagggctgtggcaggaactcacactctggcactggcagcaaaacaccactccaccccactcatcgtgtgtgcacccatgttcaagctttctccacagtttcccagtgaagaagattcatttcacaagtttgtggctcctgaagaagtccttcctttcacagaaggggacattctggagaaggtcagtgtttattgtcctgtgttcgactacgtgccccccgacctcattaccctctttatctccaacattggcgggaatgcaccgtcctacatctaccgcctgatgagcgagctctaccatcctgatgaccacgtcctctgacactgcctgtccagagcggaaccag

SEQ ID NO: 6096 - DNA, 1080 bp, Cricetulus griseus
cgcgccatggaggccgggggctgggtgctcggcggcgaattcgaggactccgtgttcgagcagaggccggagcggcggcccgagccgcccgcgccccacggcgccaagctgtgcgagccgcagtggttttatggagagacggcaagcagtgatgacatggaagttctcactctcaagaagttccgaggggacctggcctacagacgacaggaatacgagaaagcgctgcaggagtacgccagtatctctgaacagttgccatctaccaattttgctatgaaaagggatgtccaagaaggccaggctcggtgtctggctcacctggggagacacgaggaagcgctggagatcgcagcaaacttggaaactaagcaaccaacacggaccatctcaccacagtgctgtacctccacttggctgtcttttcaagtttgcagagcttggagaagacaattctgtgcttgcaaaactcatttccctgcatcctctgaacccttggagctggtggagattggcagaggcgtacctgagtccagggccaggcctgccagcattgtgtacgtcatctcggggacagacgagtgtcacctcaagtaacaaagacatcagttcctccattgtacattctggaacagactgtcttttgtgtttcccagcaaccttgcctgagatggaggcccggctgaaagcctgtgcctgtctgattcgagccaggctcttgcttcagctcacccagtctcagcaaacctcgtttgctttggagaggaacttaaggactcagcaggagattgcagagaaagtgaaggagctcagcctccctgaaggcgctgtgctgttggtggaggaggctatgggggaagatattaccccagaaaaataagagatgaagttcattcagaggtgaagtgtgttggcccgaagccctgactaccttggtgactgcgtcctccagagaatttgaagacaagtggttcagaaagatcaaagaccatttctgtcccttggaaaatcagttccacatggagatacagatcatggcttaagaaaattgtttatacaaaaaaaaaaaaaaaaaaaaaa

SEQ ID NO: 6097 - DNA, 1080 bp, Cricetulus griseus
gtgaaattgggcagattgccaaagcttattttttctagcccaacgaaaatttttacaattttgggcttttttcttacttacaatggcttccattcacaaattactgattggtacttatatccatagaaacttcctaaagccaagggctgccttgcacccatttatgggtattcagtttgtagactattcttccagtcatccgcagaaacaagtggctcctgctgacagagtctcccagcagaggaagactgaagagggtgtacaagaggatcgccacaaagaagccgctttggatgtaacttcccctgacaatgaacccgaagttagttttgacaaagcaattagagatgaagcagtagaacatattaggcgttggaaggatgaaattgtggctcattggaaaggcccagaaggccgcccattacaagaggtcataatggagcaagccaaggttgtctggaagtttcgtagaaaaaaaagatttggagaagtggatggtgacttctgataagacaattggaggcagaagtgaaatcttcttgaaaatagccaagaacaatcaaagtgccctgctctatgggactctgagctccgaggcccctaaagatggagacagtagccagagtggatactgtgcaatgttatccagggttccaaggcgttcttttgagaggaagcagtattatgattggtccctgttcaattctctgtatctccgagtccgtggggatggccggccttggatggtgaatatcaggcaagatacagactttatccagaggaaaaatcagatgtacagttacttcatgttcacccgtggggggccctactggcaggaagtcaagattcctttctccaaatttttcttctcaaatcaaggaaggatacgagatgtccagagcccacttgtacttgacaagatctcttctataggattcaccctggcagataaggtggatggaccattctttctggaaatagattttattggtgtgtttactgatccagcccatacagaagaatttgcttatgagaattctccagctcttagcccaagacttttcaaatattgaactgggg

SEQ ID NO: 6098 - DNA, 1080 bp, Cricetulus griseus
cggccgcgatcggccagccctgggacgtgtcgggctgtcgggtaacttcggtcagtgttgagcgagagaagcaactgtttgagtagtgtttgtacccacgactcagagcagccagcccttaggtcgagcgatcgtcgtggccatggcttatcactcgggatacggagcccacggttccaagcacaggacccgggcagctccagattctcctcctctcttcgatgatacaagtggtggctattccagccacccaggcggatacccagccccaggagctgatgtagccttcagtgtcaaccacctgcttggagacccagtggccaatatggctatggcctatggcagctccatagcatcccaagggaaggacatagtgcacaaagagctgcaccgttttgtctctgtgaacaaactcaagtatttttttgctgtggacacagcctatgtagccaagaagctaggactgttggtcttcccctacacacatcagaactggaaaatgcaatacagtcatgatgtgcctctgcccccacggaaagacctcaatgctcctgacctctatatccccaccatggccttcatcacctatgtgctgctggctgggacggcactgggcattcagaaaaggttctccccagaggtgttgggcctgtgtgccagcacagcactggtgtgggtgttcatggaggtgctggccctgcttctgggcctctacctggccactgtacgcagtgaactgagtaccttccacctcttggcctacagcggttacaaatatgtggggatgatcctcagtgtgatcacagggctgctcttcggcagcgatggctactatgtggccctggcctggacatcatccgcgcttatgtacttcattgtgcgttctttgcggactgcagccttgggccctgacagcatggggggcccagcccctgggcagcgtctccagctctacctgaccctgggagcagctgccttccagcccctcatcatttactggctgaccttccacctggtccggtgatacctggtcccaggtggcactgatttttccatacattgaagatttgatttccttaa

SEQ ID NO: 6099 - DNA, 1080 bp, Cricetulus griseus
ctagccggctgggcagccgccgagctcccgccatggcccggaacacactgtcctcacgtttccgtcgggtggacatcgacgagtttgacgagaacaaattcgttgacgagcaggaagaggcggcggcggcggctggcgagccaggccccgaccccgccgaggtggacgggctcctgcggcaaggggacatgcttcgggcattccatgcagccttgcggaactctccaatcaacaccaagaatcaagctgtgaaggaccgagcccagggtgtagtgctgaaagtactcacaaactttaagagcagtgaaattgagcaggctgtgcagtcactggacagaaatggcattgacctgttaatgaagtacatttataaagggtttgagaagcccacagaaaatagcagtgcagtgttactccagtggcatgaaaaggctttagctgtaggaggactaggctccattataagagttcttacagcaagaaagactagtttaaaaaaaaatcatgttaccttaagaagaattttggatgcccaggctggtgaagaagggactgataatggaccatattcctgaactcccaactatatatttcaggaaacatatctgctgaaatgtattttgcttttaaggtggagggagaaatagtcttattgtttcctaaattctttgcaggattggtgtctctgccttcatttacagagtaacacagaattgacacttgactatcacactgactggccagattatgtcaggtgtacctgtatgcactgtctgtttgaaatggggaggggctatttgggcaggtgcagatccaagggctgctgtgaaaaggagagtttgggttctgaagtgaaaaaacctgagagtttgtacagatacactgtcttcccagagaagacaggctctctagggttcattgtaaagtgcctgctgcatcaataaagctcttggctcattagtctattgattgcggtgtgttctctatatgttaaatggtaagcaaagggatggcaatgaatgacagtctgatggtttggaaagctgatgttgaagggtagaggtgttcctatactgccat

SEQ ID NO: 6100 - DNA, 1080 bp, Cricetulus griseus
atgaccagcgaactagacattttcgtgggcaacacgacccttatagatgaagacgtgtatcgcctctggctggatggttactcagtgaacgatgcggtggctctgcgagtacgctccggaatactggagcagacaggcgccaccgcaggagtgctgcagagcgacaccatggaccactaccgcacctttcacatgcttgagcgactgctgcatgcgccgccgaagctgctacaccagctcatcttccagatccctccctcccgacaggcgctcctcattgagaggtactacacctttgacgaggcctttgttcgggaggtcttgggcaagaagctgtccaagggtaccaagaaagacctggatgacatcagcaccaaaactggaattacactcaagagttgccgtaggcagtttgacaactttaagcgagtcttcaaggtggtggaagaaatgcggggctccctggtggataatatccagcaacacttcctcctctctgaccgcctagccagagattatgcagccatcgtcttttttgccaacaaccgatttgaaacaggaaagaaaaagctacagtacctgagctttggtgactttgccttctgtgctgagcttatgatccagaactggacccttggagccgtcgactcccagatggacgacatggatgtggacttagacaaggagtttctccaagacttgaaggagctcaaagttctagtagctgacaaggaccttctagacttgcataagagcctggtgtgtactgccctccggggaaagctgagtgtcttctctgagatggaaaccaacttcaagaatctgtcccgggggctggtgaatgtggctgccaagctgacccacaataaggacgtcagagacctgtttgtggaccttgtaaagaagcctacagtttgtggaaccctgccgttctgaccactggccactgagtgatgtgcggctcttcctcaaccagtattcactgtctgtccactccctggatggcttccggcaccaggtcctctgggaccgctacatgggtaccctccgtggctgccttctgcgcctctatcatgatta

SEQ ID NO: 6101 - DNA, 1080 bp, Cricetulus griseus
catgggctgccgggcctgcgtccatctggagggatcgggtgccctacaacagggccgctggttcggggctgtcctgagcgggttgtgccttctctccgcgctggtgttgcttgagtggccttgggcgcctgcagagaatgcctggagtgcagcgaggaatgtggctgcaccaaaccctccaggggtgtccactgcccaggcccccagcacactgaccatactggtgccccgaagacgccgatacacgctgacaccagccaggctgcgctggaaccacttcaacctcacatacaggattctctcctttccccggaaccttttaaacccggaagagacaaggcaggactggctgccgcctttcgcatgtggagtgatcgtttccccattccgcttccgtgaacgtggcccctgatcttcccagtgacctccaggataggtttctacccaaccaaccacaccgactgcttggtctctgctctgcaccactgctttgatggtcccacaggggaactggcccatgctttcttcccaccccatggtggcattcactttgatgacagcgagtactgggtcttaggccccacacgctacagctggaagaaaggcgtatggctcacagacctggtgcacgtggcggcccatgagattggccatgcactggggctgatgcactcacagcaacacgaagcactcatgcacatcaatgccacactgcgaggctggaaggcactgtcccaggatgagctgtggggattacaccgactctacggctgcctggaccggctatttagatgtacatcctgggcacgaaagggattttgtgacacccaccagaggctcatgaagaggctctgtcccagaagctgtgacttctgctatgaattcccattccctactgtggccaccaccacaccacccaccagaatgaaaacaaggttagtgaaagaagggaggaacatgaccttccactgtgggcagaagatcctacataagaaaggcaaagtatactggtacaaggaccaggagcccctggaattctcctaccctggctatctggacctgggtgaggcacagctgagc

SEQ ID NO: 6102 - DNA, 1079 bp, Cricetulus griseus
  modified_base (12)..(12): a, c, t, g, unknown or other
  modified_base (53)..(53): a, c, t, g, unknown or other
  modified_base (1072)..(1072): a, c, t, g, unknown or other
tctgcagaagangttttacagaaaatagaaaatggacagagttttagatggcngttttcaagttattaagctacttagcagaagacctagaaattggtcccagtgtgtagaattagcaagactaaagtttgaaaaatatttttaaccataaggctctacagcttcttcactgttttcctcttgaaacacgattaaaagatggcagttgttttggcaatcaccaaaaaggccaccttctccaataaaatttgatttaaatgaaactttgcatctcagttttcttcagagtgctgcaaaactatatgctatggtatattgcattccattttcagaaaaggacttatcagtggataccctcatggatattctttcagaagttaaaattcaggaattcaaaccttccaacaaggttgttcaaacagatgaaactgcaaggaaatctactgctgcagtttctggcttggttgccttggaaatgatcaaagtagctggtggctatccctttgaagcttataaaaactagtttccttaatttagccattccaataatagtgtttacagagacatctgaagtaagaaaaactgaaatcagagatggaatatcatttacaatttgggacaggtggactgtacatggaaatgaagattttaccctctcagatttcataaatgctgttaaagagaaatatggaattgagccgacaatggtggtacagggagtcaaaatgctttacgttcctataatgccgggtcatgcaaaaaggttaaagttaacaatgcataaacttgtgaagccttccactgagaagaagtatgtggatcttactgtgtcgtttgccccagacactgatggagatgaagatttgccaggacctccagtaagatactacttcagtgatgacactgatgaataaaagttgtcatagacttactccaggactactttatttaaactagtcatagtatataagactgaaaagttttataaagggaatatccttagaaatagatgaaaatttaaaattaatactagtagagttggcttttttttcctttccagcaatgtaatggngaaaaaa

SEQ ID NO: 6103 - DNA, 1079 bp, Cricetulus griseus
gacaccaagaagccctgaaattgttctgtgaggtggatgaagaagccatctgtgtggtgtgccgagaatccaggagccacaaacagcatagtgtggtgccattggaagaggtggtgcaggagtacaaggccaagctccaaggtcacgtggagccacttaggaagcacctagaggctgtgcagaagatgaaggccaaggaggagaggcgggtgacagagctgaagagtcagatgaagtcagaactggcagctgtggcctcagagtttgggcgactaacacggtttctggctgaagagcaggcaggactagagcggcgccttcgagagatgcatgaagctcagttgggacgggcaggagcagcagcgaaccaccttgaggagcaagctgcccagctaagccgcctgcttgctgaagcccaagaacggagccaagggttctataatgcggataccctagcccacgtccacaccttctcagctgccttccttggcgagcgtgtcttcccattctttcgggtgctttccaagggcacccgcatcaagctctgcccttgatcagcctgccacccgcaggggcccctccagtcactgctggggggcgggtggtggtggatgattgcccactatgtttgtgagctcaggctcctcccactgtttgttactgagttgctttctgctcctccttgaacccaggctgcttcccccaataggagcctaaaacaacttctagacttcctccagctcagtcttctctcacctactttgtctgacaggtctgcatgggtccctgataataagaacagctgcctgatcttccctccctgtctgcctagctcagtccatgctttggtgcaagctccagttaagggatttggaagcttttgtggggaggcaggctgggcaaaagggtagagctgtgtaaagtctacttttcttggggaagtaggaactcttaaagctttccttccgcccccaatttctacctccatagactggccagaatttagcttcagtaagatctggaatggtcaacgtgacactgcacaccattatatcacccaataaattattttctctctg

SEQ ID NO: 6104 - DNA, 1079 bp, Cricetulus griseus
aggctttcttggttgagggcggaagtgaccgctgcgtggtgccggcggcgcctaaagatcacacacgcgtgtgggagcggcgctcatcatgctccgtcgggaggctcgcctgcgccgcgagtacctgtaccgcaaggcccgggaggatgcacagcgatccattcaggagaagaaggagcgagtcaagcgtgctcttgaagaaaaccagttgattcccactgagctacgccgggaggcgctagccttacaggggtccctggagttcgatgatgctggcggtgaaggtgtgaccagccatgtagatgatgaatatcgatgggctggggttgaggatcctaagatcatgatcactacctctcgagaccccagttctcgtctgaagatgtttgcaaaggaactgaagctggtgttcccaggtgcccagcgcatgaaccgaggtcggcatgaggttggagcactggtgcgagcgtgcaaagccaatggggtcactgacctcttggttgtccatgagcatcgaggcacacctgtggggctcattgtcagccatctgcccttcggtcctactgcctacttcacactgtgcaatgtggttatgcggcatgacatccctgacctgggcaccatgtcagaggctaagcctcacctcatcactcacggctttacctcacggttgggcaagcgggtgtctgatatccttcgttacctatttcctgtgccaaaagatgacagccatcgggtcatcacctttgcaaaccaggacgactacatttcattccggcaccatgtttacaagaagacagaccaccgcaatgtggagctgactgaagttgggcctcgatttgagctcaagttatacatgattcgccttggcacgctggagcaggaggccacagcagacgtagaatggcgctggcacccctataccaacactgcccgcaagagggtcttcctgagcgccgagtgagctgtgagctcctggccagtcaggatgcagacttggactcttggggcaagaactggtcacagacagatttactaatcctaagtggaaactggaaggatttaaataaaccctctgt

SEQ ID NO: 6105 - DNA, 1079 bp, Cricetulus griseus
gggggatgcgcagggcgacaacgaccgcgatgacccttccggagacctccgcagtgtgctggtcaccagcgtgctcaacctcgagccgctagatgaggatctcttcagaggaaggcattactgggtacccaccacccagcggctctttgggggtcaaattgtgggccaggccctggtggctgcagccaagtctgtgtgtgaagacgtccatgtgcactccctgcactgctactttgtccgggcaggggacccaaaggtgccggtgctgtaccatgtggagcggacgcgaacaggagccagtttttcagtgcgttctgtgaaggctgtgcagcatggccaggccatcttcatctgccaggcctccttccagcagacgcagcccagccccctgcagcaccagttttccatgcccactgtgcccccaccagaagagctgctggaccatgaggccctcattgaccagtatctaagggaccctaacctccaggagaaataccgagtggggctgaaccgaattgctgcccaggaggtacctattgagatcaagctggtgaacccacccaccccgagccagctgcagacactggaacccaaacagatgttctgggtgcgagcccggggctatattggggagggcgacatcaagatgcattgctgtgtggctgcctatatctctgactacgccttcctgggtacagcattgctgccccaccagtccaagtataaagtgaacttcatggtctcgctggaccactccatgtggttccatgccccattccgagccgaccactggatgctctatgagtgtgagagcccctgggctggtggctctcgagggctagtgcatgggcggctgtggcgtcaggatggggtccttgctgtgacctgtgcccaggagggtgtgatccgattgaagcctcgggtatcagcgagtaagctgtagtcaaagataactggcttggcctgggattttaaagaactgtttctactgccattcctgaggcaggggtcacagcagacagctgggctgcctgcccctcatatctaataaagaaactgctaacactggaaaaaaaaaa

SEQ ID NO: 6106 - DNA, 1079 bp, Cricetulus griseus
tcgtgtggagaccaccttgtatctggtgccctgtttcaaagattgtgggccatatggccagtgcctcctgctacgtagacacggctatttgtatgcaggctgcagctgcaaagcaggttggcgtgggtggagctgcacagacaacagcacagcccagactgtgggccagcagagggcagcagcgcttctgcttacactcagcaacctcatgttcctggcccccattgctgtgtcagtgcaccgttccttcctggttgaggcctctgtctacttttataccatgttcttctccacgttctaccatgcctgtgaccagccgggggatgcagtgctgtgcatcctcagctatgacacacttcagtactgcgactttctgggctctggggcagccacctgggtgaccattctttgcatggcccgtctgaagacaatcctgaaacaggtcctgtttgtactaggtatactggtcatggccatgtccttgcagatggatcgcaggggcatctggaacttgatgggaccctgcctctttgcctttgtgatcatggcctccatgtggatgtaccgctgtgggcaccggcgacagtgctatcctacctcgtggcagcgctgggtcttctacatcctgcctggcatctccatggcctctgtaggcattgccatctacacttccatgatgaccagtgaaaattactactacacccatagcatttggcatatcctattggctggttgtgcagctttccttctgccaccacgagaggagcaggctgagtcctgggcttgcttgcagacgttcccctgtcactaccagatctgcaggaatgatcgggatgagttgtacacagtgacatgatatggctggctcaaggacacctgatactctgatgacctcttcagctaggatgggaacaagagaggtgcctatctatccccaaccaggtttccatctgaataaaattgtcctgcgctccttggcttctttctccagaggagaggactcctccaccccaaaatctttgtggctcctgccaatgtcctctgtaggtctcagctgcttgtacctggagaccaccggt

SEQ ID NO: 6107 - DNA, 1078 bp, Cricetulus griseus
gaagtgtcctccaatgaaggtcgcgccttggccgaagagtggggctgccccttcatggagacttctgctaagagtaaaacaatggtggacgaactctttgctgaaattgtgaggcagatgaactatgcagctcagcctgacaaagacgacccatgttgctctgcctgtaacatacaatagcacctgagcatggctgtcctggacaggactcgactaggcttgtagacaacagtcaccttgtctacgccattgctagttttagggtgggtggtgtgaatccacagtgcaccaacgaccctcaggctggatggtcccttgatgcctctgagtccctgtgggtccagtgaccagtctccactttgtcctcggtccttctgtgcaacctgaaggcaccaccatggagctacagggtgatctctttgaagtgatgatggtatggccactgagttaacagaagccactgatgtgtaaattaaattaagaataatcatgagagaaaagccagaagaattcctttgaccactaacaaaatattttgtcttacttaaaaacaaagtaaaggagaaatattttcctacaagagtactgaagtcaggagttgatgggccttctagcccgtgtattccaccaagtaaaacagcgtgcgtgcgtgcatgcgtgtgtgtgtgtgtgtgtgtgtgtgtgtgtgtgtgtgtgtttagtttctcagttttccatcagcagccccaccccccttagcactggttaagctttaattgtctcctcagccaatgagatgttaaagattgggggtccttctgtttaacttgtcattgtgcatctgttaaacctcgatcagggtttctagaatggctgcagtagactttgaacacagacttaccattatggatttggggtttcccagagatacagttcacagttaattgttgaactctaatacaactgaccatttaaaattgaacaacagtttattgttttgtgacaatgtcgagtaaatccgacatttcaattgaaacgtgaattgtagttataactcaatgacaaattacaacagttgtatttggagttaaattatttt

SEQ ID NO: 6108 - DNA, 1078 bp, Cricetulus griseus
ctactacttttccggtcagtgattggcagtttgggtctgggatgtgtcgcttcgccactgcagcgttttattgtaacatgtacgcctccatcatgctcatgactgtcataagcattgaccggttcctggcagtcgtgtaccccatccagtccctgtcctggcgcactctgggcagagctaacttcacttgcctggtcatttgggtgatggccatcatgggggtggtgcctcttctcctcaaggagcagaccacccgggttccagggctcaacatcaccacctgccacgatgtcctcaatgagaccctgctgcagggcttttactcctactacttctcggccttctccgctgtcttctttcttgtgccattgatcatttccacgatatgctacatgtccatcattcggtgtctcagctcctcctcagttgccaaccgcagcaagaagtcccgggctttgttcctgtcgacagccctgccacagagaaggcctacttcgcttacctcctctgcgtctgtgtgagcagcgtgagctgctgcatcgatcccttgatttactactacgcctcctccgagtgccagaggcacctctacggcatcttgtgctgcaaagaaagctccgaccccaacagttacaacagcaccggccagctgatgccgagtaaaatggatacctgctctagtcacctgaataacagcatatacaaaaagctattagcttaggggaggattgctagaaggtcacatagaaaaggttggaaacacacccatgtgccctgggcactctggtggatactgggccccaagcatatttcacataagcaaggcctaacagctaaacagctttggagatctgagtttctgcatcagtagctgtaggttaggataaaaacacagtttaagatgtatatttttaagaaacaaacccttaagtctacaataattagacactatttatttacaaatgttttattaaaaattgcccaaatcagacaggcattgtggcacatgcctttaagcccagcacttgggaggcagaggtaggcagatctttgacaatttattctttatctttattga

SEQ ID NO: 6109 - DNA, 1078 bp, Cricetulus griseus
  modified_base (1069)..(1069): a, c, t, g, unknown or other
tgttggtcaatgcatcaagacatagtagccgagccttttccctataatgtgggataagaagcttatcaagttcttccaacttaagaactggttttgaagctgctcatacccggtatattaagttgaaagaatctcagagcttagttttcatggtacaaaagcatgtgtgataaaaagagagacagaaaggaagagtgaagaaaaaagaagacgaagagacaaggaaaactagttttaggtgatgaaaagccgagctgggacaccggactttccctataattcttaggttacaaacttgagtttcagggaatttcagtcagcaaccggtagagtgaataaatacttggttaccagcctaataatgtgaactgctacacttatttttattctttaagaacacaaagactttatgcagatactttaactataaattaatgtaaaatggtgaatgtttctaaaggagggaaaacagaatcttattcacttatgcaatcaatcagtgaatgatttaaagatgatgctagaagagagctctaaggagagatataaattaagttgcttttagtgatggaatttatagacaggtcgtgttgttccaaaagatgtgaataggagccacaataggaagtttattcagaataaaataaagacttagattagtgagagttataatttgatttcttagactgggggtttaattgaacttcattatatccctgggtaacacacagagccttgggatgaggaaaagccattttggattctgcctgccacaaacagacatattctaaacagtgctactaaagtttagactgttcaaatattttattttctctgacaactactttttatgatgataaacaattaagaccatttaaaatatgggagtacaaatatttttttgaattagattaacttgcaaaaaaccaaatttgcagtacttggattgtttgtagacagacttttggtgtcaatttaaaaccaagataattttatatattctttccaatagaattcatgacagcttctgcagttttcttaaaccacaaaaaatgtcaataaaaaaaanaaaaaaaaa

SEQ ID NO: 6110 - DNA, 1078 bp, Cricetulus griseus
ttgctatggcaacgcagctgccccggctatgtcgctgcaacccgcccctccgtcgcgggtgttcatggaactggttccctgggctaacctgggccgggaaaacaacccgatcccgaccttggagacgcagcccgtcggcagccgttcccacgctgcgaaggcccaccccggagcccgcgaggtccacgtgagcggcgcggccgaggtgtccgccagcccggaccgggcgcaggtgatcgtgcgggtgagcagcacgaaggaggcagccgccgaggccaagaagagtgtgtcccgccgcctggactacatcacgcaaagcctccagcagcagggtctgcagacagaaaatgtaacagtgacaaaggatattcgaagagtagaaaatgcatatcacatggaagccgaggtctgcattacatttactgaatttggaaaaatgcaaaatatttgtaattttctggttgaaaaactagatagctctgttgtcatcagcccgcctgagttctatcacactcagggttctattgaaaatcttcggcggcaagcttgtcttgttgctgttgagaatgcatggcgcaaagctcaagaagtctgtgacctcgttggccaaactctgggaaaacctttactaatcaaagaagaagaaacaaaagaattggaaggccaatttgatgatcaacaggtatccagaatcccaggttcattaactgtacaacaaaaaatcaaaagtgcaacaatacatgcatcttcaaaagtgtttattacttttgaggtaaaagggaaagagaagaaaaaaaagcatctttaaaattccaactaaagcatactctatttgtattttcaaatctgtttttatacattttatagtgcttatttctgtcctgaacatacatgttgtatggtatattgatgctgtataaaatctgccactttttgaacataatcccacagaatacttatgctcactttctagtttccaaaacactctgagaaatactgtgagaaataaatgtaattaaaatgccacttttgtatactgacaatttatacattagaaaataaaattaaccaaaaaacc

SEQ ID NO: 6111 - DNA, 1078 bp, Cricetulus griseus
tggggccccggatcccggctggggtcgggtatgtctgctcatcggaagcacgtgtttactgaaaaagtgctgaagagactttttcctaatgtttcaagtggacaagataaagggacacctcagactcctgctttggagacaccgcccaagaatgtgaccccagaggcagtagagcacacccatggtcacaagctggcagatggtgacattaagatccagcctgaacgtcggctctacactgtgagtttgcctcctccagggtatgttcctagtttgccagaacctaccagctgcgtgaattctgaaaatgcttccagtggtggtgacacagaagagccagatcttcatgaccaaccaaaaagaagaagaagtagaaggcacaaataccaaagaaaaataattaaaaaccccaaaagatgttaggaataaagcaagcagaactagagacaaaagaaagaagctgaaaaagaagctgcagctgaggaggaagaaagcagccggcttagtgacaaagacctttggggtcagtttcatgtatcagcctgagagcagcagtgaggcagatgcagatgatgtcgcaggaggagaggccgaagatgaccaggagggctccgtcacagatgccacccaggaagacattgaacttgccaacagcaaggcagaaggcatcctgagttttctcaagtcaacacaagaaatttatttttatgatgatacttctgaaggcttcgatccagctgtgtgtatagaaacagctgaagagctgcttcacctcctcgagtctcggcgcatgcctgcttccgatgtgctcattctggaccacatgaaaactctgctgcttctgcaggacactgagagactgcagagcgctctggagatgttcccagagcactgtgcaatgccccctgaccatgcaaaagtaatctcagctttttttaattattggatcacacatattcttcctgaaaaacaaaacagcgaataacacacctctaatcccagcactctggaggcagaggcaggcagatctctgtgagttcgagaccagcctggtctacaagagctagttccaggacag

SEQ ID NO: 6112 - DNA, 1076 bp, Cricetulus griseus
cgcgggcgcattggctgcaccaggcgcgggcgctcggtggcactttgaaccgggtgtcccgcggctggaaccggagttgtgctgccccgagccgggccaggtcgctgctgctctggccatggccgaagcgcgcacatctcggtggtactttggggggctggcctcctgcggagccgcctgctgcacgcacccgctagacctgctcaaggtgcacctccagacacaacaggaagtaaagctgcgcatgacgggaatggcgctgcaggtggtgcgaaccgatggcttcctggcgctctacaatggcctgagcgcctcgctgtgtaggcagatgacctactccctgactcggttcgctatctacgagaccatgcgggactacatgaccaaggacagccaggggcctctccccttctacagcaaggtgttgctgggcggcatcagtggtttaactggaggcttcgtggggaccccagcagatttggtcaatgtcaggatgcagaatgacatgaagctgcccctgagccagcgacgcaactactctcatgccctggatggtctgtaccgtgtggcccgtgaagaaggcctgaggaagctcttctcgggtgcaaccatggcatccagccgcggggccctggtcactgtgggccagctgtcctgctatgaccaggccaagcagctggtcctcagcactgggtacctgtctgacaacatcttcactcactttgtctccagtttcattgcaggcggatgtgccacattcctgtgccagcccttggatgtgttaaagacccgcttgatgaactctaagggcgaatatcagggtgttttccactgtgcaatggagaccgcaaagcttggaccacaggccttttacaagggcctctttcctgcgggcatccgtctcatcccccacactgtactcaccttcatgttcctggagcagctccggaagcactttggcatcagagtgccaacctgaccccaccacggacacctgggccatgctcggtcactgtgctgagctccctggaagcgtgggaggggagcagactccccttcttggcctgggcccctgc

SEQ ID NO: 6113 - DNA, 1076 bp, Cricetulus griseus
cacttcgcaacccacctgtgcaccttggcgcagttcgagctgtgtgagagggacacctacttgttgctgctctgggtgcataacttctaccccaatgagattctgaacagccccaaattggcaaaggagctagagggtatcaagcttgggagcctcctgccccctaaacagaccaggttgctggaggctgtgttcctgtccaatgaggtgaccaatgtgaaggctgcactactgaggagctaccagcgcacctttgatgaatttctagagaaaagcaaactgctgagaaattacagggccaacgtcatcgccaacatcaacaactgcctgtccttcgggacatccatggagcagaagtggcagatacctcaggagtccctgaggcacctgttggatcccttgaaagatcttagggctcatggctttgacgccttgctccagggcctgttcgcagaactgaagccactgttcaagaagttcacacagacccgctgggccacgccggtggagaccctggaggaaatcatcagtactgtggacgtcagcctgcctgagttctcagaactgaaggactgtttccgggaggagctcatggaggccgtgcacctgcacctggtaaaagagtacatcatccgactcagcaaacggcgcctggtcctcaagaccgaggagcagcagcagcagctggcgcggcacatcctgaccaatgctgatgtcattcaacatttctgcactcagaatggatcccctgcaacctggctgcaccaggcccttcctaagctcgctgagatcattcgtctacaagattccagtgccattaagattgaggtggccacatatgccaccttgtaccctgacttcagcaaaggccacctgaacgccatcctggccatcaagggaaatctcccaagcagcgaggttaggagtatccggaatatactggacatcaacacagggctgcaggagccttccaggccgctgtttgcacttataaaagttggttagcttttccaaatgtctgatgtgctgatgagcacgcagccagcatcagacacctccctagttggggatgctca

SEQ ID NO: 6114 - DNA, 1076 bp, Cricetulus griseus
  modified_base (1072)..(1072): a, c, t, g, unknown or other
ccaaaactcgcttctatagaagcaagaacagacagatcgtcagacagaaaaggcggcagttacaaggggagagaagcactggatggacgacaagtccctgacctgcgaacaaacccaagtgaccccagagaagcacaggaccagcaaaatgacgggaaagggcggggaaacaaggcagcaaagcgagaccttcctccagccaagacacacctcggtccaagaagatattctaccgtactgtagacctactttccctacgtcaaacaaccccagagatcctagttcctcaagctcaatgtcatcacgaggatcaggaagccgacaaagagagcaagcaaatgtaggtcgaagaaacatggccgaaatgcaagtacttgggggatatgaaagaggagacgataataatgaagaattagaggaaactgaaagctaatggggtagaagcattgtaaatatatactctttgcaactcctggtggtactttattttgtcttcatttcaatcattgaaatatgttcttcttggaaaagtacttttggatgagtagggctaagccagttggacctctggttatctagttattatcagcagtaaacctagcaaaaatcttgttctatttttcaatcaaaagcaactacatatgcctattacaagcaagtggatgttttaatgaccaattgagtaaggacatccctatcttaactggcctaaatttcttctggtcgtgtcagttcaactttcagaagtgccacttaaggaagtttgtttggttttgttttgttttaactttttttttttgggttttttaaaagtcacaatcactaaactttatttgtaaaccattgtaactattaaccttttttgtcttattgaagaaactgttgagaagtgtttttaacctgttttgttaatgctctgtgtttgtatttgcaatatttgaatgatgacagctggtgaagtcatgtacagacttgattgtgggctgtgaaccaaatggttccaatttttcctgaactttaaaaaaaaataaataaataaataaataaataaataaataaaactaacaaaaanaaaa

SEQ ID NO: 6115 - DNA, 1076 bp, Cricetulus griseus
  modified_base (384)..(384): a, c, t, g, unknown or other
ctcttccagagggagacttacaagattgcctgctgagtaaggtggacctgaggcgccagcagatttctcaaagtgtggaggaagtgcagaaagttattcaccacctgacagcggagatcagcctccaggacagtcgattccaagctgtgcctgcctctgacacatacaatggcagcattaaggttttggccccgagcctgttccatgtcaccatcccactgaaaggtcttgcaggatacaaaggaagccagggcacagcgctggcggtactacagcctgcagggcaccaagctcacctgccctttgcgggaccctgagggtctgcagcagtggctggagaccgagcagttcatgaagaccctgtggcagtggcaccaggcagangtaaacatagaggggacattgtgcctgccaaagtcctccaagtgttccggacgctggtggaaaatgcagtgagagcctgtctaccgtggagatccccaccagcctggtctgagaaagcccagtggcctaggtgtttgacgcggtggccgtccccagacagagtggagtgcatcaagtcatttgggttcagtttggtggcccggtccagctatcactggcagctgagtttcccccaggcggaacaggtgttatttgagcagctggttgaggatgggggctgccacaggcggtgctttcaggtcctgaggcagctgaaggaggatgtgtggtgtccagggaagaggccagtcatcaccacccaccacctgcagactgttctcttctggacttgtgagaaatacccacacctcaaggattggcaggtcttccatcaggctctcctgcgcctggtccggaagctgcacagatgtgtgagccagcacttcctgaagcattatttcgtcccaaagagcaacctccttcagtcagccaacccaagtgagctggatgccgtggcccagaaagtggccttcttcctaaagaacccgcaggtcacactgccctgaggtggcccagggagcctgtgcttcattgctttctactgacctcattctcagggcagtctctctgccagctgccaggcccctatgcta

SEQ ID NO: 6116 - DNA, 1075 bp, Cricetulus griseus
gcaacagcagagctcatgggaaagaaattcagcttgaaaatgcaaaggctgctggggaaatgtccatcactgttgatctggaaacagactatgctgagctggttctatatttaggagccatcacacttggggagaagaatagaaagaaaatgcagaaccctctcctcagaaaacgggagagtgaaaatatttctcgagctgtgtgtgctctcctcaactctggaggtggagcgatcaaggttaaaattgaaaatgaaaattatagcttcaacagggatggcctgggactggatttggaagcctctctttgtaaatgtctgccatttgtggggaggcacctagacttcatggagcagggaggatacttttacatctttgtgaaatcttggagtgcagacatctttgggctgccgattggcaccctgagaaccaatttgtacgtaagaacctggtcgtcctcagttgaagtggttgcctctgatgctcttgagttcctccaagaactggaggaaaatggagggagatcctgtgtcagaccagagcctcctgtaggtagagcctgccctggagtagaagaagaaagtctcctagaggacctggctgctgcagttttcaacaagacccaatttcagtaccaggaagacttccccttcaccaggtcaacctatgctgaagtgacattgctttcagggaaacagctgcaaaaacacactaaagagctcatctctcgaacagtttctgcatttgcaaacactgaagggggatatttgttcattggtttggatggaaagaaacaacaaatacttggttttgaagcagatgagagtgatcttgggcacctagagagtgaaatagaggagtgcatccggcagctgcctgtcattcacttctgtgaggagcaggagaagataaagtacacatgcaaattcatcccagtccacagacagggaactgtgtgttcatatgtctgtgcgctcagagtggagagattctgctgtgctgtgtttgctgcagagcccaattcttggcgcgtggaaggcagctgtgtgaagaggtttaccacagaggaatgggt

SEQ ID NO: 6117 - DNA, 1075 bp, Cricetulus griseus
ggcttcggcgcgttacgcaggcgcagatcgtgggccgcgagtcagctgacccaaggggcttctacgtgtgtttaagccgttgattttaggccgttctttcggccgagagtccccgcagcgatggcgagtcagtcgcaaggcatccagcagctgctgcaggccgagaagcgggcggccgagaaggtgtccgaggcccgcaagcggaagaaccggaggctgaagcaagccaaggaagaagcccaggctgagattgaacagtaccgcctgcagagagagaaggagttcaaggccaaggcagctgcggcactggggtcccacggcagttgtagcagtgaggtggagaaggagacccaggagaagatgaccgttctccagcactatttcgagcagaacagggatgaagtcctggataacctcctggcctttgtgtgtgacattcgtccagaaatccatgaaaactaccgaataaatggataggatgtggaagcacctgccctgtgggttggcatgggagatgccctcacagaataggaaacatccacagaactcgagttctgttctggaaggcattaaattatttctctatgctgttgtagattccttcactttttgagagtatcaaatctaactttttgtacaacttagtaagtccctgaagtttcctctttttaacttgtgtgtctttaaggagtatatgttccctgcgtgtctgtgcaagcagcaggcatcactgttgattttcctttattttattaaaaagaaaaaaaaccaaacaaaaattctttgaagaaagaaagggactaaattgtttccttctactttcttaaaggtcaggggcgttatctatgaaaaagtagtaaatagcatttgtaactcttacgaagcagcagccatccttacagtagtccattctagctaatttaggacagtgaatatgctttttcaggctgctttagtgtattgtatcttaaattactagatgctaggacttaagaatgtgttacatgttatttggtgtgcttgtaatcacttaaaagtaaaactttgtcttgcccttcaaaaaaaaaaaaaaaaa

SEQ ID NO: 6118 - DNA, 1075 bp, Cricetulus griseus
aaaactttttttttttttttttttttttttttgctttttttccttcctaaaaaaagagagaagcagttttgaagcatcccacagaaggagttggttctgtattatttgtattaaatacgagcttgcgaaccaatcacttttcatcttggtttttaaaacacaagaggacaatcaatgcaatgcactgccctttctttctcttcctttcttcttttttttttctttgtgtgaaacaacttttattggtgacgttactttgttattgtttaaattagtacagaaacaaaagggtaaaaatagtgttaatataccttgttccatggtggttgttcttttgggggggaggggacgctactcaacaatgaatggaatcaacgctgttggaccagtagtatttattgctttagaggttgcttgttgtacctgtacgtctgtccctttttaaatatgtttcctttttttcctttgaaactgtataaacgtccccccccccgtccttagcataagcatcttatatataacaactcatttgtactaaggtttttaagtttatatataaaatgtgtatattatttttgtttccttttttttttgtttgtttctgtatgaaacccggacgccaccaaaaggacattaatagttacattaagggtcagtagcattaacaagggttgctttaaaagccattatgtaaaacaagacttgaacattagtgagagaatcttcgcagctgtctgagcagccctgggaaccaccccgtttccccccatctcctagtcaattgccctgtgctcttagaacatggactgaccgtgtgcaaaacttttatgtgccaaaattctcagtggctttagcttcctccctcttttttgatgctgtactttctgttcgccatgttttgctgtgatgttacatagatagacttgtgtgtagttttaatgtcacctataacaaaatgtgtttggtagcagaccgtccagaaagcattttaaatgaagaggtctaaacccttaagggccaaaaattctgtatattagattactacttaaatagaaaaagaaaaaaaaaaaaaaaa

SEQ ID NO: 6119 - DNA, 1075 bp, Cricetulus griseus
  modified_base (1068)..(1068): a, c, t, g, unknown or other
ggcagggcccagtccccgctgcgctacctggcaggtcctgtggcagcaggacgccgagccccgcgatgaactgcgctgcaagatccccgccgggcggctgaggcgcgccgctaggccccaccgcaggctcgggcccactggcaaggaggtgcacgctctgaagaggctgagggattctgccaatgccaatgatgtagaaacagtgcagcagctgctggaagatggcacggatccctgcgcagctgatgacaagggccgcacagccctccattttgcttcctgcaatggcaatgaccagattgtgcagcttctcctggatcatggggctgaccctaaccaacaggatggtctaggcaatacaccattgcacctggctgcctgcaccaatcatgtgcctgtcatcaccacactgcttcgaggaggggcccgtgtggatgccttggacagagctggccgcacgcccctacacctggccaagtcaaagctgaacatcctacaggagggccattcccagtgcttggaggctgtccggctggaggtgaagcagatcatccacatgttacgggagtacctggaacgccttgggcggcatgaacagcgggaacggctggatgacctctgtacccgcctccagatgacaagtaccaaagagcaggtggatgaagtgacagacctcttggccagctttacctccctcagtctgcagatgcagagcatggagaagaggtagcaaggaaggctctcccttgctttgtcagcaccctcctgccctccgctctcggtacagggaaagcccaggggactccagttccaccttgcccttgcccttagatgctgagggcagagctgctcccagacagtctgcatcatctctatgggccaggaccacagccctagctcctggtgcacaatgccagcctctgtagccacattccaggcccacttgtgctgtcctagcagacattacctcctcctatggcctccctatgtccttagcaaccccagaaccctatattccttcccagccatggacttattaccatcatctggcttaagctgataaaaaanaaaaaaa

SEQ ID NO: 6120 - DNA, 1074 bp, Cricetulus griseus
agcccttccattccagactttaaattgttacctattacagaaaacattttcccctcagtttaatctgattatacagtattcctgaatctttttgaaactggtgacaacttttaatattaagctcattttggaaacattagacattggaagagagatttccccaagttatgttctagtttcatcaacacagtacagcaaacaccattgccaaagtaatatttccgtgactttcctacttatttaggcttcggtgttcagtctattttacctgtgaaagttcatttttagtttgtaaaacttagagtacatttacaaaattttgtgtttaagcaaggagcaacgtataaatactcaaaactgactgagatcacctctgttaaagggtttgcacttataagaatatattctattgagaccagctctgatagggtccttacctgtcattaaggcggtgctgcactacaagtttggaattccattgaccttttttagaaatttaaaccccttctacttgaaatctcataagaaatatatgtccaaacaagacaagtttaaacagttttaaaaacatataatccacattgtcttgtcagccagcaattgtcatgtaaactatcatttttaagcgtgccactgtgtggattttttcaagtggttagtacattaaaattacctcatactgaggtgtttgcactgaaatataacagtttcagatttcatggttaatggtgtgtgtatgtgtatgtgtgtgggtgtgtgtgtttgtgcacatgtgtgtgtatttttaaaggaaacttgcattttcaatagttaatcctaaatttcataaactgcacttctttactctggtaaactgatgtttttgtgcttattgtgaattgctgtagttaactttgaatgtcaaattttatttagaaatacataaacttaccctttaagataggttcattgtgtatatccaatatttcaagtttcagttttcactatgctaaattaatgaaagtaacatgattataactaattttagaatcagaaaaaaaaaaaaaaaaaaaaaaaaaaaaaaaaaaaaaaaag

SEQ ID NO: 6121 - DNA, 1074 bp, Cricetulus griseus
gaaggaccgatggggtcaggaggtgatttcgggtaacgaggatcctggtggagtggtgttgaaggaccttgggccccccatggtggcccggctggtccgcttctacccccgggctgaccgagtcatgagtgtctgtctgcgggtggagctctatggctgcctctggcgggatggactcctgtcgtacacagcccccgtggggcagaccatgtacttatctgaggtggtgcatctcaacgactccacgtatgatggacacactgctggcgggctgcagtatggcggtttgggccaactggcggatggcgtggtgggtctggatgacttcaggcagagccaggagctgcgggtctggccaggctacgactatgtgggatggagcaaccatagcttccccagtggctacgtggagagtgggaggttttggagttcgaccggctaaggaccttccagaccatcgcaggtccattgtaacaacatgcacactctctggaggttgcactggcggcggctgctcagcaaggctgagcgccgggtgctggaggaggagctgacggttcacctctctgtccctggggacaccatcctcatcaacaaccgcccagggccgcgagagccacccccttaccaggagccccggcctcggggactccaccccattctgctccctgcgtccccaatggctccgcgttgctgctctccaatccagcctaccgcctccttctggccacttacgcccgtccccctcgaggcccgggccccccacaccccgccctgggccaaacccaccaacacccaggcctgcagtgggggactatatggaaccggagaagccgggtgccccgctgctgcccccgcctccccagaaccagcgtcccccactatgccgaggctgacattgtcaccctgcaggcgtcactggggcaacacctatgctgtggaggttgaagatcatgtcccggctgaaggacccgaacatcatccggcttctgggcgtgtgtgtgcaggacgacccgctctgcatgatcacggactacatggagaatggcgacctcaaccagttccttagcgccc

SEQ ID NO: 6122 - DNA, 1074 bp, Cricetulus griseus
cgggaaggttgctctggtcctcggttgctcagcatgtgagtgccatttcccggggtatttctgcctcagcagttcttaggcctgttgcttctagaagaacctgcttgacagacatactgtggtctgcctctgcccaaggaaagtttgcctttagcaccagttcctcattccacacccctgctgtcacacagcatgcaccctattttaagggcacagctgttgtcaatggagagttcaaagagctgagtcttgaagactttaaggggaaatacttggtgcttttcttctaccctttggatttcacatttgtgtgtcctacagaaatcgttgctttcagtgacaaagccaatgaatttcatgatgtaaactgtgaagtagttgcagtttcggtggattcccactttagccatcttgcctggatcaatacaccaaggaagaatggtggcttgggccacatgaacatcacgctcttgtcggatttaaccaagcaaatatccagagactacggagttctgttggaaggtgctggcattgcactcagaggcctcttcattattgatcctaatggtgtcatcaagcacctgagtgtcaatgacctcccagtgggccgcagtgtggaagaaaccctccgtttggtgaaggcgttccagtttgtagagacccatggagaagtctgccctgccaactggacaccagagtcccctacgatcaagccaagtccaacagcttccaaagagtactttgagaaggtccatcagtaggtcctctcatggctggtgtttgcccaaatcttctcatgccagaaaacagccacagctgaattcctttcaacgacctgaagattactatagatggcaaatcctcactgtgcttgtgtttgagtgctgccccacaggctttgttgggtagctgcttccatagctgtccttactagggacttcttgacgactaaccgactcccacagaatgcttggtcccccatttcttagatcatgtcttcagagggttagcattcttctccttagcctgctctgaactttggttactatgcagtagcacattagcaccagcact

SEQ ID NO: 6123 - DNA, 1073 bp, Cricetulus griseus
aggatgtacccaaggtccctgttcctgtgtatcctcagaatactggttccaagaagcccctcctggtcagagtgaaagtgactgtccttgtactgatgcccactactctatgcaccctgaggccagtgttaatggacagatgccacaggcagagatgggacctcctgcattctcttcacctctggttatccccccatctcaggtgtctgaaggtcatggacagttgtcttatcaacctgaacttgagtctgagaatgctgggcagcttcttcatgctgaatatgaagagtcactaagtggcaagaacatgtacccacaaccgtcctttggacctaacccattcttaggtccagttcccatcgcacctcctttctttcctcatgtttggtatggctatccttttcagggggtttgtggaaaatcctgtaatgaggcaaaatattgtcttgccctctgatgataaaggggaactggatttgcccttggagaatctagatctgtctaaggaatgcgactctgtctcagcagtgggtgagtttccagaagccagagttgaaggtgtacattctctctctgaagcaagtgttagcagcaagcatgaaggccgagtggagcagtcatcccagacacgaaagacagacatagcctttggcttcaggctctcctggagtagagggaaagctcatcctcccactcagattctaaacagagagagagaactgggtctgctgaacttgagcctaagaggaccatccagagcctagaaagaaaaccagaagaaagtaaagatacccaagactgctgctgatgtggtaagtggcagacccaagcagttttataatcaaacttacggaaacaggaaatacaaaagtgactggggttcttctggtagaggtggctatcaacatgtgagaggcgaggagtcctggaaagggcagcctaacagaagtcgggattgaaggttttcagtaccatcgaaatgttagaggacgcccatataggggagataggaggagatcagggatggggagatggtcattagggggacaacacccttaatggttagttgttgc

SEQ ID NO: 6124 - DNA, 1073 bp, Cricetulus griseus
gcaggcggggagcaagaaaggggcaggtacagctgggcacagggatcgtgctgctggtagctggggcacaggccccagctcaggctttaggactagcctcttccagcactgagctcaactcggtctagcaaggaagtgggggtcattgaaccccaaaggaggacacagctgcttgccactggatcccaggctggggcccactcagtcccacacccctgctgccactctgcctagaggggctgcagtgcagcagggcctgggccaggtgctctgcagatggaagcagacactctgagccccatggggctgggcctcctgctgctgcctgtcctggtcacgctcctggctgccttgtgtgtgcgctgccgtgagctgccagtctcctatgacagtgcttccacagagagttttggacccacggagcatcctcatcaaaccatctcaaacaggcttcccccgaacaactgccacttcctatcctcttgttacttccttccaccctgaggcagccagacctgcctccccattcccgagactccccacacgccccttggtctcctctgctcccgtgcccagcaaccctggtctccgagacagcgccttctccatggagtcgggtgaggattatgtgaacgtccctgagagcgaggaaagtgcagaagcatctctggatggcagccgggagtacgtgaatgtgtcccaggagctgcagccggtgaccggggctgagctggacaccatgaagtcccaggttgtggaagatgaaggagaagaggagggagtggagggagaggaagcccccgattatgagaatctgcaggaacttaactgagagcctgctgcagccgtctgtcctggaactagccttgctgggagtggctctaaaggagtcccattcgacctctgccttttcaacagtctgagaatctcccctaacttattgtcactttggagtccagtctgtatccccagtattcagcaccttctgatgaagcctgagaatgaatctagttcctgtctgactctgttgtggaataaaggccatatggcccaaagtacaaaaaaaaaaaaaa

SEQ ID NO: 6125 - DNA, 1073 bp, Cricetulus griseus
ctgccatccgagagttattcggctctcgtctgcctggcagcatgaagcatcgcaccctgacctcccagcccggccctcctgggcctctatcccgtgtccacgctctgagctgcgtctggacctggttttagcttctggacagttctttccggtggagggagcaaagccctgcacactggagtggcgttctggcagatcaagtatggacactgactcagaccgaggagcagctctattgcactgtgtaccgaggagacaagagccaggtcggcaggcccaccctagaagagctggaagccttacacaagtactttcagctggatgtcagcctggctcagctgtatagccactgggcttctgtggactcccacttccaaaaagtggctcagaaattccaaggtgtgagactgctaagacaagaccccacggaatgccttttctccttcatctgttcctccaacaacaacattgctcgaatcactggcatggtagaacggctgtgccaggcctttggacctcgactcattcagcttgatgatgtcatttaccatagcttccccagccttgaggccctagctggtccagaggtagaagctcacctcagaaagttgggtctagggtaccgggcccgttatgtatgtgccagcgccaaagccatcctggaagagaaaggcgggctggcttggctgcagcaacttcgaaaagccccgtatgaagaggcccataaggctctctgcactctgccaggggtgggcaccaaggtggctgactgcatctgcttaatggcccttgacaaaccccaggccgtgcctgtggacgtccacgtatggcagatcgccaagcatgactacggctggcactctaccacatcccaagctaagggcccgagccccctggccaataaagaactgggaaactttttccggaatctgtggggaccttatgctggctgggctcaagcagtgctgttcagtgctgatctgcgccaaccaaaccaggctcgggagccgccagcaaagcgcaagaaggggcctaagagtccagaaggctaggtaggacccaggggacaaaag

SEQ ID NO: 6126 - DNA, 1072 bp, Cricetulus griseus
  modified_base (758)..(758): a, c, t, g, unknown or other
ctctttttgctggtgaatgtactgtgtgcagtgctgtcccgccagcgccgggcacagccctgggtccttctgctggtgcgtgtcctggtgagcgactccctcttcgtcatctgtgccctctcgcttgctgcctgcctctgtctcgtcgcccggcgagccccttccactagcatctacttagaggctaaggggaccagcgtgtgccaggcagctgccatagggggtgccatggttctgctctatgccagccgggcctgttacaacctggcagctctggccttggctcctcggagccggctagatgcctttgattatgactggtacaacgtatctgaccaggcagacctggtgaatgacctagggaacaagggctacctggtgtttggcctcatcctcttcgtgtgggaattgctgcccaccacactgctggtgggcttcttcagggtacaccggcccccacaggacctgaccaccagtcgaatcctcaatgggcaggtttttggctcccgttcctacttctttgaccgggctgggcactgtgaggatgagggctgctcctgggagcatagccggagtgagagcaccagcatgtccggcagcctgggctctggcagctggtatggtgccatcgggcgtgagccaggctggggcgggccagccagacgaggaccactcctctgctcttctcccaggtgccaggacctggtggccaccaccacagcctctattccacaccacagacatgatctccttttacnccccttagagcacctaggccccacgctcctccttactccccagcccctgtgccaagtacatctgctgcttcttgcccaggatgccaggggactcgtggctgcttctctcctctggccagctccttgctgctcctactgtagtgagcttgtgccattcccctaagatagggacaaggcccccaggctgccagatggctacagtgccctggcatgacctgccgcctctgcttccacactggagccagctacctctcctgtgcctaccactcaataaacagagtctgtgccctgtcaaaaaaaaaaaaaaaaaaaaa

SEQ ID NO: 6127 - DNA, 1072 bp, Cricetulus griseus
ccgggcagcggacgcgggcggcaggatggttctggacagcgtggcccgcatcgtgaaggtgcagctgcccgcctacctcaagcagctcccggtccccgagagcatcacgggcttcgcccgcctcacagtttcagaatggctccgcctactgcccttccttggtgtacttgcacttcttggctaccttgcagttcgtccattcttcccgaagaagaaacaacagaaggatagcttgattaatctgaaaatacaaaaagaaaatcccaaagtggtgaacgagataaacattgaagatctgtgtcttactaaagcagcttattgtaggtgttggcgctccaagacgtttcctgcctgtgatgggtcccataataagcataatgaattgacaggcgataatgttggtccactcatactgaagaagaaagaagtataacagttgccatttaagattgaaactcttgtaatgttcctttgtttgttgtgcatagaaaagtcttgggaggttttaactatcagtacttgttgaataattatttctgccagctattttcttgctacactactgcatatatttgatactttatattttcagtcctttatatagaaatcaagtggtcaggtctcatcctgcaatcaagagttaatgttatctttcaacattaaagtcagtactttggattttaattaattggcaatttaaagtttgaccataggccaaaagttatttctttgcatatcagtgtttcaacagagtgtatatttttttaaaaattctcccctgttctgtcaaatgtatttttatactgttttgttttgttcatttgaaatagtttgccatcctctggcctttgtggaactctcctgtttttagataaattatgaaaaatattgccatcaagaatttctttgaggcaataaaaccccttgttttatagagatttttgtctcattactatgattatcccaatttcttgagtaaatcagtcataaaaatgttccagtgagaaacaattatttacatcaaaaaaaatatctgaatttgcattaaaatgacacatagttcattgttcaa

SEQ ID NO: 6128 - DNA, 1072 bp, Cricetulus griseus
cccagagccccagaacagtctagaaaagaagccagtatcctgaaattgtcttccttggtacggggtctgccatcccaatgaagatccgaaatgtcagttccacgttaatcaacataagccctgaaaagtctgtgttgctggactgtggagagggcacttttgggcagctgtgccgccattatggacagcaaatagacagagtcctgtgcaacctcactgctgtgtttgtgtcccaccttcacgcagaccaccacacgggcttgctgaatatcttgctgcagagagagcatgcgctggagtctctgggaaaacccttccagcctttgctggtggtggcccctacccagctcaggccctggctgcagcaatatcacaaccagtgccaggagattctgcaccacatcagtatgattcctgccaaatgccttcagaaaggggcagaggtctccagtcccccaattgaaagactaatcagtttgctgttggaaacatgtgacttagaagaatttcagacctgcctggtacggcactgcaaacatgctttcggctgtgcactagtccactcctctggctggaaagtggtctactcgggggataccatgccctgtgaggctctagtccagatggggaaagatgccaacctcctgatacacgaagccactctggaggatggcttggaagaggaagcggtggaaaagacacacagcaccacctcccaggctattaatgtggggatgcggatgaatgccaagttcatcatgctgaaccacttcagtcagcggtacgccaagattcccctcttcagccctgactttaatgagaaagttggcatcgcctttgaccacatgaaggtctgctttgaagacttcccaacagtgcccaagctgattccctcactgaaggccctgttcgcagatgacattgaagagatggtagagcgcaaggagaggcgggagctgcggctggtgcgagcagccctcctggcccagcagcgagacagcccggaggacaccgaaccccagcagaagcgggccctcacggaggagccgcacagcccacagagtaagaagga

SEQ ID NO: 6129 - DNA, 1072 bp, Cricetulus griseus
tgccaagactggtgcattgaggggtgcagcactgggtcccccagtgtcactccctgctcctctcactgaggctgcacccccagcaccccctgctcgtccacccccaggtccaggccccacccctgctccagccaaggcctccccggaggccgaggaggccgcacggtgtgtgcactgccgagcactcttccgccgtcgtgcggatgggcgcggtggtcgctgcgcagaggccccggacccaggtcgcctgctagtgcgtaggctcagctgcctgtggtgcgcggagagcttgctgtaccactgcctgtcggacgccgagggcgacttctcggacccgtgcgcttgtgagccaggggcacccacgccctgctgcgcgctgggctgccctagctgcgctgtccctggcagtgccctgcctctgttgctacgcgcccctgcgcgcctgtcactgggttgcgacacgatgtggctaggatctggtgtcctggatagggcaaccaaggtctccgagccaagacagtcttgatggattatggggcttaggacctacatctggccctaagtacctgggaatgtgcacctaaccaaccattcctcattacccaggcttggacggccttgtggggactcaagggattacgatttgtgtcacttcctttaaattattaactatttattgtatccggaacctgtgattcagctctcccagccagaccctgggatgggagagagaaaacggggagagggaggtgcccctcccatccccactctgtctagctctcatcactgtcagacccaccagagctgagggcggagggactgggggctggggcagcctgggtccccatccccctctctgtgcctcggtctccccccttccactggtgagcggggggaagctccattcttaacctacctcgttttgggaaggggtggaatgggggaccgagagtgctgtatggtgctgtgagatctttgggttaagcagtggggactggggaaggttccctagtctccatctcctctgggactgtgaaaaaaaaaaaaaaaaaaaaaaaaaaaaaaaaaaaaa

SEQ ID NO: 6130 - DNA, 1072 bp, Cricetulus griseus
tgcgtggacggtctaagctgactcgcttctgctgactgggcatggaggatctgaaagaagatgtcaaattcattgtggatgagaccttggactttggagggctgtccccatctgacagtcacgaggaagaagacctaacggtattggtgagcccagagaagccacttcgacggggcctctctcaccgcagtaaccccaatgccgccgtagctcccactctccagggtgtgaggttcagtttgggccccctcagcccggagaagctggaggagatccttgatgaagccaaccgcctggcagctcagctagaggagtgtgccctgcaggaccgggagagtgcaggtgcaggccctgggaagcctagccccagagccaagcccagccctcgaagggagacatttgtcctcaaggacagccctgtccgagatctcctgcccactgtgagctcttggagcacaccatccccaagcagcctaactggactccgaagcagtgataaaaaggggtcagccagggctgttcgggtgacatctggaaagaagccccccagcacgaaaaaggaatcacccacttgcaatctgttccctgcacccagaagcccagcactctctcctcttgcacaatcaagtcttccaccccggcggaaaactgggcccagcgcacggacaacagcaagcccaccagtccctgtcaggccagtcctagctccacagccctcaactagcaactctcaatgttcatcccggctacagggagcagctgctaagtcttccagtcgactaccggttccctcagccatccccaggcccgccactcgaatgccactcactagccggagtgtaccaaaacctggcaaaaagtacccctactccagattctctctcagctcggaaagggcttccaagctctgcagggcacagagctcctgttcccagagaaccaatcttccaactcccagtgcccctcgagcaggaccagtgcccctcgaggcaggatgcagcccctcaggaaagctgcagtccctggacctactaaggtaaaaagcactaccatcttagccatcaaagactgg

SEQ ID NO: 6131 - DNA, 1072 bp, Cricetulus griseus
aggcgtcctcattagagtgacatcgtctttaaaccctgcgtggcaatccctgacgcaccgccgtgatgcccagggaagacagggcgacctggaagtccaactacttccttaagatcatccaacttttggatgattacccaaaatgctttattgtgggagcagacaatgtgggctcaaagcagatgcagcagatccgcatgtcccttcgagggaaggctgtggtgctgatgggcaaaaacaccatgatgcgcaaggccatccgggggcacctggagaacaacccagctctggagaagctgctgccccacatccgggggaatgtgggctttgtgttcaccaaggaggacctcactgaaattagggacatgctgctggccaataaggtgccggctgctgcccgtgctggtgccatcgccccatgtgaggtcactgtgccagcccagaacactggtctggggcccgagaagacctctttcttccaggctttgggcatcaccactaaaatctccaggggcaccattgaaattctaagtgatgtgcagctgataaaaactggagacaaagtaggagccagtgaagccacactgctgaacatgctcaacatctcccccttctcctttgggctgatcatccagcaggtgtttgacaatggcagcatttacaacccagaagtgcttgacatcacagagcagactttgcactcacgcttcctagagggtgtccgaaatgttgccagtgtttgtctgcagattggttacccgactgttgcctcagtgccacactctatcatcaatggttacaagcgggtcctggctttgtctgtggagactgattacaccttcccacttgctgaaaaggtcaaggccttcttggctgatccatctgcatttgcggctgctgctcctgtggctgctgccaccactgctgctcctgctgccgctgcagccccagcgaaggctgaagccaaggaagagtcggaggaatcagatgaggatatgggatttggtctgtttgactgatccctcagagcaacctactcagccagtttaatttgagaaatatggaaataaag

SEQ ID NO: 6132 - DNA, 1072 bp, Cricetulus griseus
gggtgtattctgcgctcgccccacacccgcgaggcccgcgccgcccgacccaacggcggagccgcccagcgcctcccgtggcacccgctccctcctcgctggggcgggacgtggcccgacggctccggtcactatgagtgaaacatctttcaacctaatatcagaaaaatgtgacatcctatccattcttcgggatcatccggaaaacagaatttaccagaggaaaattcaggaactcagcaaaagatttacctcaatccgaaagaccaaaggagatgggaactgcttctacagggccttgggctattcctacctggagtctttgctgggcaagagccgagagatcctcaagttcaaagagcgtgtgctacagaccccaaatgaccttctggctgctggctttgaggaacacaagttcagaaacttctttaatgctttttacagtgtggtagagctggtagagaaggacagctcggtgtccagcctgctgaaggtgttcaatgaccagtgctgctcggaccggatcgtgcagttcttgcgcctgctcacatcggccttcatcaggaaccgagctgacttcttccgacatttcattgatgaggagatggacatcaaagacttctgcactcatgaagtggagcccatggccatggagtgtgaccacgtccagatcacagctctgtcgcaggcactgaacattgctctgcaggtggagtatgtggatgagatggacacagctctgaaccaccacgtgttccctgaggctgccaccccttccgtttatctgctctataaaacatcccactacaacatcctttatgcagccgaaaaaacactactaattttaggccatgccggagcctgtcatctaatggactgcattctgaatggaacattctgccttggcaattttttaattgatttagacaactagaaacatacagccttttgggtaaagccactgaactgagacctgtgcccactatggactgtcatgacttaataggaattttagtatttattttgatagatgatgtaatgcctgctaactctggaccagaaagccaggaac

SEQ ID NO: 6133 - DNA, 1071 bp, Cricetulus griseus
tggaaggctgcagctcgggccagcaggcagctccaattgttgcttgaagagcaagctcggactgcggtgtgggacgactgtgccttggtctccccaggtggagggaggaccaggccaatggctgctgctcacgatgtggagctggagagtgtgaatctgaacattgagagagagggaaaggcagagctggaggaggaggagaagacgagagaggacagggaagggaaagacttccccagaagccgaaaggtccacagcattgtctcaaagtggatgcttccggagccagtccgaagaacatacttggagagagccaactgcctcccgccaccactgttcatcatctccatcagcatggctgagctggccgtgtttgtttattatgctgtgtggaagcctcagaagcagtggatcactctggacacggggatcttggaaagtcccttcacttaccgccctgacaagagggaagaagcctggaggtttatctcatacatgctggtccacgctggagtccagcacatcatggggaatcttttaattcagctcgttctgggtattcccttggaaatggtccacaaaggcctcggagtggggctggtgtacctggcaggagtgcttgcaggttcccttgccagctccatttttgatccccttaagtatcttgtgggtgcttcaggaggagtctacgcattgatgggaggctattttatgaatgtgatcctgaattttcgagaaatgattcctgcctttggaatctttaggctactcatcatcatcctgatagttgcgtcagatatgggatttgctctctacagaaggttctttgtccctgcaaatgggtctccggtgtcctttgcggctcacatcgcaggcggatttgctgggatgtccataggttacactgtgttcagctgctttgacaagacattgctcaaagatcccaggttctggattgcaattgctgcatatgcagcttgtctgttatttgcggtgttttttaacatcttcctgtccccagcaaactgacaagactctaatataagccagttaataaaagtgccacatggg

SEQ ID NO: 6134 - DNA, 1071 bp, Cricetulus griseus
cttccgggccgtgggcctgactcctcagagctgctgtcatggcgggtgctctgtggggcttcttttccatcctcctgctgttactatcgggagatgcccacagctcggaggtgcctggggctgccgccgagggcccgggaggtagtggggtcggcctgggagatcgtttcaagatcgagggacgtgcggttgttccaggggtgaagcctcaggactggatctcggcggcccgagtgctggtagacggagaagagcacgtcggcttccttaagacagatgggagctttgtggttcatgatattccctctggctcttatgtagtggaagttatttctccagcttataagtttgatcctgtccgagtcgatatcacttcaaaaggaaaaatgagagcaagatatgtgaattacatcaaaacatcagaagtggtcagattaccctatcctctccaaatgaaatcttcagggccaccttcctacttcatcaagagggagtcgtggggctggacagactttctgatgaacccaatggttatgatgatggtccttccattattgatatttgtgcttctgcctaaagtggtcaacacaagtgatcctgacatgagacgggagatggagcagtcaatgaacatgttgaattccaaccatgaattgcctgatgtctcagagttcatgacaagactcttctcttcaaaatcctctggcaaatccagtagcggcagcagtaaaacaggcaaaagtggggctggcaaaaggaggtagtcaagcctgcgctgccatcgcacaaacttggctataccaggtggcatccaagtcttgatggtaaaccgtgtgaagcgactactgtaaactgagtcatcctgaaagttgatctcgtacaactgttgtctatgttgattccttaacatatgttttgtacttggtacacaagaaaacccagctttcatcctttgtctgtatgaggtcaatattaatgtcactgaattaattacagtgtcctatagaaaatgacattaataaattatatgaagtactatacattatgtatattaaagaagtcttaatccag

SEQ ID NO: 6135 - DNA, 1071 bp, Cricetulus griseus
tctgagaggcggtgctgaagaatgtgcggacgaacatcctgtcacctgcctagagatgttctcacaagggcctgtgcctatcacgatcgtcagggcaggcagcagctcccgcagtggagggaccccgataagtactgcccctcgtacaacaagagccctcagtcgagcagccccgtgctgctctcccgactgcactttgagaaggatgcagactcatcagagcggataattattcccatgcgatggggcctggttccatcttggttcaaagaaagtgatccttccaagctgcagttcaacactaccaactgtcgtagtgataccataatggagaagcagtcattcaaggttcctctgggaaaaggacgacgctgtgttgttttagcagatggattctacgagtggcagcggtgtcagggaacaagccagaggcaaccatacttcatctattttcctcaaatcaagacagaaaagtcaggtgggaatgacgctgcagacagccctgacagcaaggaaaaggtctgggacaactggaggctgctgacgatggccggcatctttgactgctgggaacctccagagggagagcgcctgtattcctacagcatcatcacagtggattcctgtagaggcttgagcgaaatccacaacaggatgcctgccatactagatggagaagaggcagtctccaaatggctagactttggtgaggtcaccactcaggaagccctgcagctaatccaccccatagacaatatcaccttccatccagtttcttcagtggtgaacaactcccgaaacaacactccggagtgtctggctcctgctggcttggtggtgaagaaggagcccaagacaagtggcagcagtcaaaggatgatgcaatggctggctacaaagtcacccaaaaaagaagctcctgaatcacccaaaaaggatgagtcaggtgtaccccagtggtccagccagtttttacagaagagctcattgcctactaaaagaggtgtcaccagcggcctcctggaccgatggctgaagaagcaggagaaggaggaagaacctgtgaccaag

SEQ ID NO: 6136 - DNA, 1071 bp, Cricetulus griseus
cacactctatgactatgacctcctctccaaggacgagaagattggggagacagtcattgacctggagaacaggctgctgtccaagtttggagctcgctgtgggctcccacagacctactgtgtctctggaccaaaccagtggagagatcaactccgcccttcacaactcctccagctcttctgccagcagcacagggtcaaggcccctgtccacaggacagaccgagtgacatttcaggataaggaatacaccattgaggagatagaggctggaaagacctcccaaacccacacctaggcccagtagaggaacgcctagccctgcatgtccttcagcaacaaggcctagtccctgagcacgtggaatcccggcctctttacagccctctgcagccagacattgagcaggggaagttacagatgtggattgacctatttccaaaggttctgggcaggcctggacctccttttaacatcaccccaaggaaagctagaaggtttttcctgcgttgtattatttggaacacaaaagatgtgatcttagacgacctcagcctcacgggggagaagattgagtgacatctaagaagacagtgaaaggatggtggccttgtgtgacagaggagggtgagaagaagatgctggcgggcaagctggaaatgaccttggagatcgttgcagagagtgaacatgaggaacggcccgctggccagggtcgggatgaacccaacatgaatccgaagctagaggaaccaaggcgccctgatacctctttcctgtggttcacctccccgtacaagaccatgaagttcatcttgtggcgacgcttccggtgtgccatcatcctcttcatcatcctcttcatcctcctgctcttcctgggcatctttgtctatgccttcccgaactatgctgccatgaagctggtgaagccctttagctgaagactctacttggagaaggggtcacaagctgcttcctggccccaggactggctgctcctcctttcccatggggcctggtggtcttgcacatgctcactgagttcttgggatttaccctatttttcat

SEQ ID NO: 6137 - DNA, 1071 bp, Cricetulus griseus
gctccatgaataacttaaacgaccccccaaattggaacattcggcccaatcacagggctgatggtggcgatggaagcaagtggaattatgctctgttggtgccaatgctgggattggcagcatttcgttggatttggtctagggaatcccaaaaagaaatagaaaaagcaagagaagcatgtcatcagagaacaattgctttccaacaggatcttgaagctaaataccatgctgtgatctcagaacatcggcgtgcagttgctcagctgtctttggaactagaaaaggagcaaaatagaacaactagttttcgagaagcccttatttctcagggccgaaagctggcagaagaaaggaagcttcttgaacaggaacgagctcagataaagcaagaaaaaagccagttgcagcctcttagaagtgtctatctgagctgcctggaaggagaggacgactggcagaggagagccaagcttgtgctgaaggaggtgggagaggctctagtggaacgccagaatatctactgcagcctgatccttccccgaactacaaggctagagctggagaagaacttactggtgcgctcgtctgttgatccagtggctgctgacctagagatggcagctggcttatctgacatatttaagtatgataagcattgtggagatgtctggaacaccaacaaacataaaaatgggaagctcatgtggatgtatctcaaatattgggaactacttgttgaacttaaaaagtttcagaaagtagagaaagtcatactacaaaaataagaatgaaatgaaacttaagtccagatgggggccattcaccatggcaatcaatctgcattctgggctctctgatatttactctgttcctttgccaccaggtgtgacttagtgcagctgccctttgtgagaactcaagtctttccaccctttgaacagtgcagtagggacttaggtttttcaagacagggtttctctgtttaactgccctggctgtcctggaactcattctgtggtacaggctggctttgaacttaaaagatccacctgcctctgcctcccaagt

SEQ ID NO: 6138 - DNA, 1071 bp, Cricetulus griseus
cgggcacgcgcacgccgcgtctacgtcgtcgtgagacgaagtcgcgccgcttggtccagggggcggggctgccaggcagagtgcacaaactactcggtgaagagagaattctactggaaggaatggctgcctcctcctcctcatcttcagctggcggggtcagtgggagttctgtcaccggatctggcttcagtgtgtcagatctggccccgccacggaaagctctgttcacctaccccaaaggagccggagagatgttagaagatggctctgagaggttcctctgtgagtcggtgtttagctatcaagtagcgtccacgcttaaacaggtgaagcacgatcagcaagttgctcggatggaaaaactggctggcttggtggaagagctggaggctgatgagtggcggtttaaacctatcgagcagctgctggggttcacaccctcttccggttgatgtcgcctgcatggtggcccctagggcacagccacccagagactcacagctgtactgtgagctgcatgtctgaattcacatccattgttgctttctctgtttctattaataggctacaaatgctcatgtgagatgttgcagagacgtttttcacatgcttgtttttaaaaggattgggcagcgctcgggaggcagaggcaggaggatctctatgagttcaaggctagcctgatctgcatagagttacaggacaaacagggccgtgtagacaatggtgtatatcctgtcattcttagagcatccagaagctctcaccagccaaacccaaggtcaggatccatagtctcacagtcgcagcccaaacatttgtcttcacagatgagtgtgacttctgctcagggtctgtccagatgggggaattttaaggtgttctttcctactctattcttagacatttaatagtataaattattttctcacctcttatgatatgctaaatggtgctaccccacccacccatgaactccaaaattgttttttgaatgttgcagcacttgaaaaaaataaagtgacctaattccttttagacccagaagttcttatccagctcactggg

SEQ ID NO: 6139 - DNA, 1071 bp, Cricetulus griseus
cgttgttggggccagcccgagggcccatacgcgtgccccgagtgccgcgagctgtcggcgcagaggaacctgcgacccaaccgcccgctcgccaagatggcagaaatggctcggcgcctgcacccaccgtcgccggtcccgcagggtgtatgcgcggcgcaccgcgagccgctggacaccttctgcggcgacgacctctgcctgctgtgtcccacctgcgagcgctcggagcactgggctcaccgggtacgaccgctgcaggacgcggccgaagacctcaaggggaggctggagaagtcactggagcacttgcggaaacaaatggacgatgcgatgctgttccaagcccaggctagaggaaacctgtgccttgtggcagaagatggtggagagccagcggcagaatgtgctgggtgagtttgagaggctgcgccgcctgttggcagaagaggagcaacagctgctgcagaagctggaggagaggagctggaggtactgcgggttctggatcctggtgttcctggggagtttctataattccactgagcgggccttctccccactacgggaccctcctaagcgtgtaggcatctttctggactatgaagctggtcatctctcattctacagtgacgaatgagtcgctgctgtttatcttccctcgagacccccttcctcacggcacactccgaaccctcttctcacctttgtctagtagtccgacccctactgaccatctgcaggctgataggcgtacctggggacaccactggtccccagtgacccagaccctctacaagaatcccttcacctctcttggttccttgtcctgaccatactgaggcccaggagccagacagtgtcctgtgagcattaggagaagcagtgcctttctgagcacacgtgggaacacaagctctcagtctcagtgacagtaagagtgggagtacactgggctgggctctgtcctcgtggcggggatcctctccaccactgatgtcacttagtgccaaaagccctcaccaaagcactaagtcccatgtgtcaccagcacctctgacttgaggttcc

SEQ ID NO: 6140 - DNA, 1071 bp, Cricetulus griseus
gggggctgctgcgaaggtgtcatggctgctgctgcggagcccagtgcctcaagctgcagcgagaggaacctggagcgaagctccagcccccttctcacccgcgaggtgctctgcgagctctttcgttccctgcacaccctgactgggcagcttaacctcagagatgatgtggtgaaaattacaatcgattggaacaggcttcagagcctctcagcatcccagcctgcattgctccttacagcacttgaacaacacgttttgtatttacagccttttttagcaaaactccagtctttaattaaagagaattcaactgctgttgaagagataagacagacagaaacagagaccaagagtgaactcaatgctaaacatcccattggggacctgcaagatgaaggaaagctcaaagtctgtgacttagatgtgaaaaagacaacaaatccaatttgatccagaagtagttcaaataaaggctggaaaagccgaaattgagagaagaatatctgcatttattgaaagaaaacaagactgaaatcaatgaaaacaacgtcagggaattttgcaatgttattgattgtaatcaagaaaatagttgtgcaaggactgatgccgtctttactccttatcctggatttaaaagtcacgtaaaggtttctagagttgtgaatacatatggaccacagactagacccgaaggaattccagggtcaggtcacaaacctaccggcatgcttcgagactgtggcaaccaggctgtggaagaacgactccagaatattgaggcccacttgcgattgcagacgggtggcccagtaccaagagacatttatcagagaattaaaaagcttgaagataaaatccttgaattggagggcatctctcctgaatattttcaatctgtgaatttctctgggaaaagaagaaaagtccaaccccctcaaaactattcactggctgaactggatgagaaaatcagtgccctcaaacgatccctgctcagaaaatccagagaagcagattctgtggcaactcaccattaattaactttttttttttagtttatactta

SEQ ID NO: 6141 - DNA, 1070 bp, Cricetulus griseus
ctctgcccagctctcctccggcttttccttgagatggcccagaaggagaacacctacccgtggccctacggctcgcagaagtctcattcaggcctgaacaccctgccccagagagtcctgcagaaggagtctgctgtgacatctgcacttgccctcatgaaccggtccaatggccagtccacagctgcccctggccagaagttggctgaaaatgtcagtcggggctccaatgccttcactattgacgactttgagattgggcgtcctctgggcaaaggcaaatttggaaatgtgtacttggctcgggagaaaaaaagtcatttcatcgtggcactcaagatcctcttcaagtctcagattgagaaggagggagtggagcaccagctgcgccgagagatcgaaatccaggcacacctgcaacatcccaacattcttcggctctacaactacttctatgaccggcgtaggatctacttgatactggaatatgccccgaggggggaactctacaaggaactacagaagaacagaactttcgatgagcagcggacagccacgatcatggaggagctgtcggatgcactgatgtactgccacaagaagaaggtgattcacagggacataaaacctgagaacctgctgttaggtctccagggcgaactgaagattgcggactttggctggtctgtgcatgctccctccctgaggaggaagaccatgtgtggcaccctggactatctgcccccagagatgattgaggggcgcatgcataacgaaatggtagacctgtggtgcatcggggtgctctgctatgaactgatggtggggaacccaccctttgagagccctagccacagtgagacataccgtcggattgtcaaggtggacctgaagttccctccttctgtacctgagggggcccaggacctcatctccaagctgctcaagcataaaccctcagatcggctgcccctggcccaggtcgcagctcacccttgggtgcgggcccactctaggagggtactgtctccctctgccctttagactgctttcttcatttttgtctctgt

SEQ ID NO: 6142 - DNA, 1070 bp, Cricetulus griseus
ggcgccccccgagccgcccgagccggggcgcagcccgcgccccccgcgactgacatgatgtttccgcaaagccggcactcgggctcctcccacctcccccagcagctcaagttcaccacctccgactcctgcgaccggatcaaagatgaattccagctgctgcaagcccagtaccacagcctgaagctggagtgcgacaagctggccagtgagaaatcagagatgcagcggcattacgtcatgtactacgagatgtcttatggattgaacattgagatgcataaacaggctgaaatcgtgaagaggctgaatgggatttgcgcccaggttctgccctatttgtcacaggagcatcagcagcaggtcctgggagccatcgagagagccaagcaggtcacggctcccgagctaaactccatcatccgacagcagctccaggctcaccagttgtcccagcttcaggccctggctctgcccttgacaccgcttcccgtggggctccagccgccatcgctccctgcggtcagcgcgggcaccggcctgctgtcactgtcagcgctgggctctcaaacccacctctctaaggaggacaagaacggacacgatggggacactcaccaggaggatgatggcgagaagtcggactagctcctggggaggaggacacaggggagacaggcacagataggtcacggtgttccgagggccacacagcacacagctcggtcactacccaagtttccacccccagtcctggttccggccttcttgctgtgcaccccgggtctaggggactccagagaggtaccccaggctacagggccccacctccacatttacccgggccacagccaccaatcttggccccagaatgtacacaacgcaacgctagctgcccctttccaccctgcacacccagagtctggtcctgaccccttctctcccagcctggtccccttgcccacgaaagaaggggacagagaggaagtgactcgaaggcacggggactgcagtgggggtgggcacccaaaaacttcctttctccccttccccaaataaacgtgagggtt

SEQ ID NO: 6143 - DNA, 1070 bp, Cricetulus griseus
gcggcagacgaggcggaggctgagatcatccagctgctgaagcgagctaagttgagcatcatgaaagatgacccagaagaggcggagctaattttgcatgatgctcttcgccttgcatatcagagtgataacaagaaagccatctcttacacttacgacttgatggccaacttagcatttatacgagggcagcttgaaaatgcagaacaactttttaaagcaacaatgagttacctgcttggaggaggcatgaagcaggaggacaatgcaataatcgagatctctctgaagctggccagtatctatgctgctcagaataaacaggaatttgcccttgctggctatgaattctgcatttcgactctagaggaaaaattgaaagagaaaaggaattagcagaagatattatgtcagtggaagagaaagccaatacctacctcctccttggcatgtgcttagattcttgtgcacgctacctgctcttctccaagcagctatcgcaagcacagaggatgtatgagaaagccctgcagatttgtcaagaaatacaaggagaaagacacccacagaccattgtgctgatgagtgacttggctactactctggatgcacagggccactttgatgacgcctacatatatatgcagagggcatcagatctggcgagagagatcaatcaccctgagctgcatatggtgctcagcaatctggctgccatcttgatccacagagaacgatacacacaagcaaaagagatctaccaggaagcactgaagcaagcagagctgaaaagagatgaggtttctgtacagcacatcagggaagaattggctgagctgtcaagaaaaagtagactttttgacttaattttgttaagctatgtaagttcatttgttgtagggagggtgatttctagtagcccaaaagagtgactgttcttcagtgtctggaccccaagcagtggttcgaatcattgttgaaattcagctttctttaaccccgcctcggtggaggacaagttgtatacactgccacttttgtttctaaatttagtttactttgagaatggg

SEQ ID NO: 6144 - DNA, 1069 bp, Cricetulus griseus
gatggcggcccccaggagctgtggtctatggcgctactgctgccgcgggtggtcgtgttccacgggagactgcaggctcccccggttacatcggtcctgggcccgagccacgcccagtgcgcggctcttgtcccaagagaagcgagccgcggaaacgcacttcgggtttgagactgtgtcggaggaggagaaagggggcaaagtttatcaggtgtttgagagtgtagccaagaagtatgacgtgatgaatgacatgatgagtctcggcatccaccgtgcttggaaagatctgctgatcaagaaaatgcacccactgcctgggacccaactgctcgatgtggctggaggcacaggggacatcgccttccggttccttacttatgtgcaggcacagcatcagagaaaacggaggagacagttacgggcccagcagaatttgtcctgggaagaaattgccaaaaagtaccagaatgaagaggatcccttgggtggttcacttgtcatggtctgtgacatcaacagggagatgctaaaggttgggaagcagaaagccttggaccaaggacacacagctggacttgcctgggtactgggagatgctgaagagctgccctttgatgatgaccaatttgatgtttacaccattgcttttgggatccggaatgtcacacacattgaccgggcactccaggaagcacatcgggtcctaaagccaggaggacggtttctctgtctggaatttagccaagtgaatgatcccctcatatccaggctttatgatctgtacagtttccaggtcatccctgtcattggagaggtcatcgcaggagactggaagtcctatcaataccttgtggaaagtattcggaagttccctaatcaggaagagttcaaggagatgattgaagatgcaggctttcagaaggtgacttatgaaagcctgaccacagggatcgtggccattcattctggcttcaaactctagctcccttctgttgtgcagcatgagccagtcattctgctgaggcctggaactggaagagaatctccctgacgagacagtagctga

SEQ ID NO: 6145 - DNA, 1069 bp, Cricetulus griseus
cgcgcgccgtggcgccccagagccgcgctcgttgggctcccaccccgggtctccggcggggagcaaggcaacatggttgagacgcaacctggaagaccgagatgctcaaacaaaacaactgcagtctgctgtcaccaatgtggagaagcattttggagagctttgccaaatctttgctgcttatgtacggaaaactgccagactgagagacaaagccgatctcctggtgaatgaaatcaacttgtatgcctctaccgagaccccaaatttaaagcagggtctgaaaagctttgctgacgagtttgccaaacttcaagattaccgccaagcagaggttgaaaggcttgaagccaaagtagttgaacctttgaaagcatatggaaccattgtaaaaatgaaacgggatgatctcaaagcaacattaacagcaaggaatcgagaagccaaacagttatcacagttagaaaggacacgccaacgaaacccatctgatcgacatgtaatttcgcaggcagaaactgaattacagagagccacaattgatgctactcgaacaagtcgtcatttggaggaaactattgacaattttgaaaagcagaaaataaaggacataaagaacatattttctgagtttatcacaattgaaatgttatttcatggcaaagctttagaggtcttcactactgcataccaaaatatacaaaagatcgatgaggatgaagatctagaggttttccgaaattctctgtatctaccagattatccatctcgtttagatattgtaagagcaaattcaaagtcacctcttcagagatcagtgtcagctaagtgcacatctggaactggacagatagccaccagtcgaacaagaaaagaccaacaagtagaagatgaagatgatgaagagttagatgtgacagaagatgaaaactaattttaagaaaacttcacatttccattttcatgttaagtgaaatccaggatcactttatactcactcaacagctcaaacttcaaaatgaaatactactatgaaagagggcaggggcggaggtaaaggcagttatgc

SEQ ID NO: 6146 - DNA, 1069 bp, Cricetulus griseus
gcaatggcgcttaccctgagcctcttgtttggcggtcgtgtccgcgccgctgttgctcgctgtgggttcgcgacccagggcgtggggggccctggcctcgtgggccgcgagccggaccccgattccgactgggagccggaggagcgggcgctccaggaggtggagagcactctgaaacggcagaaaaaagcaatgaaattccagaaaattcgaaggcaaatggaggctccaggtgctccacccagaacactgacatgggaagccatagagcagatccggtatttacgtaaggaatttgcagagtcctggtcagttcccaggttggcagaaggctttgatgtcagcaccgatgttatcagaagggttttaaaaagtaagtttgtacccacgttggagcagaaactgaagcaggatcagaaggtcttgaaaaaagctgggtttacgtttctggagatcctgtgaagccactcagtgcaggccattctgtatctgacccactgctgctgccaggaggtgaagtgtcatctaatagccagaatcagagcacattgttaaaagtactagggtcagacactcacagcacagctgcacagaagagacgggaagaaaggactaaaagaatccaaggtttggaagaaagctttgtgcttaccactgcagccgtgggtcatcagagagagcttcagaaacacaccaccagtgattctaaagtcacccaaagagctgacagggataggttgctaagtgttgagaagctggaagagttgaaggctggggagccaggtgaccagaacttcagcagcaaagtagtacagagggggcgtgagttctttgacagcaatgggaacttcctctacagaatttgagtctgggcctggcttttcgagatgctgtgacacagctgggcaagtagatttgaagttgccaacatttctgcatatgatcggctgctttggaagaatcaaggctaggatgtgggtggaggagctatttggctagagtcagacttctgaagtaagcctcattggaaccctgtggctctaaatctcattcatccttgttgcttggt

SEQ ID NO: 6147 - DNA, 1069 bp, Cricetulus griseus
gtctttggcttacatcgactgatagagtttgggaagaagtctgggaaaaaggctggagattggtatggaccagctgtggttgctcacattttaagaaaagcagtagaagaagcaagacatcctgatttacaaggaataactatttatgttgcacaggactgtacagtttacaattctgatgtaattgataaacagactaattcttcgacctctggggatgccagggacaaggctgtcattatcttagttcccgttagacttggtggagaaagaaccaacactgactatctggagtttgtgaagggtgttttaagccttgaatattgtgtaggtattatcggcggcaaacctaaacagtcctattactttgctggatttcaagatgacagtctgatttacatggaccctcattactgccagtcttttgtagatgtcagcataaaggacttccctcttgagacattccactgtccttctcctaaaaagatgtcatttcgaaaaatggatcctagttgtacaataggattttactgtcgaaacgtccaggactttgaaagagcatctgaggaaatcactaagatattgaaaatttcctctaaggagaaatatccattgtttacttttgtaaatggccactccagagactttgattttacgtctactgcagccagtgaagaagagactggatctttagaactacccagtctcctgctgttaatggaagcagagaatgcattgggtttatgtatttggataactaaatggacacgtaaaatcatgtaagcaggattttaaggcaatacttaataatatggttttatagcagctactcattctgcctttttttttttcttttcttttctttttttctttctttctttctttctttccttccttccttccttccttccttcattcctccctccctcactcccttccttccttgagttattaccatgccagggttaataaaaacaaaataactttaaataaaaaacagggaaaacataaaaaaaaaaaaaaaaaaaaaaaaaaaaaaaaaaaaaaaaaaaaaaaaaaaaaaaaaaaa

SEQ ID NO: 6148 - DNA, 1069 bp, Cricetulus griseus
aaactagagctggagcttgtgctgaaagggtcatatgaggacacacagacatttgccctggacacagcctctaccttcagcttccactacttgaggggccaaggcacatggagcaacattttctctgtgaacttgatggatatctggtatgatgttacctctgggaaagactggaagaatgccattgtggatgtccagaactcagaggagtcctcggccttagcaggaacctcctcctatgtggaggcctcatggctgcaacctggaacagccctggccccaggcatttaagggctttctgagtggccggccattccaccagtgcagtgccaacttcctccgtggcctccagctgcaccgggactaccgtaaccagaaagacttctccacctgggcagattgccacctagactaaccacccccaatccagctcgaccccacaggacactcagctctgcctaagggatgctgcctacttcatcaacaacagctgtccctccatgctccgcccaggtcgccaagtggacctcatactctccttcaattactcccaattctcgccctttgaggggctgcagcaatctgagacgtactgcagggctcagggcctgcccttcccccacgtggagcccagccctgaggaccaacgccagccccaggaatgccaccttttctcagatcctacctgccccgaggcacctgttctgctgcacttcccactggtcaatggctcctttagggaccactcagcccctggtgttcggcgcagccctgatgagctcaaggcagggttggtggatctcacaggggaagactccccttacatcctgtacaacatgacttacaaggaggaagattttgaccgtctgcttcagctcactgattacaacattcggaacagccaggacactatcctgcaggccttgaagactgttctgaaacgcagggccccagaggcgaagccatcagggatgtagacctgaggttacttagggacctctaaggctctgatggccatactctgaccctccaccttccaaaggaccgtaactcagcctgcagctgggca

SEQ ID NO: 6149 - DNA, 1069 bp, Cricetulus griseus
agttaagtgaggcccaggcccgggagcttcgtcttctgtcctccaccatggactttcagcgtgctggcgtccggctgcaggtcttactgggacacctcagcagaccctcggtccccagcgattagtaagctagcccggtatcatggccagcttcccctgccagttgccatcctcaacaattccagtatactttggataataatgtcctaagcctggaacagagaaaattctatgaagaaaatggatttcttgtcataaaaaatctggtatctgatgatgacattcaacgttttcgagaggagtttgaaagaatctgcagaaaggaggtaaagccaccagggatatttctaatgaaagatgtggccattgcaaaacaggattgtacactaaatgagaaagtgattacgaagatccaggatttccaagaagacgaggagctctttagatactgcaccctcccccagattctgaaatatgtggagtgtttcactggacccaatatcatggctatgcacacaatgctgataaacaaaccttcagattctggcaagaagacatctcggcaccccttgcatcaggatctgcactacttccccttccgtcccagcgatcgcattgtttgtgcttggaccgccatggagcacgttgacagaaacaacggttgtctggttgtgctcccaggcacccacaaaggcactctgaagccacatgattaccccagctgggagggagggattaacaaaatgtatcatggcatccaaggctacaagcaggacaataacagggtgcacctggtgatggagaagggagacactgttttctttcatcctctgctcatccatggatccggtcgaaacaaaactcaaggattccgaaaggcaatttcctgccactatgccagttccgactgccactatatcaaagtgaatggcaccagtcaagaaaatatcgggaatgaagttaaagagttagcacagaaacgctatggaatccaaagcaacattgactttaaggatgtctggatgtttcgaagccgacttgtaaaaggagaaagactaaacctttgaaa

SEQ ID NO: 6150 - DNA, 1068 bp, Cricetulus griseus
gagcgaggcggggatggcggcgcggctcgctgcccgcgggggaccggaggctgccggccggcgcccatggctgttgctgacgccgctgctgctggctccgctgctggcgcggcccgccgaggccctggtggaggggttgtactgcggcacgcgcgactgctatgaggtgctgggcgtgagccgctcggccagcaaggcggagatcgcgcgggcctaccgccagctggcccggcgctaccaccccgaccgctaccggcccgagccgggcgatggccccggggcgcgccgccgagcgccgaagcttcctcctggtggcgaccgcctacgagacgctcaaggatgaagagacacggaaagattatgactacatgctggatcacccagaagaatactatagccattactaccactactacagcaggcctcgctccgtttcacctgtgctcatacatagcttggtactgccggtggatctataactttaacattaaaggcaaagaatacggggaggaggagagactctacctcatacgaaaatctatgaagatgtcccagtctcagtttgacagcctggaggatcatcagaaagaaacatttcttaagcgggagctttgggtaaaggaaaattacgaggtctacaagcaggaacaagaggaagaattaaagaaaaaattggcaaatgaccctcggtggaagcgataccggagatggatgaagaatgaaagggcctggaaggttaacatttgtggatgattgaagattaatggaaggctgctatgtccaaactttaattgtgatattgtcttcatagcagttatttgagatgtgtctgctgctctcagcagtaactaaagttcgcaagatacctgattaaacagaataatgtaagaaacttcaactttcccataaaacttttctacagaagacatttatgatggttcaatttttataatctatttgtgaattttgttaaaaaagatttgacatggggatttattagttgccatttaaaatttttatatgtttagttaaaatttgacatgaaatttattagataaaaatttaaaa

SEQ ID NO: 6151 - DNA, 1068 bp, Cricetulus griseus
atggcggaggcggagactggcttggaggccgaggaacccaccgaagatgacaccctgccttctgacaccgtctccctcagcgactcggactcggacctcagcttacctagtggtgctgaggtgcaagtgttgtccccggagaggatttctggggaagcccaagaagactccggccctgatgagcctccctcgccccccacgggcgtccccaccaccgcagttcagccgttccacctccgcggcatgagctccaccttctcccagcgcagtcacagcatctttgattgtctggagagtgcagtccggcaggcaccgccctctgcgccccaaaccagtgtgactgaaaatggcaacttcaagcgacctgtggctcccccaagtcagactccagcagggaacctgagcagggtgcatgggagtacgggcccaaccagggtacctcctgtgcccgattatgtgtcacatcctgagcgttggaccaagtacagcctggaagatgcgactgaagtcagtgagcagagcaatcgtgctgctgccctggcctttctgggttctcgcagcctggcatcccccacagactatgtaccttccttcaaccaggacccctctagctgtggggaggggagagtggtctttaccaaaccaattcgaggcagtgagactagggctgaaaggaagagggtcctaaagaagggggatgtgtcaaatgctgtgagtgaggcatctgtggagctggcccatctggcagggcctgagcttgaggagtggagtggccaccagggactgcaagaggcagtgataccttcaggagctgaccatcctgggtcctcatcagatcccacagggatggaggctgttggtttccatggcagcaagaagcggagcagagaacacttccggaacagggacagtaacccggaggggccagggtctgagaggggaccctcagtttgactgcagtgctatctctccacctcctcacctgcccagtccaggtgggaagctgtgggctatttgtagaaggggtgtctgggaagcaactctgactaggactgtgggaattgtggg

SEQ ID NO: 6152 - DNA, 1068 bp, Cricetulus griseus
atgggctgcatcatggtgctggtccttgccgtgtatgcttaccgccaccagattcatcgccgcagccaccagcatatgtctcctctcgctgctcaagaaatgtcagtgcgtatgtccaacctggagaatgacagagatgaaagagacgatgacagccacgaagaccggggcatcatcagcaatactcggttcatagctgcagtcatggagcgacatgcccacagtccagaaaggaggcgacgctactggggccgctcaggaaccgaaagtgatcatgggtacagcaccatgagtccgcaggaagacagtgagaaccccccatgcaacaacgaccccttgtcagctggggtggatgtaggcaaccacgatgaggacttggacctggacaccccacctcagaccgcagccctactgagtcacaaattttaccactaccgctcacaccacccgaccctccatcacagccaccaccttcaggcagccgtgacagtacacaccgtggatgccgagtgctaacagtccccccacacctccccaagcagaggggccctaggtgatgcagaatgctcctgagaggaaatgagcctgcataaaatccctttcacatgaggagtgggtgctgaggaactgacctgccataatggaatggagcagtcggcaaagctccagcagagatgcttggaaaggaaactgagccaggggaatgctcccagcaccagaaacactcaaccccttaactggaagagagctgaaccagatgccaggaatgaggtacgccagatgccaccaaccactggacagacacgcttgcttcctagaggtgcctggacaccaacataactgcacggaactggactcaccttgagctctgaatgatgcatctcaaaatttctaagtaaaggattatttttctactatttattgaactttcaaactttggggggtggggagggatgagggattctcggccgaaaccctggctgttgtgtgtgatgacgtgtttctttgattaaggagttgtgtttcttatttaactggtgaccttcccactgccctcatccaccaaaa

SEQ ID NO: 6153 - DNA, 1068 bp, Cricetulus griseus
ctgctctcggcgcgatgagcatagagacgctactggaggcggccagacaaggctcatcaggtacttgggaagagagggtcctgtgcttagggatgctgtgtctcctgcctctgcttttgcagactgctttggcttctctttttaagtggatatttattacaagtggccttgtgtcagacactcagttacacgtgtgcacattcagctccccactggatactcaccaatggcctttcagtgtggagcaggaagcaagtgtccctaggtgtgaagtttgcactgaggcaagtctgaggggctagaaggaaggctcagggtccttcagatgacattgagcagggcattgatgccagtgaaggtcttgaatcattcttctcccttgaaatctctctgtcttgaggccagttctagagttcacaccatcgtgttggcttgcaggcctgcacagatacctcatcatccacccctccccccacccccgccaggggttcctccagatctagtgccgccgaatgacaatgtccagattggtgatgatgggtgttgttgctgtttttgttgtttgtgactgctgtgtgcccgaatgggcagccacctcccagccctctcttgggcgtctcccctttgagagctgttaggaccacatcagtcctcaccttgtgggaccgcctggcccttcccttcctatcccttccagcctgggacacacacacacacatacacacacaccttacctctcatgcgtgttttacctgtgctgttttgagtggctcactgcctgggatctttacctcggggaggaaaagggaggaagagtggttccctgggggccaaagaagggcagagaatgcctggaggggagttgggtcaccatagcctctctctaggaacagctgcttctccccccaatcccagggtcccactctcaatccccaaagaggtggcccttgtttacagtgaggactcggtcactgtgtctctgtttcctgaaatatgaattgtagcgaccccagactgtagagatttttatgtgtttgggtacatctgctgtgtgggaaaaaaaaaaaa

SEQ ID NO: 6154 - DNA, 1068 bp, Cricetulus griseus
gcggggctgccagagcgcgtgggtccttgggtcaggtcaaagggtcgaaggtgcagcgcgtgacccaggatcctagcaggctcggagcaggagcatggcgtcgtcggggtcggtgcagcagccgcggctggtgctgctgatgctggtgctggctggcgcggcgcgggccagcctctacttccgtccgggccggacctgctaccacccccttcgcggggaccagattgcccagctggggcgcaggacttaccctcggccgcatgagtacctgtccccatcggatatccccaagaactgggattggagaaacgtgaagggtgtcaactacgccagcatcaccaggaaccagcacatcccacagtactgcggctcctgctgggctcacggcagcaccagtgccatggcagaccgcatcaacatcaagaggaaaggtgcgtggccctccaccctgctttccgtccagaacgtcatcgactgtggcaatgctggctcctgcgagggaggcaatgaccttccggtgtgggcatacgcccataagcatggtatccctgacgagacctgcaacaactaccaggccaaggaccaagactgtgacaagtttaaccagtgtgggacctgcaccgaattcaaagtgtgccacaccatccagaactacacccgctggagagtgggtgactacggctccctgtcgggtcgggagaagatgatggcagagatatacgccaatggtcccatcagctgcgggataatggtgaccgagaagatggataactacacaggaggcatctatgccgagctccaggagcagacctctatcaaccacatcgtctctgtggctggctggggtgtcagcagtgatggcattgagtactggattgtccgtaactcatggggtgaaccctggggtgagaggggctggatgaggatcgtgaccagcacctacaaaggaggcacgggtgccagctacaacctcgccattgaggaggcctgcacatatggggaccccattgtttaagtacacgtctctggaaacaatgttgtaaaccatgccagggatggggtgattaa

SEQ ID NO: 6155 - DNA, 1068 bp, Cricetulus griseus
tcgacgttgctacggagggacttgcggcggcagcataggatggctgcgctctatggcggcgtggaagggggaggcacacggtccaaagcccttttactttccaaggatgggcaaatcctggcagaagcagatggactgagcacaaaccactggctgattggtacagacaagtgtgtggagaggatcaacgagatggtgaacacagccaaacagaaggctggagtggatcctctggtaccccttcgaagcctgggcctgtccctgagtggtggggagcaggaggaagcattgaggctcctgatagaggagttgaggggccgatttccctacctgagtgaaagttacgtaatcaccactgatgcagcaggttccatcgccacagctacaccggatggtgggattgtcctcatcgctgggacaggctccaactgtaggctggtcaaccctgatggctccgagagtggcgctggtggctggggccatatgctaggagatgagggctcagccttctggatttcacacaaagctgtgaaaatcgtatttgactccatcgacaacttggaggcagctcctcatgatattggctatgtcaagcaggccatgttcaactatttccaggtgccagatcggctaggaatcctcacccacctgtatagggactttgataaatccaagtttgctgggttttgccagaaaatcgcagaaggtgcacagcagggagaccccctttcccggtacatcttcaagaaggctggggagatgctgggcaaacacatcgtggcagttttgccagagattgacccggtcttgttccaaggggagcttggcctccccattctgtgtgtgggctcagtgtggaagagctgggagctgttgaaggaaggctttctcctggcattgacccagggccgagagctgcaggcccagaactccttatcccgcttcaccctgcttaaactacggcagtctgctgcactggggggtgccagcctgggagccaagcacattggataccaccttcccttggactacagcatcaatgctgttgccttctattcctataccttc

SEQ ID NO: 6156 - DNA, 1067 bp, Cricetulus griseus
tgtgcgcgctgtgtgagcgtctatgtgtgtgtgtctgggggtgccgagggggacgtgggggcgaagcacaaccggccatggcagcagcggaggacgaggacgggggccccgaaggcccaaaccgcgagcggggcggggcgggcgcgaccttcgaatgtaatatttgtctggagaccgctcgcgaggctgtggtcagcgtgtgcggacacctgtactgctggccctgtcttcatcagtggctggagacgcggccagaccggcaagagtgccccgtgtgtaaagccggcatcagcagggacacagtcgtccctctctacggccgcggcagccacaagccgcaggaccccagactgaaaactccaccgcgccctcagggccagcgacccgccccggagagcagaggggggttccagccgttcggggacaccgggggcttccacttctcatttggtgtcggtgcttttccctttggctttttcaccaccgtgttcaatgcccacgagcctttccggcggggagcaggtgtggatctgggacagggtcaccccgtctccagctggcaagactccctgttcctgtttctcgccatcttcttctttttctggctgctcagtatttgagctgtgtctcccctgcccacctccagctagaggagaatcagtattggggtccctgctggccccgccttgcttttggaccacccctcactcccatgacctatgtctgttagctgaggcctccctcagggggcagtgggaaggagtgacgagtgagcctgggtcgggagtgcctgcggctctgccctgctggcctggaggcacagccatccccgccctgaagggggacaccctggagacaggggcccagttctcctttgtcccccccccagacttcttgattggatgtttaaaggtgggctttccccgactcctccacttgttgatttaatttaattttcctctccccactgtctgatatgagttctgactctaattgtgtcctttccgccctggctacctcctttattacaaattcaataaaaaaatgaaaataaataaaaaaaaaaa

SEQ ID NO: 6157 - DNA, 1067 bp, Cricetulus griseus
tctcgctcgtcctccggtagcagccgctagcagtgtccgctgccgggcgcgctgtcggcgggtcggtcggttgccgtcggcttcggtgtcactgcggttgagttgggcagtcatggctgagctggatcccttcggcgctcccgccggtgcgcccggtggccccgcgctggggaacggggtggcgggcgccggcgaggaagacccggccgcggccttcttggcgcagcaggagagtgagattgcgggcatcgagaacgacgaggccttcgctatcctggacggcggcgcccccgggccgcagccgcacggcgagccgccgggggtccggatgctgttgatggcgtgatgaatggtgaatactaccaggagagtaatggtccaacagacagttatgcagctatttcagaagtggatcgattgcagtcagagcctgaaagtatccgtaagtggagagaagagcaaacggagcgcttggaagcccttgatgccaattctcggaagcaggaagcagagtggaaagaaaaggcaataaaggagctggaagaatggtatgcgagacaggatgaacagctacagaaaacaaaagcaaacaacagggcagcagaagaagcctttgtaaacgacatcgatgagtcatccccaggcactgaatgggagcgggtggcccgcctgtgtgactttaaccctaagtccagcaaacaggccaaagatgtctctcgcatgcgctcagtcctcatctccctgaagcaggcccccctggtgcattgaagagctaccctgtggaaacactacgtctgcaatatcttaatcctactcagtgaagctgttcacgtaattggattaattatgttgagttcttttggaccaaaccttttgtctttagagttgatcattgtttgtgattgcatgtttccttcaactgtgttctccctggcattcagagaagataggggaggaggaggggagggatgctcccaacagtagcctcaacccgtgcttttgtgcattattctgagaataaatttctgttttaaacaaaataaaaaaaaaaaaaaaaaaaaaaaaaa

SEQ ID NO: 6158 - DNA, 1067 bp, Cricetulus griseus
tgtgggctgtcgctgaggcagcatggatctcagagagctggagaaggacaatacgggccgctgtcgcctgagctctcctgtacccgccgtgtgcctcaaggagccgtgcgtcctgggcgtggatgaagcgggccggggcccggtgcttggccccatggtctacgccatctgttactgccccctgtcccgcctggcagatctagaggccctgaaagtggcagactcaaagaccttgacagagaatgaacgggagaggctgttttcgaaaatggaggaggacggagactttgtgggttgggctttggacattctgtctccaaacctgatctctaccagcatgcttgggcgcgtcaagtacaacctcaactccctgtcccatgatacagctgcggggctgatacagtatgcgttggatcagggtgtgaatgtcacccaggtatttgtagacactgtaggaatgccagagacataccaggctcgattgcaacagcgctttccagggatggaggtgacagtcaaggccaaagcagactccctgttccctgtggtcagtgctgcaagcatctttgccaaggtggctcgagaccaagctgtgaagaactggcagtttgtagagagtttacaggatctggattctgattatggctctggctatcccaatgatcccaagacaaaagcctggttgaggaaacacgtggaccccgtgtttggcttcccccagtttgtccggttcagctggagcacagcccaagccatcctggaaaaggaggctgaaggtgtcacgtgggaggactcagccgctgaggaggaccctgggcagcctggaaggatcacatcctacttccttagccagggccctcaggcctgccgcctgcagatcccccacaggtacttccaggagcgaggtctggaggcagccaacagcctctagaggcaaatgtgtgaatccgcccctcttacttgggaattaaagctgttcaagaagagagggcaccagatcccattatagatggttgtgagccacccttctatgtgtgtgtgtgtgtgtgtgtgtgtgtgtgtgtgtg

SEQ ID NO: 6159 - DNA, 1067 bp, Cricetulus griseus
gaaagtgattagacaaggaccaaaaacccaagaggaagtagttttggaaagtgaagaaatgagccaaaccaataaggacaaaataggaatacgaaagaacaaaaaagtactcagatgagctcatgagcgaaagtgactccagcagtctcagcagcactgacgccggcttgttcaccaatgatgaggggaagacaaggggacgatgaacagagcgattggttctatgagaaggagtcagggggagcctgtggtattgctggagttgtgccctggtgggaaaaggatattaaaaaatactggaggggctccaccttcaatgacgtctgctcctggccccgccagtaacaagaggatggttcacttctccccacgacgcccatcaccatgaccactggtttagccctggggctaggaccgagcatggccagcatcagcttctgagagataaccgatcagaaagaggacacaagaaaaactgctccatgaaaacagccagcaggcaaacaagcatgcattttaggatccttgtagcacaggagacatcaaaaggagaaggaaagctgcgcctttgccctggacccacagcagcaggaattgtgggtgaaaatgcccagccgatcctagagagcaacatcgggaaccgcatgcttcagagtatgggctggacacctgggtcgggccttgggcgagacggcagagggatcgctgagcctgtccaagccgtgcagaggccgaaggggttaggacttggatttcctctaccaaaaagcacccccaccagctctgccccacgtcaggaaagccttcctgagcagatcagcattactccagtgtagtttataaactttacctcatttagaacctaagatgattactgaaagaaaactgtattttttaaattcgtgctgactgaactgtataccctgccctccagatgtctacctcttcccaaaggctagtattttttaagaatcagctccaagatgaagaaagatgatttaaggttttagtcactgaagtaaattattagactcttgagtcagtttatttgaagattttagtagctt

SEQ ID NO: 6160 - DNA, 1066 bp, Cricetulus griseus
cgagcggcgagcggcggcggcggcgctgagagtgcagcggaggttttgctggtttcggaccccagcggccggatggtgaaatcctccctgcagcggatcctcaacagccactgcttcgccagagagaaggaaggggataaacgcagcgccacgctccacgccagccacaccatgccgctcctcagtcagcacagccgcggcggctgcagcagcgagagttctagggtcgccctccattgctgtagtaacctgggtccggggcctcggtggtgctcctgatgtccctcacccacccctgaagatcccaggtgggcgagggaacagtcagcgggatcacagtctttcagctagcatcctctactccgacgagcggctgaatgtgacagaggagccaacgtctaatgacaagaccagggttctgagcatccagtccgtgctcacggaggccaagcaggtcacctggagggcggtgtggaacggcggtggcctctacatcgagctcccagctggggccctgcctgagggcagcaaggacagcttcgcagctctcctggagtttgcggaggagcagctccgggccgaccatgttttcatctgcttccccaagaaccgtgaggacagagccgccctactccgaaccttcagctttcttggctttgagattgtgagacccgggcatcccctcgtccccaagagacccgacgcttgcttcatggtctacacgctggagagagaggacccgggcgaggaggactaggtgccggccctgcccagtgtccctgtgccctctcccgggtttgtccacatgtcatgattgtgcagaataaatgctcactccattagcggggtgcttctttgagctgaatgctgtgtttgtcacactcaagtgttggctttaattctaaataaaggtttctattttacttttttattgtctgtttaagatggccaggtgacctgtgctagagcagcctcctttgaagcctggcagagatagatagtgtcacctcccctggctcaaacccaataaagtgatcttgctcactaacaaaaaaaaaaaaaaaaa

SEQ ID NO: 6161 - DNA, 1066 bp, Cricetulus griseus
ggaagatggcgaaggtcacggagcgctacgatgtgacttgggaagaaatgcgagataaaatgagaaaatggagagaagaaaattcaagaaatagtgaacaaatcatggaggtcggagaagaattaattaatgattatgcttctaagcttggagacgacatttggatcatatatgaacaagtgatgattgcagccctagactatggtcgcgatgatttggcattgttttgtcttcaggagttaagaagacagttccctggtagtcacagagttaagcggctaacgggcatgcgctttgaagctatggaaagatatgatgatgctatacaactgtatgaccgaattttgcaagaagatccaacaaacaccgctgcaagaaagcgtaagattgccattcgaaaagcccaggggaaaaatgtggaggccattcgagagctgaatgagtatctggaacaatttgttggagaccaagaagcctggcatgagcttgcagaactttatatcaatgaacatgactatgccaaggcagccttttgcttggaggagctaatgatgactaaccctcacaaccatttatactgccagcagtacgctgaagtcaaatacacccaaggtggacttgaaaacctcgagctttcaagaaagtattttgcacaggcactgaaactcaacaaccgaaacatgagagctctgttttgggctttacatgtctgcaagtcatattgcttctaatccaaaagcaagtgcaaaaatgaaaaaggacaacatcaaatatgctagttgggctgctaatcaaataaacagggcttatcagtttgcaggtcgaagtaagaaggaaagcaaatactctcttaaggcagttgaagacatgttggaaacattgcagatcacacagtcttaaggtttcagaactctttgacattagctttaccaaacagtacagttgaacttctctcggcctgtgacttgtttacgaaatgcctagtgctattcgaattctagctttctctcaagaggtcagttatcaagaatgtgttcaaataacctcaacttgccttgtactgcta

SEQ ID NO: 6162 - DNA, 1066 bp, Cricetulus griseus
gtgtccacacagggcaaaaaaggagacccggtgcggagtccgtgggaatccagaggagacaagtcacagggcgtcgttggagaggggggccggtctcgaacctgggactttagggaccatggcagcagccagggctagcctgggccggatcctccccgagtcctgcatcctgttcctatgtgacatgcaggagaaacttcgaggcaaagtcctctacttcccacagatcgtgtcaatggccgctcggatgcttaaggtggcccggctgctggatgtccctgtcttgctgacggagcagtacccacaaggcctgggccccacagttcccgagctgggtgctcagggcctacaagccatgagcaaaacctgctttagtatggtgcccccgttgcagcaggagctggacaaacggccccagctgcgctcggtgcctgcctctgtggccttgagacccaaggctgcatcttgcacacggccctcgacctcctggaccgagggctacaggtccatgtggcggtggatgcctgctcttctagaagcgagctgaaccggctggtggcactggatcggatgcgacagagtggtgtctttctgtctaccagcgaagttctgattcttcaactggtaaaggacgctgcacacccacagttcaaggagatccagaagatcattaaggagccagtcccggacatcgggctgctaagcttcttccaaggcaagagcaaccccctgttgctggactccaggccctgacttgcaggatggacccaccctccctgtcacccagactttgatggatggcttctcctgcatccacggatcccaagagtggtgcagtccgccaggagacccgcccccgtgggaggggaggcgtggtctcgccttcttattgggcagctggtcccggaaatgcaaatgagactcctggtgccgggtgggaattggctgagggcaaggtgggggcggggctgggccccgggcacttcacggagcgggaaaaggaggggaaggaggaatgtcacgaactgggacccggggtctcggagaataaacattgatgtggctg

SEQ ID NO: 6163 - DNA, 1066 bp, Cricetulus griseus
cccccacgacatccggggatgatgtagacctgctctctgtagcagaaatggtggccctggtggaacagagagccgccctggccctgcagagttacccacgctccaccacccaagctccagtggtctttgtgtcggctgagcagggagcaccagcgaaggggttagggtcagagaggcggtctggtggtggtgactgcagccgagtcgccgaggcagtggcccactttgaggcccagcgggacagccctccaaccaagggtctccgcaaggaggagcggccgggtcctgggcccggtgaggtgcgtatcgcattccgcatctccaatggccgagagccccggtcacccagatgggcaattttaccctactttggagcggaagccggcctgggtgcgggccacagactcgcgctggaaccgggacccgctctatcgcgatgacccctgtaagcagtgccgcaaacggtatgagaagggcgatgtgtccctctgccgctggcaccccaagccctaccaccatgacctgccttacggacgctcctactggatgtgctgccgaagagccgatcgcgagacgcccggctgtcgcttgggcctccacgacaacaactgggtgctgccgtgcaatggagtgggtgggggccgagctggccgggaggaaggaaggtgaggcctgggggtgaggggacactgccataccgaaccccttcccgctttgctgggagctgggggccaggactgagtcgccagccaacaccttccggtccatccagcattgatctcccactagaactgggaccaggtttggggggtcggcgggggtaaatcccctggttgaccctgttggttttccactcttcagagccagggccatggaccctcagagagggttgtggttttttgttgtttttatcagaatctcacttaaaccaacatcaagccccaaccccatccctgagtctctctgccccagggacacagcagcagggagcagacggcagctaaccttggtaccacctgaggctctcctcaagctggccctccccatccctgtgcctctcccagtt

SEQ ID NO: 6164 - DNA, 1066 bp, Cricetulus griseus
gagcaggctggagctgaagcccttgttcactttggtcctgcctgcttaagccccctgccagcctgctgccgatcaccttcgtccttgggtggggtccccaagttcacagcctgagcctctggagcgttttggacgacgcttccccctgagcccaggaaggtgtctggaagaatatggttgccttctatgtgggcggttctcaagccagctctgacccctgtccttgatccagatctgagcagactgctcttgggttggacaccgggacgacccttcatttcctgctgtccagacacaggacagacacaagaccagggtgtccaggctgggcggctaagagcacgaagactgtatcttatagagagggccagagatgcccatgtagtagggctgctggcaggcacattaggcgtagctcaacaccgtgaggcactggcacacttacggaaactgactgaggctgctggaaaacgtagctatgtactggccctggggaggcccacacctgccaagcttgccaacttccctgagatggacatctttgtgcttttggcctgtccgctgggagccctagccccccagccttcaggtggcttctttcggcccatattgacaccatgtgaattggaggctgcctgtaaccctgcctggccacctccaggcctggctccccacctcacacattatgcagagctgttgcctggttctcccttttatgttccactcccaccccctgagtcagaattgtgggataccccagatgtgtcgctcatttctggagacctccgaccaccaccttcttggaagtcatccagtgacactgggtgttctgccctaactccaaggccccagctggagctagctgagagcagccctgcagcttcattccttagttcccggagctggcagggattagagccccgcttgggccagacaccagtgaaagaagctgtccaaggaagacgaggtattgccattgcctatgaggatgagggaagcggctgataccatgagaggtcagagtcaagagtgacaaatctgctgggacttgtaccgcctgagccaa

SEQ ID NO: 6165 - DNA, 1066 bp, Cricetulus griseus
gtgtccattactactgtttgttaatgtcaagtggaatttggcagagagggaagaagaagaaggagtttatggctttctagtggaagacatcaggaaggaagtcattttccagtttactggcaattttgcgtcattttgctggaaacatcgaccggttcaagtaattacatctaataagtaccgagacacttttcaatgtaccatctgtttggaatatattgagcctattccaacttacaacatattgctgagtccctgttgtaagaatgcttggtttcaccgagactgtttacaggttcaagcaataaatgcaggagtgtatttctttaggtgtacactatgcaataataccgatatctttcagaaagagatgttgagaatgggaattcatattcctgaaaaggatgcatcttgggaattagaagaaaatgcctatcaagagctgttgcagagccatgaccgctgcgatgttcgaagatgtcattgcaaaaaagggcgagactataatgaacccaatagcaaatgggaagtaaagcgactgtcagtgttgtggttctagtggaacacacttagcctgttctacactacagtccttaatgcaatatcttgagacttcatctctgtttgaaggctttgtcaagaacttgactctaaattctcaagctctaaaagagaacctttactatgaagctggaaaaatggttgccatttctttagttcatggtggtacttcacctggtttcttttctgaaactttgtttaactgtcttgcttatggacctgaaaatactctaccaagtttggctgatgttttagactttgatgtggcacaaattataatcaagataaatactgcagccactataaacagtttgaagtcagtagtaaatgaatgctcaagttacctggagtttattggatgtttaagacttataacatcactaaatgataaatacacattggtaaaagacttttttttttttgtttgttttttgtttttttgcttgttttatttatttttaaattttaaaaaaaaaaaaaaaaaaaaaaaaaaaaaaaaaaaaaa

SEQ ID NO: 6166 - DNA, 1066 bp, Cricetulus griseus
  modified_base (174)..(174): a, c, t, g, unknown or other
aaattctatgtacaggtgcttcatcttatgaataaaatgaatttgcccacaccatttggacctattactgcacgacccccaatgtatgaggactatatgccactgcaccccttccacctacgtcaccacagccacctgaggaacctcccttaccagatgaggatgaggatttanctagtaaagaatcagagtatgaaagcagtgatgaggaggaccgacagagaatgaacaaattaatggaactagcaaatcttcagcccaaaagacccaaacctgcaaaagccacgccaagtgagaaaaaagcaaaaaataaaggatatgttgaatgtaccttcgtcagcttcacatagtttgcatcctgtgctgttaccatcagatgtatttgaccaaccacaacctgtaggcagtaaaaaaattgaaattcaatatatctaccaacatgccagcagcatttaagaaagatttggagatggaacagaataacgaggaaaaaaattctgattcaccagatactggacttgatgattcaaatacaggatttggaaaaatcttccccaaacctaatttgaacaccacggaagagattaaagacgattctgatgaaatgccctcacaatgtatttctcgaagggagttggataagggtcgaatttctagagaagaaatggaaaccctttcagttttcagaagttatgaacctggtgaaccaaactgccgaatttatgtaaagaatttagctagacacgttcaagaaaaggaccttaaatttatatttggaagatatgttgacttttcttcagaaacacagcggataatgtttgatattcgcttgatgaaagaaggacgtatgaaaggacaagcttttgttggacttccaaatgaaaaagcagcagctaaagccttaaaagaagctaatggctatgttcttttggaaaacccatggtggttcagtttgctcgatctgctagaccaaaacaagactctaaagaaggaaaacggaagtgataggagtaggaaaaagagcaattcctgacgtaaacactgctgtaatactgtcacacaagtg

SEQ ID NO: 6167 - DNA, 1066 bp, Cricetulus griseus
cccggatattctgcggcctgaggacccggcatcacggaggtcccacaggacgtcttcctggttttgcatcgcgaaagggcttctccggaattgcttttgaagtctcatcttgacagccgctagctacagcggttgcatgcgtgtccaggcctctggcgctcttggaaatctgtgtttctcaagttggcattacccacagtggggctgctgacgtcagacaactgaaccgaagcccccggtgcatggcctgggagtaggagaggtgatgaactgctgagaagcggtgcagaggggagcacccccccatgctgccctgcttccagctgctgcgcatagggggcggcaggggcggtgatctctacaccttccaccccccgtccaggtcaggctgcacctatcggttgggctgcagggctgacctgtgtgatgtggccctgcggccccagcaggagccgggcctcatctctggggtccatgcattgctgcacgctgagctccaaggggacgactggcgggtcagcctggaggaccacagcagtcaagggactttggtcaataatgtccgactccccagaggccacaggctagagttgagcgatggtgaccttctgacctttggccctgaagggcaagcaggaaccagctcctcggaattctacttcatgttccaacaagtccgggtcaaacctcaggactttgcagccatcaccgtccctcgatctaggggagaagctgggactggcttccagcctatggtgccctcccagggggcaccccagcggcctctcagcaccctctcctctgcccccaaggccacactgatccttaactccatcggcagcctcagcaagctgcagcctcagcccctcaccttctcccggggtggtggcagaccacagagcctggctgttcctacgcagcctggagaagtgggagcctcaccacctgctccacccacgagaaaccggaggaaatcagttcacagagtgttggcagagctggatgatgagaacgagacttccctgagccctctgtcagtcctcatggagcccaggaagaagctccg

SEQ ID NO: 6168 - DNA, 1065 bp, Cricetulus griseus
cagagactgtccctttgtctaccatcaatagacagtgttcctcagggctgcaggcagtggccaacattgctggtggcatcagaaatgggtcttatgacattggcatggcctgtggggtggagtccatgtccctgtctgagagagggaaccctgggaatgtttcttctcgcctgctggagaatgagaaggccagagattgcctgattcctatggggataacctcagagaacgtggctgagcagtttggcatttcacggcagaagcaggatgccttcgctctggcctcccagcagaaggcagcgagagcccagagcaggggctgtttccgagctgagatcgttcctgtgacaaccaccatccttgatgacaagggcaacaagaaaactgtcactgtgtcccaggatgagggtgtccgccccagcaccaccatggagggcctggccaagctgaagcctgccttcaaggatggaggctctaccacagctggaaactccagtcaggtgagtgatggagcagctgccgtcctgctggcccggagatccaaggctgaagaattgggcctgcccatcctcggggtcctgaggtcctatgcagtggtcggtgtccctcctgacatcatgggcatcggtcctgcctatgccatccctgcagccttgcagaaagcaggcctgactgtgaatgacatagacatctttgagatcaatgaggcctttgcaagtcaggccgtctactgtgtggagaagctgggaatccctgcagagaaagtgaaccccctggggggtgcaatagccctgggccaccccctgggctgcaccggggcaaggcaggtcgtcacactgctcaatgaactaaagcgccgtgggaaacgggcttatggagtggtgtccatgtgcatcgggacgggcatgggagccgctgctgtctttgaataccctgggaactgaagccctggctgcaggcactgcccagagagtccaacagtgacggaacagagagggcctctacggaagcatgggacacccagcactggaggggtgtatcacagcactttaatttagaaaatgt

SEQ ID NO: 6169 - DNA, 1065 bp, Cricetulus griseus
  modified_base (35)..(35): a, c, t, g, unknown or other
  modified_base (421)..(421): a, c, t, g, unknown or other
cagttctaaactcagcttgacagtattgccacgtnacccagctactgggacttgtgtcattcctcgagcaccaaggtcattgcttagacttgtatataagatgcagtgtagcccatttaatggtaagtgttgaagcattgccttttgctgctgtgttctgcatccaccctagttttgccctcctcccatgaatgtagtattattcatagattatacataagtgcgtgtattgcttttggcagtaaatcaagatctagttgtaattttccagctgtgaaaatgtcaccttgtatttaaaagggtttcacgagtggaaacctaagtaaataagctcattagtgacagacctgctcttccatgtccccgttaccatctccccacgtgtgtgtgtgtgatgtgagcatgcccagtcatttgatcnctcttttcagtgcagagggaaggactgtgctgcaagctggtggtggtatacagagggtctgtcagcatgcaccgaaagcccccgttttcacagatttataactttaataatccagatgctgtccttggaagtatttaatatgcaataggtagcaccttcactaattaatctgcatatgaagggcttcctgatatatttaataagatgtgtagaagctcttcaagcattaaactaaagttgacgttttatttcatttacttttctctgtacaaaaaaaaaaatcaacccttacaatggaattgaaatctgtcccctaatggtacatttggacctttttaatttatggaacttctagattgtatgtactgtgatgaatttaaaaaaatgctgcagatctagaaatgtatgttcttagcaagtgttggaatgatgtaagcattgtttataattgaaaagtattacccttccttcttaagtaaatgcttagcaactcatatacatttttgcaggtacaaaagtatataaacattgtataatgtgacagttgtataatttatgtaatctgatgcatgagtcagaatttttatatatgataattgatttgttatagttgattaaagtgtttaaaaacttaaaaaaaaaaa

SEQ ID NO: 6170 - DNA, 1065 bp, Cricetulus griseus
acacacaaaaaaaaaccaataccacggtcccttagttacagctgaactcctccaccttccaactcagtcaggctcatccatctcctgcttccctctcctcacccaacccacccccttcagtccctctcttgagcaaggtggttgggctgttgtggggacaggtgacccaagcaggctcctagttctggagagttgggcgagtgttataacctttttggcctctccatcagttcagctttcccccaaagcatggtttggtaccagtcttctcatttccttctagagcctgagaccaatgcttaagtttgggggacacagtcaccatccccctggtactgatgcttgctggattttcgggaaggcattttgctacccagtctcttttcactgcctggggaatcagtcttttgtttttcattgtttgatgttcccatgttcccactgcatgctatgacttccctactcctcaaagaagagactcctttgcatgtctggagacagtaggggtggtaagctaaagggaagtggacaaaacagctcattaacggggtcttgcaaggggctctgtatgtacccagggtactggccaaccccccaacttctagccatagacaaactccaggccagacccctccaccctggttcagcctgggcagcttgggctgagccaccaggaccaatagatttaagctggcatttcagtccaagaaggcttctaagtggattaggacctgagaggaagaggggcctctgtgggtgctgggtactccagaggtgcccctggtggaagggtgggtcagtggtcctagcaggaagggagacccagcaaggccattcttgctgggttgagtcaaggagctagaacaagggaccaagtgggcgtgtaaagtctcaagccaatgatggggcttctccactgggctcctgtagtcctcaagtccctggcctccaccttaccaggtgccacttctcagaaggccactgcccaggcccccaggccgccccttcgtggccagagactggttaaagccccccagtgcctccttgtgcatagaacttcctctg

SEQ ID NO: 6171 - DNA, 1065 bp, Cricetulus griseus
tttttttttttttttttttttatttttgtaactttctgtgggcccaggtttcctctcagcatctttggctttttggtttgcagcctcaagtgtggcttttggtcgtcatagtttatgtccttgggcccaagcctcagacactgagacagctctgggctgtcttcttcctgacaggctgctggatacagtttccattcaaggatgcgtgctgactgccttccgtccttctctttcaccagccgttagctgtggcacacagcacgcccagaatctgaggctgagcctcttctgagcagcccgaggccctctccccatgttcatttctactgagtcccaccccatctgatgctgctttctttaggggtgtggtccagcctgtgaggccaggtccctggtccctctgcagaccctccctcctggggccagggatgctgtgtccccctcttcttccaagcatttgctccctactttgtgttaatggtgacttacagcacgtcacgactttgtgatatctagccaggtttaaaataacaaggcgtatgtatgcggcatagacatctcttcctttaaatgctctgcagtttgacagttgatttcctgtgatgatgcatttgggcctttccgggacattgtctcttctaggggatggtggggatgccctggcatctctctagagaaagcccccattctggccaagcagaaaaccactgtgattcctcccagtgtatttccaaatttatatgattcaaggattactggggctccccctggtggtgataagctgtaatgtcacctgggggctgcagtggtccagcaagttggaggccagaggtgggaaggccaaggtggctgtggttcaagaggccctgagcccccgagccgcacatatcctggcagcatgtctcccacctgcccctcttctaggtcatctgggactggcaaggtaattggcataagggcacagtgggaagcttttccctcccaactttaattttttaaaaaaatatctgcagaataaacccaatggttaatttttgaatgaataaaaggcttttgttgaataaa

SEQ ID NO: 6172 - DNA, 1064 bp, Cricetulus griseus
cccgcggcagtgcgtgccggtccccggcggcgcgtgggtgcgcacagccactgcgcgtcgcccctcgggcgggaggttggggcggtggggggtggcggggcgtggagcctgggtacgcacctgggcccccctggccatggccgcgaaggtggacctgagcacctccaccgactggaaggaggccaaaacctttctgaagggcttgagtgacaagcagagggaggaacactacttctgcagggatttcattaagctgaagaagatccccacatggaaggagacagcgaaaggggtggctgtgaaggtggaggaccccaaatataagaaggacaaacagctgaatgagaaaatctccctgttccgtggggacatcaccaagttggaagtggatgccattgtcaacgctgccaacaactccctgcttggaggtggaggagtggacggctgcatccacagggccgcgggacccctgctcaccgacgagtgtcgcaccctgcacaactgtgagactggcaaagctaagatcacctgcggctatcggctgccggccaagtacgtcatccacacagtggggcctatcgctgtaggccagcccagtgccagccaggcagctgagctccgcagctgctatttgagcagcctggacctgcttctggagcaccggttgcgctcagtggctttcccatgcatttctacaggcgtgtttggataccctaatgaggaggcagctgaggtagtgctggcggcgctgcgggggtggctggagcagcacaaggacaaggtggatcggcttatcatctgtgtgttcctggagaaggacgaggacatttaccgagagcgcctgccccattacttcccagtagcctgaggctcctgaagcccaccctgaatgggactgacccacctgggcctgtgggacctcgctcccaactctgagagaagccgaacagcttgttccagcctggccaaccccgagttcctgtcctggcccccagtatgtcctagccctgcctttcagaagcctcttaaataaagatgtctgattcagcctaacaaaaaaaaaa

SEQ ID NO: 6173 - DNA, 1064 bp, Cricetulus griseus
  modified_base (1048)..(1048): a, c, t, g, unknown or other
  modified_base (1059)..(1059): a, c, t, g, unknown or other
cggctctgcccggcgcgcccgccgcccgcggggatgtcgtacaagccgaacttgaccgcgcacatgcccgccgccgccctcaacgccggaagtgtccactcgccttctactagcatggcgacatcctcccaatatcgccagctgctgagtgactatgggccaccgtcactaggctacacccagggaactggaaatagccaggtgcctcagagtaaatacgcagaactgctggccatcattgaagagttggggaaagagatcagacccacttatgcagggagcaagagcgccatggaaagactaaaacgaggcatcattcatgcccgaagcctggttcgggagtgcttggctgaaacggaacgtaatgccaggtcctagcccctggccagtctgaaggcccatctcgataccctgtggagatgagaggctttgttcaaaatggcagtagttttcctgccatggtcattaagctctgaacctacattcaaaagattgggaagacattttgcagttattgatgatgtgcattttaagtagttaggaacgatccagctctttttttctttccaagcattgatctgaaagatgtttgtgaagccacttcacagcaagctattgtttgcccccagataccagtgtcccctttaatctccttttggatagcatcaccccagttgacttcctttccatgagctcacctgcctctgaggacttgagtgcaaaccacagcacgtttgcttagtagctggcccgcctgtgtacagtgtagaccctgcttcacggagcttctctgcttaagtgtttgcatgattgagtgctttgaagtcaatcttaaaaatgcacaagttataaatacagaagaaagaacaatctccccaacctaccaagcgccctgcaaatgtccatcctgagactgtagatctcagttccgtgtttactgtgagacgatcacaacatctggaagaaaacaactgaaaccgttgcatctttgtatttattacttgatgtaataaagcttattttcattaaaaaaaaaaaaaaaaaaaanaaaaaaaaaanaaaaa

SEQ ID NO: 6174 - DNA, 1064 bp, Cricetulus griseus
tgtgctttgcgccttacatgaggcgtggccagcgcgcctgcgccgtctggatcagccggttactcgcgtcagcattagtcctgttctgacgctgccgggtaccggccagggtccacaaggatgtgggtgtttggctatgggtccctcatctggaaggtggacttcccctaccaggacaagctggttggttatatcacaaactatagccggcgcttctggcaaggcagcactgaccaccgtgggttcccggcaagcctggaagagttgtgacccttgttgaagatcctgggggcagtgtttggggtgttgcttacaaactaccagtaggaaagaagaggaagtaaaaacataccttgacttcagagagaaaggaggctacagaactacaacagtcatttttatccaaaagataccacaaaaaaaccatttagtgttttgctctacattggaacatgtgacaatcctaactatcttggtcctgcacctctggaagacatagctgaacaaatttttaatgcagctggtccaagtggaagaaacacagaatatctttttgaacttgcagattctattaggaaacttgtgccagaagatgcagacgaacatctcttctcttttggaaaaattagtaaaggaacgtttagaaggaaaatagaaccttagtagcacacaggtaattggaatatcatctaaatttactgtttattacaagtgtcttaaaacatattcagaagatttgcatacagagaaagaaaattgaagctatacaagtgatttcctaactaaatgacatatgaacatttgttcattagaaatacaggtttcaattcacttcctgtttttattggaggaaccatgtttttttatagtatatatgcttaaaataatgttattagaaatatatggtaatagacacctgattgttaatttccttgtaattttagattaaatgaaaagtcaaatttaggccaaaagaaattgggtttgttaatataatattttccttggattataatgtgctatcttctcctttgggggaaaaaggcattttattagaaagaaaa

SEQ ID NO: 6175 - DNA, 1063 bp, Cricetulus griseus
tttatctgctaccatggcatcaatgatctgtagagctttttagattgaaatgatggaaaaacttccactgcaaaatgcagtggtattaaattcttcattggttttgttgctgcttgccttcctggacagctcatcagcacttaatcttccctgtttactacaaaagtctgacatagtaaaaacagtattcctcagcttctccttttgtccttttctgtcctttacccaactgacttcattcaatgccttagccaaggagtgcagcacctgtcgcccttgctaacagctgtccttggagacctagttctttagcccgggtatagcagtttccagttgttttattgcctgtttctttcccatgcttccttctggcttcacaaaattcttctggcttttcagagtcagacaagaagcagacaaggaagtgaataatcctcaatgtgtgattatgaaaggtgaagttgtgtgagagagcattggaggaacctggaaaaagactcccatcctaactaagaagcatgatctcagtagaccaataactcgcctttttatacacctgtaataaatggaatgtttttaagaatataattatgtcagatttagcatttcttttatatattaaatatatatcatttctgcttttgaaagtgatatttttttagaaataacagaagtttggcagttgaaaggcaggacatgtgaacctgaaataaaccagttacacttattaaatcagaacttggcgttgggaggtttgtgcctagttggagaattcaatgtcctcagatatatttgagagaggatgccattgaagtggtttttttcagaagcttcttgttcttagagctttttatgtgccatttgggaagacctttggtgttctagccttctttttttttttttttttttcttttgctttttcagagacagggtttccctgtaacttcgcagcccgtcctggaactaactcttgtagaccagactagccttgaactcacagagatccacctgcctctgcctcccgggtgctgggattaaaggcatgcgccaccaacgcccggct

SEQ ID NO: 6176 - DNA, 1063 bp, Cricetulus griseus
gagcctctctgggaaccagctgggagcactaccaccccaactttgtagcctgcgacatctggatgttgtagatctctctaaaaaccagattcggagtatacttgacacagtaggggagctgcaggccatcgaactcaatctcaaccagaaccagatatctcagatctcagtgaagatatcctgctgccctcgtctgaaagtcctccgcctggaggagaactgccttgagctcagcatgcttccacagagcatcctcaatgactcccaaatctgcctgcttgctgtggaaggcaatctctttgagataaagaaacttagagagctagagggttatgataagtacatggagaggttcacagccaccaagaagaagtttgcatgatattctccaggaccatgggacatcacttctgtgttaacacttcatatttttaatgaaattctaattttgtgggaactacgtcgatggttaagaacatgtgcttttgttccatctgccaattcaaaagcagtgcacttggaacttgggatgtacataaatatgtagctatcttaaagcaagctttgtcaagaggagcaccaacacaacagccaccaagaaatgttcctcaaggctgcagtagcaatttttttttttacttattgcaggtgccttattggtagaaggctctgaagagctaaaagtatatgcaaaaattgtaaaaaaaaaaatttttagacaagtttttttgctatgtagcccaggctagcctcagacttaaaaatttccccacctctaccccctcaagtactggggattataggcatgcgccatactcagcctacttgtaagatttttaaatgaattttaataatcaagattttcctgaagatttaattaaaaatcaatgtgttatttctggtaatttctcccccttttgtatttatgactactaaacaaattaccttcaagaaaaccattgctataatattttaaaataacttatgtttatcatggtcattctctgaatgagaggatatactaaataaaatacttttaaagtaataaaaaaaaaaaaaaaaa

SEQ ID NO: 6177 - DNA, 1063 bp, Cricetulus griseus
ccgaacctcggtgaccccttacgaagctcccagatctcagtggctggctcgccgaacgaggtgggcgggcggctcgggaccatggccagagccggcatggagcggtggcgcgaccgcctggcactggtgaccggagcctcggggggcataggcgcggccgtgacccgggcattagtccagcagggactgaaggtggtgggttgtgcccgcaccgttggcaacatcgaggagctggctgctgaatgtaagagtgcaggctaccccgggactttgatcccctacagatgtgacctgtcaaatgaggaggacatcctctccatgttctcggctgtccgctctcagcacagtggcgtggatatctgcatcaacaatgccggcatggcccggcctgacaccctgctctcaggcagcaccagcggttggaaggacatgttcaatgtgaacgtactggccctcagcatctgcactcgggaagcttatcagtccatgaaggagcggaatgtggatgacggacatatcattaacatcaacagcatgtgtggccaccgagtcccaccccagtctatcatccatttctatagtgcgaccaagtatgccgtcactgcactgacagagggactaaggcaagagcttctggaggcccagtcccatatccgggccacgtgtatctctccaggcttggtggagacacggtttgccttcaaactccatgacaaggaccctgagagagccgctgccacctatgaagacataaagtgtctcaaaccggaggatgtggctgaggctgtcatctatgttctcagcacccccccacatgttcaggttggagacatccagatgaggcccacagagcaggtgacctagtgttctgtggggagctcctgccttcccacccttcatggctggcctcccgcctctggattttaggtgttgattttttggaccctggatcttactttccttatccactccactagggatagaaaatttgccaaattatttccattatacatgtgaaaagaaatgggctggggagagaaggcatggtcatgactgtttatct

SEQ ID NO: 6178 - DNA, 1063 bp, Cricetulus griseus
ggaggagtctggcacatgggaacccttgcctttgtcctccctggagccagcccctgccaagggccccagcttccccagaccggaggggcaaccttcccagagctggagctgcaacagctagagatagaactgtttctcaacagtctgtcgcagccgttttctctggaggaacaggaacagattctctcatgcctcagcatcgacagcctctcagtgtcagaggacagtgaaaagaacccatcaaaggcctctcagagctcacgtgacaccctgagttccggcgtgcactcatggagcagccagacagaggcaagaagttccagctgcaacatggtgctggcccggggacggcccacagatactccaagctacttcaatggtgtcaaggtccaaatacagtctctcaatggcgaacaccttcacatccgggaattccaccgggtcaaggtgggagacattgcaactggcatcagcagccagatcccagccacagccttcagcttggtgaccaaagatggacagcctgttcactatgacatggaggtgccagactcaggcatcgacctgcaatgcaccctggcccctgatggcagctttgcctggagctggagggtcaagcatggccaactggagaaccggccctagccctgtcttccaccaccagctccactcttggctagctggcaccctagtccctcatctgtgaaactgaaggatgacatgagacccacctcacagaaatagtctgcaatgacagattctaaagaaagccacagatgcagggctagctgcccgccaaaacacagtcagtatccagcatgccagcatcgtggtggcaagacactgccggcagcattttgcactctgatgacctcaaagcacttttctggctgccttccagcagagcattggctctgcatggactcaagcaggccaggggatggggaagggactatcttgacccatcatccacacaggtttgaccggcttcaagcctcctccagatcctagatgagcgtatatccacattgccctaaccaggcttttcctggtggggcttgga

SEQ ID NO: 6179 - DNA, 1062 bp, Cricetulus griseus
gaggaggaagagggtggtggttaccgtgacaaagaaggccccagcagcatggtccaggctcccgctttgctggaggtagctcctccaataggaaaacaggaaagcaaggctagctcggaccaggcctccatgttgcccccaacatgctctggaagacgacaggtgggcagtggcagcccccagccccagctcagcacgcagcgtcagcagccacaccacacgggacagcagttccctgtccagctgcacctcaggcgtcctggaggaacgcagcccagctttccgaggcccagacagggcccggtctgctgccccaaggcagccagacaaggaattctccttcatggatgaggaggaggaggaagatgagatccgagtttgaggcctggacagaaaagttgagtcttggtggcacagtgactggtagcttactcaaatctgggtgtacagaccctgtccaggttgaactggggggggggcagccgccaccagtttgtccatgaaccccacctttatagctgttaacagctgaagactatgtaggaatgttctggaaaatgatggttaaataatgcattgttccctggagtgtgagcttttgtttgtttgctttttgagacacggtctccctctgtagtccaagctggcctcaaatttgcagcaaagcctctcataccctaggagctgaggttacaggtgtgcaccagcggccctggctgtttgtctgaaatctgttttgcttggctcctgtaactctacccagaacatgggtagaagcaggggccagagtcccaggggtggtggttcattccttttctgtgctgggaacaggctggcccaccttctgatctagcatagccagtgggaatctggggagagagcaagctacattacaataggatcctggccagatgagggtggtggcctgccatgggctgctctgcttccgaggtcctcccagatcctgacccggaaacactcactgggctcctgactggtgctcccacatagtagccattgacagagtcacagaactgtgcctctggccagcagcacacacac

SEQ ID NO: 6180 - DNA, 1062 bp, Cricetulus griseus
tggcctgtgtgtctggctgtgatggagtctgaaatgaagtttgataaggaccaggacggactcattgtagaatggaggctacgcagaccagacctatgatggatgggtcgccacaggccccagtgcttactgtggagggctgtggcttggccgctgtggctgtgatggttcagatggctgttctgtgtggggcccaggatgtccaggataagttttcttccattctctgccgaggccgagaagcttatgagagactgctctggaatggccgttactacaactatgacagcagctcccagcctcagtcccgcagcatcatgtctgaccagtgtgctgggcagtggttcctgagggcctgtggcctgggagaaggagacactgaggtatttcctaccctgcatgtggtccgtgctctccaaaccatctttgagctcaatgtccaggcctttgcaggaggagccatgggagctgtgaatgggatgcagcctcatggtgttcctgatagatcgagtgtacagtctgatgaagtttgggtgggtgtagtctacgggctggcagccaccatgatccaagagggtctgactcgggaaggtttccggacagctgagggctgttaccgcactgtatgggaacgcctgggcctggctttccagaccccagaggcatactgccagcagcaagtgttccgctcactagcctacatgaggccgctgagcatctgggccatgcagctggccctgcaacagcagcagcataaaaagggcaaaaggccagttgtcacacagggcacaagactaagcacagagcctgaacatgaaccaaagaaatcttggacaaacctaagcccagagtgatccccctgaactgtggaagcccagccaatacactggtctttcctcctccctcccaccactcctgcacgccctgagccactaggacaatcaagccctccttcttgctacccaactgtgccagtaaaagggccaaggaaccacttattactttcttaccctcccgttccttccaaataattacttaaaaaactaaaaaaaaaaaaaaaaa

SEQ ID NO: 6181 - DNA, 1062 bp, Cricetulus griseus
attttagattgggagtcgtccctgtgattccagctatgggttcctccgcatctactcctgctgctgcagcaaacaccccaaatgcttcagatcatcagccaccttcacggccttcaggatgcccaatgcatgagaggcaaaagaaagactgtccagtgactgcagtagcatctgatccaaccagtgagagcaaagcacactctgcacctgcccaccaagatcgggcctatgagtacgtggaatgccctgttactggtgctgcaacaaaggataaggagaaccttgatccttcaaatctgatgccaccacctaatcagactccatccccagatcagccatttgctttgtctacctcaagagaggagtcatctattccaagagcagactctgagaaaaagtgggtttacccttctgaacagatgttctggaatgccatgctacggaaagggtggaagtggaaggatgatgatattagtcagaaagatatgtataatatcattagaattcacaatcagaataatgagcaagcttggagggagattttgaagtgggaagctcttcatgctcgtgagtgtccttgtggcccatcattggtccgatttggaggcaaagccagaaaatattcaccaagggcaagaattcgttcctggatggggtatgagttgcctttcgacagacacgactggatcatcaaccgttgtggcacagaagttaggtatgtgattgattactatgatggcggcgaggtcaacaaggactaccagttcaccatcctggatgtgcgtcctgccttagattcattctcagcagtatgggacagaatgaaggtggcgtggtggcgctggacttcgtaaacacgaatttgtttgttatgaaaaaactgaaaatattttttgagaaagatgttaaactattttccccaaactaaatgcactcataatgttaccaagggtgcttttcaagtgtgtaatcaaacttgatctttcatgcaaagatgcaatgttccattaaattttgagtcacattttccattgcagttgaaaatgtgcatttaaatttttt

SEQ ID NO: 6182 - DNA, 1062 bp, Cricetulus griseus
gcgagcgctggggcggggcgggagaaagtggcggctggaggacctcggcggtgacgcgtggccgagcccaggagtcccgatctacgtgcccgccttcgtgagccgctggccgccggcctaggggtccccccgcagccgccccgcgtcgagtccgcagtccggcgccagcccgggcgaggtgggaatcgcgatcacccggtgatccacgcccgtagaccccccgaccgcccatggccacgcgggtgctgaccatgggcgcccgcctgggacccgtgtcccagccaccggccacacaggacgagccggtgttcgcgcagctcaagccggtgctgggcgctgcgaacccggcccgcgacgcggcgctcttccccggccgacgatctcaaaacacgcgcaccaccacccgcctgcgcagcccgcgccgccgccggccatggcgggccttaacacacacacctctgctgttccgcagactgcaatgaaacagttccagggcatgcccccttgcacatacaccatgccaagtcagtttcttccacagcaggccacttactttcccccatcgccaccgagctcagagcctggaagtcccgatagacaagctgagatgctccagaatttaactccacctccatcgtatgctgctacaattgcttctaaactggcaattagcaatccgaatttacctgccactctgccagttagttcaccaagcatccaacctgtcagatacaatagaaggagtaaccccgatctggagaaacggcgcatccactactgcgattaccctggttgcacaaaagtttatacaaagtcgtctcatttaaaagctcacctgaggactcatacaggtgagaagccctacaagtgcaactgggagggctgcgactggaggtttgctcggtcggacgagctgactcgccactacaggaagcacacgggtgccaagccgttccagtgcggggtgtgcaaccgcagcttctcccgatccgaccacctggcgctgcacatgaagcgccaccagagctgagctttaaaccgctgacctaacttcataataaa

SEQ ID NO: 6183 - DNA, 1062 bp, Cricetulus griseus
aagccgtcgtcgctttcggcatatttttaactctatgaagtcggggaccctttctctgccttggtaacatgaggtttttctttgtggaacgcgatcttgacactgtgggtcatggctgtgagttcagctttgattcctgagccagaagtgaaaatcgaagttctccagaagccgttcatctgccatcgcaagaccaagggaggggacctgatgttggtccactacgagggctatttagaaaaggacggctctctgtttcactccacccacaaacataacaatggtcagcctatctggttcaccctgggcatcctggaggctctcaaaggctgggaccaaggcttgaaggggatgtgtgtgggagagaagagaaagctcatcattcctcctgccttgggctatggcaaagaaggaaaaggcaaaatccccccagagagcacactgatattcaacattgaccttctggagattcgaaatggcccaaggtcccatgaatcatttcaagaaatggacctgaatgacgactggaaactctctaaacatgaggttaaagtgtacctaaagaaagagtttgagaagcacggtgcagtagtgaatgagagtcaccatgatgctttggtggagggatatttttgataaagaagatgaagacaaagatggatttatatctgctagagaatttacatatgtgcatgacgaattgtagggagaagcaagaatcttgattatccaattgtatagctctgcatcagtcctcagctaaacattccaacaagtatgaaagaaagacaaatctgtaatcatggttgttttagccatctgcctttttgtatagcaatatctttgaaccctcccatgagcgggaataatcaaacacccaactgtgacttcatatgtatatgatttgactcagaactcttctatgtgtcatatttacatttctatgtctattgtgatattctttttgataataaagtttatttgggaaataaaaaaaaaaaaaaaaaaaaaaaaaaaaaaaaaaaaaaaaaaaaaaaaaaaaaaaaaaaaaaaaaaaaaaaa

SEQ ID NO: 6184 - DNA, 1062 bp, Cricetulus griseus
gcggcggctgcgaacgggagcggaggcagcagcggcatggaggtggatgcagcagcccccagcgtgatggcctctggagtgactgggagtgtttccgtcgctcttcatccccttgtcatcctcaacatctccgaccactggatccgcatgcgctcccaggaggggcggcctatgcaggtgattggggctttaatcgggaagcaggaggggcgaaatatcgaagtgatgaactcttttgagctgctgtcccacaccgtggaagagaagattatcattgacaaggaatattactacaccaaggaggagcagtttaaacaggtgttcaaggagctggagtttctgggttggtataccacaggggggccgcctgacccctccgacatccacgtccataagcaggtgtgcgagataattgagagccccctctttctgaagttgaaccccatgaccaagcacacagatcttcctgtcagcgtttttgagtctgtcatcgatataatcaatggagaggctacaatgctgtttgctgagctcacgtacacactggccactgaggaagctgaacgtatcggtgtagaccatgtggcacggatgacagcaacaggcagtggggagaactccactgtggccgaacacctgatagctcagcatagtgccatcaagatgctgcacagccgcgtgaagctcattttagagtatgtcaaggcctcagaagcaggagaggtccccttcaaccatgagatcctgcgtgaggcctatgccctatgtcactgtctaccagttctcagcacagacaagttcaagacagacttttatgatcaatgcaatgacgtggggctcatggcctacctcggcaccatcaccaaaacgtgcaacacaatgaaccagtttgtgaacaagttcaacgttctctacgaccgacagggcatcggcaggcgaatgcggggactgttttctgatgagggttctagaagggatgatgtacagggctcagacaactgttactgggcactacattccccttagagaaactgtcattaataaaagagcagccccttagca

SEQ ID NO: 6185 - DNA, 1062 bp, Cricetulus griseus
ccggctgaggctgctcgggagggagctgcggttcgccgcttcatgattttctgccgattctgggcaaagatggccaccaatgatgctgttctgaagagactagagcagaagggtgcagaggctgaccagatcattgagtatctcaagcagcaggttgctcttctcaaggagaaagcagttttacaggcaactttgagagaagaaaagaaacttcgagttgaaaatgctaaactgaaaaaagaaatagaagaactaaagcaagagctaattcaggcagaaattcagaatggagtgaagcaaatgccacacccagtccaatctgatactccagtgcaagctagctctgcagtttctacaagtgtgatacagtctacatcggtatcaaccacctcttatagtataaaagaacagagtaaagagggggagaagaaaagaaggtaaaagagaaaactgataagaaaggagagaaaaaggagaagaaactgcagtcagcagcaccaagtgctgactcgaagccagtagatgtttctcgtctggatcttcgaattggtcgtattgttactgtcaaaaagcacccggatgcagactcactgtatgtagaagaagtggatgtgggggaggcagccccaaggacagtcatcagtggactggtgaatcatgttcctctagaccagatgcaaaatcgaatggtggttttactttgtaatctgaagcctgcaaaaatgcggggaatactgtctcaagcaatggtgatgtgtgctagttcaccagagaaagtggaaattctggcccctcccaatggatctgttcctggagacagaattacttttgatgctttccctggagagcctgacaaggagctgaaccctaagaagaagatctgggagcagatccaacctgacctgcacaccaatgctgagtgtgtggccacatacaaggggtctccctttgaggtgaaggggaagggagtttgcagggcccaaaccatggccaatagtggcattaaataagtactctgttactgaaggccatggagaaaccttagtaacaataaagaggagt

SEQ ID NO: 6186 - DNA, 1062 bp, Cricetulus griseus
acaatggcgccttccaggaagttcttcgttgggggcaattggaagatgaacgggacgaagaagtgcctgggagagctcatttgcacgctgaacgcggccaaggtgccggcagacaccgaggtggtttgtgcgccccccgccgcctacatcgattttgtcaggcagaagctagatcccaagattgctgtggctgcacagaactgctacaaagtgaacagtggggccttcactggggagatcagccctggcatgatcaaagacttaggagccgaatgggtagtgctagggcactcggagagaaggcacatctttggggagtccgatgagttgattggacagaaagtggcccatgccctatccgagggccttggagtgatcgcctgcattggggagaagctagatgaaagggaggccggcaccaccgacaaggttgttttcgagcaaaccaaggccatcgcagataatgtgaaggactggaacaaagttgtcctggcctatgaacctgtatgggccattggtactggcaagactgcaacacctcaacaggcccaggaagtacacgagaagcttcggggatggctgaaatccaatgtctctgatgcagtggctcaaagcacccgaatcatttatggaggttctgtgactggagcaacctgcaaagagctggcaagccagcctgatgtggacggcttccttgtgggtggtgcttccctcaagcctgagtttgtggacatcatcaatgccaaatgttaaacaccagcatcttccctaccctccgctaggccaggattaggttgcccaggagcttaggaactgctcccacaagtcacatgcttctgatgtcatcgccccatcttgtttgctaatccacactgtaccttcctacacctttgacacctccctataaaggttgggaccaggccaatccctttaccacttacaatgaatgaaacaatgtcacctgaaactctgagaggccaggggtgtcccatctcccacaatgccgaagccctagtactgtgtttgtgaaccatcttacatgtaaaggaaataaacacctgg

SEQ ID NO: 6187 - DNA, 1062 bp, Cricetulus griseus
cccctctttctccttcaattatatatattaaccaggttagtgttgagttagaaattaaatttctgagttcaagcatatctttttaagtttaaaaaactacaaggcattgtttttgctaggtagactggcatccaagtagaggctgcctgggttttttgtcccccccgtataaccagggaccatctgaaaagtcaattttttagccagatagctattgtgagcataagcgtcagtgtttagcaggaacttctgagcagcatgcttggcatccttttgttttccttactgttttacagaatacgaagctaagggagagtggtgggcacagaagtgtggcaaccctgctctgtgctttgaaaccaaagtgtgtgtcctgtctgtccgtctcacctgccaaaaggaagtgtctaatcatggacactgaccagcctgttacagatacttctttctacaaccaaattcagatttatttatttattaagcatcataccacaggctatcctgtgctactgcagctcttgaaaacaccccttctgtaaacgcctttggggatgaagcagtagctaggttgcttgcctcccctgtctaccagaagcataatccagatagaattaacagctgatttcccatttcatgagctcctttggtccgggtacagcagaaaactagcagttttccttttagttcaatgagttctgcttcctcatctgtcctttgtcagaacaggaacaggcaaacccaaacacctggagctcaatcaacctacttaggggaaagggcttcagtattaagctgtggactgcttatgtggttgtgcagtcacacaattcattgtgtgacttctcatctaaaaggttggtggcttttgcttgggatcagtgctctgctaatgcctttgctggtctctcaacacattcctgtcattgagacttgaattgtaggtgtgatgttaaggcacaggatgctaagagctatgttactactattcttagtttgtaaattgcccttttgataccatcttgttttcttttgtaggtataaataaaaattgacaataaaggt

SEQ ID NO: 6188 - DNA, 1061 bp, Cricetulus griseus
gctgagttccagccatggggtcttcgggcctggctcgcctgcagggcctcttcgcggtctataaacctcccggcatgaaatggctgcacgcgcgggagaccgtggagctgcagctgctgaaaggtctcaatgcagcgaagcctcctgctcctgaacagcgtgttcgcttcttgctaggccctgtggaaggcagtgaagagaaaaagttgacactcacagccaccagtgtgcccaccctcactacccacagacttgtacgtggcccagcattcactagcctgaagattggtgttggacatcacttggatgcccgggcttctggtgtgcttgtgctcgctgtgggacatggactcagactgctcaccgacgtgtatgatgctcacctcaccaaggattatacagtgcgaggcctcctaggcaaagctacagacagcttctgtgaagatgggcggctgatagagaagacgacatacgaccacgtgacgagagaaatgctggaccggatcctggctagaatccaaggctcccaccaaaaggcactggtgatgtactccaacctggacctgaagtcccaggaggcctatgagatggccgtgcagggtgtgatccggcccatgaacaagtccccgatgctcatcactggtacccgctgcctgcactttgcacctcctgagttccttttagaagtgcagtgtatgcatgagacccagcagcagctgaggaagctggtgcatgaaattggcctggagctgaagactgccgctgtctgcacgcaagtgcggcgcactcgcgatggcttcttcaggctggatgatgccctcctgagaacccagtggaatctacacagcatccagggtgccatccagtctgcagccccccgggtggcagcagagctggaaaggaacttgagactgaggttgggccaccagcagctccccagtgctgggcagccttggggctccaaggacccaagctccactgtggaggtggaaagctattcggggcagtgatcaggagttcaaggtcatctttggcttcatgagttctaggctacatgaaac

SEQ ID NO: 6189 - DNA, 1061 bp, Cricetulus griseus
agccaggcagccaagaactcaggaggcagtcaaggcctgggtggtggcccaagcagtcacagccacatcaccactgccaacaaggtggagacactgaaggaagaagaggaggagctaaagaagaaggtggagcagtgcaaggatgagtacttggctgacctgtaccactttgccaccaaggaggactcatatgctaactacttcattcatctcctggagattcaggctgattaccatcgcaggtcactgacctcccctggacacggccctagctgagctgagggacaaccacagccaagcagactcccccttgatggtggctgcccccatctccagggtatatggggtgtccctgagaacccacctggaagagctaggccgtgacatcgccctgcccatcgaggcgtgcgtcctaatgctgttatcagagggtatgcaggaggagggcctcttccgtctggctgctggggcctctgtgctgaagcgtctcaagcagacaatggcctcagatccccacagcctagaggagttctgctcagacccccatgctgtggcaggtgcccttaagtcctatctccgggagctgccagagcccctgatgacctctgacctctatgatgactggatgagagcagccagcctgaaggagcctggggctcgcctggaggccctccgtgatgtttgcagccgcctgcctcaagagaacttcagcaacctcaggtacctgatgaagttcctggcactgctggcagaggagcaagaagtgaacaagatgacacccagcaacatcgccattgtcttggggcccaacctgctatggcctcctgagaaggaaggggaccagacccaactggatgcagcctctgtgtcctcaattcaggtggtgggtgtggttgaagcgctaatacagaacgcagaaacgctcttccctggagatatcaatttcagtgtatcaggcatcttctcagccctggccccccaggaaaaggtcagtagccaacggacctcagaggaattgccacctgctgcagcgcctacgccagctgccaccccagttccca

SEQ ID NO: 6190 - DNA, 1061 bp, Cricetulus griseus
ccttgatccagccatggcttctgctgtggtgcggctgctgcagcggggccctcgctgcctcttggctccggccgcccccacactggtccccccggttcggggagtgaagaaggggttccgggcagccttccgcttccagaaggagctggagcgatggcggctgcagcgctgcccgccgccacccgtgcgacgttccgagaagccaaactgggattaccatgcggaaatacaagcctttggggctcggttacaagaaaccttttccttggaccttctcaaaactgctttcgtcaatagctgctatattaaaagtgaagaggcgaaacgtcagaaacttggggttgagaaagaagccgttcttctgaatcttaaggacaatcaagaactatctgaacaagggctgtctttttcacataagtgcctcacacagtttcttgaagatgagttcccagatttgcccaccgaaggcattgaaagtctagttagctttcttactggtgaggcagttgtctgtcatgtggctagaaacttggctgtggagcagttggcccttagtgcagaattccctgtccccctgcctgtattgcggcgaactttctttgcagtgattggagccctgctacagagcagcggacctgaaagggctgcacttttcatcagggactttttaattacacaaatgacagggaaagagctctttgagatgtggactgttgtaaatcctatgggactactcgtagaggaactgaagaagagagacatttcggctcccgagtctagactcaccaggcagtctggaagcacaactgctttgcctttgtattttgttggtttatactgtgataaaaagctggttgcagaaggacctggggaaacggtactagttgcagaggaagaagctgctcgagtggcacttaggaagctctacggattcacagagaacagacggccctgggactactccaagcccaaagagagcgcgaaagcagagaaaaccagcattgccagttaggcagcaagcagggtaacaccatcctgtctagagcaaagcagtgagacag

SEQ ID NO: 6191 - DNA, 1061 bp, Cricetulus griseus
aggaaacaaattaccccgaactccagaaaatttgataactgaaattaggaaattcaataggagaaaaaactagttgaaactgaagataatagaagttcagaagggattctagtagatgtcaaagctagagaagtggcaccagagtcttcacctgtactgaataatcagagagaactaagcatggctattttttcctccgattttgatcaatcctatttgcctgaagaaaaaactgttccagatcagctcagaagtgtgcctcaaaaaccactggtaacaagtcagatcggcgaccccccaacagaagacgaatcagacttggtaaataagaaatcattttctgagcaagatttagagtgtgtgaccaccaggctttcagaaactggacaaatggaggcattttcccttgctgtggacagtggaatagatgtggtgggtagaagagaagaggactcttttcgaaaatcccaccactcacaagcttcttgtagtgaaccttccacacgtaaaactctgttctgggactcttttcagaggatgagtgacattggaatattacatgaaactcttccagaagaagttggtcacctaagtcttaatagttctactacttcagagaccaattttagactggaaccaaatagttatgtgcacagtgatgcttttccagatgatgatggaaaaagacaagccactccagaagtggattccagttttcaggctattctcatagttatgaggctctgaagaaatctcttaacaaaataaggcaagaatctcacctgtctaattccaagacacttgaacaagacaaagtaggattgagccctgtagccaaagacatgcaagcagatgatacacatacttttttgggcactcaagatttgttttacacagagccatcttcccacatgccctttgatgaaagaacacagtctttatcaccactaactaaagtttctctggtggagcaaaaaattgaggactacgttaccatgtagtctcagggaatttctgcctaacttaaaagtttacaaaaaaaaaaaaaaaaaaaaaaaaaa

SEQ ID NO: 6192 - DNA, 1061 bp, Cricetulus griseus
ggagctgcgtggagctagacttcgcgatgccgacgggcgactttgactcgaagcccagctgggccgaccaggtggaagaggagggcgaggacgacaagtgtgtcaccagcgagctcctgaagggaatccctctgcccaccggggacaccagtccagagccggagctactgcccggagagccactgccacctcccaaggaagtcatcaacgggaacgtaaagactgtgaccgagtacaaggtagatgaagatggcaagaagttcaagattgtcaggaccttcaggattgagacccggaaggcatcgaaggctgtggccaggaggaagaattggaagaagtttggctactctgagtttgacccaccggggcccaatgtggccaccaccacagtcagcgatgatgtctccatgacattcatcactagcaaagaggacctaaactgccaggaggaggaagacccaatgaacaagctcaagggccagaagattgtgtcctgccgcatttgcaagggcgaccattggaccacccgctgcccttacaaggacacactggggcccatgcagaaggaactggctgagcaactgggcctgtctactggggaaaaggagaagcttccgggagagctggagcctgtgcaggccacccagaacaagacagggaagtatgtgcccccgagtctccgggatggggccagtcgccgtggggagtccatgcagcctaaccgaagagccgatgacaatgccaccatccgagtcactaacctgtctgaggacacacgtgagactgatctccaggaactcttccggccttttggctccatttctcgtatatacttggccaaggacaagaccactggccagtccaagggttttgcttttattagcttccaccgccgggaggatgctgcacgagccattgcaggggtgtctggttttggctacgaccacctcatcctcaatgttgaatgggccaagccatcaacgaactaataagacacctgctgcctgctgctgtcacccagaccctcagggacagaaagcttccattaaatagactccaaa

SEQ ID NO: 6193 - DNA, 1060 bp, Cricetulus griseus
cccgcctcgcgtaggctgtcgcggcggttgcccggggcttagcggctctcgtgtccccctggctccgcggctgcctggcccaatggcgcctcagcggaggggaccacccagagttccggagggaagctctgcagccgagcgccggcgcgcgaacggcaccaagaaggaccggctgcctcgggaggcacagaggacatggctaaggactgtggcccttggagtaggtcttgctctgatcacattcctgctctggagtagtctggggattgatgacgatgttgctgaagtcttggcccgtcgaggtgaggtcctagaaggcaggttcattgaggttccctgctctgaggactatgatggtcaccgaagatttgaaggctgcacccccaggaagtgtggcagaggtgtcactgacatggtgatcaccagggaggaggccgagcagattcgcagaatagcagagaaggggctctccctaggtggatcggatggaggggcatctatcctggacttgcactctggggccctgtctgttgggaaacattttgtgaacctgtacagatactttggggataaaatacaaaatatcttctctgaggaggacttccagttatatagggatgtgcggcagaaggtccagctcaccattgccaaagcttttggcatcagtgcatccttgctgtatctgacaaagcccacattcttctcccgaatcaatagtacggaagcccagacggctcacgatgagtactggcatgcacacgtagacaaggtgacctacggctcctttgactacacttcactgctttacctgtcggattacttagaggactttggtggagggcgctttgtgttcatggaggaagggtccaacaggacagtggagcccagagctggtcgagtctctttctttacctcaggctctgagaacctgcaccgggtggagaaggtcctgtggggcacccgctatgccatcaccatcgctttcacctgcaaccctgaccatggcatcgaggacccagtactcacgtaacgaagctaggttgggtcctgaggaccatgt

SEQ ID NO: 6194 - DNA, 1060 bp, Cricetulus griseus
ggccgtgactgccaataccgacgtcagcagcgccccatccgagcaagattaccaagacctgtatgtattctgtgtggtttcgaacaagtcctttagccaaattgagccttatttttttctacctgcaaagtggaactgacagtttgcgtctattgagctgttcatgaactaggcagtgttgtcatatgaagttgaacatggcagaagaagaagattacatgtcagattctttcattaatgttcaagaagatatcagaccaggcgtgccaatgctgaggcagatccgggaggcccgtcgtaaagaagaaagacaacaggaagctaatctgaaaaacaggcagaagagtgtgaaagaagaagagcaggaaagacgtgacatcgggttgaagaatgcactaggctgtgaaaacaaagggttcgctctgctccaaaagatggggtacaagagtgggcaggctctgggcaagagtggagatggtattgttgaaccaattcctctcaatgtcaaaacaggaaaaagtggcataggtcacgagtcattattaaaacggaaagcagaagaaaggctagaaaactacaggagaaaaattcatatgaaaaaccaaaatgaagaaaaggccaccgagcagttccggatgcgactgaaaaataagcaagatgagatgaaactcgaaggagacctgaggagaagccagcgagcttgccagcagctggatacccagaagaatattcaggttcccagggaggcatggtactggttaaagcctgaagaggagactgaggaagaggaagaggaagaacaggatgaagatgaatgcacgagtgaagatttgagtgcactggaaaaactgcagatactcaccagctacttgcgagaagagcatctatattgcatttggtgtgggacagcctacgaagataaagaagatctatcttcaaattgcccaggaccaacctctgcagatcatgactgagattattcccaataaagcatggacattgaaataaaataaaaattatttttaaaagaataaaaaaaaaaaaaaaaaaaaaaaaaaaa

SEQ ID NO: 6195 - DNA, 1060 bp, Cricetulus griseus
agttcaagtgaaccaggcggctgtctgaggcgggcagaacagatccaggctcgcagaagcgtgaagaaggagtggcaggctgcgtggctcctgaaggctgttacatgtatagacctcaccacactttctggggatgacacgttctctaatgttcaacggctctgctacaaagccaaatatccaatccggcaagacctcttaaaagctttaaatatgcacgacaaaggcatcaccacagcggccgtctgtgtttatcctgcccgggtatgcgacgctgtgaaggcgctgaaggccgcaagctgcagcatccctgtggcatcagtggccactggctttccagctggacagactcatttgaagacacgactggaagagatcagactggcggtggaggatggagctactgaaatcgacgtggtcattaacaggaccttggtgctgactggccagtgggaagccctcctcaccaacatctacaaagccagcctggtagcaatgatggcaggatcagattttattaagacttctactggaaaagaaacggtaaatgccaccttcccagtagcgatcgtaatgctacgggccattagagatttcttctggaaaactggaaacaaggtaggctttaaacctgcaggaggcatccgcaccgcaaaggagtcccttgcatggctctctcttataaaggaggagctgggggatgagtggctgacacctgacctcttccggataggggccagttctctgctctcagacatcgagaggcagatataccaccacgtgactggacggtacgcagcttatcatgatcttccgatgtcttaggtcagcagccagcccagaaaagcatcttgcaacaacttgtaaaaaatatcttttgcataattgccaaggttatataatttaagaataggtaactgacttttccccaataaaatctcccctgaaactaactcaaaaaaccaaagaaacaaatacaatttgaaactgtaatgtggaactctgatcaaagtgaggctgaaatgctcttaattattaggaggtctacaattattaattt

SEQ ID NO: 6196 - DNA, 1060 bp, Cricetulus griseus
  modified_base (1003)..(1003): a, c, t, g, unknown or other
cgggagtggccctctgcttgtgattccgtctttgcggtgggagtcatggccactcgtcgagctctgcacttcgtcttcaaagtggggaaccgcttccagacggtgcatttctttcgagatgtcctggggatgcaggttctacgccatgaggaatttgaagaaggctgcaaagctgcatgtaatgggccttatgatgggaaatggagtaaaacaatggtgggatttgggcctgaggatgatcattttgttgcagaactgacgtacaattatggcattggagactacaagcttggcaacgacttcatgggaatcacacttgcttccagccaggctatcagcaatgccaggaagctggagtggccactcaaaaaagttgcagaaggaagttttgaaactgaggccccgggaggatacaagttctatttacaagatcaaagtctacctcagtcagatcctgtattaaaagtaactctagcagtgactgatatccagaagtccttgaactactggtctaatctcctgggaatgaacatttatgagcaggatgaggagaagcagagggctgtgctgggctacgctgataaccagtgtaaactggaactacagggcatcaaaggtgcaattgatcatgcagcagcctttggaagaattgctttttcttgtcctcagaaagagttgccagatttagaagatttgatgaaaaaggagagccaatcgatcctgacaccactggttagtctggataccccagggaaggcgacagtgcaagtagtcatcctggctgaccctgatggacatgaaatttgctttgttggggatgaagctttccgagaactttctaagagggatccaaaaggcagcaagttactggatgatgcaatggcagcagacaaaagtgatgagtggtttgccaccagaaataaaccaaaggcttcgggttaatggatgacatgtgagaacagcacctacgactccagtcaaaacaaacaaacaaacaaaaaanaaaaaaagttaaagttgttgtggtcatgatgcctcttcacagcagtaaaacccctaa

SEQ ID NO: 6197 - DNA, 1059 bp, Cricetulus griseus
  modified_base (104)..(104): a, c, t, g, unknown or other
agagagctgtcgggaaggaaggtgaatgtgtcaaacctttcacaccagagaaaagcaaaagaaattataatgtctttacagcagcctgcaatcttctgtaacanggtttttgattggcccgcacaacactggactgcggaacacctttccagggtcctgcagggcaagcagatccgattcagaatgggcctgagaagcacagatacagttcctcagttttgaaactgcatgtagttacgtggatgctacactttgaggagtttctgacctggaactgtgaccagtctagtgtctctggaccattttaaagattatgaccattccaaattctgggcttatgctgactataaatatttttgtcaatctgtttgaagacaagacaaatgttttccaggaggtgatgtggtctgactttgggtttcctggaagaaatggacaggaaagtacactgtggatcggctctctgggagcccatactccctgtcatctggactcctatggctgacaaacttagtattccaggtacaaggaaggaaaagatggcatctttttcctcctgaagatatgcctttcctttatccaaccagaatcccttacgaagagtcgagtgtgttcagtaaaatcaatgttgtcaaccctagaattttaagaagacgtttaccctcaagttccagaaagctcgaagacatacggtcacactgagcccagggcaggttctgtttgtccccagacactggtggcattatgtggaatccattgatcctgtcaccgtcagtataaactcctggattgagctggaagaggaccacctagcccgggtggaagaggcaatcacccgcatgctcgtatgtgcccctgaagactgcagaagatccacaccatcccagagcctggctgaaaccccactgaggttgaagaaacatctcatgaagtcaattgctgctacttaaatgatgctgtttgtgcttttttgaccattgtggaaaagctaaagaagtagagacgcaggcactgagagcaaacgggggagccaagtgtgcaggagcacatggaagtgga

SEQ ID NO: 6198 - DNA, 1059 bp, Cricetulus griseus
ctgtgcggagacctcaatgcccagacgtgtgaggagcaggaggggcgctgccacgacgcctcgggctcagccatgggtggctccggagccgggagcatcggaccattgtgccctcctttgcagtgcaatcaggacgaagactccttgactttgctcatccaagtgcctcagattcagccgcaaagtcttcacggggacctgagccccctccgatacaatttgtgcttctccacacaagactcaggctattgcttcactttgcagtttgctccagagaataaattgagtaccagagaacccgtgattagcatttctttaaacaatgcggtgatagtactggcaaaatctccggagagccgtggacactggcgagaatggtattgtggcttgaacaccgactctttggaggaaagattgtttcttgatgaagaaaatgttaatgagtttcttgaagaggtcctgcattccccgttgacacaggagaggtccctagcccccccaccattgattgaagttcttcaggttacagatgagaagattcagattcatgcaaagttgcaagaatgtagtggtcctgatgggcttcaaggagaggaaaaaggagtcagtgaaggatgtcctctaagtgaaaagggagacacagaacattttaccacctctaccactgattccgattcatctgtagcagttgaagcagtaaaaacaaacacttgtggctcagctgtgggccctcaacacatttgtcctgatcttcctcacatgctgtctggaaaacctcagcaaccggaggcaaaaacggaccctgagtttataaaagaaaacgatgctacctactcaacagaggaaaaggaaaatataaaaagagccagtcataaccaaaaaaaaaaaattagatggagatcaacctgtcttcattactggacaaaacggcagttcaagacaaagctgactttgagagcatcaaagaaaccaatatgcaggatggtagtgtgcagattattaaagatcacacaaactcaaatgtgcattcagtttccagaactctttgctgtatgattt

SEQ ID NO: 6199 - DNA, 1059 bp, Cricetulus griseus
  modified_base (146)..(146): a, c, t, g, unknown or other
ggccccgcctgaggtctggcagtcagtgacaacagccgggcacccactgcccaagcgtcatcaacagcaccatgcccgcactcttggagcgccccaagctttccaacgctatggccagggctctgcacaggcacatcatgatggancgggagcgcaaaacggcaggaggaggaagaggtggacaagatgatggaacaaaagatgaaagaagagcaggagagaagaaagaaaaaggaggaagagaggatgtcactagaagagaccaaggaacaaattctgaaactacaggagaaacttttcagctctacaggaggagaagcaccagctttttcttgcagctcaaaaaagtttttgcatgaagaagagaaacggagacgaaaggaacagagtgacctaaccactctgacatcagctgcctaccagcagagcctgactgttcacacgggaactcacctcctcagcatgcaggggagtcctggaggacacaaccgcccaggtactctcatggcagctgacagagccaagcagatgtttggaccccaagtgcttacgacccggcactacgtgggatcggcagctgcttttgcaggaaccccagaacatggacaattccaaggcagtccagggggtgcttatggaactgctcagcccccacctcactatggacctacacagccagcctatagtcctagccagcagctcagagcaccgtcggcatttcctgccgtgcagtacctatcacagccgcagccacaaccctatgccgtgcatggccactttcagcccactcagacagggttcctccagcctggtggtgccctgtccttgcaaaagcagatggagcatgccaatcagcagactagcttctctgattcatcttctctgcggcctatgcatccccaagctctgcatccagcccctggactcttggcttccccccagctccctgtgcagatgcaagcagcaggcaagtcaggctttgccaccaccagccaacctggccctcgactccctttcatccaacacagccaaaatccacgattctaccacaagtaacca

SEQ ID NO: 6200 - DNA, 1058 bp, Cricetulus griseus
ccgctccggctcgtcctcctccagccatggcggtcgcggcgctgcagctgaggctgatcctgtgcccggggtcgcgcggcctgcgcagcttcgcctcggccgccaggcccgcggcctcgagaggcggcccgcgttcggcatccagaagtgaacggccattaagaagaaaggctctgcctcctaggacggagaagatggatgttgaccaggactggcccagtgtttaccctgtcgcagcgccgtttaaaccctctgctgttcctctgcccattcgaatggggtatccagtaaagaagggcgtgcccatggcaaaggaggggaacctagagcttttaaagatcccgaattttctgcatttgactcctgtggcgatcaaaaggcactgtgaagctctaaaagatttctgcactgagtggccggctgcactagacactgatgagaaatgtgaggagcattttccaattgaggttgatacagctgactatgtgtcatcaggaccatcggttcgaaaccccaaagcacgagtggtaacattaagggttaaactttcaagtttgaatttagacaaccatgcaaagaagaaacttattaaacttgtaggagatcggtactgcaagaccactgatgtgctcacaatcaccacagacagatgccctctcaagaggcagaactatgactatgcgctgtatctcctcacagtcctataccatgagtcttggaaaactgaagaatgggaaaaaaataagacggaggaagacatggaagagtatgtatgggaaaacagctcctcagagaaaaacgttctccagaccctgctgcagatgagagcttcggatggcagcagtgtggcaccgagcagggaggagctgctggggaccaaggaggttgaagactaccagaagtgcattgttcaactcaagaatgagggcgagaatgaggagaacctctctcagtacaaagaatctgtgaagagactgttaaatctggcatgaaatttaaaccaggtgtctgctgtatcaattctatgatgtatttagtcactgatttgatataaatgg

SEQ ID NO: 6201 - DNA, 1058 bp, Cricetulus griseus
ccagctgcccacgacccaggggagctcagcggcggctggggagagttcgaaggcttccgggagtcttcggctaagtctgagccgttttctcagccctttgaactcccagggagagccgcagaccatcagccgcggagacccccttcagtcgcgaaagagcatggttcttgccaggggcagcagggtggaccctgggtgacaggcgctgctgctggcccatcttcagagtccatcctcagctatgagaaggtttttaggtttgcgtttcaagaagtcccagtggaacaggcaactgaagacgtttgttctttagaccatttcttagaaaaaagcagtgaagtgcatccgtgcctagactgtgttctgaatctaggaagctctggagagcccttcagaacactgacaccgggtctgcttcaccgtgtctctggagtgaatctcactgtcgggaaaacctctttcctggtcctcggcatagacgccacccagaagagcggttctggaggacaggatcatgttctagaaggttctgacctcagaaagccggaagagctgctggcagtcagcagtttccatctacaccactgcaaagccctgattcagaccaagctctcagggacatctggcagcagacagggcagcttacctacagcctgtttctgaagacaccactacaaggaaatgggcactacaccaccattccacaaaaaagatctttactccacgcaacctaaagatggcattctttagtaatggtgtttgctaaaagccaagagtactttgtaactttatgagatattttacacattcttactggtttgttttagtactagaatctgagaactgttctatggccactgttttcccggaacccatgttagttgcctagaacctctgtcaatctgcgctatacctcatgcactcagatctgaaggggtgcactgggaattcctagggcagagccggtttccattagcatttctggggacactgtaggctggcaccaggtgcctgatgacccctgcctggctcacagttggagccatgagttcagaagt

SEQ ID NO: 6202 - DNA, 1057 bp, Cricetulus griseus
gaagggtatgttggaggtcatcgaacaagtaagattatgaggtttgttgataaaattaccaagtcaaatatttccaaaagcaacggagacagagttcattaaaaagaagatcgaagaggtctctaatacacccctgctgctaactgtggaagtgcaagagtgtcgaggcaccttggcggtcaacagaaagtttttgtcatgccaaacatggatgatgtttatatccctttaatgcactccgccatggaccctcgctccacttcctgcttcctgaaagacccccctgtggaggcctctgaccagctgtgatgggtgaaaatgggacatcccccagtattatgagacctagctttttttttctttttttaagttctaccaggttttgtagcagcaaatgagcacatttggagcaaagctgtacaattggaaggctttcccttgcctcgactcctccaaagcttttcctcaggcagttggtgcacaatggaacatttttccactctacactttgtactcatgattgcagccctccacacgtggggaatatcactgtaacctgtgtggagtgtggttttgtgagccatttcatcggtggtaaagataggcatagcaacttttttcatattaaattgtgcgttttggaagcaagtagccataggacatacacacccacactttaccttgctagtcagcgtcaagcactacatttccacctgcacttgtgacctttctttaatgttgccaacttaagtttgagcatttgtatcagaatgtttagtttacagatttggggcctctaactgtataatttgcttcgaaaagacctaatacagttttgtttaaagctgcatccaatgtcaaaattaccttgggtaacttttgataatttaatgtctgtgcacaaagctagtagtgttttttttaaacagcaccttgcctgaagatgactttacagaaattaatatattaagaatttaatatttgaacctttattttaatcatcccaataaaacatgacaaattatttgaccattccagtcaatgtactgccctaatt

SEQ ID NO: 6203 - DNA, 1057 bp, Cricetulus griseus
cggccacttggagcagctctgccgcggggactgcactgtccgccctgccagacccgccccgactggggctcgccgtcgccagcagtctttgcactgcgacctcgggccctacgccgcctatggctgcgtcctgggactgagcccgcaggctgtgtgaccgagattccaaagagagagagagagaccgatagaagaagagaaggaggcggggcgggctcctggcaaggcatttgctcctgaatagagtcctgcaaagatggagaaggaggaggagacaacccgggagctgctgctgcctaactggcagggcagtggctcccatggactgaccattgcccagagggacgatggagtcttcgtacaggaagtgatgcagaactcccctgcggcccgcaccggggtggtcaaggagggggaccagattgtgggtgccaccatctattttgacaacctgcagtctggtgaggtgacccagctgctgaacaccatggggcatcacactgttggcttgaagttgcatcgtaagggggaccggtcccctgagcctggacagacctggacccatgaagtcttcagctcccgtagctctgaggtggttctgggcccagcccagccctcagccctggagtacaatgaccagaataaacccaagaaagccatcaacaaagccggggcagcttcagtctccaccccagatgcagggctgtagcagtggccaggaagaaaacccccactggagcttgtttttgcggctgttctttggagcattgttttaaaaatgggaaattacatcttgccatgccaaaggaaacaaacacctgcagttaaagggacaccttccctgagatggctttttggagcatgcacaatggtagctacagccacttttggatggaggctgtggctcaaggttgacgggtgctttctttcttgcaagggggtgggtgtgagcttatctttgcaactagggtgggctgtggcagctgtgggtatagatggctgtctacttacccacccaataaacatttgtcaagcaaaaaaaaaaaaaaaaaaaaaa

SEQ ID NO: 6204 - DNA, 1057 bp, Cricetulus griseus
gggcccccgcacagctcagtcccgcgctgcgccggtcccgcagtgtcctcccggtccagcgttcccgctcgcagacgacttccctggtgcagacatggcctcgggtgccgcctgcacgccagtgaagattggaataattggtggaacaggcttggatgatccagaaattttagaaggaagaactgagaaatatgtggatactccatttggcaagccatctgacgccttaattttggggaagataaaaaacgttgattgtgtgcttcttgcaagacatgggagacagcataccatcatgccttcaaaagtcaactaccaggcaaacatctgggctctgaaggaagaaggttgtacacatgtcctagtgaccacagcatgcgggtccttgagagaggagatccagcctggtgacatggtcatcatcgatcagttcattgacaggacatccctgaggcctcagaccttctatgatggaagccactgcagcgccagaggggtgtgccatatcccaatggctgaaccgttttgccccaaaacaagagaggtcctcatagaaacagccaagaagcttggtcttcgatgccattccaaggggacaatagtcacaattgaggggcctcgtttcagctctcgggcagaaagttttgtattccgtacttggggtgcagatgttatcaatatgactacagttccagaggtggtgcttgctaaggaggctggaatttgctatgccagcattgccatggcaaccgattatgattgttggaaagagcacgaagaagcggtgtcagtggatggggtcttaaagaccatgaaagaaaatgccaacaaagccaaaagcttactccttactaccataccgcaaatagggtcgatggaatggtcagaaaccctccgaaatctgaagaacatggcccagtgttctgttttaccaccaagacattaacacagcgtggctgccacaagaagacttacaacttctcgtctttgggggactttgcttaaacaaaaaaacgggaaagatttatacggccttcgtgcctttgcttggaaagaa

SEQ ID NO: 6205 - DNA, 1056 bp, Cricetulus griseus
cgcgagtcgggctggtgtgccgccaggcgcggggcgtgcggcgagcagagccggcaggagcgcgccgggcagctgccgccgccgtcccgtgcgcgggcggcaggatggagctgaattccctgctgctgctgttggaggcagccgagtacctggagcgtagggaccgagaggccgagcacggctacgcctccgtgctgcccttcgacggcgacttcgctaggaagaaaacaaagacggctggcctggtgcgcaaggccccgaacaacaggtcttcacacaatgaactagaaaagcacagacgagctaaactcaggctctacctggaacagctcaagcagctggtacccttgggccctgacagcacacgccataccactctgagcctcctgaagcgtgccaagatgcacatcaagaaactggaggagcaggaccgcagggcactgagcatcaaggagcagctacagcgggagcatcgcttcctcaagcgacgcctagagcaactatccgtgcagagtgtagagcgtgtgcgcactgacagcactggttctgctgtgtccacggatgactcagagcaagaggtggatatagagggcatggagtttggccccggggagctggacagtgttggcagcagcagtgatgccgatgaccactacagcctacagagcagtggctgcagcgacagcagctatgggcacccttgcaggcggcctggctgccctggccttccgtaggcgctatgtcctttgcttcttggcccacctgcctgcctacctagccaagcgtctcagccttccagtcctcccttaactgaagccagcctcgtcatgagcctactgctgtgccattctcgaagctacagttgctgcctggtctgcctgcctctgcctgcccaccctttggtcaggactcaaactgcctgccccttctctgcagggcaagatcccacgcagggaagcagggtcaggctctcacatctggagcccagcgtagtcacccacgatctgttctcagatttctaatcattccagaagtattaaatgtcattgctacaaa

SEQ ID NO: 6206 - DNA, 1056 bp, Cricetulus griseus
cgagccccgagcccatgacaggccaggggcagccggcggccggatcggcggcgtggagcacggtgttccgccacgtccggtacgagaacctggtggccggtgtgagcggcggcgtcctgtccaacctggcgctgcacccgctggacctggtcaagatccgcttcgccgtgagcgacggactggaagtaagaccaaaatacaaaggaattctgcactgcttgactaccatttggaaagttgaaggactgcgaggactctatcaaggagtaaccccaaatgtatggggtgccggtttatcctggggactctacttttcttttacaatgccatcaagtcgtataagacagagggaagagctgaacaactagagccgctagaatacctcgtctcagccgctgaagctggagccatgactctctgcatcacaaacccactgtgggtgacgaaaactcgccttatgttacagtatggtggtgttgttaacccctcgcagagacagtataaagggatgtttgatgcacttgtgaaaatatacaaatacgaaggtgtgcgtggattgtacaagggatttgtccctgggctgtttgggacatcacacggcgccctgcagttcatggcatatgagttgctgaaattggagtacaacaaacacatcaatagattaccagaagcccagctgagcacgccagaatatatctctgttgcagcactatctaaaatatttgctgtagcagcaacatacccgtatcaagttgtgcgagcccgtcttcaggaccagcatgtgtcttacggcggcgtgatggacgtgatcgtaaagacatggaggaaagaaggcatcggtggattttacaaaggcatcgctcccaatttgattagagtgactccagcctgctgtatcacctttgtggtttatgaaaatgtctcacactttttgtgtggccttcgagaaaagaaagtaagctagaagaagattccagcgtatctgcctgaggtggctgcagactcctttgtgtttgaaacacagaactcagaagatgacagcagagcaacacagct

SEQ ID NO: 6207 - DNA, 1056 bp, Cricetulus griseus
tgcctggccgggcgacccgactccggactctcggtgccaccgaggtgaggctgtcgccaactgaattttgttgcttgtgtcgccgccgcctgggcgcaagcgcggtcccggcccctcgctgcgcttgggcctggacaagcccggcgctgcgttcctgggggcccccgaagccccctgctccgcccggcagaactttctccagccctcgcttccttacccgctgctcccagccgcagctacagcaccgaggagcagccccagcaacgccagaagacaagaatgatcatcctaggggttctccaaccccatcaactgggtccggactcgaatttacgccttccttatctgggcctatttcgacaaggagttcaatatcgctgagttctctgagggggcgaagcaggcttttgctcatgtatctaagttgctgtcacagtgtaaatttgatctattggaagaacttgtagccaaagaggtcctacaggtattaaaagaaaaggtcacttcactgtctgataaccataaaaatgcacttgctgcggaggtagatgacattgtctacacatcaacaggggacatctccatttactatgatgagaaaggaaggaagttcgttaacatcctgatgtgcttttggtatctgactagtgccgacatccccactgagtctctgagtggagccagtttgttccaggtgaagttgggggatcagagcgtggaaagtaaacatttgcttagtgcaagctacgaatttcagagagaatttacacaaggagtaaagcctgactggactattgcacggattgaacactcaaagttactagaataatctttcttggaacaaatcaggatgtgaactcttaataatcgctgtgaaaaactaaggaagaaatgtttctggatcatttgatttttcacttaattaagtctgtggattacttttgtattatttggaaatattccttgcagtatattgacatgatacaataaagcattttccacaggtttatggtgttctttataggaggtcaaagtaaaagacagaactacagcacc

SEQ ID NO: 6208 - DNA, 1056 bp, Cricetulus griseus
gctgcatgccgaggggctgccctcaccttgcgctgccggcccggctccagtctcagatatggaccttcttcagttcctggtgtccttctttgtcctactattgtctggctcagaagtcacaggcacccaaaagacaaccctggacccaagcctcaagatttacaagaagatgtttgaggtgaagcggcgggagcagttgttggcactgaagaacctggcgcagctgaacgacatccaccagcagtacaagatccttgatgtcatgcttaagggactctttaaggtgctggaggactcccggacagtgctcactgctgccaatgtgctcccagatgggcccttaccccaggatgagaagctgaaggatgctttctcccacgtggtggagaacacagccttctttggggacgtggtgctgcgattcccaaagatcgtgcaccactattttgaccataattccaactggaacctcctcatccggtggggcatcagcttctgcaatcagacaggtgtctttgaccaggggccccactcacccatcctcaacctgatggcccaggagctggggatcagtgagaaagactctgacttccagaacccatttaaaatagatcggacagagttcattcctagcactgaccctttccagaaggccttgagggaagaagaaaaacgtcggaagaaggaggagagacggaaagagatccggaaaggcccaagaatctcaagatcccagtctgagttgtagccctggagcagtttggggcctaagagatcagcaagaggacagtcagaagaggcacaactgtgtggctgtggtgtagcagcaccaagcaccatggtgagcaccatccacttccagatggggactctcttcttcactcactgctgccctttgtgagggatcagtttagaaaggggacccagaagtgtcctgggagggtgtttatttcaaggagaccttaaaagaacatgatctctattctcagataactggggacaatcattgagttggttcatgagacaatcaacttgttgtctctactgctaaaagat

SEQ ID NO: 6209 - DNA, 1056 bp, Cricetulus griseus
  modified_base (1041)..(1041): a, c, t, g, unknown or other
  modified_base (1053)..(1053): a, c, t, g, unknown or other
ttgtggtgcctatgcaggatcagaggttggcatgctgtctgcggtcccacaccttgtcatgacaatcattgttcctatcggggggcaaattgcagattttctaagaagcaagcaaattctttcaacaactacagtgagaaagatcatgaattgtggtggttttggcatggaagccaccctgctattggttgttggctactctcacactagaggggtggccatttccttcttggtgcttgcagtaggattcagtggatttgctatctctggcttcaatgttaaccacttggatattgctccaagatatgccagtatcttaatgggcatttcaaatggcgttggcacactgtcggggatggtctgcccgatcattgttggtgcaatgacaaagaacaagtcccgtgaagagtggcagtacgtcttcctcatcgctgcactcgtccactatggtggagtcatattttatgcaatatttgcctcaggagagaaacaaccttgggcagaccctgaggaaacaagtgaagaaaaaatgtggcttcattcatgaagatgaactggatgaagaaacaggggacatcactcagaattatataaattatggtaccaccaagtcttatggtgccaccacacaggagaatggaggctggcctaatggctgggagaaaaaggaagaatttgttcaggaaggagcacaagatgcatacacctataaggaccaagatgattattcataacgaagctagttgctggattcatttctagtgttaaaaaatatgaattccaaacaggcacagattcccatcaagtgcaatctgtggaagttgtcatgtatgtcatttccattggggtcattcatcctttggtttgtgatttagaggtttactgtagaaataagtagatatttgttggacccatcaccacattagagagcacaactaaaatagttggcacatgtcatcctacagaagttaggaagccaaagctacttgatcatgcaaactgcacttacttacttattacactggactgtaactttttttnttttcaacaaanata

SEQ ID NO: 6210 - DNA, 1055 bp, Cricetulus griseus
gcgggtggtggacgatggcggcggcccaggccgtggaggagatgcggacgcgcgtggttctgggagagttcggggttcgcaacgtccacaccaccgacttccccggtaactactcgggttacgacgacgcctgggaccaggaccgcttcgagaagaatttccgtgtggatgttgttcatatggatgaaaatacactggagttcgacatggtgggaattgatgctgccattgctaatgctttccggagaattctgttagctgaggtgccaacaatggcagtggaaaaggttctggtttataataacacatccattgtccaggatgagatccttgctcaccgcctggggctcatccccattcttgctgatccacgtctgtttgaatataggaacccaggggaggaagaaggaacggagatagacacactgcagtttcggctacaggtcaggtgtaccaagaaccccaatgctgctaaggattcctctgatcccaatgaactctatgtgaaccacaaagtatataccaggcatatgacatgggtccccttgggaaaccaggctgatgtcttcccggagggtacgattcgcccagttcatgacgacatccttattgctcagcttcggcctggtcaggagattgacttggttatgcactgcgtcaagggcattggcaaagatcatgccaagttctcacccgtggcaacagccagctaccggctcctgccagacatcactctgcttgaacctgtggaaggtgaggcagctgaggaattgagcaggtgcttctcaccaggtgtaattgaggtgcaggaagtacaaggtcaaaagttggccagggttgccaatgctcggttggataccttcagcagagaaatcttccggaatgagaagctgaagaaggctgtgcgccttgcacgtgttcgggaccattatatcttttctgtcgagtccactggagtgttgccaccagatgtgttggtgagtgaagctatcaaaatactgatggggaagtgccggcggtttttggatgaactagatgcagttcagatggactga

SEQ ID NO: 6211 - DNA, 1055 bp, Cricetulus griseus
agcctcggtgtcagccatctttcaattgtgttcgcagccgtcgccgccgccgccgccgctctctaacgccagcgccgcctctcgcttgccgagctccagccgaaggagaaggggggtaagtaaggaggtgctcttaccatggctcgtacaaagcagactgcccgcaaatccaccggtggtaaagcacccaggaaacaactggctacaaaagccgctcgcaagagtgcgccctctactggaggggtgaaaaaacctcatcgttacaggcctggtactgtggcactccgtgaaatcagacgctatcagaaatccactgaacttctgattcgcaagctccccttccagcgtctggttcgagaaattgctcaggacttcaaaacagatctgcgcttccagagtgcagctattggtgctttgcaggaggcaagtgaggcctatctggttggcctttttgaagataccaacctgtgtgctatccacgccaaacgtgtaacaattatgccaaaagatatccagctagcacgccgcatacgcggagaacgtgcttaaaagtccactatgaggggaaacatttcattctcaaaaatttttttcctcttcctgttatcagtagttctgaatgttagatattttttccatggggtcaaaaggtacctaagtatatgattgcgagtggaaaaataggggacagaaatcaggtattggcagtttttccattttcatttgtgtgtgaatttttaatataaatgcaagatgtaaagcattaatgcaagcaaaatgtttcagtgaacacatttcaacagttcaactttataacaattataaataaacctgttaaaattttctggacaatgccagcatttggatttttttaaaataagtaaatttcttattgacggcaactaaatggtgtttgtagcatttttatcatacagtagattccatccattcactatacttttctaactgagttgtcctacatgcaagtacatgtttttaatgttgtctgtcttctgtgctgttcctgtaagtttgctattaaaatacattaaact

SEQ ID NO: 6212 - DNA, 1055 bp, Cricetulus griseus
cgcaaccatgagcgggaccttagcgaagatcgcggagatcgaagccgagatggcccggactcaaaagaacaaggctacagcacatcaccttgggctgcttaaggctcgtcttgctaagcttcgaagagaactcatcacccctaaaggtggtggtggtggtgggccaggagaaggttttgatgtggctaagacaggtgatgctcggattgggtttgtgggtttcccgtctgtggggaagtcaactctgctgagtaacctagcaggagtgtattctgaagtggcagcttacgaattcactactttgaccaccgtgcctggtgtcatcagatataaaggagccaagatccagctcctggatctcccgggtattattgaaggtgccaaagatgggaaaggcagaggtcgtcaagtcattgcagtggcccgaacatgtaatttgatcttgattgttctggatgtcctaaaaccattgggacataagaagataattgaaaatgaattggaaggctttgggattcgattgaacagcaaacccaatgctgatgtgactctgcgtagtgatgccacagctgatgacctcattgatgtggtagaaggaaacagagtttacatcccctgtatctatgtcttgaataagattgatcagatctccattgaggaactggatatcatttataaggtgcctcactgtgtacccatttctgcccatcaccgatggaattttgatgacctgttggaaaagatctgggactatctgaaactagtgagaatttacactaaacccaaaggacagttaccagattacacctctccagtggtgctgccctactccaggaccacggtggaagatttctgcatgaagattcacaaaaatcttatcaaagaatttaaatacgctttggtctggggtctctctgtgaaacataatcctcagaaagtgggtaaagaccatacattggaagacgaagacgtcattcagattgtaaagaagtgaaaacctcttctgctggccagccatagcaatgttccttatgaccaagtagcctcctcaaccc

SEQ ID NO: 6213 - DNA, 1054 bp, Cricetulus griseus
  modified_base (584)..(584): a, c, t, g, unknown or other
tgcgctatagcctggcggacgaggcagccatggacagcggcgcacgctggcagcggggtcgcctggtgctgcgggccccgggcccaggccatggccgcctactgcagctcttgaccgcccaagagctcaaagcccaagctccaagaggcatgttccagcatccgggaggtccggccatgcacacgcctggagatgcctgacaacctctatacctttgtgctgaaagtgcaggaccagacagacatcatctttgaggtgggagaccgaacagcagctgaactcatggctggaggagctcagaacaagcacaggccaagggctggagcgcatggacacagagttacccctttctttcatgtcagagcctggcccagccagctctccaaggggaagcacagactccctggaccaaggtgcttcacccgggacagtgttggacccagcctgccagaaaacagatcacttcctgtcctgctacccctggttccatggccctatttccagggtaaaagctgcacagttggttcagctgcagggccctgatgcccacggtgtgttcctggttgctccaccacttccagcgntcccccatcccacttgagtgtggagcagcctgtgatgtccggctctctggctatgtggtagttgtctcccaagcaccaggttcctccaacacggtcctcttccccttctcccttcctccctgggactcggagctgggtctttcccacctcaactctgctggctgtccccccagtctgggcgcagaggctctccctggccgagtgacacccccagagcaaatcttccacttggtgccttctcctgaggaactggccaacagtctgcggcacctggaactggagcctgtgagcaatgcccgggactcagactatgggatggactcctcttcacggagccaccttcgtgccatcgacaaccagtacacccctctctcacagctgtgcagggatgcaaacttgtgaatgtaatcatcgtctttccctccagagagctactggctgcagtgtaagccttccccagctcagatgtg

SEQ ID NO: 6214 - DNA, 1054 bp, Cricetulus griseus
aggccggaggccggagcgccgtccctgctgccgccgacatggagactctgtaccgagtcccattcttagtgctcgaatgccccaacctgaagctgaagaagccgccctgggtgcacatgccgtcggccatgacggtgtacgccctggtggtggtgtcttacttcctcattaccggaggaataatctatgatgttattgttgaacctccaagcgttggctcaatgactgatgagcatgggcatcagagaccagtagctttcttggcttacagagtaaatggacagtatattatggaaggacttgcatctagcttcctgtttacaatgggaggtttaggtttcataatcctggaccgatccaatgcaccaaatattcccaaactcaataggtttcttcttctcttcattggctttgtctgtgtcctgctgagtttcttcatggctagagtattcatgagaatgaaattgccgggctacctgatgggctagtgccttttgaggaaatcagtgaatcctggattggctcctgttagagaagctttagaggctgagccactcccctgtgcggtgaggagaagagtgaagagcagagtaaacgccacgttgagcgacaccctagcaagcatatgacagctaggactggaattcatgctatcagagacacgttcattacagtattttttctgatgacctcttctgatgtaccaactatgttaagtggcattttcttcttagttttttatttcccaaagaaaatatactccatttctaaaactttggtattgaataaagtgattatttttacaaccccttatcatttttggacatgatatttctgattttcagaaattaatgcaaatcgagaagtatatcgtgagacacttggacaaccggtcagttcctccagtggtgctttgcctttaaatggtgtgtgtggtactctgccatttcagacacatatgggagactgtttcctagacaatatgtatgaaaggagcagaaataaatgatttttctaattaaaaaaaaaaaaaaaaaaaaaaaaaaaaaaaaaa

SEQ ID NO: 6215 - DNA, 1054 bp, Cricetulus griseus
gactcaggacatgtgccaagatgagaaggtggtgagggaggatcacgcgtgggaaacgcataggcttctatcgaattcgaggagagatcggaagcggaaacttttcccaggtcaagctggggattcactccctaaccaaaggtggccattaagattctggacaagaccaagttagaccagaaaacccaaaggctgctatccagagagatttccagcatggaaaagctacaccaccccaacatcatccgcctttacgaagtcgtggagaccctgtccaagctccacttggtgatggagtatgcaggagggggggaacgtctttgggaaaattagcactgaggggaagctctctgaaccggaaagcaagctcatcttctcccagatcgtgtccgccgtgaagcacatgcatgaaaaccaaattattcacagagatctgaaagcagaaaatgtattttataccagtagcacatgtgtgaaggtgggagattttggattcagcaccgtaagtaaaaaaggtgaaatgctgaacaccttctgtgggtctccaccctatgctgcacctgaacttttccgagatgaacactacattggtgtctatgtggatatctgggctttgggggtccttttgtacttcatggtgactggtacaatgccatttcgagcagaaacagtggccaaactaaagaagagcatccttgagggtacctacagcataccccagcatgtttcagagccctgccaccggctcatccgaggagtccttcagccaatccctacagagaggtatgggatcagctacatcatgaataatgagtggatgagaggggtcccatatcccacccctttgccaacctttccaactggatcctaaacatttgtcagaagccagcagcctcgaagaagaagaaaatgaggtgaaaagcactttagaacacttggggattacagatgagcatataccgaaataaccccagggagagacgctcgcagctccatcacgggtgtctacagaatcattttacatcgagtgcaaagaaaaaaggctctggaaagt

SEQ ID NO: 6216 - DNA, 1054 bp, Cricetulus griseus
ggttgtcagctcgcgtcggtcgcgtcgcacggagatggcagacgatctgggagacgagtggtgggagagccagccggccgccgccggcagcccagaaccatccggtgatgaggaaggaagagacacagaaatgatgcagcaggacacagctccagttcctgaaccatcacaggaaaccaaacagcctatggagtgtttcttgacacaaccgaaggaaacaaaagaggaaacccggaagaccaagaagtggaaaaagaagaaaatttctgagattcttgcaaaatcagagcccaaaccagggactcccggagaccttcagcagctcatcaaggaccattacagtggcagtcgttccgtgattgagttggaagagctgaacctaccagactcctgtttcctgaaggccaatgatttgactcacagtctttcttcatacctaaaagaaatctgtcctaagtgggtaaaacttcggaaaacccacagcgagaagaagtctgtcctgatgctgatcatgtgcagctcagctgtccgagccctggagctcatcaggtcactgacagcattcaaaggagatgccaaagttatgaaattatttgcaaaacacataaaggtccgagagcaggtaaagttcctggagaatcgtgtgatacacctgggtgtgggaactccagggagaatcaaagaacttgttaaacaagatggccttaatttgaaccccttaaagtttctggttttcgactggaactggagagatcagaaactaaggagaatgatggacattcctgagataagaaaggaagtgtttgagcttctagatatgggagtgtttagcctctgcaagtcagagtccttgaagctgggccttttctaagcctgggtcctgatgaagtgtccagttgccaccatgctgcaagtgctcagtagctacctcctgtgatgtaattatattaagtgcgtcacccagtggatcattgggagtgctgcgtgcagattctttgacagctgcgaatgtgtcctttggctaatgccttcattcaataaagaagctctgcct

SEQ ID NO: 6217 - DNA, 1054 bp, Cricetulus griseus
tcaagttcgtttaggtcgtctctacctgtacagtttcaatgaggacaacacggctaaacctctggttgaggtccaaagaagggattcttctgccatcctggacatgaaatggtgccatattccggtgtctggtcacatacttttaggcttggcaaatgccaatgggtctgtagagctgctccgcctgatggaatatgagaagaacagttacaccctacaaccaatatccagccttatcctggaggagagatgtctgtccttgtccctggattggtcaactgggaaacctggaagggtcggagaccagcccttgaagatgattagcagtgattctaaggggcagctgcacctcctgatgctgagtgagggagcagctgaattacagcgagtggcttcatggccagcccatcactttgaggcatggatcgctgctttcaattactggcagacagaacttgtgtattcagggggagatgatggccttctgagaggctgggacactaggatgcttggcacacctgtcttcactagcaaaagacactccatgggtgtgtgcagcatccagagcaacccccaccaggaacatattctggctactggcagctatgatgagcatgttctgctgtgggacactcggaacataaagcagccattggcagatgtgccagtgaaaggaggcgtgtggaggctcaagtggcacccagtccacccccacctactcctggcggcctgcatgcacaatggcttcaagattctcaactgccagaaggccattgaggagaaacaggatgtgactgtcttaatatcgcaagaaatgccgaactcattagtgtacggagctgactggtcctggcttcttttccgttccaagaagcccacactcacctggtcctttgatcaaaatggcatgggagcattaattaacttttttttttttttttaattttagaaatactagtctttatttgtatgttgtgagccaccatgtgggtgctaggagtcaacctcaggacctctgaaagaacaacacagctgtgcttaacaactgagccat

SEQ ID NO: 6218 - DNA, 1054 bp, Cricetulus griseus
atggcggccagccgctcttccggcctcgcgcagggtgccggcccgtcgtccagcacccagccattctcggctttcccctccgggctgctggggccagctatgccatgcagtccacccctggaacggagagcactgccagccaggccctggcccctgccacccagacacctgcacctggaggaggaggcgtccccgtggggtatggctgctcccagccccaagtgtgcagctgaccctgctgtgctccaacgaagacccacgcactctctcctacagaggatcaagcaagagctgcccaagagagctctcgatagtggcagaagacaagtatgaagtctcatctgaccatgatgccaacattgttatctcggcctgcgtggagccccggggtgaagggtcaccgtgtctgctacctcacctctgatgcgtgaagacccctccgtaaaacgaggactgcaagactctctgtctgacccagaggatgtcctggaccgggagagatgccttgagaccctggcagccctccgtcatgccaagtggttccaggctcgagccagtggcctgcagccatgtgtgattgtcatcagggttttgcgggagctatgtcgctgcctcgcccccctcggggggcgtctgcctgcctgggccatggaactgctggtggagaaggtgctgagcagtgcaccccggcccctgagcccaggggatgctatgcggcgggtcctggagtatgtggccacaggtgcgctcctcacagatggcccagggctacaggatccctgtgagaaagggccacaggatgccctggagcccatgaccccacagcagcgagaagacctaacggccagcgcacagcgtgccctgcgtctcgtggcctttccgacagatacacaaggtccttcacatggaacagttacccccacggaccagatttggggcctgggcccgggcccggaagaggataagggaggctagtcaggcccaggagggagccggggagaggaagcggggccggcagggcacagctggactgctatgagccagtcatcaccac

SEQ ID NO: 6219 - DNA, 1053 bp, Cricetulus griseus
aaagggttcaaagacaccagtcagtatgttgtaggagaattggcagcactagagaatgagcaaaagcaaattgacacccgtgccgcgctggtggagaagcgcctccgctatctcatggacacaggaaggaacacagaagaagaggaggccatgatgcaggaatggttcatgctagttaataagaaaaatagccctaataaggaggatgaaccagctctccctactggaaaaagaacatgacttagaacgaagatatgagctgctgaaccgggaactgcgggcgatgctagccattgaagactggcagaagaccgaggcccagaagcgacgggaacaactcctgctggacgagctagtggccctggtggacaaacgggacgcccttgtcaggggacctggacgcccaggagaagcaggcggaagaagaagatgagcatttggagcgaactctggaacaaaacaaaggcaagatggccaagaaggaggagaagtgtgctcttcagtagcctgcagaccagacctctcccagcagcttagccttagtccccaggccaggaacagactggttgatttaaagtgggggggggggcaaaggggaataagaaactgtcatgaatgaatttttcccaatcccgaagtatgccgtatgtaacactgttacctgaatctcatagttagatcatattctgtgtattgacgaaactgtgtcccatttgccagtggggttttctgcagttgtttgcatttcacataaagataataaagttcctctctgctctcctcggaggatggccctttaaggtagcctgagataaaccctgtggtttgaaaggtgagctgtgagaaaggctctactagatgagcagcagtttacaaagacagttgtatcatctgactatgcgccatctttttctctgaataattatttattacattcttgcttggttcctacttttgttgggtctcaacgttggctcaagaatgctgttaatatttatttctgttattgataagtctgttcttggcactacaagtaaatctcagattgcatct

SEQ ID NO: 6220 - DNA, 1053 bp, Cricetulus griseus
tttataactgcttacaaaaatgccaccatatcaccaacatgaagaagagaaattcttcctcaatgccaaaggccagaaggaaatattacccagcatctgggactcacctaccaaacagctgtctgttgttgtgccttcctacaatgaagagaaacggttgcctgtgatgatggatgaagctctgaactacctagaaaagagacagaaacaggactctaagttcacttacgaggtgatagtagttgacgatggcagtcaagaccagacttcaaaggtggctttcaaatactcccagaaatacggaagtgacaaagtacgcgtgataacgctggtgcagaaccgagggaaaggtggtgccgttaggatgggtgtattcagttctcgaggagagaagatcctcatggctgatgctgatggagccacaaagtttccagatgttgaaaaactagaaaagggactgagtgctctccagccatggcctgatcaaatggccattgcttgtgggtctcgagcccatttggagaaagaatcaattgctcagcgctcttacttccgtactcttcttatgtatgggttccatttcctggtgtggttcctttgtgtcaaaggaatcagggacacacagtgcgggttcaaattactaacccgagaagcagcagcccggaccttctcatctctgcacattgaacgatgggcatttgatgtagaactgctgtacatagcacaatttcttaaaattccaatagcagaagttgctgtcaactggactgaaattgagggttctaagttagttccattttggagctggctacaaatgggcaaagacctcctttttatccgacttcggtatctgatgggtgcctggaggattgagccaacaaggaaagtgagttagtttgctgtcagggctggactgcatttttacatgcaagtgtcatgcaatttcacctgaaatcaggattttcaataaagctgcgatggacccattgtcactatctgcctttgtatgctcttaagaattaactgccatgaagaaaccatgagatgtctttt

SEQ ID NO: 6221 - DNA, 1053 bp, Cricetulus griseus
cgcggcccggagcaagagaggtggagaagagcgggtgtttgagaaagaagaggaggaagatgatgaagaggaggaggaggaggaggaggacaatgtgtcagagggctcagaagtgcctgagagtgaccgccccgcaggtgctcagcaccaccagattaatggagagcggggccctcagagtgctaaggagagggtcaaggagtggtcgccctgtggaccctaccagggccaggatgaagggcggggaccagcacctggcagctgcacacgccaggtcttctcgatgacagctaagaataaagaagggggaatcagcttgtgttgcggctgctccagattctccatctcctgtgccttttcgcccccaaggaaaaccagctctacctggggctgatgggacaccaatttggctgtcctcctgggcgcaaagagaaaccgagtgacccagtggagtggacggtcatggatgtggtggaatacttcaccgaggcaggtttcccagagcaggccactgcttttcaggagcaggaaattgatggcaagtctctgttgctcatgcaacggacagatgtgctgactggcctgtccatccgcctgggcccagccctgaagatctacgagcaccatatcaaggtgcttcaacaaggccactttgaggatgacgaccctgacggttttctaggctgagcaccagccagtcttgcccctccccagccagtctcccccttttctcatcacatccctaccttagtacatccctctccacagaggtggagtgtggggtagttggacttggttggctcattacaggggccaccctttctccccaaccccaaacattttttgaaaaaaaaaaggggggggagtttcctgtggccccaaacctcttcagttcagccagatgtatcttatatacgtgtttcgttctgcctgtccttctggtggtgggttttcccgtcacccccggtgccctccccacaccttgacctccaacctctggagaacaggtgaggtaagggaccttgggtcccctggctccttcttctgtctgtc

SEQ ID NO: 6222 - DNA, 1053 bp, Cricetulus griseus
ggagcgctgcgccgtgggcggttgcaggagggcgcgggctgccggtgagactgcggtttccctccgtggccgccgccgccgccgccgccgccgcgatgcctcagttccagacctgggaggagttcagccgcgcggccgagaagctctacctcgccgaccccatgaaggtacgtgtggttctcaaatacaggcatgttgatgggaatttgtgtatcaaagtaacagacgatttagtttgtttagtgtacagaacagaccaagctcaagacgtaaagaagattgagaaattccacagtcaactaatgcgacttatggtggccaaggaatcccgcactgtctccatggaaacagaatgactggtttgaaatgaagactgtttgtatgttcttgggaagtagatagcttttgaaactgagaacgttggaaagaaaatatttatgtaactgagctgttgagagctgagggaccagcctgtactctgaggcttgctttagagtgggaatgtcactgcttgcagttacaaaacctttatttttggaaactgaataaataccctagaaatttttgcagatcatttgatgttgggcaaatatataattatttttctggtaaattcatatcagtaatttgttgaatataaacaagaaaagttagttctttctagattgtgtttaagaggaaataaagtgtaaccttttgctgtgttggtatgtttcttttggagcataacatttgtgccatttataataaacgtggcagctgaggtcactgctctgcagtgcacctgacccggcattgtgaaaaagcaagcttgcttctccttccttaccaggttcaaaactgtgtttgaatagaaaggattggtagcatctcagactgaactaaagtactaagcatagcatgcctctcagaactgttaggtctccaataagccagaagtctactatttcatatttaacctgtatttgtaatctaattttaccatctaaatgtaatgtcccatgttgtctgctcaagagtgaaggtattgcattaaagtatttttttgtaaaa

SEQ ID NO: 6223 - DNA, 1053 bp, Cricetulus griseus
ccctccgggaccgcctctccgccgccgcccggcctcctcgggcccgagcgcacaccgggctgtggccgcgcggagtcggcagcctcgcgctcccgctcgcccctccgcggccccgtcgctccccggacccctcagggcggcagctgccatgggtaccgacagtcgcgcggccggggcgctcctggcgcgggcccgcaccctgcacctgcagacggggaacctgctcaactggggccgcctgcggaaaaagtgcccgtccacgcacagcgaggagcttcgagactgtatccagaagaccttgaatgagtggagttcccagatcagccccgatttggtcagggagtttccagatgtcttggaatgcactgtgtctcacgcagttgagaagataaaccccgatgaaagagaggaaatgaaagtttctgcaaaactgttcattgtagggtcgaattcttcatcatcaactagaagtgcagttgatatggcgtgctccgtcctgggagtcgcacaactggactctgtcatcattgcttcacctcccattgaagatggagttaatctttccttggagcatctgcagccttactgggaggaactagaaaacctagttcagaataagaaaattgttgctataggcacctctgacctagacaaaacacagctggagcagctgtaccagtgggcacaggtaaaaccaaatagtaatcaagttaatcttgcctcctgctgtgtgatgccaccagatttgactgcatttgctaaacagtttgacatacagctactgactcataatgacccaaaagagctgctttcagaggcaagtttccaagaagcccttcaggagagcatccctgacatcgaagcccaggaatgggtgccactgtggctgctgagatactctgtcattgtgaaaagcagaggaatcatcaagtcaaaaggctacattttacaagccaaaagaaggggatcgtaactacaactcaagctcagtgcttactgacccgtgtttatctcaaacagaagataaaaattcaagatcaaattgaaatgtgt

SEQ ID NO: 6224 - DNA, 1053 bp, Cricetulus griseus
cctcctaagagcagcatgaaagccttcagtccggtgaggtccgttaggaaaaacagcctgtcggaccacggcttgggcatctcccggagcaaaaccccggtggacgacccgatgagcctgctctacaacatgaacgactgctactccaagctcaaggaactggtgcccagcatcccgcagaacaagaaggtgaccaagatggaaatcctgcagcacgtcatcgattacatcttggacctgcagatcgccctggactcgcaccccaccatcgtcagcctgcaccaccagagacctggacagaaccaggtgtccaggacgccgttgaccaccctgaacacggacatcagcattctgtccttgcaggcatctgaattcccttctgagcttatgtcgaacgatagcaaagtactctgtggctgaataaatggacttttttttttctttttactttacttctttcttttggaggacaatttgaaatggacctttttaaaaagaaaaacaaacggaaggaaaagggagagtgaccatcttccccagaagttctccaaccccggactgcgataccgttatttatgagagactttcaatgccctttctacagttggaaggttttcttttatatactattcccaccatggggatcgaaaaaatgttaaaaaaaaaaatcacaaggaattgcccaattgaagcagactttaccttttttcaaaggtggagcgtgactacccgaaggacccagtattcggttacttaaatgaagtctttggtcagaaatggcctatttgacatgagcctactgaatgctgtgtatatatttatatataaatatatatatataaaagtttagttgtaaacttaacccttttatacaaataaatcgtgtgtttattgaatgttgatgcttgctttatttcagacaaccagtgctttgattttttttattgatgctatgttataactgaacccaaataaataccagttcaaatctatgtagactgtattaagattataataaaatgtgtctgacgtcaataaaaaaaaaaaaaaaaa

SEQ ID NO: 6225 - DNA, 1052 bp, Cricetulus griseus
cccgcagcatctgtacagtcatggcggcggtgcctccggagcagcggcccgcggcggcccgggcccggaacttgccctgggttgaaaagtaccgaccacagaccctggccgatctcatttctcaccaggacattctgagtagcattcagaagttcatcagtgaggaccgcctgccacacctacttctctatggccctccagggacaggaaagacatccaccatcctggcctgtgccaagcagctgtacaaagataaagaattcggctccatggtcttggagctgaatgcatctgatgaccgaggaatagacattgtccgggggccaatcctcagctttgccagcacaaggacaatcttcaagaaaggctttaagcttgtgatcctggatgaagctgatgccatgactcaagatgcccagaatgccttgaggcgagtgattgagaagttcacagaaaacaccaggttctgcctcatttgtaactatctgtccaagatcatccctgccttgcagtccaggtgcacaaggttccgatttggccccctgacgcctgaactcatggttcctcgcctggagcatgtagtacaagaggagaatgttgatataagtgaagatggaatgaaggccctcatcactctgtccagtggggatatgcgcagggctctgaacattctgcagagtaccaacatggcctttggaaaggtgacagaagagaccgtgtacacctgcactgggcaccccctaaagacagatatcgccaacattctggactggatgctgaatcaagacttcaccactgcctacagacacatcatggagctgaagactctgaagggcttggctctgcatgacatcctgacagaggttcacttgtttgtgcacagagttgactttccatcttcggttcggatacatttattaaccaaaatggcagacattgagtatagactctccgtcggcaccagtgagaagatacagctgagctccctcatcgctgcttttcaagtcaccagagacctgatcgtctcagaggcctagcagatccaaggcctg

SEQ ID NO: 6226 - DNA, 1052 bp, Cricetulus griseus
ctcctgggacgtcagcatggcggcgttcgcagatttggacctaagagcgggctcggacttgaaggctcttcggggactggtggagaccgctgctcaccttggatattcagttgttgccatcaatcatattgttgactttaaggaaaagaaacaggaaattgaaaagccagtagcagtttctgaactcttcacaactttaccaattgtacagggaaaatcaagaccgattaaaattttaactagattgacaattatagttacagatccgtctcactgtaacgttttgagagcaacttcttcaagggtccggctgtatgatattgttgcagtgtttccaaaaacagaaaaactttttcatgttgcttgcacacacttagatgtggatttagtctgtataactgtaacagagaaattaccattttacttcaaaagaccccctattaatgtggcaattgaccgaggtctgggctttgaacttgtctatggccctgctataagagatgcgacgatgagaaggtacacaatttccaatgccctcaatttgatgcagatctgcagaggaaagaatgtaattctatccagtgctgcagagaggcctttggaaatccgaggaccatacgatgtggcaaacctagggctactgtttgggctgtctgaaaatgaagccaaggctgccgtgtccacaaattgccgagctgtatttctccatggagaaactaggaaaactgcttttgggattatttctacagtgaagaaacctcggccatcagaagtggatgatgactgtcttccagcttgcaagaaagctaaatgtgagggctgagaaggcctcagtctccatcagctgcctccctcttttcagctcatcggtcacagtggaagggaacttctgctgagttgatattttcattaaagccagaaactagcagtctgtaaaaacagctttatattcagactactaaaacagcaaataaaacccagtgaggtgttctctgaatactaacagttaaattcatttagatatacttaaagaaaaaaactagtttatcctt

SEQ ID NO: 6227 - DNA, 1051 bp, Cricetulus griseus
gctgtcaaagttgtggtgttcctcgggggtcggtcccgccaagcgtctcccaggtctctcctgctggccctggagcgcttcccccgtgcagggtgggagcgcggggacggacgagcgagatgagcaccatgtttgctgacacgctgctcatcgttttcatctccgtgtgcaccgcgctgctcgccgagggcataacctgggtcctggtttacaggacagacaagtacaagagactgaaggcagaagtggaaaaacaaagcaaaaaattagaaaagaagaaggaaactataacagagtcagctggtcgacaacaaaaaaagaagatagagagacaagaagagaaactaaagaacaacaatagagatctgtcaatggtacgaatgaaatccatgtttgcaattggcttttgttttactgccttaatgggaatgtttaattccatatttgatggtagagtggtggcaaagctccccttcactcctctttcttacatccaaggattgtctcatcgaaacctgctgggagatgacaccacagactgctccttcatcttcctgtatattctctgtactatgtcaattcggcaaaacattcagaagattcttggccttgccccttctcgagctgccaccaaacaggctggtggatttcttggccccccacctccttctggaaagttttcttgaaggaaaggagaattctttatttcctgtcatactttctggacattcacatcagactggcaagacacctggccacattctagttttgagttatttctcagcttttgaataggatcaaaatgagaatggcacttaacaattggtatagtgctgtgtggtcatggatgacttctttaataagtggactcattagttaaattgggtaatttatatgtaatcacaaatatcgtctttctttctcttcagtatttccatacacacacacacacacacacacacacacacacacacacacacacacatacacacacacacacacacacacacacacacacacacacacacacacacacacacacacacacatg

SEQ ID NO: 6228 - DNA, 1051 bp, Cricetulus griseus
ctggcaaaaagagcctgagtgcatctccaggggttggtaagaccagtgctggctccaggccacaagctgaggtggcagtactgaagggtccaggttccacctctcaggaaggccaggaggaagggccagagggatggagggcccgcctgaagccggtggataagagctccgacaccagcattcatgtcgtcttgactcccattcagcataagaggacaccacgcctggctgattccgggcccgaccctcccccagcccccctctccttctccatcacaccgtaagaaacttactgtccctcccagccttgatgtttctgctgattggctccagccagagctcaagaagcaggaaactcaggccaagaaccagaaggaggagaagacgcccacctggaggacaagagagaagcctgcagtcctggacagtgctcttgctccacatggtgatactgtaacctctccagtcaggctgcactccaactatatccctcaggaggagctgcagaggcagctgcaggacattgagagtcagctagatgccctggagctcaggggtgtagagctggagaagcggctgcgggcagccgagggagatgctgcagaggacagcctcatggtggactggttcctgcttattcatgagaagcagttgctgctcaggctcgaatcggaactcatgtacaagtccaaggaccagcgcctggaggagcggcaactggacctccaggatgagctgcggaggctgatagacaagccggagggtctgaagtccccccgagaccgccagcgggaacaggagctattgagtcaatatgtgaacaccgtgaatgaccgcagtgacattgttgactttctggatgaggatcggctccgggaacaagaagaggaccaaatgctggagaacatgatccagaacctgggcctccagaagaagaagtccaggttcagcttttccaagatctggtcctcaaagagcaaaggcgggcagacctgagctgcccagggctggtaccagagccctggcccttctcaggaagagactggtgctg

SEQ ID NO: 6229 - DNA, 1051 bp, Cricetulus griseus
gcatggcggtgttagacggccccgcaaagccgaatctggcgctgaacccgcaggaagactcgctgtttcagaaggaggtgacgcaagtccaacagcgcgtgaaaaagcaaaagaaggaaggaagtcttaaccctggagtgatctttctgggccacctgccttcaacactttctgaaacgcacatctatgactactttacccagtttggcactattagcagattcagattgtccagaagtaaacggactggaaatagcagaggatatgcctttgtggagtttgaatctgaggatgttgccaagatagttgcagaaacaatggacaactacctttttggtgaaagacttttatcgtgtaaatttatgccaccagaaagagtccataaagaactttttaaagaatggaatgttccgtttcaacagccatcatttccatcagtgagacgctataatcagaaacgggggcattttgaaatgttgaagatggaatatcggttcaagaggaaggaaaaattactccggaagaagctagccaagaaggggattgattatagtttcccttcgttggtcttacctaatccaaagaagtctgttgacagccagggtcccacaccagtttgtacaccaacatttttggagagacgaaaatcagaagtgaccgaaatcaatgacagtaaagatgatgaagtcattttcaaacagcctgtgtccacagtgaaagaagaggggcaaaacactccaacacctgcacgctctgggaaaaaaagagcaagaaaaaggaagagggaccagtgatcctgaaagcattctatgtgcatatctgggcagatgtgattttgttataaaggcccactttattttaccaggtgcagtcatgtgccagccactgatgagactgatggaggaaaaatgtgttggttcatgccaatgagaaaggccatcaggaacttggctgttttgccctctcctgacctgagtttgtattcaggcttcaatcaatttcaacaggtgtattcaagattcaaacagtgaccaaacttttctacaattta

SEQ ID NO: 6230 - DNA, 1051 bp, Cricetulus griseus
ccttgtgattctctttggttaccattgttggcttgtcagcagaaacaaaactaccttagaggccttttgcactccagtatttacaagtggaccagagaaaaatgggttcaacctgggcttcatcaagaatatccagcaggtgtttggtgataataagaagttgtggttaatacctattgggtccagccctggtgatggacactccttccctatgaggtctatgaatgagtcacagaacccgctgctggcaaatgaagaaccctgggaagacaacgaggatgacaatcaagattatccagaaggctcatcatcactttctgtggagacagaaacgtagcagtttccatatttcctgcacctgcaacaggaaccaccatctcccatgaggcttatagacttcaatgttgagaaccactctaatcctcaaaataagtcaccatgttggatagaaagcttcacagtttgggtgttccatcaaatacatgctgtgcagatgtttaggactttgcaaaattgactttgctgactgaactcatttggaaacaattgcttcaagtctaagttttcctttccttaccctccccaatccatgaaagcctaaatataaatatataaaaaaggaattactttcctgaaaacttttaatgccaggctacggtcaaaatctctatgttattcatttctctgctatatagcttattttagcctttgcaaattacttttataatggtagaaatactataagcctaagttatgaaccatccattttataaaaggatttaagggtgattttcagtataattaaaattctgttgaagacggtaaagtttcagatatgacactagcctgaggattagctaaaggtctatgttttcacagcaggagctaatgtacagagttaaccgaacagtgatattccagtcccctttttttaagcttcggtggcagctcagccattaagagagtttacatccatttccccacttatttataaccagctttcctttcagtcctcatgcctggatcaatgagatggacactaatgctgctt

SEQ ID NO: 6231 - DNA, 1051 bp, Cricetulus griseus
agagctgtgtgtcgccatgctgtcccctgaagcggagcgggtgatgcggtacctggtcgaagtggaggagctggccgaggcggtgctgtcggacaagcggcagattgtagacctggataccaagaggaatcagaaccgagagggcctgagggccctacagaaggacctgagcgtctctgaagatgtgatggtttgctttgggaacatgttcatcaaaatgcctcaccctaagacaaaggaaatgatccagaaagatcaggagcacctggataaagaaatagaaagactccggaatcaacttaaagtgaaagttaaccgccttttcgaagcccaaggaaaaccggagctgaagggttttaacctgaaccccctcaaccaggatgagcttaaagccctcaaggtcatcctgaaaggatgagactcaaacagcaggatgggggacctttgacttcggccactccctccccaaccttgagacctgcaaggacaggattgtctttttaaggggataggcccaggaatgtggcttttgtaccaagtctttttctgtagtgcttgactgctttgtgacaagagagaaccctttgcctgttttgtgtgcttggcctggccaccagagcttggtggacacaagacctattgacagaccctggcagccatctgtaggtgtgtgggggtgtgagaatggctgccactgacacttctcaacagtagcctgctgtttagatgggcctggccagggatggagagagagggcggactggaagcttcattccagctttctgcagggcgaggcatttctaggaagtgtgtgtgacagttgggataaaacaagagactgacagtttgcttctgtgtgaagaagacagacccttagtgccccacaccagctgcagggtggacacatttccccaaagcccccagtcctgtccgttttcctgctggctttccatagtaggtgctgtcagtcaccctctgtggttgctcttgagatgggaggccttacagaggactggcccagggcaggcaaaccgcatccttcctaatgtga

SEQ ID NO: 6232 - DNA, 1050 bp, Cricetulus griseus
ggtgaattgtgtgtactaggggaaggaagactgggggaggggtgttccttatcaataaaagcccccaaatggaaaagaagcagaaacgacaagccattttaaaggctggagtttgaggtgtataacaaatctcaagtgtaagaatattgagaaaatgttgagaaaccacctcagctattaggggaaagttacgtttgtttgaaggaagcaaagcacagtgggagaaactgcagatggaagctagccagttcctccccctgggagcttgttaaacttcaagtgcaagcaggtcccagttcaggctgtcaggttctcctcaggcaggcaggaccagtctttctccagcctagctggagatgtctactctgagaggcctctggggtttcaaggggcctctgccacattctcaggtctctcaggttttacctgaaagctaactgccacaagtcttactgcagtggcaaccctattcctcgaattctgtagatactctcctaagtacaagctgatttgtccccttctaaggtggtagcagaaactagagggagattctgtgtaaaactaggagcagattccctcagacccaggtcttaaagtgtcatcagaagtctgcttggggggcaagcggtctatgtagtcatggctgactgtagactatggaagaactaagatgtagcatatgtgataggatgctcacatgttctggagacaagtgagggctatggtcttgactccagtactaaatggaccatgtggataggtggtggactgggcttcctagtaggaaaaaggcagagacctcgaggtgagacctgttcttttggccacctccctctcagatccagctgaggacttgaaaccatcatcaccccccacgtctgaagtgagtggctcccagaatcctttgcctccacaaaggaagcccctctcacttgacttctccctatggagtgaagggaagtcctatttttgagtgtcttgtgtcagtaacagtgttgtgtcaccagtggtcatgttgaatagttgaagagaataaagggagtaagattt

SEQ ID NO: 6233 - DNA, 1050 bp, Cricetulus griseus
  modified_base (479)..(479): a, c, t, g, unknown or other
tcctgggtgctgtctgctgtgcaaccaaacccagggtacagtagcccggctggaacgtggcactgccccctccctctaattatccccagctcagacccaagactagagcctgaaaggtctgagcatcgtggtgccatctgcccagggctgggtcctgagcagctggccttcctgcaggaaaggaagggggggggcccagctgtgctgggtaagcaaaggccttttcctctgctctcatgtcagcaggcctgggctgggttccaggctgcagaggcagtcagccaggtgggctgtgactggatggactggatctggcttattgccaggcaagcctcagccttcctctgggcaaggggcatgctttccctgggggagtcttcccccttacctacccaccttcttggtacctccccagccccagccctttgtctgtcctgaatttgcttaaaggagggtactggctgccagtcagccctggntaaacttcacccctttaagctgctctcattttgtatcaacccagcaggctggcgtttccttagccctatttagtgtttccttttcctcctgagttcacagttctgtattctctcctccccccagtaaggggaggtaggtgcctctgttcaccactccacctgcatctcagcagggctgggggcagggggtatgggacaccggttctatgggtgggggatggctggactccccaggtcagggggttccttgcccagtttctgtcttccttagctagcaagttggggctgtggttttagaactccctggtgttaggaccagagcatttctatcctcttgagctcagtgattcccacagggtgcctagagcacctggacttcaaattctatatacagagataggatatattaagagatatttttggaaaggaattggtctatgcaatgccagtttggaaccctcgagaaagacagttttaatgtttttactaggaagatataaagatccacaatattttagggttcttttctggctaccccacaactgatcactgcatggcctggcaggaagag

SEQ ID NO: 6234 - DNA, 1050 bp, Cricetulus griseus
cctgggccccagcctccccgggcctgcggtgcatgcagtgtgaggacagccagaactgcctggtgaaggagtgtgccctgggccaggatctttgcaggaccactgtgcttcatgaatgggaagatgataacgaactggagttggagatgagagactgcgcccattatgagaaaaccaacaggaccatgagctatcgcgtgaactcaaagatcatcagcctggccgaggtcgtgtgtgccacagacgtctgcaacaggccgaggcctggagcccgaggggttgcctttccccggggccgttacctggagtgcatgtcctgcagctccttggatcagagctgtgagaggggccgggagcagagcctgcaatgccgctatcccggagaacagtgtgttgaggtggtcaccctacggagcacggaaaggagtctgaaggatgagaactacaccagaggctgtggcagtcttcccgggtgcccgggcatagccggtttccatggcaaccacaccttccacttcctgagatgctgcaactccacccactgcaatggcggcccagttctaaatcttcgggacttaccaccgaatggcgtccagtgttacagctgcgagggcaacagcacccacgggtgttcctccaaagagacttccctcgttgactgccggggaccgatggatcagtgcctggaggccaccggcttggatgtgctggcaaaccggagtcacaccgtgagaggctgctcgacggcttcctggtgccaaggctcccatgtggcagatgccttcctcctgagccaccccaacatctcgtgctgtgatggcagcggctgtaatggacccagaagcggcgcccccaggacagaccctgctcgtctaggcctcatcgtctccctgctcctgaccgtcaggctatggggcctcctcctctggacctgagtcctgagccccaagccctggctggacccagggacttttgttctcccttttttttttttttttttattttattttattttattttcttctctgagacaggatctcactatgtagc

SEQ ID NO: 6235 - DNA, 1050 bp, Cricetulus griseus
aaaagagcgaacaaagtgtatcgacgccggggaaatgctctctggtgtggtggtcatctctagcaaagactccgtccagcaccagggagtgtctttgacaatggaagggactgtaaacctccagctcagtgccaaaagtgtgggcgtgttcgaagccttttacaactctgtgaagcccatccagatcctcagcagcaccatagacgtgctgaagccaggaaagctccccagtggtaagactgagattcccttcgagtttcctctgcatgtgaagggcagcaaagtcctgtatgagacctaccacggcgtgtttgtgaacatccagtacacactgcgctgtgacatgcggcggtccctgttggccaaggacctgaccaagacctgtgaattcatcgttcattctgctcctcagaaggggaagctgaccccaagtcccgttgacttcaccatcaccccggaaaccttgcagaacgtcaaagagagggcctcactccccaaattcctcattagaggacatctgaactctaccaactgtgccatcacgcagcccctgacaggagagctggtggtggagcactcggatgctgctatccggagcatagagcttcagctggtccgggtggagacctgtgggtgtgcagaagggtatgcacgcgatgccacagagattcagaatatccaaatcgccgatggggacatttgtaggagtctgtctgtccctctctacatggtcttccccagactgttcacctgcccaaccctggagaccactaacttcaaagtggagtttgaggttaatgtggtggttcttcttcatgctgaccacctcatcacagagaacttcccactgaagctctgccggacatagtccagctgcaggaggggacagccaggtggccacgtggacgtctgtctggtcatctgctcacaggtggacgtcgtgccttgcctcggcctttcctctggaatgtaacagaatttcctcacctgtgttgcaagatcacagaaaacatttctgacagccccagatgtgcctgtttctctttaggt

SEQ ID NO: 6236 - DNA, 1049 bp, Cricetulus griseus
gaagaccaagctgtccggcccgcggcgccccgccgtctgcagggccttcgacatccccaagaggtatttttctcacttctacgtcgtctccgtattatggaatggcttcctgctctggttcctttctcagtctctcttcctgggagcacctttcccaaaatggcttcgtgctttgctcagaactcttggagccacacagttcccagcactggagatggagcccaaggcctcccaaatgatagtgggtgagctgactctgtctgccttcttggtgctggtgttccttgggtccacagcctgcggaggctcttcgagtggaatctgctgctaccagctcggtggttccacgtcctcggaacgatgatgtatctctggtcatctgcccatcagtatgagtgccatgtcattctcagcaacctcaggagaaacaaaaaaggtagtgatagttcactgccagcacaagatcccctttggagactggttcgaatatgtgtcttcggctaactacctagcagagctgatgatctacatctccatggctgtcacctttgggttccacaacttaacttggtggctggtggtgacgtatgtcttcttcagccaagccttgtctgccttcttcaaccacaaattctacaagagcacgtttgtctcctacccaaagcataggaaagcgttcctcccatttttgttttaaggcagcctttatgggaggcactcgagccaggtgacagattccatccctggagacaccgagacagcacgcaagtacacatgcagtgggaatgtttgacatttcccttccactgcagtgctgcagtgttcactgggcaaggcaaatgttcctggagaagacattcctggcagacctgggcctgaggggcctgctttctgccaagctttacagagacaactgaaaaccagtaaatgggcatctccaagctgatttgtaatcacactaagcgggagtataaacagccttgcaagcgtgcatgcctgcttgagtcagtcctctctctctctctctaactctctctctctctctctct

SEQ ID NO: 6237 - DNA, 1049 bp, Cricetulus griseus
cggcaaccacaggcctggaaggacaagtatatccacgccttcatttcactgggtgcgccctgggggggcgtggccaagaccctgcgcgtcctggcctcaggagacaacaatcgcatccctgttattgggccacttaagatccgggagcagcagcgatccgctgtctccaccagctggctactgccatacaaccacacctggtcacatgacaaggtatttgtgcacacacgccacaactaactacactctccgagactatcaccagttcttccaggacatcagatttgaagatggctggttcatgaggcaggacacagaagggctggttgaagccatgatgccacctggtgtggagctacactgcctctatgggactggcgtccccacaccagactctttctactatgagagctttcctgatcgtgacccaaagatctgctttggtgatggtgatggcactgtgaacctggagagtgtcttgcagtgccaggcctggcagagccgccaagagcacaaagtatcattgcaggagctgccaggaagcgaacacattgagatgttagccaatgccactaccttggcttatctgaaacgtgtgcttttcgagccttgattcctgtgccaggctgggctgctggatggctggaccatggagcatctcttgggctctgaccctttcatggcctacaagctcggtaaaagtttgtgaccattattcgaggtcctaggggggttttttgtttgccccagggatgctgcatggtctctgtgtgacagcagggatggtgactctgggcctgtcttagggacagtggacctgactataggctgagacttgggttagctgttaggttggagtccccaaaccactttcaggctggactatgtacactgccttcccacaatgattctcactgggcttcccttgttaggcacattcccaccatctctccctcacctgatggtggtccccacctggggccctgagcaagctgtacctcaattttggcaataaaagtattctggatgcactaaaaaaaaaaaaaaaa

SEQ ID NO: 6238 - DNA, 1049 bp, Cricetulus griseus
gcgagccccaagcaccagccacgaggtggccggcgagaagttgggtctcaatggctacgtggaggcggggatagccggctaaccggcagccagaggctcctgtgtgcagggctggcgggggtgttcagcctcagcctcaccgcgcccctggagctcgccaccgtgctcgcccaagtcggcatggtgcaaggccacacccaaggggctgtgggccacgggacgccgagtatggctggccgaggggccgagagccctgtggaaggggaatggcgtggcatgcctgcgcctcttcccctgcagcatggtgcagctggctgcctacagaaagtttgttgtgctgttcatggatgacctgggccatatttcccagtggcactccattgtggccggaagtctggcaggcatggtttccatgattgtcacataccctacagacctcatcaaaacccggctgattgtgcaaaacatgctgaaaccatcttacagggggattacccatgctttttctactatttatcagcaagaagggttcctggccctctatcgaggggtgtccctcactgttttaggtgcggttcccttctctgctggctcccttctagtttacatgaatctggagaaaatctggaatggaccccgggaacgattctctcagctacagaactttgccaatggctgcatggctgctgctgtgagccagagtctttcctttccctttgacaccgtgaagagaaagatgcaggctcaaagtccttatcttcccaactgtggaggagtagatgtccatttctcaggagcagtggactgcttccggcagatagtgaagacccaaggggcactagggctctggagcggactgacagctaacttactaaaggtagttccatattttggagttatgtttagcatgtttgagttctgtaagagaatttttctttatcaaaatggttacatcctgtccccactgacctataaactgactccaggggtggaccaaagtttgaagccccaggagttacgggaattaaagaagtttttcaaacccagaa

SEQ ID NO: 6239 - DNA, 1049 bp, Cricetulus griseus
caaccttctgccactggtcccacccttctctgcagaggaatagtatgtctcctggtgtaacacatagacctccaagtgcggggtaacacaggtggtctgatggggtggagacctcacatccggtgcaggcaccagcgcagggaatggatatggcaacccccgaaactcaccaggtctgctggtctcacctggtaacttgaacaagaatatacaagccaaatctcctccccctatgaatctagggatgaataatcgtaaaccagatctccgagttcttattccaccgggcagcaagaacacgatgccatcagtgaatcaaaaggataaaataactcccagtcggctcagtcattggctaccccagtggtttccgtagcaactcctactttaccaggacaaggaatgggagggtatccgtcagccatttcaacaacatatggtactgagtactcctgagtagtgcagacctgtcgtctctgtccggcttcaacactctataccttaatggggaaggggggtcgatatgcattatatgtgccgtgtgtggaaaaaaaaaaaccgtcaggtactctgttttgttaaaagtacttttaaattgcctcagtgatacagtataaagataaacagaaatgctgagataagcttagcacttgagttgtacaacagaacacttgtacaaaatagattttaaggctaacttctcttcactgttgtgctccccttgcaaaaatgtatgttacaatagatagtgtcatgttgcaggttcaacgttatttacatgtaaatagacaaaaggaaacatttgccaaaagcggcagatctttactgaaagagagcagccgttatgcaacatatagaaaatgtatagacgtttggacagacccggcaaggggtggccattggtaaatgttaggaacatgcccggtcacctaacatcccgaggaagctcacaaacctgcaggcatatcattggtgtatggcactcattcaaaaggatcagaaaccattcaaagaggaccatacctactttaaaagaaaaaaaaaaaaag

SEQ ID NO: 6240 - DNA, 1048 bp, Cricetulus griseus
agctgctccgcgcgcgctgctggaggaagcgccaccgggtccgctccgctctgggtccggctgggccatggagtcgatgtctgagctcgcgccccgctgcctcctgcttcccttgctgctgctgctgtcgttgctgctcctgcccgccccgaggctgggcccgacccgtgcccgggcggaggacaccgactgggtgcgattgcccagcaaatgcgaagtgtgcaagtatgttgcagtggagcttaagtcagcttttgaagaaaccgggaagaccaaggaagtgatcgacacaggctatggcattctggatcggaaggcctccggagtcaagtacaccaagtcggacttacggttaattgaagtcactgagaccatttgcaagaggcttctggactacagcctgcacaaggagaggactggcagcaaccggtttgccaagggcatgtcagagacctttgagacgctgcacaacctagtccacaaaggggtcaaggtggtgatggacatcccctatgaactgtggaatgagacctctgcagaggtagccgacctcaagaagcagtgtgacgtgctggtggaggagtttgaagaggtgattgaggactggtacaggaaccaccaggaggaagacctgactgaattcctctgtgccaaccacgtgctgaagggcaaggataccagttgcctggcagagcggtggtctggcaagaagggggacattgcctctctaggagggaagaaatccaagaagaagcgtggtagggtcaagggctccagcagcggcagcaagcagcggaaggagctggcgagtctggagggggatgccagccctgaggaagaggagggtgtgcaaaaggcctcccccctcccacacagccctcctgatgaactgtgagcccaacttagtgtccttgaatcaagatcccaactcaagagcatgggacgctccagcgagatggctgttgttcagcttccggtctcctaccttggctgtgccctcttcctgcccttgagcaacagcaagaagtggagaggaggagcagaaggc

SEQ ID NO: 6241 - DNA, 1047 bp, Cricetulus griseus
aaaccataccacggtcccttagttacagctgaactcctccaccttccaactcagtcaggctcatccatctcctgcttccctctcctcacccaacccacccccttcagtccctctcttgagcaaggtggttgggctgttgtggggacaggtgacccaagcaggctcctagttctggagagttgggcgagtgttataaccttttggcctctccatcagttcagctttcccccaaagcatggtttggtaccagtcttctcatttccttctagagcctgagaccaatgcttaagtttgggggacacagtcaccatccccctggtactgatgcttgctggattttcgggaaggcattttgctacccagtctcttttcacctgcctggggatcagtctttgtgtttccattgtttgatgttcccatgttcccactgcatgctatgacttccctactcctcaaagagagactcctttgcatgtctggagacagtaggggtggtaagctaaagggatggacaaaacagctcattaacggggtcttgcaaggggctctgtatgtacccagggtactggcccaaccccccaattctagccatagacaaactccaggccagacccctccaccctggttcagcctgggcagcttgggctgagccaccaggaccaatagatttaagctggcatttcagtccaagaaggcttctaagtggatttaggacctgagaggaagaggggcctctgtgggtgctgggtactccagaggtgcccctggtggaagggtgggtcagtggtcctagcaggaagggagacccagcaaggccattcttgctgggttgagtcaaggagctagaacaagggaccaagtggctgtaaagtctcaagccaatgatggggcttctccactgggctcctgtagtcctcaagtccctggcctccaccttaccaggtgccacttctcagaaggccactgcccaggcccccaggccgccccttcgtggccagagactggttaaagccccccagtgcctccttgtgcatagaacttcctctg

SEQ ID NO: 6242 - DNA, 1047 bp, Cricetulus griseus
agacagaagtcattgccgttgcctcagagtgaccagaaaacttcagcctatactggatggacaatgtgctccagtaacccaaatccacttggtttgcctacaaaagttgctctttctcttcttaattctaaacagaagactggaaagtcgctgtattgccaagcaataaccacccattcaaaatcagatttagtggtctattcaagcaagtggaaaagcaacttaagcaagagagcagtaggtaatcaaaagtcctcagtagttgaattcagcaataaagatgactctgaaattaacagtgagcaagataaagaaaattccttaagcaaaagtgaaccaagaagaattaaaatatttgatggaggatacaagtcaaacgaggattatgtatacgtccgaggcaggggaagaggaaagtacatttgtgaagaatgtggaatccgttgtaagaaacctagcatgttaaagaaacacatacgaacccacacagatgtccgtccctaccattgcacatactgcaacttctccttcaagactaaaggaaattcttacaaaacacatgaagtccaaggcacatagcaagaagtgtgtggatttaggcgtctcggtgggtgtgatagatgagcaagacccagaagaatcagatgaaaagcaaagatttggttatgagcggtctggatatgatcctgaagaatctgatggccctgacgaggacgacaatgacaatgaagaggatgatgaggacagccaggcagagtctggcctctcagcagcaccctcagtcacagccagcccacaacatcttccatccagaagtggccttcaagaccctgggagtgtagaggaggaccttagagttcccagttgcttctcaggggtacacacagaccctatggacattctacctagagcattactcaccaagatgactgttctgagcacagtacagcttgaccccaacaggacagacttaccaacaaaggccaggcaccatactgcaaaagaggaacatgagatagttcctcatgtagacactcccaggtcccc

SEQ ID NO: 6243 - DNA, 1047 bp, Cricetulus griseus
aggttttctatcagatgttccactgtaataatgctggagttaagaagtttccatacctatgctgcacatcagagaaatctctctgcatacagaaatggagtaatgtttaaagacagctggcaaattaaagattttagtgacctaagctctatgctgaaataaaattaattggactgcaagtgccactttggggtaacccaaatctatttctggaaccatgaaagttttgttggtatttgacttcgacaatacaatcatagatgacaatagtgacacctggattgtacaatgtgctccaaacaaagagcttcctatggaactacaagattcttatcaaaagggattttggacagaatttatgggcagagtctttaagtatttgggagatgaaggggtaaaagaagatgagatgagaagagcagtgacatcaatgcctttcacttcggggatgatagagcttctcaactttctaagaatgaataaggataaatttgattgcatcattatttcagattcaaattcagtcttcatagattgggttttagaagctgctgattttcatgatgtctttgataatgtgtttacaaatccagcagcttttgataacaatggtcttctcacagtgaaaaattgccatgctcattcttgcaatagttgcccaaagaatctttgcaaaagtgcagttttgctagattttgtagataaacagttacaaaagggagtgagatatgcacggattgtttatataggcgatggtggaaatgatgtctgtccagtaacccttttaaggaagaatgatgttgccatgcctcgcaaaggatatactttacatagaactcttgccaaaatgtctcaaaattttgagcctatggaatcttctgttgtagtttggtcttcaggtgttgaaataatttctcatttacgatttctaataaaggagtaatgtgccaacaattgaaatgtgtattaagattgggctcaatagcataaaacaaaatccctgatatttagtacctataaaaatgagagggggtttcctctttaaag

SEQ ID NO: 6244 - DNA, 1047 bp, Cricetulus griseus
agcatctcaggaggccccgtccatgatcccctgatttggaactgcccagaccaaaagacagtaaagctgcagaaagaatcctgtaataagactgtacaccagaggggccaagaaccctctcacccgtcagtctccaagaacagcaagtacgggcgtgactctgacctttctccacggaaatggcaagcaaaagctcatgttggagctaagaagcagctggatcctaaaggtgtctgccaaaaatcctctgattcagatctctctcctccacggcaaaaacaaaattcaggacaccaggactctgattcagatctgtcaccaccacggaatagacagagacaccggagcgctgactctgacctctctccgccccggagaagacaaaggaccaaatcttctgattctgatctctctcctcctcgaaggagtccccgtcccgggaagaaggctgcacacatgtattccggagcaaaaactgggttggtaactgatgttcagcgggagcatcaagaactcaaaaaacaggaccaagacaccacgacccttggagcccagtttgaattcgctgaaactgtattccgagacaagtctggtcgtaagaggaatttgaagctggagcgcctggagcagaggagaaaagcggagaaggattcagagagagatgagctatatgcccagtgggggaaagggcttgcccagagccggcaacagcagcagaatgtagaggatgcaatgaaggagatgcagaagcctctggcccgctatattgatgatgaagatctggatcggatgttgagagaacaagaaagagaggggacccaatggccaacttcattaagaagaacaaggctaaggagaataagcaaaagaaagtgagacctcgatacagtggtcctgcacctcctcccaatagattcaatatctggcctggataccgctgggatggagtggacagatccaatggctttgaacagaagcgttttgccaggctcgccagcaagaaagctgtggaggagcttgcttacaagtggagtgttgaggacatgt

SEQ ID NO: 6245 - DNA, 1047 bp, Cricetulus griseus
tgggcctggagcgtatcaagatgtcgaccgcgacggttccagagctaaagcagatcagccgggaggaagcaatgcgcttggggcccggctggagccactcgtgccacgccatgctgtatgccgcgaacccggggcagctcttcggtcgtattcccatgcgattttcagtgctgatgcagatgcgcttcgacgggctgctgggcttccccgggggttttgtggaccggcgcttctggtcgctagaggacggcttgaaccgggtgctaggcctgggcttgggcggcctgcgccttaccgaagctgactacctgagctcacatctgactgagggtccacaacgcgtggtggcacatctatatgcacggcagctgacactggagcagctgcatgctgtggagatcagtgcagtgcactcgcgggaccacggtctggaggtgctgggccttgtacgcgtcccactgtacacccagaaggatcgagtaggcggctttcctaacttcctgagcaatgccttcgtcagcactgccaagtaccagctcctatttgcccttaaggtactcaacatgatgccctcggaaaagctggcagaggccttggcctcggccacagaaaaacagaagaaggccctagaaaagctgctcccagcctcatcctgaggaggttcctgtgcggttcttgccctcccttagctgtctctgcccacaggccctgggattcccgagaagcgtgccttctagcttgtttggttttgcaccctttctgactgcaagggacaagcaggcagctgttcatctttattgtcccaagcagtccctgggacctagctactctctcaggttgttcagtggggtagcttgggcctgacttttcaagctgagtatgccgtcacccatcccagggctcagactgtcctgtgtgagtctgtttgtgactgctggagacccaggtagagcccacttttccaaggcaacgacttgatggtacatggttcctggactggtcagggatttcattcaatggaggtgacccgtgttagatcactccttc

SEQ ID NO: 6246 - DNA, 1047 bp, Cricetulus griseus
ctcctggatgacccccagtggccttgtggcaagcacaagcgggtcctgactttcccctgaagagagagatgcggaagcttgcccaggaggactgcggctttgaggagcccaccgtggccatggcctttgtctactttgagaagctcgccctcaaggggaaactgaataagcagaaccggaagctctgtgccggagcatgcgtgctgttggcagccaaggtcggaagtgacctcaaaaagcacgacgtcaagcatctgattgataaactggaagagaagttcagactgaacaggagagaactgattgcctttgaatttccagtgttggtggccttggaatttgcacttcatctgccagagcatgaagtcatgcccccatacagacgcctgatccagagttcctagcacccctctccctgtgtcaagagcgtgccaatctatttttatatctgccttcggaagtgcactttccctgggcactaagggtgtgggtgtgcaagtgtctgagaggcactgttacacttgaccccccaaaagccaatcccccacctttctatggagctgacttgttatgattttctaggtaagactcagatccagagtgacatctctgctcttcggaaatagcactgtttatgagactgtacctgccactcactggacagaggcaacagttctcaacagtaggataagtcacgtgcagagtggcgcgctctgaacttcctgccgtcacaccacgggcttctatttaaccctctagctcttgcctgtggaaacatgagggctgcactccatagcgtgtattcctgtgctctatgttagagtgcataatgagcgcgtttattgtgctaaatacatatatgtatgtgttttataaaagtctgtattgggggtaagacgcatgattggtgtcttgtggcttttgcagctgggacaaactacatttcaagctgtggttaagttgattgttagtacaaaattgtgacctgtcagcattaaccatgctgtcacctggtagttatacaggtataactttactgaagaaagc

SEQ ID NO: 6247 - DNA, 1047 bp, Cricetulus griseus
ggcggccatggagtccgcagcgcggaggcggcagctcgcgggaacggcgagcggccccggcgccacgttcgtgcaggccaggcatggctccatgaaggctgaggagacagaccgcacagctcccttccactttgacctctggttctacttcacactgcagaactgggtcctggactttggccgacccattgccatgttggtgttcccactccagtggtttcctctcaacaaaccaagtgtcggggactacttccacatggcctacaatgtcatcacgcccttccttctgctcaagctcatcgagagatcccctcgaacgctgcctcggtctataatctacgtcagcatcatcactttcatcatgggagccagcatccacctggtgggtgattctgtcaaccaccgcctgctcttcagtgggtaccagcaccacctgtccgtcagagagaaccccatcatcaagaatctcaagccagagacactgattgactcctttgagctgctgtactactatgacgagtacctgggccactccatgtggtacatccccttcttcctcatcctcttcatgtacttcagtggctgctttaccacctccaaggctgagagccacatgccagggcctgccctgctcctggtggtgcccagtggtctgtactactggtacctggtcaccgagggccagatcttcattctcttcatcttcaccttctttgccatgctggctctcgtcttgcaccagaagcgcaggcgcctcttcctggacagcaacggcctcttcctcttctattcctttgccctcaccctctcactggtggctctgtgggttgcttggctgtggaatgatcctgtactcagaaagaagtaccctggtgtcatctatgtccccgagccctgggccttctacacactccatgtcagcagtcagcactgaggctccctgggagcaataggccatggacatttgtgcaagggtgcatatgtgcacccgtggtaatgtggactgtgcatgtgcacagggacgggcagagcgcattgttgaaagac

SEQ ID NO: 6248 - DNA, 1046 bp, Cricetulus griseus
cgccctctttcaaaatggcagcccgaaggaagtttgcgaggaggacgagcgcggtggtctaacttaaggacgtcagcgcaacttccggtctgcttgcaagatggctgcgcccagtgttggtttccagcctcgtgcacggcgttttgcagtgcaggagccggactgggaccatgcgccgcctaagaggccccggcttggggcaggaagcaagagcggaggccgtcggctcattgtggtgctggaaggggccagtctggagacagtcaaggtagggaaaacttacgaactgctcaactgtgacaagcacaaatccatgttgttgaagaatggacgggacccaggggaagtcagaccagacattacccaccagagcttactgatgctgatggatagccccctgaaccgagctggcttgctacaggtttatatccacacacagaagaatgtgctgattgaagtgaacccccagactcgaattcctagaacttttgaccgcttttgtggcctcatggtccagcttttacacaaactcagtgtccgggcagctgatggccctcagaagcttttgaaggtgattaagaatccagtgtccgaccacttcccagttggctgtatgaaaattggcacttccttttccatggcagacgtcagtgacgtgcgagacatggtgcccagcagcgacccaattgttttcgtggtcggggcctttgcccatggcaaggtcagtgtggagtacacagagaagatggtgtccatcagcaactatccactttccgctgcccttacctgtgccaaacttaccacagcctttgaagaggtgtggggtgtcgtgtgagaacggcagagcctagttctcagacaggactcttggcttttggtctgttgactcctacgatatgtctgctggaagaaaatcttctgtaccaagatggtagagtaggagccaacactatattagtttttttttgtttttcctaataaagactgtgtcttttctttttagaaaacaaaaaaaaaaaaaaaaaaaaaaaaaaaaaaaaaaaaaa

SEQ ID NO: 6249 - DNA, 1046 bp, Cricetulus griseus
atccctgtggtgcttctggcctgcggttccttcaaccccatcacaaatatgcacctgcgattgtttgaggtggccagagaccacctaccaccaaacaggaatgtaccaggtgatcgagggcattatctcacctgtcaatgacagctatgggaagaaagacctggtggcttcccatcaccgagtagccatggcccagctggccctgcagacatctgactggattcgggtggacccctgggacgagtgagcaggcacagtggatggaaacggtgaagggtgctgaggcaccatcacaaccagctgctgaaatcctcagcccagatggaagatccagaccccagcaaaaacaccatcagcctctgcagcactgcccgagctgaaactcctctgtggagcagacgtcctgaagaccttccagacccccaacctctggaaagacgagcacatccaggagatagtggagaagtttggcttggtgtgtgtgagccggaggggtcatgacccgaaagggtacatcttggactcgcccatcctccgacagttccagcacaacatccacctggccagggaacccattcagaatgagatcagtgctactatacatcaggaaagccttgggccaaggggcaggaagtgtgaagtatctcctccctgacaccgtcattgcctacatcagggaccatggcctctactagcagtgacggttcctggacaggaaaaggaaagattagttagagggcgctggtcttgattggcgggatttgacaaggtgctgattactgaacagtaattagcctctgcaatgtccttgtttcaaacaataataccaagtgaggattcagaaatctggaaacagtacatctctccaaccccctcaagctatatttttgatacagcaagtatttttacactgctatactctaaacaccagggttcccaatatcctgacttctaaaaaggaactgaagtaaaacagatgccgactgttttagaagatcttttgaatgtttatgactgcctgactgtttgaatattggcaaaaggat

SEQ ID NO: 6250 - DNA, 1046 bp, Cricetulus griseus
agctccgagagaagcaagatggcggacgtgctggatcttcacgaggccgggggcgaggatttcgccatggatgaggatggggacgagagcatccataaactaaaagaaaaggcgaagaaaagaaagggccgcggctttggctccgaagaggggtcccgagcgcgcatgcgagaggattatgacagcgtggagcaggatggcgatgaacctggaccacaacgctctgttgaaggctggattctctttgtcactggagtccacgaagaagccactgaagaagatatccatgacaaatttgctgaatatggggaaataaaaaacatccaccttaacttggacaggcgtacaggatacttgaaggggtatactctagttgagtatgaaacatacaaagaggctcaggctgccatggagggactcaatggtcaagatttgatgggtcagccaatcagcgtcgactggtgttttgttcggggtccaccaaagggcaagaggagaggtggccgaagacgaagcaggagtccagaccggagacgtcgttgatagatcctctgttgcccaggtggtctctacacgagtccatttggttatgctgccttgcataaatagggctagggtagaacttgtgtttatatttaatttcttaccctatctacttagtattgctttgagttaaaacctaataataaatgttccattttgttttctacatttaagattattttactgttctggagactgtttatagtaaggccttctgagtcactgggaagacatgtctgtctggagtgtaattctgagtttctagaggctcgggcagagattgttcatcatttctttttcttagaagaccagagagcaggggtagtgaggttcttaaggcattaaggagtgattcttacatactcttgtgagcaaatactatattagtggggctggagagatggcttcaatggttaagagcattgactgttcttccaaaggacccagattcaattcccagcactcacatggcagctcacttttcaaatgctattggcccttct

SEQ ID NO: 6251 - DNA, 1045 bp, Cricetulus griseus
catgggcaagggagaccccaacaagccgcggggcaagatgtcctcgtacgccttcttcgtgcagacatgccgcgaggagcacaagaagaagcacccggactcgtcggtcaacttcgccgagttctccaagaagtgctctgaaagatggaagaccatgtctgcaaaggaaaagtcgaaatttgaagatttggccaagagcgacaaagctcgttatgacagggagatgaagaattatgttcctcccaaaggtgataagaaaggcaagaaaaaggatcctaatgctccaaaaagaccaccgtctgccttcttcctgttttgctctgaacatcgcccaaagatcaaaagtgaacacccaggcctgtctattggagatactgcaaaaaaattgggtgagatgtggtctgaacagtctgccaaagataaacaaccctatgagcagaaagcagccaaactaaaggagaagtatgaaaaggatattgctgcataccgtgccaagggcaaaagtgaagcaggaaagaagggtcctggaaggccaacagggtcaaagaagaagaatgaaccagaagatgaggaagaggaggaggaggaggaggaagatgaagatgatgaggaagaagacgaggatgaagaataaatggctgtcctaaaatgtgtggagtgtatgtgctcaggcaactattttgctaagaatgtgaaattcaagtgcagctcaacattagcttcagtataaaaaaactgtacagatttttgtatagctgataaaattctttgtagagaaaatacttttttaaaagagtttgtagcttttttaggggctacaacatacagttagatttaaagcttttgatgttgaatgttcctaaatatttaatggtttcgttagtttcttatggtagcacagcaaacttcataggaatttgtattgccagttaaatttttttttaggatgttgcatttttcttttttgtttttttttttaaatttgtaataaaataatgtatattaactttttttttaattaacttttattttatttatttatttt

SEQ ID NO: 6252 - DNA, 1045 bp, Cricetulus griseus
tggcccgcgggtcaggcttccccagcggcggggcctccgggcctcctccgcactctgtggctcgtgaccgtcgccgcgggacactggggcgctgcctctggcgccgtcgggagcgaggagacgcccaagtgtgaggacctcagggtgggacaatatattttgtaaaagaaccattaataaatgatgctacgcaagaaccagttaactgtacaaactacacagctcatgttcagtgttttccagcacccaacataatttgtaaggattacagcggtaatgaaacacattttactgggagtgaagttggtttttacaagcccatatcttgccgaaatgtaaatggctattcatacaaagtggcagttgcattatctctttttttgggatggctgggagctgatcgattttacctcggataccctgccttaggcttgctaaagttttgtcaccgtaggattttgtggaattgggagcctaattgatttcgttcttatttcaatgcagattgttggaccttcggatggaagtagttacatcattgactattatggaaccagacttacaagactcagcattactaatgaaacgtttagaaaaacacagttgtatccataaatgtttacaaagaggaacagatttgaaccttcttgatttcaatagtgagccccttatgtggaattccagattttccttttcctttaagtactattttatgcattctggatgatgttttggtgtgtgctcaattttgatttgttgatttagttaatattattcctagatttatttaatagtctttcttaaaaattattataatagtatttcatgggtttctgtctccatgagacagctagcctattactctgttactattattgtattactgtactgtcctttacatgtcacttgtcatttttatttgtgaaaaataaaaacaataatctattcacaaaaaaaaaaaaaaaaaaaaaaaaaaaaaaaaaaaaaaaaaaaaaaaaaaaaaaaaaaaaaaaaaaaaaaaaaaaaaaaaaaaaaaaaaaaaaaa

SEQ ID NO: 6253 - DNA, 1045 bp, Cricetulus griseus
gagcagctgtcctgagccagaactcatcattcccaccgccaacatcggcattcacagtcaccagcagcttcctgtcatcatggcccccggttgtgacagatgcctcattcaaggtgaagagccatgtctacagcctggagggccaagactgcaaatacaccccaatgtttggtcctgaagtccggaccctggtcttacgccttgctcagctcatcacacaggccaagcagactgccaagtccatctctgatcagtatgcggagagcccagctagccattccttcttgtcatggctgggctttggcaccacagacccaaatagctgctacccaggcaatgacctggatgagatgggtcaggacagtgtccgcaagacagatgagtacctggagaaaggccctggagtacctccgtcagattttccgactcagtgaagcccagctggcccaactcacgcttgccctggggaactcacgggatgagaatggaaagcagcagctaccagattgcattgtgggggaagaagggctcatccttacacccctgggtcgctaccagatcattaatggtctgcgaaggtttgaaattgagtaccagggggacttagagctgcagcccatccggagctatgaaatcaccagtctggtccgagcactcttccggctgtcctctgccatcaaccacagatttgcaggccagatggcagctctgtgctcccggaatgacttccttggcagcttctgtcgctatcacctcaccgagtcagcactgagcaatagacacctgctgagtcctgtgggccggaggccggtgaccagtcctgcccggggccccaggctcagcctgcgtttcctgggcagttaccggacactgctcctgctcctgatggctttctttgtggcctctctgttctgcattgggcccctgccctgctccttgctcctgatcctcggctaccttctctatgccgtagctatgacactgctcactgagagggggaagctgcaccagctctgacctgccgaccatctctcctggtcagact

SEQ ID NO: 6254 - DNA, 1044 bp, Cricetulus griseus
  modified_base (49)..(49): a, c, t, g, unknown or other
ttttttttttttttttttttataaacgaaaaccgcgatggcgtctagcngtaactggctgtccggagtgaatgttgtgcttgtgatggcatacgggagcctggtatttgtactgctgttatttttgttgaagagacaaatcatgcgctttgcaatgaaatctagaaggggacctcatgtccctgtgggacacaatgctcccaaggacttaaaagaggagattgatattcgactatccagggttcaggatatcaagtatgaaccccagctccttgcagatgatgatacaagactactgcagctggaaaccccaagggaatcaaagttgctacaactatctgtacaggatgaaagctctagatgccatccgtgcctctgagatcccatttcatgctgaaggccggcatccctgttcaatttaatgggttgaagaatttccgctcctatttgtctagatctacgaaacactagcactcctttcaagggcgtacgcaaggcgcttattgataccctcctcggatggatatgagacagcccgctatggaacaggggtctttggccagagtgagtacttgcggtatcaggaggccttgagtgagctggccactgtggtcaaagcacgaattgggagctctcagagacagcaccaatcagcagccaaagacctaactcagtcacctgaaatgtcgccaacaaccatccaggtcacatatctcccctccagtcagaagagcaaacgtcctaagcacttccttgagctgaagagctttaaggacaactataacacattggagagtactctaagtgggtggaatgtcctctggaattttggtgctccatttaaaccaggtatattaagacatgaacatgactttcctgaagtggaaggatctgtcctgccttcacccaatactgttttgacaattaaaaaggaatgttctggcacttccacataacctatgccaagatggtaagacagcatgaagtggttttctctaatgtcagcatattagtctcagtttacaaatatatttaataaaattaa

SEQ ID NO: 6255 - DNA, 1044 bp, Cricetulus griseus
ctgaaggtggacagcaatggagtgatcacagtgaagccctgacttcaccggcatcaaagaaccctacagaatcgagactgagggagagaagcaggaacatacttcttcttggaaatacactatcgaccaatgtgtcctccctcgcacagccagaggaggaggagcgggaacagccgtgtcgttcaaggatccttttatggccgccacaaagagtacctcagcagcctcgtgggcacagactttgagatgaccgtcccaggtgccctccggctctttgtaaatggagaggtagtttcagcccaaggctatgagtatgacaacctctacatccatttctttgtggagctaccagctactaactggtcaagcccatcattccctcagttctcaggagtgacccagacctgtgccaccaaatccctgggaatggacaaggtggcctatttctcctacccattcacatttgaagccttctttctccaccaggatgagtcggctgacgccctcccggaatggcccgtgctctactgtaaggtcctctccctggacttctggcagaggtaccgtgtggaaggctatggggctgcggtgctgcctgccaccccaggatcacacaccctgaccatctccacgtggaggcccatggagctgggccttgtggcagagctaaggaggttcttcatcggtggttccctagagctggaggactcctcctacgtgaggataccgggaaccttcaagggggatcgtctgagccgatttggattccgaactgagacaacaggtaccgtcaccttccgcttgcactgcctgctgcagtccagggctttcatggaatccaactccctacggaaacagatgcggagtgtgttggaccgcctggaagggttcagccagcagagttccacacacaatgtgctagaagccttccgtcgagcccggcgccgcatgcaagaggcccgagagagcctcccccaggaccttgtgagcccctcaggaacactggcctagctctctgcagccctggcctgtggagcaagagaa

SEQ ID NO: 6256 - DNA, 1044 bp, Cricetulus griseus
ggtctgaaacccaggcagggagtgaggaagaagttaaacctgaacttgaaagtcaagtctcagaaggatccaagccaaaggaaagtgagctctcataggtcattctgtggaggaggtgggtctcagctggggttccatgtaaaattgtgataatatattttgacttttgtgtgctgcttaatgctgatctcacatttcctgttgacagtcttgttagagcctttccagacctttatgtcagtgtatacagaccaatgtactgttacctaggggagggtgggaggaagatggcattggcttctacctcctgattactttctctagtttccctttaagcactgccaactgatgtggaactgaacagtatcttagtgggagagctagtgatatgagaatatatttattctcagatagctagaggcttgcttggtaagtcagaccatgaggctgtgggagacgaagagaaggcagcaccttgctaatgcagatggggctggagtatcctcaggggtttcgacatgttaactcaggtctgagatcgaaaccatcttgaaaggatgtgtgttagtgtcacgtaggggaaagggaggagagaatccttgtgcctttttgaggcttacgctgagataaagggacttttcttttaatagtgtaggacaaagagcctagggataaattactgtttgctacagacacaatgttctggagcttggtaaagttgctacacttagattttgatttatactttggttttcatttgcctttttatttatttgtgtttgttttaacctagagcagttaaaacagcaaataaagaagcagaaaccaaatcccagtgctatgggccagtgcacctgtcctgctctgtagacaaaggagttaagcttggtactgaaagacatgtttctccaaagctgaacacaattgtcaaattgttttacttgtatttgttttggtacagctgaatgttcaaggtccttttcaaagttctgataattttaaaaaataaaaatagaattcattctaataagaaaaaaaaaaaaa

SEQ ID NO: 6257 - DNA, 1043 bp, Cricetulus griseus
cgcacagagcacagggtcttacctttgttttttggtattcagatgatgttatgatgccccagagagtgaggctgcaacatgaagctgctgttcagcacccaacgagtatcataggatgccaagtgaggagagacccctcagactctacagagcgatacacgcgttggatcaaccagttgacatctgatcagctgttgacacaggtgttcacctcccatggccccacagtgatcatgcccacctggttctgctctcggggcctggttttcccatgtgggcccatttgatgaaggaggacagggggtaccagaggacctgctgctcttctatgagcacctcaggagagggggcggtgtattccgggtggaccacaaactgctcctctaccgctaccacccgtatgctgccacacattcagtccttgagatgaccatctggacccaccgtgttcacttcctagaggaacaggtcctgcctcgttggaagtccttcaccatttggaatgcaggcaagcgaggggcgacggttataccgcagcctgacttgcagccagccggcgcaaggtgatggccttctgtgatgttgatgagaacaagatcaggaagggcttctactgccacgaggactctgaggaaaggcccaagccgaaggtccccatcctgcacttccaagctgcccagtcaccctttgtcatctgtgtgaagctggacctcacagggggtgagtttgaagacaacctgaagtcactgcacttgcaggaaggccaggacttcgttcacttcagctgaggctgctgccgtgccacctttctcagaggtctgtgacacaatgtttccatgatggtaaagcttgttgtgaagcctcagggcaggacatcccagctaggtaggcaaggactcagcttccaggagcaggctgtaaagacacatagcaacatcaggctggtctccatcccaccctctctaacatatggctaaagactgccatgtcccaggatcctgacagcttaaattgtatagtgatggctggtgacttgtcagagt

SEQ ID NO: 6258 - DNA, 1043 bp, Cricetulus griseus
gatggcggcagtggagaagcggcgactggcagtaacaccagcggccagtttcgcggacagcggccggacgacggtgtctcaggcggcggcggcggccgagagcgaggaggacttcctacggcaggtcggcgtgacggagatgctgcgcgcggccctactgaaggtgctggagacacggcccgaggagcccatcgccttcttggcgcactacttcgagaacatgggcctacgctcgccagccaacggcggcgccggggagcccccaggccagctcctcctgcagcagcagcgcctgggccgcgcgctgtggcaccttcgcctggctcaccactcgcagaggacggccttcaacaacaatgtgagcgtggcctacgagtgtctgagcgccagtggccgcaagaagaagccggggctggacgggcgcacatacagtgagctgctgaagcgcgtgtgcagggatggcggggcacccgaggaggtggtggcgcctcttctgcgcaaaatccagtgccgggaccacgaggcggtgccgctgggcatcttccgggcaggcatgctgtcgtgcttcgtgctgctggagttcgtggcacgggccagcgccctcttccagctgctggaggacccaggcctggcggtggccgatcggcgcgtgggccaggctgtgctggacacgctagagggcgcgctaggcgcgggagatctggcggcggcgcccacacactacctagaggccggttcccgcttgggccctgacagcctggcacgtgccctggaccgggcggccaccggacggcggcccagcgcgcccatggcccgcgaggagttcctggagaaggctgccgccctcttcatcgccaaggtcaagccggtgggctgagcccacgacgcaggactttgggaccttcaaaccagtgtcccggcaccctgcacggggccctcacccaaggaaggggacccgcgtagaccctgcaggaccagcacctgcagctcagacccctctgtactggcctgccatccctactcacagaaataaaatttgaaaa

SEQ ID NO: 6259 - DNA, 1042 bp, Cricetulus griseus
tgccaggacgacactccccttctgcatactataagggctacagctggccctgggcgcttcttcctagaactgcagcagctggagctggacctgctacagcagccttcaccatggagcagctgagcacagccaacaacctctttgccttggagctgttccgttccctgaatgaaaacaactccacaggaaacatcttcatctctcccttcagcatttcatctgccttagccatggtctttctgggcaccagaggcaacactgcagcccagctctctaagacctttcatttcgatgccgtggaggatgtccattcaaggtttcaaagcctgaacgccgaagtgggcaaacgtggagcctcccacattctgaaacttgctaacagactgtatggagagaagacctacaatttccttcctgaattcttggattcaactcagaaaatgtatggggctgacttggctcaggtggattttcagcatgcctctgaagatgcaaggaaggccataaaccagtgggtcaaaggtcaaaccgaagggaaaattccagaactgttggctgagggtgtggttgacagcatgaccaaacttgtgctggtgaatgccatctacttcaagggaatgtggagggagaaattcaggaaaaaggacacaactgatgctccctttcgactgaataagaaagacacaaaaacagtgaagatgatgtatcaaaaggaaaaatttccattcggttacatccgggatctgaagtgcaaggtgctagagatgccttaccagggcgaagaacttagcatggtcatcctgctgccagaagacatcgaggatgagtccacgggtcttaagaagattgaagagcaattaactttggaaaaacttcgtgaatggaccaaacatgagaacttggaaaacattgatgtccatgtcaaattgcccagattcaagctggaagagagctacaccctcaactccaaccttggcagcctgggagtgcaggatctctttagcagtagcaaggctgatctgtctggcatgtcaggatccag

SEQ ID NO: 6260 - DNA, 1042 bp, Cricetulus griseus
actcaatcatccaggaacaaacaaactcggaattcccagaagagcttgtcttgctccgaggagttcagggaattgatgaccctgcccacatttggagcccgaacttaagcatttagccaaaccaaggtttcaggtgtaatagggagcccaaacctgccatccagtctatctctgcatcagccctcttgaagcaacagaaacaacagatgctagaaatgcggaagaggaagtcagaagaaatacagaaacgattccttcaaagctcaaatgaagcccagagcccggcagtgccatgtccatctcgacagtctgctgcccagtctcctcgaactggggcagagttccccaggttggaaagaaccacagcaccacagatgcctaagcttggtacaggcatctcagaaggggatgacgttctcttttttgatgaatcaccaccgccaagaccaaaactgagtgcagcagcagaagctaaaaagttagctgctattgcaaaattaagggcaaaaggccagattctggcaaaaacagatccaaacagtattgtaaggaaacagatgaaaccccaagatgtagctggacgtgaaggagcgtgcagagaagagcaacaccgttcctactgaagatgagttggagcctgccagtaaaaaaaggagatggaagaaaagatgaggagcatcagagaagtgaaatgccgagtagtgacgtgtaagacgtgcacctacacccacttcaagcctctggagacctgcatcagcgaacagcataatctccattggcacgatggcgtgaagaggtttttcaaatgcccttgtggaaacaggactatctcccttgacaggctcccaaataagcactgcagtaattgtggcctctacaaatgggagcgggatggaatgctaaaggagaaaactggtccaaagatcggaggagaaaccctgttgccgagaggcgaagagcatgccaggtttctgaatagccttaaataaccccctctgcaaatggttctcatgaccggccttacttcttgtggctctgaaaa

SEQ ID NO: 6261 - DNA, 1042 bp, Cricetulus griseus
gccatggctcccgctccggctgtcctcacccggctgcggtgtgcaggtgtgtggcgctggccaggtttcctgcagaaggcgaccccgggcccagcggggctgaatggtaggatggtgacgggagcccaagtccccatggtcagcgagcctcaggatggcgacgatctccagagcaggattctagatgtgccactgcagcattcggacttcttcaatgtcaaggaactgttttctgtaaagagcctcttcgaggcccgagtacacctgggccataaagccggttgtcgacataggtttatggagccatacatctttggtaaccgcctgggccaagatatcatcgacctggagcagacagccttgaatctacagttggccttgaacttcacggctcatgtggcctaccgcaagggcatcatcctgtttgtgagcaggaaccgacagttctgtcacttgattgagaatacagcccgggactgcggagagtatgctcacacccgctacttcaagggtggtttactgactaatgcacaactcctctttgggcccacggtccgcctgccagacctcatcatcttcatgcacacactcaacaatgtctttgaaccccatgtggctgtgagggatgctgccaagatgaacatccccacagtgggcattgtggacaccaactgcaacccatgcctcatcacttaccctatccctggcaacgatgactcaccccaagctatccatctcttctgcaagctcttccggacagccatcacccgggccaaggagaagaggaggcagatggaggcactgcatcggttgcagagttcccagggatctgagggcagtgggacatcttctgcacctgataaaagccagtccccatgacaggagcccctgctcccacactagagccaagcctgctctgagcaggaggctccttgtccagccttggcctatatatccctgttccccatcctcagcatcagcatcagagacctatagttcccaagatctggccaccccagagtctgatcatcctgaattaacc

SEQ ID NO: 6262 - DNA, 1042 bp, Cricetulus griseus
gaggctgcttctgtcctcgacgtaagatatgcatctgcctcatgaaaaactgctgggtagcttttgaacactttgggtaatgggacgacatgttatccagatatcaggtattacctccccttctctggggcagccacctaagtaatatcatgcttctttggaaatcacagccaattggcagaccacatcataacctttatcttaccaagctccttgatataactcctgtttccctaaacagagggcgaaattatggtttatgaatcaggtggcccctctcccctttctctctcccctaactctttcccttttctcccttccaagctcatttgcagcaactgtccttgacattgtagcttaatgggaacgtggacctcaatgctttctttctgccttcagccttcagcattggaatcccaggatgtgggtacttcccatctcctcttgattccccaactaccactatcatcacccaactctgagagatttggttcatatcactgtacctggtgcttgtacatttggaattggtgccttctccttctggcaaccatgttatcagtcgcttttctgttcaagtgtcttatttaatgtttattgcttgccaaagatgacatcatcgaggtgtagcagatggggagagcctctgcagatttgagacttgaaacgtcaggtcggctcaggagaggacatgagggaagctaaggatggttttctatgtcattttgtgtactggtgtgatcacacatacaccgtcccctcttcttttttagcagcagataggacagaaaagtgatggatgtgttgctttagtgagaccaacatgaaaaagaagcaatctacagagtggtatgtgatgccatctgttttagactgggaacaagcaaagatttctaataaatgttctgaaacttcacagtcactttttaccagactgtggccctgcagggggtttgaggagcagccggtcagactgcgttctagcacccatggccagttgagactgcactaaccatgtggaaatatcttttgttgtttgttt

SEQ ID NO: 6263 - DNA, 1042 bp, Cricetulus griseus
cccgggccgggcggcggggcccgctggaggtttatagcgacgtcgccagccgctcagctgtcacccaccgaactgacagaaatgcggaatgatctttttaataaagagaaaagtaggcagttatcgttaactccccgaacagaaaagatcgaagttaagcatgttgggaaaactgatcctggcaccgtcttcgtgatgaataaaaacatttcaactccctacagttgcgccatgcatttaagtgagtggtactgcagaaagtccattctggctcttgtggacggacagccgtgggacatgtataagcctttgaccaagtcctgtgagataaaatttcttactttcaaagaccctgacccaacagaagtgaataaggcttattggcgttcttgtgccatgatgatgggctgtgtagtagaaagagcattcaaagatgattatgtgatcagcttggtcagagcacctgaagtccctgtcattgctggggctttctgctatgatgtagttttggataagagactggatgaatggatgccaacgaaagagaacctgcgttctttcacaaaagatgcccgtgctttaatgtacagggaccttccctttgaaactctggaagttgatgcaaaagtggcattagaaatatttcaacataacaagtataaagtggacttcatagaagagaaggcatctcagaatcccgagagaatagtcaagctacacagaattggtgacttcattgatgtgagtgaaggccctcttatcccgagaacaagtatttgtttccagtacgaggtgtcagcagtccacaatcttcaccccactcagccaaacctcgttcgaagatttcagggcctgtctttacccactcacttgagagcacattttacaatatgggacaagctattggaaagatctcggaaaatggtaactgaggatgaaactagacagacagaggacactgtatctaccccagagccttcgaaaatttaagtatgtatagtaaattaaaataaaagcttttaataaaaaaaaaaaaaaaaaa

SEQ ID NO: 6264 - DNA, 1041 bp, Cricetulus griseus
gcgcgtagagcaagtgacgggactgcggggcggccgggatgtgtagtttgcagcttcaggcatgaacacgggcattcggatggtgactcgcagtcggagccgcacgcctaggatcgcggcagaagggtgtggggaggagctcacgccgcgagaagctgctgcagaaggaagaaaaagctgccggcctgtgaaacgtccacgtaagacacagaaactacatgtggcctatgaggtttctaatggtgagaaaggtgaagatgctgagcccctcaaagtaccagtttgggagccccagaactggcagcagcaactggccaacatccaaatcatgagaagcaagaaggatgcacctgtggaccagttaggtgctgagcactgctatgacaccagtgcccccccaaaggtgcggaggtaccagatactcctgtcgctgatgctctccagccagaccaaagaccaggtgacagcgggtgccatgcagcgcctacgggcacggggcttgactgtggaaagcatcctacagacagatgatgacatgctgggcaggctcatctaccctgtgggcttctggaggaacaaagtaaagttcatcaagcagacaaccgccatactgcagcagcgctatgaaggggacatccctgcttccgtggcagagctggtagccttaccaggtgttgggcccaagatggcacacttggctatggctgtggcctgggggaccatatcaggcatagcagtggacacacatgtacatagaatcaccaaccgactgaggtggaccaagaacgtgaccaagaccccagaggagacacgcacagccttggaggagtggctacccagggggctgtggagtgaaatcaatggactgatggtgggctttggccaacagatctgccttcctgtccatcctcagtgccaggcctgcctcaaccaggccctgtgccctgctgccaaggacctctaagggtcagaggacttcctctggccagagtctgtgaagtgcctttgtgaggaggggtggtaggttttgggggtttttgc

SEQ ID NO: 6265 - DNA, 1041 bp, Cricetulus griseus
gcaagtcaccttggcgctaggggccggggccgacaaagacgggaccctgctgctggagggcggtggccgggaagaggggcagcggaggaccccgcagggcatcgggctcctggacagctggaggcagcagccagccaaagctgggtctcttggatcgggttcgcctttctaatcctcgtggtagcaatactaaaggaaagtcatttacccctctgaatgtagatgccatagaagaaagcccttctaaagaaccaaagcccgtgggcttaaacaataaagagcgtttccgcaccgccttccgcatgaaagcctaggaacgaaccctatgtagccagggcagccacatcagaaactgaggatcaaagcatgatggggaagtttgtaaaagttgaaagacaggttcatgacatggggaagaaactggacttccttgtggacatgcacatgcaacatatggaacgcctccaggtgcatgtcacagagtactacccgaccaagggggcctccctcccccgcaagaaggggagaagaaagaggacaacaggtattccgatttgaaaaccatcatctgcaactactcagaggcaggccccccagacaacaccctaccaaacttccaccaggtgcccattgaaagagtcggcccctactgggtttttttctacacgaccctgtgaacctgacccgaggggacccagttctacaaaggctcaggccacccttccctcctcgggaagtgtatatgcagagaggcccacggttctgatcactagggacagtgacacgcctctatccctcatgtctgtcaaccacgaggagctggagcggtctccgagtggcttcagcatctcccaggacagagatgattatatgtttggccccagtgggggatcgagctggatgagggagaaaaggtacttggctgagggggagacggacacagacacggaccccttcacacctagtggttccatgcctatgtcatccactggggatggcatttcggattccatatggaccccttccaacaagccccactta

SEQ ID NO: 6266 - DNA, 1041 bp, Cricetulus griseus
tctgcagatcgaagaagccacgaatgggagaagcgaagatctgtcaacctttcggagctcatcgatgtttacagtgatggagttgagcttctccagttggtgaaggcaccagactccaactgcagcagtctcttgattacaaccagacaaggcctggtcctgcttcggggacaagatcttatgccactctggaaactgagccttcaaggcctgcgcagccagcccactcctgggtatttcactgatgaccagacattggacttccttctgcagacacaggatggagttgggatgaagaagatgacagtggttgacggtgcctctggctccatcatctggagtcacagtataccatgtcacatgaaggaaacaccaaccacttctgcaattacttcagaccagaagtctgtcttcctcttctgggcagaagcgctgaccacggcatctcttaattctcaggagctgagcctcctggtctttaccacctgtacctcctgcacccagccttcccgtctatcctcctggacctgaccaacaccactggcatagtgacagcttccgaggttggaatcaatgacatctggaaagatgccttttatgtcaccaggacaacagggatgagccctgatgggcaccccacttctctggtgatcagcaagctgagcctgcgctgggcgctcatggaaggccagatggtccagctgaaggagaccactcctaaaactggccgtggggagctgcgaagattcctctccaggatcaagtttgttgatcctccctaccagatctagtgcagtggaacccggattcagaagaaccatacagagcggctcctgtccctcctgtgtcagctctctggagagaagaggacttcgagggtcacgcagcacttggggaccgctggctgtgctttggccgcctgttggagctgcgtgatgcagcatgatctgcttagcgggacctcttgcaaccttcccattcctgcactaacccctcttccctgggaactctgtgttttttttttgtacctttaaatatata

SEQ ID NO: 6267 - DNA, 1041 bp, Cricetulus griseus
  modified_base (988)..(988): a, c, t, g, unknown or other
cggctgcaccatgaacgtaatctacccgctggctgtgcccaaggggcgtcggctctgctgtgaggtgtgcgaagccccggccgagcggatgtgcatggactgcacagtcacttattactgtgggcctgtgcatcagaaggctgactgggcagcatccatgagaagatatgtcccctgctaattcctctgcgtacgaccatgcccttctacaactcagaggaagaaaggcagcatggcctgcagcagctgcagaagcgacagaagcacttgattgaattctgctacactgttgcccagaagtatctttttgaaggaagatatgaagaggctgtccctgcggctctccactcccttcgattccgcatgaatgtgtacggcctgaactcagtagagcttgtgcctgcttacctgctcctggctgaggccagccttggtctgggccggatagtgcaggctgaagaatacctatcccaagcccggtggacagtcctcaaatcaacggactgtagtaatgctactcattctttactgcatcggaacctgggccttctctacatggccaaggagaacttcgaggaagcccgttaccatctggctaatgattcaggaggctacttccacctggccaacatcttctatgctcttagcaaaatgggctggcagacacattgtacacaaaggtctcggagatctggtttacatatttgaatgatcactaccaagtcctcttacaggctcgttcccaacaaacagacttactgggcaaacaatttgtgaatgacactggcctggatgaagcccaggaagcagaggccattcagatcctaacttcaatcctgaacattcgagaatcttcttccagcaaagcaccccaaaagactgtcttcattatgaagaccctgagcatgctttactatctgatgttggagtgttcaatggcaaaggaatatgccaagagagccctcagtctagctaaagacatcttagngtgcaggagcagaggtttattcaagcgttactgaaagtcatctcaaccgagga

SEQ ID NO: 6268 - DNA, 1040 bp, Cricetulus griseus
caccatggcagttcctgagacccgtcccaaccacactatttatatcaacaacctcaatgagaagatcaagaaggatgagctcaagaagtccctgtatgccatcttctcccagtttggccagatcctggatatcctggtgtctcggagcctgaagatgaggggccaggcctttgtcatcttcaaggaggtcagcagcgccacgaatgccctgcgttccatgcagggtttccccttctacgacaagcccatgcgcatccagtacgccaagacggactcggacatcattgccaagatgaagggcacctttgtggagagggaccgcaaacgagagaagaggaagcccaagagtcaggagacaccagctgctaaaaaggctgttcagggtggggcagctgcccccgtggtgggcgctgtccagcctgtaccgggtatgccaccgatgactcaggcaccacgcatcatgcaccacatgccaggccagcctccttacatgccaccacctggcatgatcccaccgccaggccttgctcctggccagatcccccctggggccatgcccccacagcagctcatgcctggacagatgccacctgcccagcctctctccgagaatccccccaatcacatcctgttcctcaccaacctgcctgaggagaccaacgagctcatgctctccatgcttttcaaccagttccctggcttcaaggaggtgcgtctggtccctgggcggcacgacatcgccttcgtggagtttgacaatgaagtgcaggcaggggcagctcgagatgccctgcaaggctttaagatcactcagaacaatgccatgaagatctcttttgccaagaagtagcgcctcccccccttggctcagtccctgaaggtaagtcccccttgggggccttctcagagccgcgtgtgagtgtgtggttgccacacagcattgtacccagagtctgtccccagacattgcacctggcgctgttagcttgtgattaaagtggtttttttgttggtttggtttttcaaaaaaaaaaaaaaaa

SEQ ID NO: 6269 - DNA, 1040 bp, Cricetulus griseus
acccctgggctcccggtcagaggcggcgctcggcaaatttgcgacaatgtcgatgctggcggagcctcggcggaagcagaaatggactgtggatcccagaaacactgcatggagcaatgatgattccaagtttggccagaggatgcttgagaagatggggtggtctaaaggaaagggtttgggagctcaggagcaaggagccacagaacacattaaaagttaaagttaaaaataacaatctgggacttggagctacaaacaataatgaagacaactggattgctcaccaagatgacttcaaccagcttttggcagcactcaacacttgccacagtcaggaaacagcagattcctcggacaacaaggaaaagaaatcttttagccttgaagaaaaatccaaaaactccaaaaaccgggttcattatatgaaattcacgaaagggaaggatctgtcctcccggagcgaaaccgacctggactgcatttttgggaaaagaaagaaccagaagactgctcaggatggttgcagcacctccattgcagatgaagtggacacctccatgatgactaccacaaccagtgccttcaccatccaggaatattttgccaagaggatggcccagttaaaaagcaagccacgagcctcagctccagagcctgacatttcagagacctctgatgaatggaaaaaggaaaagaaaaaaaccaaagaagcagcagtcacagatgtggagaactctccccaacacaaggccaagcgacataaaaagaaaaggcgagcgaaagcagaggtggagcctgtgatcaagaagagagaccgacttgagctgcaacctggaggtcccagcggggatgagtgttctgaagcctctgccgaagctgaagaagattgtgaacaatcacccagcagccagggtgatgtcctgaagtccaagaagaggaaagcaaagaaaaagctgcaaaggccagggcgggtagaaatagacaccacactagagaaggcacccgtgaaaaagaagaagaaagcttccagatgactt

SEQ ID NO: 6270 - DNA, 1040 bp, Cricetulus griseus
ggacctggaggaggcacagaacgagcagacccgggaactcaagctcaagtacctcatcattgagaacttcatccccgtgtgtgtactagtatgtgtgaaggggtgagaaaagggcagatggcacctctgcctgttttctgtgtctcctttatttaattcatgttatttattcatggagcttggttagtgaggagagatcccctcgcctgagctgcctgggcctgccgtggtcactgcatatagccttcttttcttctgcctggatagacgcctcagtcaggccccaagctcctcctcatgtctgctgcctccagaagggaagatggctagtgcctgagaagacagcacttcctttacccgtccattccatggtctccatcttcttgtctgatggtgagcagctcctgacgctttctgggctgtgaactgctagtgtccattgagggcgaggaggtgtgctaatgtgaggtgtggcttcttcctgctttgatcactgttccctgatgtttccatcctgagtccatagtggaatgaatcagtgtcattctgcccttataaatgcagatagcaaagtccttcacatttcccctctggctagtataagaagcaaacccaggcacaatctttgccagatttacctagtccccctatttctgagtcacatcttggggggatactattttgttgaaaatcgatctattctttactacctgtgtgaactggcccttcctcaccttcctttgtgacagcccaaaatatctccaggtattgcaagtgataagtaaatttctattttaaaaagttaactgggcattgagggacctccccctcaccatttagtcacttgtagatgaaactgcatgtgccaccccattatcacttggacgcatcaactccacgttgttcgggtcacttgtccctcacagttttatagcacaatatatcccacttgagcaccccagcctgagggctaggcccaaggtgtggtcagaggaggagcccctgcctgtggtattgtgtgtgtgtgtgtgtgtgtgtgt

SEQ ID NO: 6271 - DNA, 1040 bp, Cricetulus griseus
cagaacgctcacagtgacgaatctggcctgaggataacaagagatggtctttctacaaaccgacagcatgagtatagggatatgaaagatgattttagaagaaaatagttcctcctcttcccattattcaagagagcggtctccccataaaggggattctcattttttcagaaagtcaagtgtaggtcagaagaactccccacgtagcagatctggatccagtggcgggcactccccaaaacgaagcagacgacattcttcccctttgtcagatcttaggcagtccaggcatgctcatgctttctacagatggcacagagaagaaaagccagaaggagggcaaaagagacctggccagtctttgaaaacattaagagacacacacccagcaagttcttcaacagttccttcatcagaaagtttaaacaaatacaacaaattcaatgaaaagggacttcctgaagctaccagcagtcagacagtagaaaagcctaaggtggcagatgaaagtgacttacctaaaatttctgagtttaaggtgggactcacagaacaattacttacggatcagccacaggaacctgagtcaaacagaactgaacgcacagaattagttgatgaccagctaactaatcgccttaaagcaatagcatcaaaaaccaaggaaattgaacaagcataccaccaagactgtgaaaccttcgggatggtggtgaaaatgctggttgacaaagatccttcattagaaaagtccattcagtttgcacttaggcagaatttgcatgaaataagtgagcggtgtgtgaaagagcttaggcagttcattgcagagtatgatgcttcttaagaattggtgctctagcagaaaagtgctccttgattgttaattagagaattgcataagtgtttcaaatatggagtgtttgtgatgaaaggaaatactccagtgtcaagtaaaatctaaaatggtcactttaaaataatctattcagaactctattccacctatagagccttctaattcatacacacaccaatgt

SEQ ID NO: 6272 - DNA, 1040 bp, Cricetulus griseus
agggcccacagactacaagaggatcctggcgtctgggcctccggggtcatcaccatgaggccacttcttgccctgctgcttctgggggctggtgtcaggctctcctccactggatgacaacaagatccccagcctggtgtccccggggcagcccggccttccaggcacaccaggccaccacggcagccaaggcctgcctggccgcgacggtcgtgatggccgcgacggtgcgcccggagctccgggcgagaaaggcgagggcgggaggccgggactgcctgggccgcgtggggagcccggaccgcgtggagaggcaggtcccgtgggggctaccggacctgcgggggagtgctccgtgcccccgcgatcagccttcagtgccaagcgctctgagagccgagtgcctccaccagcggacgcaccgctacccttcgaccgcgtgctgctgaatgagcagggacactacgatgccactacgggcaagttcacctgccaagtgcctggtgtctactactttgccgtccacgccaccgtctaccgggccagcttgcagttcgatcttgtcaaaaatggcgagtccatcgcctctttcttccagtttttcggggggtggcccaagccagcctcactctcagggggtgctatggtaaggctggaacctgaggaccaggtgtgggtgcaggtgggcgtgggtgattacattggcatctatgccagcatcaagacagacagcaccttctctggatttctcgtctattctgactggcacagctccccagtcttcgcctaatgtacagtgaaccaggagctggcacttgctcctagagaagggtgtgacacttgacaggcacataccaggagggctggccccctggaatattgtgaatgactagggaagacagagagccacctcctgtcccactgctggcaaggaatggagacagaggctgtctgaggtcaagacaggcagcctgaaacagtggctgggttactgcccaggactttagagtgtgctgtgctggcggctgtgggttcctggc

SEQ ID NO: 6273 - DNA, 1039 bp, Cricetulus griseus
ggagccggaggggagcgcatcgagttctggcctgtggtcgtgcagtccagggggctggatggcatgctggacccaagctcacctcagtgtctgggcccactaaaggctttgccaaggacacagctttctatactggccactctgaggtgcatagcgtaatgtccatgttgttctacactctgatcacagcttttttgatcggcgtacaggcagaaccatacacagatagcaatgtcccagaaggagactccgttccccaagcccactggactaaacttcagcattcccttgacacagccctccgcagagcccgcagcgcccctgctgcatcaatagctgcccgtgtgacagggcagacccgaaacatcactgtggaccccagactgtttaagaaacggagactccgttcaccccgtgtgctgtttagcacccagcccccacccacctcttcggacactctggatctagacttccaggcccatggtacgatctccttcaacaggactcacaggagcaagcgctcatcctctcacccagtcttccacatgggggagttctcagtgtgtgacagtgtcagtgtgtgggttggggataagaccacagccacggacatcaaaggcaaggaggtgacagtgctgggagaggtgaacattaacaacagtgtattcaaacagtacttctttgagaccaagtgccgagcccccaatcctgttgagagtggatgccggggcattgactccaagcactggaactcatactgcaccacaacccacacctttgtcaaagcgttgacgacagacgacaagcaggctgcctggaggttcatccggatagacacagcctgtgtgtgtgtgctcagcaggaaggctgcaagaagaggttgacctgcctgcagccccttccccacctcgccccctccacaccctcctcgggccccctccctacctcacgcctgtaaattattttaaattataaggactgcatggtaatttatcgtttatacaattttaaagtcattatttattaaattttcaaagca

SEQ ID NO: 6274 - DNA, 1039 bp, Cricetulus griseus
agaaggctccactgcagctgtgaccccctggcgaggtgatggccaaggtgtcggtgctgaacgtggctgtcctggagaacccgagccctttccacagccccttccggttcgagatcagcttcgaatgcagtgaggccctgtctgacgacctggagtggaagatcatttatgtgggctcagccgagagcgaggagtttgatcagatcctagactcggtgctggtgggccctgtccctgctggaaggcacatgttcgtctttcaggctgatgcccccaatccatccctcattcctgagaccgacgccgtgggtgtcactgtggttctcatcacctgcacttaccatggacaagagttcatccgtgtgggctactatgtcaacaatgagtacccaaatccagagcttcgggagaacccacccccaaagccagacttctctcagctacagcggaacatcttggcttctaagccccgggtgacccgattccatatcaactgggacaacaactcagacaggctggaagccacagagaaccaggaccccaacccggactatggccttcccctcagttgcactcccatcaaaagcctgggcctccctagctgcatctcaggcctcctcccggagaactccatggactgcatctgatgggggccaggctggtcccagtaggaccatggccagtctccttgcacacctagaggggacctacaggccctcacatgcttggtcatctcaaggatttgagggcctctagctgcctccagacctgtcagccccaaggaaaatatggaccccaacctctcatggagttatcaggtttgctttgatgacatattctcatgagctacccaatactccaggataaggaggcatttggcaggctgacctgagaaactcccacccccatctacccttacccctaagccctgggtccccttgctgctgctacatggatgctattgtgagtgcagtgtgtatatgaaaatgcttttatattaaaagttttggttggtttaaaaataaaagcacttcatcta

SEQ ID NO: 6275 - DNA, 1039 bp, Cricetulus griseus
gggcggaccctggactctgactatgcacctctccagcagttctttgtggtgatggagcactgcttgaaacatggcttgaaagccaagaaaactttcttggacaaaacaaatccttctgggggcctctagagctggtggaaaagctcgttccagaagctgcagagataacagcaagtgttaaagatctcccaggacttaagacaccagttggcagaggaagagcctggcttcgtttggcattaatgcagaagaagctttctgagtatatgaaagccttgatcaacaagaaggaacttctcagtgagttctatgaagccaatgccctcatgatggaagaagaaggagctattattgctggtctcctggtgggcctgaatgtcatcgatgccaacttctgcatgaaaggagaagacctggactctcaggttggagttatagatttttcaatgtatctcaaagatggaaacagcagtaattagaaaaatccaacactaaactgacagaggagcttgcggtcgccaacaacagaatcattaccttacaagaagaaatggaacgagttaaagaagaaagctcctatctactggaatccagtcggaagggtcctaaacaagacagaactgcagaagggcaagcactgagtgaagcaagaaagcatctaaaggaggagacacagttacgattggacgttgaaaaggaactggaactccagatcagcatgagacaagagatggaactggctatgaagatgctggagaaggatgtctgtgagaagcaggatgccctggtgtctctgcggcagcaactggatgatctcagggctctcaagcatgagcttgcctttaagctgcagagttcagacctaggagtaaaacagaaaagtgaactgaacagtcgcttagaagagaagactaatcaagatagactgccaccattaaacaactggaagcaaagtaatttagttaataaaaataaaaaaaaatagtactaaaataaaaacaaaaaaaaaaaataaaaaaaaaaaaaaaaaaaaaaaaaa

SEQ ID NO: 6276 - DNA, 1038 bp, Cricetulus griseus
ctgcggtcgctgcgactccttgtcttcgccgtgttctcggccgccgcgagcaactggctgtacctggccaagctgtcatcggtgggcagcatctccgaagaggagacctgtgagaagctcaaaggcctgatccagaggcaggtgcagctgtgcaagcggaacctggaggtgatggactcggtgcgccggggcgcccagctggccatcgaggagtgccaataccagttccggaaccgacgctggaactgctccacactggactccctgcctgtcttcgggaaggtggtgacacaagggactcgggaggcggcctttgtgtacgccatctcttcagcaggtgtggcctttgcagtaacaagggcgtgcagcagtggagagctggaaaagtgtggctgtgaccggacagtgcacggggtcagcccacagggtttccagtggtcaggatgctcggacaacatcgcctatggcgtagccttctcacagtcctttgtggacgtacgggagagaagcaagggagcctcctccagcagggcactcatgaaccttcacaacaacgaggccggcagaaaggccatcttgacccacatgcgggtagaatgcaagtgccacggggtgtcaggctcctgcgaggtaaagacgtgctggcgagctgtaccacccttccgccaggtgggccatgcactaaaggagaagtttgatggtgccacagaggtagagccacgtcgtgtgggctcctcccgggcactggtaccacggaatgcacagttcaagccacatacagatgaggacctggtgtacctggagcccagtccagacttctgcgagcaggacatgcgcagtggtgtgctgggcacgaggggccgcacatgcaacaaaacgtccaaggccattgatggctgtgagctgctgtgctgcggccgtggcttccacacggcacaggtggagttggccgagcgctgcggctgcaggttccactggtgctgcttcgtcaagtgccgacagtgccagcgactcgtggagatgcacacatgccggtga

SEQ ID NO: 6277 - DNA, 1038 bp, Cricetulus griseus
  modified_base (931)..(931): a, c, t, g, unknown or other
gtgctgggcatggtgtgggtggcgtcagccattgtagacaatgacaaggccagcagggagtcgctctatgacttctgggagtattacctcccctacctctattcctgtatctccttcctcggagttctcctgctcctggtatgcactccactgggtctggcccgcatgttttccgtcactgggaagttgctggtcaagccccggctgctggaagacctggaagaacagctgaactgttcagcctttgaggaggcagctctgactcgaagaatctgcaatcccacctcctgctggctgcctttggacatggagttgctgcacagacaggtcctggctctgcagacacagagggtcctcttagaaaagcggcggaaggcttcagcctggcagcggaacctgggctaccctctggccatgctgtgcttgctgctgctgacgggcctgtcgggaagagctcatccgagcctttgggctagacagactgccactgcctgtctctggtttcccacgggcttccaggaagaaacagcaccaatgacctccagctaggggttgagaaggagaaaactggacactgcctaggccgggaggcgagccagggtggttggacctcaggacctggaatcctcggggtggattggaggagggaaccgagccgtctgcactgctgcactgctgcataatctgagccagggtttgggacccgcctcctgccttttcagatgtagccttggcctcggcgtgaggtggagctgggggactggctctgattcctggtcccaaatccgtttacacatcaatctgcctcaatcctgttccaggccatgcctgaagccatgtttacatgatttgatgtgcaatagggtgggtgggaggggggggcctgggcccctgggtagggtcgtgggagataggctgtcttccttgcctntggcccagcagagcctaagcactgtgctaccctgtggaggggctttggaccactggagagaccaaggtgcccagaggaagagccgtacccatcagcaataaagttga

SEQ ID NO: 6278 - DNA, 1038 bp, Cricetulus griseus
cagcaggtgcataccatccccacaagcatcattcaggaatagccaaaacacaaaaagagcagccagtcacatcaatctcctcacccagcaggtggcaaacctgaatttggccagcagtgtcataaacagaagcagtgcttcaacaccccctacccttcgacctgtcatcagtcctagtggcccaacctggtctatccagccagacctccacactcctgagaaccactccagcccccctggaagcaggagcctccagacgggtggctttgcctgggagggtgaggtagagaacaacgcatacagcaaggctacaggagtggttccccagcacaagtatcaccccacagcgggcagttaccaactccactttgccctccagcaacttgaacaacaaaaacttcagtcccggcagcttctggaccagagtcgagcccggcatcaggcaatctttggcagccagacactacctaactccagtttatggacaatgaataatggtgcaggctgcagaatttcaagtgccacagctggtggccccatagtatttttgctgcctcagagtccccaaggccttcaagcagaagtggcagtagatggttgccatcagcccaaccagacttttaccaggacaacagggaaacagaccccctgggtttggatggaacttggcagtggggactctcgcctgatgcgtcacgccccccacccagagcacgagtgtgcctttccctgcccttcccctcaaccccgctaggtcctctgtctctcctgctgctgctcccagatgatataaaagaggctctttggctatttgcatctggctttcgcttcttttccagattgaagtattaagtttattttattttgtacaaacttcagatcccaacaccatccaccaaacttgatcttccctttgcctagagtggtgggggaggggagccaacagcactggttccccagtggggaagcaaggtaggcgactgccatgggacaggcgccttttggaattactgacttctaagattaataaagtaattc

SEQ ID NO: 6279 - DNA, 1038 bp, Cricetulus griseus
  modified_base (1010)..(1010): a, c, t, g, unknown or other
tgtgttccaggagcttaaaacagcaatgtcatccccttctcaaccggaagtccctgccccgctggacaacttgaagattcaatataccaagatcttcataaacaatgaatggcatgactcagtgagtggcaagaaatttcctgtcattaaccctgcaactgaggaggtcatctgccatgtagaagaaggggacaaggcagatggttgacgaaagccgtgaaggctgcaaggcaggcttttcagattggctccccatggcgcaccatggatgcttcagaaagagggcgtctactgttcaagctggctgacttaatggagagagaccgcctcctgctggctacattggaggcaatcaatggtgggaaagtctttgccagttcatacctgtttgatttaggaggctgcatcaaagcattgaagtactgtgcaggctgggcagacaggtccatggtacaaacgataccaagtgatggacaatgttactgatgacatgcgcattgccaagaggagatatttggaactgtgtcttcttgctctgcaggctgggtaggtgtgggtaaagttagtctatatgatgctgtcaccccagtgcccctttggtggattcaagatgtctggaaatggacgtgaactgggtgagcatggtatttatgaatacactgagctcaagacagttgccatgaaaatttcccagaagaactcgtaaagaagccagcagagtgaagagaaacccttcagaaatgactacacatctcctatagtcaccattatagtggtgttttcctttaacacttccatttattgatttcttaaacataagcgattcatcagtattaatgtcacacacagaaaacatgtagcttaatctgaaagaatcattggccttctaatatgtgaccccaattcttgccctagacctaaaggatagatttaggtgcaagctctctgtgactctgtcatggtcatgtgctttccattgtagaatgtttggaatatttacttggtaaggnggaccattgtgtatttaagctttgtccc

SEQ ID NO: 6280 - DNA, 1038 bp, Cricetulus griseus
cagatcctgagggaggtacggagccccgaggggatgatctctatgagagacacacctgcctccctgcgccttgagagagacaccaggcagttgcccctgctcaccagtgccttgcatggactccagcagcagcacccagccttctcaggtgtggctcgcctggccaagcggtgggtacgtgcccagctcttgggcgagggattcactgatgagagcctggatctggtggctgctgccctcttcctgcactctgaacccttcacccctccccagccccccctcaggtttggctttcttcggttcctttacctggtgtctacctttgattggaagaaccaaccctctcattgtcaacctcaacagtgaactgactgctgaggaccaggtagaaattcggagtagtttcctggcagcacggacacaactcccagtcatggtcatcattaccccccaggaccgcagaagctctgtgtggacgcaggatagaccttctgcccagatccttcagcagcttgtgattctggctgctgaggccctccctgtcctagagaagcagctgatggatccccgggggctggggacattaggacagtgttccggccacccttcgacgtgtacgatgtactgattcacctgactccccgccacattccccggcaccgtcaggctgtggaccctccggctgcttccttctgccgtggtctgctcagtgagccagggccttcatctctgatgcctgtcctaggctatgatccccctcagctctatttggcacagctcagggaggcctttggagatctggcacttttcttctatgaccagcatggtggggaggtgatcggtgtcctctggaagcccaccagcttccagccccagccctttaaggcctccaacataaaggggcacatggtggtgtctcgaggtggggagcttgtgatggtgcccaacatagaagcaatcttggaggactttgctgtgttgggtgaaggcctggtgcaatctgtagaggcccgaagcgagaggtggactgtgtgattc

SEQ ID NO: 6281 - DNA, 1038 bp, Cricetulus griseus
gatgccttaggtgaagaaagaaagacgcttgtggtacaggataccaatgctgatcccaaaaatcaaggaattctaaagtagcttaaaataaaaggaatcaaaaattgatggtgagaaagctgaaaaaggaagtagagcttcaaatgccagctgtctccatgacagcgggacaagccacatcaaaggcttgccttccacaagcctcagagactgcagcaatgtcaacattgatcactcaagaaatccaggcatggcgattcctccactcacacacaatctttccgcagttgctcctgcagatgtgcgattgcctgaactaaactataatcatctccctgaactgagagctctagaaggaatagctcgaaactctaggctaataaagaaggagaacaaatctctttcagaatctcgaattccctctctggccgctattgaactgcatgcttccagtattgcattacaacagggagcagggtcacccctgtctgatgattctgagtgtgatttgcctcggatggagcaccagcactgagacccacttaacctgaacaggatgctgctagcactgagacgatgtcctcttgcaaccagagcactgatgccctagaagagatctgcagtttgactatttccttctcaactacctacgttttctaagaaagactttgcagaagaaggcaagacagacttccaaatccgtcaaaggaagattgagcgagtgccccttgatatttgaagatcatattttattagagctttggtgtggaactaaagaactaatgattattcaaaatcaagtctgtaggtactgaccaaaataatatcttttttcaatttgtgggtgtttagtctcttcttataagaatgcaatttatgtgaacatgctaatgtgaaattaagtacttttgggagacaatggacttgctgtgcctacctatgttttaaaattaataaatattgtctaactaaacgaaaaaaaaaaaaaaaaaaaaaaaaaaaaaaaaaaaaaaaaaaaaaaaaaaaaaaaaaaaaaaa

SEQ ID NO: 6282 - DNA, 1037 bp, Cricetulus griseus
tgcggtgggcgcggagcagcgcggcaggcaggccgggcgggcggcggcggcggcagcgggcggcggcggcggcggcggcggcgacaggatgatcaagctgttctcgctgaagcagcagaagaaggaggaggagtcggccggcggcaccaagggcagcagcaagaaggcgtcggcggcgcagctccggatccagaaggacattaacgagctgaacctgcccaagacttgtgacatcagcttctcagacccagacgacctcctcaacttcaagctggttatctgtcctgatgagggcttctacaagagtgggaagtttgtgttcagttttaaggtgggacaaggttatccacatgacccccccaaggtgaagtgtgagacaatggtttatcaccctaacattgacctcgagggcaacgtctgtctcaacatcctcagagaggactggaagccagtccttacgataaactccataatttatggcctgcagtatctcttcttggagcccaaccccgaggacccactgaacaaggaggccgccgaggtcctgcagaacaaccggcggctgtttgaacaaaacgtgcagcgctccatgagaggtggttacatcgggtccacctactttgagcgctgcctgaaatagggttagcaaatacccatccctgccagggtcaccagcccaggcatcccctgcaaatatttattgggggcccgggtaggatatgtggggtagccttggcccctgccttggccttacctctcctccctgtcacctgtccctagttatttttttttaaccaccacgtgattatggtcggtgctgccttttcccgacctgctcagcgatgggaaatgaattggcctgtttagcgcccccccctcccgctgggtgctgtccaataccccactcttgactgtggggtaagtgggcaatgagcctgggtcactggtcccaggcaacccaccccaccaccactggaggtcccaccaggctattaaaggggaatgttactgacaaaaaaaaaaaaaaaaaaaaaaaa

SEQ ID NO: 6283 - DNA, 1037 bp, Cricetulus griseus
  modified_base (536)..(536): a, c, t, g, unknown or other
ttaactcttgccaagtctcgccgccgctgcggctcgcgggccttgggcttcccttgaagcatgagccttccctcccgcagccgccaacgctgcgcggggcgcggacagtgcgcgccggggctccgggcgtgcggactccagatcccttgtgtcccgagcccggaagcttgcggcaggcgatctgtcggtgaccgtgactgtgagagactttgccacaccaatctgccggaatttggagagaaggaaccagctgcttccaatcccccgcgcctctgccaccatttcggacaccccgcagagactcgttttgggataccttgtgacttccaaggaggactcgaggtccgctggccccagctcgggcgaccacctgtctctggcgtgttgattcatctcccatgaccctgcggtgcctggagccctccgggaatggcgcggacaggacgcggagccagtgggggaccgcggggtcggcggaggagcagtccccagaggcggcgcgtctggctaaggccctgcgcgagctcagtcaaacnggatggtactggggaagtatgactgttaatgaagccaaagagaaattaaaagaggctccagaaggaactttcttgattagagatagttcgcactcagactacctactaactatatctgttaagacgtcagctggaccgactaacctgcggattgagtccaagatggaaattccgattggattctatcatatgtgtcaagtccaagctcaaacaatttgacagtgtggttcatctgattgacttctatgttcagatgtgcaaggataaacggacaggcccagaggctccccggaacgggactgtccacttgtatctgaccaaacctctgtacactacagcaccctctctgcagcacttctgtcgacttgccattaacaaatgtaccggtgccatctggggactgcctttaccaacaagactaaaagattacttggaagaatataaattccaggtataagtgtctccctcctttaaatgaaacaaaacaaaacaaaacaaaac

SEQ ID NO: 6284 - DNA, 1037 bp, Cricetulus griseus
tacctatggatctctcatatgtgtgtgttcgcgtcatttggcctgtgcagctctgagatctgggaattgctcctgaggctgcttcatctctgtaacccaaagaggatctgggtcatgcggtattcggtgcccatactcacgctgctgtacctgtgctgtaagtcctggccagggaatgatggatgaactctcggaattgaaagaattctatgacccagacacggtggagctgatggactggattagctctaacacaccaagaaaggccgtgttcgctgggagcatgcagttgctggctggagtgaagctgtgcacgggacggaccctgaccaaccacccacactatgaggacaaaagcctgagagagaggacccaagcggtctatcagatatacgcgaaaaggtccccagaggaagtgcactcgctcctgaggtcgtttggcactgactttgtgatcctagaagatagcatctgctttgaacgcaggcaccagaggggctgccggctgcgcgatttgctggacgtcgctaacggacacgagatggatgggccaggagagagtgaccccgacttgagacctgccgaccaccctcgcttctgtgaggagattaaaaggaaccccccttcctacaaagctcacttcactagagtattccagaacaagacattccacgtctacaaactgtcccgaaagcccccacaccgtgcaggctgaagctggagccctgtaggcctcactccttgctgtttgggccctggggactgttacatctgggtaataaggttcagctgtggctccagatagaacaagcactaggcttcgcttctgagttctcggaagaacctctaagtacaacagaagtgctcttaattaacgctgctgtgactcctcagagcttcaagtctccagccctcttgggagccacctgctgcaatccggcaggtggccactgccttgtgtctgcactcctggtgcctggctccagtcatggtccaacccggatctcggggttcactttctgcttctgattgtaagt

SEQ ID NO: 6285 - DNA, 1037 bp, Cricetulus griseus
aggacccagcattgacagctgaggccatgtgagtctgatcctgaatgaggctttatccgactgtcctctgtcccatcatccactgtggcaccagctccctcggactggactggacaggaccgtctggatgacagagacagccagcactagagaggtgatggtagccatagcctggacagagaggaggagactgggcctctagctgctaaccaggtgatggggacacccaggcatgatagacacccctctgagcccctgacattcatcttctaacctgaccctgcctgaccaagccatgtcccaacaagcctcagtggccagggggctacccccagatgtgctggcagagcaggtggagctatggtggtcccagcagccccggcgctccttgctctgtttctctgtggcggtgggccttgtggctggctgtggggcaggtggcgtggcactgctgtcctccaccagcagccgctctggtgaatggcgactcgccgtgggcactgtgctctgcctgctggccctaatggttctggtgaagcagttgctgagctctgctgtgcaggatatgaactgcatacgccaggcccagcacgtggccttgctgcgcagcggtgggggagccgatgctgttgtagtactgctcagtggctttgtgctgctagtcactggcctgaccctggccgggctggctgctgcccggccccagctcggccactggctgccatgctgtctgtgggcattaccctggcttccttgggctcagtcttgctgctgggtttgctgctgtatcaggtgggtgtgggtggacactgccccccgatctgtgcagctgcaccctccacccaaaacagccacagtgctaacagcagcatctttagcatctcgggacagttgtcctctggccagcgtcatgagaccacctccagcattgccagcctcatctgacagagatggagcccttcttcccatgacctgactcggtgtccccggaacttgtggccggcacaggttcatgcatgtatgtgtatccccctacc

SEQ ID NO: 6286 - DNA, 1036 bp, Cricetulus griseus
atctccacgcagtacatcctagactgcgtggagcggcaacgagaggctggaggctggagggcataccggctgggactgaccgagcaggctccagacacaaagcccggggcttccaccgagggctcctcggagctggagccgcagcctctgaccgggcgcctcacctacacgaacgcggacgacgtggccatcctgacctacgtgaaggagaacgcccgcacgcccaactcggtcacaggcaacgccttgtggaaagcgatggagaagagctcgctcacgcagcactcctggcagtctctcaaggaccgctacctcaagcacctgcggggccaggagcacaagtacctgttgggagacgccccggtcagcccatcctcccagaagctcaagcggaaggcggagcaggaccccgaggccgcggatagcggggaaccacagaacaagagaacaccagacttgcctgaagaagagtgtgtgaagggagagaccaaggagaatgaccaatcagtcaaaaactctttgaggaagccactcgggagtttgaagaagccgtggtgggtgagagtcctgactttgaaatccatataacaatgtgtgatgatgatcctcccacacctgaagaagattctgaaacacagccagatgaggaggaagaagagccaaaagtttccacacaagaagtgggaactgccatcaaaatcatccggcaactaatggaaaagtttaacttggatctgtcgacagttacacaggccttcctgaaaaacagtggtgagctggaggccacttcctccttcttagagtctggtcggaggtctgatggttatccaatttggtcccggcaagatgacttagatttgcaaaaggatgatgaagacactagaaatgcgttggtcaaaaaatttggagctcagaatgttgctcggaggattgaattccgaaagaaataatggacaagataatgaaaaaggtgtagcagatgatgatataaacatcttgtgaccatggaaaccgaccagtgcatcagaactatgaa

SEQ ID NO: 6287 - DNA, 1036 bp, Cricetulus griseus
cttcttcctgagtcagggtccctctcaggattggcggcccaggctcggacccctcggtcaaggtcgcgaatcttgggctgctcctccatgatgcgctttctccgaaacctggcagggtgcagaggtgtcatcggtccccaccagagagaccaaggaggttctgggtcacctgtctgagaagaaaggaaaggaggaagagccagcaggggaggcctcgggggactcagacagggaacactttacccaggccctggaggcagaacaaggatccctgcagtgcgtcccaggaccactggccctcacccctgagggcttcgtcaaagaggaagaggaggagcactgcctaattgagattggagacctcagattggcctcttgcaaggcggggtccaccccgtggaactatctccttggcttgtacaagcacctgcacaagtcagccatgaccaaggctcagagaccaggtgtgcctcagcttcctctgaaggaaggctcgccccatgaggagaaaggggagagagaagaagcggaggaggacagcttcctcaagttgtgtgccccagcttcctcaagttgtgtgccccacatatcgccaccttccagtgtcctctgcagaagacttttaggtccacagacacagtgggtttcgtggagtctgagctgaagaagattctggcagtgcgaagagagtcccgactctggaaggtgggcagcccagaaggccgggagcttctgaccaggccagacatcacgctggaggaggccggcatggtggatggccagcacctactcctggaggagatggacgagatggggaactggcctcctccagagtgaggccctcaccggcaggagcccactgtgcccacacccctgggaccccagtccagcatgtgtctcttcctgggacacatcaagtccctgtggccctgggctttgggatgagtagcatcctgtgtgtgtgtggtgggcctgcccagcactgtcctgacacatcagacgcctatagatgatgttattaataaaaacttagttt

SEQ ID NO: 6288 - DNA, 1036 bp, Cricetulus griseus
gtgcgcatgcgccacgtccttacgccgtctctgggcgccagcggctgtaccgaaacatggcggaagctgggtccaattcggtgttgttcgtgtgtctcggtaacatttgccggtcacccattgcagaagctgttttcagaaaattggtaactgatgaaaatgtttcagataattggaggatagacagcagcgctatatccaactaggaacgtgggccagcccccagactaccaagagctgtcagctgcctgagaaatcatggcattagcacagcccataaggcaagacagattacaagagaagactttgtcacattcgattatatactatgtatggatgaaagcaatctgagagatttgaatagaaaaagtaatcaagttaaaaactgcaaagctaaaattgagctacttgggagctatgatccacagaaacaactcattattgaagatccctattatggcaatgattctgacttcgaagtggtgtaccagcaatgcctcaggtgctgcaaggccttcctggagaagactcgatagatggtcctgcccaccaccattgagcaactcactcaccagagccatgcccaagggtggtggcagtccttagccccatgccccacctgtcttttcagctgacttactgtccacctttaaaataattgtaggtggaaattaggcatatgttcagaaagataaaaatatctgagtaagataatttgaggtgaggcaaagcattcttagactaattggaacctctcaccttgccctaattacaaaatagtgaaacaagcaaatatggaacaaagtagaacacaaatgttatagaagagtcactctgaagactgttcattataccaaacacttcatttatttccttgtacttattcacagtatttacatattgtacaatacctggaatgtacttttacagaggacaaatgagactggcctgggcatacccacatattgatatgccactgtcttcaaaacaagtgaggttttttggttttcattaaaatttttcatgcagttccaaa

SEQ ID NO: 6289 - DNA, 1036 bp, Cricetulus griseus
gggctaagtgcgggctgccggagatcttcgaccccccggaggagctggagcggaaggtgggggagctggcccggctgatgctgcaggcctccagcgtggttttccacacgggcgccggcatcagcaccgcctccggcatccccgacttcagaggcccccacggcgtgtggaccatggaagagcgtggcctggcccccaagtttgacaccaccttcgagaacgcccggccctccaagacccacatggccctggtgcagctggagcgctcgggcttcctcagcttcctcgtcagccagaatgtggacgggctgcacgtacgctcgggcttccccagggacaagctggctgagctccatggaaacatgtttgtagaggaatgtcccaagtgtaagacgcaatacgtgagagagacagtcgtgggtaccatgggcctcaaggccacgggccggctctgcacagtggccaaggccaggggcctaagggcctgtaggggggagctgagggacaccattctggactgggaggacgcactgcctgaacgggacctgatgctcgctgatgaggccagcaggaccgcagacctgtcagtcaccctgggcacctcgctgcagatccgtccaagtgggaacctgccccttgccactaagcgccggggaggccgtctggtcattgtcaacctacagcccacaaaacacgaccgccaggctgacctgcgaatccatggctacgtggatgacgtgatgagcaggctcatgaagcatctggggctggagatccccccctgggatggaccctgcgtgctggacaaggcccctgccacctctgccacgccctgctgtgcccaagactgagcctcctgcacatctcaatggctcggtgaatgctgtttgtaagccagagcccaacagccctgtaccccacaggccccccaaaagagtaaagaccgaggctgtccccagctgacccgggtgcgaggggtgggaggggcacttgtaagagccacacttttttttttttttttttttttgagacgagg

SEQ ID NO: 6290 - DNA, 1036 bp, Cricetulus griseus
ccgggatctctgaacctcaataacgaggttgtgaagatgagaaaagaagtgaagcgaatccgagttttggttatccgaaaacttgtcaggagtgttggcagactgaagtccaaaaagggcactgtaagatgcactattgaaaaaccaaagacgagcccaaagattgcttgaagagatacacgccatgaaggaattgaaacctgatgtcataactaaatctgctcttggtgacgatatcaactttgaaaaaacttgcaaaaagccagattcaactgcttctgaaagagcaattgccagattagcagttcaccctcttactaaaagaaaaaaatagatgcaactaaaagctgctgttcaagccttcaaagatgcaagacagaatgctcctgaggctgagtcatcaaagaatgcttcagaggaaagccagcataaggacactctctgttcaaaagatgatgcaagcgagttacagcatcctaacagtggcagtgaggaagaggagagtgaggaggaaaaggagtactttgatgatagcactgaagaaagattctacaaacagtcttctgtgtctgaggatagtgacagtggtgatgatttcttcattggaaaagtccgacgtacaagaaagaaggaagggggtgtccggtcctcagctaaggaacacaaacccctccaaaaggtgtcacccaaaacatatacacttgatcctgattgggatttaagaaatgataaacacaagggaattccagacgctaggaagttagaatctgtgtttttccactctttatctggacctaaaagctccaggagggatttcagagaacaggccccaaagaataaaactccagactttgcagaaaatgaacctccaatcaagagtcggtttacaaagagtgcacgaagagggtttgagagtgtgaagcagcagactcatgctcctctgcatccttcctgggaagcgagcaggaggcggaaagagcagcagtccaaaatcactgtgtttcaagggaaaaaaatcacggtttgatgactgatt

SEQ ID NO: 6291 - DNA, 1035 bp, Cricetulus griseus
cagcgatcaccggcgaagggtcggggcccttccggtccctgcaccatgagctggggcaccgagctctgggatcagtttgacaacttagaaaaacacacgcagtggggcatcgatattcttgaaaagtacatcaagtttgtcaaggagaggactgagattgagctcagctatgccaagcagctcaggaatcttcaaagaaataccaacccaagaagaactcgaaggaagaagaagaatacaagtacacggcatgtaaagcgtttctttccaccttgaatgagatgaatgactatgccgggcagcatgaggtcatctccgagaacatgacatcgcagatcacggtggacctgatgcgatatgtacaggagctcaagcaagaaaggaaatcggggtgccacaccagaagacttcagcaaccttccccctgagcagaggaggaaaaagctgcagcagaaagttgatgagctcaataaagagatccaaaaggagacggatcagagggacgccatcaccaaaatgaaagatgtgtacctcaagaaccctcagatgggagacccggccagcttggaccacaaacttgctgaagccacccagaacatagagaaactgcggctggagacacagaagtttgaggcctggctggctgaggtggaaggcagactcccagcacggagtgatcaggcacgccggcagagcggaatgtatgacggtcagacacaccagacagtcactaattgcgcccaagaccgggagagcccagatggtagttacacagaagagcaaagccaggagagcgagctcaaggcgctggccacggatttcgatgacgaatttgatgaggaggagccgcttcctgccattgggacctgcaaggccctctatacatttgaaggtcagaatgaaggcaccatttccgtggtagaaggagaaatgctgagcgtcattgaggaggacaagggtgatgggtggactcgtatccgcagaaatgaagacgaggagggctatgtccctacttcctacgtcgaagtctattta

SEQ ID NO: 6292 - DNA, 1035 bp, Cricetulus griseus
acggcactggcgggaggcgcaggccggtggccgaggtgaggggactcggcggcggcaggatggtgaagctgacggcggagctgatcgagcaggcggcgcagtacaccaatgctgtgcgggaccgcgagctggatcttcgcggatataaaatccctgtcattgaaaatttaggtgctaccttagaccagtttgatgctattgatttttctgataatgagatcaggaaactggatggttttcctttattgagaagactgaaaacattattagtgaacaacaacagaatttgccgtataggagaaggacttgatcaggctcttccctgtctgacagagctcatcctcaccaacaacagtctagtggaactgggtgatctggatcctttggcatctctcaaatcactaacatatctaagcatcctaagaaatcctgtaacaaataagaagcattaccgactttatgtgatctacaaagttccacaagtcagagttctggacttccaaaaagtgaaactcaaagagcgtcaggaagcagagaaaatgttcaagggcaaacggggtgcacagcttgcaaaggatattgccaggagaagcaaaacttttaatccaggtgctggtttgccaactgacaaaaagaaaggtgggccatctgcaggggatgtagaagcaatcaagaatgctatagcaaacgcatcaacgctggctgaggttgagaggctgaagggcttgctgcagtccggccagatacctggcagagagcgcagatcagggccaagtgatgatggtgaagaagagctggaagaagacacagtcacaaatgggtcctgagctctgtggcagatggtctaataggctgtctagggacaagtcttgctttttgagcatggagtaacagccttgcttgtatcagcaacatggaatttgtcagcattgctgaatgttcagaactactgctggtaattttttaatatgtaccttggaatctaaatgcctagttttctacaaatggtaaaataaaggccactttcttgctgcc

SEQ ID NO: 6293 - DNA, 1035 bp, Cricetulus griseus
gggtccccaacccggtccccgcggaagcggcggcgggcgccatggcggagctgacggctctggagagcctcatcgagatgggctttcccaggggacgcgcggagaaggctctggccctcacagggaaccagggcatcgaggctgcgatggactggcttatggagcacgaagacgaccccgatgtggacgagcctctagagactcccctcggccatatcctgggacgggaacccacgtcctcagagcaagttggccctgaaggatctgggtctgctgctgaagaaagcaaacccattttgactgaagaggagaggcaagaacagactaagagaatgttggagcttgtggcccagaagcagcgggaacgtgaagaaagagaggagcgagaagctttggaacgagaaaagcagcggaggagacaagggcaagagctgtcagccgtaaggcagaaactacaggaagacgagatgcgccgtgctgctgaggagcgcaggagagaaaaggctgaagaattagctgccagacaaagggtccgagaaaaaattgaaagggacaaagcagagagagccaagaagtatggtagtagtgtgggttctcagtcatccccaccagcaacagatccaggtcctgttccttcttctcccagccaggagccccctaccaagcgggagtatgaccagtgtcgcatacaggttaggctgcctgatggcacttccctgacccaaacgttccgggcccgggaacagttggcagctgtgaggctctatgtggagcttcaccgtggggaggaacctggacaagaccaggaccctgtgcagttgctcagtggcttccccagaagggctttctcagaggctgacatggagcggcctctgcaggaactgggactcgtgccttctgctgtcctcattgtggccaagaagtgtcctagttgagggtcctccatcccaccatccctctttgacctcttcatctttgataaagcactgacatttccttcctaataaatagaccttttgaaaaaaaaaaaaaaaa

SEQ ID NO: 6294 - DNA, 1035 bp, Cricetulus griseus
ctacacaactttcttctaccaaactcacacaaaatgtggacctccttgctctgctgaaatggaaagccttcccagaccggatcatggacatactaggacggttgcggcatgtcagtggggaggaaattgttaagtttctgcaggatatattagatacactctttgtgattttggatgataatacagagaaatatggccttttggttttcagtctctggttttcatcatcaatctgcttcgagacataaaatatttccacttccgacctgtgatggacacatatatccaaaagcactttgctggagccctggcatataaggagctcatccgctgtttgaagtggtacatggactgctcagcagaactgattcggcaggaccacattcaggaagccatgcgggtcccagccatgcagaagccactcagccccagggtgtgtcatccctcaggaccccatggacccacctgcgttgccacccaagccctaccacccccgcctgccagccctagagcacgatgagggtatgctactgcgggaggaggctgagaggccaaggggcctgcaccgaaaggcctcactgcctcctgggagcgccaaggaggagcaggcccgcatggcctgggagcacggccgaggggaacagtgaggagcagagaggcagctgcaccaccaccttccataagcagcttgccaggcactcggggtctgaaatgcaagtccctcccagggagctagagcttggcactcaggagaaaaccaccagagtctctgttctactgccgtgaactcaatgtattgccatgtccagacggccacagcagcatgatttttgtttccctatttttctgggttttccttttatgcagtagttgctttcttcctcctgcagttccagaccacatggagctatatggagatattgcacagacagaattgctttgcagcaatgcagagtccaggagtaggagcccaggcctccttccagggtagcgatggcgaagaatggaaattgcactagggacctcttcctttgc

SEQ ID NO: 6295 - DNA, 1034 bp, Cricetulus griseus
ctttttttttttttttttttttttttttttttttttttaatttttttttaatttttattcaactccccagcaccagctcaaagacaaccgattttcctaaaagtaacgtagagcctccgccactttgccttatctaagtaagcaaaacggtaaactattttgtacagacagcaaaaaccatggtttattaaagggcagtttactgcagataccacgtaagtttcctcctgcgtgcagacagagactttcctgctccttcgtcttgtccctctgccttgcctctcacctgtaagatagtattttatcctatgatgaaagaaggggaaagtccctgtttatgaaaatcgctttcttttattcctggacttgttttaaatgtaaattgcaacatagtaatttacatttaatttgtagttggatgtgacggaccaaacaccaagaaagtgttccaaaagctttaaagttaaattgcctgaaactatatcctattgtttgtttataataattgccattcagtttgaataagacctatatgtctggatactttaatacagctttaatataaagggaagatttcagagcagacattgtagagttccctaatctctgccacatttctgaaatgtggagaaaacctcctgtagttcatgtcaaattttgctagaagcatttttaaaaattgtttagatttttttttccttacagcattctctgcaaaacgtgctatatagtcagcttgctttgtggctattaaaaagataatttcctaaacacatctgagttggcatatgaacaaatacttttcctcagtaactacaaaacatgatttggcaattttaaggccatgaatcagcagccgtgttaccatcgtggtacttgtgctcagagatgtcccacatagattgcaatggtgttatacatacctgtgagccagatgccaaatcgatttttttcatcagtttcattcctttgtaagtggaaaaataactagtttttaaacgtatgtatataactcacccatagttacaattctt

SEQ ID NO: 6296 - DNA, 1034 bp, Cricetulus griseus
agttttcagagtcgcgctcgggccgggtggagatgcgcaagtggagctcggagccgggacccgaaccggacacggtggaagccgttatcgagtacatgtatactgggcgcatccgggtgagcaccggtagcgtgcacgaggtgctggaactggccgacagattcttattaattcgtttaaaagaattttgtggagaatttctcaagaaaaaacttcatctctcaaattgtgtggccattcatagcttagcccacatgtacactctcagccagcttgctctgaaagctgcggatatgatccggaggaatttctataaagtcattcaggatgaagaattttatactttacctttccatctcattcgagactggctttcagacttggaaattaccgtggattctgaagaggttctttttgaaacggtttgaagtgggttcagagaaatgctgaagaaagagagagatacaattttagccctggcttccaaagatgtgactgtttacaatcctgagcttgataaatggcacaacttagaatcagcaccaaagattcttcgagatgtcaaagcactagccattgaggaccggtttgtgtacattgctgcccgcactcctgtggaccgggacaccgaagatggattgaaggctgtaattacttgctatgatacagagactagacagtggaaagatgtggaatctttaccacttattgacattactgttttttcagtatgtctgtggtcaattcaaacttttatcagacagcatcatgctgtcccaagagccggtcaggtgtctgatgagatccttgaaagcttgcctccagaagtcctaagcattgaaggagcagccatttgctattataaagatgatgtcttcattattggaggctggaaaaacagcgatgatattgacaaacagtatcggaaggaggcctatcgatactgtgctgagagaaagaggtggatgctccttcctcccatgcctcagccccgttgtagggccactgcttgtcacgtcaggatcccctaccgg

SEQ ID NO: 6297 - DNA, 1034 bp, Cricetulus griseus
atggaagcccccgagccaggggaagcgctggagttgagcctgacaggtgctcacagccacggagttcacaagaaaaaacaacaagaaaacacaaaaagaaacacaagaagaagcatcatcaggaagaggaggccggacagacacaggctcctgccaagccccagcttaaactgaaaatcaagctgggtggacaggtcctgggcaccaagagtgttcctaccttcactgtgatccctgaggggccgagatcaccttctcccctgatggttgtggacaatgaagaggaacctatggaaggggtgcctctggagcagtaccgagcctggctggatgaagacagtaatctgtctccctccccacttcgggacctgccaggggatctggagggccaggaggaagaggaggaacagaggtggctagatgccctggagaagggagagctggatgacaatggagatctcaagaaggagatcgatgagcggctgcttactgcgagacagcgagccctgctccagaaggcgcggagtcagccgtcccccatcctgcctctgccagtggctggcggctgcccggcccctgccctcacggaagagatgctgctgaaacgcgaggaacgggcgcggaagaggcggctgcaggcggcaaggcgggccgaggagcacaagaaccagacaattgagcgtctcacgaagacggccgctcccagcggacgcggagggcgtggggcggcgcggggcgagcggcgcggggggcggacagctgccccggcccctacgcccatggtgcgctacagcagcggggcccagggctccacgctgtcctttcctcccggtgtcccccgcacccgcggcggtggctcagcggcccgccccgtcaaacccagcgccgcgctgctctgtccccggctgcccccacccacgtcgttacgcctgttcccgcaccggccaggctctctgtagcctgcagtgctaccgcatcaacctgcagctgcggctgggtggacctgagggcccagggtccccccttctggccac

SEQ ID NO: 6298 - DNA, 1034 bp, Cricetulus griseus
atttccctaggtccttcgcgttacttgttttgagtcccgcctgttgtctggtcccctaaacctttacacatgtcttggtttatttgaagaccaggaagttcatagctcccgaggacggctgcagaaagacggtggctcggttgggacagtcgccagggatggcggaacgtgaggatggagcgagtgtccgggctgctctcctggacgctgagcagggtgctatggctctcaggcttttctgagcagggagctgcccggcagccccggatcatggaagagaaagcgctagaggtttatgatttgatccgaactatccgggacccagaaaagcctaatactttagaagaactggaagtggtaacggagagttgtgtggaggttcaggaaataaatgaagaagactatttggttattatcaagttcacaccaacagtacctcattgctctttggcaactcttattggattgtgcttaagagtaaaacttcagcggtgtctgccgtttaaacacaagttggaaatctacatttctgaaggaactcactcaacagaagaagacatcaacaagcagataaatgacaaagagcgagtggcagctgcaatggagaaccccaacctacgggaaattgtggaacagtgcgtccttgagcctgactgagaccgtcttaagagccaatgacttttaatcaatcgtttgatctgtttaaatctttgtaaaatgtagaggacacatgttgaatatgtaggtgatttgtacctcagagctattttttttttaagttttttttttaaagggttctttctgtgcaggcttcagtgatgaggtagaacctaattgttcagagagtaacattctcaggatttctaatccaagtgatcagacagaaaaatattttctagttattatgtgtaagatgttactatttttctgatgaccattctgatacaactgcttttcatgtcaaatatctactgtgcccaaatgtatgatttaaatcatcattctaaataaatacgacatgattcttgtaatgg

SEQ ID NO: 6299 - DNA, 1033 bp, Cricetulus griseus
tttcagccatcagaaaacagctaggagatctacatgctcagccacttgaagaagagaaattgtattttgaaaataccttttctctcatggatttttgcctattgatgccatcgaacctacttcatctcaggtgcacaatacagaaatatctgaagtgaggaaacagagaagaaatatggcaaccaaaccaagtgactcaagtatatattcaccactgacctcttttatcactgctgattcagaattacatgacattattaaagatctggaggactgtttaatggtgggtctccatacttgtggtgacctggcaccaaatactctgcggatatttgcatccaagtctgaagtcaagggagtttgctctgtgggttgttgctaccatcttttatctgaggaatttgaaaaccagactaaagagtatgctcaagaaaactggggatttccaatgtgccgttatctgaaagaggagagatggtgttgtggccgtaatgcaagaatgtcagcatgcttggcattggaacgggttgcagttggccaagggcttcccaccgaatcactcttctatcgtgctgttcttcagaatatcattaaagattattatggcatcaccaaatgtgatcagcatgttggtaaaatttattccaaatgttcttcctttctggattatgtcagaaggtctctaaagaagcttggattagatgaggccaaggtctctgaagaaattataatggactactatgaaaaatataagcctagaatgaatgaactggaggcatttaatatgttgaaagttgttctggctccttgcatagaaacactgattcttcttgatcgactttgttacctgaaggaacaggaagatgtagcatggtctgctcttgtgaagttgtttgaccctgtgaagtctcccagatgctacgctgttgttgctctgaagaagcagtggtgatcgaagctgaagcaggtggctaatcagcttgtttggggaataataaactattgactaacaaaaaaaaaaaaaaaaaaaaaa

SEQ ID NO: 6300 - DNA, 1033 bp, Cricetulus griseus
  modified_base (7)..(7): a, c, t, g, unknown or other
ctttaanaccccggagaagagtgttgtcagcctgttccatgatccaccaggctcctacaatcctatgacactagggcctgttcaccctcggtctacttcttcctggcctgctggacctatggcctcacagtatctgctggcgtcttcatcccatctctgctcattggggctgcctggggtcgactctttggcatctccctgtcctacctcacaggggcagcgatctgggcagacccgggtaaatatgccctgatgggagccgctgctcagcttggtggaggcatctcttcctcgagtgttcaagttgttccgggctctgggcttgaggcacctggtggtagtagacaaccacaatcaggtggtcggcctggtgaccaggaaggacctggcaagataccgcctagggaagggaggccttgaagagctctcgctggcccagacgtgagggttggctctacccttgtgcagtggtacccgagcccctctgcacctcctcccagggtccctggtctcagccaaagccttgcccctctgggcagtgcaacagcaggagcaaatgtcctccctgggcctgactggtgtgggggccagacccttgttcttgggcagttggtttacatcatcagcactttccttgttccctgacccctccacaccttggacttgcccttctcctgggttccttctccaaggatgaaatgtgtgcatttgcaccccttgtggctcacttctcagagccacttggatgacatcctgtcctcaaacctgggcatgccaggctctgcatgtcagaagttgtaactgaccaccttgcctgctccactaggctttgtgcaaagccaggggtggctctggattgggaagagccatatctaagttggacccaaggggatgaaaaacactgcacagggcctcaaagacttggtaccaaaaaagcatgtgcaatctgtcctgcaatctgtcctcagttctgtgttgactacatgttgagatgatatttttggatatattaggttaaataaaacaatcaaaa

SEQ ID NO: 6301 - DNA, 1033 bp, Cricetulus griseus
gaactgcggggacagccgggcaggtggccccaggctggagcgcgcgcgcgtgggcgagcagtgatcgatcctgcgcgggagagggggtcatcatggcggatgatctaaaacgattcctgtacaaaaagttgccaagcgttgaagggctccatgcaattgttgtgtcagatagagatggggtgcctgttattaaagtggccaacgacagtgctccagagcatgccctgaggcctggcttcttatccacctttgccctcgcaacagaccaaggcagcaaactcggactttcaaaaataaaagtatcatctgttactataatacctaccaggtggttcaattcaatcgtttacctctggtcgtgagtttcatagccagcagtaatgccaacacaggactaattgtcagcctagaaaaggaactggctccgttatttgaagaactgataaaagttgtggaagtgtcttaatctaaaagtggttttgatgtataccttgccttcattgcaacaacactgtaccagtccagcaatctttagaccacagtaatactttatctatgtattcagagggccgcttttccaccttacactaaagaagagcctatagctataatttatagacagatcaattgttgtatttatgtgtataaagtcttttcttacttagtgagatctggaaacgccacaaaaatggttcattctggtgcagctcccatggagttagtgtggatgcctgataatgggtggtattctacccagtgcatcaggatcagattgatgctctggagccagcaagcatgccagctgcacagtgctcccgctccacaagccagagacttcctgagaataataatgaggacatatttttcataagagtttattttatttctttgcattgggtgtgaggaagataaatggcttagtacaaataataataaatacgtacaatcactaacttctgtctgtatatgatctcagcgaagatgagtatataccagtgtatttgatccttgaaggtgctgctcttcagtgaga

SEQ ID NO: 6302 - DNA, 1032 bp, Cricetulus griseus
ggaagaatcaatgctggaatctctcttcataactacttactcagatgtaggaagatacattgaccattatgctgctattaaaaaggacctgggatgacctcaagaagtacttggagcccaggtgtcctcggatggttttatctctgaaagaaggcgcacgtgaggaagacctggatgctgtagaagctcagattggttgcaagctccctgatgattatcgatgttcataccggattcacaatgggcagaagttagtggttccagggttgctgggaagtatggcactgtcaaatcactatcgctctgaagatttactagatgttgatactgctgccggaggatttcagcagagacagggattgaaatactgtctccctttaaccttttgcatacatacgggcttgagtcagtacatagctgtggaggctgcagagggcagaaataaaaacgaagtgttctaccaatgtccagaccaaatggctcgaaatcctgctgctattgacatgtttatcataggtgctacctttactgactggtttacatcctacgtcaacaatgttgtatcaggtggtttccccatcatcagagaccagattttcagatacattcatgacccagagtgtgtagcaacaactggagatattacagtttcagtgtccacatcatttctgccagaactcagctctgtacacccaccacactatttcttcacatatcgaatcaggattgaaatgtcaagggatgcccttccggagaaggcctgtcagttggatagtcgctactggaggataacgaatgctaaaggggatgtggaagaagttcaaggacctggagtagttggtgaatttccaattatcagcccaggtcggatatacgaatacacaagctgcaccacattttctacaacatcaggctatatggaagggtattataccttccattttctgtactttaaggacaaggtctttaatgttgccatcccccgattccacatggcatgtccaacattcagggtgtctatagcccgattgg

SEQ ID NO: 6303 - DNA, 1032 bp, Cricetulus griseus
cttccaacatggcgcacgcaggcggcggaggctccgcgggccgggggttcggcggctcccgctggggtcgttcgggctccggaggccacgagaagctgccggtgcacgtggaggacgctctcacctaccttgaccaggtgaagatccgctttggcagcgaccctgccacctacaacggcttcctggagatcatgaaggagttcaaaagccagagcatcgacacccctggtgtgatcaggcgcgtgtctcagctcttccatgagcaccctgacctcattgtgggatttaatgctttcctcccgctcggataccgcatagatattcccaagaatggcaagttgaacatccagtcacctttggccagccaggagaactcccacagccatggtgactgtggggaggatttcaagcagatgtcctacaaggaggacagaggccaggtgcccttggagtcggactctgtggagttcaacaatgctatcagctatgtgaacaagatcaagacccgctttctggaccaccctgagatctacaggtccttcctagagatccttcacacctatcagaaggagcagctgcatactaagggtcgtccattccgtggtatgtctgaggaggaggtctttacagaggtggccaatctcttccgtggtcaggaggacctgctgtcagagtttggacagttcctgcctgaggcaaagcggtccctgttcacaggcagtgggtcgtgtgagatgaacagtgtacagaagagcgaggagaagagcctggaacacaacaagaagcgctctcggccctcactcctgcgccctgtgtctgctccagccaaggtgggactgcaattgaaatgtgcagttgtatggtttggttactgcacaactgaggagtgaaggtggctgacaacagttcctgccccgctcatcaccccgtgatggtggacctctagttctctcattccgtgtgtttgctagttgactttctatagtaataaagttgttttggcatttctgtttaatttaaaaaaaaaaaaaa

SEQ ID NO: 6304 - DNA, 1032 bp, Cricetulus griseus
gaacccagggcctggcgacgtcggggcacgtgaccggcgttcccacatgacgtgcgcgctgctgagcgtcaccgcgacgttcgggcgaccttcgaagtggccaggctacctccgtcacctgtgctgtcggggtgctgtcatggacctgggaccgatgcgcaagagttaccgcggggaccgagaggcatttgaggaggctcatctgacttctctggaccccatgaagcagttcgcttcctggtttgaggaggctgttcaatgtccggacataggggaagccaatgctatgtgtctggctacctgcaccagagatggaaaaccctctgcccgcatgctgctgctgaagggctttggcaaggatggcttccgcttcttcactaactacgagagccgaaagggaaaagagctggactctaatccctttgcctcccttgtcttctactgggagcccctgaaccggcaggtgcgtgtggagggacctgtgaagaaactgcccgagaaggaagctgaggactacttccattcccggcccaagagcagccagattggggctgtggtcagtcgccaaagttctgtgatcccagaccgggagtacctgagtggaaaggagccagggccaatccatgtttgctgtgactcagccgggaagaactactatttattttggttggccttgaacttgttactcgggacaccgtacttcttttgactttgggggtgtgtacttcaggctctgtccctgataagagctcctcccaaagcaatcctctcctgtgttgattcctcacttaagcctgggtctggaaggacattgacctgtgaccaccgccaggtaccattcccttcctcaccccttttgctgttgtgccatggactgtgtgactttattagtacatgcaaatgagttgttgaggacaagtgttgtaccccacatcttttagggggttgtatgtgccccccatttttaacgtgatctcagctgtcatttccaacatgcaagtgtgtaataaaaaacttgtcggccgtgtgtga

SEQ ID NO: 6305 - DNA, 1031 bp, Cricetulus griseus
gacacccgaacaagcgatgaagcaatacatgcaaaaactcacagcctttgaacaccatgagatttttagctaccctgaaatatatttcttgggtccaaatgcaaagaaacgccaaggcatgacaggtggacccaacaatgggggttatgatgatgaccagggatcatatgtacaggtgccccatgatcacgtggcttacaggtacgaggtcctcaaggtcattgggaaggggagctttgggcaggtggtcaaggcctatgaccacaaagtccaccagcacgtggccctgaagatggtgcggaacgagaagcgcttccaccggcaggcggcagaaggaagaatccgaatcttggaaacaacctacggaagcaggataaagacaacactatgaacgtcatccacatgctggagaattttaccttccgcaaccacatctgcatgacgtttgagttgctgagcatgaacctctatgagcttatcaagaagaataaattccagggcttcagcctgcctctggtgcgcaagtttgcccactcgatcctgcagtgtttggatgctttgcacaaaaacagaataatccactgtgaccttaagcccgagaattattttagttaaagcagcaaggtagaagcagtattaaagtgattgactttggctccagttgttatgagcaccagcgtgtctacacgtacatccagtcgcgcttctaccgggctccggaagtgatccttggagccaggtacggcatgcccattgatatgtggagcctgggttgcatcctcgcggaactcctgacaggttaccccctcttgcctgggggaggatgaagggggaccaactagcttgtatgattgagcttttgggcatgccctcccagaaactcctggatgcttccaaacgagccaaaaaatttcgtgagctccaagggttatccccggtactgcactgtcacaactcttatggctcagtagtcctcaacggaggtccgatcccggagagggaaactggagggcccgccagagagcagagag

SEQ ID NO: 6306 - DNA, 1031 bp, Cricetulus griseus
  modified_base (214)..(214): a, c, t, g, unknown or other
caaggctccagcaggcggtaacggcaacaagaagaagtcgggaaagaaagagaagaagtaatatggaggccaggccttgagccacagggcagcctccctccccagccagtccagcttgtccttacttgtacccaggcctcagaattttaggggctcaccccaggatactggtaggagccaaggccatgctccccgttgggaaacagaaataagngcccaagtcaacactcctctctgtgcccgtagggggttgaatatgcaaagaggggggacacagtcaccatcccccctggtactgatgcttgctggattttcgggaaggcattttgctacccagtctcttttcactgcctggggatcagtcttttgtttttcattgtttgatgttcccatgttcccactgcatgctatgacttccctactcctcaaagaagagactcctttgcatgtctggagacagtagggggtggtaagctaaagggaagtggacaaaacagctcattaacggggtcttgcaaggggctctgtatgtacccagggtactggcccaacccccaattctagccatagacaaactccaggccagacccctccaccctggttcagcctgggcagcttgggctgagccaccaggaccaatagatttaagctggcatttcagtccaagaaggcttctaagtggatttaggacctgagaggaagaggggcctctgtgggtgctgggtactccagaggtgcccctgggggaaggaagggtggggtcagtggtcctagcaggaagggagacccagcaaggccattcttgctgggttgagtcaaggagctagaacaagggaccaagtggctgtaaagtctcaagccaatgatggggcttctccactgggctcctgtagtcctcaagtccctggcctccaccttaccaggtgccacttcttctcagaaggccactgcccaggcccccaggccgccccttcgtggccagagactggttaaagccccccagtgcctccttgtgcatagaacttcctctg

SEQ ID NO: 6307 - DNA, 1031 bp, Cricetulus griseus
gagcataggcggggccgtgacagcagttccggggctggaacgtcggaaagaggccggatcgcagcgcctcagcggcagcgcagagatggcgatctttagtgtgtacgtggtgaacaaagccggcggcctgatttaccagtgggacagctactcgccacgggctgaggccgagaagactttcagttacccgctggacctgctgctgaaactgcacgacgagcgggtgctggtggccttcggccagcgcgacggcatccgggtgggtcacgcagtcctggccatcaatggcatggatgtgaatggcaagtacacggccgacgggaaagaagtgctggagtatctgggtaactctgccaattacccggtgtccattcgattcggccggccccgccttacctctaacgagaagctcatgctggcttccatgttccactcgctctttgccattggttcccagctgtctccggaacagggaagttcaggcattgagatgctggaaacagacacatttaaactgcactgcttccaaacactgacagggatcaagtttgtggtcctggcagatcctaggcaagctggaatagattctcttctccgaaaaatttatgagatttactcagactttgccctcaagaatccattctactccttggaaatgcctatcagatgcgagctgtttgaccaaaacctgaagctagctctagaggtggcagagaaggctggcacttttggacctgggtcataggctgaaccaggatctgagacatgctgcagaaggctttgctgtttctattccagtgaggatccattgcagtagccctgttaatgtacttgaaaatgggagaacactgtgcctggtcatggggatggatcctggactagaatgccatgttctctgcccttctgtatatatcacagtcctatgccctgctctgtacagatttatttatggaggaagctggcttagcaatgctgtaataaacattcctttgttctgggacaaaagacaaaaaaaaaaaaaaaaaaaaaaa

SEQ ID NO: 6308 - DNA, 1031 bp, Cricetulus griseus
ggaggaggaggaggaggaggagaactgggcctggagtccagctggtcttcgaagctaccagcaagccctgctccgaatctctctggacaaagtccagcgcagcctgggccccagagcacccagcctccgcaggcatgtccttattcacaacacactccagcagctccaggctgccattcgcctggctccagccccagccctgcccccagagcctctcttcctgggggaagaagatttctccctgtctaccaccattggctctatcctcagggagctggatacatccatgggtgagatggcatcccctccgaatccagtggctcccccaagtcccccgaatgaaacgatgccccaggctgatcctgtgtttttagaagctctgagctcccggtacttgggagattctggcctggatgacttctttctggacattgacacatctgcggtggaaaaggactcttcactcccgcccccagacgcctcctcgaagcctcttctgtgctccaggatcctgggagtggaatgaattggaccacatcatggaaattatcctaggatcctaagactcatggtggggtccttcctggcatcagcctctttgagctgggtccttggatgtgacccttgtatgtgtgtttagccgaggctctcagcagtggactgtggcctcctttcctcctgtcaggattccacaaactgccctgcccgtgtgcatgtctggttacccccagccttccgtgaaggtgcgtcttcctgaattaatttatctcttccagatgccttaaggagactctgtttcagggagtccgatttctcacttacacacttcttctgcctccagttcccactgcccttgccaccactagggcctcagagaacataaaactggacctgtcaaagggtgatagacgggctgcctctccttggaaataaaaaaaaaaaaaaaaaaaaaaaaaaaaaaaaaaaaaaaaaaaaaaaaaaaaaaaaaaaaaaaaaaaaaaaaaaaaaaaaaaaaaaaaaaaaaaaaaaaa

SEQ ID NO: 6309 - DNA, 1031 bp, Cricetulus griseus
ggattgtgctcatctgtgccaagcggtccctgtgtgcggccttctcagtcctgccctatggagaaggcctccggatcagtgacctgagggtggacagccagaagcagaggcacccatccggcggcgtttctgtttcttccgagatggtctttgagttggaaggcgttgagctgggagcagatggaaaggtcgtgtcttatgcaaagttcctgtaccctactaatgccttggttacacacaagaatgacagtcacggcttgctgccccagcctcggcccagcgtcccccgtgttccaccaggttcaagacacaaacctgtacctaccaagtcaacaccagctggcacagaactaggaaacgatggaggagaggcagtggaatacaaccccaacctcttggatgacccacagtggccatgtgggaagcacaagcgggtccttatctttgcttcgtacatgaccacggttatagagtatgtgaagcctgcagacctcaagaaggacatgaatgagaccttcagggagaagttcccgcatatcaaactgacactgagcaaaattaggagtttaaagcgggagatgcgcaccctgtctgaggagtgcagcctggagcccgtgaccgtgtccatggcctacgtgtactttgagaagctggtgctgcagggcaagctcaacaagcacaaccgcaaactgtgtgctggagcttgcgttctgctggctgccaagatcagcagtgacctccgcaagggcgaagtgaagcagctgattgacaagctggaggaacgattccggttcaacagaagagacctcattgggtttgagttcacggtgcttgtggctctggaactggccctgtacctcccggagagccaagtgttacctcactacagacgcctcacccagcagttctagcccagaatagtgtgcaccctgcaggaaggctgcttggtaggaaggcatgtggcttggctagaacagaggcaactagtgtccagtccctcctccaacactgcacttgcccctcacagccca

SEQ ID NO: 6310 - DNA, 1031 bp, Cricetulus griseus
acccattcccagaaggaacttgaccttctagccccgaggcttcctcctttcccatcttctgtgtttccagagaacaactttgtccttatggttagcccaagtccccactctcttcccattgccctctccactccccatcgatgacggcacgaagagacagttactgttcagtgtttcattgctgtcactgagctcctttcagctggtccccatcttggataccagcagtttcccctttccagtccaatgaatcccaggggtctggggaaggaggcaagcctgggcctcagctgcagatttcccccagcagtggcatcatagcggacagtccctggatgcgctgtacttcgtatgagtatgcattgtttatgctccggagctcagccagcaggcccatcagctttgcatacagaaacctttggagggagtagtagggttaccagggaaagaagttgtgcctagtttttcctgaacccagggcttagaggtcaagtgtaaaggaagtgctagacatggccaaaacttcaactgtatagaacctggaggtttctatgtatgaagcatccccctcttagcaaactgatttatcaagggatgagtaggacaaaaagtgtcatgaacttcagagcctggactgttgaagtagggacagactttgtccacaaaactgtgaatgaccgtgacttcaaagggaactgaaaaattcaaggaattgacccaagggagaggtagagagcccaaaagaagaatgagcaagactttgaaaattttgctttagtttggaaaggttggagaggtgaggtgacggatatcaccaatctcaggaatgctatcacacataggctatgagctactactttgcatctctactgaataaaacaaacaaaaaaacttaggaaaaaaggaaaaaatggaacagcattatgagcaatttggatattggaactatgtgtgataggggtggcccaagggaaggtctagattcctaagtatttggtttcccaaaggaaacaacagtaaactgcattcat

SEQ ID NO: 6311 - DNA, 1030 bp, Cricetulus griseus
tcgcgctaccccgggacgggtccatacggcgttgttcttgattcccgtcgtaacttataagggaaacttacacaatgtccggagccctcgatgtcctgcagatgaaggaggaggatgtcctcaagttccttgcagcaggaacccacctaggtggcaccaaccttgacttccagatggagcagtacatctacaagaggaaaagtgatggtatctacatcatcaatctgaagaggacgtgggagaagctgttgctggcagcccgggccatcgttgccattgagaaccccgctgatgtcagcgtcatctcctccaggaacactgggcagcgagctgtgctgaagtttgctgctgccaccggagccactccaattgctggccgtttcactcctgggaccttcaccaaccagatccaagcagccttccgggagccacggcttctagtggtcaccgaccccagggctgaccaccagcccctcactgaggcgtcttatgtcaacctgcccaccattgctctgtgtaacacagactctcctctccgctacgtggacattgccattccgtgcaacaacaagggagctcactcggtgggtctgatgtggtggatgctggcccgggaagtactccgtatgcgtggcactatctcccgtgagcacccatgggaggtaatgcctgacctttacttctacagagacccagaggagattgagaaggaggagcaggctgctgccgagaaggctgtgaccaaggaggaatttcagggtgaatggactgcgccagcgccagagttcactgctgctcagccagaggtggccgactggtctgagggtgtgcaggtgccctctgtacccatccagcagtttcctactgaagactggagtgcccagccagccactgaggactggtcagcagctcccacagcacaggccactgagtgggttggagccaccactgagtggtcctgagctgctctgcagacagctgagcaaagggaaaaaaggtggaaggaaaataaagttcttacaagttgtct

SEQ ID NO: 6312 - DNA, 1030 bp, Cricetulus griseus
gtggagctgggcttcgccgaggcggcaccggcttggaggctgcgtagcgagcagttccccagcaaagtgggcgggcggcccgcgtggctggggctatcggggctgccgggacccggggcgctgacgtgcacgcgctgcggccatccgctcaccttcctgctgcaggtgtacgcgccgctgcccgaccgcgacgacgccttccaccgcagcctcttcctcttctgctgccgcgagccgccgtgctgtgccggcctgcgagtttttcggaatcagttaccaaggaaaaatgcgttttactcctacgagcctccttctgagacgggagcttcagacactggagattctgtgcgcctccagcttaagtcaggagcccacctctgccgggtttgtggctgcctgggccctaagacgtgctctaggtgcaagcaggcacattactgcgggaaggagcatcagacactggactggcggctgggacacaagcatgcttgtgcacagtcagatcatttagaccagacagctccagaccacaacttcctgttcccagaatttgaaattgtgacagaagcagaaggcgagattacacctgatgaggctgtggaaattaaagattattctgaagtcaaagaaagcatggggagaatacttgaggaagaactagattccatggcaaagcatgaatccaaggaagatcacattttccaaaagtttaaatccaaaatagcccttgaaccagagcagattctcaggtatggaagaggcattaaaccgctctggatttctggagaaaatatccctcaagaaaaagatattccagattgctcctgtggtgctaagaggacatttgaattccaggtcatgccccagctgttgaactacctaaaggcagacagactgggcaggagtgtggactggggcgtcctggcagtcttcacctgtgctgacagctgcagcctgggcatgggctacacagaggaatttgtgtggaaacaggatgtaacagacacaccttgaaaacgattacattctt

SEQ ID NO: 6313 - DNA, 1030 bp, Cricetulus griseus
atttttgttgtgtgtgtgtgcgtgcatgatcttttaaaaacttttacatactttgttttgatcttgtgaggctgggcctctgtcttcctgaagttttagaagagcctggagctactcagctaaggctgaattttgaaactttctcttcgggggtgaaagcaaagaactgcttttctttgctagccgaacagataaatgctgtttatgaagatggacctgttgaactaccagtacttggacaagatgaacaacaacatcggtgttctgtgctatgaaggtgaagcttctctcaggggagaacccagaatgcagaccctcccagtggcctctgctctcagcagtcaccgcacaggcccaccccccatcagccctagcaagaggaaattcagcatggaacccggggacaaggacctcgactgtgaaaatgatcatgtctccaagatgaggcatccctccctggcctcatggagcagcctcttgcactgactaagaacagcagtgacactggcagatcggctgtggagaggcagcagaaccggccctccgtgataacctgcgcatctgcaggcgctcgcaactgcaacctctctcactgccccatcgcacacagtggctgttctgcacctgcatctgccagttaccggagaccacccagtgcaactgccacctgtgaccctgtggtggaagagcacttccgtcggagcctgggcaagaactacaaggaaccagagccagcacccaactcggtgtccatcactggctctgtggacgaccacttcgccaaagcactaggtgacacatggcttcagatcaaagcggccaaggacagcgcttccagcagcccagagtcagcatcacgcccgggccagccagccagtcccactgcccacatggtcagccatagtcactccccctctgtggtctcctgaaggggggcgctctaccctccgaccacacagggatctgcatggtttgcctgagctttgaacagtcagtgaacttaaaaaaaaaaaaaaaaaaaaaaaaaaaa

SEQ ID NO: 6314 - DNA, 1030 bp, Cricetulus griseus
ggagcggcggctgctggcggtgtccgggcagatatactgcagttcttgagcactaccccattgagcacacttgggaagttcagccaccaccagcatgtccaagcacaaacttattatactgagacatggagagggcgactggaataagcagaaccgattttgtagctgggtggaccagaaacttaacagtgatggactgcaggaagctcggaactgtgggaagcaactcaaagccctcaactttgagtttgatctagtcttcacatccattctcaaccggtccattcacacagcctggctgatcctggaagagctggggcaggaatgggttcccgtggagagctcctggcgtctcaatgagcgtcactatggagccttgattggccttaacagggagaaaatggctctgaatcatggtgaagagcaggtgaggctctggaggagaagctacaacgtgaccccgcctcctattgaggagtcccatccctacttccatgagatctacgatgaccggaggtataaagtgtgtgacgtatcactggatcagctgccacgttccgaaagcttgaaagatgttctggaaagacttcttccctactggaaggaaaggattgcccctgaaatactgaagggcaaaaccattctgatatctgctcacgggaatagcagtagagccctcctgaaacacctagaaggtatctcagacgacgatattatcaacatcactcttcctaccggagtgccaattctgctggagttggacgagaacctgcgtgctgttggatctcaccagttcctgggtgaccaggaggccatccaggcagccattaagaaagtggatgaccaaggaaaagtgaaacaaggcaaaaaataaaacccagtgtggccaggaatcatggcaggagtggcattcagtgtgttacttagtgtgtttctccctttccccgttggcccccattttcctcaagactaggctgtgtggtagagtttgtgtagataactaggtaatttatcatggcccagatgtgac

SEQ ID NO: 6315 - DNA, 1030 bp, Cricetulus griseus
atgctgcggttgttccgggccgcttctcaggcctgggttcgaccccccggctcccgggtcctcagctcgctggcggaaggcgcggcgcggccggccgagagctcgcagccgggggctaccgcgggtctcctagatcccgtggtgcgcaagtgcgagctccgaatcccggcgcaccggcgcccggtgcacgcctgggtcgagtcactgcgaggcttcgagcaggagcgcgtcggcctagcggagctgcaccctgatgtgtttgccacggcgccccggctggacattctgcaccaggttgccacctggcagaagaacttcaagagaattagctatgctaaaaccaagaccagggctgaggtgagtggtggtggccgcaagccctggcaacagaaaggcagtggccgtgcccggcatggcagcatccggtcccccttatggcggggaggaggagtagcccatggtccccggggtcctacaagttactactacatgttgcccatgaaagtacgggcactgggcctcaaagcggccttgactgtcaagctgatgcaggatgacctacacatcgtggattccctggagctgcccactgcagaccctcagtacctgacagaactggcccagtaccgacactgggggagttctgtgctccttgtagacttgacacatgaggaagcgcccaagaatgttgtggcagccacctccaggctcaagagcttcaacctgatccctgcagttggcctgaatgtgtacagcatgctcaaacaccagactctggttctcaccctgccttccatcgccttcttggaggacaagctactctggcaggattcgagatacactccactctaccccttccgctttccctacaatgacttcccctgaccctgccctggtcacctagaagcacaccccacttggggccaagtcagcataccagccttcctgtaaaaaagctattccctggaagctgctgggccttggtgccaggaggggataactgcacagagccaagatggctgcctgcctg

SEQ ID NO: 6316 - DNA, 1030 bp, Cricetulus griseus
ctgtttgaaggcttgaaggcttttcgaggagttgataataagatccgattgtttcgacctgacctcaacatgaggaggatgtgccgatctgctgtgaggaccactttgccggtgtttgaccaggaggagcttctagaatgcattcggcagcttatacagatagaccaagagtgggttccgtactccacctctgccagtctgtatatccgccccacgtttattggaactgagccatcccttggagtcaagaagccttccaaagccctgctctttgtggtcctgagccctgtgggaccttacttttctagcggaacctttaagccagtgtcactgtgggccaatccgaaatatgtcagagcctgggaaggtgggactggggactgcaagatgggcggcaattatggcgcgtcccttttggcgcagtgcgaggcaatggagaatggctgtcagcaggtcctctggctgtatggccaggacaaccagataacggaagtgggcacgatgaatctgttcctctactggataaacgaacatggagaggaagagctggcgacacctccgctagatggcatcattctcccaggagtgacgaggcaaagcatcatagagctggcacaacagtggggtgagtttaaggtgtgtgagaggtacctcaccatggatgacctgaccactgccctggaggggaacagagtgaaggagatgtttggctcagggacggcctgcgttgtctgtccagtttcagatattctgtacaagggccagatgctgcacattccaacaatggagaacggcccgaagctggcaagccgcctcttgggcaaactgactgatatccagtatggaagggaggagagcgactggacaatcttgttatcgtgatggaaaaactcagtgtgttgatggtgtgccacagaagacagacctctgccctgaacggcgactgcccgtcaatagttttgcatattgtagttgcagtgttcatgtgttaccaagttgaggttttcccttgagccacaggaaattgcca

SEQ ID NO: 6317 - DNA, 1030 bp, Cricetulus griseus
caacttttgtttcttgaccctgtggtatgacagtctgctaatattgccagaaggtgcagtttgggggttacagttgtgattttagctattcaatcatattagcaggaaaaaaatgacttgtttctgttgtacttgagtcttaaagaaaagtgcccatagtttagtgacaatttccaaaggctttagtaccacctgtatttcaaaatgggggacccaaactcccggaagaaacaagctctgaacagactacgtgctcagcttagaaagaaaaaagaatctctagctgaccagtttgacttcaagatgtatattgcctttgtgttcaaggagaagaagaaaaagtcagcactttttgaagtgtctgaggttataccagtcatgacaaataattatgaagaaaatattctgaaaggtgtgcgagattccagctattccttggaaagttctatagagcttcttcagaaggatgtggtacagctccatgctcctcgataccagtctatgagaagggatgtaattggctgtactcaggagatggatttcattctttggcctcggaatgatattgagaaaattgtttgtctcctgttttctaggtggaaggaatctgatgaaccttttaggcctgttcaggccaaatttgaatttcatcacggtgactatgagaaacagtttctgcatgtactgagccgcaaggacaagacaggaattgttgtcaacaatcctaaccagtcagtgtttctcttcattgacagacagcatttgcagactccaaaaaacaaagccaccatcttcaagttatgcagcatctgcctctacctgccacaggaacagctcacccactgggcagttggcaccatagaggatcacctccgtccttatatgccagagtaaataagagcattgaccagcaaaatggagaagaccagagaatgcagcagcgattttctttcttgttttcttaccacttttctttcagagtttaaagaaaatggactcatgcacagaacactatgcattttgaaacttg

SEQ ID NO: 6318 - DNA, 1030 bp, Cricetulus griseus
gagtccattcggcgatggcctctacttttaagaagacaaacatggcatccagtggccagagaaaaagaatgagccctaagcctgaactgactgaagaacagaaacaggaaatccgggaagcttttgatctctttgatgctgatggaactggaactatagacatcaaggaactaaaggttgcaatgagggctctgggactttgaacctaagaaagaagaaatcaaaaagatgataagtgaaattgataaggaagggacaggaaaaatgaacttcagtgactttttgacagtgatgactcagaaaatgtccgagaaagacaccaaagaagaaatcctgaaagctttcaagctctttgatgatgatgaaactgggaaaatatcattcaaaaatctaaagcgtgtggccaaggagttaggcgagaacttgactgatgaagaactgcaggaaatgattgatgaagctgatcgagatggagatggcgaggtcaatgagcaagagttcctgcgcatcatgaagaagaccagtctctattaagatcactgcttctttttctacttcaagcacatgtgactagatttagtgcctgccattttgtgaaatacggcttttgagaaccctccttccccaacctgtgggttaactagccatgcccctgaatctatttttgacttttggaagtttctttgatattaagttctttgtacatttccctgctgactaattaaacagggcagaacaagagcacatagtggggaaagggtgtgaaagtgtgactgcagccactccactttccattagttcacattgcttatgcattttcacacagctgcaaacacacaatggcttcttagatgtccatgtagccatgtcacaataaacagtggttgttctaaaattgttctagtttttagttgacaccagagtgcagttttttcctcacataaaacccaacgaatgcttgttatggcatttagatatgtgttaatgctattttgttttagttttaaaaaataaaactttttaactttaa

SEQ ID NO: 6319 - DNA, 1029 bp, Cricetulus griseus
  modified_base (627)..(627): a, c, t, g, unknown or other
ttctttggtcaccaaggtgacagctgtggatgctgatgcaggccacaatgcatggctctcttactctctgttaccacagtccacagccctggactgttccttgtgtctgcacacactggtgaggtgcgcactgcccgggccttattggaggaagactctgatactcaacaggtggtggtcctggtgagggacaatggtgacccttcactgtcctccacagcaacagtactgttggttctggaggatgaggacgctgaggaaatgcctaaatccaatgacttcctcacacaccctcctgagcggtcagacctcaccctttaccttattgtggctttagctgctgtcagcctcttatccttagttaccttcactttcatgtcagctaagtgtctgaagggacatgaagatggtgaccggggtgggggtcagtgctgtaggggccaggactcaccctccagggagttctatagctgctgatgggagctccactctgggaggggcgctggcaccatgggtttgagcgctcgatatggaccccagttcaccctacagcacgtgcctgactaccgccagaatgtgtacatccccggcagcaatgccacactgaccaatgcagctggcaaacgngatggcaaggctccagcgaggcggtaacggcaacaagaagaagtcgggaaagaaagagaagaagtaatatggaggccaggccttgagccacagggcagcctccctccccagccagtccagcttgtccttacttgtacccaggcctcagaatttagggctcaccccaggatactggtaggagcctggacaaaacagctcattaacggggtcttgcaaggggctctgtatgtacccagggtactggcccaacccccaattcttagccatagacaaactaccaggccacccccgcctcggctggtgtagaatagccaatagtgtagtgtggtgtgcttttatgtgatggcgagtgggcaacgggcggtgggctgtgccgtctgtccttgaatctcaatctgcctg

SEQ ID NO: 6320 - DNA, 1029 bp, Cricetulus griseus
aggctacacgtgagccatggatacaccgttgaggcgcagccggcggcttgaaggcttaaaacctctgtctctagagaacccttcctgaccccgcagtttcccgagcgagacgggcccttctcgagtttgagtcgaacccagaagaaaccaacgaaaaccaaagtctccgagagtgcagccactgcccggatcaccgtgtctgaaacaggaagcaggctttgggtcccctcaaaggcagccagagcctgaccccgggtccctgcaatctcagcaagatctgggcctggggtcacctacagaacagacagaatcgagtccggaagccccccaacgagagacgtcatccaaatctcttcccacacaaggagaactggactcagaggtggtacacgctaaggagttgatcccaggatccccagagccttgcccgggccagcaagcaccgggtcccgagccctctcagccagtacaggagctgacatcccagacacccagcttcccacagcgccaacaggaaccaaacaagctacctccagctggcaagacggtgacaggtggcctcgacgtaaagaaacgagttataccttctccccaggccccggcacccaagaaattgaaggaggaggagcttcctgtaatcccgaaggggaagcccaaatccgggcgcgtgtggaaagaccgctccaagaaaaggttctcccagatggttcaggacaagcccctgcgtacctcctggcagcagaaaatgaaggagcgtcaggagaggaagctgaccaaggattttgcccggcacctagaggaggagaaacagaggcgccggcaggagaagaaagagcgccgggctgagaacctgaaacgccgcctagagaatgaacgaaaggctgagattgtccaagtgatccgaaaccctgccaagctcaagaaggcgaagaagaagcagctgcgctccattcagaagagagacaccctagccttgctccagaagcagcccccccagaggcctgtagccaaggtctgagctcaggacag

SEQ ID NO: 6321 - DNA, 1029 bp, Cricetulus griseus
tgcgatggtaactgcacatcctagaacaccgggttgcgggtcctgagtgtcgcccgccagggcctctggctctacacccacccactcatcaaactgctcttccctgccccatcgcagccggtgcaagttcttcagcctgacggagaccccggaagattacacactcatggtggatgaggagggttttaaagagctacccccatctgagttcctgcaagtggccgaggccacatggctggtgatgaacgtatcatctcacagcggtgcagtgatgcaggctgctggagttaccaagattgcccggtctgtcattgccccactggccgagcaccacgtgtctgtgttgatgttgtccacataccagacagacttcatcctggtacgggagcaggacctgtctgtagtgatccacacactggcccaggagttccaaatctaccgggaagtaggcggggaacctgtgcctgttgccagggatgattccagcaatggctttccccgagcccagcatgggcccagccccacggtgcatcccattcagagcccgcagaaccgattttgtgttctcacactggaccccgaaacattgccggctattgccaccaccctcatcgatgtcctcttctactcacacagtgtccccaaggaggcagcctcaggtggtcctgagtcaagctccatcccgttcttcgctttctccctcattgagggttacatctccattgttatggatgcagagacccagaaaaagttccccagtgacctcttgctgaccagttcctctggagagctgtggaggatggtgcgcatcgggggacagcccctgggtttcgatgaatgtgggattgtggcccagatcgcgggtcccctggcggctgctgacatctctgcctattacatcagcaccttcaactttgaccatgccctggttcctgaagacgggatcagcagtgtcattgatgtactccagcgaaggcaagaaggcctggcttccaaaggtccatagggaacaccaggatcccagcattc

SEQ ID NO: 6322 - DNA, 1029 bp, Cricetulus griseus
ctgtctggtggcctgaggagagcattctgtatccaggccaccttgaaggaccacaaagagggactttctgataaagaacaaagatttgtggataaactttatatgggtttagtcagcgggcaaagagcttgcttagcagaggccataactctggtggaatccactcactctcggaagaaagagctggctcaggtacttcttcagagagtcctagtctaccaccgagagcaggagcggctcaaccaaggaaagccccttacatttcgagtaggattgtctgggccccctggtgcagggaaatcaacctttatagtaatattttggaaaaatgctgactgatagagggcacagattatctgtgctagctgtggacccatcttcttgcaccagtggtggatccctcttaggtgaacgtaaaacccggatgattgagctatcaagagatatgaatgcatacatcaggccatcacctaccagtgggactttaggaggtgtgacaaggaccacaaatgaagctattctgttgtgtgaaggagggggatatgacatcattcttattgaaactgtaggtgtggggcagtcggagtttgctgttgctgatatggttgatatgtttgttttattgctgccaccggcaggaggggatgaacttcagggcatcaaaaggggtataatcgagatggcagatctggtagttataactaaatctgatggagacctggttgtgccagcccgcaggatccaagcagagtacgtgagcgcactgaagctgctccgccggcgctcaggggtctggaaaccaaaggtaattcgcatttctgccagaagtggagagggcatcagtgagatgtgggatacaatgaccgagtttcagcgtgtgatgctggccaggtggggagctgaccaccaagagacagaagcagcagaaagtctggatgtggaatctcattcaggaaaacatcttagaacatttcaagacccatccgagcatccaagaacagattcctctgatggagaggaaggttctca

SEQ ID NO: 6323 - DNA, 1029 bp, Cricetulus griseus
atggcatcagcgttgaagatcagagaccccacagtttctgagagaacgattgtagtctctggtcttccagttggccttttaaaagaccagctaatgaggcgttacttccaaaatgagggtgaacacgtggaagaggtgatatatccatcaagaaccaaaggagttgcatatatcatattcaaagaaaagaaagttgcacagaatatcatcagacaaaggaaatatcctctggcctcaaagcctcggctcacagtctccggcttcagtgaaaaggtcttcaaccatgtgatggctattctggatctgtctgtttttcggactcaaattgtgctagaaagcctggtaatggatctgaaaaagaaaatcccaactttaaacttcagctcactgggacccagtgggaaaatctctgtgcaaggttcatttccggctatcatgaagcttaaacaggctttgatatcaaaagccatctcccctttagaaaaccacaggaagtatgccagtgacaggagaaatcagaatagacagaaccctggaagtgtcctacagagaagtgacaactctacagtggcacttgggacctctgtacctgaggctgccagaagtgaagggacacttgtgcttgatacagatactttcttttacctgaaacacaagtgtgacttttatgaactgacactgaacaaataccatatcctgtgtcaggagagggtggatggtgatgtcaccactatttgtctacaaaatgcccacaacgggtcttgctctaacagtgtcagacatgtgaaagagatcattgaggagtgggtccaggggctccaccttgagctcagaaaagagacactggtgttagaaggaaggggagatagagagaaaagaaatattaagcaggcatgtgaacaactatgttacagatatcttagagttttgattaatcttcacaacacacatatcgacattataggaccttcttccgacacgttcctattcaagacagagctcataaagtgtgcaaggcaaaaggtcact

SEQ ID NO: 6324 - DNA, 1029 bp, Cricetulus griseus
gcagagcagcctgagcctgagaaggctggaagtgaggagcaagagacggctcaatggcaagccctccctgtcctgtcggagcagcaatcgggggccgtggagttggtgctggcctacgctgcgccagtcctggacaagcgccagacgtcccgcctcctccgggaggtgtctgccatctacccgcttccagcccagcccacctcaagcgggtgcgccccagtcgcagtgccggcggcgcccacgcatcggatcttctgctgtgcctggcagggccctctgcgggcccacgctcgctggctgagctcctccctaggccggctgtggacccccgtggcctgggcacacctttcctggacaagcaggtgaccagcgcactggctgggcagctcttctctgcacaggcgcgagcagccatgcagagccatatggaacgggcagtgcgtgccgcccagagggcagctggccagggtctgcgggcggtgggtgctgtagtggtagacccagcttcggatagcgtgctggccactggccatgactgcagcgatgtggccagccccctgctgcacgcagtcatggtatgcatcgacctggtggcccaggggcagggccgtggcacctgcgacctcagacggcacccgacttgctccttcaccctggccaccaccccccagggtgcacgtgctggcagcgtgcgcaagctggacgaggacgatgatggcatgccgtacgtgtgcaccggctatgacctgtacatcactcgtgagccctgtgtcatgtgtgccatggccctcgtccacgcccgcatccagcgtgtcttctatggggcgtcctctcctgatggcgccctgggtacgcgctttcgtgtccatgcacggccagacctcaaccaccgcttccaggtgtttcgtggcatccttgaggaccagtgccgccagctggatcccgacccttaggcctagtcacttctgcttccggactgctctgctcctggccagccctcatccctgcagctccatggccttgggccct

SEQ ID NO: 6325 - DNA, 1029 bp, Cricetulus griseus
aagagccggcctcctctcctcgggcttctacgccggctcgccctgcgccgcacgtgcgttgctgaatggagctggtcgctggcagctacgagcaggtcctgtttgggttcgcagtgcaccgcaagcccgcgaagagtggcgaccgggagacatggacccctgtggctgacttcactcaccatgcccacaccgcctccttgtcagctgtggcatcgaacagtcgctttgtagtcacaggcagcaaagatgaaacgattcacatttatgacatgaaaaagaagatcgatcatgggtctctggtgcatcacagtggcaccataacttgcctgaaattctatggcagcaggcacttaatcagtggcgcagaagatggactcatctgtgtatgggatgcgaagaaatgggaatgcctgaagtccattaaagctcacaaaggacatgtgactttcctttctattcacccgtctggcaagttggctctgtctgttggtactgataagacattaagaacatggaatcttatagaaggaaggtcagctttcataaaaaatataaaacaaaatgcccacatagtggaatggtccccgagtggagagaagtacatagttgttgtgctgaataaggtggatgtctatcagctggacacggcctccgtgagcggcaccatcacaaatggaaagaggatctcgtcagttaccttcctttctgactctgtccttgcagtggctggagatgaagaagtcgtaaggttttttgactgtggttcactggtgtgcctctgtgaatttaaagctcatgaaaacagggtaaaagacatgttcagttttgaaattccagaccatcgtgttcttgtcacagcatcaaatgatggcttcatcaaaatgtggatgcttaagcagaataagagagatcccccatctttgctgtgtgaggtgaacactggtgccaggctgacatgtcttggagtgtggttagacaaagagacagatgaaaaagcaagccttcctccagcaacagagccctcccctg

SEQ ID NO: 6326 - DNA, 1029 bp, Cricetulus griseus
atggcatctaagaaatttgccattaaatgtggaaattttgctgtcctcgtggatcttcatatagtgccacaaggttcaaacaaagattccagttggttttctgaacagaagaaagaggaagtttgtttgctgttaaaagaaaccattgattccagagttaaggagtacgcgggcatttataaacagcacaggccttcaaatgcagaattcacaagatccagtcccttgtccttaaaaggttatggctttctcatcactgcctatttcgtcaagagggggatacaccttcgctgtattcagaactcacagaatactgaacttcgtatatttcctgacagatttgtggtcttgtgtttagtcagtcttcctatttggtcctgatacttggacaagccagaatgcaaagtccacgagcagccaagacacaacagaaacgcaggaactgtggctctgctgaagtctttgaccaccgcagcagagtttctcttggaaacgatggattagtcccaggagacatgatggtagagaagagcacagctgtcagtgttttgccagcattagagttgtcagatacagggttgcttttgaatcaagatttggcgaaagtcacagctaaagaagagctatatgctttggaaaacctctcctccagacaccttatgacaaacaacccagggctggtgcagcaaactagctcgcctgcagttgatgaaagattagctacagttcaaggcggcccaagtaaaaaaagaaagaaattgcaaagttctagcagaggatgtagtggcaagaaaaacttcagtgtatagttcctctggtttgaaaagaattgagtaattagtctaagcaaatatttggaggttgggagatatctcagcttttaagagcacttactgtctccaagaggacccaggttgagttccaagcatctacaaggtaactggaaaccatcacgaactccagatccgggagacacaacacccacttttggcccccatggggcaccaggcatgcccacggtatgtatat

SEQ ID NO: 6327 - DNA, 1029 bp, Cricetulus griseus
ctccaggaccgaagtcagcagcccagagacttgccaggcaccataactgtgagcatcctcagcagtgcctctctcacagctgtgtgacaccagccgcctacctggccccactagctctcaccactacttgcatgtccccacctggcctgggaccagcctgggaaccagacattggggcccttcccccactcttcactgacctactgtgtgacctgaggagagccctgtccctctctgagcctcagtgtttggagctgacttcactcgcatctcctaaagagctgtggccacactggtgagaaagttatttcccaatctctacttgtgatgttggaagcagtggcacgggccaggcaggtcaatgtagggctatgggagaccctagggggacataagactgcctctgttgaaagatcctgggttttcttggaagaaaggaactccagggtggggggtgccaggccttcagggttatgtcatctgttgggtgtcataggcagggacttccctctcctgaccagaggcctctccaccagcatcccctagacagcccaaggaggccaccatgatcttgctgcccagaccatcattcagtcctcaacatttggtagtcttagcatttaaaaaaaaatcttgggtctcagggcctgacatgtgggtcttagctcagccatatccccctgaggcacagggcaaaccaggaccaagtagcaaacttgtataagcttctcccggtggttagccactgcctcccacatccagcagaactgggccagcagccctgttcttgcttcctccctcttaagctaggccaggctggctcctggctgtgcagggacctctggtccccaggaagccttgaggactggactggtgaggacagtgtggagcatggagagcagtggctttgttcactctttgcacccagaaggcctcatagtgtgccagttgcaggcgatcaaccctgcagcctacactatatggaccaccagggcctggccttcactcctccaggtcaccgtgccctgg

SEQ ID NO: 6328 - DNA, 1028 bp, Cricetulus griseus
gagaacaccggccagccggaaggatgaagtacctacttgacttcatcctgatgctacccttgctcatcgtcttctgcatagagtctttcgtcaagctttttattcccaagaagaaaaaatcagtcgccggagagcttgtcctgatcactggagctggtcatggaattggaagactgactgcctacgaatttgccaaacttaataccaaattggttctctgggatatcaataagaatggcatcgaggaaacagctgcaaagtgcaggaaccttggtgcccaggcctatccctttgtggtggactgcagcaagcgggacgaaatttacagtgctgcaaataaggtaaaggaggaagttggaaatgttagcattctggtaaataatgctggtgttgtctacacttcggatttgtttgctacacaagatgcacaaatcgaaaagactttcgaagtcaatgtgcttgcacacttttggaccacaaaggcatttcttccagagatgatgaagaataatcatggccatattgtcaccgtggcatcagcagctgggcacacagtggttcctttcttgctggcttactgttccagcaagtttgctgctgttggcttccacagagccctgacggatgaactggctgccctaggaagatccggagtcaaaacttcgtgtctctgccctaacttcataaacaccggcttcatcaagaacccgagtaccaacttaggacccaccctggaacctgaagaggtagtaaaacatctcatgtatgggatcctcactgaaaagaagatgatatttgttccaagtgctttagggtttttgatggtgttggaaaggatctttcctgagcggttcctggcagttttaaaacacaggatcaatgtcaagtttgatgcagttattggctacaaagataaatgatgaagactgcctggttttcttgaaggctgatttactggactcaagttgatttcttccaatatgaattgaaattttaatgtttttgacttgtttttctcatgatcttgt

SEQ ID NO: 6329 - DNA, 1028 bp, Cricetulus griseus
ccggggaagccattgcctggttaatagttgctgttgctgcacttccgcttctctcccagcgagagcgagacacgagtggccaggcccagccgcagccgcagcagcagccgccgcggcggcacggagcagccagacacaaagagaggggccgttcgcggggtggggtggggggttcgctatgtcggatgacgattcgagggccagcaccagctcctcttcatcttcatcctccaaccagcagaccgagaaagaagccagcacccccaagaagaaggagagtaaagtcagcatgagcaaaaactcgaagctcctctccaccagcgccaagaggatccagaaggagctggcagacatcactttagaccctccaccaaactgcagtgctggtcccaaaggtgacaacatctatgagtggagatcaaccattcttggacctccaggatctgtatatgaaggtggtgtattcttccttgatatcacttttacaccagaatatcccttcaagcctccaaaggttacatttcgtacaagaatttatcactgtaatattaatagccaaggagttatttgcttggacatattgaaagacaactggagcccagcactaaccatctcgaaagtcctcctctctatctgctcactccttacagactgcaatcctgctgaccctttggtgggaagtattgccactcagtatatgaccaacagggcagaacaccagacagtggaccaagagatacgctacataaaactggggttttcagttcttccattatctgtctgtcacagaagagagctgcttatgattttgaaagggtgggggagggtgggagttggtaaagagtagggtatttctataacagatattattcagtcttacttcctaagattttgttgtaacttaaggtatcttgctacagtagacaaattggtaatagtgacttttagagctgtcagttttgcaagattagctgactttttagtacaacagaaaagaatgtatgtgtagacacttgggttccattgat

SEQ ID NO: 6330 - DNA, 1028 bp, Cricetulus griseus
cttggacagcccgggcaacctcgacaccctgcaggcgaaaaagaacttctccgtcacctgctagacctggaggaggccggggacatggtggcggcacaggcggacgaaagtgtggggcgagacgggaccggagcctgctggagtcaccaggactggaccagtcggcaagcgacacccctcagcaggacaatgatcaactgaactcagaggagaagaagaagagaaagcaacggagaaacagaacgaccttcaacagcagccagctgcaggccttggagcgtgtcttcgagcggacacattacccggatgcttttgtgcgagaagatcttgcacgtcgggtgaacctcactgaggctagagtgcaggtgtggtttcagaaccgaagagccaagttccgtcggaatgagagagccatgctggccaataaaaacgcttccctcctcaagtcctactcaggagatgtgactgccgtggagcagcccatcgtacctcggcctgctcctagacccaccgattatctctcctgggggacagcctctccatacagcttgctccacttccacacgcttctcagccatccaccactctcaaggctgcttttgcagctggctgacattccttactcggttaacctcttcagagacattcaacttgctggcatccccacatttttacaggagattgctggttgccccaggagcagggtttggggcagaagagagaggggcggccatcagcaatctcctcttggactcaggaattcttgccaaggttgcaaaaaccaggaaagaatataaaagaacagatcctttgaaaactgtgtccagtgcccctcttggaaccattctggaacaaaactatcccgtttaagacacctttgctgtgttgcggttaagtagggaatcaatgtgtaatgctccaagtgtaggactaaaagctctcttcccaataaaactgattttgaattaaaaggtcaggaaggagggagggagggagaagaagggagacacgagggagggaggagagga

SEQ ID NO: 6331 - DNA, 1028 bp, Cricetulus griseus
ggcgggcccacaggcctcgggtgccgctcggttctcctgcccccccaacttcaccgcggtgtctccagactcggatccccctcgtttctccttggaggcgctgacgtttccagatacagaagtgtggcttatccgagcccctgcagacttcgccccacagtgcctcaatgggcggcgtgtgcctctctctggctcaaagactgttaagggcaaactggatggcaagaggtgccgataccgggtcctcaccagcagcccccaggctggggaagccaccctgctggcctcgtcaacagaggcaggcgggaaactcacctgcgccccggcccccaatggaagcttaaggataatggagggccttcaagaatttcgcgtctctcgggtccctctgcagcccattcccacaagcctgccacctcagatcccagatggcctaaggccgcggttctctgcctttggaggcagccctccagtcacggggcctgggtcagtcatggctctgaggtcacccagttcagggaagaagaaaagaagagaaagctcgaagaggcctcagccattcaggaggcagtggacgggcacggggccatggaggtgggcacaccctggggtggcctagaaatgaacaagaagaagaagaaaacacggaacctgtgggcaaaatgcagcctcctgatgggaccatcctgaccccaccaagaagagaaaaaggcaggagaatcctgaagggatggaggtggcggagggcaccatgtctggctctcagtcacaggtcgctgtggaaccccaggaggaagccatctcactgtcccccacaaagaagaggagaaaagagaagaggcagaatttggtggtggagccagaggcggggctccctggagcggtcacagagcctgaactttcagaacacgggtttcaggccgaggcagctacggtgtcccccaagaagacaaagaagaaaaaaggaaagtggctgggtgaggctacacagagaaaccctgtctcaaaaaccaaaaaaaaaaaaaaaa

SEQ ID NO: 6332 - DNA, 1028 bp, Cricetulus griseus
tgcagatggcggaaatggacctggctgcggacttgccgccgcccgagggtgctgcgcgctgggccgacgttatggctcgctttgcggccagcctgggcgcgcagggccggcgggtggtgctggtcacgtcaggaggtaccaaggtccccctggaagcgcgagccgtgcgctttctggacaacttcagcagcgggcggcgcggggcaaagtcagtcgaggtcttcctggctgcgggttacggggtcctgttcttgtaccgagcacgctcggccttcccctatgcccatcgcttcccgcctcaggcctggctgtcggccctgcgaccttctggcccagcccagtcagggaagctgaggctggaggccgaagagaatgcactcccgggctttgctgcagcattgcagagctaccaagaggcagccgctgccggcaccttcttggccatagaattcaccactttggcggactacctgcatctgctgcaggctgcggcccaggcactcagcccactaggctcttctgcgatgttttacttggctgcggcagtgtcagatttctatattcctgtctccgaaatgcctgaacacaagatccactcgtctggtggcccactgcagataacaatgaagatggtgccaaaaatgctttctcctctggttaaagattgggctcccaaagcatttatagtttcctttaagctggaaactgacccctccatcataattaatcgtgctcggaatgccttggaagtttatcagcatcaagtggtggtggccaatatcctcgagtcaatacagtcctttgtgatcattgtaaccaaagactcagaaaccaagttactgctgtcagaggatgaaatagcaaaaggcatggtgatagaagagaagatagtagaagaccttcggtcacgacacacagcttttatatgtgacaaaaactgagggaaatactcatctagcatcaaaagccggggttcttaacactgacaagaagtaaaatgaatcctttgctaaggataaagacaatga

SEQ ID NO: 6333 - DNA, 1028 bp, Cricetulus griseus
gtcgtcgccgccagtgccgggaccaggagcctccgcgagcaagatggccgctcccgagaccgaggccgaggggcgcgggcattaggtccccaccgcgcgccctccctccagctgcttgcgcccccacgaaggcctcgcgcttctagccaacaaatccgcatggattactctcgctgtgggcgcgaggccattccaatagagccttagttgccccagggagagaactcgggcatttggctgctcggagctggaacctctgggaggtctgctgcaacaggtgcgacagtgactgctccatgctcgcgggcgcggggaggcttggcctcccccggggcggccacctctgctggttgctgtgtgctttcaccttaaagctctgcgaagcagaggccccggtgctcgaggagaagttgtcagtgagctcctcaacttcgccatgttggctgatggaagagttcgtagtgactgaagagtgtactccgtgttctaacttccagattaaaacaacgcctgagtgtagttctacagggtatgtggagaaaatcacatgcagctcatctaaaaggaatgaattcaaaagctgccgttcagctctgatggaacaacacttattctggaagtttgaaggcaccatggtgggtgtggctttagtcttcgcttgccttgtcatcattcgtcaaagacaactggatagaaaggctcttgaaaaggtccggaagcaaattgagtccatatagctgaatcccactgtattatgctgggtcttgcagactggatctcgtatgaagaaggttcagtaggagaatttgcactctgtgtctgtggtactagcaccttcccctgacttcttccagaccattaatgagcacaataaaatgtgaaatagagctgggcatggtggcacacacttgtaatcccagcacttgagagaggggggctggaggctacttggtaaatttgtaggtaggctaggctgaactacataataagactgtactttaaaaagaaaaaactaataaaggactaaa

SEQ ID NO: 6334 - DNA, 1028 bp, Cricetulus griseus
tgctgtattttcaccatttgattatgtagcaagatacatggtgtttatttttcatttagtctgattgtccaatgtcgttggtaacagcccaaagccactatattatctcctttgttatagtatctttgccatggaggaccttctctgagtaggggctccccaggtttgtctctttgagctgagacagaaggcacaccctttttcttaatgggaactgggtgtcaccaccccaagaactgcagagctttcccaagctgaggcaggagtgtgaggtcagggaagagtgagagccaccctcatcccacgctgtgctattcatccatcatgctcatcattctcgctcatccatcggagacagtctgcctaaagcaaatatgcatttaaatagtacatttacataagaaaagccagatttgtaccctgtgttgttacactgtgctgctggctcccgagggcaatgggtcactagcaaggaagtgcagcggcctggggcctggggcccctccagtgggttctgttatcttctcacacgtgattttctcactggtggtgtcaccagggacctcctcacaggggccagtcaccctccccaggtaatgcaccggtttctagctggatgagaactggggagtctttccttacacagcttccctggtccatcttaaggtaatctcatttctcaaaatgttccatagaaacctccaaattcccccaggagactggtcattgccaagttcacaaaagcagccagcagagtcattgccaacctcgacggtcttgcagtgtctgagcagtgatgggttcagtgttgtgtgtggtgaataatgtattttgtttcagttctgtctcccagataatgtgaaaatggtccaagagaaggcagcttcctatatgcagtgtgtgcttttttattctcatctttaatatatgacagttatttgagaagccatttctactttgaagtcatatcaatgaaaatgatgtatcttcacctacaattttcccaataaagatctgtattacaaata

SEQ ID NO: 6335 - DNA, 1028 bp, Cricetulus griseus
aggttgttgggcatctgcagagcatcaccggcattgcctcggagagcattgctgagttctcttatgcaatcctgactcacagcgtgggaacaaacactcctgggcaacagcagcctactccccacaaggcagccagagctctgaggactgctgcttcctccaacacatgagtctggctaaaccccagacacacagccttctgacactgtattctccttctctttgtttactttcatattcagggtgcaaaagttccaagtttcctttgaacagtattttgtattccaatttgaggcactttttttctacatcagagatagttatggaggataaacacgtcctcttgtgttatggcaagctaaaaattttgttctgttttgttttgttttgttttgttttctgcttttttgagacaggatctctcactatttgtccctgtctgacttgcaactcactatacacaccaggctgagttggattcagagatccacttgcctctgccttctgggattaagtatcatcatgcctggcttactgttatactttattttttaaactaaaacatgtttcaacagaatttctacaaaactgactggaactcaattcttccagaatgcaaaatactcaattctaaagaaaaacttagcatccaccccttggtaattaacagaccatagcaaatcctttattacaaataattaaatctctccatgtctcaaacagtctcaaacaccgtttttgtaattctaacagataacagagtaggcattcagtgctggaactgtgtgagaaaagagttagacatccagcttctgacatggcgtcctttcccacgtcaccccactgtgcacactaacatcatctcagaactcttctgtttcagattttaagtgcaggaagttgagagagataaaatccagtgaaaacacatcaatgtcaattcaactaacttaaaaaaaaaagacaaatttaaattagttgttttcaaggggaaaagggaaaggaaagcatggggctgagtcagaact

SEQ ID NO: 6336 - DNA, 1027 bp, Cricetulus griseus
ctaagctggtggcactgccagactctcgaatcaaagacaaaggtaccaaccaggtgcagggcggcaccactgaacacaggccccgcaatactccattcatgggcatcatggacaagactgccaggtcttcagcagcaaagaagggaagaggctatctagtcattttgattgtaccaggtcagatacttgcgtagcaaaagtaataagagaagcactcttgatggtgcctacaattatctctaactggttccagaagtcctcaggacagtgctggaagtctctgaaacaagcctccaatgtcctctagggccagggtttaaacaggacccttgaggactgggtgttcgtttttgtttttctattattgcagtcattatttcgtaatcacatgttgtatatataaatggctagcccagttttattcagacttgtaaatataacccaaaagaagttaatctaaagacaaacaacagaaccccgccattgatctgcatgtcctctgtaagcttcatccatgctggtcactgcactgaacaatgcgttctcatggcatgttaacagtatacccgtaacagcactttatctcattgtatgaacacctctgaggtgctaaaggtatttttatatggaaaatggtattattggaagatgttcaaatgctggtttgagagaagtgggggaagtattttatatgttgagatgtgagatgtattttctagaactggggagaaggaagttctatatttgcagaatgttttaaaaatgaatagccgtgatgtccctgcaaacatcacgaaggtttttgtacgaataggaaccttgcagtatgactcagcgtttgttcctgtgtgtgtagcgtgctttgtacaaaaagctaggccatttgtatgagctttctctgagttctgctctaattactatggctatttattgttttctttaatatttgtgaaagtctttctcctttgttatgttagtttgtttctgcacaactactgtacttttccatatggaataaaaaccatta

SEQ ID NO: 6337 - DNA, 1027 bp, Cricetulus griseus
gagctgggtggccttgggcatgaagcggcggcagtcgccgggctaggcccggggcggctccaggcctgggcggcccgcggagggctgagccggtccccggctccggttcccggggcggcgggtgaccactcaccatgcccggcaagcaccagcatttccaggaccctgaagtcggctgctgcgggaaatacttcctgtttggcttcaacattgtcttctgggtgctgggagccctgttcctggccattggcctctgggcctggggcgagaagggtgttctctccaacatctcagcactgacagatctaggtggccttgatcctgtgtggctgtttgtggtggttgggggtgtcatgtcggtgctgggcttcgctggctgtattggagccctccgggaaaacacctttctgctcaagtttttctccgtgttccttggcctcatcttcttcctggagctggcggcagggatcctggcctttgtcttcaaagactggattcgagaccagctcaatctcttcatcaacagcaatgtcaaagcctaccgggatgatattgaccttcagaaccttatcgactttgctcaggaatattggtcttgctgtggtgcccgagggcccaatgactggaacctcaatatctacttcaactgcactgacttgaacccaagccgtgagcgctgtggggtgcccttttcctgctgtgttagggaccctgcggaagatgtcctcaatacccagtgtggctatgacatccgactcaaactggagcttgagcagcagggctccatctacaccaaaggctgtgtgggccagtttgagaagtggctacaagacaacctgattgtggtggctggggtcttggtgggcattgccctcctccagatatttggcatctgcttggcccagaacctcatgagtgacatcaaggcagtgaaggccaactggtgaggctgccaggggtgacggccacacgcctggcctgatgggcctctgctgaggacctcttaggatgtctgtttcgctcacaa

SEQ ID NO: 6338 - DNA, 1027 bp, Cricetulus griseus
gatccacgatgaggcggtcttgcggctgttctatgaggaagccaagggcaatgtgctgactgctcgatacccttgtgacctggaggactgtgaggtgctgggtgccctcgtgtgccgtgtgcagcttgggccttatcagcctggccagcctgctgcctgcactctgagggagaaattggactccttcctcccctgcccacctctgcaaacgaggccatggcctctttgctgccttccggggccgagggtccaagactgggccaggagagcaaggtctgctgaatgcctaccgccaggtaaaggaagccacaggcagtgacagtgagcatgaggacaagccagcccagggcttcttgcatcgaggcggacgcaaaccagtgaccgtggccatcagtctggaaggtgtgcatgtcatcgacagcagggagaagcatgtgttgttgggcctgcgctttcaggagctgtcttgggaccacacttcccctgaggaggaggagcctgtcctgtggctagagtttgatggtgacagtgagggcatgcctgtcaacaagttactgaggatctactccaagcaggctgagctgatgagtggcctaattgaatattgcattgagctgagccaggcctctgagcccactctgccccaggagagtgcatctggacctcaggaagctcccagctcctctccaccacccactcagcgccccaagctgcggaggcagggtagtgtggtgtgtagccggattcagcatctctccaccattgactatgtggaagatggtaaggggatcaagagggtgaaaccaaagcgcaccacgtccttcttcagccggcagctctcctccagccagggcagctacaccgtggtacagcccactgacgacagcctggagcagagctgagggaagccatgcctgacatctgggtgccctagatctgactgaataggcactgccctaggcaggactaagccacaatagtcccagaggctgtgggtctagggccgtgctgttcagggtctgctgga

SEQ ID NO: 6339 - DNA, 1027 bp, Cricetulus griseus
gggcgctgcgttccgaccggctgatccccgggcttctttggagaacctagcgtggccaatggctgtcgatattcaaccagcatgccttggactgtattgtgggaagaccctattatttaaaaacggctcaaatgaaatctatggagaatgtggggtgtgcccaagaggacagagaacaaatgcacagaaatactgccagccttgcacagagtcccccgaactttatgactggctctatcttggatttatggcgatgcttcctcttgttctacattggttcttcattgaatggtactcggggaaaaagagctccagtgctctgttccagcacatcactgcactgtttgagtgcagtatggcagctatcatcaccttgctggtgagtgatccagtgggtgtcctttacatccgttcctgccgagtactgatgctttcggattggtacacgatgctttacaacccgagtccagattacgttaccacagtgcattgcactcatgaagcagtctacccgctatacaccatcgtgtttgtttattacgccttctgcctggtgttgatgatgcttctcaggcctctgctggtgaagaagattgcctgcgggctggggaagtctgagcggttcaaaagcatctatgctgccctttacttctttcccatcctgaccgtgctgcaggcagttggtggaggcctcttgtattatgcctttccctacattatattagtgttatccttggtgactctggctgtgtacatgtctgcttcagaaatagagaactgctatgatctcctggtcaggaagaaaagactcattgtcctcttcagccactggctgctccatgcctatgggatagtctccatctccagagcagacaggcttgaacatgacctgccgcttttggctttggtacctacaccagctctgttctacttgttcactgcaaaatttactgaaccatcacggatactctcagaaggggccaatggacactgaatataaaataccaaaaaaaaaaaaaaaaaaaaa

SEQ ID NO: 6340 - DNA, 1027 bp, Cricetulus griseus
tatgggccgcaagaaggctgtgcgcggccccaggaccgagagcggtcgtgctcggcgccccccggccgctctctggatgccttcgccgaggaggtgggcgccgcgctgcgggaatccgttcagcctgaggcggccgagggccacgacggcccgggccctgcggcgctgccttgtgccctggctatgtgggagcttggccactgcgacccccggcgctgcacgggccgtaaactggcccgcctgggtctggtacgctgcctgcgcctgggccaaagatttggcggtctggtgctcagccccgtaggcactcagtacgtgtctcccgcagacagacagctggtggcacagtcaggggtcgctgtcatagactgctcctgggccagactggatgagacaccctttgggaagatgcgagggagccatttgcggctcctgccttacctcctggctgccaaccctgtaaactatggccgaccctgcagactttcctgcgtggaagcttttgctgcggctttctgcattgtaggcttttcagaccttgctgtcattttgcttcagaagtttaagtggggcaagggcttcctggacctgaaccgacagctcctagagaagtatgcagcctgccgcagtccagaggaggtgctgcaggccgaacaggggtacttggctagcaccaaggacacccctgaggaggaggaggagattgatccctttgatgtggactcagggcgagagtttgcaaacctcaacaggcctgttgccagcacctggccacctgtggacatggatgacactgagtccgaagaccacagtgaggattctggggaggacagtgatgagggtgaggaacaagaagcttgtgttaatggaggagacaacagctgctctcaagaggtagagacagaagaagaggttcaggccaaagactccactgaactctggaatgaaatcaagagacaccagagagactgaagtttgacaaacacatatgttattgaagctggtgtacattagtccagaggtggca

SEQ ID NO: 6341 - DNA, 1027 bp, Cricetulus griseus
atcggccacagggagagcagtcagagttgtcagagatcatgggggagagcgcgctggagtcggggcctgtgcccggggcgccgggtgggggcccagtgcacgccgtcaccgtggtgaccttgctggagaagctggccaccatgctggaggcgctgcgagagcggcagggtggcctggctgagaggcagggcggcctggcgggctcggtgcgccgcatccagagtggcctgggtgcactgagtcgcagccacgacaccaccagcaatacactggcacagctgctggccaaggcggagcgcgtgggctctcacgccgacgcagcccaggagcgggcgctgcgccgcgctgctcaggtacagcggctggaggccaaccacgggctgctggtggcgcgcgggaagctgcacgtcctgctcttcaaggaggagactgaaatcccagcccgcgccttccagaaagcatcagaactcttgggccccgatgaccaatcggtgctgggcccagagcagccagaggatcaaataggagagagttccgacgaggagccagtggagtcccgggcccagcggctgcgacgcactggcttgcagaaggtacaaagcctaagaagggctttttccagtcgtaaagcagcacagtccataccagtcaagccgccacgcctagggcctgtccggagctctgaaggcccatcagatgtccagtctgcagctcagccagatgccctggagtcctccctagagtctgctctggagctagaacctcctcaggctaccaatgaagatcctgggaggcctgctcttcaaatagagagtgcagcctgatcaccggagctgcctgacctacttggtgcttatgccttgtcctaaaataaatccttaaagcgtgcagcacttacacccaaataaggagaaaatcctgcatccactgctcagttcccatcctcccttcctggccttcccgtctggtaccctatgtcctccgaaagagaagccttcagcctaatttaggctcaccagcaataaaa

SEQ ID NO: 6342 - DNA, 1026 bp, Cricetulus griseus
gggtgtcatggcgacctccatgcttggttcagtccgcggccaaaggcctttgggtttggttggccttttccgtcgccggccgcctcgagatgtgtgggagcgtgtgcggcggcttccgggaccctcggcagtccggcgcagcgtggcggcgaccagcgggcccggcatcccgggttccgaccattattgcctggagctgctgaggaagcgggattatgaaagttacttgtgttccctgctgttccctgcaggatgccgaaaactctgtttctgcactgaagggccttcaacgtggaactggctcaggttaaggactcagtctctgagaaaacaattggactgatgcgaatgcagttctggaaaaaagctgtggaagatatgtactgtgacaacccaccacatcagcctgtggccatcgaactctggaaggctgtcaagagacacaatctaactaaaagatggcttttgagaatcattgatgaaagagaaaagaatctggatgacaaagcatatcacagtatccaggagcttgagaattacgctgagaacactcagagctctcttctttacttgacactagaagttctgggtgtgaaggatcttcatgcagaccatgctgctagccatattggaaaggcacaaggaattgtcacatgcttgagagcgacaccctatcatggtagcaggagaaaagtgtttctgcccatggatgtttgtgtgcagcatggtgtttcacaagaggactttctacggaggaaccaagataaaaatgtgagagatgtaatatatgaccttgccagccaggcacacttgcacctaaagcatgcaaggtccttccacagaagtgttcctgcgaaagcacttcctgcatttcttcagacggttgctctagaggactatttgaagaaaatccagcgagtggattttgacatattccacccgttctttacagtcagaagaatacactacttccattatctttgtatattcaatcaatggagaaaaagatactaaatgattttatgt

SEQ ID NO: 6343 - DNA, 1026 bp, Cricetulus griseus
gaagagacagcatggagttggagaggatcgtcagttcagccctccttgcctttgtccagacacacctcccagaggcggacctcagtggcttggatgaggtcatcttctcctatgtgcttggggtcctagaggacctgggcccctcaggcccctcagacgagaactttgatatggatgccttcacggagatgatggaggcttatgtgcctggctttggccacatccccagaggcatgataggggacatgatgcagaagctctccacacagctgagtgatgccaggaacaaagagaacctgcacccacagagctcctgtgtccaaggtcaggtgcccatttttccagagaccccgaggcaacctgaaaagctcaaagaagacaccaggtctccggctgccactgggggcacccaaaatgaggcagctggtgctgaggaagaacttctgccaggagtagatgtgctcttggaggtattccctacctgttctgtggaacaggcccagtgggcgttggccaaagcccggggggacttggaagaagcagtacagatgctggtggagagcaaggaagaggggcctccaggctgggacggcccaaaccaggacttgcccaggcgccttagaggcccccaaaaggatgaactgaagtccttcatccttcagaagtacatgatggtggatagtgcggaagaccagaaggttcaccgacccatggctcccaaggaggcccccaagaagctgatccgatacatcgacaaccaagtagtgagcaccaaaggggagcggttcaaagacgtacggaaccccgaggctgaggagatgaaggccacatacatcaatctcaagccagccagaaagtaccgcttccactgaggccctggctggactctgctgagccttccagaccccagagggatgcagaaaccacccccgtccaccctactgtcccttctctatgtccttgctctagttaatctattcttggagctgccttcatgaacacagtaaaggctgtccaaggaaggta

SEQ ID NO: 6344 - DNA, 1025 bp, Cricetulus griseus
gcaagtcagctccctcgatttcagatctgcagactatcaccagagactcacaagcagctttggcttctcaccaagccaggagtagaagcagaacagtcaccaccctcccagatgcccaggacactgaggcccttcaaggacgaagcaccactccagaggagccactggcaagagctggagaggcgagcacaaattccctgcctgcccctgttcttgaagagatttcagagggaggaggactgctccatgagttggtggagcatgcagtacccatcacgagggtgcagaggagtgatgacactgaggtggacccagaactcagtgatgaagactatgaagaagatattattgagcccaggaccctaaatgaaattaccacagtgacagacaaaactagcccctggtccagttttacatcagacatgagtggtgaggtcatcagccctcagcccaatgaggtacaaagggaaggctcctcctgtcctcccggacctttccccagagaggagcttaaggtcagaagtagcccacaaaaggcagtcaacccccaggctggacggggctcccctagccacagtattgcctgtgagggtggagcctataagaccaaggttgaagaatctgcctcagcccagcctctgctagtcccaggcctaacagtctcaggagccaaagagagcaatgattctgttggatgggggctcaccacagaaaaagcaggacaagagacccatgccagagatcctggctgagagggaaactttctccagtgagttcagtgactcttctgaggactccccttctgtgaggcaggaacaggtaacaactggaccagggatgtccacgaggcagagcctccttctcccagaacctattgtggtgcccaacttctttttgcctccccaacaactggaggcctctctgcgcatgatctcccactctccggctttgccaccaccggccacaactgaccaggacaagagtgaaactaccaggggagcccttgcccaaaggccttgtcgccc

SEQ ID NO: 6345 - DNA, 1025 bp, Cricetulus griseus
aacgccagatcccgggtaatgcaggagccgagagtgctatggagaatttcaccgcgctgtttggagctcaggctgacccaccaccacccccaagcgccctaggtttcgggcctggaaagccgcccccgccacctccgcctcctccgggaggtggcccaggcacggccccgcccccgacggcgacctcggcccctgcgggcgcagacaagtcggctgctggaagcggccccttctaccttatgcgggaattgcccggcagcacagagctgacgggcagcaccaatttaatcacacactacaacctggaacaagcctataataagttctgtgggaagaaagtgaaggagaagctaagtaacttcctgcctgacctgccagggatgattgatctccctggctcccatgacaacagcagcctccgctccctcattgagaagcctcctattctcagtagctcttttaatccaatcacagggaccatgctgtctggtttccgcctccatactggcccgttgccagagcagtgtcgactgatgcatattcagcctcccaagaagaagaataagcacaagcataaacagagcaggacccaggatccagttcccccagaaacgccatctgattcagatcacaaaaagaagaaaaagaaaaaagaagaggatcctgaacggaaaaggaagaagaaagagaagaaaaagaagaagaaccgacatagtccagaccacccaggtatgggaagttcccaggccagcagcagcagcagcctccgctaacaggactactgaactctgccaaggatggctttcctgctgatttaacagactggctagtatggctacctttttaagaggcaagtgtcattctgtatgaggcagtttaagataaggcactgctaagacataaaagattttagattttgtcatcacattagtatcaggattttatttttatttcttttgtttggttttaaaaatggctaatcagaataaaaaattaaagggtctctgtaaaaaaaaaaaaaaaaa

SEQ ID NO: 6346 - DNA, 1025 bp, Cricetulus griseus
ctggagacacagtctccctcacatcctcaccttccgtcacaaatgacctttcaaaatcagcatcttcaaagatggggtgcatcaagctggcatcctcccccagcaggagcgagggaaggtcttcagaggagccagtctcagaagctgctgatgacagcctccatgattttagaattaatattttgtccattgatgacctggtactggctgatggagagaaatcagatgtggaacagaaagaggaaggttctggatgggaagggatgtcaggcagaggctctccacccatgtcatcctctcgactggaagaacaggggcctcccagcacaagagctctgcacttgagggcacggccaccgcggttgctgatgaggagggtctcgccactgaggtctcagagcatctggctgacagctccgctgaaactgtgcagtctcacagcatgtccctcacggccagcccagcttactctgaggattttgagccatcctctagatccttggcctcagaggcatcactcggcaggacacaggacactttgtcacagtattcttccagggggcagacaggtcttctttccagacgatccctatcgaggacacagtggggccaaggggtgacgagagtcgtgaaggagacagctgtgcagacgcttgatacctgcctttgtctaccagtggagcaaggctggagggcggccattggcccacccttggaggcgcctatgtggacccagcacccatcgccagtcacgttgtcagtgcagatgctatagaagccctgacagcctacagccctgcggtgttggcgctgaatgacatgctgaagcaacagctgagcctgacacagcagttcaccgaggccagccgccatctgcacatgtccctcctacagtccctggatggggactcatttcactaccacaccctggaggaaaccaaagagtacatcaggtgtcacagacccgcacccctgaccatggaggctgcccttcaggaggtgaaggaggagcttaagtcctagca

SEQ ID NO: 6347 - DNA, 1025 bp, Cricetulus griseus
  modified_base (394)..(394): a, c, t, g, unknown or other
atgaacagctgcagagtctgaagcggcgctatacggcctacaggcagaagctggaggaagccctgggcgaggtcgtggaagcccggctaaggccaagggcgtcctgccaggatggcacagctcggacctatgaaagagcgccgccgccgcttcctctgctcagagagctgttgtcgtgccccgccatgctagggtcttcctcttttctctctagacacagttctcaaagcctggtcacacagcatcctgcgcctcacggattggcacaagggactttgcaagcttgtcctgtcgcggcatggcgatgttacctcttgcaagctgtgagcctgtggtcatcaggcacatcctggattgcttggaagcatggactctggcttgatttccccgtttntctcgtgactttggttatgtgatttttgttaagcttcaggaattatggaactattttaacagaagggcacaattgcctcatttcccgcagcagcttgcaaatccaagagcagagggaacagcgagctgggcttccggaggggccttatagtcggtctggttttagtctagatagatattgctgttgtttataaattcccaaggaattgttaacgcggtgacacttaatggattcttttggaaattccaaggtgctccagctatttgcctttctatgaaccgtgccttcgactgagtatctgtcccttcatggtggctctcctgacttgtcagagaacgtcacctgggagggggggaggcatatccgagtgtgggttgtgctccaccagctccagagacaatcagatcttctaagctattaggaagagttggaaaaaaaaaaaacagaactagctataaaatatgaatggcacatcttgtttaattttgcatgcaatttctttttagtgcatcagtgaggttttagtgacattgtcacccaacactttgcctttgttgttcagggaatgccttcatggtttctgtactggttttactattgttttttttttttactagaagtaagactttat

SEQ ID NO: 6348 - DNA, 1025 bp, Cricetulus griseus
ctgagccgccgccgaggactcagctgcctccccctcgagccccctcgcttcccgacgctccgtcccccctgcccgccttctcccgcagccgccttccgcaggccgtttccaccgaggaaaaggaatcgtatcgtatgtccgctatccagaacctccactctttcgacccctttgctgatgcaagtaagggtgatgacctgcttcctgctggcactgaggattatatccatataagaattcaacagagaaacggcaggaagaccctcaccactgtccaagggatcgctgatgattacgataaaaagaaactagtgaaggcgtttaagaagaaatttgcctgcaatggtactgtaattgagcatccagaatatggagaagtaattcagctacagggtgaccagcgcaagaacatatgccagttcctgatagagattggactggctaaggacgaccagctgaaggttcatgggttttaagtgcttgtgactctctgaagcttaagtgaggatttccttgcaatgagtagaatttccctcctgtcccttgtcacaagtttaaaaacctcacagcttgtataatgtaaccatttggggtccgcttttaacttggactagtgtaactccttcatgcaataaactgaaaagagccatgctgtctagtcttgaagtccctcatttaaacaggtcaagcagtaagccctggcagtgtccagcctgaaacaaagcaataacaatgtttcagccaagcccagagccccaagtatataagctatgtctatccagaagcccctcagctctccctctacagagtcccctgccctaggagaaagtcaccgggtaaacaagagaatgggtaacactgtggctagctgtaaaggtttcaactcattagtagcagctgcccagtgccatgtgaaggaacaaactggtttttggttttcttttccctttcagttttaatgttatgtaatgtatttaaacccttatttaaataaaacttgttttaagaaacaaaaaaaaaaaaaa

SEQ ID NO: 6349 - DNA, 1025 bp, Cricetulus griseus
atcttgtctggaggctttgagaagaacccaaaacctattttcactgagggcaagaaccagttggaaattcagaacctaagggaagattgggatcactttgagcccctgttgagttccctcctgcgtaggatgcctgtattggagactctggagattttgaagttggtgaattgccctgagaccttcacaccagacatgaagtgcatcatgggcgagtctcctgtagtacagggctactttgtcctggcagggatgaactctgctggcctgtcgttgggtggaggagctggaaagttccttgctgaatggatggtatatggctatccactgaaaatgtctgggaattggatttgcagcgctttggacgccctccagagcagccgcacctttcttccaactgaccagcagtccactgttgggcctggcttaacaagtacatgccaaaagacagcagcctgctgctagaggatgtcacctggaaatacacagccctcaatctgattggtcctcgggctgtggatgtgctgtctgagttgtcctatgcccctatgactccagaccactttccaactctgttttgcaaggagatgagcgtgggctatgcaaatgggatccgagtgatgagtatgacccacacaggagagccaggattcatgctgtacatccccatcgagtatgctctgcatgtctacaatgaagtgatgagtgttggacagaagtatggaatccgcaatgctgggtattatgctcttcgaagtctccggattgagaagttttttgccttctgggggcaagacttaaacaccctcaccacccccctggaatgtggaggagagtctcgagtgaagttagagaagggcatagatttcatcggtcggaatgccctgctgcaacagaagcagaatggggtgtataaacgccttgctatgttcatcctggatgaccatgacacggacctagacttgtggccttggtggggagaacccatttaccggaatgggaagtatgctggcaagaccaccagt

SEQ ID NO: 6350 - DNA, 1024 bp, Cricetulus griseus
aacctgtacgtggcgcgctacgggctgcacctgcgtttccgggacgagcagcagctacgtcgtgactacggtccgctcctgcgcagccgcggctgcgtcactcccaaggacttccagcaactcttggaggagcttgagcaggaggtgagacgtcgccgcaggctggggcaggaatcagctgccagaaaagccctcattgccagctcctaccgcccagcgaggcctgacatctacagcttactgcaggatgaggctctggcccctgagtttgtggctgcagctgaatatagtgcatctccgggtgcaagctttgagggccttctccagtggctggagatagtgtcagagcagaagcgcatctaccgggtgccggtgttctcggtggggttctgccaggccctgctggaaggaactggagcattttgagcagtcggacatgcccaagggaaggcccaacaccatgaacaactatggggtactgatacacgagctaggtctagacgagccactggtgacaccgcttcgggagcgcttcctgcagccactgctggccctgctgtacccagagtgtggcgggggccagcttgatagccaccgtgcctttgtggtcaagtacgcactgggccaggacctagagctgggctgccactacgataatgctgagctcaccctcaatgtggctctgggcaaggtcttcacaggaggtgccctatactttgggggcctcttccaggcacctgcagccctgatggagcccctggaagtggatcatgtggtgggccagggtatcctgcaccgtggtggccaattgcacggggctcggcccctgggtactggagaacgctggaaccttgtcatctggctccgggcgtctgctgtccgaaaccacctctgtcccatgtgctgccagaagccagacctggtggatgatgagggctttggtgacggcttcgacccgggaggagcctgccacagtagatgtatgtgtactgacttgagtctggttccccagaggtgttggtgc

SEQ ID NO: 6351 - DNA, 1024 bp, Cricetulus griseus
gagggagcgatggaggaccacgagttaattgaatacttcaagtctcagatgaaaggcgatcctaacatggcctcagctgtagctgccatccgcactttgctggagttcttgaagagagacaaaggggagacactccagggcctgagagcgaatctcaccagtgccatagaaaccctatgtagtgtggactcctccgtggccgtgtcgtctggtggagagctcttccttcgattcatcagtcttacctccctggagtactctgattactccaaatgtaagaagatcatgattgagagaggggagcttttcctcaggagaatatccttgtcaaggaacaaaattgcggacctatgccataccttcatcaaagatggggcgagaattttgactcatgcctactccagagttgtcctgagggtcctggaagaagctgtggcagccaagaagcggttcagtgtgtatatcacagagtctcagcctgatttatccgggaagaaaatggccaaagccctatgccacctcaatgttcctgtcactgtggtgctggatgctgctgttggctacatcatggagaaggcagatcttgtcatagttggtgctgaaggagtggttgagaacggaggaattattaacaagatcggaaccaaccagatggctgtgtgtgccaaagcccaaaacaagcccttctatgtggtcgcagaaagtttcaagtttgtacggctcttcccactcaatcaacaagatgtcccagataagtttaagtacaaggcagacactctgaagtccaagcagactgggcaggacctcaaagaggaacacccgtgggtggactatacttccccgtccttgattaccctgctgtttacggacttgggtgtgctgacgccatctgctgtaagcgatgaactcatcaagctgtacctatgagcagagtccactccagccatcctggcactcgctctggagaccaggctagcctcaaactcagagagatccatctgcctctgcctcccgagtgatggga

SEQ ID NO: 6352 - DNA, 1023 bp, Cricetulus griseus
ctggtgacggctgacggtgtgcccatcctgtgctgagctgcctccatctctgcccaccagccaagctaggaactggtctgagcaaatatgcaatccccaaggcgggatcaggcttctcctcgaagttctctggagagagctcctaggctgggccccaggcccatcctagctgctccagagggagggctggctggtcccacagggactggctgctctgccgctgcaccacagttctcgagagattagaatccaagccatatttccctagtacctccgactgtctcccaccagggaaagcagaaatcaggtgtgttgtctatttatttctctatgtaaatattgtatttctgtggggaagttttatggggaaaaatggaaaaggatttttccccaccttcgtgacaagggtgggtgtgcgacaagagtgtgtgtgtgtgtgtgtgtgtgtgtgtgtgtgggtcccctctggcctcttgtacccacatcctagcctcatgtaccaggaaagtccagcgaccctttcttctcccaagatggaaagaataggctatacccatggaccgaaggcctttgtcctcaaaaatgccttgtagcgcacatgctcccaaacgtcccaccaagccaaggcttcctaggacctccctccctttgctcaggcctgccaagtatctgtcccagttccagggacttcatttctctcactaattgctcaaagggcctctcttggtggccccaggataaccaagggtaccccattcctggctgtcccatcaccctgaggctttctgttctccacacgagtgcaatatttcattcctggaggtcatcggaagcgatgaccaccaaggtcccgctcacagctagggaatcaggaagatggtgagtgaagaaacaagcaccagggctggtgttggaagtcactgctcagaacccccagtacccaggggcacaggagtgagcagaaaggctgttccgcgggccgccttctggatgtttctttctccctctgctgagctgtcctct

SEQ ID NO: 6353 - DNA, 1023 bp, Cricetulus griseus
ccaccgcccccgcggcgggtcgcttagtctattccgtgcggtggcggctggcagcgcagctccgtgacggggttcgacatcgcacgcgcctccctcccagcgccgccacgatgcccaagaggaaggtcagcgcggatggagcggccaaggcggagcccaagcgccgctccgcgaggctgtcggccaagcccgcccctgccaaggtggacgcgaagccgaaaaaggccgcgggaaaggataaatcatcagacaaaaaagtgcaaacaaaagggaagaggggagcaaagggcaaacaggctgaagcggctgaccagcagactacagatctgcctgcagagaacggagagacggagaaccagagtccagcctctgaggtagaagagaaagaagccaagtccgactaaccattcgtcatgtctgtcagtggttcctgcctcccttcgtgtacaatccagaggaatatttttatcaactattttgtaaatgcgagttttttagtagctctagaaacatttttaaaaagtgggaggaaatctcacctcatcccattttttaagtgtaaatgatttttttaagaggttaaatcatttgctggttgtttattttttggtacaaccagaaaatagaatgctcaatcaggagaggctgtgactgtctcgggggtcaccataacattccgtagagggggctagttttatatcctacagcataaagcgtactaagtgtttggggtcttggtcgtgcatttgtgtctgcagtattttcagttacatctggtctcgtgtttctagtagaactgtttcccaaaaaaaaaaacaaaaaaaaaaaaaacactcctcggtccttgccctgtcagaactgtctctgatggtcatggccatccattttcctaacaattgtgataataatgctgtgaaaggtggacattttgagtatgtgctgtatgtggcataaaattgtgagtcagtggaattgaggattgggaaccatttgggttttatgtgaggtcttagggaaaacttg

SEQ ID NO: 6354 - DNA, 1023 bp, Cricetulus griseus
  modified_base (433)..(433): a, c, t, g, unknown or other
attgattactatgaatctaaacttcgaaaactccatacacaaagacagagtaaggaagatgacagtcaatcagaagaagaaacaaaccacagaaacctggatgcctcaccaagttataaaggccttttgatgtcgttacagaatcaactcaaggaagcaaaattcaagattgatgtactgttaggtgaaaagctgaacctccaaaaagatctggagagcaggcccacagaacatgagttaagactttataaacaacaggtgaagaaaactggaaaaagcccttaagaaaaacatcaaattacaagcgcttactggtcaaaaaaagactgattacacggagaaaaaagatgagcccagcaaagacagccatcaacaggttctagttgaccagagatactttcaggtgctagtagcaagcatcaattcaatttanccacaatcctcgaactccagtaattagttgaaacaagaaagaagagcagcaacatgctaaactttcaaactttgtcaagctattgtttctcacttccaaaagactattttgatgttcattctctaaatggagtctatccccgaactgaatgaagtgtataccaggcttggagaaatgaacaacgctgtgagaaacctccaggagctcttagaactagacagttcatcctcgctgtgtgtggtggtcagcacagttggaaaattgtgtaagattatcaatgaggatgtgaatgatcaggttaaacaagtattagggcctgaagacctacaaagcattatcaacaaattggaagaacatgaggaatttttccagcatttcaagcttttacaagtgatctccttgaaatcttagaaattgatgattttggatgccattgtacctgcagtaaagaaattaaaagtactttcatactgaaaacaaatcaaatcatttttacttgtgtaaattgtattcttaacattttaagtattttggaggactgatcctgagtcaagattctaaaatgtatcagctctcagaattcagcctct

SEQ ID NO: 6355 - DNA, 1023 bp, Cricetulus griseus
gtgtcgtccctgaccatcgcggacgcgttcgttgcggccagtgagggtcctgccccgacgcgccccgcgctccccagcagattcatctgctccttccccgactgtggcgccagttacaacaaagcctggaagctagatgcgcatctgtgcaagcacacgggggagaggccatttgtgtgtgactatgagggctgtggcaaggctttcatcagagactaccatctgagtcggcatgtcctgattcacactggcgaaaaggcgttcgtttgtgaaaataatggctgtaatcagaaattcaacacaaaatcgaacttgaagaaacacattgaacgcaaacatgaaaacccacaaaaacagtatacatgcgggtttgaaggttgcacgcaggcctttaagaaacaccagcagctgaaaacacatcagtgccagcacactggcgagccactcttcaggtgtccccaggagggatgtgggaagcactttgcctcacccagcaggctgaagcggcacatgaaggttcacgagggctatctatgtcagaagggatgttcttttgtggcaaagacatggacagagcttctgaagcacatgagagaagctcacaaagaggaagtcagctgtgcagtatgccagaagacattcaagcgcaaagactaccttaagcagcacatgaagactcacgattcagaaaggatggtgtacttctgtccgagacaaggctgttggaggacctacacaactgccttcaacctgcagagccacattctttccttccacgaggaacagcgtccatttgtgtgtgagcatgatggctgtggcaagacgtttgcaatgaaacaaagcctcatgaggcatagcgttgtgcacgatcctgacaggaagagggtgaagctcaaagtaaagcggcctcaggaaagacggagcttggcctctcgcctcagtgggtacttccctcctaaaaggaaacaagaggcagactcccccatgtctaaaaatgcagacttcagcagcagcccagaaggc

SEQ ID NO: 6356 - DNA, 1023 bp, Cricetulus griseus
gacatggcgcctccggctcccggcgcggcctctggcggctccggagaggtagacgagctgttcgatgtgaagaacgctttctacatcggcagctaccagcagtgcatcaacgaggcgcagcgagtgaagctgtccagtcccgacagggaagtggagagggatgtctttctgtatagagcatacatcgcacagaggaagtatggtgtggtcctggacgagatcaagccctcctcggccccagagctccaggctgtgcgcatgtttgctgactaccttgccactgagaaccggagggatgccatcgtggtggagctggaccgtgagatgagcaggagtgtggatgtgaccaataccactttcctgctcatggctgcctctgtctacttccatgaccaaaacccagatgcagccctgcgcaccctgcaccagggcgacagcctcgagtgcatggccatgacgattcagatcctcctcaagctggacaggctggacctagcccggaaggagctgaagaagatgcaggaccaagatgaggatgccactctcacccagctagccactgcctgggtcaacctggctgtgggtggtgagaagctgcaagaagcctactacatcttccaggagctggctgacaagtgctctcccacgctgctgctgctcaatggccaggcagcctgccactcagcgcaaggccgctgggagactgccgagggtgtgctgcaggaggcactggacaaggacagtggccaccccgagaccctcatcaacctcattgtactgtcacagcacctaggcaagccccctgaggtgacaaaccgatacctgtcacagctgaaggatgcacacaggacccatcccttcatcaaggagtatcaggccaaggagaacgactttgaccgccttgcactgcaatatgcgcccagcgcctgaggtggagatacccctggtgaccccagcttcgtgccagacgtcgtcctcacttccttgtctgtcaataaagtctgtccatttacaaaaaaaaaa

SEQ ID NO: 6357 - DNA, 1022 bp, Cricetulus griseus
aagccactgttgtcgccgagagaatcctcacccccgccgctcgcgcgtggccatgtggaggctgctgacgcgcactcccgcgccgctcctgcgggtgcacgtttcagattcttgggcagcccttcccaccagtgctggtctgaagaccctcctcccagtgccaagttttgaagatatctccatccctgaaaggtccaagcttaagtttgttgaaagggtcccacttgtaccaaaagtaagaagagaacctaaaaatttgaaggacatacgaggaccttcaactgaagccactgaattcacagaaggcaattttgcagttttggcactgggaggtggttacctccactggggtcattttgaaatgatgcgcctgacaatcaaccgctctatggatcccaagaacatgtttgccaagtggcgagtaccggcccctttcaagcccgtcactcgaaaaggtgtcgggcagcgcatggggggcggtaaaggtgccattgatcactacgtgacacctgtgaagactggcaccctcatagtagagttaggtggacgctgtgaatttaaagaggtacagggtttcctggacctagttgcccacaaactgccctttccagcaaaggctgtaagccgtgagactctagaaaagatgcgccaaaatcaaaaagaaagagaaaataacaaccaaaatccctggacctttgagcgcatagccacggccaacatgcttggcatacggaaattcctgagcccatatgacttgacacagaaagggcagtattggggcaaattcttcctgcctaagcgtgtgtagtcaaagcccaggaacccacgtgcacacagacccttgagactgagtctgcatcttcactgtctttaggatctttggtggttcttggaccatagctaagcacatgagtaaatgacttctgaaaagttatgtcatctgattgttcctaattaaactctgagtgtaacctcaaggtacaacttctcattggtcagtttcagttgctcaaaagattaag

SEQ ID NO: 6358 - DNA, 1022 bp, Cricetulus griseus
caaggccctcaagaaccacgaggacaagatccgtgtggtgctaaacaaggccgaccagattgagacccagcagctgatgagagtgtacggagctctcatgtggtctactggggaaagattatcaacaccccgaggtcaggacaagccgcaagcctaggaacacacacacacacacacacacacacacacacgacttgacagtcacactagaaatgagaagggttcttccttgttttgaacacctctccaagttcccagggttggaagaagggccgctgtacctcccctatcccaggatataagcctgtgtttccaaacttgccctctagctccagtccccagatacatgaggcagttatggatataaggtcccaccattactacctggtgacagagcacagcaccatctgagcacacagctcctcacacagcctcccagagcatccaggcaagggaagagagctcaccagcatttggtgggccatcaatctggccatctgtcacctcctagaagcaaattgtgccttctggctctgtgcctcgtgttcccgacatcacagaagtccaaccaagccatcaggagagtgggctggcctgccagatgctgtgtgtgcctgttcccgctgagcctcccgtccattcaccttgagcatcccaactcaaattcagccactggatgtcaccaagcaggactatgtgctagttctcaaaaggccatcttgagaggactgggaccttgttctctgtagagtttcagggactctggtgtccttggcaaaaatccccactgtactcagtaccctccatcccccactgtaacctttcccttggcttgctacctggccactgatccagtgactgtctgctatactcctactgtgatggaaaacaaagcaactgtaacttattttgtatctatgttcagactatatagagactgttctgtgtgtctacaatgtgcttataactacagtctgtttgtcattaggattcatgctaatacaacacgtttatcctttggt

SEQ ID NO: 6359 - DNA, 1022 bp, Cricetulus griseus
ggattcgagagctgatcctggactcagagacactatccagtccacgagtcgggcagctcctcaaggtactccaggactcggagactccgggcccatcttccgcgcctgacacacctaacaccggggccgtgttgcttgtgtcagacggaacccacagtgtccgatgcctggtgacgcgcaatgccatcgacacctccgagtgggaagagaaggagttcggattccgtgggacagagggccgcctcctgctgctgcaggtctgcggggtccgcattcagattgctcaggaccgtgcgcctgcagagttctacctccaggtggaccgatttaacctgctgccatcggagctgccccggctacaggtgaccggttgcaatcaggattcggatgtgcagagaaagctctgtgaatgccttgaggactacctttcagagtctgcttctcccagtgcaggcctaacactgtctcagcttctggatgaggtgaaagaggaccaggatcatcggggggcactagtgcatctagctgagagctgcctgatgctatcagggccttacacagccacccccctcacccactggactgcctcttgcttccaggccacggaagaagccatgttcactgtctctagcttattgctgcacatctctgagaatgacgagcagattctgagttctgttgggtcaagtcagaagacacagggaaaccctgcttcactcaggcacacatcattggaggaaagtgatgccagggagttccagtggcctatcaagaaacagcagcttttcccaagaaccagagccaagggagcccaagaaccttgctgtctctgggaacccccgaagaggcatcatgatgcttcagctttccagtataaatatgagacaccctctgcctccctccatgcccaggttcaaactgccaggcttcctcctcagcttgtagcttgggccctgaacttggtgatggagtcagagtctgagttaacgcaggcatgaggagcccatggacatatcagagga

SEQ ID NO: 6360 - DNA, 1022 bp, Cricetulus griseus
gcagcggtcagcggtcggtcatggcggagtcggaggccggcggcgacgaagtccgctgcgtgcggctgaatgccgagcgggccaaggtgctgctggccgatgtggacacgctgctgttcgattgcgatggtgtgctgtggcgcggtgagacggctgtgccgggcgcgccggagactctacgggcgctgcgggcccgcggcaagcgactgggcttcatcaccaacaacagcagcaagactcgcacggcctacgcggagaagctaaggcgcttgggtttcggcggtccggtggggcccgacgcgggcctcgaggtcttcggcacggcctactgcagcgcgctctatctgcgccagcgcctggccggtgtgccggaccccaaggcctacgtgctgggcagcccggccttagcggccgagctggaggccgtgggtgtcgccagtgtgggtgtgggcccggaggcgttgcaaggcgaaggcccgagcgactggctggcggtgccgctcgaacccggcgtgcgcgcggtcgtggtgggcttcgacccacacttcagctacatgaaactcaccaaggccgtgcggtacctgcagcagcccgactgcctgctcgtgggcaccaacatggacaaccggctcccgctagagaacggccgtttcattgcgggtaccggctgtctggtgcgagccgtggagatggccacccagcgccaggcggatatcatcgggaagcctagccgcttcatcttcgactgcgtctcccaggagtatggtatcaacccggagcgcaccgttatggtgggagaccgcctggacacagacatcctcctgggcgccacctgtagcctgaagactatcctgaccctcaccggagtctccactcttgaggatgtgaagattaatcaggaaagtgactgcatgtacaagaagaaaatggtccctgacttttatgttgacagcatagccgaccttttgcccgcccttcaaggttaaagatctagtgtctttaatctctggaaataaaaaaaa

SEQ ID NO: 6361 - DNA, 1022 bp, Cricetulus griseus
gcccagccaggtaaccatcccatggcttgaattgggaatgaaatcttctaaaatatcagaacagaaagctttttgttcaacatggaggacaaaagacggcgagcccgcgtacagggagcctgggctgctcctgccaagagccagcctactgcccagccaggtactgctgctaggaaccatctttcccagacaccagggcaggcctggaggagcaaggagcagcaactgcctgacagagagtttgtgttcaaagagcctcagctggttgtgcggacagccccagaacccagagtgattgacagggagggtgtgtatgaaatcagcctgtcacccacaggtgtgtctagggtgtgtctatatcctggctttgtggacttgaaggaagctgactggatattggagcgcctttgtcaggatgtcccctggaaacagaggatgggcatcagagaggatataacttatccgcaaccaagacttacagcatggtatggagagcttccttacacttactcaagaatcactatggaacccaatcctcactggcatcccatactgtgcactctgaagagccgcattgagaagaacactggccacaccttcaactccttgctgtgcaatctttaccgggatgagaaggacagtgtggactggcacagtgatgatgaaccctcactggggagcttccccatcattgcgtcacttagttttggtgccactcgaacttttgagatgaggaagaagcccccacctgaagagaatggagactatacatacgtggaaagagtgaagataccactggatcatgggaccttgctaatcatggaaggagctacacaagcggactggcagcaccgagtgcccaaggaataccactccagagaaccaagagtaaacctaacctttcggaccatttatccagaccccagaggagcatcctggtgatgggacgtgtctgcaaagtttatcactgaggtgggggctgtgcacctagcagcccctctcccacactcctggaagcactt

SEQ ID NO: 6362 - DNA, 1022 bp, Cricetulus griseus
aaccgggtgtctgccatcctcttcagcccagctgccgagtgggtgatcagcacaggccatgacaagtgtgtgagctggatgtgcacacgcagtgggaacatgcttggccgtcacttcttcgcgtcctgggcttcctgcttgcaatatgatatggatactcaacatgctttcgttggtgattactcgggacagatcactctgttgaagttggaacagaatacctgttcagttatcacgaccctcaagggacatgaaggtggtatcgcttgcctttggtgggaccccattcaacggttactcttctcaggagcatctgacaacagcatcatcatgtgggacatcggaaaggccggacacttctcctttcagggacaccatgacagagtgcagtcactgtgctacctgcagctcacgaggcagcttgtctcctgctcctcggatggtgggattgcagtgtggaacatggatgttagcagagaagaggctccccagtggttggaaagtgattcctgtcagaagtgtgagcagcccttcttctggaataataaagcagatgtgggacacgaagacgctggggttgagacagcatcactgcagaaagtgtgggcaggccgtctgcgggaagtgcagcagcaagcggtccagttacccggtcatgggcttcgagttccaggtccgagtttgtgattcctgttatgactccatcaaagatgaagatcggacttctctagcaacatttcatgaaggaaaacacaacatttcccatatgtccatggacattgcaaggggactgatggtgacctgtgggacagatcgagttgtaaagatatgggatatgactcccgtggtgggctgcagcctggcaactggattttctccccactgatcctggagatgggtgatgtctgctacacaggccagcctggtctacagagtgagtgccaggacagccagggctgttacacatagagaaaccaacgtctcaaaaaaacaaaaaacaaaaaaaaaaaaaaaaaaaaaaa

SEQ ID NO: 6363 - DNA, 1021 bp, Cricetulus griseus
ggggctcctaacgagtgcagaacctgcaagtgcaatgggcatgccgacacctgtcacttcgacatcaacgtgtgggaggcgtcagggaatcgaagcggtggtgtctgcaacaactgtcagcacaacactgaaggacagcactgtcagcgctgtaagctgggtttctaccgtgacctcaggagacccttctctgccccagatgcttgcaaagcctgctcctgccatccagttggatcagctacccttcctttcaactcagtgaccgtctgtgaccctagcaatggtgactgcccttgcaagcctggggtggcagggccacactgtgacaggtgcatggtgggatactggggctttggagagtacggctgcagaccttgtgactgtgcagggagctgtgacccccacacaggagactgcatcagcagtagtgctgatgtagaatggtaccatgaactccccgactttccatctccacacaataagagtgagccgacctgggaatggggggacgaacagggattctctgcactccgacactcaggtaaatgtgaatgtaaggaacaagtgttaggaaaccccaaggcattctgtggaatgaagtattcatatgtgttaaaaatcaagattttatcagcacatgataaaggctcacatgccgaggtcaatgtgaaaataaaaaagtcttacagtcgacaaaactgaagatcttacgaggcaagagaacactgtatccagagtcctggacaaacagaggctgcacttgcccaatcctcaatccaggtctggagtaccttgtagctggacatgaggatgtaagaacaggcaaattggttgtgaatatgaaaagttttgtccagcgctggaaaccagctcttgggagaagagtcatgcatatcttaaaaagagagtgcaagtagcagtggaggtgtgaagcacacaaaggctcttctctgggtagatatacaagtgtaatgaaaaagagacctcaaaatgaaactggaatattttttaagtgccaaaa

SEQ ID NO: 6364 - DNA, 1021 bp, Cricetulus griseus
tagtaatggcggcgtccggggagcccgggaggccgtggcaggaggaggtggcggcggcggcggtggtggtggtgggttcctgcatgaccgacctggtgagtcttacttcgcgtttgccaaaaactggagaaactatccacggacataagtttttcattggttttggaggaaaaggtgccaaccagtgtgtccaagctgctcggcttggagcgaaggcatccatagtgtgcaaggttggcaaagattcttttggcaatgattacatagaaaacttaaaacaaaatcacatttctacagaatttacatatcagaccagagctgctgcaacaggagctgcttctataattgtcgatgatgaaggccagaatatcatcgtcatagtggctggagcaaatctgcttttgaatactgaagacttgaagaaggcagccagtgtcattagcagagccaaagtgatgatctgccaactcgaaatcagcccagcaacttctctggaagccctgacaatggcccgcagcagtggagtgaaaacattgttcaatccagctcctgccaccgctgacctagacccccagttctataccctctccaatgtgttgtgctgcaatgaaagtgaggctgagattttaacgggccttgcagtgaataatccgactgaggctgggaaggctgcattggttctcctagaacggggatgccaggtcgtggtcatcaccttaggggcttcaggatgtgtgacactgtcacagacggagcctgttccaaagcacattcccacagaagcagtcaaggctgtggataccacgggtgctggtgacagtttcgtgggggcactggccttctacctggcttactacccaaatttgtccttggaagaaatgctcaagagatcaaatttcattgctgcaatcagcgtccaggctgcaggaacacaggcctcttatccatacaaaaaagacctacctcttgctctattctgactgctgccaaccccaaataataaacctggaaataaaatgca

SEQ ID NO: 6365 - DNA, 1021 bp, Cricetulus griseus
tggacggactgatgcttgagggggagaacattgtgtctgctgccaggaaagccatcatccgccacgacttctccacagtgctcacggtcttccccatcctgcggcacctcaagcagaccaagcctgagtttgatcaggtgctccagggcacagcgagccgagcaccaagaacaagctgcccggcctcatcacctccatggagaccgttggagccaaagcactagaagactttgccgacaacattaagaatgacccagacaaagagtacaacatgcctaaggacggcacagttcacgagctcacaagcaacgccatccttttcctacagcagcttctggacttccaggagacagcgggtgccatgctggcctcccaagcccaagaaaccagctcttcggccaccagctacagctctgagttcagcaaacgcctgctgagcacctatatctgcaaagtcttgggcaacctgcagctgaacttgctgagcaagtctaaggtgtatgaggacccagccctgagtgccgtcttcctgcacaataactacaactacatcctcaagtccctggagaagtctgagctgatccagctggtggctgtcacccagaagactgctgagcgctcctaccgggagcacatcgagcagcagatccagatctaccagcgcagctggctaaaggtgaccgattacatctcagagaagagtctacctgtgttccagcctggcgtcaagctccgggacaaggagcggcaggtgattaaggagagattcaagggattcaatgatggccttgaagaactgtgcaagattcagaaggcctgggccattccggacacagagcagagggacaagattcgacaagctcagaaaaccatggtcaaggagtcctatggggcatttctgcacaggtatggcaatgtgcccttcaccaagaaccctgagaagtacatcaagtaccgtgtggagcaggtgggcgacatgattgaccggcttttcgacacctctgcctgaccctgccagtgt

SEQ ID NO: 6366 - DNA, 1020 bp, Cricetulus griseus
gaggagcaggatgtggaagaggatgaggatgaagagccactcagtgatgccagcccatggacctacagctcctccccagatgacagtgaaccagatgttcctaagccacctccatcccctgttacccacacacctaaggagggagagatcccgccagtacctacaattctccctagtccttgtgctgttcttgcctctctgggttctacagctgctctgacatcagaagctgaggtgcggctagaactcagtaggacccctcagacctctgtagagctgcaaatgaccgagtctctggacagccctgggagtcaggcccagtctactgcgaagccaacctgggatgaggatactgcccagattggactcaggagaatgaggaaagctgccaaaagagagctgatgccttgcgacttccctggctgtggaaggatcttctccaaccggcagtatttgaatcaccacaagaagtaccagcacatcaaccagaagtcattctgctgccccgagccagcttgtgggaagtccttcaactttaaaaagcacttgaaggagcatgtgaagctgcatagtgatacccgggactacatctgtgaattctgtgctcgctctttccgtactagcagcaaccttgtcatccacagacgaatccacacaggagagaagcccctgcagtgtgagatatgtgggttcacttgtcgtcagaaggcctctctaaattggcaccgacgcaagcatgcagagactgctgctgccctgcgcttcccctgtgaattctgtggcaaacgctttgagaagccagacagtgtggcagctcactgcagcaaaagccacccaaccctgctccccacacaggagtcacctggctctttggagtctagtcctagtgtctctgctgctgaacccctgcaatctcctgaggggccaagcctttcctcctcttctgactctaatcctgccccttcaacagccagctctttacaacctggggttctagaccccagggattcagagaaaagt

SEQ ID NO: 6367 - DNA, 1020 bp, Cricetulus griseus
ggagttacgagacatgctgatggccacctgtacactggagaacagtagcagcttcagcctggaccagggctggaccttgtgtattcaggtgcttactagttcctctgccttggatctggatggggctggctcgacttttacctataccattccagtggacagacttggcccaggcagtcggcgtgaagtgacattgcccctgggccctagtgagagtggcatgctcgacctgccagtgaccatgtcctgctggcttttctacagtctcagggaggtggtgggtggggccctggccccctcgactctctagaggtcccctatctggagacgctccctctcaacctccctaagcaagaggggtctgcctgcccctgtgcaagcgcacagtggacatgctgcagtgtctgcgcttcccgggtgtgtcctcacaacaacctgcacgggcgccctgcgtgcctggccctgcctgtgagcctcgtggaaaccttcctaaagacctgccaaaaccctggcagtgagccagctggcgctgcctcccttcgggccaagtacctgcctccgtctacagcatccatcagagtatcagccgtgctgctcagaactgcgctggagggtggtcactcaggttcccacctttgcagcgccaccctgcagtggctccttgccgagaatgctgctgtgactgtcgtaagggcccagaaactgtcctccatccagggaacagccccagatggtaccgatgtcaacctcaccgtccgtgaggtatctgtgactgacttgagccccgcacgggcccatccaggctgtggagatccaagtggagagctcctctctggccaacatgtgtagggcccaccatgccatcatcagacggatgcagactatggtcacagagcaagctgcccaaggctccagcccacctgacctccgaatgcagtatctacaccagattcatgccaatcatcaggaactgcttcgagaggtgcagacactgcgtgaccagctgtgcacagaggatga

SEQ ID NO: 6368 - DNA, 1020 bp, Cricetulus griseus
  modified_base (425)..(425): a, c, t, g, unknown or other
gctggacgagtggcatgagcacactgctttcacgaacaaggcgggaaaatcacgtctcacgtgaaaaaggctgtcaatgcagagctttgcactcaagcctggtgcaaattccaggagattctgtgcagttttccacttattcctcaggaagcttttcagaatggaaaactgaattctctgcacctctgtgaagccccaggagctttcatatgtagtctcaatcattacttaaaatcccaccggttcccctgtgagtggagttgggtagctaacaccctgaatccataccatgaagcaaatgacaatcttaggatgatcatggatgaccggctgatcgcaaacaccttgcaccattggtactttggcccagataatactggtgatatcatgaccttgaaatacctgactggacttgaggatttccncagcagcatgtctactgtccacttggtcacatcacattttcttgtcccacgtcctctgagcccctcaggacctgtgcagtccttctgtgcattggttatcagaacctgccaaatccagttttccagtatctgcagagtgttaatgagttggtgagcactttgctccattctcaggcaccccagcaggttttgcagtttgtgccaatggaggtgctccttcaggggacactgcttgactttttgtgggatttgaatgctgccattgctaaaaggcatttgcatttgattattcaaggagagagagacaaagtcatcagcagccttgagttataaaattgagcatgtccctgttgagatttatttttgtgacttagtttctgccttcatttcacctgccctctctatttaatacctttcattttggagaaatgccagttttttgtatcaaaggacattaattatggaaagtcatagcttgttctcatctgaaggatatatgtactaataggcacagagttcttatggtaggaaccgtgcacgggtggtattcagcctgtaatcttgtgacatcagtatgtgcttggggtgtcaacac

SEQ ID NO: 6369 - DNA, 1020 bp, Cricetulus griseus
gaccaggagaactgtgtttatgaaactgtagttttgcctctggatgagacagcatttgagaagactttaacaccaattatacaagagtactttgagcacggagacacaaatgaggttgcggaaatgttaagagatctaaaccttggtgagatgaagagtggagtgcctgtattggcagtgtcctcggcccttgaggggaaggccagtcaccgggaaatgacatctaagctgctttctgacctctgtgggacggtcatgagcacaaatgatgtggagaagtcatttgataagttgctgaaggatctccctgaattagcattggatactcctagagcaccacagttggtgggccagttcattgccagagctgttggagatggaattttatgtaatacctatattgatagttacaaaggaactgtagattgtgtacaggctagagctgctctggataaagctactgtgcttctgagtatgtctaaagggggaaagcgcaaagacagtgtgtggggatctggaggcgggcagcggtctgtgaaccaccttgttaaagagattgatatgctgcttaaagagtatttgctctctggagatatatctagaagctgagcactgccttgttattgtttttttttttttttaagagtaaccacctaagtgtgggaattctgataagctacttttctaagtgccatgtttatgacctaatcattccaagttttgcattgatgtctgactgccactcctttctttcaaggacagtgttttttgtagtaaaatcactggtttatacaaagctttagttaggggtgaagtaaagctactactaagccccctgttggctgctgctgtggaaatgctgtgctttggggaatagacacacacacacacaccatatatacttttgtcttgagaatttttaaaaagacgagttagtcatgagactttttcatctttccagggaacatattgattggtcttaaatattagacagttaagtaaatggtggctggaacatct

SEQ ID NO: 6370 - DNA, 1020 bp, Cricetulus griseus
ccagtgagatccccaggccggtcgagaaacgaaagtctccgcccaaagagtacattgatgaagaaggggtgagatatgtcccagtgcgaccaagacctcccatcactttgcttcgtcactatcggaacccctggaaagctgcttaccaccacttccagaggtacagtgatgtccgggtcaaaagaggagaagaaagctatgctacaagaaatagctaatcagaagggagtgtcctgccgtgcccaaggctggaaagtccacctctgtgctgcccagttactgcaactgacaaacctagaacatgatgtttatgagagacttaccaacctaacaggaaggaattatcccaaagaaaaaaaaacagcaacagatgatgatctacatcgaataaatgagctgatacagggaaacatgcagaggtgtaaactagtgatggaccaaatcagcgaagccagagactctatgcttaaggttttggatcacaaagatagggtcctgaagctcctcaacaagaacgggactgtcaagaaaagtgtcaaaattgaagcgaaaggaaaaggtgtagacccagaagaatcaggacttggaaacagaatttatgaagaataatgagcattgaaatgcgggacagttttcttcatttacttgaggaagcagagttgatggcacagaaaggtcagagctggactggcatggtgagccctccttcctccaggtacatgcctgttacacctctgtcttcagcaactcccgatactcggtgacacaaatggccagctgagttttcagccttccagtccataggctgtatttatctggtggattcctgcagggcctgaactgagcctggactgaaagtatccacttggacaatctgttatctctctagactaaacagaaaacctcttctcactccagtcagttcttcagtttgaccgtccagtttccaaattggcctacagtggtgccacagcacccggagagctgccacatctcacacaaaagggttccagcaatcag

SEQ ID NO: 6371 - DNA, 1019 bp, Cricetulus griseus
agcttgatactcatggacattggatggaccggaggcagggatggtcggctatgacgccaaagcagatatcaggagtaactccaagttggaggtggcggtggcaggatcagtgtctggatttgtcactcgtgccctgatcagccctttggacgtcatcaagatccgtttccagcttcagattgaacggctgtgtccaagtgaccccaaagccaaataccacgggatcttgcaggcaatcaagcagattctgcaggaggagggaccagcggctttctggaaagggcacgttccagcccagatcctgtccgtaggctatggagctgtccaatttctgacgtttgaagagctgactgaactgctccatagaatcaacttgtatgaaacccgccagttctcagcacacttcgtatgtggcggcctgtctgctggtgcagccacccttgctgtgcaccctgtggatgtcctgcgcacccgcctcgcggctcagggggagcccaagatctatagcaacctccgagacgccgtgtcgaccatgtacaggaccgagggccccttggtcttctacaaaggcttgactcccaccgtgatagccatcttcccctacgcgggcctgcagttctcctgctaccggtccttgaagcaagtctacgactgggtcatacctccagatggaaagcaaacagggaacctgaaaaacctgctctgtggatgtgggtctggagtcatcagcaagaccctcacatatcccctggacctcttcaagaagcgtctgcaggtgggagggtttgagcgtgcccgatccgcctttggcgaggtgcgtagctacaggggcctcctggacctcaccaagcaggtgctacaagatgaaggcacccagggcctcttcaagggcctgtcccccagcctgctgaaggcggccctctccaccggcttcatgttcttctggtacgagctcttctgtaacctcttccactgcataaggagtgaagacagatagctgtgagcatgggaggggccta

SEQ ID NO: 6372 - DNA, 1019 bp, Cricetulus griseus
  modified_base (758)..(758): a, c, t, g, unknown or other
  modified_base (806)..(806): a, c, t, g, unknown or other
ttttcccagcttgctgcacctcagcacctagatcttcacctgtacaataacgagcagattctaagttgggagccgccaccccccagcaacgacacaagaccagtggtctaccaggtggagtttaaatatgttgatggttcctggaataagttcacagaggtaaactgtacagacatcacagtgacgaagtgtgacttcaccagaggtggccgcttgaccaggaaaaggctccctcatcatcctatttctcacctccctttgatgtgactagtgaagcaacttttgagtaccgtgtccgttactgggaaaaaacaggagcccaacaggaacaggtgaggggcccgttcaaggagaactcggttgtgctgagtaacttgaagccattcagagtgtactgtctacaaaccgaggcacagctgacggtgcaaaacaacaactgtcggcctgggctttcgttaagcaacgtgtcttgccatgaaacaacagcagatgcagcatcaaccaggctgcaagtcaccctgatcgccgtggggaccttttcattgctactggtgctgactggggcctgcttcttcctgttcctcagataccaaagccgggtgaaatactggtttcaagctccaccaaccatcccggaacaaatacaggagtatttaaaggacccagaccagcccatcttagatgccttggacaaggaccactgctcaaaaggacgatgcttgggactctgtgtcaaattgtgtcctctccagaaaagngcaggatgtgctgcaaaacactatgagccaggcttaactttttttttntttttttttaatctagattaaactttttttttttttaggtgcacacctttgctcccggcactcgggaggcagaggcaggcagatctctgtgagttcgaggccagcctggtctcctttaatcccaacacttgggaggcagaggcgtggatctctgtgagctcaaggccagcctgatctacatagtaagttccagaaaagccagggctatgtaga

SEQ ID NO: 6373 - DNA, 1019 bp, Cricetulus griseus
tttgatgaagatgacaaagatgattctgtctggtttttagaccatgattatttggaaaacatgtatggaatgtttaagaaagtcaatgccagagaaagaatagttgggtggtaccacacaggccccaaactgcacaagaatgatatcgccatcaatgaactcatgaaaagatactgtcccaactctgtgttggtcattattgacgtgaagccaaaggacctgggacttcctaccgaagcttacatttcagtggaagaagttcatgatgacggaacaccgacgtcaaaaacttttgagcatgtgaccagtgaaattggggcagaggaagctgaggaagttggagtggaacacttgttaagagacatcaaagacactacagtgggaactctctcccagcggatcacaaaccaggtccatggtttgaagggactgaactccaagctcctggacatcaggagttacctggagaaagtggccagcggcaagctgcccatcaaccaccagatcatctaccagctgcaagacgtcttcaacctgctgccagacgccagcctgcaggagttcgtcaaggccttctacctgaagaccaatgaccagatggttgtggtgtacttggcttcactgatccgctctgtggtcgccttgcacaacctcatcaacaacaagatcgccaaccgggatgcagagaagaaggagggacaggaaaaggaagagagcaagaaggagagaaaagatgacaaagagaaggagaagagtgatgtaaagaaagaagaaaaaaggagaaaaaataaatcgtgtagcttttttatttgtaaattaaaatcttataaactaacttggtgtgccactagagggttctttgtcacattcagtgcttgtcaacacttgtgctctgacccttctgaactcttcagcccacaccaccttttggacctgtaactctagcattcttagggcttgtggtccaggtccatgtattgtttaccttcaaaaaatacaattaaatggcttaggttttt

SEQ ID NO: 6374 - DNA, 1019 bp, Cricetulus griseus
atgtttacatcgattcaatgggatatgcattcacactgcctctgtttaaatacatagggggctgccgagttgggagctatgtccactaccccactatcagcactgacatgctctctgtagtgaagaatcaaaacactggatttaataatgcagctttcattagcagaaatgctcttctcagcaaagcaaagctcatctattactatttgtttgcttttgtttatggtcttgttggttcttgcagtgatgtagtcatggtgaattcttcttggacactaaaccatattctctcactgtggaaagttggccattgcactaacattgtttatccaccttgtgatgtgcagacatttctggacatccccttacgtgagaaaaaggtgaccccaggacatttgctggtttccattggccagttcaggcctgaaaagaatcatgctttacagatcaaagcctttgctaagatgttaaatgagaaagcagctgagtcacacccttacactttaaacttagtccttattggagggtgtcgaaacaaagatgatgagcttcgagtaagccagctgagaaaactatctgagaatttgggagtccaagaaaatgtggaatttaaaataaacatttcatttgatgaattgaagaattacctatctgaagcaacaattgggctgcataccatgtggaatgagcattttgggattggaattgtcgagtgtatggcagctggcacaattatccttgctcacaattcaggaggcccaaagcttgacattgtcattcctcatgaaggacaaataactggatttctggcggagagtgaagaaggctatgctgaaaccatagctcatattctctctctatctgcagaaaagaggcttcaaatcagaaggactgctcgagcgtctgtgagcaggttttctgaccaggagtttgaagtgtcattcctgtcttctgtggggaagttacttacgtaatgccaaatttgtaacattctagataatttctacaaaatggagctg

SEQ ID NO: 6375 - DNA, 1019 bp, Cricetulus griseus
cctggaaacgctcaacctaagtggcaaccacctgaaggaggtgtgtgcgggtgccttcgaccatctgccgggcctgcgccacctcgacctcagccacaaccctctcaccaacctcagcgccttcgcctttgcgggcagcaacgccagcgtctcggcccccagctccctggtggagctgatcctgaaccacatcgtgccccctgaggatcagcggcagaatggaagcttcgagggcatggtggccttcgagggcatggtggcagctgccctgcgctcaggccttgcgctgcaagggcttcatcacctggagctggccagcaatcacttcctttacctgcctcgggacttactagcccagctgcccagtctcaagcacctggaccttcggaacaactccctcctatgcatcctttcgcaacctgacacacctcgaaaaactccacttggaggacaacgccctcaaggtccttcacaactccactttggccgaatggcaaggcctggctcatgtcaaggtgtacctggacaacaatccctgggtttgcgactgctacatggctgacatggtggcctggcttaaagagacagaggtggtgccggataaagccaggctcacctgtgcattcccagaaaaaatgaggaatcgtgccctcttggacctcaacagctctgacctggactgtgacgctatccttcccccatccctgcagacttcctatgtcttcctaggtattgttttagctctgataggcgctattttcctcctcgttttgtatttgaaccgtaaaggcattaaaaagtggatgcataacatcagagatgcctgcagggatcacatggaagggtatcattacagatacgaaatcaatgcggaccccaggttaacaaacctcagttccaactcggatgtctgagaagcaggactggtcaaggacagctctgcatgaggtgtagacttcaagttttttgagaaaataacttttttctataaatatgagtttcatcctcatctacataaa

SEQ ID NO: 6376 - DNA, 1018 bp, Cricetulus griseus
ccgaggtagagatagccgggaggagaggctgcagttggtacagctgtcccaagaaaatccacagctgctagatgcaggaattacaggatatttcttttttccaagagaaagaaagagagcttggaaaagccaagttgatgggtttctttgatttctttaagtacaagtaccaggtaaatgtggatggaaccgtggctgcgtacaggtatccctatctcatgctgggggacagcctggttctgaagcaggattccccgtattatgaacatttctatgtggcactaaggccttggaagcactacgttcccattaaaagaaacctcagtgatcttctagagaaagtcaagtgggccaaggaaaatgatgaagaagcaaagaagatcgccaaagaaggacagttaactgctagggacctgcttcagccacccagacttttctgttactattacaaagtactacagaaatacgctgcgcgccaggccagcaagcccatgatacgtgatggaatggagcttgttccccagccagatgatggcacatccgtttgccagtgccacaggaagaggccggagaaggaagacctttaaggaggcccagtttcacactcctttgtatgctggctacatctttaagacttgtgaagatgccaagctgtgaagaaacagaggagccaggcctggtgggtcaagctcacacctctaatcccagcactctagaggcgaagcaagaggatttcttagtacaaagcctgcctgagatacatggtgatttcctggtcagcccagactacccagttggaccttatcaagaagccaaaacatttttttttttttgtttttgtttgtttgtttgtttgtttttttgtttgtttgttttttggtttttcaagacagggtttctctgtatagccctggctgtcctggaactcactctgtagaccaggctggcctcaaactcagagatctgcctacctctgcctcccaagtgctgggattaaaggcatgcaccaccaccaccc

SEQ ID NO: 6377 - DNA, 1018 bp, Cricetulus griseus
cattccagcgcagacccagggagccaggatttactgaggaggcgactgcctgtgtcagaggctggaagtcctgaagaaagagacgaagttagtgaaggaaaaacaagaggctgcacaggattcactgagaaagactgataaaaagagtctttggagctatggtcttctgtttctctgctgcctgattgtggctcttgtgctaagttccatcaatagctactattcctccctagcccagcaagtgccccagaacccagctttggaggctttcctggctcagtttagccaactgaaggataaatttccaggtcagagttcctttctatggcagcgaggacgaaagtttctccagaagcacctcaatgtctcaaaccccaccgagcctgccaccatcatcttcacagctgcgcaaggagggaaaggagaccctcaagtgcctgagtccaccatgtggccaatcgcctaccacctcttcccagaaagtgtcagccgtctccatagacggagctgaaagagccctgcaggacagtgacgtggtcaagctgtgggttgacttggagctcagctctggatttaagaatggcaataaggctgctgtagtccaccactttgaatctcttcctgcaggctccaccctgatcttctacaagtattgtgatcacgagaatgctgcctttaaagatgtggccctcatcctgaccgtcctgctggaggaggaaacactagaagcaagcgtaggccccagggagacagaagaaaaagtgagggatttactctgggctaaattcaccaactctgaactcccagctccttcagtcacatggactcagacaaactgagtgggctgtggagccgcatttcacacctggtgctgcctgtccagccagtcaagaacatagaagagcgaggctgccttttgtgaagccatgcacagaggtggcgttgaagccaggtctgagagcccgtgcccctgggaggaggtagttagttagcaggcgtgaggaaacagctgagaggc

SEQ ID NO: 6378 - DNA, 1018 bp, Cricetulus griseus
ggaaggaggggagccccccagggctgggccctcagctcatggaagtctcattcatctctgcctggggtgttgagtgccacaggggtggtcagccactggacacaggactttgaggaaaaaggtatcccagaggcccgggaatccagtgagtacatcgtggctcatgttcttggagctaaaacatttcagagcctgaaaccagcactttggaccaagccactgacccctagacagctgcagtggatccaggaactgtgtagccatcggttacagaggatgcccgtgcagtatatccttggggagtgggacttccaggggctcactctgaagatggtacccccagtgttcattcctcggccagagacggaagaactggttgaatgggttttagaggaagtggcccagaggccccctgcagtgggaaccaaaggtggtcccctcattctggaggtgggctgtggatcaggagccattgccctcagccttctgagtcagctcccacagagtcaagtcattgctgtggataaggaagaagccgctgttagcctgacccgtgagaatgctcagaggcttcagttgcaggacaggattcggatcactcgccttgatgtaacctcagaagggtgctggacacgccttttgccctggggccctgtggacttggtggtcagtaaccctccctacatcttccacaaggacatggaacaactggccccagagatttgcagttatgaagacctggtggccctggatggtggtgaggaaggcatggacatcattacccacatcttgaccttggcgccccggcttctgaatgcctctggaagcatcttcttagaagtggacacaaggcacccagaggcttgtcagcagctggcttcagagtcagcctgacttgcaccttagtcttgcggctgtccggaaagacttctgtgggaggccccggttcctgcacatccagaagtctgcaccatagtgtggctactctgagcagctggccaggattctagcctgctgg

SEQ ID NO: 6379 - DNA, 1018 bp, Cricetulus griseus
ctcttcaaagacaatcagaaaaattacaatattgagaaagaccatataaatgtcaacagtgtagtaaggcctttagatgtctcaatgcccttcagtcacatgaaagaattcatactggagaaaaccttaatgaatgtaaacactgtggcacagcttttagcagacttactcacctgagattacatgaaaaagttcatactggagaaaaacactatgaatgtaaacagtgtgatatagttttcaaatctcagagttcctatcatagacataaataatgcatggagaaacattctataactgtaagcagtgtggtaagtccttcatttacccctctttacttcaaatgcatgaaagaactcacacaggtgaaaagccctatgaatgtaaactctgtgggaaagcatttagatatcactcttccatacggttgcatgaaagaactcatacgggagaaaaaccctatgaatgtaaacactgtggcaaagcctttacacgtcagagttatcttcagtttcatgaaagaagccacactggagagaaaccctatgaatgtaaagaatgtgggaaagcttttaggcatcactcttaccttcgattacatgaaagaagacatactggagagaagccatatcagtgcgtacagtgtggcagatccttcagtaggcagagttcctttaagagacatcagtccgttcatgctgtggaaaacccctataaatgtcaacaatatctaattcctttatccctatttccttcaaatgcatgaaagaacttacaccagcactaaacttctgcatgtgaactgtgtgagaaaatgcttatcctaattcataagaatacatctaagaactcaaaatagtgatgagccttttgtagtatagccttcagggttttaattgaaacttaatggattcaaacagagttcttgagacacacgcttgagtccactcctgttctgtggaatgtattctatgctgttattctcaagttcaataaaatactatatacactctcagta

SEQ ID NO: 6380 - DNA, 1018 bp, Cricetulus griseus
ctcccagctctgccccgaagaactcccaaacagcactattgtaacacatgtggtaaaaccttctcctcctcgagtgccctgcagatccacgagagaactcacactggagagaaaccctttgcttgcactgtatgtggaagagcattcacgacaaaaggcaatctgaaggtccacatggggacacacatgtagaactggtaaaccccctgctcgccttggccgtcggctccctgtggatggccccatggcaattctaggcaatcctgtcaagttcctagaaatgtcccagaaggatctggcagcaaggtcaggaagcggggatccgtccagtttttggaaccagtacacagcagcacggtccaacgggttggctatgaaggccaacgagatctctgtcattcagaatggtagcatccctccaattcttggaagcctgggcagcgggagcagctcacccgtcagtgggctgacaagggaatgtggaaaagctggagaattctgaacccagtgctcctctggctggcctggagaaaatggcgagaagcgagaacagaaccagcttccgcttcacccgcttcggcttcgtggatgacagcaaagaagatagtcacaagctaaagctgccccacccaattccacccacgaacgccgcccgacggttgcctctgccccttcttacctaccttccggctcctgggactatgaattccattatgaagacattcttttgtactttgttcagcctctagagttctaaagaaaacttatttattagtgctgtaaccttgctttgcaaacagaatgcaagcgttaactttggtcttctgtattttggactaaataaatactagtggatagaatgctataaacttgctgtaatattcacggcaatggcaagttgccgtgccaggcagtcctagtctggcattaacttagtttctatatccagttcaatatgaatctggtgttgatgtaatgcctccgtgatgcgttagatctctaataaagtctgtatata

SEQ ID NO: 6381 - DNA, 1018 bp, Cricetulus griseus
atggcaaccgatgggctgcacgagaacgagacgctggcgtcgctgcaaagctgcatgacgtggagctacaccaggtggctgagcgggtggaaagccctgggccagtttgtcatgaagaccagaaggaccctcaaaggccacggaaacaaagtcctgtgcatggactggtgcaaagacaagcggaggatcgtgagctcctcacaggatggaaaggtgattgtgtgggattccttcacgactaacaaggagcatgcggtcaccatgccctgcacatgggtgatggcgtgtgcttatgctccatcgggatgcgccatcgcttgtgggggtctggataacaagtgctccgtgtatccactgacatttgacaaaaatgagaacatggctgctaagaagaagtctgttgctatgcacaccaactacctgtctgcctgcagcttcaccaactcggacatgcagatcctgaccgccagcggtgatgggacatgcgccctgtgggatgtagagagtgggcagctactgcagagcttccatggccatggggctgatgtcctctgcttggacctggccccctcggaaactggaaacaccttcgtgtctgggggttgtgacaagaaggctatggtgtgggacagtgcgttctggccagtgcgtgcaagcctttgaaactcacgaatccgacgtcaacagtgtccgatactaccccagtggagatgcctttgcttccgggtcagatgatgcaacgtgtcgcctctacgacctgcgggcagatagagaggtcgccatctactccaaggagagtatcatatttggagcgtcaagcgtggacttctccctcagtggtcgcctgctcttcgctgggtacaatgactataccatcaatgtctgggacgttctcaagggttccagggtctccatcctgtttggacatgaaaaccgtgtcagcactcttcgagtttctcccgatgggacagcattctgctcaggatcatgggatcacactctaagagtttgggcataa

SEQ ID NO: 6382 - DNA, 1018 bp, Cricetulus griseus
ccatcatggcagtcaagtggactggtggacattcttcttctatcctctgcctgaatgcaagtaaagacgggcttgtggcttcaggagcagagggtggagatcttgtggcttggggtgaagatgggactctattaggacgcatgcagttggaaggagctgatgatgttaccagcatcttgttttctccctcctgccccaccaagctatatgcctcccatggagaaaccatcagtgtactagatatcaggtctcttaaagagtccgtggaccgttttcatgtgaatgatgaagaaatcaattgtctttcactaaatgaaactgaaagtctgctggcttctgctgatgactctggggcaatcaaaatcctggacttggaaaagaagaaagttaccagatccctgaagagacattctaacatttgctcctccgtagcttttcgacctcagaggcctcagagcctggtgtcatgtggcctggatatgcaggtgatgctgtggagtcttcaaaaagcccgacccgtctggattacgaatttacaggaggatgaaacagaagaaatggaaggcccccagtcccctggtcagctcctaaaccccgcactagcccactctgtctcagtggcatcttgcggcaatattttcagctgtggcgcagaagatggtaaggtgcgcatcttcagggtgatgggagtcaaatgtgagcgagaattgggatttaagggtcacgctttgggggtatcccaggtctgctttctgacggagtcccatctgctgcttactggagggaatgatgggaagataaggttgtggaacgtgagcagtgaaatggagaagaaacagaagagtcctgcaaaacacacccacaggaagaaagcaaaaagagcagcttgccccaagcagggtagggactctagtaccacaggagcagacgaggaggagcatgcaaaggttttgccaaagctcgatattgaacacggagaaaaagtgaactggctcttgagttacaaaaataaaaggga

SEQ ID NO: 6383 - DNA, 1018 bp, Cricetulus griseus
aactggggctgtttgggagccataggcgctgactggcaagtccgaagccggtgctaagaagtcgctctgagatcgcgccgcttaggtttttctgttccttttttcttcctgtttatctccaagcagccagcggcccatagaaacatgaccaccaatatgggccccttacatccatactggcccaggcacttgaggctggacaactttgtgcctaatgacctccctacctggtatatcctggttggcctgttctccgtctctggggtcctaattgtgaccacttggctgctgtccagtcgagcttccgttgccccacttggaaaatgtcgtcgactggccctgtgctggtttgctgtgtgtgcattcattcaccttgtgatcgagggttggttctctttctaccatggcatccttcttgaagaccaagctgtcttatcccaactctggaaagagtattccaagggagacagccgatacatcctgaatgatggcttcatcatcactatggagactgtcacagcttttctctggggaccgctcagcctgtgggtagtgattgcctttctccaccagaaatccttccgctttatcctacagctcgtggtctctctgggccagatgtacggggatgtgctgtacttcctgacagagtatcatgatggatttcagcatggggagctaggccaccccctttatttctggttttactttgttttcttaaatggcatatggctggtggtacctgcaatcctcatctttgatgccataaagcatctcactcatgcccagaccaatctggacagcaaggtcatgaaaactaagagcaagcataactaaagagcagtatagtgggccggaacaccactgatgaggcaccctgcccacctcccagaagattcaagccctcctcccacaagttggagggtcagaactatctgatttgtcacactcaggctgatgatgggtacaaaaagggccaggaaataaagtgttgtttgactctaacaaaaaaaaaaaa

SEQ ID NO: 6384 - DNA, 1017 bp, Cricetulus griseus
gtcacttagggaatggggcctgcgcccatgaccagctggaggtgattgagctggacaacctgcccgctgatcaccgacgccatccctggaacacttgaagaagctgtcacagccttgagcggatagaactctatgactgccagcagatcacgcgggctggaatcaagagaactcaggacccatttacccaatattaaagtccacgcctacttcgcacctgtcactccaccgccatcagtaaggggcagcagacagcgcttctgcaggtgctgtatcatacctatgacaatggaggtgaccagccttggtgactgagtatttaatgacacttcagatgaaaggtcccagaattctatactaccagatttatttatcttattaaacttatttaaaatcttattttattatgctctttcaaaagctaaattacttgttgttttttattccttctcccctttatgttcagattaccttgtacagaatttcttttttcctgagaccatttgttacgttgccaggccaactggtcttggcacctgggctccagttcccctccccctcagcagagcactgtgcagactgcccccttcctgtcagaccgctcagggacaggtggatgggtacctggtgctgtctgaggaactctcatcttcactcctgcacccctagtctttgccaactccctgagggggtagcagggcagtcacaatatcatgaaccctgtgccccagctgctgggcctgacctggacttttgtatgggagctgctgcttgcttgtttctcaccaggcctgcgccaacactcagccactccccaggccctgcacagttccccggtggggaccttaccaggttccattagctaagtgactgtatatacaatacttccatcacccaaggatggtgggggtggggagaattgttttaaataaataaaaaccaaggaggcagtagtacttatttttttgtctttaaaatctttggactaaagaaatgttttattatatatatatataa

SEQ ID NO: 6385 - DNA, 1017 bp, Cricetulus griseus
agcagccggaactggaagtccagtaccaaggcaaatgtaaaaagacttgccgggatgttctctgtcctggcagctccacctgtgttgtggaccagacaaacaatgcctactgtgtgacatgcaatcggatttgcccagagccctcctcttctgagcagtacctgtgtgggaatgatggagtgacttactctagtgcctgccacctgagaaaggccacatgtttgctgggcagatcgattggattagcctatgagggaaaatgtatcaaagcaaagtcctgtgaagacatccactgtggtggtggaaaaaatgcctgtgggatttcaaggttggccgaggccgttgctctctctgtgatgagctctgccctgacagtaagtcggatgagccggtctgcgccagtgacaatgccacttatgccagcgagtgtgccatgaaggaagctgcctgctcctctggcgtgctgcttgaagtgaagcactccggatcttgcaactccatctcagaagacatggaggaagaggaggaggaggaagaccaggactacaactttcctatctcttccattctagagtggtaaacgctccaccagtgttcagtgttgacatagcctctgggcaaaacaaaacacaacaaaaaaaaatgatgttacagatccaaagacatgatgatgtgggcgtcaggagtctaaaggaaggtgaaagttacactttcaacctgtcattcagtgtttctccttttgaggtagttggcagtaccttttcaattagttctttttcaaccaatgtgtcactaaaagttccatcaaagctttatcagttcaagtttcttgcttttcataatacttttttctgatgcaattttatattttcaaaacatggcaagttaaatataaattcatttaaatatatagttttgtacttttctaccatgtaaatgtgcaatgtatataaaagttataatgtgtatttgtaaataaatgatgaagtgaaaaaataaaaaaaaattaaaaagcca

SEQ ID NO: 6386 - DNA, 1016 bp, Cricetulus griseus
cgctctgcgtcctgggaaggtcacctgccccttctgaacctcggttttgtcttctgcaagcggggacggtaacagagcccgtgtcgtagcgttgggcagctgcgatgagcttaaaagatgatgacagtggagaccatgatcagaatgaagaaaacagcacacagaaagatggtgagaaggaaaaaacggaacgagacaagagccagagcagcggcaagaggaaggctgttgtccctggaccagcagaacatcccctgcagtacaactacaccttttggtactctaggagaacccccggccgtcctaccagttcacagagctatgagcagaacatcaagcagattggcacctttgcctctgtggagcagttctggaagttttacagccacatggtacgtcctggggacctgacaggccacagtgactttcatctcttcaaagaaggaattaagcctatgtgggaggatgatgcaaataaaaatggtggcaagtggatcattcgacttcggaaaggcttagcatcccgctgttgggagaatctcatcctggccatgttgggggagcaattcatggttggggaggaaatctgcggggctgtggtctctgtccgctttcaggaggacattatttctatatggaataagaccgccagtgaccaagcaaccacagcccgaatccgggatactcttcggcgcgtgcttaacctacctcccaacaccattatggaatacaaaactcacaccgacagcatcaaaatgccaggcaggctgggcccccaaaggctccttttcaaaacctctggaagccgcgattgaatgtgccatgaccctctccctctctggatggcaccatcattgaagctggcgtcatcggagtctcttgttctgttggcgtgccacctggaagacccttctgtcctggacaagaggaacggaagagcatgttatgctttgagaacaggctgacagcagcagctacaacaacagctgagatcacaaataaatggtgctaaacca

SEQ ID NO: 6387 - DNA, 1016 bp, Cricetulus griseus
gaacagtgggaacctggataaacagacaggcaagggcagcacgagccctgcactactgctgcttgactgacaatgccgagtgcctcaagctcctcctgcggggaaaggcctccatcgagatagccaatgagtcaggagagacgccattggacatcgccaagaggctcaagcatgaacactgtgaggagttgctaactcaggccttgtcaggaagatttaactcccacgttcacgttgagtatgaatggcgactgctacacgaggacctggatgaaagcgacgatgacgtggatgagaatcatacctctacttaataactgtaagcaatctctctctctctctctctctctctctctctctctctctctctctctctctctctctctctctctctctgccccccacaacccccacgcatctgcaccatttggcctttgctgacctggtgccagatcttggagaaaacaagtttgacttatgtcaacatttgaactccagtccctggctaacttatggggttcactggtacttaaacacctaggaaatatttttccactttctggtggtgctattgtgcggtaacggatagtgctttttaccagaagagaaattctattgactttcctcctaattatcctctcttagttatttgctctttgcaaattgagaagaaaaagtaactcaaaggaaaacattgtagatatctatttatatttaaagtttacatttcacatgtgtcagctgtggaattcgggctttttttctgttgagggtggagaatgacctgcggcctagaatgctcttttgagatgtatgatattcagttcattcacttgattactttggtctagttgcagcgcaactgtatatactgtataacctaaacggattattttcattgtccttaatgcagtgatttataattagagcatgtttaataacttgatttcccattaaccagtcatttgactaggaaaaaaaaaataaaagtacttttaaatggaaaaaaaaaaaaa

SEQ ID NO: 6388 - DNA, 1016 bp, Cricetulus griseus
caacatgctacgcctgacagaagtagacattgatgatgaagaaagaccccgcaatccacatagagtcaaaagctgtgaggttctgtttaatccttttgatgacatcattccaagagaaattaaaaggcccaaaaaagagaaaccggatgaagaaatcaagaaattgaagcctaaaggcacaaaaaactttagtttactttcttttggggaagaagctgaggaggaagaggaggaagtgaaccgagtcagtcagagcatgaagggaagaagtaaaagcagccatgacctgcttaaggacgatccacacctaagttccgtgccagctgtggaaagtgaaaaggatgatgcaacaggagatttagaagatgatggagaagatgagagtgcagatcctgatgaatacattgatgatgatgaaaagaacctgatgagagaaagaattgcaaaaaggttaaaaaaagacacaagtgcaaatgtgaaatcagctggagagggagaaggagaaaaaagccggccagccgcagtgaagagctcagaaaagaagcaaggcaactgaagcgggaacttttagctgcaaaacagaaaaaggagactacaacaaaagcagagaaaggaaatgaagaggaagaggctgccccagatggcgctgtggcagaatacaggcgagaaaagcaaaagtatgaagctttgaggaagcaacagcctaagaagggaacgtctcgggaagatcagacccttgcactgctgagccagtttaaatcgaagctcactcaagcaattattgaaacacctgagagcactgttcctgaagcagaggtggaagatgatgaaggatggatgtcacatgtgctccagtttgaagacaaaaccaggaaagtgaaagatgcaagcatgcaggactcagacacatttgagatctacgatcctcggaatccggtgaacaaaagaagaagggaagagagcaagaagctgttgagagagaagaaagaaagaaggtgagaggagagtggtgatgc

SEQ ID NO: 6389 - DNA, 1015 bp, Cricetulus griseus
gcggctgccgatgaggccgtggggctggagtgtggcgccgctcaaggtgcctgcctggcgggctttccgtgcttgagttgatggctcacttttgctcttttttccaaagatgaggccgctggcgtttgtggtgttggctctgttggctgtcagtcaagcagaagaaggagccaggcttttggcctccaaatcattgctgaacagatacgctgtggaagggcgggacctgacgctgcagtataacatctacaatgtgggctccagtgcggcgttagatgtggaattatctgacgattccttccccccagaagactttggcattgtctctggtatgctcaatgtcaagtgggaccggattgcccctgctagcaatgtctcccacaccgtggtcctgcgtcctctcaaagccggttacttcaacttcacctcagcaactattacctacttggcccaggaggatgggcctgttgtgatcggctcaacaagtgctcctggacagggaggaatcctggcccagcgggagtttgaccggagattctccccccattttctggactgggcagcctttggagttatgaccttgccttccataggcatccctctgctcctgtggtattccagcaagaggaaatacgatacccccaaacccaagaagaattgaatgcagtgtttccttggcccttttctcccacaaaaccaggtgttttccagacttcatagggtgtcaaatgtgttctcttggcccttggcctatggccatcttttcctggatcctaccctgaactcaaccagaatgcagagggcagacctgggagcttgggcgagcctccctgccttcactgaagccatacaaacaggactgcctttagccacagctttggggcttgagggtcccgccaaggtgctgttggtatgttactggcaatgtgaactcttgggggtccacgagggaccctttggactctgtctgacacccccatttcctggcagctcctctcaagagggtggaagatta

SEQ ID NO: 6390 - DNA, 1015 bp, Cricetulus griseus
ggtaccagggtgtcatggaagggctgctgacgagatgcagaacactgtctgccttggccacctgcagccgccagcactccaggtatgttacccacaagtgtcaccattgcccaccagggagacagcaacgcttggtattatcccgcatgttccagcctcagaatcttcgggaagaccaggtgctctctctggagggcagagctggagagttgacctgtaagagtcagcggctgatgctacaagtgggtctgatcctcccagcaagtcctggctgttaccacctcatgccctacacagttcgtgctatggagaagcttgtgagggtaatagaccaggagatgcaggccattggggggcaggaaatcaacatgcccagcctcagcccagctgagctgtggcgagccaccagccgcgaaaccaaaggcattgagtggggcacacattctacctcggtaccaagtactcctccattttcaatgcccagtttaccaatgctcatggggaccctttgctggcggaaatggggtgctatgggttgggagtcactcggatcttggctgctgccattgaagttctctcgacagaagactgcatccgttggcccagcctcctggctccttaccaagtctgcctcatcccccctaagaagggcagtaaggaggaggcagccacagagatcatggagcacttgtatgatgacatcaccgaggcagtggttcagctccaaggggaggtcctgctggatgacaggacccacctgaccattggaaacagactgaaagacgccaacaagcttggctaccccttcgtgatcattgccggcaggagggccctggaggaccccgcacactttgaggtttggtgccagaacactggtgaggtggtcttcctcaccaaagagggagtcatggaactactgaccggtgttcgtgttgtctaagctcccaaccacacctgtccccaggcttggtgtccactgtaatgctgtagttcctccacttctctcttgggtggt

SEQ ID NO: 6391 - DNA, 1015 bp, Cricetulus griseus
ttctcgggatggaggcggaagacggtacgccgccgctgtggcggctgcagaagttgcctccggagcagggtcccccgcttcttcacaaaataattgatggcatgtgtggccgagcttaccctgcccaccatgattatcacagcatttgggatttgactgaatggaagcatgttctggaagatgtaaccatgtttttcaaagcagtagttggcaaaaacttttcagatgaagagacactccagcagttgaaccaactgaattcttgtcatcaagaagcagttatgaaatgcttgaagagcaggaaaaatgagatcaagcaggccctgttgggagaaatagttgatatttcttgtgcacagctgaaggattttgattggcagttaaagctggcgctttctagtgacaagatcgccactttacagatgccacttttaaaccttcatctggatgtaaaggagaatggtgaagtgaaaccatactctgttgaaatgagtaaagaggagctacagagtctaattagttccttggaagcagctaataaggtggtcctgcagttaaaataactggaaatggtgaatttcaacattaccagatttcagtgctgcaccgtggcaaagtgaatgctgtgttcagaaggtggatgctacagcaggctgagcaggaagcaacgctgagattacagagatgaaaatctgtcagcaccctaaagaacaggaaattgtatggctgataggaaagacataaaatgaaagatgaaaaactggagctactatgtgtgctttcacaatgattgctttgtctcatttattaaatgtttgagaaatctttagataatgctttatcgaaaaggtaaaaataagttctagagtaatgtaaacacacaaagcagacatacagaactgttgcttctattcgaatagcaagacatgtattttttttcttttgaaacagggtctctctgtgtagctctgactgatctagaactcacatgtagatcaggctggcctcaaactca

SEQ ID NO: 6392 - DNA, 1015 bp, Cricetulus griseus
ccaggtggaggcacggacacagccagggagctcaggggcatcggagcgcctgaggtctcagacgcgcgcaaacgcggtttcgctctgggcgcagtgggaccgggactacccacgccgccaccgccgtcccagagcttggcacccgggcgtcccgaggtgcagccctaccgcgagccggctctgcgtccccgcatcttgctgtgtgcccctccgcgcgccccacgccgcctgtgcctcccgaaccccagcggcgccacgagagtcccccgtgcgccctgcgccccccacgcgcccgggggaaagtcctaggcgaagcgaccgccgcctccacggagatcaaagccctgcagcagacccggaggctcctggccaacgccagggagcggacgcgggtgcacaccatcagcgcagccttcgaggcgctcaggaagcaggtgccatgctactcctacgggtcagaagctgtccaaactggccatcctgaggatcgcctgtaactacatcctgtccctggcgcggctggctgacctggactacagcgccgaccacagcaacctcagtttctccgagtgtgtgcagcgctgcacccgcaccctgcaggcggaaggccgtgccaagaagcgtaaggagtgacctgccacaggctagaccatggacactgctctgggtctcttcccagttgggcctgaggagaaaaagctgagtccatcaagacagccagcctcactcgctgtcttcttcaagatgctaccagatactcagcccacttactgcctctcagggtcactcaggaccaggacaaggtcagcctgcctcactctcagtctcctgccagctgcccttggaaaggccggcaagaggacatagggaggaagggaccaggggaatgggccagtatgtggggaagggggcacgttcaaagccagtgcccgctccatgtgctagaggccaaagctgttcacatctgtgtgcaaccatctgcttcaaattgaaagtaaaacctgcaacatataaa

SEQ ID NO: 6393 - DNA, 1014 bp, Cricetulus griseus
tgccgcgcttcggtgtggcctagtgggccggcgcgccgctgtgacgtagtcctgcgggcggtctctgatgctgtggcgcccgctggtcgggctggcagtggccgccctgggtcgcgtgcctgcggacggcatggcaggtcctaggccagtagtgctgagtgggccatcaggtgcagggaagagcaccctgctcaagaagttgctccaggaacatggcagcatctttggcttcagcgtgtcccatactacacggaatccacgacctggtgaggaaaatggcaaagattactactttgtgaccagggagatgatgcagcgtgatattgcagctggggacttcattgagcatgctgagttctctgggaacctgtatgggacaagcaaggcggctgttcgggctgtgcaggccatgaaccgcatctgcgtgctagacgttgacctacagggtgtgcgcaacatcaagaagactgatctgcgtcccatatacatctctgtgcagcctccctcactggatgtgctggagcaacgcttgcggctgcgcaacactgagactgaagagagtttggcaaagcgactggcagctgcacaggctgacatggagagcagcaaggagcctggcttgtttgacctggtgatcatcaatgacaacttggataaagcctatgcaacattgaagcaggcactttctgaggaaatcaagaaggctcagggaaccggccatgcctgagggcctgcttcattccagaatgatgctggtgccccaaatctgcctggaggtggggtgatctttgccaaggcaccaaggacttgtcataggcttccactgtggagtaggaggagctgccccttgtctggccacatggtggctcttcatcctgtgctggcttgccgaaactgaaggattctgaaatgtacccacatttattctccctgggctgtccctgcccctgtctctgccttcctgctggagcaggactgacatcctaataaagtaactattgttttagagtgtca

SEQ ID NO: 6394 - DNA, 1013 bp, Cricetulus griseus
cggcgcccggaaggtcagcgtgtgaaggtggcagtaggaacgcgggtcttcccgctgttgctgtggggaccacggccgaacacacgatcccggcctgaggtggtggtgggaagcccaccgcactttgctgcgacgtcatggagggtggcgggggaagtggcaacaaaacctccggcggcttagctggcttcttcggagcaggaggagcgggctactcgcactctgatttggccggcgttccgctaactggtatgaatcccctgtctccatatttaaatgtggatccacgatatcttgttcaggatactgatgagttcattttgccaactggagctaacaaaacccgaggccgatttgagttagctttttttaccattggaggatgttgcatgacaggggctgcatttggggcaatgaacggtcttcggctaggattgaaggaaacccagagcatggcctggtctaaaccaagaaatgtacagattttgaatatggtgactaggcaaggggcactttgggctaatactctaggttccttggctttgctctatagtgcatttggtgttatcattgagaaaacacggggtgcagaagatgacctcaacacagtagcagctggaaccatgacaggaatgttgtataaatgtacaggtggtcttcgaggaatagcacgaggtggcctggcaggactgacactcaccagtctctatgcactgtataacaactgggagcacatgaaaggttccctgctccaacagtcactctgaagactttgccacctcaggaatgggggacatttcatagtcatccagaccaattaataagtcagtctggagttgctttctctcttgtacctacaattactttgaacaattggagactctgatttgctgtgatgaagatcatggatggttagcctggactgcaatgcttgcccttagtgagtggaagccaaaccctttggtgactcactgagtatgtgttctcttctcctttggagatggtcttgcacc

SEQ ID NO: 6395 - DNA, 1013 bp, Cricetulus griseus
cgcaccctttgtcatccacgacatcgagacactgtggcaggcggagaagggcctggtgtggaagcagctggtgaacgggctgcccccctacaaggagatcagtgtgcacgtcttctatcgctgccagtgcaccacggtggagacggtgcgcgagctcaccgagttcgccaagagcatccccaacttcagcagcctcttcctcaacgaccaggtgactctcctcaagtacggcgtgcacgaggccatctttgccatgctggcctccatcgtcaacaaagacgggctgctggtggccaatggcagtggcttcgtcacccatgaattcttgcgcagtctccgcaagcccttcagtgacatcattgagcccaagtttgagtttgccgtcaaattcaatgcactggaactcgacgacagtgacctggcgcttttcatcgcagccatcattctgtgtggagaccgtccaggcctcatgaacgtgccacaggtagaggccatccaggacaccattctgcgggctctggaggtccacctgcaagtcaaccaccctgacagcccgtacctcttccccaagctgctgcagaagatggcggacctgaggcagctggtcactgagcatgcccagatgatgcagtggctaaagaagacagagagcgaaaccttgctgcaccccctgctccaggaaatctacaaggacatgtactgaggccgcagccaggcctcccgggcccagctttccaagaagcttggcctggccttctcttttcgcctggctggtcaccagcttccagctgcagctacaagtggcctggagcttgctgggtgctcccatccctgcccaggtctggtgctgagggtgcagctcctctcagggtctgaagtctccaaaactgaaatgtatatttttgctaggagcgcagcttcctgtgtttttaatataaatagtgtatacagactgacagaactttaataaatggtaattaagtaatttaaaaaaaaaaaaaaaataaaaaaaa

SEQ ID NO: 6396 - DNA, 1013 bp, Cricetulus griseus
gaggatggcgctgttgcggggagccagcgccccggacccggacgatgtccggcctctcaagccgtgtctgctgcgccgcaaccacagccgcgatcagcacggcgtggcggcctcctgcctcgaggagctgcggagcaaagcttgtgaaatcctggccattgatgagtccctggccccggtcacgctggtgctggcagaggacggtacaatagtggacgacgacgactacttcctctgtctgccctccaacaccaagtttgtggccctggcctgcaatgagaaatggacatacaacaattcggatggaggaacagcctgggtttcccaagagtccttcgatgccgacgagacagacagtggggtaggggtgaaatggaggaacgtggccagacagctgaaagaggacctgtccagcgtcatccggctgtcagaagaggacctccaagcactcatcgacatcccatgttcagagctggctcgggaactttgccaaagctgtgccactgtccaagggctccagaacacactccagcaggtgcttgaccagagagaggaggcccgccagtccaagcagctcctggaactttatctccgggccttggagaaggagggcgacatcttgtccaaccaggaagagtccaaagctgccctcagtgaagacttggatgcggttgacacgggcatcagcaaagagatggcttcagacgtggcactgacgagccgaatccttaccacactgagggagaagccttctccagagctgagtttatctagtcaggatttggagttggtctccaaggaggaccccaaagccctggctgttgctttgaactgggacataaagaaggcagaaacagtccagcaggcctgcaacacggagctcaccctgcgcctacagcaaatgcagagcttgcgttcactcaggtaatttttcagcgaggaagaacccactgcctggggaacagcagagtcccaaaacgagccaaaccatggagtccagaagacagtgtcag

SEQ ID NO: 6397 - DNA, 1013 bp, Cricetulus griseus
tctcagagtggcctggtgcacatctggagcctgcagaccagaagaacagttgctgccctaaatggccacaagggccagggtgtaacctggctgaagacactgccccaagggcaccaactcctcagccagggccgggacctgcggctgtgcctgtgggacttggcagagggcaggaacaccatcatggacacagttcagctggacagtgtgggcttctgcaagagctctgtcctggccaggggacagctatgttggatgcttgctgtacctgggaagggcagcgatgaggttcagattctggagatgccatccaagacgtcagtgtgtaccctgaagccggaggcagatgccaagccaggcatgcccatgtgcctggggctgtggcagactaactccagtccccgccctctccttctggctggctatgaggatggatcggtaaccctgtgggacatcctggagcggaaggtgtgcagccggattgcctgccatgaagaacctgtcatgggccttgacttcgactctcagaaggccaagggcgtctcaggctctgccgggaaggtactggctgtctggagtctggacggccagcagtccctgcaggtgtacaagactcatgaactcaccaatcctgggattgcagaagtcaccatccggccagaccacaaaatcttagccacagcaggctgggaccgatcgcatccgggtgtttcactggaggacaatgaagccactggctgtcctggccttccacagtgcttctgtatactgtgtggccttcgccactgatggcttgcttgctgcagggtctaaagaccagcgtatcagcatctggtcactctacccctgctcatgacttagctgtcagacactgctgtcttaatccagtcttgacccagccctgtggaaggtcctcaagggcctctgaggacaccaaattatggccaaaggtctgtggaatccactttcttcataaggttctctgttccttttgtgacctgtcattcagatga

SEQ ID NO: 6398 - DNA, 1013 bp, Cricetulus griseus
  modified_base (14)..(14): a, c, t, g, unknown or other
tttttttttttttntttttttttagacaaccaaaatttcacttcaaaaaaaaaaaaaaaaagttaactattcgtgatacaagtaaaccattggcctgtggtgcctgagccttcttatccaggttttctcctcagggctgagtgtgtaggcaaagcatggatttttgttgggtcactgcagctcagtgcccacatctatgtacactgcaaagtggaggagatgtataggttcgagttcgttctgaaatgccactaccactgtcctaaattcagagaatcaaaggctactctcaaccttcaagttatacattcacatacttcactgtcaggtgtgacatacccaagtcactgaaacatcaaatcttcacaaatctgttcggaaaaggaacaagtttttaaagctctgttaaagccctcttctggtctttacatattttatacaaaagtaaattgttaccttttgtatgctaatatacaaagttttgtataatatgatggtttatttttagctctacacttaaaccgtaggtgatggagtggaaacttttaaaaactaccaagaggcttgttagacgaatttgtattctgaacctccatatgaaagcattccaggtttccagccttccctgttgttggtgtgttttccagctctaaattctttattaagcccatagttcttgtgtcttatttgattattctgctgtgcattaatgtgaatttcataagtaatggctatttattcagctattcattaaaatacaggattctttggggaggatggtgtaatctatagtttctgtttgttggcagcctattaccaaagatgacgtaattttcctgaaagctgagataatgacaatttgatagacaaacatagtaagagcctcaggatttacaacgtaagagctattgggatacaagcacccatttatagaaaggccagactacttaatcgctgacattgcttatcattctgacatataacagagaaggtaggagtcatttcgctttctt

SEQ ID NO: 6399 - DNA, 1013 bp, Cricetulus griseus
gatactgtatgtgtccaagataaataaaataaattccactttcctgattttgacaagaaaattacctggaaagctgtttcctctgcctcttctctacgttggcaaccatataagtggcttatccagcacaagtaaattaagcttgccaatgttcaccgtgctcaggaaatttacaatcccactcactttactcctggaagccatcatacttcggaaacactattccttgaacatcatcttcagtgttttggccatcgtgcttggggctttcatagcagctggctctgaccttgcattcaacttggaaggctacatttttgtgttcttgaacgacatcttcacagcagcaaatggagtttataccaaacagaaaatggacccgaaggagctggggaaatacggagtgctttttctacaatgcctgtttcatgataattccaactgtcatcattagtgtcactactggagactttcagagggccactgaattcagccactggaagaacgtcttgttttattattcagttttcttctttcctgtcttttggggtttctgctgatgtactccacagttctttgcagctactacaactcagctctgaccaccgcagtggttggagctatcaagaatgtatctgttgcctacattgggatgttggttggtggagactacattttctccctcttaaactttatagggttaaatatttgcatggcaggtggcttaagatactcctttttaacactgaacagccaattaaaacctaaacaacccgtggatgaagaaagcatgcctctggatctgaagagctagactggaaggcagagttgcaggcttaggctggacaaggcagacccagcaggcgtgggcaacccagagatcccacacctgggacaatcacctgcttggccagagcacaaacaggaatgtctgcaaaatacaaagaaagctacctcacacgtcactgcacaaggagccacaaggcacccaagacacacagcccagaaccttc

SEQ ID NO: 6400 - DNA, 1012 bp, Cricetulus griseus
gctgcgatttccgggagctgcgcggtcgccctccctttcctttgcagtcttgagctcgcagttccagattttggttgctgcgtccttggcttgcgtcagaaaaatggctacaaactttctagtgcatgagaagatctggtttgacaagttcaaatatgatgacgcagaaaggaaattctacgagcagatgaatgggcctgtgactgctggctcccgccaggagaatggtgccagcgtgatcctccgtgacattgcaagagccagagagaacatccagaaatccctggccggaagctcaggccctggggcctccagtggacctggtggagatcatagtgagctcattgtaaggattgccagtctggaagtggagaaccagaatcttcgaggcgtggtacatgatctgcagcagtccatttccaagttggaggtcaggctgaacactctggagaagagttcacctactcacagagccacagcccctcagacgcaacatgtgtctcctatgcgtcaagtggagcccccaaccaagaaggcggccacaccggcagaggatgatgaggacgatgacattgacctgttcggcagtgatgaggaggaagaagataaggaggcagcccgactacgagaggagaggcttcgtcagtatgcagagaagaaagccaagaaaccctcactggtggccaaatcctccatcctcttggatgtcaaaccttgggatgatgagacagatatggcccagctggagacttgtgtacgttccatccaactggacgggctggtctgggggggctccaagctcgtgcctgttggctatggtatccggaagttgcagatccagtgtgtggtggaagatgacaaagtaggcaccgacttgctagaagaggagatcaccaagtttgaggagcatgtgcagagtgttgacatcgcagctttcaacaagatctgaaagtccaagagtgtggttcatgtgtgtgaggacctgctgagattaaagacagactctgcactc

SEQ ID NO: 6401 - DNA, 1012 bp, Cricetulus griseus
cacccactcggctacctccagctggtgagcgaggtggccataagaaccttgccctggaggggctccgggactggtacatccggaattcaggactggccatggggcctcagcgccggcctatgcttccacatgtgggcccaacacatgcacccttcctccatgcccgctgctatgaggtgggccaggcactatacggtcctcccagccaggcaccgctcccgcactcgaggagtttcacagcaccccctgtctccggcaggtatgggggtgcttttactgatgggtagggtattgattcagtgaaggtatcctgaccagggagcacctttctaaagatactacacggacttcctgtatcccccggagctgagcgctcgtttaagtgacctgacgcgtagagggggagcagtcttccagttctgattccccagaccccagggacattggtctgacccttcctgataagccccatgttggtctggggagcacacggtcgacctcgctgagccctgggatgtggttgctcttggtcctgagggacagctgcttgatctcacaggacgcctggcttcttttgggcccaggaggatgtccgatacccctgcttctcttctcatcctgtgctgggggactgaagggccccagctagcttcaaagacccaatcaggaggctatacaagaggatgtcaagaagcagagccatttgagtatgttgcatcctgggatgctgcagtggttaaaactggcaattggtagatgccagcaaaaccctcaggtgacatctggccatgggccacaggccacatcatgtcctccttggtttccttctatttaccactttttaaacaaatccacataagctgtgttttctatattgtctgtgactttctggagctgggggttcccctaccccctttacctggtgttaaattttttttgttaccagtggatctgggcccaagacactattcacactggaaggggatttctataataaatgtataaactagaa

SEQ ID NO: 6402 - DNA, 1012 bp, Cricetulus griseus
accatggcgtgggttccagccgagtctgcggtggaagagttgatgccacggttgttacctgtggagccctgtgacttgacggaaggcttcgatccctcggtgccccccaggacgcctcaggaatacctgaggagggtgcagatcgaagcggctcaatgtccagacgttgtggtagcccaaattgatccgaagaagttgaagaggaagcagagtgtgaatatttctatttcaggatgccagcctgcccctgaaggttattctccaacacttcagtggcagcagcaacaagtggtacagttttcagctgttcgacagagtgtgaacaagcatagaaatcactggaaatctcagcagttggatagcaatgtgacaatgccaaaatctgaagatgaagaaggctggaaaaaattttgtctgggtgaaaggttatatgctgaaggggctattggaccctctacaaatgaaagtcctgggattgattatgtacaaattggttttcctcccttgcttagtattgttagcagaatgaatcaggcaacagttactagtgtcttggaatatctgagtaattggtttggagaaagagattttactccagaattgggaagatggttttatgctttgttggcttgtcttgaaaagcctttactacctgaagctcattcactaattcgacagcttgcaagaagatgctctgaagttaggctcctggtgggcagtaaagatgatgaaagagttcccgctttgaatctgctgatctgcttagttagcaggtattttgaccagcgtgatttagctgatgagccatcttgataaagcctatctcctggggatggaaaatagttcttggaaggcagtctaagtctgagaaagcataatggcaatttgaagacagagtgcatcacttcttcaacaccatgtgaagtgtttcatcttaatctgtaactcaagttgatattcagaatatagacaatattggtttgagtgtctgaaatagctaaggaaaagccca

SEQ ID NO: 6403 - DNA, 1012 bp, Cricetulus griseus
ccgggccagaatgcgttcctgtgttgctatgtagtggaggagtacgttcggtcctgcaaattctggaaggttcttgagttccatcaggacagcggatgcggaattcctggtctccggcctgaggtgcccgctggcggagcagaggcgctgagggcgctgccatgtttggctgcctggtggcggggaggctggtgcaaacagctgcacagcaagtggcagaggataaatttgtttttgacttgcctgattatgaaaatatcaaccatgttgtggtttttatgctgggaacaatcccatttcctgaggggatgggaggatctgtctacttttcctatcctgattcaaatggggtgccagtatggcagctcctgggatttgtcacgaatgggaagccaagtgccatcttcaaaatatcaggtcttaaatctggagaaggaagccaacatccatttggagccatgaatattgtgcgaactccatctgttgctcagattggcatttcggtggaattgttggacagtttggctcagcagactcctgtgggcagtgctgctgtgtcctcggttgactcattcacgcagttcacacagaagatgttggacaacttctacaattttgcttcatcatttgctctctctcaggcccagatgacaccaaatccatctgaaatgttcatcccagcaaatgtggttctgaaatggtatgaaaactttcaaagacgactagcacagaaccctctcttttggaaaacataatttgaataaaatgatttgttatgttatttaaaagcatgaagtcaaaggggtcatgaagcctacctttcaaaactacgtagtgactatgaaacttacataaacccttataaacattagaaacattgagcaaggaaaatgttcaatattaattaccctttccttatatgtgtgaaatacttcttggaggcaaacattttgtatcagctgtcattcatttcttaaaataaatcctactcacagtagttgtatttgaaata

SEQ ID NO: 6404 - DNA, 1011 bp, Cricetulus griseus
ggaagatgccggagcgttaaggagtttgagaagctgaaccgaattggcgagggcacctatggcattgtgtatcgggccagggatacccagacagatgaaattgttgccctgaagaaggtgcggatggacaaagaaaaagatggcattcccatcagcagccttcgtgagatcacattacttttgcgtctccgccatccaaacattgtggagctgaaggaggtggttgtgggcaaccacttggagagcatcttcctggtgatgggttactgtgaacaagatctggccagcctattggaaaatatgccaacacccttctctgaggcccaggttaaatgcatcatgctacaggtgcttcgtggccttcagtacctgcacaggaacttcatcatccacagggacctaaaggtgtccaacttgctcatgactgataagggctgtgtaaagacagccgattttggcctggctcgggcctatggtgttccagtaaagccaatgactcccaaggttgttaccctctggtaccgagccccagagctgctgcttggaactactacccagactaccagcattgacatgtgggctgttggctgcatcctggcagagctgctggcccataagccccttctccctggcacttcggagatccaccagatcgatttgattgtacagctgctggggacgaccgagtgagaatatctggccgggtttctccaagctgccaactggccggccaatacagcttgaggaaacagccctacaacaatctcaagcacaaattcccgtggctctcagaggccggacttcgtctgctcaatttcctcttcatgtatgaccctaagaaaagggcaaccgcgggggactgtctagagagctcctacttcaaagagaaacccctaccctgtgagccggaactcatgcccaccttcccccaccaccgaaataagcgtgctgccccagctgccactgaggggcagaacaaacgatgcaagccctgatggtgggtctagccca

SEQ ID NO: 6405 - DNA, 1011 bp, Cricetulus griseus
ggcaagcatggcgccacctgtgagatactgcatccccggcgaacgtctgtgcaacctggaggaaggcagccccggtagcggcacctacacccggcacggctacatcttttcgtcgctggcgggctgcctgacgaagaccagcgagaatggcgcgcttcctgtggtatctgtgatgagagaaacagagtcacagttacttccagatgtaggagctgttgtcacctgtaaggtctctagcatcaactcacgttttgctaaagtccacatcttgtatgtggggtccacaccactgaaaaacgcttttcgaggaactatccgcaaggaagatatccgagcaactgaaaaagacaaggttgaaatttacaagagtttccgcccgggtgacatagttttggccaaagttatctccctgggtgatgcacagtccaattacctgctgaccactgcggaaaatgagttaggggtagtggtggcccacagtgagtcaggggtccagatggttcccatcagctggtgtgagatgcagtgccctaagacccacactaaagaattccggaaagtggccagagtgcagcctgagttcttacaaacctaagtacgctttagcccaaagacagagtcaactagttccaagaatacaagtatcgaaagaacatcaagatgccatggtctttattaaggtacctctagtcagctagcagttacctcttgaaaaaatgtgccagaagtacatttgtgtggtaatgaatgcccaaggcccgtgcagctgagacaggaagattgttaggtcccaagtgtgagtccgcctgggctccattgtaagactctttcaaccaaaaatacaaaaaagaaaatgtactctatttgaaacattattcttgggaaactgattttctattctcttggctggcgaatctcatttaaaggcatttcgcaaacagaaccatgtaatattggaaatagcttatgccttctttataaatatgtatatatgtattttgctatgactgg

SEQ ID NO: 6406 - DNA, 1011 bp, Cricetulus griseus
cgatctcaagaacaccatggtcatcacacattcctcatggaggaggtggccaaggactaccaggagatgttccaggagtctctgaagaagctgaggaaggagcagcaggaagccgagcggctaaaagctcttatccaagagaagagggagtcctggaagaatcaggtggagcctgagagacaccggatccggacggagtttaagcacctgcggagcatcctggaccgggaggagcagagggaactgaggaaactggaagtagaagagaagaagggtctgagcatcatagagaaagcggagggggacctgatccaccagagtcagtcattgaaagatctcatctcagacctggagcatcggtgccaggggtccacagtggagctgctgcaggatgtgagcgatgtcacaaaaaggagtgagttctggaccctgaggaagcctcaagctctccccaccaagctgaaaagtttgtttcgagccccggatctgaaaaagatgcttcgagtctttcgagagttgacagatgtccaaaactactgggtggacgtgactctgaatccacagacggctaatttaaatcttgtcctatctaaaaaccggagacaggtgaggtttgtgggtgccaagctgtccaagccttcctgtctggaggaacattatgactgtagtgtcctgggctctcagcacttctcctcaggaaaatactactgggaggtggatgtgaccaagaagacagcatggatcctgggtgtgtgcagtaaccaggtggaacccatgttctctttcagccagtatccaggcaagcagagtgcctactccaggtatcagccccagagcggatactgggtgattgggctgcagcataagcatgaatacagagcctatgaggactcctccacctccttgctcctctctatgacagtgccacctcgccgcataggggttttcttagactacgaggctggcactgtatctttttataacgttcacaaccatggcttgcccatctac

SEQ ID NO: 6407 - DNA, 1011 bp, Cricetulus griseus
gggctttgcaaagatggcggctccggaggtgccggagtcagacgtgtcaagttcgataacacttttgaaaaacctccaggagcaggtgatggctgtaactgcacaagtacaagccctgacaaaaaaagttcaagctggtacatactctacagagaagggtctgagcttcttggaagtaaaggaccaactgttgctcatgtaccttatggatctgagccacctcatcctggacaaagcctcgggaggatctctgcagggacaccctgcagtttggaggctggtggaactccgaacggttttagaaaaactccgtcccttggaccaaaaactgaaatatcaaattgacaaactggtcaagactgcagtgacgggcagcctcagtgaaaatgacccacttcgttttaagccccatcccagcaacatgataagcaagttgaactctgaggatgaagaggaagacgaagcagaggaggaccagtctgaggctgcagggaagaaatctgtaaaaggaacatctaagaaatacgtcccaccacgcttggttccagtgcattatgacgaaacagaagcagaacgcgagcaaaaacgcctggaccgggccaagaaacgagcactgagcagctctgtcattcgtgagcttaaggagcaatactcagatgccccggaggaaatccgcgattcccggcaccctcatgtcactcgccagagtcaggaggatcagcataggattaactatgaagagagcatgatggtgcgtttaagtgttagcaaacgagagaaaggacggcgaaagcgagcaagtgttatgagctcgcagcttaattccctcacacacttcagcgacatcagtgctttgacaggaggagctgctcatcttgatgaggaccagaatcctattaaaaagcggaagaagatacctaagaaaggccggaagaagaaaggttttcggaggcgtcggtgaaataataaaattaattatgcttacagtcaaaaaaaaaaaaaaaaaaaaaa

SEQ ID NO: 6408 - DNA, 1010 bp, Cricetulus griseus
tggaagatggatggcccagagacagatttcaaccttaaagtcgtcctgatcagcttcaagcagtgtctcaatgaggaggaagaggtgctgctggaccactatatcaacagctggaaggggctggtcaggtttctgaacagcctgggtgccgtgttctcattcatttccaaggatgtggtctcaaagctgcagataatggagcacctgaggaaaagcccacagtatgaacactacactagcttgcagtccatggtggcctatgaggtgggcaacaagctggtggacctagaccgccgctcccgttcccgataccctaactccggctgccggactgtgctgcgcctgcatcgcgctctgcgctggctacagctgttcctggaaggcctgcgcaccagctctgaggatgctcgtacctcgacactctgcagtgatgcctataatgccacactggctgcctatcacacctggatcgtacgtcaagcggtcactgtggccttctgtgccctgcccacacgcaaggtctttctcgaggccatgaatgtggggtcctctgagcaggcagtggagatgctgggagaggcgctgcccttcattgagcacgtgtatgacatctcccagaaactctacgctgatcactccctgctagacctgccctagcagtcaacatgcccagccaatgtgagtccttcctgtgcccatcttgagcctgaggcatggatcagtgccagacaaacagacctgggcctgcatgcctggggccccttcatattccaaaagctgtccttgggtaagatgaggttccttggccgtggcatgagtactgaagacttccttgcccttcccctgcttccttgtcagcctctgcatatcaaacaggcccttgtctccttggaaatagaaactgtctgaaactgctagctaagacctccctaggaaagcctgctctggtcagtgcagcctgcttcacagcttcttcgatatggtagcatcacccttcagaaagtggcctc

SEQ ID NO: 6409 - DNA, 1010 bp, Cricetulus griseus
caaggagagcatcctgaagacgtagctcccactgttggattttctaaaattgaccttagacaaggaaagtttgaagtcaccatctttgacttgggaggtggaaaaagaattcggggaatttggaagaattattatgctgagtcctatggggtaatatttgttgtggattccagcgatgaagagagaatggaagaaacaaaagagacaatgtcagaagtgctaagacatcctaggatatcaggaaagcctatactggtattggcgaataaacaagacaaggaggcgccttaggagaagccgatgtgatcgaatgtctctctctggagaagctggtcaatgagcacaagtgcctgtgccagatagaaccgaagaaagagaacgagagcaaactgaactggaagggaccagtggttctttaattctacccaattacatgatttgaaagtagtaacggaggagagaattcagttctgttgtcctttaccaaaacttctagagatatatttagtaatggattcataatgtagtattcaattgaaagcatgcctttgtcaaggtgaagattacaaagaacaattctcatgtcaacttgttaggatttggtaccttgtgtgaccatagacatattctggtttctgaaggtaagtccagctaaggtagactgatacgattatttgtctgttaaatgtttataatgcattgtgttcacattttagctcactggacctgggtcaatcaggtcacattgttctagtgagcactggtggtgtttctgtgagtttgtgcatctgccttgcacactgaggaaaaagcattttaatttctatgcaaaacccatatgcagaattagtagttgactcagatatgacagatcataggaacacaggaggcgaaacctgaactgatttagaggcaaaaggctcatccttttgattcattttgtaatatttaaaatcccttttaaaaccaaactcacacttttgctatcttttaacattcatctggtttga

SEQ ID NO: 6410 - DNA, 1010 bp, Cricetulus griseus
ggggaattcatgtggaggtcagcgtgaaagcgggtgtgagtgggtgcaacagaaggaattatggctgccaaagtgtttgagtccatcggaaagttcggcctggctttagcagttgcaggaggcgtggtgaactctgccttatataatgtggatgctgggcacagagctgtcatctttgaccgattccgtggagtacaggacattgtggtaggggaagggactcactttctcatcccttgggtacagaaacctattatctttgactgccgctcacgaccacggaatgtaccagtcatcactggtagcaaagatttgcagaacgtcaacatcacactacgcatcctcttccggccagtggccagccagcttcctcgtatctacaccagcattggtgaggactatgatgagcgggtgctgccatctatcaccacagagatcctcaagtcagtagtggctcgttttgatgctggagaattgatcacccagcgagagttggtctccaggcaggtgagtgatgaccttacagagagagcagcgacgtttgggctcatcctggatgacgtgtccctgacacatctgaccttcgggaaggagttcacagaagcagtggaagccaaacaggtggctcagcaggaagcagagagggccagatttgtggtggaaaaggctgagcagcagaagaaggcagccatcatctctgcagagggtgactccaaggcagccgagctgattgccaactccctggccaccgcaggtgatggcctgattgagctgcgcaagctggaaagccgccgaggacattgcttaccagcctctcgcgctctcgaaacatcacctacctgccagcagggcagtcggtgctcctccagcttacccagtgaggcctccactgcttgcaccttctcaggctaaccaggctgtggcctcgatcattctgaatacactttccttctgccctgccccagaaatcactgtgaaatttcatgattggcttaacatgaaggaaataa

SEQ ID NO: 6411 - DNA, 1010 bp, Cricetulus griseus
cttgtctgttctttattctgggtgctgtgatcctgggctttggagtgtggatcatcgcagacaagagcagcttcgtttctgtccttcaaacttcgtccagctcgctgcaggttggggcctatgtcttcatcggtgtgggtgccatcaccatgctcatggggctcctgggctgcatcggtgctgtcaatgaggtccgctgcttgctggggctgtactttgtgttccttctgctcatcctcattgcacaggtgactgtaggggtcctcttctacttcaatgctggcaagctgaagcaggaggtgggcagcatggtgatggacatcattcagaactataagacgaatgccagcagcagccgtgaggaggcttgggactatgtgcaggcgcaggtgaaatgctgtggctgggccagcttctacaactggacagataacttggagctcaggaactctacagagaacatttacccctgctcctgcgaggagacaatggaagaggacaaccagtacattgtgaagaaggggttctgcaaggtctccaacagcagctcggatgcaatcttccatgaagagtggcctgtgtacaaggaggggtgtatgaagaaggtgcagatgtggcttcaggagaacctcggcatcctcctgggcgtgtgtgttggtgttgctgtcattgagctgctggggttgttcctgtccatctgtttgtgccggcacattcattctgaagactacagcaaggtccccaagtactgagctgctgacgtcctctctgtgctgtgtctctccaccctcagtatcccatgggacctctctgactccttcccccatggcctgtgctccatccaccactaaggtctctggcccatcctgagcaggtcatagcggggactttctgggcctggacccttctcccttcctctctgctgttagtatgaagcccccgctgtcctgtggcttactgtctaggggggtctcttaacagctttaaatggctcccagtgttactgtaca

SEQ ID NO: 6412 - DNA, 1009 bp, Cricetulus griseus
cagcttctaagcagtttaacaacgaggtcctgaaggcccacaacgagtaccgggctcagcacggtgtccccccactcaagctttgcaagaagctcaaccaggaagcccagcagtattcagaggccctggctagcacaagaatcctcaagcacagcccagagtccagtcgtggctagtgtggggagaaccttgcgtgggcatcctacgaccaaacaggaaaggaagtggctgatcgttggtacagtgaaatcaagaattacaacttccagcagcctggcttcacctcggggacaggacacttcacagccattcctttaaatgtgacataaagcagcttgccttagagatacgtcactagctccatttcacagagtcagtgagatttcttgttctcagttggaaaagacatgatatcatcccacatcctctgggattccctaatggaattgccaaagagcaaatggagaaggaaaaaagccttacttccttgcggtcttaccctgtaaagagcaaataccacagccacgagcacctttcacacctcatgcttacagccttacatctggcttctgggggcagggggctaggtctggaatgcagtcctgccccccactctcatctcactggaccctcacactgcctgggctttgggccaagactttggactatgaagtcagtggtgtaggggagagggtgagcccatttggggaccctggaggaaacccgacagcctctgcccttccccaacccagcaggcagtgaccacccagccttgtcccctgcagctgtagctgcagctgagctgtgactccctcctggaatgtgtgacaagcccaaatgctcccgggaagaggcccaaacagggagattaggaacgctaatttgattctgtgttttgcctcagacgatacacagttctctctgaatagctgtttaaccaggtccccttgggagggaccaagctagaggtccagttgagtgtccctgaaatgacggcatctcctcctgc

SEQ ID NO: 6413 - DNA, 1009 bp, Cricetulus griseus
agtggtgacactatacccatacacccgacagaaggacaatgagctctccttctctgaaggcactgtcatctgtgtcacccgccgctactctgaccggctggtgtgagggagtcagctcagagggcactggattcttcccagggaactatgtggagcccagctgcggacagcccagatctatccctgcaccaacccagcactgcctcagtgggactcttgagtcccaagaagccagcgccacagtcaaggctgcactaaggacctgtctacctcttgggctgtgaactgtgttcagcacctgctccacacagcagcgtaggggaggggcagagagaggtggtacccaggaacctccgctcccagcccacaaagcggacaaaattccagaaatgcccagaggagcgtagcaaagcgaaggggaagaaggaagaaaccaggtggtcttaagcaattcccaatccctgccctgtctccgccgccggctctccccgagttcccctggcaggtgatggtcttcaatacatcttcagcacctgttgcaggtgttggcgcacctcggcggccgtttcccagggcaccacgtgagcgcggaaggagctgggctcagccttctgtgcctcctggatgaggcggtgcatggggtagccgcgccttgggaaggccacgtccccgcttgccagcagccccaaggggcagaagtcattcgcaccgtctcccacgtagaataggcgctcgaagtgcacgccgtcgcgggcccgctcacgcaggtattcactgagcaccttgtgcttgcacatgttggcggggcagcgcgagcagctgtgcgtgtggaaggccgcaggcgtcagcagtcctcgagcggtcgggcccggccgggttgctcacccaggtacttgaagacgcgttgctatgtattcattgtagtagccctcgcggtaggtggcacgcaggctctcaggtagttgcttggccgggcgcagcgcgcacgatcgagtcgtcgctgttttcg

SEQ ID NO: 6414 - DNA, 1008 bp, Cricetulus griseus
tccgcttgagtgtgtgaattactaaactttagaagttgcagtcccgaagcctcacaggtttggtgaacatgctttgtgcttttctacgagttgtgcagcgtgtggagaagctgccccgttccttgggcaagcaattgttgccacactttgtgctcaccagagcttgcttgcagacccagcctttgagatgggggctgctagagcagaagaaaacagtacatcctagaactgctattgggttcgcccagaaaaccttctggacacaagggccggacccccagaaagcaaaggaggacagcagcaagcaagtgtctattcacagaaatcagagaggggaaaccagcgtctcaacttctcagaaagtgaaggaagccggaagagacttcacctacttgatagtggtgctcttcggagtcagcattacaggtggcttgttctacacgattttcaaagaactgttttcttcatccagtcctaacatcatatatgggaaagccctagaaaaatgcagaatgcaccctgaggtgatcagtgtgtttggggagcctgtcaaaggctacggggaaatgtcgagacgtgggcggagacagcatgtcagttttattgaatatgaaaaaaacgggctaaagcgcatccgtgtgaaattctacattgagggctctgaaccagggaagcacggaacagtgcatgtggaagtggaagagcacccacagagtggccaatttgaatttcgatacgtatttgtggaagtggctcctactagatctattgtcgttgaagataatcgttcccaaaagagttaaaagaatcaaacctgcctgctgcttcctgtaggggataaagggattcattgccactgtgatcttcacaactctctttcagaaactctaaaaataagaataaaaagtatgtcacacagaaagtgagtataacgtgagagttcatgagtatgaacaaaccagactgaggtttttctgtgaaaaatcatgaaatgtagcaaattttaca

SEQ ID NO: 6415 - DNA, 1008 bp, Cricetulus griseus
ccttcccaagtgacagtgccgtggagtggaagaaactctttaagccatgtgcttcccagaggctgttcttgccgttaatcctgaaagaagttgattcactgctatatgttgacactgacattccttttcttacgacctgttgatgattatttggtcattaactaaaagaaatttaattccacacaaattgctgcgatcggccccagaacacgcggctgcaatggggagacatacttatgccactgcttaaaaaatacaaactgaacatcacatggggtgatcaagatctgttaaatatcatgtttttccataatccagaaagcctgtttgtttttccgtgccaatggaattatcgaccagatcactgtatctatgcaagcaactgccgagaagcagaagaggaaggagtcttcattcttcatggaaacagaggtgtttaccatgatgacaagcagccagcatttagagctatgtatgaagcactaagaaattgttgtgtgtgttatgtgtgtgtgtgtgtgtgtctgtgttagaaagatggttaagttgccttttcaaacaatgtttttggtttcttggaatatatagaagaaaaataaagtgtgcaatatgtcatgtgtggggccagttatccatttattaggtgtaatttcaagcgtcttaagtaataattgccttactacattttaatatttaatggaggtagactaagatgactagtatcgcagtagtcatctttttctacattgccaaagcagcccttcttgtcctctaaagcctgtctaacttgttctgatgtttgttggtttttttaattcattgaagataaaactagatttaaaaaagctaagttatatagatttaagacagttgtctaaaaactgttataaagattgaaactgggcatgctagcacatggcctgttacccaacacttgggaaactaaggtacattcaaggccagtatggcctttgttgagatcttatcgcaaaaagaccaaaaaaaaaa

SEQ ID NO: 6416 - DNA, 1008 bp, Cricetulus griseus
gcctcagcttcggcttcgcctctccgcctcggcatttgtgtgcgggttgcggagctcccgcgaccccaaaacactcgggcgcgggcggcgtggcggggctgtggagctgcgccatgtccgcgtcggcgtggtgttgcctgcgttgctgcagggacggcgggaccggccacattcctctcaaggagatgccggccgtacagctggacacgcagcacatgggaacagatgttgtcattgtgaagaatggaagaagaatctgtggcactggaggttgtttagccagtgcacctttacatcagaacaaaagctactttgagttcaaaatccagtctactggaatctggggtataggtgttgcaactcagaaagttaacttgaaccagattcctcttggccgagacatgcacagtttggtgatgagaaatgatggagccctataccacaacaacgaagaaaaaaacaggctgccagcaaacaaccttcctcaggaaggagatgtagtgggtatcacgtatgaccatgtagaattaaatgtgtatttgaatggaaaaaacatgcattgtccagcatcaggtatacgagggacagtgtatccagttgtatatgttgatgacagtgcaattttggattgccagttcagtgaattttatcatactcctccacctggttttgaaaaaatattatttgagcagcagatcttctgagtgtgtttgttttcaaaacttgcacttctgcaccattacacaagtgtttgcctcttaataaagctctcccttatctagacatgagaacacattctgaaaattgctcttcttattgttgtctaaggaacccatgtattcattataccataatgtagtttggtttaaaatagctgggcaacttatttaatcttatttaaacaaacaaaccatggttttgattaacagtattacatgctaacatgtatataaatatttaaagggaattttcttatataaagtatttgtttgacagtgatgtgtaatt

SEQ ID NO: 6417 - DNA, 1008 bp, Cricetulus griseus
tcttgctgcatcaagtggaggcgcttgccgcggcaggtgtggaccacgtgatcttggcagtgagctacatgtcacagatgttggaaaaggaaatgaaggcacaggagcaaaggcttggaatccgaatctccatgtctcatgaagaggagcctttggggacagctgggcctctggcattggcccgagacctactctctgagaccgaagaccctttcttcgttctcaacagtgatgtgatctgtgattttcccttccaagccatggtgcagttccatcgacaccatggccaagaggctccatcttggtaaccaaggtggaggagccttccaagtatggtgtggtggtttgtgaggctgacacaggccgcattcaccgttttgttgagaagccgcaggtattcgtgtccaataagatcaatgcaggcatgtacatcctgagcccctctgtgctgcagcgtatccagctgaagcctacatccattgagaaggaggtcttcccagttatggcccaggaggggcagctatatgccatggaacttcctggcttctggatggacattggacagcccaaggacttcctcactggcatgtgcctcttcctgcagtccctgagacagaagcacccagagagactgtgttcaggccctggcattgtggggaatgtgcttgtggacccaagcgcccgtattggtcagaactgcagcattggccccaatgtgagtctgggtcccggtgtggtggtggaggacggcgtgtgtgtccggcggtgcacggtgcttcgggatgcgcacatccgctcccactcctggcttgagtcgtgcatcgtgggctggcgctgccgtgtgggtcagtgggtgcgcatggagaacgtaacagtgctgggcgaggatgtcattgtcagtgatgaactctacctcaatggagccagcgtgctgccccacaagtctatcggggagtcggtgccggagcctcgtattatcatgtgaaggatatgcagggctggccaagc

SEQ ID NO: 6418 - DNA, 1008 bp, Cricetulus griseus
  modified_base (992)..(992): a, c, t, g, unknown or other
cactcgctgcggtatttctccaccatcgtctcccggcccggcctcggggagccccggttcatctatgtcggctacgtggacgacaggcagatcgtgcgctacgacagcgacgccgagaatccgaggatggagccgcgggcgccgtggatggagcgggaggggccggggtattgggaaagggagacgcggaaagccaaggacacagggaagaacttcagatcgaacctcaagaccctgctcggctactacaaccagagtgacgatgaacctcacacgctgcagtggatgtacgggtgcgacgtcgggccggacgggcgcctgctccgcgggtattgtcaggaggcctacgacggccacgattacatctccttaaacgaggacctgcgctcctggaccgcaaatgacctggcctctcagatctctaagcagaagtcagagaacgtagacgaggcccaccaccagagggcctacctgcagggcccgtgcatagagtggctgctgaagtacctggagttggggaagtcgactctgctgctctcagaccccccaaaggcatatgtgacccatcatcctggatataaaggtgatgtcaccctgaggtgctgggccatgggcttctaccctgctgacatcaccctgacctggcagagggaggaggaagaacagactcaggacatggagctggtggagaccagaccttctggggatggaaccttccagaagtgggcagctgtggtggtgccttctggggaggagcagaaatacacatgccatgtgtaccatgaggggctgcctgagcccctcaccctgagatgggagcctcctcctcagtccactgtccccatcatggcagtcattgctgctctggttctccttggagctgtgatcattggagctgtggtgttttttgtgaggaagaggagaaactcaggtggaaaaggaggctatgaccattttgtaggcagatataataaataaataaataaataaanaaaaaaaaaaaaaaat

SEQ ID NO: 6419 - DNA, 1008 bp, Cricetulus griseus
tgagttccttgattatgtcaatgcccccattgggaaggggaagccagtgactgtgcctctgaaacctctgattgcagttccaaccacctcaggaaccggcagtgagacaacaggggttgccatttttgactatgaacatatgaaagtaaaaactggcattgcttcacgagccatcaaacccacactgggactagttgatcctctgcacactctacacatgccttgtcaggtggttgccaacagtggctttgatgtcctttgccacgctctggagtcatacacagccattccctataacatgcggagtccctgcccttccaaccccatccaacgaccagcctaccaggggagggctgtcaaaatcctgatgatctggaagcaaggtctagtatgcacttggcaagtgctttcgctggcatcggctttggaaatgctggtgttcatctgtgccatggcatgtcttacccaatttcaggtttagtgaagacatataaagccaaggaatacaatgtggatcaccctctggtgccccatggcctctctgtggtgctcacatctccagcagtgttcactttcacagcccagatgtttccagagcggcacctggagacagcagaaatattaggagccgacatccgcactgccaggacccaagatgctggacctgtgttggcagatactctccgacaattcctgtttgacctaaaagttgacgacggtcttggtgccctcggttactccaaggatgacatcccttcacttggtgaaagggacactgccccaggaaagggtcaccaaacttgcaccccgtgcccaatcagaagaggacttgtctgccttgttcgaagcatcaatgaaactgtactaactgacagcagaaacgatcactgttgcctttgtagcagaagttacaggtagcagaagtgggtcaggctcgcctttgtcttttgtctccacacttaattcaactgctgctggtttgaatgtgatatgattgtatccttggaa

SEQ ID NO: 6420 - DNA, 1007 bp, Cricetulus griseus
cccctggctccccctgcgggtggcttggcggtgtgcacagtcccgcctgctggctggcggggtgccacggttcgggaagcatgacgaccgagaccttcgtgaaggatatcaagcccgggctcaagaatctgaaccttatcttcattgtgctggagacaggccgagtgacaaagacaaaggacgggcacgaggttcggacctgtaaagtagcagacaaaacgggcagcatcaatatctcagtgtgggacgacgtgggcaaccttatccagcctggggacattatccgactcaccaaagggtatgcctcagtgttcaaaggttgtctgacactatacactggccgtgggggtgacctacagaagattggagaattctgcatggtttattctgaagttcctaatttcagcgagcccaatccagagtataacactcagcaggcacccaacaaatcggtgcagagtgacagcagccctgccacccctcaagccaccacaggacctcctgctgcctctccagcttctgaaagccaaaacgggaacggaccaagcacccaaccgggccctggcggtggcccccatccctctcacactgcctcacatgcccccagcacccgaatcactcgaagccaaccaaaccacacaccttctggcccccctggcccctccagcaaccctgtcagtaacggcaaagaaacccgcaggagcagcaagagatagcaagagacaagtcctctcccttccaccacgaccagaccaggtgtctgcccgagaacaagacagtctcctactgggcttctggccttgagattggagggtggagtagcttgtcctgctgacgttgcctgtcccctgggatccagggccctctgcctgccctccttcctctggaaaagacagtctgtttgtgtgtgggggtgggggataggagggtctccttcctaataaatgtccccactcaaaaaaaaaaaaaaaaaaaaaaaaaaaaaaaaaaaaaaaaaaaaaaaaaaa

SEQ ID NO: 6421 - DNA, 1007 bp, Cricetulus griseus
agccattcacagatccaaaaggaaagtcctcggccgcaaagactcagaagacgatcacacccgaaaccactctccctccccgccagtgacacccacgggtgcagcacctagcctggcctctccaaagcaagtaggttctattcagagaagcatgaaaagagtgctaccagcagtgacaacttcaaagctctgctgctaaagaagggcagtcgctcggacaccagcgctcgcatgtccgcagcagagatgctcaagtcgaagagttagggtcagaacctgcctctcttgagtgaggttggagggaaatgcatcactcggaagtctatgtggccttttccttggcttgtggggaccccactcagcattggtgatggggaggtctcagccttgcaggtcacttaggactcactcgccatgtggcttaaaagcaagtagaagcttcaacttctgaaagtgcttcctggggaagatttttgtttgttggttggcttgcttgttggtttttcccaaaaatgccaggtgtgtgtatatgtgtgcattttgaacactttattctaacacatacacacactaacattgtgtatagaaataggagaagtcagagttaaggtagatagagtcatgaagacttctggaccgtggtggtaactgctttcaatgcattatgggtatgggaatgagtaagttcaacaaccacaaatgatgacttgacatgtggccacagggatttttttcttttaatcctttgggttaattttcaactacatgggggcacacagatcattttttgtaaatcttaggaaggtcatattgagttttgcatacctaaaaaattagaatgtatgtggctatcagaaatcttgaaattaatatatcaatatttgtttgagggcaagatgaggagcactagaactaattataaaatgatttaaaatccccattttaaagatatttattaggttttaagtttgctttgaataaaacaattgtaaagtcagtatttgaaa

SEQ ID NO: 6422 - DNA, 1007 bp, Cricetulus griseus
gctgaggcgccatggcggccacgttcttcggtgaggtggtgaaggcgccgtgccgagccgggacggaggaggaggaagaggaggaagagcagaacaggcgggacacgccggaggaccgcgaggtccggcggcggctggcgcggaagagggaggtgaagcttctccaaagacagacaaaaactcctctggaggttgccctgctagaaaagcagtcctgctccgagtttataattgctgtggggagtaacgcagcagcgtttttgtcatcgtttgtcatgaattcaggagtctggaaagaggtcggctgtgctaagctctggaatgagtggtgcagaacagcagacactgtccatctgtcccccacagacgctttctgtgtgttttatcagctgaaatcaaatccctcggtttttctttgtcagtgtagttgctacattgctgaagatcaacagttccagtggctggaaaaggtctttggctcccatcccaggaagaacatgctggtaaccattctcacgtgccgacacgtcacagagtataaaacctctgagtctacctgcagccttccttctcctttcctgagagccctaaagactcagaagttcaaggaccctgtctgctgcccactgctggaacagccgaacattgtgcacgacctgcctgcagcagttctgagctactgtcaagtgtggagaatccccgcagttctgtatctgtgctacacggatgtgatgaagttggacctggtcaccgtggaagcttttaagcctgtgctgtcttccagtagcttggagtgcttggtgaagaacattcccgaaagcacagaaatactgaagaaattgatgacaacaaatgagattcagagcaacatttacacgtgaccgcaaaggcctgcccgttccaggggcagccactactgttttgtactttactctggcttgggggtgtgataaaccaataaaaattttaaaaatttaaaaaaaaaaaaaaaaaaaaaaaaaaaaaaa

SEQ ID NO: 6423 - DNA, 1007 bp, Cricetulus griseus
agagtcaacttctggtccgtggttaatttgatggtcatggtggttgtgtcagctattcaggtctatatgctgaaaagtttatttgaagataagaggaaaagtagaacttaaaactccaacaagattacttaacattgaaataaacaagaagcagcacattctaatacactgttacaatcaaggtcattaacagtcttttccataacattttcagaaaataagtgtaagatatgtaaaatttaatataaaaggaaaatcctcattttatgtccagataactttattgacccagttataaacttaagtgtataactaaatatcatataaaatttagacttagttgaatgaagccatattagctatttttctatgctcaaaaatatttcccaaatatcatatgaattacatgaatgaacgtattcataaacacaccaccactttgctttcacccagagctttctctgtaaatgtggcaggtacaagtggtgaaacacgcctttaatcccagcacttgggaggcagaggcaggtggatatctgagttcaaggccagcctggtctacagagtgagttccaggacagccaaggctatgcagagaaaccctgtcttgaaaaaacaaaaataaaaataaaaataaacaaaaaaaaaaaaaaaaagaaaaaagcaaaaaaaaaaaaaaagttgggggaagacagaaatttatttttccctaatcagaggcttttcaaaatcagttacttcctaccatttaaaatggttaataatatctttattggaaaaagtaatttaggactgttaaagattttatttttatagacagaagtaaaaaaaaaaggtattaagaaccatgttgcctgtattaatcgtaaaaaagtaaaattgtaagcaaaaaaaacaaaatgtttatttttaaatgtgtattatctgcttcatgagccttttgatgttattttctcaattacgctaaaatcaagtaagccatcacttgatctgacttttatcttgtt

SEQ ID NO: 6424 - DNA, 1007 bp, Cricetulus griseus
gtggaaatggggaagatggtaccaaccctagccgtggcaaccctagaggatacgaaacccttgaggaaacccagggccaggtgggccctgagggaagagccacagtgtggtcagcacgaggctagtgacctgggtgcaaagatggccagagacacaggggaagcctggccgccaaagccggccccacctgacacacaccctctcaagaccccagaggacagcggcctagagaaacccagcgagaaggttgccctggaaagtggcgaggaggggctggtccccgatggtgaaacgggcaagaagacgtacaaatgcgaacagtgtggcaagggcttcagctggcgctcgcacctggtgacacaccggcgcacacacacgggtgagaagccctacacctgcaccgactgcgggaagcgcttcggccgcagctcacacctcatccagcaccagatcatccacacaggcgaaaagccctacacttgcccttcgtgttggaagagcttcagccatcactccacgctgatccagcaccagcgtatccacactggtgagaagccctacgtgtgcgaccgctgcgccaagcgtttcacccgccgctcggacctagtcacacaccagggcactcacaccggcgccaagccgcacaagtgccctatctgcggcaagtgcttcacgcagagctccgccctggtcacgcaccagcgcacccacaccggcgtcaagccctacccatgccccgagtgcggcaagtgtttcagccagcgctccaacctcatcgcgcacaatcgcactcatactggcgagaagccctaccactgcctggactgcggcaagagcttcagccacagctcgcacctcactgcccaccagcgcacacaccgcggtgtgcggccctattcctgcccgctgtgcggcaagagcttcagccgccgctccaacctgcaccggcatgagaagattcacaccaccgggcccaaggccctggccatgctcatgctgggggcggc

SEQ ID NO: 6425 - DNA, 1006 bp, Cricetulus griseus
tgcaggtctgtgtggagccgcggttgcgggtgtctgttccgcaggatggggttcgtgaaagttgtcaagaataaggcctacttcaagaggtaccaagtgagatttagaaggcggcgagagggtaaaactgactactatgctcggaaacgattggtgatccaggacaaaaataagtacaacacacccaaatacaggatgatagttcgtgtaactaacagagatatcatctgtcagattgcctatgcccgtatagaaggggacatgatagtctgcgcagcatatgcacacgaactgccaaaatacggggtcaaagttggcctgacaaattatgctgcagcctattgcaccggcctgctgctggcccgcaggcttctcaataggtttggtatggacaagatctatgaaggccaagtggaggtgactggagacgaatacaatgttgagagcatcgatggccagcctggtgccttcacctgctatttggatgcaggtcttgcccgaactacaactggcaataaagtttttggggccctgaagggagctgtggatggaggcttgtctattcctcatagtaccaaacgattccctggttatgattctgaaagcaaggagttcaatgcagaagttcatcggaagcatatcatgggacagaatgtcgcagactacatgcgctacctaatggaggaagatgaagatgcgtacaagaaacagttctcccagtacataaagaacaacgttactccagacatgatggaggagatgtataagaaagctcacgctgctatccgagagaatccagtctatgagaagaagcccaagagagaggtgaagaagaagaggtggaaccgtcccaaaatgtctttggcccagaagaaagatcgggttgctcaaaagaaggcaagcttcctcagagctcaagaacgggctgctgagagctaaagcaattttctatgaagattttttcataaagataataaacttattgaccaagcaaaaaaaaaaaaaa

SEQ ID NO: 6426 - DNA, 1006 bp, Cricetulus griseus
gggaacaagcccggctgaagacgcgcgtggtgcccagggacacggaggcctggcagcgggaccccgccttcccgggcctgcggagggtcgggggcgtggacgtgtccttcgtcccgggggacagttcccgggcctgcgcgtccctcgtggtgctgagctacccagagctccaggtggtgtatgaggacagccacatggttcgcctgaaggccccttatgtgtcaggcttcctggccttccgagaggtacccttcctggtggagttggtacagcggttgcaggagaaggagccaggcctcatgccccaggtcctgcttgtggatggaaacgggtgcttcaccaacgaggctttggggtggcctgccaccttggtgtccttacagatctgccctgcgtcgggtgccaagaagctcctgcaggtggatgggctggagaacaactccctgcacaaggagaagatagtgctcctggagacacgtttcctctgatgggcaactctgggactgtcctgggaatggccctgaagagccatgaccacagcaccaagcccctctatgtctctgtgggccacagaataaccagaaggagcagaggccaaaggcatgtcccaaaggaggctcaggagcacctgcaggtccaggcaggccacccgaggactgtggcagagactccagcacagaacctgaaagacccccagccaggcttccaagagcagcagaaggaccagcagtcagagggaactgggcctcataaagactcagacctctggcctcctcctgcagcccgggtacagtcaccaccctgagaagatgatctctaattgctgtgggaacttcacccacaccacaggcagagcactgagcctcggagacaacagtggcctgaaccccaggaggacgcagcaggcataggtctaagcttgggccaatggctgcccagcctcctccatcactggctggcccagtgtagtcaccatcgccccagacatacacactctctctctctc

SEQ ID NO: 6427 - DNA, 1006 bp, Cricetulus griseus
  modified_base (823)..(823): a, c, t, g, unknown or other
caactaccagctctgcgctggaatcagctaccagttcagcccacagtggtgcctcttctatgactaatagttctgaaccagactttggagaccactccagtttacagtggcacctctatctctactaccaaggctactttagcctctgccatcaccccagtctacaatggctccttggtgccaactaccagctctgtgttgggctctagccaccactccgatcagtataacatctctacaatggctactacaactccagttggcaatggtactcaatcttcagtcccaagccagcaccctgtctccagcaacagtaccattgcctatagcacttaccacagcacggcactctcccctaccttctccagcaatagttcaccccaggtgtctgttggagtctctttcttcttgttgtcttttcacatttggaaccaccagtttaattcttccctggaagatcccagctccaactactatcaagaactgaagaggaacatttctgcattgtttctgcagatttttaaccaagcttttctggggatctctactatcgagttcaggtcaggttcagtggtggtagactcaactgtgattttccgggagggtgaggcagaagtctataatctggctattcaaaaatcaatgtgaatgagatgcagttttcttcctctgcccagtcttggcctggggtaccaggctggggcatagccctactggtgctggtctgtattttggttgctttggccatcatctatctcattgcactgacagtgtgtcagtgccgccgaaagaactatggacagctggacatcttcccaacccnggacaccttaccatcctatgagtgaataccctacctaccacactcatggacgctatgtgccccctggcagtaccaaacgtagcccctatcgaggaggtttctgcaggtaatggcggcagcagcctctcttacaccaacccagtagtggcaaccacttcagccaacttgtagggcaagtcaccc

SEQ ID NO: 6428 - DNA, 1006 bp, Cricetulus griseus
gccaacataaagatgagtaacacggacattgccgagaacctctatcagaaagttaaaattctttgttgggttatgacaagtcctcaaaatctagagaaaaaggccaaacatgtcaaagctacatgggcccagcgttgtaataaagtgttatttatgagttcagaagaaaatcaagacttccctactgtgggattgaaaccaagaaggcagagagcaactatactggaaaacatcaaagcctttcagtatgtgcatgaccattatttggaagatgctgatggtttatgaaagcagatgatgacacatacgtcatagtggacaatctgagatggcttctatcgaggtataaccctgaacagcccatttactttgggaggagatttaagccctatgtgaagcagggctacatgagtggaggggcagggtatgtactcagcaaagaagccttgagaagattcgttgatgcatttaaaacagagaaatgtacgcatagctcctccatcgaagacttagcactgggaaggtgcatggaaattataaatgtagaagctggagactccagagataccactgggaaagaaactttccacccatttgtcccagagcaccacttaatcaaaggttatctgccgaaaacattttggtactggaattacaactattatcctcctgtagagggtcctggttgctagttctgatatagcagtttcttttcactaacagtgtgtgttgttgtcactaaagctggagtggttcagtttgtaatcacctactgcactgcactgcactgttagaacacaatgctgaacaaatctgccttaaaactagaaagaaatactgttgctcaatatacactctgctcatgtgtagatgatacaaaccagcctcccagttgccgaatgaaaacttttctgtgattatattacttacaattggcagtgtttcctcaagaagtagaataagaatgacaccctgaagatcactaataaaccacattttccaatta

SEQ ID NO: 6429 - DNA, 1006 bp, Cricetulus griseus
gagccaatggacgaccgggggcgggcagggcaggcgcgggcggcggcgccgagacgagcgcgggtggagggcgcggaccgatcgagcgcaccgaccatggcctccaagtgtcccaagtgtgacaagaccgtgtacttcgctgagaaggtgagctctctgggcaaggactggcacaagttctgtctcaagtgtgagcgctgcaacaagacgctgacccccggggccacgctgagcatgatgggaagcctttctgccacaagccctgctatgccacactgtttggacccaaaggtgtgaatatagggggcgctggttcctacatctacgagaagcctctgactgagggccctcagatcaccggccccatcgaggtccctgtggtgcgaaccgaggagcggaaggccagcggaccccccaagggtcccagcaaagcctcgagcgtcaccacattcactggggaacccaatatgtgtcctcgatgcaacaagagggtgtactttgctgagaaggtgacctctctgggcaaggactggcaccggccctgcttgcgctgtgagcgctgctccaagacactgacccctggcgggcatgctgagcatgacggccagccctactgccacaagccttgctatggaattctctttggacccaagggagtgaacaccggtgctgtgggaagctatatctatgacaaggaccctgaaggcacagttcagccctagatctgcagatgctgtcctcagggtcgcctacgggaccctgagggaaaacgacccgctgcctagccctgcctcagtgtgtcttgcctgcaaacctgggggcctgagtgcctgtgttcccatgttcccgatagcttcttccgaggtggcgctcctatgatatccctgttgcccacacatgcccaccagtattatttatgctctgcttgccggtgatggccatgagctcacagcattcccagggtgcacgtggttcacagctacggagacttttgctgtcaataaat

SEQ ID NO: 6430 - DNA, 1005 bp, Cricetulus griseus
atttatttttctctctttgagctgggtcttgcccctttctgcggccatgatggcccagtccaaggccaacggctcacactacgcactgacggccatcggcctggggatgctggtcctcggggtgatcatggccatgtggaacctagtccctggtttcagcgctgcagagaagccaacagctcagggcaacaagacagagggaggtggtggcatcctcaagagcaagactttctcagtggcgtatgtgctggtcggcgctggcgtgatgctgctgctgctgtccatctgtctgagcatccgggacaagaggaagcttcggcagaatgaggaactggcccgcatccaacagcaggccggagctgtgcctcccacgcaggaggaagacagccaggaggaggaggaggaggaggcttcctcacggtactatgtacccagctacgaggaagtgatgaacacaggctactcggaaaccagggggcaggagcagaacccgagactaagcatctctctcccctcctatgagtcgttgacggggctcgacgagacaacccccacgggcaccagggctgacacagaggccagcccagggcatgctccggacaggcaaaactccaagctggccaaacgcctgaaaccactcaaagttcgaaggatcaaatctgaaaaacttcacctcaaagacttcaggatcaacctcccagacaagaatattcctcctccctctattgagcctttgactcctcctccgcagtatgacgaggtccagtcgaaggcccctgatgcccggcctcccgactgaacggcccttctgacttcaccccctcctgtctcaccctccacaccgacagactgcaccgaagtcacttcagccccagacaaggggtcagggcacacttagccactgtgatggggattctgggtagagggagtgaccaagggtgtttcacagagcctcacgtagcgggagcatcagaaggatgctgggagcttgtgatactctggacc

SEQ ID NO: 6431 - DNA, 1005 bp, Cricetulus griseus
  modified_base (984)..(984): a, c, t, g, unknown or other
ttactgtgcatcagagtatccacactaatgtgaaacctttcaagtgtaaactctgtggggcagccttcagacttcagtctctacttacccaacatcacagaattcataccgatgagagaccttaccattgcaaagaatgtgggaaaaacttccgtcgacgttcaaattttactgagcatcagagtatccactctggaaagaaaccctttgagtgtaagcaatgtgggaaagtcttcagacttaatatccatctcattcgccaccagagatttcatagtggcgagagagcttttgaatgtacggagtgtggagaggcctttcagtcttccagcccaccttaagaaccataaaacaattcatacaaaccaaaaaccgtttgaatgtgaggaatgtgggaagtccttcaagagagcctccacccttgtccaacataggaacattcatgctggtgtgaaaccatatgaatgcaacgagtgtgggaaagcctttaatcggcgctcaaacctcacacaacatcagaaaattcactctggagagagaccctttcagtgcaagcagtgtgggaaggccttcactgttctggcacagctcactcgccaccagaacattcatactggaaagaagtcttttgagtgtgagcagtgtgggtcagaacttacccaacatcagagaactcatactgatatcaaaccctaccagtgcaagcaatgtggaaagggctttgctcgtggtagaggacttcgacttcacgagaaaatccacactggtgagaagccctttcggtgttcagaatgcaggcaaacctttcgatatcattaccaatttcttggacatgttagaatgcatgctggcaagaatccttatgaatgaaagaatgtgggagctacgttactcgtgatggataccttaaagcacatcagagaatccacactggtgaggaaccttaccaatgttaaaatgttcctaaaaaaacaaaaaaaaaanaaaaaaaaaaaaaaaaaaaaa

SEQ ID NO: 6432 - DNA, 1005 bp, Cricetulus griseus
tcattcctactacgtgtacatatagtagagatgggaaccttgtggcagctgcttgtcagaacggaagcatccagatctgggatcgaaacttgacagttcaccctaaattccactataaacaggctcatgaccctggcacagacacttcttgtgtggctttttcctatgatggtaatgtccttgcctctcgtggaggtgatgatacattaaaaattatgggatgtccgacaatttaataagccattattttcagcctcagaccttcccaccttgtttccaatgaccgactgctgtttcagtcctgacgataaactcatagtcacgggtacctctgttcagaggggatgtggcaacggcaaacttgtcttctttgagcgcaggactttccaaagggtgtatgaaattgacatcacggatgcgagtgttgtccgatgcctgtggcatccaaagctgaaccagatcatggttggaactggaaatggattggcaaaagtgtactacgaccccaacaaaagtcagaggggagcaaaattatgtgtggttaaaacccagcggaaggcaaaacaagctgagacactaacccaggactacatcattacccctcatgccttgcccatgttccgtgagccccgccaacgaagtacgaggaaacagctggagaaggacagactggaccccctgaagtcgcacaagccagaacctcctgtagcaggcccaggtcgtggtggccgagttggaacccatgggggcaccctgtcatcctacattgtgaaaaatattgctttggacaaaactgatgacagtaatcccagagaagccattttgcgtcatgccaaagcagcagaagataacccatattgggtgtcgccagcatattccaaaactcagcccaaaaccatgtttgcccaagtggaatctgatgatgaagaatcaaagaatgagcccgaatggaaaaaacgtaaaatttagaagaatactcatttaagagctgtttgcatggagcaa

SEQ ID NO: 6433 - DNA, 1005 bp, Cricetulus griseus
gctcgtgcgccggtagccgccatgccgggagaccaccgtcgtatccgcgggccggaggagtctcagccgccgcaactgtacgcggccgacgaagacgagctgcctgctgcccgcgacccgacgcggctacggccggtgtacgcgcgcgctgggctgctgagccaggccaagggctcggcctacctggaggccggaggcaccaaggtgctttgcgccgtgtcgggcccgcgccaggccgagggcggcgagcgcggcggcggccctgcgggagcgggcggcgaggctccggccgccctccgtggccgcctgctctgtgacttccgccgcgcgcccttctccggcccccggcgtcgcgccccccagggcggcggcgaggagcgcgagctgagtctggcgctgcaggaggctctggagcccgcggtgcgcctggggcgctaccctcgcgcccagctcgaggtgtccgcgctgctgctggaggacggcggctctgcgctggccgcggctctcacggccgcggcgctcgccctggccgacgcgggagtggagatgtatgatttggtagtgggctgcggcctgagcctcgcaccgggaccctcgcccacttggctgctggaccccacgcggctcgaggaggagcactccgcagccggcctcacggtggcgctcatgccggtgctcaatcaggtggccgggttgctgggcagcggggaaggcggccagactgagagttggacggacgcggtgcgcctgggcctggaaggctgccagcgcctctacccagtgctgcagcagtgcttggtgcgagctgcccgccggaggggcgccgccgccccgtcctgattggaaaacccgagcaacaaggatgcggatgactgctgatgtccttctttcccaaacggcccggctgctggtcgcctgccttggccgagctgagaaacgagagtgggaggcagcgcacactgaaccgaagcgctggacagctgtgttggaacggtttaaagggcc

SEQ ID NO: 6434 - DNA, 1005 bp, Cricetulus griseus
ctgtcattatttgtatcaaaaacaaagaaatttgaaaaggcttcaaaaattttgaaaaaaaacatgtccaaggaccctacaactcagaagctaagaactgatctcctgaacattatccgagagaaaaacttggcacaccctgttatccagaacttttcctatgaaaccttccagcagaagatgttgcgcttcctagagagccacttggatgacacggagccctacctcctcacgatggccaaaaaggcattgaaatctgaatctgctgcttcaagtacagcgaaggaagaaaagcagccagtcccagagccagtggaaaagccactgagagagccttcaagacagccccggaacactccaaccaccattggaatcaggaccctgaaggcagctttcaaagctctgtcaactgcacaagactcagaggcggcttttgcaaaactggaccagaaagatctggtacttcctaatctagcatccccatcatcaccaacccacaaaaacaagagacccaggaaagatgaaaatgaaaactcagctcctgctgagggtgagggaggctcagaactgcagcccaagaacagtcgcatgacaataagcagattggttttggaggaggacagccagagtactgagcccagcccaggcctcaactcctccccggaggccatgtcagcatcaccatccaagcccagagctctcaaccaaccccacacaggggagaagaatcccaagtatgaagaccttctttgtagcagttttggggctggttggaggtcctggttgggtctggttttacttccatgaatgaagtaacctgctaagttactctccacaaaggcttgctcagactgctagaatgagactggagcagggagcgacaagtagcagtccctgccagttcccaagcctcattggaggctacactgcactatctgtcctagggcatgagaaggagggagggtttctgagacttcagccagacaatctaagtgcctcaaggac

SEQ ID NO: 6435 - DNA, 1004 bp, Cricetulus griseus
gcactatttaagtggtagcaggaatgggctgtgaatcgcgtctgctttctccacaaacaggcacagtgttgtctgatctggacatctctgagctgaagagagggaagggcaaaagcctgtaggtccctactgccaccatgtgctctagcaagtgtgcaagatacatcggacactctctggtgttgtttgctgtcctctgcatcgtagctaatattttgctctactttcctaatggggaaacaaagtatgctgttgaggaccacctcagccgctttgtgtggttctttgctggcatcgtaggcggaggccttctggtactcctgcccgcgtttgtgttcattgggctggaggaagatgactgctgtggctgttgcggccgtgagaactatggcaagagatgtacgatgctttcttctgtactggctgctctcattggcattgcaggatctggctactgcgtcattgtggcagcgctgggtttggcagaaggaccaaagtgtagtgattcccacggtgtgtggaactacacctttgccaacactgatggacagtaccttctggatcccactacatggtccaagtgccatgagcctaagaatattgtggaatggaatgtgaccctattttctatcctcttggcgctcggtggaattgaattcatcttgtgtcttattcaagtcataaatgaagtgcttggaggcatatgtagctattgctgctcccaccaacagcaatatgactgctaaaagaacacaagacagaaccacatgcttcctttatttcactgtaacttgtatattttactcgtgttatgcaactttgtactggtgtatcatattccataattctacttttacaaagaaatgtgcggacatcgtcacatgatgtcagcgtttgcatttcagcatagctgagataaactcttcaatatttaagataaaaatcacatttaactattgtgcatatgtgtattttaaataaaggatctacagtttcctttttaa

SEQ ID NO: 6436 - DNA, 1004 bp, Cricetulus griseus
ggccactgggagtagcgacgtccgtgttgctcccggctagcgggcgcagcgcggggccggtccggggcgtgctggggggccgtagatgtcatgtggcctgtgctatggtccgtggtgcgtacctatgctccctatgtcacctttcctgtggcctttgtggttggggctgtgggctaccacttggaatggttcatcaggggaaaggatccccagcctgtagaggaggaaaagagcatcctggagcgtcgagaggaccgaaagctgaatgagctgctaggcaaggaccacacacaggtggtgagccttaaggacaaactggaatttgcccccaaagcagtcctgaacagaaaccgtccagagaagaattaatggagggctcaggtccctgtgatccacggggctatgacatgccctgccaccttgtcgacccagcttcagaacatacatctgatttgctttgctgctcactctggccccttctgcatcccccagccacaaacatactggctgatccgttatggctatacagctgcagcagcaggggccaacgaagaggaaggctgcatctgtgggatgggctgtctccatgactgcgggcttctgatctttcctgggagcactgtagggaggagccctggggaatgaacaatgctctcaggttccctggggaggggcttgccctcaactgggaatggttggggcttgttgttgccatgaggagggtcacctccatgtctagttgtagtttttgcactggacagaattcagaagtttccctggctcccttgatgtgtttttcctgttcgctggcacaattgtccctttatcagctcaggagtggattctcaggggaaggaaagcacatttctgttgtggggagctcaggctgtttactttggggcagaaggcgtatgcctggaaataatccttgtcttccacccttcctcacatgtagtgagaacctaattaaagtggcacctgagaaaataaaaaaaaaaaaaaaa

SEQ ID NO: 6437 - DNA, 1004 bp, Cricetulus griseus
  modified_base (19)..(19): a, c, t, g, unknown or other
  modified_base (307)..(307): a, c, t, g, unknown or other
taaaataattgaaaaaaanaaaaaaaaaaatttgtttgtttgtttgttaatttatgtttgaaatttatttagtttgtgaagtaggtcctctccttcatcgtgtaatggttaattgtaagtaatgtatttatatggtttttgttctgtacatagctagccagggcctcaagtctcggcctcattaatagattggtgtagttcaggatgtgaggtggaggcactggctgactcccagaaacacctccttcacctgagggaagaggagagatttgccctcctagcagattccgcctcgggtttgtcttgngttttaaagaggcgctgtctgtctgctccggcagatccagctgtgttgagccactcactcacttttttatatgagctatttatttcagacttgttcgaaaaaacaggaggtcatgaaagccctgtcctctgctctctgagcatacggttccctctgactccaaaagttcacttctatcctcaaaatattagattgaccgccaacattaaacatggttatgacataataaagagggaacagccttgtaacactaataaataggatggatacaggagtcaaaacagaaagaccaagagaaacttatcattgttaacacctaagttctatgcatttttcaattgtgtagagcaaagcctggatacagttgaacaaggtggcgtacaaaaatgaaaaatgcccaggtcctcctgggatgcccagagggaaggttgtgtgtgtatgtgtgtgtgtgtgtgtgtgtaagtagcttttaaggaagtgttggctcttgatccagagcatgaggcagtgtgctgtgttcctagaactaggctgactgctcccagcactaggggtgacagccctctgctaatgctgcttttgtgtgatatccaatgaacctttggctcatctcaaatccctgggcactcagtctagtgaatgtgatgtcaccatgtacagtagagaactagtttaacttttttttgtcaaaaacaaa

SEQ ID NO: 6438 - DNA, 1004 bp, Cricetulus griseus
agaattttgattctgatattagcttagtttgttgggatagatggctgctggcaggcagacagccaacggcttctcaatgaggtgatggtggaacacttcttccgacaaggcatgcgtggatgtagctgaagagctctgccaggaatctggactgtctgtcttcgtcagcaaacaacagataacaatcacccatgaaattggtttgtggtcatattatatcaagagatgccctgaataaaatgtttaatggtagcaaattaaaatgtccatattgcccaatggaacaaagtccaggagatgccaaacagatatttttctgaagaaatgagtttgtttgcaatttgtaagtgaaaactgaattatgggtacattcgagacaagagcgatccattgactgcagctatccaaggactgccgggttaataagctgtgcaccagaagctgctgacacgcgagtgtgcacaaggggagtgctccagatgggtgttacatagggctttttttcactcttggtcttcgtttctgatcaagtaaatacaccagcagttgtcattcagtgcaggtttttgtacttactatatggcgatttttttacttaaaagcagaaacagaagttgaccttcctggcatatgtttgatattcctcctgcttttacttctgtcattttctcgataattgtaagcttgagcgtgtttgtggaagaactttctttcttgttatgtatacataattaaatgaaaattcttcatagtagtttgacagattgaattgtggttatacaacgaatttgcttttttgtttggttttgtttttctttttggcttaagaaagctgtgataaattccaaatttatgttgctttttgatgtttttactctgctccagctcttgcttcaaagtcagcccgcctgcatttgagttgtccatagccccagcaggcttcctgtttaaaatcccatcatgaatttagcaggctgatgtgagaatgaaagaaatattactgg

SEQ ID NO: 6439 - DNA, 1004 bp, Cricetulus griseus
cacctggggagagtggggagcgttttgtgctttaaaagaagagcccttcgatattggtctggtcagcaacccgcaatgccgctccgtgttgcactgcagacccgcttggcgaagaggggcatcctcaaacatctggagcccgagccagaggaagagatcattgctgaggactatgatgatgaccctgttgactatgaggccacccggatagagggtctgccacccagctggtacaaggtctttgacccttcttgtggactcccttactactggaatgtggagacagacctcgtgtcatggctctcaccacatgaccccaactttgtcgtttccaaatctgccaagaaactcaggaacagtaatgcagatgctgaggacaagttggaccggaatcatgagaaggtggatagaaatcatgagaagtcagaccgaagtcacgagaagccagataggaaccatgacaaggcagacagaaaccatgataagtctgaccgggatcgagagcggagctatgacaaagtggacagagagagagatcgggacagggaacgagatcgggaccgtgggtatgagaaggcagaccgggaagatggtaaagaccggcgccaccatcgcagagaggagctggctccttaccccaagagcaagaaggcggtgagccggaaagatgaagaattagaccctatggaccccagctcatattccgatgcaccccggggcacatggtcaacagggctacccaagagaaatgaggccaagacaggtgctgacacaacagcagctggacccctcttccagcagcgcccatacccctccccgggggctgtgctccgcgccaatgctgaggcctcccgaaccaaacagcaggactgaacgtttgttccatggagctttggcagtttgcctttctttcttccttgtggctctggagatagggctcaaagctttgcatatgctgaataattatttcacaaatgagctacactcccagcccccttattgtt

SEQ ID NO: 6440 - DNA, 1004 bp, Cricetulus griseus
atgatgagcgatctccagaagagcaagccaagacctataaggatgaaggcaatgactactttaaagagaaagactataagaaagctgtggtttcctacaactgaaggattaaagaagaagtgtgcagaccctgatttgaatgctgtcctttataccaacccgggcagcagcacagtactatcttggcaattttcgctctgcactcaatgatgtgctggctgccaggaagctaaagcccggccacctgaaagccgtagtaagaggtgccatgtgccatcttgaactgaaacactttgctgaggctgtgaactggtgtgatgaggggctacaaattgatgccaaagagaagaagcttctagaagtgagggcaaaagcagacaagttgaagaggatggaagagagggatcctgaggaaagcgaggttgaaagaaaagaaggaacagagtcagaatgaggctctactccaggccatccaggcaaggaacatcagacttgtttctgaagcggtgggtaaggatgaagattcagcctccgatggtccagctgagatcttcctggatgggctcagctcagagaacccttgcagagccaggctaagtctagataacgaaggcagactgagctggcctgtgctgttcctgtacccagagtatgcacagtccgacttcatctctgcttttcatgaggactccaggtttattgaccatctcacggtgatgtttagtgaagctccctcctgggactcagagcagaaatatcacccgggtaacttggaggtctactttgaggatgaggacaaggcagagctataccaggtgtccccctggagcactctgctgcaggtgctgcagcaccccaggtactctgtgaaagcccttacaccagcattcctggtctgtgtaggatcctctcctttctgtaagaattatctccaggggaaaagggtacacaggtaaagtgggagccagaccctgggatccttccctcaacttcctctgcctgga

SEQ ID NO: 6441 - DNA, 1003 bp, Cricetulus griseus
ggactgtgcgtcctctgcggcttgccggcggccggaaagtcgaccttcgcgcgtgcggttggccctccggctgcggcaggaacgggattgggccgtgggccgtcctctcctacgacgatgtgctgccccccgcgctccctgacggcgctggcacacagcctcggccatcccaatggaaaaatgtttcgacaagaactgttaaagcacctggaatgcttcctcgtggcggtcattggtgggggtcagatgtctgccccacccaacagcactgaagctgtgtgggaagattttataaacttgactaaaaaaaaacaggatttgatcttttctgcagcgcttgaggcccagccgtgccacctcttggcaaaaaactgttgtttctagacctttgtttttggtgttagatgacaacttttattaccaaagtatgagatatgaagtctaccaactggctcggaaatattccctgggcttttgccagctctttttagattgtcccctggaaacatgtttggaggaatggccagagaccccagccactgcctaatgagaccatccacctcatggagagaaagattgaaaagcccaaccctgagaaaaactcctgggaacacaacagcctcatgattcagagtacagcatgtcctgtggaggccagcctggaggtgactgatttattgcttactgctttggaaaatcccataaaatgtgttgaggacaatacagaacaaaaggaaacagacagaattatttgttctactaacatcctccataaagctgatgagacactccgaagaaccatctctcagaccatgaaggaagccaaagatgagcagatacctcttaataacttgaagcgtctagcagaagaacttaacaggctcaaagcagattttttggaagatctaagacaaggaaacagaaaatatctatgttttacaacaaaccactgacttatcagatgttatttcttcttttgtgtgtatgagagagatactgttgt

SEQ ID NO: 6442 - DNA, 1003 bp, Cricetulus griseus
gtcagccaacagctgtgtgtgagcagccttgctgggaagaaagaaaatggcttgtattgaattttctttccatgtgccaagtctggaggagcttgctgaagttttgcagaagggactaaaggacaactttgctgatgtccaggtctctgtggttgactgcccagatttaacaaaggaaccatttacctttcctgtaaaaggcatctgtgggcaaactagaattgcagaagtaggaggtgtgccttacttaatgcctcttgcaaacaaaacaaaagtttatgacctaaatgagattgcaaaagaataaagctgcctggagcttttatccttggagcaggggcaggtccatttcagacgcttggattcaattctgagttcatgccaattgttcaaacggcaagtgaaaacaaccgtcctgtgaatgaaagctactttgcccgaattaaccctgcagatggaagttgcctgctggagaagtacagccaaaaatatcacgattttggatgcgcactactggctaatctttttgccagtgagggccaacctggcaaggtcattgaggtgcaagccaagagaagaacaggacaacttaattttgtgacttgcatgaggcagactctagagaagcactatggaaacaagcctgtgggaatgggaggcacgtttcattgtgcagaaggggaatgtcaagggcccacatcatgccagcagagttttcttcctgcccattgaactcagatgaagctgtcaataaatggctacatttttatgagatgaaggctcctttggtttgtctgccagtttttgtctccaaagacccggggcttgatttgcgactggagcacactcatttcttcagtcatcacggagaaggtggacattaccactatgatactaccccagacacagtggagtatcttggctacttctcacctgcacagttcctttatcgcattgatcaacccaaagagacccatgcatttgggagagattaaagcagctg

SEQ ID NO: 6443 - DNA, 1003 bp, Cricetulus griseus
gtgatggcttcgggacccggcagctgagcgctgaagggtgagtgggccctgcgcccggaatctcagaggccgacgctcacgtgcagcctgcgccatggccacctccgccgcctcctccgagcatttcgagaagctgcacgagatcttccgcggccttcttgaagacctacgaggagttcccgagcggctgctggggaccgcggggacagaagagaagaagaagctggtcagagattttgatgaaaaacaacaggaagcaaatgaaacgctagcagagatggaggaagaactacggtatgcacccctgactttccgtaaccccatgatgtctaagcttcgaaactaccggaaggaccttgctaaactccaccgagaggtgagaagtacacctttgacagccacacctggaggccgaggagatgtgaagtatggtgcatatgccttagagaacgaacatttgaatcggctacagtctcaaagagcattgctcctacaaggcacggaaagcctgaaccgggccacccaaagcattgagcgttctcatcggattgccacagaaactgaccagattggtacagaaatcatagaagagttgggggagcagcgagaccagttggaacgtaccaagaatagactggtaaacacaaatgaaaacttgagcaaaagccgaaagattctccgctcaatgtccagaaaagtgacaaccaacaagctgctgctttccatcatcatcatcctggagctagccatcctggccgggcttgtgtactacaaattctttcgacaccattgaacttcctggagggaagggactgtggaccagaatcttgactccaaacggtgttaggcatatatattgctgctgtgggctaacagttcaagaatgtattgtgtagccagactatggggggagggcaatggaaaaccacaaatttgtgaaggaacagcgcaagaccagtatgatatactaaggtaataaatgctgtttatgactccttcaaac

SEQ ID NO: 6444 - DNA, 1003 bp, Cricetulus griseus
gcagatgcgccgtgccctcttcctcggagcctctgccctgcttctcctcatcctaaaccatagtgtggtccgagagttggacatatcccagcttctgctcaggccagtgattgtcctccattattcttccaatgtcaccaagctgttggaggcacttcttcaaaggacccaggctactgctgagatcaccagcagagagtccctgtcagccaacatcgagtggaagctgacattgtggactacctgtggcctctccaaggacagctacgggggctggcaggacttggtgtgcctgggaggtggtcaggcccaggagcagaagcccctgcagcagctatggaatgccatcttgcttgtggccatgctcttgtgcacaggccttgtggttcaggcccagcggcaggcatcaagacagaaccagcaggaacctggaggccagggggatttgttcaaacgacgtgtggttcggagactagcatccctcaagacccggcgctgccggctgagcagggcagcacacagccttccagagcctggcatggagacgtgtgctgtttgtctagataacttctgtaacaaacagtggctccgggtattgccctgtaagcatgagttccaccgagactgcgtggacccctggctgatgctacagcagacctgcccactgtgcaagttcaatgtcctggggaaccactactcagatgactaactgcccaagtggagattctgcactttggaatggacccttcccagcctacactacaggattgtggcttggacaggccagctagccctgtgggcaaagtcaaggccccactataccatacccatggtgggtaggagggactcatggccctaggctgaagacacagagccaggaccaccaggcaaggacaaatcattagagcccttctctgcaaccctaggatatctatgcctgcccttataggcagctctcaggactttggggaaagaaatatggccactacatctgtctccagca

SEQ ID NO: 6445 - DNA, 1003 bp, Cricetulus griseus
cggctactgtctgaggtggctttgggcggcctctgagcgtttgtgtccctcgcccgctaccttccttcctttggttcccaccatgccgatgtaccaggaaacatctgagccatctttgcaagcccttgaatcccgccaagatgatattttaaagcgcttatatgagttgaaggcagcagttgatggcctttcaaagatgattcacactccagatgcagacttggatgtaaccaacatcctgcaagctgatgagcctgtgcctttaaccacaaatgcactggacttgaatttggtgcttggaaaggattatggggcactgaaagacatcgtgatcaacgcaaacccagcctccccacccatttccctgcttgtgctgcacaggctcctctgtgaacgctacagggtcctgtctactgtgcacacacattcgtcagtcaagaatgtacctgagaatcttctcaagtgcttcggggagcaggccagaaaacagtcccgccatgagtatcagctgggcttcactttaatttggaagaatgtgcctaagacacagatgaagttcagcgtacagacaatgtgccccatcgaaggagaagggaacattgcacgattcttgttctctctgtttggccagaaacacagcgctgtcaatttaaccctcattgacagctgggtggatattgccatgtttcagctgaaagaagggagcagtaaagagagagcagctgttttccgctctatgaactctgctctggggaagagcccatggctggttgggaacgagctcaccgtggcagatgtggtgctgtggtccgtgctacagcaaactggggatggcagtggggtagcacccgccaatgtgcagaggtggctgaagtcctgtgagaaccttgtccccttcagtactgccctccagctccttaagtaagttctagcagcttgtcttacagggttcaacataagaatgatacagcttcaagtttgttgtcaggaaagggacttgtcc

SEQ ID NO: 6446 - DNA, 1003 bp, Cricetulus griseus
cgaaaggtgcacgcagaccctgactgcagaaagacacctcgtggcaagcggggctggaagaccttccacgggatcctcaagggcatgatcctctatctgcagaaggaggagtaccagcctgggaaggctctttccgaggcagagctgaagaatgccatcagcatccaccatgccctggccactcgagccagcgattacagcaagaggccacatgtcttctacctgcgcaccgctgactggcgggtcttcctcttccaggccccgagcctggagcagatgcagtcatggatcactcgcatcaacgtggtggctgccatgttctctgcaccccccttcccagctgccgttagctcccagaagaaattcagccgtcctctgctgcccagtgccgccacccgcctctcccaggaggagcaggtgaggacccacgaggccaagatgaaggccatggcaagtgaactgcgcgagcaccgggctgcacatctgggaaagaaggcccgaggcaaggaggctgatgagcagcggcaggaaggaggcctacctggagtttgagaaatcccgctatggcacctatgcagcgctgcttcgagtcaagatgaaggcagccagtgaggagctggatgccatagaggcagccctggcccaggctggagcacggaggacggatgccctccgcctcactccagtccttccctgcagcccaaccccaccagccagacccgggctcagcattctggctcagaagcccgggctggggcaggcagtacaaggccaaagccctgagcagggaacaggagcaatgggggcagtgcccgctgggcacctgctgcatgatgaaacggccctgcctgagctcagctagcctcgggccacccacgagggcctcctggcccagggcccgaccgcgccggaacgcggtagtaccggggacaacgggcagggcagagcgggcctcagaaactactcttaattacaaaaaaaaaaaaaaaaaaaaaaaaaaaaa

SEQ ID NO: 6447 - DNA, 1003 bp, Cricetulus griseus
gtttctggagacccgcagaagcggccaggacgtcctgaccggcttgttccggtaacaggttagacagtttgaccttggccgctcctcttttgcactttgcagcccctggtcgaagcagatgatgtggtgggctgctgttaacctgagagggacggctgcccgatgctttcgtgcgcgaagcctcggggttcgcgtgggtccttggtgcgtctcccagcaggaaaaccccggctgcggcccaactccacacaggacgctgcgtgtcagcgcggcggccaccgcgggacacaataaatggtctaaagtccggcacatcaagggccccaaggacatggaaaggagtcgaatcttcagtaaactcactctcagtatccgcctggcggttaaagagggaggccccaaccccgagaacaacagccacctggccaatgtcttagagatgtgtcgaagcaagaatatgcccaagtcaactattgagtcagcactgaaaacagagaaaaacaagggcattcatttgctgtacggggttagaggccctggtggctcttctctgctcgttgaggcattatcgagcagtggtcccaagtgccatttggacattaaatatatcctgaacaagaaagggggaatgatggctgaaggagcgcgtcatttctttgacaaaaaaggagtggttgtggttggagtagaggacagagagaagaaagctgtaaacctggagcgtgccctggaactggcgattgaagccggagctgaagatgtgaaggaagctgaggacgaagaagaaaagaacattttccagtttatttgtgatgcctcttcactgcatcaagtgaggaagaaactggactccctgggcctgtgttctgtgtcctgttccctggagttcatccccaactcaaaggtgcagctggctgaacctgacctggagcaggctgttcacctcatccaggctctcaacaaccacgaggacgtgattcatgtttatgacaatatcgaataa

SEQ ID NO: 6448 - DNA, 1002 bp, Cricetulus griseus
tgaagacccagatagaagagctgaagctggagcgccaacagctcatcctgatgcttaaccgccaccgccccacctgcatcgtgcgcacagacagtgtcaggacgcctgagtccgaaggcaacccgctgctggagcagctggacaagaagtgactgaaggcctggaggaggcatcagaggaagagtggtgggggaggagcagaaaagagaagaagaggagcaaggtgatggaggccccctcctgggagcatgacaaactctatgatgagacttagcataactggcctccagtctgctcttttctgaaactcagcccggccacacaaaagcaagagcagactgaagaaaccagagggaccaagcgatgagaccaaagttgacccgcaggtaggggctgtcccactccaaggcccagcttgaagggcacctcagccagagagatgtccaaacaggtagcctcctcaggctctcctctggcctctctgccaagacccccacccaaaggactaccgagcagccaagaaaagccatgcgtcgcgaacacagtgtggccgaggatggaacttagcgtggaccgcaatccacttccccagccctgcccaagccggatggaaaggggtgcactgtggggctgtgatggccctgctggagtttgctgtggcactgaggcgcgggcgcccttccaaagcacacactcaatcgatgaatgtttacagactggctgtcctggcggggcttccaactgcacacgttttttatatatatatggatttctataatcactcgatgtgacacagtacaaatatgctatggtctgttgttagggacatccgcccaccagttacagccattgtaattcctaagtactgtaggttctgggtgttggggggtggtggccaggcgggtggggtgcatttccatccttgtaaacccttcctagtactcagtcctgtatcgctcagtaaacattgctcttaattaacccaaaaaaaaaaaaaaaaaa

SEQ ID NO: 6449 - DNA, 1001 bp, Cricetulus griseus
cacagccctctgcaaccaaacctgctacccccagaaatcatcctctccattgttctagtttctgacagccattgggaagccctcaactgacatgttacagggagacttgggtcagcctgatgacaatatgtttgcatgggtttccttcatctgctgtgcttgtttgtgatagtccagtgcatcagcaggctgtcatattcatgccattcaccatgctaccacttttcttttttcctggagtctcatttgtagtcccacagcttttccagggaggctacagagcaccctccatatagctctctgccttagtgtgaaaggctgatgtctgacctcttggaggaggatgtcttcaccagtcatccagtggcctccagatccagccattcttgacatcagttcctgaatgtagcccaggcccagctggcctgtaagaagcggactacccaaccctgtctgctgtcattccttgcagatgtacttagttttttttccattgacattgggcatctgttctctcaagatgtatatattttcttactgtacataaagacattccttaagtcatacagaatgtgttgtgacaaggggacttgggcaccttgttgtgaatgccattgtggaattctctgtgtgttcacaacccagctcttaacttttcttgtttgacataaatctgtgagcttgcatgaagttctcaaacaagactccatagccagccaagcactgactgatctcttgtgtgagcctgatgtgccctccttagaggctatatagttccaagttcgtctactctgagggcatctctcatactctttcctgtttgggcaaactggaaacagaccctgcagaagtctgcacctcccacctcacttgctgttgactttcagtcccaaacttgagggtgctgggcagctctcactctaaagggagcttgcaggagaggcttcctgtcaccttgggagcagtgctcacttcaaaggtacttctaactgttcagtttg

SEQ ID NO: 6450 - DNA, 1000 bp, Cricetulus griseus
ctgttactgcctaccagaatgacaagattacacagttgaagatcgacaacaacccgtttgccaagggcttccgggacaccgggaatggccgtcgggagaaaaggaagcagctaacgctgccgactctccgtttgtatgaggaacactgcaaaccggagcgtgacggcgccgagtccgacgcctcgtcctgcgaccctccgcctgcacgtgaacctccgccctctcccagtgcagcgcccagtcccctgcgcctgcaccgggcccgagccgaggagaagccttgcgcagccgacagcgaccctgagccggagcgcccgggagacgagcgcgcagcagcgcccctgggccgcagtcctccacgggacaccagccccgctcgcttgaccgaacccgaacgctcccgggagcggcgcagcccggagaggggcagcaaggaaccgaccgagggcggtggggacggcccgtttggcctgcggagcttggagaaggaacgcgccgaggcccggaggaaggacgaggggcgcaaggacgcgggcgagggcagccgccgccgccgctggttccctatcacggagcccattcctgggcagtgcccgaccccgcctgcgcttcagcccctaccagatcccggtcaccatcccacctagcactagcctccttaccaccgggctagctgcggagggctccaaggctgcaggcggaagtagccgtgagcccagcccactgcctgagctggctctccgaaaagtgggggggcccatcccgtggggccctatcgcccagcggctcagccaaagaggcggccagtgaactgcagagcatccagagactggtgagtggggctggagagccagcgagccctctcccccaggcccggggagtcgcccaagtgagggggctgcttggctgctgcgctgccacacgagcctccgggggctggggctggcctgcctcggctgcttgggctgtacagcacagaatgggtatttatttaaataaa

SEQ ID NO: 6451 - DNA, 1000 bp, Cricetulus griseus
tgtctgtctatctctgtgtgtctttctaactctctctctctctctctctctttctctaggaatatttagacctcacattcaacatcatttggtggaatatgagagaaacaaattccaggaaattttagaagaaactccaaatgccttcagtcagaccacggaatggctgaaagagtctatagatgaagaactccttttcgtgagactgctgtatctcctggaactgaacagagtcccacaaaccaagcctaagccctctgttggtgctaaataattgttacttgaaactacttcagtgggactatcagacaaaggtcttaccagagacactcttgacagatggaacacggcttcaagaactgacagaaaagctgaatcaattgaaaatgattgcctgcttgtccctaattaccaacaacatggtgggtgctattacagaaggcctgcctgagcttgcaaacaggttaaaaaggatttcagctgttctactcgaaggcatgaataaagagacctttaacttgaaggaagccctgaattctattggtgttcagacttgtgctgaagttaataaggccctgaaagagagaggctcacccactttaaatgctgaggctcaagctaatctcatcggtcagttttcaagtctcggagagaaggacaatcctgtctgtaccttgatggataaacggatccggttgtacatgaaaagcctactctgtcttccaagcactcagaaaagcatgcctcccatgccagggggccttggtgtcattcatcaggagctggaagtgcttggctgtcaatatgcaaatattgtgaatctcaacaaacaggtgtatggaccattttatgcaaatatattccgaaagctgctcttccaagatgaagctgtggggaaatttctatgtggcttgttcatttggcctgaaaggagttgtttttgtttatatacttgattatactgcacttgctggacaggaatacaatgtgcaaacattta

SEQ ID NO: 6452 - DNA, 1000 bp, Cricetulus griseus
tcagatctcactctggggtttcccttccttgcccagtctacacaggcagtaactcatgtgcctttccttctctgaacctgccaccagtagtgtctgggccaaggctcgtcttgggacctgtatcctccccctcacttttctgacttttgacacattgcatgatcctgttggtaactgataaaagactaaggcacagcgaggtcagggagccccagagtgaaggaataaaagggagataggttatctaggaggcagtcctccctggtgtccagcctatttcttggtcctaagcactacctgcatagtgagacagccccactcaaggggagtctaagctctgaaggctgccatggcctgactgaggtctcccagcacaatagtggtaattagcatcaggatcccagcccaggtctggaaaactttgctgtctgtttagttctcctggaagccccaagcgatatcagctattgggcctgttctgcagatgaagggacagggtcagattaagggagtccagcctgcaacccacacagctagacagcccaggatccaaaactagtctagtccctgtcttctagatggttcccagctcatatactgtggtcagatgtctactttgggagacaaatgacatcagtaatacatagataaaatttttagtgattcccttattcctttgaaggaccgagatagggctctgtcttgaattataaagtacatggccaacatcaagaagtctggcttgagaacaggaacactcccctagagcaccaggccactcacctcttgttcctcagatcaggacttgggctggttcgagaccttccacaagtccttttactcagggtcctacttccactcaatgccctacgtttcatacacaaaaatctttcgtggctgtgggttgagcttttaactgcaacctccaggatcacacttgggggtttcagctgtgtcctatggcttcaagatattaaagatgcttttctggttgtacaaa

SEQ ID NO: 6453 - DNA, 999 bp, Cricetulus griseus
cactgcaagccagatgattcaggcactctctttggtaataaatagcagcggcgaatggaggtggaggatgtccacctgggcttccagtcacttctctgtgaaagtgaacaagactggcacacagtacttgctcagaacagctaataagctcttcggggaaaagtcttgtgatcttttagcatcttttaaagattcctgccgcaagttctacgaagcagagttggagcagctggacttccagggtgatacagagcagtcccgacagcacatcaacacctgggtcgccaagaagacagaagataaaataaaagagttgctgtctcaaggttcggtgaattcagacactcttctagtcctcgtgaatgctatctacttcaaagggaactggaaggaacagtttaacaaggaggacacccgggagatgtatttcaaagtcaacaaggacgaggagaaacccgtgcaaatgatgtttaagaagtctacctttaaaatgacctatattggagagatattcaccaagattctgttgcttccctatgtcggcaatgagctgaacatgatcatcatgcttccagatgagcacattgacttgagaacggtggaaaaggaaataacttatgagaaattcatggagtggacaaggctggacaagatggacgaagaaaaggtggaggttttcctcccacggtttaaactggaggagaattatgacatgaaggatgtcctatgcaagctgggcatgactgatgcctttgaggacagggcagacttttctggaatgtcttccaagaaaggcctgtttctgtccaaggttgtgcacaagtccttcgtggaggtcaacgaggagggcacagaggcctgcagctgccacacccaagtgaccttatccctaagtgcaatgacaattttgtaaataaaagtagctttctagcaccccaaaaacaaaaaaaaaaaaaaaaaaaaaaaaaaaaaaaaaaaaaaaaaaaaaaaaaaaaaaaa

SEQ ID NO: 6454 - DNA, 999 bp, Cricetulus griseus
ctcacccactagccgcagctcacagccgagttgcagctcaccccctagctacaagtcactcccgagctgcagttcaggaatggcttccaccctgcaaccaacacagatggacaccagctgcagcagtggtcgctggagcaaagactatgacgtctgcgtgtgccacagtgaggaggacctagaggctgcccaggagctggtctcctacttggagggtagccaggccagcctacgctgcttcctgcagcttcgggatgcaaccccaggtggcgccattgtttctgagctatgccaggcactgccttcgggacccctggtttgcaagtaccagatgctgcaggccctaacagaggccccaggggcggagggttgcaccatacccctgatgtctggcctgaccagagccgcttatccgccggaactccgattcatgtactatgtggatggcagaggccgggatggtggcttttaccaagtcaaggaggctgtcatacgctatctggaaacactaagttgacacaagttttcctgaccaaagttggaaatagcacacaccgggtgctggatcccagtagatacagctttgggagccagagccagctgcactctgtacaccacacaggatcagattgctaccagcttccattactgtgggctccacaggaaggctgggcagaagatcgggggaccccccccgatggggactccccaagaagggcaggaggaagccagggactcccccaggaaggcaatgaggaagtcaaagtttggagttgtcaagagattgtggtatcaggagggtcagcagtgtcttgcctgctacttaactggacaggaaactgagagcctggtggcggtggagcacgccattaatcccagcactggggagacagaggcaggtgatctctgtgaattatagtccagcctgttctacagagttcccgaatagccaaagctacacggagaaaccctgtctggaaaacccaaaacataacaaaa

SEQ ID NO: 6455 - DNA, 999 bp, Cricetulus griseus
aagatggtggcgcgcaagaggaaagctggagcgtgcggccatgaggggagcacacccagcccaccgggttattcagctattcctgtcaagttcaccaaacagcagcaggcttcccattacctgtatgtgaaacagcacagagttcgaggagacactcagtccacgtggcctcctaataagaccctttttgtcctcaatgtgcccccgtactgcacagaggagtgcctgtcccgactcctgtcctcctgtggcaccatcaagacagtcgacttgaaagagaagcctgaccatgctgagagccctaaagaggcaaagtcgaagttttttcaccccaagcccgttccgggctttcgggtagcttatgtggtattccagaagccaagtggagtgtcagctgccttgaatctgaagggcccattgctggtttctacagagaaccaccctgtgaagaccgggattcataagtggatcagtgagtatcaagattcagtattagacccagaggccctgagggtcgaagtagacacattcatggaggcttatgacaagaagatagctgaggaggagaccaaggccaaggaggaggaaggtgttcctgatgaggagggctgggtgaaggtgacccgcaggggccgcaggcctgtgctccctcgaacagaagcagccagcctgcgtgttctcgagagggagaaaaggaaacgtgcacgcaaggagctgctcaacttctatgcctggcagcaccgagagaccaagatggagcatctggcacagctgcgcaaaaagtttgaggaggacaagcagaggattgaactgatgcgtgcccaacgcaaattccgaccctactgagctgttctgggaagcagacaccaggccaagaagggctctggaggaaggcgctgacaattccagccacaaggtgttggttgttcatgtggacgtagtgattgcctgggatttccacatactggaaccgctggagaaagggtcaggtggtgagat

SEQ ID NO: 6456 - DNA, 999 bp, Cricetulus griseus
gggattgggcgtgagcgcggagccgcagagcctcgcagtcgccggggccgggctcgcgtccccgtgatcgagaaggcgcgctctgcgctgctgccgccgcaggacgtggaggacacggtggagacgctcatgttacatccggtgatcaaggctttcctctgcggctccatcagtgggacctgcttccaccctcctcttccagcctctggatctcctcaagacccgcctgcagaccctgcagccctcagacctacggtccaggcgtgtcgggatgctggctgtgttcttgaaggtggtccgcacagaaagtcttctgggcctctggagagggatgtctccttccattgtgaggtgtgtccctggtgtgggaatctactttggcactctgtattctttgaagcagtatttcttgcgaggccatcctcctaccgccctggagtcggtcatcctgggcatgggctcacgctctgtcgcaggagtctgcatgtcacccatcacagtgatcaagactcgctatgagagtgggacttacagctatgagagcgtctatgcagctctgaggagcatctattgcagcgagggccaccggggcctcttcagaggcctgacagcgactctccttcgtgatgcacccttttcagggctctacctgatgttttacagccagaccaaaaccacagtgctccgaggcacagaccagttggacgtggctctgatgcccctggttaatttcagctgtgggatattggctggcgttctggcttcgctggtgactcaacctgcagacgtgatcaagactcatatgcagctctccccagtgaagtctcagtggattggccaggcagctgccctcatcttcaagaaccacggcctgcgtggcttctttcatggcagtgttccccgggccctccgtagaactctgatggctgccatggcatggactgtctatgaagaaatgatggccaggatgggcctgaagtcctgacaggagagcgctgg

SEQ ID NO: 6457 - DNA, 998 bp, Cricetulus griseus
tgacagcccaactaaaaaaatgagagtcgatgaattcagccctggctgctcaggcctatgccctcaaagaggagaatgacagcctccggtggcaactggatgcctacagaaatgaggtggagctgctgaagcaagagaaagaacagctcttccgaacagaagaaaacctcaccaaggaccagcagctgcagttcctacagcaaaccatgcaaggcatgcagcagcaattgctggccatccaggaggagctgaacaacaagaagtctgaattggagcaagcaaaagaggagcagtctcacacacaagcattgctaaaagtcctccaagaacaattaaaaggcaccaaggacttggtggagacgaatggccacagccacgaggatgcaaatgaaatcaatgtgctaacagttgcattggttaaccaagaccgggagaacaatagtgaaaaaagaatccaaggcttaaaatctgagaaggaggccctgctaatagggatcatatcaacgtttcttcatgtccaccctttcggagccaatatagagtacctgtggtcatacatgcagcagctggactctaagatatctgccaatgaaattgagatgcttctgatgaggctgcctcgaatgttcaaacaggaattcactggtgtgggagcaacattggaaaagagatggaagttgtgtgccttcgaaggaataaaaacgacctaactgatggccaggaaagctggaaacaaagctgtccgaagccggccagggctgtacagtggaggagtaggagggttggggtcggccagcgggggacctgtgtggagccaccaaagccttgttcagtgacatctgtggcgttttcttgtgagtggaaatgtaattgtgtaccagttctttaaactagacgaagcctcatactttactatgacagacctgtccctacgaataccaagcaatgattccacagtcacacaaaatccaaaacaggcattgttgcagaacagcgca

SEQ ID NO: 6458 - DNA, 998 bp, Cricetulus griseus
aggaggagggcgtggacgtcaaacgggagctgttggggggtcaggacgtgaaggaggagcagctggtggaggcggtgcgcgtcaaagaagagggctccctcaagacggaaggctcggatggcccgcgggtgaagggggagcctcgcatgagcccccgagggggctgcaagaggaagctggccatgtcaaggtgtgaaacttgtgggacagaagaggcaaagtacagatgtccacgctgcatgagatattcctgcagtttgccctgcgtaaagaagcacaaagcagaactgacttgtaatggagtccgagataaaaccgcttacatctcactacagcagtttacggagatgaatctcctaagtgactatcggtttttggaagacgtggcaagaactgcagaccaggtttcaagagatactttcttgaaaagaccaaagcgcaaaaaatacctgttatttatgaaaaatcgtgcccgaaagcaaggtattttcttaaagcttctacccaatggattcagcaagaggaaagaaaattcaacagtttttgatcataggaagcagcagttctgctggcatgtaaagctccagtttccccagagtcaggccgagtacacagaaaaaagagtaccagatgataaaactattaatgaaattctaaaaccttacatcgatcctgagaagtctgatcctgtgattcgtcaaagattgaaagcctatgtacactcacagactggggtccaaattttaatgagggctgaaaatatgcagcaaaattttgtaaggtattatgaactggaccctaacaaaagtcttttagataatttgaggagcaaagtgatcattgaatatccaactttgcacgtggtgttgaaaggatctagtagtggcatgcagcttcttcaccaagtgaaaagtgaatctacccagaagcttggcaatggaaattgagcacttgcagaagaaggtggaagttcccagatggttgagaagattgtgtgt

SEQ ID NO: 6459 - DNA, 997 bp, Cricetulus griseus
acccaggtccaggtctcgggtcccagagctgactcttgtcggacagacaacttccagtgtattgccagtggcttctgtgtgcccctctcttggcgctgcgatggggacccagactgctctgatggcagtgatgaggaggagtgcaggattgagcggtgtgctcagaaagggcagtgccaaccactggccacccttccttgctcctgtgacaacatcagtggttgtcctgatgacgctgacaaccttcgcaactgcagtcgccagccctgtcaggagggtgagctgcgttgcatggtgggtgatatgtgtatcccacacacatggcgctgtgacggccactcagactgtcctgactccagtgatgagctcagctgtgacaccaacacagaaactgacaagatctcccaggaggagaatgccacaactacaaagactgtgaccctggagaatgagacctttctcaggaatgcaacagttgcttctgctggggactcttcccgaaacccaaatgcctatggggttattgcagctgctggggtgttgagtgctatcctggtttctgccaccctcctcatattgttacgactccgaagtcagggttacctgcccccatcagggctgttggtggctgtgaaggagtctctgctgctgtcagaaaggaaaacctcactgatctgaggacacgtggtcaccacctggccccaagtgcagtcagatcggggcaaagccacagtgggacatgtaggcagctgctggcttctcgagacctgggctctttttgccacagagaactttgattttaagctcctccagatgtggtcctagagactgggggtcctcagatattccccttgtctgtggggagcttggatggagaactgctatagccaggactgaggggccggccccaggatggttccaagaaatggggccactctggcttagacactcctgctgctcacactgatgggtggtgattaaagtttctttacctcct

SEQ ID NO: 6460 - DNA, 997 bp, Cricetulus griseus
gccctgaccacagaaaccaatggatggcagctaggtgttgtaaactcggaggtgctcagagcccaggaagaatgggatgtggtggacaccatccatccagacccagagattggggtcagctcccagcagcctggccagctcatctccttcagcgaggccctgcagcacttccagaccctggacctctcctccttcaagaaaagaatccagccaactattcgaagaaccgggctcgccgccctccggcattgcctgttcgggccgcccaagctgcaccagggccttcgggaagaaagagacttagtcctcaccattgctcagtgtggcctggacagccaagacccgatgcatggccgagtgctccagaccatctacaagaagctgactggctccaagttcgactgtgcccttcatggagaccactgggaagacctgggcttccagggagcaaatccagctacagacctgaggggggcaggctttcttgccctcctgcacctgctgtatctggtaatggactcaaagactttgctgatggcccaggagatcttccgcctgtctcatcaccatatccagcaattccctttctgtttgatgtctgtgaacatcacccgcattgccatccaggccttgagggaagagtgtctctccagggaatgtaaccggaggcagaaggtcatcccggtggtgaacagcttctatgcagccgctttccttcacctggcacgcgtgtggaggacccagcagaagactatctcagactcaggcttcgtcctcaaagacttggaagtattggccaagaagagcccaaaacggctgctcaagactctggaagtctacctagcccgagtgtcaaagggacaggcctccttgttggagacacagaagtgctctgggtctgaagggtctcactccaaggacctcaccttcacaggcgtgtgtgacctgcagtctcactcatttgagagcacagggttgatctgacccaccacggaga

SEQ ID NO: 6461 - DNA, 997 bp, Cricetulus griseus
acaagagaaaccaagcgattgctgccatggcgggaaagccagtccttcactactttgatggccggggcagaatggagcctgtccggtggctcctggctgcagcgggagtagagtttgaagaaaaatttctgaaaactcgggatgacttggcaaggttaagaaatgatgggagtttgatgttccagcaagtgcccatggtggagattgacgggatgaagctggtgcagaccagagccattctcaactacattgcctccaaatacaacctctatgggaaggacatgaaggagagagccctcattgacatgtatgcggaaggtatagcagatctggatgaaatagttctccatcaaccttatattccccaagaggagaaagaggcaaaccttgccaagatcaaggacaaagcaaggaaccgttacttccctgcctatgagaaggtgttaaagggccatggacaagattatctcgttggcaacaggctgagcagggctgatgtttacctggttgaacttctctaccatgtggaagagctggaccccagcgttttggccaacttccctctgctgaaggcactgagaaccagagtcagcaacctccccacagtgaagaagtttcttcagcctggcagccagaggaagccttatgaggatgagaaatgtgtagaatcagcaatgaagattttcagttagatcaggcacatattgatgaacagcagccacaagagcaaccttctaaagctttgcaacaatgaagtgttttgattaaatgttgctcctgcttattgtgaagctaacacgttttccaagatttgtgcattagttcaagtagtcatgacctatgcagaattgctaggatgctatttggttctagtcaaaattgaaatcatgatcacttcctaggatgtttccttgtatttcaataaaatagaacaagcttcctagactctggactgttcaaatattcttatgaaatagctgtcatatccttgccaaac

SEQ ID NO: 6462 - DNA, 997 bp, Cricetulus griseus
gtccaccgctgccgcctccttcttctgccgctcctggtgctgcctgtgtgctccttccgtgcggacccggcgcctcttttgtgaagcggcagctgaggagactccggcgctcgccatggccgacgagaaacccaaggaaggagtcaagactgagaacaacgatcatattaatttgaaggtggcggggcaggatggttctgtggtgcagtttaagattaagaggcatacaccacttagtaaactaatgaaagcctattgtgaacgacagggattgtcaatgaggcagatcagattccggtttgatggacagccaatcaatgaaacagacacacctgcacagttggaaatggaggatgaagatacgattgatgtgttccagcagcagacaggaggtgtctactaaaaagggaacctgctactttactccagaattttgttatagaccaagaatacattcgcaattagaaagccgcaatttggttccaccacatcctgactactacagtatagttttctctattctttcatttccctgtccccatttctttattgtacataaagtaactggtgtatgtgcacaagcatattgcgcttttttttttccttttttaaactaaatggccaatgttctgttttgattgacatcagatggagatggtctgtggggagtactggttctgtgaaaatatccccctttctccattagtggcatgctcattcagctcttatctttatttccagtaagttattttgctctcaatgttttaacaaaagaatccaacaacaaaatccttgcataccttgttcgattggagaattttaatgtttttcatttatcattgtaaaaccaaggacaattttataacttttttgtacgtagctgttacatgtagggcaatctgtctttaagtaggggtaaattactcttgaagaaaatgatcctagatagttttcccttcaagtcaagcgtcttgttgtttaaataaacttcttgttt

SEQ ID NO: 6463 - DNA, 997 bp, Cricetulus griseus
aacaaagcaagacaggaagattttggaagcgcgggaaaatttttgcctgctcgtgaaacagctgtcggaggcagaggatttggcttcaagcctgcaagaactcgaacaagactatggagaatcctttctggttgccatggaaaagctgctgtttgaatacttgtgtcagctagaaaaggcactgcctacagtcagagcacaagagcttcaggatgttctaaattggattcagcctggctcacttgtcaccaattctgttgctttgcgccagtatggtatggacatgggatggccacttccagagagctctgattctggctcagtgaatctgccagaacccatggaacggagtcctcatcggcaaatgaaaccagcactccacagtcctctgcttaatgctaaacttgaccttcaccgaccggcttcacgggaacacccggaacatgtagctggcaactgctttaatctggcccctctaggacagcgaaaatcccgatcacagtggacgtctgcaaagcgatgccataaagagcggcccacagtcatgctgttcccttttaggaatatggacctacctgcccaaaataaatctaaccctaaacacagggaagagcatggactggacacagcaggttctatgggtacaaaaacagtctccacagggaagtctaagactccatctcagaccctcgggaaaaggactctagagggcccacctgactcagatgcagcagagcaaaaagagaactctgtgaattgctacatggatcctctaagactctcattgtcgcctcctggagccaagaaaccaatgcagtccccatctctgtgtagctctgtcattaccataggggacttggtgctggactctgatgaggaagaaaacagtcagaaggaaggagaggagtctctgaaaaactatcagaagacaaagtttgacacctttatccccatgttttgtgactacatgcctgagtcctgcctattccttcctggc

SEQ ID NO: 6464 - DNA, 997 bp, Cricetulus griseus
ccatggcaatgggacagaagttgatgagggcggttcgagtgtttgaatttggtggaccagaagtgctgaagctccagtccaatgtggcggttcccatcccaaaaggccatcaggttctaatcaaagtccacgcctgtggtgtcaacccagtagagacttatattcgctctggagcctacagtcgaaaacctaccttgccctacactccaggcaccgacgtggctggggtcatagtatctgtcggggacagcgtgtctgctttcaagaaaggtgaccgggtcttctgctccaacacagtttctggcggctatgcagagtttgctcttgcagcggatcacactgtctacaccctgcccgagaccctggactttaggcagggggccgcacttgggatcccgtacttcacagcctgccgagctctgttccacagtgcccgtgtgcaagctggggaaagcgtcctggttcacggggccagtggaggtgttggattagctacgtgccagattgccagagctcatggcttaaaggttttgggcacagctggttctgagaaaggaaaaaagcttgttctgcaaaacggggctcatgaagtgtttgatcacaaagaagccaattacattgataaaatcaagaaatctgttggtgacaagggggtcgatgtggttgttgagatgctggcaaacgtaaacctgaataatgacttgaagcttctgtcccgtggagggcgggtgattgttgttggctgtagaggttctattgaaatgaacccacgggacaccatggcaaaggagacaagtataattggagtttctctcttttcatccaccaaggaggaatttcaacagttcgcaggcatcctccaaacaggaatggaaaaaggttgggtgaaaccagtgataggttctgagtaccccttggagaaggtcgtccaggcccatgaagacatcatccacagcagtgggaagaccggaaaaatgattcttgtcttatgaggacc

SEQ ID NO: 6465 - DNA, 996 bp, Cricetulus griseus
  modified_base (978)..(978): a, c, t, g, unknown or other
acagttgatgtcagcttgtgtccttttctacaagtcccttcagatcctgggttgttaaaggaaaagcatgatttcaaagatgctacgtctcagttattgtccacttacggtctttctgggagacatgcagaatcacccaaattcttcaaaactcaggctaaggttgaaacagaaaaaaaacgccacaagctctgcaaaatagcctatatacatattccttctgcagaaagtcagcattaattcacagtaggcattttaacaggacagataatagccactggataaacagacccaatggatttctagaacaatatggatcgactcccagaacttctggatgtaataatttggtgagttagcagttggcttgagccatggagaccacagcagcatgacattggcagaggcagctgtgcggctgcagtggcagagaatacttaactgagagatgcatacacagtaagcggctggtaattggttcagtaaatggcagtgtgctgcaagcgtttgcagaggctacaagagcagtgccagtaacctatattacacaagtgaatgaagtttgattacagtagtactcactagcccagtgagtgctcagatggaaaccaaggaagacaggttttggtcttgtgtatatcgtttatatcatgccctaaaagagaagaaggtcttccttggaggtggtgctgttgaatttttatgtcttagccatcttcaaattcttgctgagaaatctttaaataaagaaaatcatgcttgttcaggatggcttcctgattcttcctcttggatggcctcatctctgtcagtctacagacctactgtgttgaagtacctggcaagtgggtggcatgaatacctgtcagctgtcatgtttaacactgccactcacccatcggcaatggaagccagcacattcattcaatatcatgtacaaaaataaaagaagttgctttgtatcaaaaaaaaaaaaanaaaaaaaaaaaaaaaaaa

SEQ ID NO: 6466 - DNA, 996 bp, Cricetulus griseus
gcggctcgccatgccgctcggcctcttccggcgcctcctcctggcgccctgctgctggtgatcgtctggaccctcttcggaccctcgggctttggggaggagctgctgagcctgtcccctggcgtccctgcctgcccgccccagcctcaccggggccgcccctggccctgccccgcctcttgattcccaacccccaggcctgcggcggcgccgggcccccgcccttcttgctcgtcctggtgtgtacggccccggagcacctgagccagaggcgcgccatccgggggtcttggggcgccatccgcgaggcccgggggttcagggtgcagacgctcttcctcctgggagaacccacgggacagcaccgccccgacctggcctcggagtcggcggcacacaaggacatcctgcaggccgccttccaggactcctaccgcaacctcaccctcaagaccctcagcgggctgaactgggtgcggaaatactgtcccggagcccggtacatcctcaagacggacgacgacgtgtacgtcaacgtcccgagctggtgtcagagctgatccagagaggggcccttcagagcgatggcagaagggcgaactgtggccttgaaaacctgggggtccttttccccaccttacgcctcaggcacaggctacgtgctgtccgcctctgcagtgcacctcattctgaaggtggccagccgggcaccccatctacccctggaggatgtctttgtgggagtaagtgccaggcgagggggccttgcccccacacactgtgtcaagttggccggtgccactcactaccccctggacaggtgctgttatgggaaattcctgctaacatctcacagattggatccttggaaaatgcaggaagcctggaagctggtgaaccgacttcatggggaaagtgctgagcccttttgctcctggccccaggcattcctgggtgtcttgaggtgccggttcatagcctggctcaacagctgag

SEQ ID NO: 6467 - DNA, 995 bp, Cricetulus griseus
agaggtcattttcaacaatggggaaagagccagaagtacagatgctgatcaagaaagaaaatcagcaacaccattcctctcactattcgtctgactttgggtccacgccacagtcttctgtctattcatcacccgtccatcagcctaaatgtccaagtactaaggagaagaatcccaaaagacacttgtcaggccaccaggtgtatcaccaagccgttaggaaagttagccctaaggctggacccagcaaaagggaagccgaataggatttcgatcccaaagcctcaacagagagccgcttcggaaagatccagatatcattacaaagcggattctgtctgcaaggcttctgaaaatcaatgagctgcagaacgaagtgtcggaactacaggtcaagctagcccagctgctcaaagaaaacaaggctttgaaaagccttcagtttcgtcaggagaaagcactgaccaaatttgaagattttcctcggtgaaggaagaaagctttaatcccaacagacagcggctgaagcacgcgagcaataagccatcggtgacagctgttgactctgttgatgaggacattgaagaggttacactcagatgactgactggagcacacagagtatatatattattttttaaattgtaaatattaaaatattttaatacagtatttattataaaatttaaatttttaatggtaaaatggccttattagggagtcatttttagcagctaaacatggcacaattaaacaaatagtgacataccacaaagccacgttgctaagaatgctttttttgttttgttttgaaatgaaccaagaggagagttgttccttactttttctatttttacagctggtctcactaccaaatacaggaaggagaagaaatgtcagcccagcacagaatgatttcaactcaattatgttccagagtcctagtttagaaatttaatacaaagtttcaatacacaaaaaaaaaaaaaaaaaaa

SEQ ID NO: 6468 - DNA, 995 bp, Cricetulus griseus
gtaggcctccctaggccgccatgaaccggctgcaggatgattacgatccctacgccgtggaagagccgagcgacgaggagccggctctgagcagttctgaagatgaagtggatgtgctgttacatggaactcctgaccaaaaacgaaaactcatccgggaatgtcttactggagaaagtgaatcatctagtgaagatgaatttgaaaaagaaatggaagctgaattgaactctaccataaagacaatggaggataagctgtcctccatggggacaggagggtcttcggcagttgggaatgttggaggagttacagcaaagtactatgatgacatttattttgattccgattctgaggatgaagacaaagcagcacaagtgaccaagaaaaagaagaagaaacaacgcaggattccaacaaacgatgagttgctatatgatcctgagaaagataacagagaccaagcctgggttgatgcacagagaagaggttaccatgcttttggattgcagagaccccatcagaaacaacagcctgttccaaacagtgatgctgttttgaattgcccggcctgcatgactacactgtgccttgattgccaaaggcatgaatcctacaagactcagtacagagcaatgtttgtgatgaattgttctgtcaacagagaggaggttctaagatacaagaatccagaaaacaggaagaaaaagcggggtgctaagaagatgaggtctaacgctgagggtcctgtggagacagaagaggaagaaatctaccatcctgtcatgtgcacagagtgttcaactgaagtggcagtctacgacaaggatgaagtctttcattttttcaatgttttagcaagccattcttgaattaaaacaatagttgtactttaaaaaaaaaaaaaaaaaaaaaaaaaaaaaaaaaaaaaaaaaaaaaaaaaaaaaaaaaaaaaaaaaaaaaaaaaaaaaaaaaaaaaaaaaaaaaaaaaaaaa

SEQ ID NO: 6469 - DNA, 995 bp, Cricetulus griseus
gggctttggttctgaatgatggcgtctcgggcaggcccgcgagcggccggcaccgacggcagcgactttcagcaccgggagcgcgtcgccatgcactaccagatgagtgtgacgctcaagagtgaaatcaagaagctgatctacgtacatctggtcatatggctgctgttggttgccaagatgtgtgtgggacacctgaggctcttgtcacatgaccaagtggctatgccctatcagtgggaatatccatatttattgagcattgtgccctctctcttgggccttctctccttccctcgaaacaacattagctacctggtgctctccatgatcagcatggggctcttctccatcgctcccctcatttatggcagcatggagatgttccctgccgcccagcaactctaccgccatggcaaggcctaccgcttcctgtttggtttctccgctgtctccgtcatgtacctagtgttgatactggcagtccaagttcatgcctggcaactgtactacagtaagaaactcttagactcttggttcaccagcacacaggagaagaaacgtaaatgaagcctgcctgattgaagggagctgttcagaatctccatggactgtggcatctgtgatgttggcacctagtgcacactatcctcagattttggccttgagttctctgttaccatctgctgagatgacaaatctgtagtgtttaatttattcttgactagccacaaaccggatgaccgatgtctgtggaacactttccagactgagccttatccttgccttctcttggtcaaattccttacttccatttatcacctcttcatcaccgatactaaaagagatctggaataaatcagtgcagaaattctacttcaatctgtaggtcatggggcaagcaacatttgggaagttgctccccctaaaggctactctgtttactgcaaaccattttaattaaaaaagaacttcaataaagttaagactgtcct

SEQ ID NO: 6470 - DNA, 994 bp, Cricetulus griseus
attgaccggagtggccgacactttggtacaatccttaactacctgcgggatgggtcagtcccactgcctgagagtactagagaactcggggagctgctgggtgaagctcggtactacctggtccagggcctgattgaagactgtcagctggcactgcagcaaaaaaagggagaacctgtccccgctctgcctcatccccacagtgacatccaccccgggaagagcagcagcttctggccagcacctccaagcccgtggtgaaacttctgcataaccgcagtaacaacaagtactcctataccagcacttcagatgacaacttactgaagaacatcgagctgtttgacaaactagccctgcgcttccatgggcggctgctcttcctcaaggatgtcctgggagatgagatttgctgctggtctttctatgggcagggccgaaaaatcgccgaagtgtgctgcacctccatagtctatgccacggagaagaagcagaccaaggtggaattccctgaggcccggatcttcgaggagacactgaacatcttgatttatgagactccccgtggcccagatctagctctcctggaggccacaggggggtgcagctggaggtggtggggcaggcagaggagacgatgaagagaaccgggagcaccgtgtccggaggattcatattcgccgccatatcacccatgatgagcgtcctcacggccaacagattgtcttcaaggactgacctttgatctctcctatcttcctcttgcttgtgggacccagtccctctctctttgccccggctttgctggccaagtcgtgggtctttcctgtgtcccgtcattgcatgctatgttcagtgaggccctttccagtcattgccactcactgctaacaacatggtacattccagcttccccctcaggcggggctcttcagaaagccagcatccacccctcttccacgtccttgttctgctgtctttctcttaccatctg

SEQ ID NO: 6471 - DNA, 994 bp, Cricetulus griseus
attcctgtccacccctcgtggcagattccgacacaacacagtcatcttcatcctaggcaaggagcaccatctgaaggagctacacccactgcatcgacttgatcgactcacctcaggagtgctcatgtttgccaagacagctgcattctcagagaagattcacgagcaagtgcgggaccggcgggctggagaaggagtatgtatgccgggttgaaggggagttccctgacaaggaggtgatttgcaaggaacccatcttagtgggtggtcttacaaggtaggagtgtgccgtgtggatccccggggcaagccctgtgagactgtgttccagaggctgagctacaatggccactccagtgtggtacagtgccgaccacttacaggccgtactcaccagatccgagtccacctgcagttcctgggccaccccattctcaatgaccccatctacaattcaacggcctggggtccttctcgaggccagggtggccacattccaaagacagatgaggaacttctccgggacctggttgcagagcatcaggccaaagaaagcctgaatgtgctagatctctgtgaaggtgacctggccccaggactcatggattctacagccccttcttcaaagttagccaagaacagcctggaagagttggcttcagtagcccagaagatagagagaatagcagaggcaccctctcaggatctggacacaccagagaaagcagctaaagcagaagttatgaatcaagaaacagacccactctgtgcagagtgccggctgtcgcgacaggatcccttgccccaggatcttgtgatgttcctgcatgccctccgctataaagggccagactttgaatatgtctcacccatgccagcctgggcacaggatgactggcaggaagactgagggatgtggccaatggaagagtggcttcttgggttgcacacacacacacatacacacacacacacacacacacacacacacacg

SEQ ID NO: 6472 - DNA, 994 bp, Cricetulus griseus
cgcggccggctctccgccgcctggtgacatgctgcagaagccgaggggccgcggccggcccagcacgcaggccgatagggagcgggagtggggagacgcaggcgaggaggctcccagcacgtcccgcggcacgggcggcacgtcccagggctcccgcgccctccctgtcgtcccccgccgtggggccgcgcacccagaagcagctggaggtgaaggtggccgagctggtgcagttcctgctgatcaaggaccagaagaagatccccatcaagcgcaccgacatcctgaagcacgtggtgggtgactaccgggacgtgtaccccaacctgctgcggctggccgccgagcgcctacagtacgtgttcgggtacaagctggtggagctggagcccaagagccacacctacattcttatcaacatgctggagccggtggaggaggacgccgaagtgaggggcgaccagggtacacctaccacgggcctgctcatgatagtcctggggctcatcttcatgaaaggcaacaccattaccgagaccgaggtctgggacttcctgcggcggctcggggtgtaccccaccaagaagcatttaatttttggtgacccaaagaaactcattactgaggactttgtgcggcagcgctacctggagtaccggaggataccccacaccgatcccgtggactacgagttacagtggggcccgcgaaccaacctagaaaccagcaagatgaaagttctcaagttcgtggccaaagtccataaccaggaccccaaagactggcccacacagtactgtgaggccttggcggatgaggagaatagggccagacctgcagcaagtgccccaaccacatcctcctgaacttgaggtgcagtctgaggaactcccgaaatccaggataaacgaacagggaaaaggggttggttggaggaagcttgattctgctaggtgtaaatatcttgtagcatcaggatgttgtgcaaggtttt

SEQ ID NO: 6473 - DNA, 994 bp, Cricetulus griseus
accacagcaccagcaccatgcctatgatactgggatactggaatgtccgcggtctgacaaaccccatccgcctgctcctggaatacacagactcaagctatgaggagaagaaatacaccatgggggacgctcctgactttgacagaagccagtggctgaatgagaagttcaagctgggcctggactttcccaatctgccctacttaattgatgggtcccacaagatcacccagagcaacgccatcctgcgctacattgcccgcaagcacaacctgtgtggagagacagaggaggagaggattcgtgtggacattgtggagaaccaggctatggacacccgcatgcagctcatcatgctctgttacaaccctgactttgagaagcagaagccagagttcttgaagaccatccctgagaagatgaagatgtactctgagttcctgggcaagcggccatggtttgcaggggacaaggtcacctatgtggatttcctcgcttatgatgtccttgatcagtatcaaatgtttgagcccaagtgcctggatcccttcccaaacctgaaggacttcttggcccgctttgagggcctgaagaagatctctgcctacatgaagaccagccgcttcctccggagacctatattttcaaagatggcacagtggagtaacaagtaggcccctgctacacgggctctcatatggaggacctgtgcacactggatcctcctggccctggggacagctggtcttctgcactgctgcctcaaggttctcacttctttctcctttccctcccttccccagctttgtcagccccttggctcctcagctcttaacctagtcaaggccatgtagtcttcaactccccacttcctttcaccaaggtcccttcttcatttgtgccctaacccaagcacacagtccttttctatgatttgatgtcggccctggactccactccctagaattaccctaaaggtcaatactgtctcagt

SEQ ID NO: 6474 - DNA, 993 bp, Cricetulus griseus
gcagcaaggacagacagcatgagcacagctggaaaagtaatcaagtgcaaagctgctgtgctatgggagcctcacaagcccttctccatcgaggacatagaagtcgcaccccccaaggcccatgaagttcgcattaagatggtggccacgggcgtctgccgttcagatgatcatgtggttagtggaagcttggttacacctcttcctgcagttttaggccatgagggagccggtattgtggaaagcgttggagaaggggtgacttctgtaaaaccaggcgataaagtcatcccgctcttttctccccagtgtggaaaatgcagggtttgcaagcacccagaaaacaacttgtgtataaaaaatgatttggtacaacctcgggggactctactggatggcaccagcaggttcacctgcaaggggaagccaatccacaacttcgtcagcaccagcactttctcccagtacactgtggtagatgagatagcagtggctaaaatcgacggagcttcaccactcgagaaagtctgccttttgcaaaggccaaagaattgggtgcaacagagtgcatcaaccctcaagactacaacaaacccattgaggaagtactccaggaaatgacggatggaggggtggacttttcctttgaagtaatcggtcgactggacaccatgaattcttccctgttgagctgccatgcagcatgtggagtaagtgtcattgtcggggtgcctcctaatgcccaaaacctctccgtgaaccccatgttgctgttgctgggtcgcacctggaaaggagcaatatttggtgggtttaagagtaaagatgccgtccccaagcttgtggctgattttatggccaagaagtttccactggaaccattaattacccatgttttaccttttgagaaaataaatgaaggatttgatctgcttcgtgctggaaagagtatccgtactgtcctgacgttctgagaccacactgatgccttcc

SEQ ID NO: 6475 - DNA, 992 bp, Cricetulus griseus
  modified_base (564)..(564): a, c, t, g, unknown or other
agagccattggcaagctcagcttcctcccatcccggaatgagcgaaaatgtatctgcttccttggagaacagtcctgccattcctgttaactgctcctcagccatcccccagcccagcatgacctccaagccctggcgcagcaagtccctcagtgtgaagcatagcgccacagcatccatgctttcagtcaagcccactgggcccgaggtttccaggcccacacctgaagccatgaagcctgcccccaaccaaccagaaatccatgttggaaaagctcaaacttttcaacagtaaaggggggctccaaggcaggtgaaggctcaacatccagggacacgagctgtgagcgattggagatcctgcccagctttgaagagagcgaggagttggaagctgctagcagggccctttctacttcaagccctgcatccagcagcccaaagattgcactcaagggcatcgcacagagaactttcagcagggcacttaccaacaagaagagctccccaaagggcaatgagaaagagaaggagaaacagcagcgggagaaggaagaaggggtntgtgtgtgtgtgtgtgtgtgtgtgtgtgtgtgtgtgtgtgtgtgtgtgtgtgtgtgtgtcaaatcctatgcaacactgatgctgaggtaccagtaggagccaaaagttttcttcccaagaggccgtcaatgaggcgagaagtccttttaatttaaggttgggggtggggtgggagtgtgacaagggcaagacttgcccagatcttcctctgaacttggggacattttaaatttgattgtttaaaatgctcgactttaaaattctgtgtgcccaaatttgaccatggcaaatctattccaaaagcaaaatagtccaactgtgcagctgttgaagggaggtttgctgtcttgacctgcttgcttcaggctgacccatttatggaacatgttctataggatgttactatttattttttttctattgttaac

SEQ ID NO: 6476 - DNA, 992 bp, Cricetulus griseus
gtctgcaaaggcagttcctggagctgactgcatggtgccaagctgtggtctgctgccgagccacaccccttcaaaaagtgaggtggtgaaattggttcgaaaccatctccatgttatgaccctggccatcggtgatggtgcaaatgatgttagcatgatacaagtggctgacattgggataggtgtctcaggtcaagaaggcatgcaggccgtgatggccagtgactttgccatctcccaattcagacatctcagcaagctccttcttgtgcatggacactggtgttacacacgactctccaacatgattcttctaatttttcttacaagaatgtggcctatgtgaacctcctcttctggtaccagttcttctgcgggttttcaggaacatctatgactgactactgggttctgatcttcttcaacctcctcttcacgtctgtccccccatcatttatggcgtgttggagaaagacgtatctgccgagaccctcctgcagctgcctgaactttaccagagtggtcagcactcagaggcgtactcacctctcaccttctggatcaccttgttggatgccttctatcaaagtctggtctgctttttgtgccttactttacctaccagggctctgacattgacatcttcacatttgggaatcccctgaacacagcagctctgttcatcattctcctccacctggtgatagaaagcaagagtctgacttggatccacatgttggtcatggttgggagcatcttgtcctacttttatgagacaatcatcttcaaaacagtctcctagataccctctgagagttcatcgttctaacagtgctcagcaacttgtctttgctgtagcctctacagaatgagataggggttgagactgacacaggttatgctcagtgggaatcccgaggctcttagaaaattaacatacttaagggtagaaatgtctgtagcaagtattctgctgtgacaaatcatggatg

SEQ ID NO: 6477 - DNA, 992 bp, Cricetulus griseus
catcctggggcagcagctggacaaccaatggacctcagtgccagggtattcttcctccagctgggatctgtggctgccggctgcatatgcctcctggctgtgtgctcctcttccccacaccgtctgccccttcctctttgtatcttccagtgtctggatactacctaggcttttcagcagcaaggcagggaccgttggggagggggcacatggctatccttcaccggtgttccttgactaggggaagctgctaccagtcagcttgttttgctttttaaagtgggggggaaaatgacactcaggatgctcaagatttaaaagtcgcccatcatttgcacaaatttccatatcgtgctaagtcctgttccatatttgattgtggtccaagcctgattatactcagactcaaccttgagggcattagaaagagttttgtatcaaatccaaatggtcccattggggttggggtggcagtaaatgaatgacaggagctcagcatctgagaactcttgcttccttctctggctgtcaaccccgtccaagataggctgctatcactcgtcagccggtgctttctctccccctcccaaggcagaccacccttcctccatgacactggcctaccctgtctctcattgtccccaccatttccacccccatgcatggctgctgtgggtcttgttttttgaacctcactgtgggagatccaggcataccccctgagccagctggctgctgtgccaaggcctgttcagagttaataataatcattagttgaatggcgctggggcctttcagctccagatctctaagcacttgcaggctgactcagccagccttcaccttccccctcttctgggctttggagtgtaatagcatgggaaggcactgtgggagagggagtctggattcttgctgcctgaccatgcctgaggattttctctgagagtaagcagtgaggccaaggtacacagagaatatagtatgctcag

SEQ ID NO: 6478 - DNA, 992 bp, Cricetulus griseus
gatggggtccccgcagcgcggggcccggcccttcttggggtccccaggcgcctcggctcccccgtgaccgtcggcgctggtggcgcggcccttctcaggatgaagggcggcgagggagacacgggcgaacaggccccgctgaacccgggggcggacagccctgcgggctccgccacgtaccgggagttcgtgcaccgcggctacctggaccttatgggggccagtcagcattccctgcgggcgctcagctggcgccgcctctacctcagccgggctaagctcaaagcctccagccgcacgtctgctctgctgtcgggcttcgccatggtggccatggtggaggtgcagctggagagtggtcatgaatacccgccaggcctgctagtggccttcagcgcctgcaccactgtgttagtagctgtgcacctctttgcactcatggtctccacctgtctgctgccccatattgaagctgtgagcaacatccacaatctcaactctgtccaccagtcgccacaccaacgactccaccgatatgtggaactggcctggggcttctccactgccctgggcacctttctcttcctggccgaagttgttctggtgggctgggtcaagtttgtgcccattggggcacccatgaacaaaccagctcctgtggtacctatgtcccaggtgccaccagtgaccgtctcccttagtttagcttccaacctcacaccatcctctgcttctatagccacatcacagcagccttccaaagcctgcccaccccggcaagtgtgtggtggtgcccatggacctggttggcaggcagctatggcctccacagcaatcatggtacctgtgggacttgtgtttatggcctttgccctacatttctaccgatctttggtggcgcacaagacagaccgccacaagcaggagctagaggaactcagtcgcctgcagggggagctgcaggctgtgtgagcctggctttagatttgcaa

SEQ ID NO: 6479 - DNA, 992 bp, Cricetulus griseus
ctggcggagcccgggagttctcgctgtgatggctaagtccagcctgggccaggattccgacagcaccgctgcagtggcggtgctaaagcgggcagtggagctggatgcagagtcccggtaccagcaggctctggtgtgttaccaggaggggattgacatgctcctgcaggttctcaaaggtccagagactctagtaagagatgtgttctcagaacgaaaatctctgactacatggatagagcagaaaacataaagaaatacttagaccaagaaaagaagataggaaaatatcacaagacaaattaaaataagaagagaatgcaactgggttcagttacgagacacttttaaagaataccttcatgagacagttacggaagtttggatagaagacccttatattagacaaactcatcagctgtataacttccttcggttttgtgagatgttaagaagccatgtaaaataagaactattcaccttctcacctctgtggatgaaggctttgggaatgcacagcaaagtagtggcctggaagaaataaaacaatccctcaggagtcatggagtgctgttggaaataaattattcttcatctatacatgaccgagaaattaggttcaacactggatggatgtttaaaattggaaggggactcgattattttaagagaccacagggtcgtttttcccttggatattgtgatttagatctgagaccatgccatgaaacaacagtggacattttccataacaagcacacaaaaaagatatgacgtgtaataacctaactatacatttctgctttggatggtttcagcccattttctgttgctaaaactgaataccatacactggataatatataaagagtagaggtttaggctttggcatctggggaggatcatttttctgcatcccaatggtaaaatgcaacaagatggagcaggctttttttataatgtatgagtttaacaataaatgtttacatttc

SEQ ID NO: 6480 - DNA, 992 bp, Cricetulus griseus
agctgctccgaggtctggactccttcatctcaccgcgtagtgcatcgtgacctaaagccacagaacattctggtgaccagcagcggacaaatcaaactggctgactttggccttgcccgcatctatagttttcaaatggcccttacctcagtggtcgtcacactgtggtaccgagccccagaagtcttgctccagtccagctacgccacccccgtggacctttggagtgtcggctgtatatttgcagaaatgtttcgaagaaagcctctgtttcgtggaagttcagacgtggatcaactaggaaaaaatcttggatgtgattggacttccgggagaagaagactggcccagggatgtggcccttcccaggcaggcttttcatgccaaatctgcccaacccatccgagaagttcgtgacagatattgacgaactaggcaaagatctacttctgaaatgcttgacgtttaatccagctaaaagaatatctgcctatggcgccctgagtcacccatactttcaggacctggagaggtacaaagacagcctgcactcccacctgtcatccagccagagcacctcagagctgaacacagcctgaggttccccagggatgccatgagctggtcatctaaacatggtggctgacaagacccctacgagagccttgcagagcagttgaagattgctggctgtgggctttccagctgctggcttccagatgcgctctgcttcaccaaggaaaccacctagtttactgttgagaaatcaatgcaagagtgattgcagctttatgttcgtttacttgtttgtctgtctgtgtgtttcaagaacctggaaaacttccagaagaagagaagctgctgaccgattgtgctgccatttccttttctaaccttgaatgctgccaatgttggatggtcatccaggcccagtcgggttaggatgtaatctctgcagctgctgggcctgcttgggtacttgtgagtgtgtg

SEQ ID NO: 6481 - DNA, 991 bp, Cricetulus griseus
cattgtcccaccggcagctcccaggtacgggaccccggcgccatgagcaaacgcaaggcgccgcaggagacgctcaacagcgacatcaccgacatgctcgtagaactcgccaactttgagaagaacgtgagccaggccattcacaagtacaacgcgtacagaaaagcagcatctgttatagcaaagtacccacacaaaaatcaagagtggagaagaagctaagaactgccaggagttggaacaaaaattagctgaaaagattgatgaatttttggcaactggaaaattgcgtaaacttagaaaagattcgtcaggatgatacgagttcatccatcaatttcctgactcgagttactggcattggtccatctgctgcaaggtaagtttgtagcagcttcagacgaggtgcagagtccagcggagacatggatgttcttctgacccacccaaacttcacgtcagagtcaaacaagcagccgaagttgttgcatcgtgttgtggagcagttacagaaagtccatttcattacagacactctgtcaaagggcgagacaaaattcatgggtgtttgccagcttcccagtaaaaatgatgaaaaggaatatccacacagaagaattgatatcaggttgatccccaaagatcagtattactgtggtgttctctacttcactgggagcgacatctttaataagaacatgagagctcacgctctagaaaagggcttcacaatcaatgagtacagcatccgccccttggggatcactggagttgctggggagccccttccagtggacagtgagcaggacatttttgattacatccagtggcgataccgggagcccaaggatagaagtgaatgatgccaccacccctcccaccctggcatatcccactaggagtcctaatttatttcttaacctttgctatgtaagggtttgtgttttaagtgtattgtttcttctccatgcttaccatgtactgtagtcaa

SEQ ID NO: 6482 - DNA, 991 bp, Cricetulus griseus
  modified_base (415)..(415): a, c, t, g, unknown or other
  modified_base (424)..(424): a, c, t, g, unknown or other
  modified_base (958)..(958): a, c, t, g, unknown or other
gcacggtgcttcccccgcggagctgaccggtcagcccgcgctccggcagagccctcggtgctcgcccgccagcgggacagaacgcccgcctctggccgctctctggaccctggccgccccgagcggagattggagcaaaatgatgcttcaacatccaggccaggtctctgcttccgaagtcagtgcgtctgccatcgtcccctgcctctcacccctcggtcgaggagttgaagaatgagaaacagcacttgatatacatgctcaacctgcaccgacccacgtcgtatcgtgccgggctcagaatgggcggactccggaagatgagaggaacctctttatccagcaaataaaagaaggaacattgcagagctaagcggcagggcgtgggggcaactgggagtccttattgaatccnccttttccnccccaaaccctgaagccgttggaaagctggcttcctgtgcacttctagcatctcagcagccgagagccgttggggcaggggggcctgcggcgaccactgcgttgtcccactctgccctggagtgaactgtggcgcaggggccaagagcgtcccttgtctcactaactccaggattttaggccttaccatcctgaccattctcagatgatccagctggtccccggctggggtcccatgcaaagcaggacacccactaatgggattcacgcagaagtgtccgcctcggtaggtggggtgggaccagggccgccactgcagctgacaccatcccttctagggaatacggagcaagaacactcgttgtcgaggttgtccaatggccagggtgtgcttctagaaaataagctgtttcatcccagatggctgtgcacagggcattcacttcagaaccaggtgttgtgttgtgctatttggatgtttgtcttgcacgacactgtaatgatttttctgggagtttcatcagaactgatttcngagtaggtttgggagtctgccatcatggatagt

SEQ ID NO: 6483 - DNA, 991 bp, Cricetulus griseus
atggctgctgacgaagatgagttgaatcttctggttatcatagttgacaccaacccgatttggtggggaaagcaagcattaaagggatctcagtttactttatccaagtgcatggatgctgtgatggtgctggcaaattcccatctgttcatgcaccgctccaaccagctggctgtgatagccagtcacattcaggaaagtcgcttcttatacccggggaagaacggcagacttggagacttcttcggacgaccctggcaacccctttcctgactgtaatccctctgggagtaaagatggcaaatatgagctgttgacagcagcaaatgatgtgatcgccgaggagatcaaagatctgatgaccaagagtgacataaagggccagcacacagagacactactagcaggatccctcgccaaagccctctgctacattcacagaatgaacaaggcagttaaagataatcaggagatgaaatcaaggatattggtgatcaaggctgcagaggacagtgcactgcagtacatgaacttcatgaatgtcatcttcgctgctcagaagcagaacattctcattgacgcctgcatcctagactcggattcagggctcctccagcaggcttgtgacatcacagggggattgtacctgaaggtgcctcagatgccttctctcctgcagtacttactgtgggtttttcttccggatcaagatcagcgatctcagctaatcctcccgcctccgatccatgtggactacagggctgcctgcttctgtcatcgaagtctcattgagattggctatgtctgctccgtgtgtctgtccattttctgcaatttcagccccatctgcaccacgtgcgagacagcctttaagatctccctccctcctgtactgaaggccaaagaaaaagaaacagaaggtgtctctgtgatgaacaacacatgcgtccccatctcttaccacagctttttttttattttttaaagcaca

SEQ ID NO: 6484 - DNA, 991 bp, Cricetulus griseus
gaagtagtacttcaaagaaaacccgatgcgacccctccagattgttccaaaccgattcattccccagttgtgtcatagactgaagcctccagcctccccacaaagcaagatctgcctcaccatggctcgtccgagttcaaatatggcagattttcggaagtgttttgcaagcgcaaagcacatcgccatcatctcaggggctggtgttagtgcggagagtggggttccaactttcagaggagctggaggttattggagaaaatggcaagctcaggacctggcgacgcctcaggcctttgccagcaacccatcacaggtgtgggagttctaccactaccggagggaggtcatgcggagcaaggaacccaaccctgggcacctggccattgcccagtgtgaagctcggcttcgagaccagggccggagggttgtagtcatcacgcagaacattgatgagctgcaccgcaaggctggcaccaagaacctgctggaaatccacggaaccttatttaaaactcggtgtacctcatgtggcgctgtggctgagaattacaagagtccgatttgtccagctttagcaggaaagggggctccagaaccagagactcaagacgccagaatcccagtggacaaacttccccgatcgtgaggaggcaggatgtggtggcttactgcgacctcatgtggtgtggttcggagaaaacctggatcctgctgttctggaagaggtggacagagagctcgccctctgtgacctgtgtctagtggtggggacatcctctgtggtctacccagctgccatgtttgcccctcaggtggcttccaggggagtcccagtggctgagtttaacatggaaaccaccccagccaccaacagattcaggtttcattttccaggaccctgtgggacaactcttcctgaagccctcgctcctcatgaaactgaaagggtgtcttaattgtcctttggaaagaggagaaaatcctgcag

SEQ ID NO: 6485 - DNA, 990 bp, Cricetulus griseus
acttggtgattggggcccgtggagagcgccttccaggaatgtgatgatgtgattgggagagagctggaggcctcaggccaggtgggtggctgtacagccctggtggctgtgtccctgcaggggaagctgtatgtggccaatgctggggatagtagagccatcttggtgcggagagatgagatacgggtgctgagtactgagtttaccccagaaacagagcggcagcggatccagcagctggcctttatctaccctgagcttctagctggtgagttcacccgactggagtttccacgacggctgaagggggatgacttaggagagaaggtttttgttcagggatcatcacatgaatggctggagctacaaacaggtggagaagtctgatctcaagtacccactgattcacggacagggtaggcaggctcggttactaggaacactggccgtctcccgaggcctgggagatcaccagctcagagtcctggacaccaacatccagctcaagcccttcctgctctccatcccacaggtgactgtgctggatgtggaccagctagcattggaagaggaggatgtggtcatcatggcaactgatgggctctgggatgtcctgtccaatgagcaggtggcccggcttgtgcggcgctttctcactgggaaccgagaggacccacacaggttctcagagttggccaaaatgctgatacacaatacacaggggaaggatgatggtgccaccggagaagggcaggtgtcctacgatgacgtctctgtgttcgtgattccattgcacagccaggacaaagggaatagtggccagtgaggactctatacggcactctataatctcttcaggaccagtgcagtctgggcatatgtccactgtggccaagagtgggccctgtctggtctgtccccagccacagccgaatgctgatcttaattttttaaaaaaaaaaaaaaaaaaaaaaaaaaaaaaaaaaaaaa

SEQ ID NO: 6486 - DNA, 990 bp, Cricetulus griseus
ctgcggggcgggccaacagactgcggggcggacggtggtcgcggtgttatctcaggtcccaccgatccgacccccgccgtcgctgctgccatgacggggctggcgctgctctacaccgggatctttgtggccttctgggcctgcatgatcgtcgtgggaatctgctacaccatttttgacttgggcttccgctttgatgtggcatggttccttaccgaaacttctcccttcatgtggtcgaatctgggcattggcttagcaatctctctctctgtggttggagcagcctggggcatctatattaccggctcttccatcattgggggtggggtgaaggcccccagaatcaagaccaagaacttggttagcattatcttctgtgaagctgtggccatctacggcatcatcatggcaattgtcattagcaacatggctgagcctttcagtgccactgaccccaaagccattggccatcgaaactaccatgcaggctactccatgtttggggccggcctcacagtcggtctttccaacttgttttgtggagtctgcgtgggcattgtgggcagtggggctgccctggctgatgcacagaaccccagcctctttgtaaagattctcatcgtggagatctttggcagtgccattggcctctttggggtcatcgtcgcaattcttcagacctccagagtgaagatgggtgactagatgatctatatgggtggggccgtgccccactgttatttattgttggttttcctgggacagctggagctgtgtcccttagcctttcctgggcttggtgttcagggccctctgcactcacctcttgctgcctgttcactatggaggcattgcagaccagactgaaccccagtgtgggggaatgggctgctgatggtgactgtgtacagctgtgcacctgtgttccctacccctcatccagcccatcttcccggtgtttgtgaaataaacttgattatttgtccc

SEQ ID NO: 6487 - DNA, 990 bp, Cricetulus griseus
gtcgcgtagcagcggcagggacgcggccaagctgctaccggagtgcggtcgcctgttagcggacagtgataagactccaaggctggctcttctctgtggccacgagctcatggcaggggacaaagccaagcattgtgaactggaccaggagaaatatgatgctcacgacaacgtgaagatcatctgcctgggggacagtgcggtgggcaagtccaaactcatggagaggtttctcatggatggatttcagccacagcagctgtccacatatgctctgaccctgtataagcacacggccacagtagacggcaagaccatccttgtggacttctgggatacagcaggccaggagcggttccagagcatgcatgcctcctactaccacaaggctcacgcctgcatcatggtatttgatgtccagaggaaaatcacctataagaatttgagtacctggtatgcagaactacgggagttcaggccggagatcccatgcatcctggtggccaataaaattgatgcagacatacagatgactcaaaagaacttcagttttgccaagaagttctccctgcccctgtactttgtctcagctgctgatggtaccaatgttgtgaagctcttcaacgatgcaattcgattagctgtggcttacaaggaaagttcccaggacttcatggatgaggttttacaggagcttgagaacttcaagttggagcagaaagaggaggatgcaccagaccaagagcagagtggcatgatcaagagcccgtctccctcttaatcaagaggatacccacatgtggctgagttggggtattggggagccatttggaatacccaacatctctggggaacctatccaggctacccctgctcaacttcctacaaaccagtgttctgtggtccatgatgaggtcaacacaaacacactaggacaagcgtgatatccaccaattcctgcagcaggatgagggatccatgtctttcaca

SEQ ID NO: 6488 - DNA, 990 bp, Cricetulus griseus
gaaagtgatgcggatgaagagcttctgtttaatattccatttacaggcaatgtcaagctcaaaggcatcatcgtaatgggtgaggacgatgactcacacccctctgagatgagactgtacaagaacattccacagatgtcctttgatgatacagaaagagaaccagatcagaccttcagtctgaaccgagatattacaggagaattagagtatgctacaaaaatttcccggttttcaaatgtctatcatctttctattcatatttcaaaaaactttggagcagataccacaaagatcttgtatattggcctgagaggagagtggactgagcttcgccggcatgaggtgaccatctgcaattacgaagcatcggctaacccagcagaccaccgggtccatcaggtcaccccacagacacacttcatttcttaagggctgcccaggctccttcagatgcactgtgagtgaagatgtacaaccacctgctgggaaggactgaggaggctctagcaagagttgcctgccatagcctcaggccaggctctgtcttggttgttgcaggaacctggcctgtggaaactgcctcaccaccaggagcagtgtgagtgccaaggagcagttgttctctaaggcactgcagaaatgggcttaggctgggtggcatctggaagtcaagaataacatttgcttttccagtcagtgtgaccatgggatcccaagtgtcttgttgcttgtggcaggttttttgtgtgatttgtcctttaaaaaaggaagcttcctcggctgcaggaatcctcctgaaactcagttttgtgtttgtgttagccatcaggaagatctccaactagaaacacatgtccctgcttgctcctcctccctgtcattgctcagcatttgtgtcagggtgcccagctggtgtcatgtcacatacaagtgtcccaggatggtggctggaaaggaaggagtctcctggtaaatgactgcttgggg

SEQ ID NO: 6489 - DNA, 990 bp, Cricetulus griseus
gcacagccgccatgaattacatcaatctgcccaccgtgctgcccggctcccccagcaagacccggggccagatccaggtgatcctcggacccatgttctcagggaaaagcaccgagctcatgaggagagtccggcgcttccagatcgcccagaacaaatgcctggtcatcaagtatgccaaagacacgcgctatagcagcagcttctccacacatgaccggaacaccatggacgccctgccagcctgcctgctccgggatgtggcccaggaggccctgggtgcggctgtcattggcatcgatgaaggacagtttttccctgacatcgtggaattctgtgaagtgatggccaatgcaggcaagacagtgatcgtggcagcattagacggaactttccagagaaaggctttcggcagcatcttgaacctggtgcccctggctgagagtgtggtgaagctgactgccgtgtgtatggagtgcttccgagaagccgcctacaccaagaggctgggcctggagaaggaggtggaggtgattggtggagcagacaagtaccactcggtgtgccgcgtgtgttactttaagaagtcctcggtacagcctgctgggccagacaacaaagagaactgcccggtgctgggacagcctggagaggcctcagctgtcaggaagctcttcgcccctcagcaagtcctacagcacaactccaccaactgagaggacctggggcctgccagctcctaccccaggttggattctcagagagcagaggacgggctgggactgccgtgcctgatggacaatgtgccctggagaggctcacccgcttgtcacagccttttttagttcccttcttggttgctgagatgctttagcccagactagagccagcgcctgcctggtggttagggtttgacatccagccagaggtgaggacaaagccacagggtgttgtgacacagaggtgctggcttcttccttcttggtggct

SEQ ID NO: 6490 - DNA, 990 bp, Cricetulus griseus
  modified_base (693)..(693): a, c, t, g, unknown or other
gctgataagaaaagttgcccatattaatcttccctgaaggtacctgcatcaacaatacttcagtcatgatgtttaaaaagggaagctttgaaatcggagggaccatatatccagtggcaataaagtataacccccagtttggtgatgcattctggaacagtagcaaatacggcatggtgagctacttgcttcgaataatgaccagctgggccattgtctgcgacgtgtggtacatgcctcccatgaccagagaggaaggagaagatgccgttcagtttgcaaacagggttaaatctgctattgctgtacaagggggactgactgaacttccttgggacggagggctgaagagagcaaaggtgaaggacacctttaaggaagaacaacagaagaattacagcaagatgattgtgggcaatggatctcccaacctggaactggactgatgtgctgaggatgaacatggcttcccagaactggcctttagaagtgaagttttataacgtgttttgttgtactgtcttttgcttatttatcgttaatcttttctactggatgattgtctctacctcttcatgccagaggcaggacctacaggtgcccctttctgaccatttttgttatagtgtggactcagtgaatggtaagaccggattcttgagtggaaacagatttaaactttttttttttttnatttttattattattattatttggagcttgcctcctgtccccccaccaacctcactgtagtggtttagtcccaaactttcccagccttttaagcagaaacctaagtggtacgattaccttttggaaactgagccttaacatgtttaaaggagaaacaagcattctctgagtccaatggcatgagcaatatttgatagctatgtatttccgatgtaagctcttgaggttgttagctcaagagtaaccctgtacagaaagtgaactgtcttactatgaataaattttatatttttaaat

SEQ ID NO: 6491 - DNA, 989 bp, Cricetulus griseus
actggccttcacagacatctctagacccaaggacttgtgccccaggaggagccgaggctaatgggtgcccgcctcagccctgaggccaacgctgaggtgccccgtgaggcccgcgaggcccttagtttccacggggatgccactggcacacaggtgcatctggatgaccagaggagcacagcgcataggctatccacgtttcatgatggcattgtgttcagccagcgtccagtgtggcccggtgagcgtgtagcgctgcgcgtgctgcgacaagaggacggctggtgcggtggcctccgcgtgggcttcacgcgcctggaccctgcaaatgtggccgcatcctgcctgccgcccttcgtgtgccccgacctagaagagcagagccccacgtgggcagcgctgcttccagagggtttcgttcgtgcagggaatgtggtctgcttctgggtgaaccgtagaggctggctctacgcaaaggtcaacgctggccgtcccctcttgctgcgcaaagacgtgctggtccagggcgccccgctctgggcggtgatggatgtgtacgggaccacgaaagccattgagctgctggatcccaaagccaacgcctggatcatcaatggagaggctgtaccagagtctgaagtcacatcaggagaggagtgtgccatctgcttccacaaccctgccaacacccgcctcattccctgtggccactcacacttctgcggctcctgcgcctggcacgtcttcaaagacacggccaggtgccccatgtgccgctggcagattgaggaggtggctgtggaaccttcactgaagcctggagaaggctcctgatagagcactggttctcaaccttcctaatgctgcaaccctgtaatacagtccctcatgttgtggtgacccccaaccataaaattatgttcgttgctatttcataactgtaactttgctactgttaggatcataacgtaaatatctgatatgcagga

SEQ ID NO: 6492 - DNA, 989 bp, Cricetulus griseus
gggtcctgaggaggcaggtcggggaccggctccagagcgacgcccgcggaccgcagtgacccgcgtgcctctgtctcactgctccgcagtgtcagagttgtcctgagagaagatgggaaagggctgcaaggttgttgtttgtggtttgttgtctgttgggaaaactgcaattctggagcaactgctttatgggaatcacactattggaatggaagactgtgaaacaatggaagacgtgtatatggcctcagtggagacagaccgtggggtgaaggaacagctccatttatatgacacccgaggcctgcaggaaggcgtggagctgccaaagcattatttctcttttgctgatggttttgttcttgtgtacagtgtgaataaccttgaatcctttcaaagagtggaacttctgaagaaagaaattgacaagttcaaagacaaaaaagaggtggcaattgttgtgttaggaaacaaactcgacctttctgagcaaagacaagtggatgctgaagtggcacagcagtgggcaaaaagtgaaaaagtgaaactgtgggaggtgacagtgacagatcggaggacactgattgaacccttcactttactagccagcaagctttcccagccccagagcaaatccagcttccctctgccagggaggaaaaacaaagggaactccaattctgaaaactgagtcaagccttgaatgtctgtagcatggcacaaggctacaatttaacacggccctttacaaaaccacctctgggccttatggaactcctaaagtggtaattcaatgcactttatcaacctgcctctgcctctggactgctgggattaaaggtgtgtgccaccactgcgacaggtttctttgtgtagccctggctgacctagaagttgctttgtagaccaagttggccttgaattaagttaacaacaaaatcttaggaagtaagactgaataatatctgtttataagaaataccctactc

SEQ ID NO: 6493 - DNA, 989 bp, Cricetulus griseus
aggaatgaagggagcctgtggccttgatggagaaaaggagctaagggagaagctggtttcctggccgccctggattggcaggacgcaaaggagacgcaggggagcctggtgtgccgggtcagtctgggtctcctggcaaagagggcctgattggtcccaagggtgacagaggctttgatgggcagtcaggacccaagggtgaccagggtgaagaaaggagagagggggcccccaggagttgggggcttcccaggtcccagaggaaatgatggctctagcggtcccccagggccacctggtggtgttggtcccaaaggccctgaaggacttcagggtcagaagggtgagagaggtccccctggagagagtgtggtgggggctcctggtgctcctggtgccccccggtgagagagggggagcagggggcgaccaggacctgctggccctcgtggggagaaaggagaagctgcactgactgactcatgtagaggaggaaggccaggtacccctgaagatgatgacgacttctctgagtactctgtgtattctgtggaggactaccacgaccctgaagttccttgggatggtgatggggatatcaagggctgggaccagagaggttcagacccctgctccctaccactggatgagggctcctgtactgcctataccctgcgctggtaccatcgggctgtgcctggtggcacagcctgccatccctttgtctatggcggctgtggagggaatgccaaccgttttggaacccgtgaggcatgtgagcgccgctgcccaccccaagtagtccacagccaaagaacaggtgctgcctagggccgaagcctgcatgatgcactagatggtcatcagttcctggaggtggcagggctcagcggggtcctgccattctccgtttggtgctagagttctgtgtgcccgtgagcgtgtgtgggcactgaatggatgtgactggtgtccaacctgccccttga

SEQ ID NO: 6494 - DNA, 989 bp, Cricetulus griseus
gtgttgtggagccgagaggagtccctggcagaagtggtgtgtctggagatggtggacctccccctgactggggcacaggctgaactggaaggagaatttggcaagaaggcagatggcttgctggggatgttcctgaaacgcctgtcttctcagcttatcctgctccaggcctggacttcccacctttggaaaatgttctacgatgctcggaaacctcgaagccagattaagaatgagatcaacattgacacattggccagagatgagttcgaacctgatcccatattctccagatgtgcagatccatgcagagcgattcataaactacaaccagacagtttctcgaatgcgaggcatctacacagcaccatcagggcttgagtccacttgtttggttgtggcctacggtttggacatttaccaaactcgagtttacccatccaagcagttcgatgtcctgaaggatgactatgactatgtgctaatcagcagtgtcctttttggcctggtttttgccaccatgatcacaaagaggctggcacaggtgaaactcctcaatcgagcctggcggtaaaacggaagcatcctgccagagtggagaaccttggggaagagggtcagctaaggagctatggccatggattggtggattggtgaagttgggttgggttcccatctcacttgagtctgggggaagaagatgaccttcatgtagaacttctgggatacagtgaggcacagtccttgtgggacagatagccacctcagcttttttccttttatgagacctccagtttttctcttctgaggctgtttaaattgactttaggtaaccttctgtgtttccattcttactggaaaccctctaacaatttattctccatctcttgcttccaagcctgatgggccagctctggcccaggctggcttcaaagttggcattcctcctgccttagcctctggctgggttcctgtgtggggtgtgtgtg

SEQ ID NO: 6495 - DNA, 989 bp, Cricetulus griseus
ctaggtcatggggattcaaccgagcccggtcctgctagcctctctgggggtggggctgcttactctgctcggactggctgtggctacctatctggttcgaagatcccgccggtcgcaggtcacactccgggacccggatgagaagtacctgctacgattgctcgacaagacgactgtgagccaaaacaccaagaggttccgctttgccctgcccaccgccaaccacattctgggactgcctgtgggcaagcatgtctacctctctgcccgaattgatggcaatctggtcatcaggccttacactcctgtcaccagtgatgaagaccgaggctatgtggatcttgtcatcaaggtttatctaaaaggtgtgcaccccaaatttcctgaaggagggaagatgtctcagtacctggatagcctgaaaattggggatgtggtggagtttcgggggccaagtgggttgctcaattatgctggaaaagggaatttttacattcagaccaacaaaaattctccatctgaactgcgagtggcaaagaaattgggaatgattgctggtgggacaggaatcaccccaatgctgcagctgatccgggccatcttgaaagtccctgaagatccaacccagtgctttctactttttgccaaccagactgaaaaggacataatcctacgggaggacctagaggaactacaggcccagtatcccaaccgctttaagctctggttcactctggaccatcctccagaaggttggacctacagccggggcttcgtgactgctgacatgatccagcagcacctgccccccccagcagacgatgtgctggtgctgctctgtgggccgccgcctatggtacagctggcctgccatcctaacttggacaagctgtgctattcacaaaagatgcgattcacctactgagcgtctcaagctggtgtgtgtgtgtgtgtgtgtgtgtgtgtgtgtgtgtgtgtgtgtgtatctc

SEQ ID NO: 6496 - DNA, 988 bp, Cricetulus griseus
ccgccgccgccccgcgcgccgagacccgccacccaagactccgactccttttggctcggcccgcgcgcctcaggcccggctcgggcggcgcgacgggaggatgagcggcgggcggcggaaggaggagccgcctcagccgcagctggccaacggggccctcaaggtgtccgtgtggagcaaggtgctgcggagcgacgcggcctgggacgacaaggatgaatttttagatgtgatctactggttccgacagattattgctgtggtcttgggtgtcatttggggcattgtgcccttgcgaggcttcttgggaatagcaggattctgcctgatcaatgcaggagtcctatatctctacttcagcaactacctacaaattgacgaggaagagtatggtggcacgtgggagctcaccaaagaagggttcatgacatcatttgccttgttcatggtcatttggatcatcttttacactgccatccactatgactgatggcgtttgctaccatctcttctgtccaatccaaaggacccttttattacagcacagatacatgcttgttggggcactcctgccacgtggtactgagaagacccatgtctcttggacttagaatcatcatgttgggcattggtgttttctgcaagggttgtgaaacttttcaaagaaccatctacctttggggaaatagttgtgaatttgtttatcacagaccattttttcttggacaccatcatgtaatggctgtttgccaagtggagctgctgtctaatcttacgcacctctggatccggatgaaacatgaaattgtcttccttagttctccgtcaggtgcacagtttttaaactatcattggcatctcaagtcttctgaaaacaccatgtgcgtgagccattgcacagtacgggcagccatctaataagtttccactgtagagtgttttcggatacttgaataaacaagtctaactagaaaaaaaaaaaaaaaaa

SEQ ID NO: 6497 - DNA, 988 bp, Cricetulus griseus
acacacaaaaaaaaccataccacggtcccttagttacagctgaactcctccaccttccaactcagtcaggctcatccatctcctgcttccctctcctcacccaaccaacccccttcagtccctctcttgagcaaggtgttgggctgttgtggggacaggtgacccaagcaggctcctagttctggagagttgggcgagtgttataaccttttggcctctccatcagttcagctttcccccaaagcatggtttggtaccagtcttctcatttccttctagagcctgagaccaatgcttaagtttgggggacacagtcaccatccccctggtactgatgcttgctggattttcgggaaggcattttgctacccagtctcttttcactgcctggggatcagtcttttgtttttcattgtttgatgttcccactgcatgctatgacttccctactcctcaaagaagagactcctttgcatgtctggagacagtagggggtggtaagctaaagggaagtggacaaaacagctcattaacggggtcttgcaaggggctctgtatgtacccagggtactggcccaacccccaaattctagccatagacaaactccaggccagacccctccaccctggttcagcctgggcagcttgggctgagcccaccaggaccaatagatttaagctggcatttcagtccaagaaggcttctaagtggatttaggacctgagaggaagaggggcctctgtgggtgctgggtactccagaggtgcccctggtggaaggagctagaacaagggaccaagtggctgtaaagtctcaagccaatgatggggcttctccactgggctcctgtagtcctcaagtccctggcctccaccttaccaggtgccacttctcagaaggccactgcccaggcccccaggccgccccttcgtggccagagactggttaaagccccccagtgcctccttgtgcatagaacttcctctg

SEQ ID NO: 6498 - DNA, 988 bp, Cricetulus griseus
tcaaaagaagctctacagagattgtgatgaaggagacatttttgaacctgatctccatagaagaaacagtagaagaaaatattggagaggactgcaaagacctcagtgtgggaaagcatttattcagttgaaaaacctactcatgcaccaaagaattcacactggagaaaattcttatgaatgtaaacattgtgaaaaagtcttcactatttccaatgctgatcatgttcatgaaaaacttcactgtgtagagaagccttattcatgtaagcattgtgggaaagctttcactagtcccgatgactataatagttgtgaaaggattcacactggagagaatccctttgtatgtaaaaatgtgggaaagcattcaaacgtttgggtcattttatgaatcatgaaagaattcacactggagagaagccttatgcatgtaaacattgtggaaaaatccttacaccagttccagtgaccgtaacagtcatgaaagatacatactggagagaaaccctttgtcacgaaagaattcacactggagagaagccttatgcatgcaaacattgtggaaaagccttcaccacttcaagtgcccgtaacagtcatgaaagaattcacactggagagaagccttatacatgtaaacattgcaacaaaaacttttgccacttccagtacacgtaacagtcatgaaaaaactcacactgcagagaagcattttgcatgtaacccttgtggaaaaaccttcaacagtcagagttcctattacactcataaaaaaattcattctatgaaagagaaactttacatatgtaaacactgtgggaaagaattcacctattgtggtaatttcctcaagcatgaaagaattcatgctatagagtccttgtccatgtgagcaatctgtgaaaaggtctctgtgtcttacataccatcacaaacccatacaaggtctcataatgaagaacttgctcaactagaaacagtatgg

SEQ ID NO: 6499 - DNA, 987 bp, Cricetulus griseus
tacatcccctacgcagcaggatgtgctgcggacccgtgtgaaaaccacgggcattgtggaaacacacttcaccttcaaggacttacactttcaagatgtttgatgtccggtggccagcgatccgagcggaagaagtggatccactgttttgagggcgtcaccgccatcatcttctgtgtggccttgagcgcctacgacctggtgctggctgaggatgaggagatgaaccgaatgcacgagagcatgaagctgttttgttctctgaaggttatgtgtttcacagggatgttcttacagaggttaggcactcccacctttggatcagttagttaagcattgtgtacattgacattttctttacagagtgcatgatgctcccattctaccttaggtttgttttaagaaaaactggtataccagatttttgaggatacaggatcttagacttaaaaacacttcacttttagtccatcaactttgtttcaatttggatcttagtatcgggttggcattactgcactgcctttgggtgatgccagcttaattttatacacttaagtaaccacagatttatttataataaagtttaagtgactgatgaaagctatttttggtgggtaaaaaaatttagtatgtcaattttgagacatttcatttatgtattttctttgagaaaccccttgtacttaagcatacacgagagttccttgtttggaagacaaccaaaaatactccactactaatattatacaagcttttgattcatgtataactagtttcaagtttatcattttatgtgaaaaattacttcttttcccttagatattcaaattcattccactcgctggaacttacatgcttttaaagctacactatgatttctgacattaagagaacaattatacttagaaattgaatagtagtatttaacaagatcagtgagtgtatgtgtgcttacataggtgttacataagagctacatactga

SEQ ID NO: 6500 - DNA, 987 bp, Cricetulus griseus
cattccagttgcttttgagtggacaactgttgcagcgagagtaccgactgacggtggaaatagcttgtggcatctgaactactgagaactccaccatggaaaggaatacttgtgatttactttctcggagcaaaagtgcctctgaggaaactttgcattccagtaatgaagaagaggacccctttcgtgggatggagccctatctggtacggagactttcatcccgcagtatccagctccctcctcttgccttcagacagttggaacaagctgacttgagaagcgaatcagagaacattacaacgactcctctgtcttagagaatcatcatctggccgtgggcttcaagttgctccaagaagaaactgtgacattttccagaatctgaccaaaagcaaagacaatctttaaggaaaatggtcattgacattgtccttgcgacagacatgtcaaagcacatgaacctcctggctgatttgaaaacgatggtggaaactaagaaggtgacaagctccggtgtcctcctccttgataattattctgacaggatccaggtcctccagaatatggtgcactgtgcagatctcaccaatcccacgaagccactgcagctgtaccgccagtggacagaccggataatggaggagttcttccgccagggggaccgggagcgggaacgtggcatggagataagtcccatgtgtgacaagcacaatgcctctgtaggaaaaaatcacaggtgggcttcatagactatattgttcatccactctagggagacatgggcggacctcgtacaccctgatgcccaggacatcttggacactttggaggacaatcgtgagtggtaccagagcacaatccctcagagcccctcccctgcaccggatgaccaagaggaaggccggcagggccaaactgaaaaattccagtttgaactaaccttagaggaagatggcgagtcagacactgagaaggacagcggaa

SEQ ID NO: 6501 - DNA, 987 bp, Cricetulus griseus
  modified_base (968)..(968): a, c, t, g, unknown or other
ctgctgtgacttcttcgcgcgcctttgcccgtcacgcgaccacgatgctgtcgctgcgctgtggcccccgcctgctgggcctgctctctagcccgcgctccgcaccgctgctcctctccgcgactcgcgcctgcagcgacagcggagcacgagacccgaactcctcctcccggaacccgctcgtgtacttggacgtgggcgccgatgggcagccactcggccgcgtggtgctggagctaaaggcagatgttgtgccaaagacagcagagaacttcagagccctgtgcactggtgagaagggctttggctacaaaggctccaccttccatagggtgatcccatccttcatgtgccaggctggcgatttcaccaaccacaatggcacgggagggaagtccatctacggaagccgctttcctgatgagaacttcacactgaagcacgtgggaccaggtgtcttgtccatggcgaacgcaggccccaacaccaatggctctcagttctttatctgcacaataaagacagactggctggatggcaagcatgttgtgttcggccatgtcaaagagggcatggatgttgtgaagaaaatagaatctttcggctcaaaaagtgggaagacatctaagaagattgtcatcacagactgtggccagttgagctaagtcgtcgccaaggtgctaggacagtagcagccacccaagtgctctgagcacaggtgccccaaagaactgtttgtgcctatgtcccttactgagtatgaagaaggttactcaggcacatggtccttcacaggaccacgctgctctcaactctccatcctccctcagatcctgtttctgggcatcagtgtggccactgggcaatgcatcctcagcaagtgaccccagaattgccattcatgtgtgccttggacattggcatcgatgaccagttgtcacaaatgtgataaataaatccttattttntaataaaaaaaaaaaaaaa

SEQ ID NO: 6502 - DNA, 987 bp, Cricetulus griseus
agaaatggcaaaaagtcttttgactacatctctgtctgcaaggacaaaactattacaaacaggggtgtcgctttataatacatctcatggcttccacgaggaggaagtgaaaaagatactggagcagtttcctggtgggtccgttgaccttcagaagaatcagaatggcattggcattctcactctgaacaaccccaacaaaatgaatgccttctcaggtgtcatgatgctacaacttttggaaagggtaattgaattggaaaattggacagaagggaaaggcctcattgtccgtggtgcaaaaaatactttttgctcaggatctgatctgaatgctgtgaaagcactctccacctcagagaatggggtggccttatctatgttcatgcagaacaccttaacaagatttatgagactacctttaataagcgttgctctggttcaaggctgggcaatgggtggaggagcagaatttactacagcatgtgatttcaggttaatgactatggagagtgtgatcagatttgtccacaaggagatgggcatagttccaagctggggtggtgccagccggctggttgaaatcattggcagcagacaagctctcaaagtgttaagtgggaccctcaaactggattccaagaaagctttaaacatgggctttgttgatgaggtcttacagtcttcagatgaagctaaggctctagaagaggcacaagaatggctagagcaatttgtcagtgggcctccagaagtcattagaaggtttaaaaaaatccgtttagttacaaaggaagagagctgtatttagaggaagcattacagaatgaaagagatgttttaggaacactgtggggtggacctgcaaacctagaggctattgctaagagagggaaacatactaaatagtttttaaaatatgggagtactacaagttgaagcttcaatgagaacatggatggaagtgaagttatattaaaaatgagc

SEQ ID NO: 6503 - DNA, 987 bp, Cricetulus griseus
  modified_base (194)..(194): a, c, t, g, unknown or other
cccaggaaggattgcaggcccccagtggcagcaccaaggtggaggtgcaggagggcgcctgccccacagtccccactttctcaggttgttttcatgcctaccccactgaggtgctgaagcctgtcagccaacaccccaggggacttcttctctggccttaaagacagggtgctgttgggacctcctggtaaagnggaagggctgtcagccaaagagccccagctaggtgtggggtggggatggccaaccgcccctctgcattccataaaggcagctccagaaaaagaagtttctatcccaagcccaaagcctgctgggtatcccccatggccaaggtccctgctgagagccctggagccacacaccccctcccaagcagcccaggccttggcagcaagcgcctgtgctggctccagggactacacagaaaccctatgacttagcaccctctttccttagagatggtttgatctgccagtcccaagttgactgtcagtacaacttctcaactgttcctgggaaggcagagccatcatggccccagagatcccaggatgcctgtgaaccagggtcaacagatgcttactgacctgcgtcatgggaactcaccctgtcctgacctcaggccatgggtgggagggcaagttttcatggcccccttagttcacaggtggcatagctaaggccagggacaggaagtgtcattgagagtgcctggctttgggaaatgggtgctcagggaaagtagctgcctgtggggagagatgtagcaccggtgtccttcaggaccaggtagccaggagggcttgtttccctgacaggctgccccagaggaccctcaggccagcagggcactcggtgtctgttcagtgcatcatttgggttcaggatctactttcaaatcattcgtgacatttgagctgctagcggtgggaggaggcagagaccaccctgggatttgtgctgatcccgccctatccttggtcc

SEQ ID NO: 6504 - DNA, 987 bp, Cricetulus griseus
gagcggtggacgcagggaggtagcttccggtgttcctccttcgggcagcagctcgcccagagccctaaacatcttcgaccgggaattgaagaggaagcagaagaattgggcagcccggcagcctgagcccatgaaatttgactacctgaaggaggaggttggaagtcagattgcagaccgtgtttatgacatagccagagattttccccttgcactggatgtaggatgtggaagaggctacatagcccaacatttaaataaggagactgtaggaaagattttccagacagacattgcagaacatgctttgaaaaattccttagaaacagatattcctacagtgaatgttttagctgatgaagaattccttcccttccaagaaaacacatttgatctggtggttagcagcttaagtttgcactgggtaaatgaccttcctagagcacttgaacagattcattatgtcttaaaaccagatggggtgtttgtcggtgcgatgtttggaggtgacactctctatgaacttcggtgttcattacagttagcagaaacagaaagggaaggaggtttttccccacacatttctcctttcactgctgtcaatgacctaggacatctccttgggagagcaggcttcaataccttgactgtggatactgatgaaattcaagttaactatcctggaatgtttgaattgatggaagatttaaaaggtatggggtgagagcaactgttcttggaacaagaaaacctctgctgcaccgagacacgatgctggcagctgcagccgtttacagagaaatgtacagaaatgaggatggttccatacctgctacataccagatctaccacatgataggatggaaataccatgattctcaggcaaggccagctgaaagaggttctgcaactgtgtcatttggagagttagcaaaactgagtgaagtcatgccacagggaaagaaacaataaatatttatcaattgt

SEQ ID NO: 6505 - DNA, 986 bp, Cricetulus griseus
  modified_base (938)..(938): a, c, t, g, unknown or other
cattcatataagctttcatgacaaggtgtatgaactgccctttatcgtggttctggatcacaggaaagaggccgttgtagtcgctgtgagaggggaccatgtctgtccaggatgtcctgactgacctgtctgcagagagcgagaatctcgagctggatattgagctgcaggactgtgtggcccacaagggaattgctcaagcagccagatacgtttaccacagactggtcaatgatgggattctgagccaagccttcagcgttgctccggagtatcggcttgttctggtggggcacagcctaggagctggagctgccctacccacaagtccgcgcttatgccttctccccgcccagggggcttctgagcaaatccctttatgaatactccaaagacttcattgtatcacttatcctaggaatggatgtgatttccccaggtttaaagtgtgaccaacatggaggatctgaagagaaggatcctgcgagtgattgctaactgcaacaagccgaagtacaagatcttgctgcacggctgttggatggactgttggaggaagccctgataactctccgactgaactggatgagagcaaccagagagccctgaccctcttcgttggggagcagacgatgctccccgggctacagccccagcgactccccactggactctcccaccaagtacccaactctgtacccaccgggcaggatcatccacctagaagaagagagtggctcggggaggtttggctgctgttccgctgcccggtacagggctaggtgggcacacgaagcagaatttggcaagatcctgataggcccaaagatgctgactgaccacttgcctaacatcctgaatcaggccctggacaaagtggttgccgacagaacagcctgtgtctcctgcccagggcaaggtggctccttttttttttnttttttgtttgttttgataataaaaatatacagaaaacaaaaaaaaaa

SEQ ID NO: 6506 - DNA, 986 bp, Cricetulus griseus
  modified_base (966)..(966): a, c, t, g, unknown or other
gtgtaaaattacttggtaaaagaactttcagcagtatcttccactggttatcgagcctcttattaagactgcctcagctaaacctgatgttgctctcttagacacacaagatgtggagaacatgagtgatgatgatggctggcaatttgtaaatcttggagaccagcaaagctttggaattaaaacctcaggacttgaagcaaaagcaactgcttgtcagatgttggtttactatgctaaggagttaagagaaggatttgtggactatacagaacaagttgtgaagctgatggttcctttgttgaaattttattttcacgacaatgttcgagtggcagctgcggaagccatgccctttctcttggaatgtgcaaggatccgtggcacggagtatctttcacagatgtggcagtatatatgtgatcccttaatcaaggccattggaactgaacctgataggagacgattatcgttctttatgttcagaagctgttccactgttggtaaaggttattaagtgtgcaaattccaaaacgaaaaaaaatgtcattgctacagagaactgtatctcagcaataggaaagattatgaagttcaagcccaattgtgtgaatgtagatgaggttctcccacactggctgtcatggctcccgctgcatgaagataaagaagaagctattcagactttgaattttctctgtgacctaattgaaagtaaccacccagttgtgatcggtcccaataaattcccaaatcttaccaaaatcatcagtataattgcagaaagaaaaattaacgagactattagccacgaagacccctgtgccaaacgcctagctaacgttgttcgacagatacagacttctgaagaattatggttgcaatgtatatcccaacttgatgaagaccagcaggaagctttacaagaattactcaattttgcttgaagcactttatttttttttnttttttgtttgttttgtttt

SEQ ID NO: 6507 - DNA, 986 bp, Cricetulus griseus
ccaggatggatgcacggacggtactgctgggcctgcaaatcatgtcactcccgctcctggctcattgtgcagccgctactcccaccctgagatttgtggctgtgggtgactggggaggggtccccaatgccccattccacacagcccgggaagtggccaatgctaaagaaatcgccagaaccgtgcagattatgggtgctgacttcatcatgtccctgggagacaacttctacttcactggagtgcatgatgccaaagacaagaggttccaggagacctttgaggatgtgttctctgaccgtgccctccgcaatatcccctggtacgtgctggctgggaaccatgaccaccttggcaatgtctcagcacaaattgcctactccaagatctccaagcgctggaacttcccaagcccttactatcgtttgcacttcaaaattccacggacaaacacaactgtggccatcttcatgctggacaccgtgatgctgtgtggcaactctgatgacttcgtcagtcagcagcccaaaatgccccgagacatgggagtggcccgaagtcagctgtcctggctcaaaaagcagttggcagcagccaaggaagactacattttggtggctggccactaccccatctggtccattgctgaacacggacccacccgctgcctggtcaagcacttacagccactgttggccacatacggggtcactgcctacctttgtggacatgaccacaacttgcagtatcttcaggatgagaatggagtgggctacgtgctgagtggggccggcaacttcatggacccctctgtgcgacaccaacgcaaggtccccaatggctacctgcgctttcactatggatccgaggactccctgggtggcttcacatatgtggagataagctccaaagaaatgagtatcacctatgtggaagctgctggaaaatcactcttcaagaccagcctccctagacgactcagaccc

SEQ ID NO: 6508 - DNA, 986 bp, Cricetulus griseus
tgggcccagggccaccagatcaccagccagcccagatctcccgccgctactctgacttcgagcggctgcacagaaacctgcagcgccaattccggggccccatggctgccatctccttcccccgtaagcgcctgcggcggaactttactgcagaaaccattgcccgccgtagccgggcctttgaacagtttttgggccacctgcaggcagtgccggagctacgccatgctccagacctgcacgacttcttcgtgctgcccgagctgcggcgggcacagagcctcacctgcactggcctttatcgcgaggctctggcactctgggccaacgcctggcagctgcagacccagttgggcaccccttctggcccagaccgccccctgctgactctggctgggctggctgtgtgccaccaagagctggaggatcctggagaagctcgagcctgtagtgagaaggcactgcagctgcgtgggggacaaggacgaccccatcctttcctggcaccctttctagaggcccatgtgcggctctcctggcgcctgggcctagataaacggcagactgaggcccagcttcagtccctacaggaggcaggcctcacccccatcccgccccccagcctcaaggagctgcttatcaaagaggtgctggactaactttcaccagtctcaaggccacttctgagagaggggctgccccaggtcaggggagtagttccagaaagagtctgtagcagactgagaggaacttcgttttgtggggctgggctccaaacaggctttgcctggggttaccctaggatgatacaaggaggaagttttggcaacggctcttcagcccaccatagccagagactgtggccaaggtcaggatcaatgtttccttttccatgggcctgggcaccagtaaaacagcttggctgaagtgctggggactactactggaatcctggagtttagagccaggaggagggctgtagttct

SEQ ID NO: 6509 - DNA, 986 bp, Cricetulus griseus
cagacgtcggtcaaggggagataggacccaagagagaacagaagcccaagttaccgggtctggaccaggcctcaggggccaacaaatggccccgggagctgttcctccttccacagaactcttcacactaaaagagaaggggaccctgctgcaactacctgtggccttcaggaaagcagcttcccagaattctcgtctgtgggcacagctcagttctatacaagccagtgactccacagatgtcaccagagctgccaaaactgagttcctccacaaactccagatggcttcaggatcatctagccacaggcccagtgctgcagaagtggaggcacacgtccagagcctgaggaaggcccgtaccctgctgagacttcatatgcagaaggagctttcaacagcccccactgactggatgcaggagtaccgaggcctactcatcctagaaggactgcagaccattgttggacagtgtctacacagggtgcaggtgctacaagcagctgtgacagaacaattgccaggactacaccttgtggagaaagcccactcaggcctcatcacttggtggaggagagatggacacttcctggagccctgagctccttctctactctagcaccgaggagctgcagactttggcaaccttgaagcttcgagtggccatgctagaccagcagatccatctagaaaaggttctgatggctgaactcttccctcctgataaacacccaggaggcaggagggtcacctcagctggcgctgtgtcgggctgcgtacagtctgctctgtgaagggggtgagcaattcctcacagtccttcgagatgaccccactgactaagaaggctgggcagacaagcttctctggtagagtctcctcctctcatgtggagaataatgaacagggattgaggaaaagtttcctaaataaaaatttttaaaaattaaaaaaaaaaaaaaaaaaaaaaaaaaaaaaaaaaaaaa

SEQ ID NO: 6510 - DNA, 986 bp, Cricetulus griseus
tgcctggctagccagcttcttcagagggccgaggtggataatgtgactatgagagactgcaaccccacagtgaccactgagagtgaccaagaggtctcctgtaactttgaacgggactcatgcagctggcacacagttcacctcacagatgcccactggcaccgcgtaaaaggccatggctctgaatatgaccacaccactggccaaggcttcaccagctagaggtcaacaccaagtaccagctgctgtttgaaggcctccggaatgggtaccatggcacaatggccctggatgacgtggctgtacggcctggcccctgctgggcccccaggagctgttcctttgaagactctgattgcggcttctctccggggggcttggggctgtggaagcgccagggtaatgcctcaggctatgttccttggggtccttggacagaccataccacagaaacggcccaagggcactacatggtggtagacaccagcccaaatgtactgcccaagggccaagtggcctctctgacctcagaggagcaccagccccctgaccccagccagccctgcctgaccttctggtaccacaagggcaaattgagagtgctcctgagcagtgcccaaggccaactagctgtgtgggagcagggcagtcacttgcggcaccagtggatacaagtccagatcaaagtgtccaactctgaggagttccagattgtttttgaagccactctgggtggccagccagctctggggcccattgccctcgatgatgtgcaatacttggcagggcagcactgccagaaacctccgtctagccagggtgaaatggcagcacctgtgtctgtgccggttgctgttggaggggccctcctcttcttcgtgttcctggtgctcctgggccttgggagttggcactggctacagaagcagcgctgtcccttccagaggagtacagatacagcaacctctagttttgacaacatcctc

SEQ ID NO: 6511 - DNA, 986 bp, Cricetulus griseus
aagcaggctttcatctgctctctcggaaaagtctctgcagcagcatggccaccttcgtggagctcagtaccaaagccaagatgcccattgtgggcctgggcacctggaagtctccgccaggcaaagtcaaggaagctgtgaaggccgccattgatgccggataccgccacatagactgtgcctatgcctatcggaatgagagtgaagtgggagaggccatccaagagaagatcaaagagaaggccgtgagacgggaagacctcttcatcgtcagcaagttgtggcccaccttctttgagaaaagcatggtgaagaaatgctttcagaaaaccctctcggatctgaaactggactatttggacctgtatctagttcactggccacaggcattccaggctgggagtgagatggtccccacagatagtgaaggcaaagttctcatgagtaaatccaccttcttggatgcctgggagggcatggaggaactggtggaccagggactggtgaaagccctgggcatctccaacttcaaccacttgcagattgaaaggctcctgaacaagcctggactcaaacataagccagtgaccaaccagattgagtgccacccatacctcacccaggagaaactgatccagtactgtcactccaagggcattggcatcacggcctacagccccctgggctctccagacagacctgagattcccaaaatcaaagatatcgctgcaaagcacaagaaaacagtagctcaggttctgattcggttccatatccagaggaatgtggtggtgatccccaagtctgtgacaccctcccggatacgagagaactttcaggtctttgacttccagtttgagtgatgaggagatggccaccattctcagcttcaacaaaaactggagggcctgtggcttattggctgccattaatgaaccggactatcctttccatgaggaatactgaagttaattcacttgatgaga

SEQ ID NO: 6512 - DNA, 985 bp, Cricetulus griseus
cgcagacgggaggcaggatccttggtgctgtggcggtgtggttgactggggtgctagttggagtcgtgtggcccttgaaaaccccaagtatccaccgctgccgcctcctgccctcgctatgttcctcactcggtccgagtacgacaggggtgtgaatactttttctcctgaaggaagattatttcaagtggaatatgccattgaagctatcaagcttggttctacggccattggcatccagacatcagagggtgtatgtctagctgtggagaagagaattacctccccactaatggagcctagcagcattgagaaaattgtagagattgatgctcatataggttgtgccatgagtgggctaattgctgatgctaaaactttaattgataaagccagagtggagacacagaaccattggttcacctacaatgaaacaatgacagtggagagcgtgacccaggctgtgtccaatctggctttgcaatttggagaggaagatgcagatccaggtgccatgtctcggccctttggagtagcattgttgtttggaggagttgatgagaaaggacctcagctgtttcatatggacccatctgggacctttgtacagtgtgatgctcgagcaattggctctgcttcagagggtgcccagagctccttgcaagaagtttaccacaagtctatgacactgaaagaagccatcaagtcttcactcatcattctcaaacaagtaatggaggagaagctgaatgccaccaacatagagctagccacggtgcagcctggtcaaaatttccacatgttcacaaaggaagaactggaggaggtgatcaaggacatttaaggaggagccatcctcaaacatctgggaacaatttcagttctcctaattgcccttaaactttatttccagctcttatgtcatggaaaaatctccagtatatgtgtgtttttttttatgatgtctgtacataacagcaattct

SEQ ID NO: 6513 - DNA, 985 bp, Cricetulus griseus
atgacagtgcccactcgggtgccagccacagggaaagcaggggccccagcagtgcaagcacagaaggggctagtggctggagcagggcaggactcggagagcagcagtgaagaagagtctgacagtgaagaagaggcaccagctcagacaaaacctgtggggaaaacctctcaggttagagctgcctcagcccctgccaaggagtcccctggaaaaggagcccccaatacccaaggagccaccaagaagacaggacctacatctgcccaggcccagaacagggaagacagaaggctcagagagcagtagtgaagaatcggacagtgatggggagatgccatcagccagcagtgacacctcttcagggagcgaggaggatgccaagagaccccaggtggctacgtcagccccgagactggatccacacctttcccagaaggagactgtggtagaggagacccctgatgaatccggtgaagatgagttggtggcgccctcacagtctctcctctcaggttatgttactcctggggcgactgtggccaattcccaggcttcaaaagccacttctaggccagactccaaccctttggtttcctctgctccggtcaccaaagataacccagatggcaagcagaaagcaaaatcccaggatgcagcagacaccgtgttccctaaaacaggtaggaaagagacctcttcagacaccacacctccgaagcccaagaaggctaagaaaagcacctggacctcagcaacacccacacaggctctgcagaacagcatcacccagtgcctccgggaacagtcctggtccctgagcgaggcgcaggtgcaggcctctgtggtgaaggttctggcagaactgctggagcaggaaaggcagaaggccacagaggccatcaaggagagtgggaagaagggcaagaagcggaagctgtcgggggaccagctagcagcaggggccccagagagcaagaagaag

SEQ ID NO: 6514 - DNA, 985 bp, Cricetulus griseus
ccagcatgggttcctcgctccctgtcttgtctctgatgtgcctcctgtccagtcccaggcttcagctaggaaatgcccaggctcctaccatggtgcagctgccaggtgggcgatttttgatggggacagatgctccagatggcagagatgggtgaaggacctgcccgagaagtgacagtaaaatcctttaccattgatgtatttccagtcaccaataaagatttcagggagtttgttcgggagaaaaagtaccagactgaggctgagacgtttgggtggagtttcgtcttttgaggattttgtctcccctgagcttagaatcaagcaaatcagatgccgtctgttctctggtggcaaccagtgcaaaaggcattttggaggcagcctgcaggtcccggctctggcattcgagagaaactggagcttccggtggtacacgtgagctggaacgatgctagcgcttactgcgcatggcgggggaagcggttgcccacagaagaagagtgggagtttgcggcccgagggggcttgaagggtcaggtttatccttgggggaaccggtttcagccaaaccgcaccaatttgtggcagggaaagttccccaaaggtgacagagctgaagacggttttcatggactgtcaccagtgaatgccttccccccacagaacaactatggactatatgacctcatgggcaatgtgtgggaatggacagcgtccatataccaatctgccagccaggacatgcgtgtcctccggggggcatcatggatcgacacagctgatggctctgccaatcaccgggctcgggtcaccaccaggatgggcaacactccagattcagcctcagacaacctgggcttccgctgcgcttccagcacaggccaactgaaggaggatctctgagcatccaggcagagatagagaaagctcctgtcagttctgtgtgtccctgaccacgttccagaggcatccagataccaag

SEQ ID NO: 6515 - DNA, 985 bp, Cricetulus griseus
cagctgctggacgagtcgaacgtgtcgccaggtcagctatgtcatctgaacctcccccgccgccgccacagcccccaacgcatcagtcttctgtcgggctattggacactcctcgggcccgggatcgttctccatccccgctgcgaggcaacgtggtccctagccctctgcccacccgcaggacaaggaccttctcagcgacggtgcgggcttcacagggccctgtctacaaaggagtctgtaaatgcttctgccggtccaagggccacggcttcatcaccccggctgatggtggccctgacatcttcctgcacatctctgatgtggaaggggagtatgttccagtggaaggcgacgaggtcacctataagatgtgctctatcccgcccaagaatgagaaactgcaggctgtagaggtggtcatcactcacctggcaccaggcaccaagcatgagacctggtccgggcatgtcatcagttcctagggacctgccagaaccccccttctcctgggcttgagggagactatgggggaggagcaggacaccctcgatataacattctaccatacaagatggggcctcaaggcgggcatggcccctttcaagcatttcctggaagggagttgtgggcagggcaggggggtgctctcagccaccagcacagcctctagccattgcaacaagctctcactgtctgaaaacattaaaagcatttgaaaaggagatggtttttttctactaggtcaaaggtggcttttacccctccaggcttggctgaccgcccagagcctctgctggccaaggaacagacttccaaagccactttgctaggacccaggaaggctccctgagattgacacccttctctgtcaccccattgtccctagctatcagtacagctttgttttcactctggtgtggtgaggctttgggtgacacatggttggcctgctagtgggccctgtccgccactgagctggcag

SEQ ID NO: 6516 - DNA, 984 bp, Cricetulus griseus
acacacacacacacacacacacacacacacacatccatacataaatgcaccaacctaaggactggtaggaaaagctttacttactctttcatgtcattgtattatgatatcatttaaaaatacattctttcaatagaaatcactgtcccattattttgcaaatttgttacctctaacatccagtgtaattaacttttagagagtttttttgttccattattaattgtaattaacatcaaacacagcttctcatgctatttctacctcactttggttttggggtgttcctggtaattgtgcacacctaatttcacagcttcaacacttatctgttgtgtggacaccattatcctttttctttttcatttccaaaagaaaacccaaagctctaaggtaacacattgagatttggttctcttttatgtgacgctggacattttctttacccaagggtttgttttaaccaagatttaaagcaaggggttactttacatcctactaagaagttttaagtttcattctaaaatcagaggtagatagagtgcataattttgttttaatctttttattctatcttttagatattagttctggagtgaatctgtcaaaatatttgaataaaagctgagagctttattgcagagtttaagcataatttggacatcatttcgtgttctttataaccaccaagtattaaaactgtaaaatcataatcaatgtaactgaagcataaaacatcacatggcatgtatcatcattgtttccaggtactggattcttacttgagtatcataatatgttgtgtttttaaacaccaacactgtaacatttactaattattttttaaacttctagttttactttctattttcacaacatatacagaacttcaccaaatatatgacttaatattgtatttatattactgctttactgtgtatctcaattaaagcacgcagttatgttaaacaaaaaaaaaaaaaa

SEQ ID NO: 6517 - DNA, 984 bp, Cricetulus griseus
gccacgttgagtggcggcatcgatgtgctggtggtgaagcagacagatggctccttccggtgctcacccttccacgtgcgatttggcaagctggggtgtcctgcggtcacgggagaaggtggtggacattgaaatcaatggagagcccgtggacttgcacatgaaactgggggacagtggcgaggccttctttgtccaggagctggacagcgatgaggaagacgtgcctcctcgcctgtgcacctcgcccatcccatggggaggcctgtcaggctttccctcagactcccagctgggcacagccagtgagcctgagggccttgtcatcactgggcggagaaagaggaggcgcaggaggaaagccaggcgcagggaggatgccatggactccagttctgaggagttggaggccagtactgagagtgagggcattactagtctctaccacaaaatccatctaaatgggtacaagttcctgtactgctcagcacgggccatcggcatggctgacctcaccaagggttacttgcagtgggtgagcgagcgtggctgtggtcttcctaagggccccatcttgttgtctcccagcagcctcttctctgccctccacagagaggtgattgagaaaaagccagaagtattcaaagttgcctgcctgagtgacatccagcagctgtttctgcctcaaggccaacctttctatgctgcctttgggaacaggccaaatgatgtttttgcctaccgacaagtgggcctccctgaatctcgaatcttcacagtcaacccccggggagaccttgttcaggagctcataaagaaccacaaatccacgtaccagcggctcggggaggtggttgagcttctcttcccacctgtggtgcgaggccccagcacagacctggccaaccctgaatacagcaacttctgctattggcgggagccccctgccacatgtggactttgatgctctagtatgagcctgcc

SEQ ID NO: 6518 - DNA, 984 bp, Cricetulus griseus
ggagaacgaggacctactgagcaacttactcaccatgggagttgatgttgacatggcaaggagacgacagcctggagtttttaacaggatggctacaaatgagcaggaactgaaagtattccttctatccaaaggagccagtgacaaaatgattggtaatatcatatcaagatacccacgagccataacacgaaattctgaaggtctttcaaaacggtgggatctgtggagaaagattatggcatcagacattgaaattataaatattttggaacgttctcctgaattccttttttcggtctaataacaacctaaacttggagaataatatagagttcctctgctctgtgggattgactaacgaaagacctctgcagactgttgaccagtgctcctagaaccttctccaatagcctgaatttgaataaacagaatggttgtagtttttgcaggagactagtatgccttaggtcacaatgatcaaacgggtaaaagctaacattgactttttacagtcaacattcaacttaaacaaggaggacctgctgcttctgatatgtggcccaggagctagaatcctagatctttccaatgactgtaccaaaagaaactacactaatatccgggagaaactgctctctcttggatgcactgatgaggaggtacagaagtttgtcctaagctatctgaacgtgatcttcttgtcagagaaaaagtttaatggtaaaatagactgcctcttagaagaaaaagtcagtatttcacaaataattgaaagtcctagagttttggatgtaagcataaatactttaaaaactcgaatgaaagagttggtatatgctgggtatgacttgagttcatcaaacattgctctcctgtcctggagtcagaaaagatatgaagccaaattagaaaagaattattaaaatagaacagtgttagaggagtcttaattaactttttttttaaatttttttaaaaaaa

SEQ ID NO: 6519 - DNA, 984 bp, Cricetulus griseus
gggcggttgctgccgagcatcttttgaaaggggaagaagaggactgcgggcgggagcagctggagcttggggcccagtcaagccgcccggctacgatggccagtgctaagacggtgtgcgacacgcagccccattcgttgccgagcggcggcctggccacagatgcacaaactcgaactacttctaagcttcctgttaagtccaaagaagctgatgtgtttagacatcttcatccaggaggttcagatcctgatgttacaaaagtcaccaaaacaagacgagagaatgcgcaagtgagagctgcagaggcccccagcaagaagaacatcaggaagagctacaaaccactgaataagcaaaaaccagaggaggaactaaaggataaaaaccagctcctggaggctgtcaaccagcagttacaccagaagctggcagagactcagggagagctgaaggacctgacccagaaagtggagctactggagaagtttcaggataactgcttagcaattttggagagcaaaggcctcagcccaggcatcgggaccctggcatcacagcgggaacctactacagatcacacgaactccatgctgctgctagaaactttacaaggtgagctgaaggctttcaatgaaactgccaagaagcagatggaagagttacaggccttgaaggtgaagttgaagttgaaagaagaagaaaggctccagttcctggagcagcaaaacggatgtaaggaccaagccagtgacttcacagtagtcctggaggaaatggagcagcttttagagatgtaatacaaggcagtgtggccagacggcttcttcctggggcaaactcccagaggaagccccttagggtatcctcaaggactcaccatcccttatgcactgtagcagttaatcttacttagggtagttgatgtggaacggggttcctccttaagcagactgcccaccttcagactgctcagctcacctg

SEQ ID NO: 6520 - DNA, 984 bp, Cricetulus griseus
ctcccaacaggagaaacaggcccacaatcggagcatcccggaggccatggccgcccctaagcttttccgagctctcgtgtctgcacagtgggtggcggaggctctgaagtctccgcgagcctcgcagccgctgaagttactggatgcatcctggtacctgcccaagctgggccgtaatgcgcgacaggagttcgaagagcgccacatcccaggcgccaccttctttgacattgatcattgcagcgaccacaggtcgccctacgaccacatgctgcctagcgccgagcacttcgccgactacgcgggaagcctgggcgtgggtgctgccactcacgtcgtggtctacgatggcagcgaccaaggcctctactctgctccgcgggtctggtggatgttccgtgccttcggccaccgctcggtgtcgctgctggacggcggcttccgccactggctgagccagaacctgccaatcagctctggcaagagccacccgaagcccgcagagttccacgcacagttagatccctccttcatcaagactcacgaggacatcctggagaacctggaggcccggcgtttccaggtggtggacgcccgcgcagctggccggttccggggcacagagccggaaccccgagatggcatcgaacctggacatatccctggctcagtaaacatcccgttcactgaattcctgaccaaggaggggctagagaagagcccagaagagatccggcacctgttccaggagaagaatgtggacctgtccaagcccttagtagccacatgtggctccggtgtcacagcctgccatgtggccctgggggccttcctgtgtggcaaacccgatgtgcctgtctatgatggctcctgggtagagtggtacattcgtgccaagcctgagaatatcatctcagagggcaagggaaagacccagtgaggccaggcaggacacggtacagctcaggtgacatctgaccatca

SEQ ID NO: 6521 - DNA, 984 bp, Cricetulus griseus
agttaaataagagtagtcccgttaccagcgaggaatggaagcagcttcaggctcaagcagagctggttctagatgaaaacaagctgctgatacagcagttggagatccagcaaaccaaagccagggatgcccaccaggagcacctccaagaagtttctaagctgaccaaacaacttgtgctcctggaggcaaagacacaggaccaggaacagcagctggaggacagcaaggagcagctggggagcttgcaggcccgatgccgagaactcaaagtgcagctggacagcaagatcgccatggacgttcatacgtcaattgtcaatgaactgcaaagccagttgcaaaaggaagaagagaaagacggcgctgagatggaggaactgctgggaaggctgacggccttacaggtgcagaagaagagcctgctcctggagaagagcagctgggccagcaggaacagagctctggagactgagctggagcacgcgcgcaaggcaaacaggcaaaatcctgaaaggcaacatccgcctggggaagctggaggagagggtaaagggctacaagaaacaggcggccctgaaactcggggacatccatcaccgcctgatggagcagcaggaggactttgctggcaaagcagctcagtaccagaaggagatgaggcacctgcagcggacgctgcaggaaaagcaggtggccctggacaaggcgttgcagcagaaaagagaaatggaagatgagcttgaagtggttctggagtccactgccaaggagaaccaaaggatgcgagaccttgtccaggccaccctggagaggggaggcacaccgcacaccagagctcgggaggacgctggctttggcggcctcacgcggagagacctgctgcttggccatgatttcagctatggtgacgtgcaacctgctgctgccacttttcggcagactcggggggagtctgtggcgtagccctcttcatctgaggtg

SEQ ID NO: 6522 - DNA, 984 bp, Cricetulus griseus
gtcctgctgtaggccatgcgcgcgctgcgggtcggcctgaccctggcgctgggcgcggggctgggtgcagcggcagagcactggcggcgacgggacgggacagcgacggggctgctggcccgggtgccaatgttgcccgtggtggcggccgagccgcccgcgctgccaggagggccggcgggcggtaccggcgagctggccaagtacgggctgcccggcgtcgcgcagctccggagccgcgagtcctacgtgctgagctacgacccgcgcacgcgcggtgcgctctgggtgttggagcagctgcgaccggagaggctccgtggcgacggcgaccgcagcgcctgcgacttccgagaggacgactctgtgcatgcgtaccaccgtgccactaacgcggactatcgcggcagcggctttgaccgcggccacttggccgccgccgccaaccaccgctggagccagcgggccatggacgacaccttctacctgagcaacgtggccccacaggtgccacatctcaaccagaatgcctggaacaaccttgagaagtacagccgaagcttgactcgcacttaccaaaatgtctatgtctgcacagggcctcttttcctgcccaggacggaggctgatgggaagtcctatgtgaagtaccaggttattggaaaaaaccacgtagcagtgcccacacacttcttcaaggtgctcatcctggaggccaccagtgggcaaattgagctgcgttcctatgtgatgcccaatgcccctgtggatgagactatccctttggagcgcttcctggtgccgatcgagagcattgagcgtgcctctgggttgctctttgtgcccaatatcctggctcgagctggaaacctcaaggccatcactgctggcagcaagtgagggtgaaggactgaagacactgggagaaggggctggctcatattaaaggtggttatttttggagacaagtcttgaccatctcta

SEQ ID NO: 6523 - DNA, 984 bp, Cricetulus griseus
gccagtcatggcggaaccttggtctgggcagtttttgcaagctctgcccgcgtcggtgctcggagcgctgggcaccctgggcagcgaattcctgcgggagtgggagacacaagacatgcgagtgactctcttcaagctgctcctgctgtggttggtgttaagtctcctgggcatccagctggcgtgggggttctacgggaacacagtgaccgggttgtatcaccgtccagatccccacccctccagcctcctgcagctctgggtgtgttcctgcctccaggtctgggtggccagaatggatccacacctgatggctccactacatttcccttcatgggaaatggcagcaaatgaacctctcaaaacccacagagaataagggaaggcagcagcagaagcgtctccagagacataactgggactgctggctcctaggttgcatcctgctgctgcccagacccgttggacaactgcagagggcttggggttgggggactggagtaccacagtgtttccagggtgagcctccattgctttcagccttgccttcaacagctccaggtactgggcaggtgaagtctgtctctaccccagtgtagttgccctaagacttctgtcaagggtcagagctaagaagcattttggttggggaggtcagcagccctttcactttgtctttttccctgtctcagctgggccactagctacctcaggtgtccccgtctctttgttagatgtcacatagccttctggcagcctttgtctacaaagactttgtagcaggtgtactaaaaatgaaactgtactgagctcctcatgcacaagtacctactccagcgatgcatcatctgtatggcagaaagatgttcttcacagcctcagacccacccactgacatcaccacaaagagccaaggtctcacattccaccccaggagcaactgaggatgtcgcatattaaagacagaagtgcaaaaaaaaaaaa

SEQ ID NO: 6524 - DNA, 983 bp, Cricetulus griseus
tctatggcgccaccgcagcgatgtcctctgtgtcgccaaactttcttctgtggtcgcggacacgtctacagccgcaagcaccagcggcagctgaaggaggctctggagcggcttttaccgcaggtagaagccgctcgcaaggccgttcgtgccgcccaggtagaacgctatgtccccgagcacgatcggtgctgctggtgtccgtgctgtggctgcgaagtacgaaaacacctgagccacggaaacctgacagtgctgcacggaggtctgctggaacatctggccagcccagagcataagaaagccaccaataaattctggtgggagaacaaggccaatgcccaaatgaaagagaagtttctgatctccccccaggattatgcgcggtttaagaaatctatggtgaagagcctggattcctatgaggaaaaagaggatgaggtgattaaagagatggcagctcagatccgtgagatagaacagagtcggcaggaagtggtcagatctgtcttagagcctcaggcagagccagatccagatgagggctcttcggcactgggaagctgggaagcagctaacggccatgtggcctccagctcacagcaggtatcacacttggacccacaacgtgttccagagcttgactggatggagacaggacagcatttaacattcattggccatcaggatacacctggagttggtaatatccattcaggtgccacacctccatggatgatccaagaggaagaacatagctctggaaacctaccaataggaccttcctatgaagaatttacttaaaagaaaaagaaaaacaaaaactagaaagaaactgcccccagaacgagttggggccaactttgaccacagttccaacactagtgcaggctggctgccttctttggcagagtatggaataatggtcgccgctggcaatccaggcatcaattcaaaactgaagctgcaacaagaagcaagca

SEQ ID NO: 6525 - DNA, 983 bp, Cricetulus griseus
actcccgggaggatgctggtggtggaggttgccaacggccgctcgctggtgtggggcgccgaggcggtgcaggcgctgcgggagcgcctgggggtcggggccgcacggtgggcgccctgccccgcgggccccgccagaactcgcgcctgggcctcccgcttctgctcctacccgaggaagcccggctcctggccgagataggcgccgtgacgctcgtcagcgccccgcgcccggatccccgcagccatggcctggccttggcgtcgttcaagcgccagcaggagcagagtttccaggagcagagctcgttggcagccgaggcccgtgagacccggcgtcaggagctcctggagaagatcgcagagggccaggctgccaagaagcagaagctggagcaggattcaggggccgatgaaggccaagaagccggtggaagcgaagctccccaggggagcaccccagggggcgagaccactgatgacggccaggctaatgggcagcaggaggaggcaggtgaagagtcttcatctccccagccagggccttcaaacggggtgacccccttgcccaggtcagccctgctcatccagctggccactgccaggcctcggcctgtgaaggctaagcctctggattggcgtgtgcagtccaaagactggccgcatgctggccgtcccgcccacgagctgcgctacagcatctaccgggacctgtgggagagaggcttcttcctcagcgcagctgggaagtttggtggtgacttcctggtctatcctggtgacccgctgcgttttcacgcccactacatcgctcagtgctgggccgccgacgaccccatcccccttcaggacctggtctctgccggccgcctgggaaccagtgtcagaaagaccctgcttctctgctccccccagcctgatgggaaggtggtctacacctccctgcagtgggccagcctgcagtgagctggagaatgggggtgg

SEQ ID NO: 6526 - DNA, 983 bp, Cricetulus griseus
ggcaagaggagctaggagccatggttgacaaggagatggctgccacctctgcagccattgaggacgctgtgcggaggattgaggacatgatgaaccaggcccgccatgagagctcaggagtgaaactggaggtgaatgagaggatcctcaactcttgcacagatcttatgaaggccatccggctccttgtgatgacctccaccagtctgcagaaggaaatcgtggagagcggcaggggggcagccacgcagcaggaattttatgccaagaattcacggtggactgagggcctcatctctgcctctaaggcagtgggctggggagccacacagttagtggagtcggctgacaaggtggtgcttcacacgggcaaatacgaggaactcatcgtctgctcacatgagattgcagccagcacagcccagcttgtggcagcctaaggtaaaagctgacaagcatagtcctcacctgagccgcctgcaggagtgctcccgcactgtcaatgagagggcggccaacgtggtggcctccaccaaatcaggccaggagcagatcgaggacagagacaccatggatttctccggcctgtccctcatcaagttgaagaagcaggagatggagacacaggtgcgagtcttggagctggagaagacactggaggcagagcgcgtgcggcttggggagcttcgcaaacagcactatgtactggccggggtgatggggacaccaggtgaggaagaacccagccgacccagcccagctccccgaagttcagccaccaagaagccacccttggcccagaaacccagcatagcccccaggccagacaaccagctcaacaaaaaggatggtgtctacccagctcaactcgtgaactactaggccctctgaggtgttcagcaggatggctggtggtcgtgcctgagcctcgtgtagctatctggcaatgggcaagggggcctctgagaggcttccaactcctg

SEQ ID NO: 6527 - DNA, 983 bp, Cricetulus griseus
ggagaatgagctgtcagtacaagttggcatgaagcatgagattgagcttgctatgaagttgctggagaaagatattcacgagaaacaagacactctcataggccttcggcaacagctggaagaagtcaaagcaatcaacattgagatgtaccaaaagctgcagggttctgaagacagcttgaaagaaaaaaatgaaatcattgctcgcctggaagaaaagaccaataaaatcagtacagccatgaggcagctggaacaaagatatatatatatatatatatatatatatatatatatatatatatatatatatatatatatatagatgtgggtgctgggaaccgaatcaggacttctgcaagaccagcgggtactctgctaacagtaaaatacatcatcccaaatcttatgaaggcagcacatccttaagagtacctatatatataaaaagtagcaacatcagtggtttcaatataaaaattattttaagtcaaagtatgcaacaaataaaacctacagaaaacagattttcccatcacaatctgttgctttaaccaaatattttgaaaacacattccttcagtcattataaagttcttgaaatacaaaagaaattcaatctgtaagaaagtcagatgttgttaggacttgtacgttggaggaagtggtctcagtacatcccacgccatccacctccactcattccaccttgtccatagtaaccaccacctccaccaccacatgttcttgtaagaaaaaaaaaaaagacttacattagcaatatcattttctgttgcacgaaaaggcagccctctcatgtgcacaaaatgaccaccatggaaacctgaacttgcatcaccagctccaccatagccatgtcctcccatgcctagattataaaccattgtgggttcacataagtacatataaatcaacaagccagcgcaatgacacaagtttccattatcccatcaaagttgcct

SEQ ID NO: 6528 - DNA, 983 bp, Cricetulus griseus
tccgggttggagaatttccttgtcaaaccatggaccctgaggtgtccctcctgctgttgtgtcctcctgggggactgtcccaggagcaggtagcagtagagctgagcccagctcatgatcgtcgcccactgcctggaggagacaagaccattactgccatctgggagacaaggctacagacccaaccctggatctttgatgcccctaagttccgccttcactcggccatactggcatccagctcacctcagccacagctgctcctgaacctgggactaacttcctaccgggacttcctgggcacaaactggtccagctcagcctcctggctgcgacagcagggagctacagattggggtgaaaagcaagcctatctggcagatccactgggggtgggtgccatattggtcacagctgatgacttccttgtcttcctgcgccgctctcagcaggtggctgaggcgcctgggatggtagacgtgcctggagggcaccctgaacctcaggccctgtgctctggtggcatcccccagcacaaggacctccctggggaactggtggtacgtgaactcttctccagtgtcctacaggagatctgtgatgaggtgaacgtgccaccgcataccttgagccagccactgttattgggcatcgcttgcaatgagaccagcgcgggcagagccagtgcagagttccatgtccagtgcagcctaacttcagaggaggttaggagttattacatgagtgggggacctgaggcccacgagtctacaggaatcatctttgtggagacacagagggtacagagactacaggagacagagatgtgggcacaactctgcccttcagccaaaggcgccatcctcctctacaatcgccatcctcctttacagtcgggtgctgggacgtcccgcctgagtcatcctagcgtcccagccctatcactgcagctactaaagacaataaaggtacttttatttctt

SEQ ID NO: 6529 - DNA, 983 bp, Cricetulus griseus
ccgggccatgaatcgccggagacggcgcctggcgtcggaggccttcggggtgaagcggcggcgggcgccggggcccgcgcaggcggatcccctgagggcgggcgcagggtcggcgcgcgaggcggtggaggcgctggtgcggctgttcccccgcgggctgttcgaggacgcgctgccgcccatcgcgctgaggagccaggtgtacagcctgctgcccgacaggacgctggccgacctgcagctgaaggagcttcaggagcagggagagatcaggatcatccagctgggctttgacttggatgcccatggaattgtcttcactgaagactacaggaccagagtccttaaggcctgtgatggccgaccatgtgctggggtggtgcagaagttcctggcctccgtgctcccagcctgtggggatcttagtttccagcaggaccagatgacccagacttacggcttcagggacccggagatcacgcacctggtgaacgctggagtcctcactgtccgagatgctgggagctggtggctggccgtgcctggagctgggagattcatcaagttctttgtcaaagggcgccaggctctactcagcatgctgcggagggccaagtacagggagcttctcctgtcagagctcctggggcgaaggtccccgtcggcagtgaggctcggccttgcctaccacgtgcatgacctcattggagcccagctggtggactgtgtgcccaccagctctggaaccctccttcgcctgccagatacgtgaggagtcgactcctggactcttcagctcacagagtgaggttcctggaagcgctgcccctggacggctgagcgggtcaccgggaatgggtgccaggccctgctgctgcaagctggggctccagcctgagctgcgctgtgtgcgctgcagctctgggcttctgtgggtgtgaagccaggagccggtgccggaggggatagggaaggtgggattg

SEQ ID NO: 6530 - DNA, 983 bp, Cricetulus griseus
cgggcggcgccgggcctgcgcgtcgtcggccccaaagatggcgctgttccaggggctgtggggcgcgctaagggcgctcgggcgctcgggggccgagctgtgcgcgggctgcggaggtcgcttgccctcgccgctcagccttgtctgtattccaaaatgtttttcatccaacgtgggtaattatccaaagaaacctatgacttcataccttcgattttctacagaacagctacccagatttaaagctaaacacccagatgcaaaactttcggacctcgttagaaaaattgcagccgcatggagggaactaccggaagaagaaaaaaaggtatatgaagctgattttagggcagactggaaagcatacaaagaagctctgagcaagtttaaagaccagctaactccagctcagttggtatcttttgagaaagaagtcaggcaaaaacgtttaaaaaagaaagcctcagtaaaaaagagagaattaatgttgcttggaaaaccaaaaagacctcgatcagcatacaacatttacgtatctgaaagcttccaagagactaaagatggatctgctccgggaagactgaagactataaatgaggcttggaaaagtctatctagtgatgaaaggcaggcatacattcagcttgctaaagatgatagaattcgttatgataacgaaatgaagtcttgggaagagcaaatggctgaagttggacgaagtgatctcatccgccgcaatgtgagacgctcagacatcattgaggactaagatagaagatggagttgtctctgggattaggcacaagaaaccaattaggtctcaatgccttaagttgtcaaattagaaaggataaggctggttacatttgatattcagttcttttttctgtagccaatggactttaagaaaattatgtaacaagtctatgcatatttgttttattgcatagaataaaaattctaattttcaaacatgtttctga

SEQ ID NO: 6531 - DNA, 983 bp, Cricetulus griseus
gcgtctgtgacccgttgccgaggcggcggcgaagctagttgggtttacctcaccgctttctcgtgcctcggcgcctcctctgcgggcttcctcctcacaccgctcttcgctcccgccagccgaccgattccgtcatggcgacccgcagccccagcgtcgtgattagtgatgatgaaccaggctatgacctagatttattttgtattcctaatcactatgtcgaggatttggaaaaggtgtttattcctcatggagtgattatggacaggactgaaagacttgcccgagatgtcatgaaagagatgggaggccatcacattgtggccctctgtgtgctgaaggggggctataaattctttgctgacctgctggattacattaaagcactgaatagaaatagtgatagatccattcccatgactgtagattttatcagactgaagagctactgtaatgatcagtcaacaggggacataaaagttattggtggggatgatctctcaactttaactggaaagaatgtcttgattgttgaggacataattgacactggtaaaacaatgcaaactctgctttccctggtcaagcggtacaaccccaaaatggttaaggttgcaagcttgctggtgaaaaggacctctcgaagtgttggatataggccagactttgttggatttgaaattccagacaagtttgttgttggatatgcccttgactataatgagtacttcagggatttgaatcatatttgtgtcattagtgaaactgggaaagccaaatacaaagcctaagatgagagttcaagttgaatctgcaaacacgaggagtcccattcatgttcccagtaaaattaccaagcattctagttctgcagccatctgcttagtacagctttttgcatgaaccttctaagaattttatggttttttttttagaaatgtcagttgctgcattcttaaactttttatttgcactatgagcct

SEQ ID NO: 6532 - DNA, 982 bp, Cricetulus griseus
accaggagtcgacgtgtgcagaaatcctgctagtctggtccttgtttccatctgggtaccagcttccttcagcttcgcaggcggcggtgtaagaggcccgcggaaggaggagacagcttgtttaaattctccaggtttgttctttgtaccgctccaggctaaaataagtgggagaaagaaactgaccagatcagtacctggaagagaagcacacacaagatgaaaccctgccaaaaaatggaaggaaccccagaaaatgatgagccaaagcccgaggaggagccaaagcccgaggaaaagccagaggagggggaagaaccagaagaggaggaaaaatcggaagaaacttttagggagaggctgattcagtctcttcaggattttaaagaggatatacataacaggcatttgagcagtgaagatatgtttagggatgtggatgaagtagatgagataaggagagtgagaaacaaacttatagtgatgcgttggaaggctaatcgaaaccacccttatccctatttaatgtagcttgccttggtttctgttttatctggtattgccactgcaatatagctttctttttattagcaattttctgatatgcctttgcccatctccctattttgaatctgttgctattagtggttttagatgtatctcttcttgtctgcatcttactgttgcttatatttgaatcaatctacaagtgtttggctttgaatgagagagctttactgatttagtaaaaaaaaaaaaaaatgagcttctgatgggatacaaaatgaggaaaggttacaaaataatatgaggatatcatattttgaaagacaagagtacctttgtatgctacataaatgcacatataaacttgtgaaagatgaatgatttttcttctgcttatttgtatttgccatattcctaaaatgaacgtgcattattcttgctaaaaataataaaggttttataactaaaaataaga

SEQ ID NO: 6533 - DNA, 982 bp, Cricetulus griseus
ggagtcctgcctgtttgcgcgctcatggtgcgctgcgggtgcgcgtggtggagacagtatggaaatttcattgataatgtaagactcttcaccaaaggaggaagtggtggaatgggttaccctcgtttagggggagaaggtggaagaggcggcgatgtctgggttgtagcccataaaaatatgactttaaaacaacttaaaaacaaatatcctcagaaacggtttgtggctggagtaggagcaaacagccgagttagtgcactgaagggctccaaaggaaaagactgtgaaatccctgtgcctgtgggcatttcaataactgatgaaaatggtaaagttataggagaactcaataaagaagaagatagaattctggttgctaaaggtggccttggtggtaaattacatacaaatttcttacctttgaaaggccagaagcaagtaattcaccttgacttaaaagttatagctgatgtaggcctagtaggattcccaaatgctggaaaatcctctttactaagtcgggtgtcccatgcaaagcctgtgattgcagattatgcatttacaacactaaggcctgaacttggaaagattatgtatagtgattttaaacagtcccaggtttgatagaaggaagcacacatgaacaaaggaatggccacaaattcctcaagcatttagagagaaccagacagctgctttttgttgttgatatttctggatttcagctttcttctgtaactccatacagaactgcctttgaaactataatacttcttacaaaagagttggagttatacaaagaggaactgcagacaaaacctgcactgttggcagttaataagatggacttgccagatgcccaagtaaaacttgacgaactgatgaagcagctccagcaccctgcagattttctgcatttatttgaaaaaagcatgcttccagagaaggctgtgaagttccaacatatcatccccatctc

SEQ ID NO: 6534 - DNA, 981 bp, Cricetulus griseus
gtagtgaagaacatggcttaaatcaaaaggaagcgtctactacaaattccaattgcctttccgtggaaggagtcacatcgcttgaagtaggtgaaggccaggtgtctcagccacagcacgatgtgccgtatttcagaaaaatcctccagtcagaaactgacaaattaacttcacactgcctggagtgggagaggaaactggaactggacattcctgatgatgccaaagatcttattcgcacagcagttggtcaaacaagactccttattaaggaacgattcaaacagtttgaaggactggtggacaactgtgaatacaaacgaggtgaaaaagagactacctgctcagatctggatggattttgggatatggttagttttcaggtagatgatgtaaaccaaaaattcaacaacctgatcaaacttgaggaagctgaatggaaaagcattaataatccaagcaaaaaagtcctccggaaaaaaactgtgcctggtcgaacaaataaagcaaaacaggatgatgatggaagaatggcagctagaaaccgtctagctgccataaaaaatgcaatgaaagagagactgaagcaggaagagtgtgcccaagtggcagctatggaaatgccaaaggaagttgagaaaatagtgtttgatgctggctttttccgaattgagagtcctgttaaatcgttttcagcactttcatctgaacgtcgttctcagagatttggagcacctacgtctgccagccgagtcatgcctgagaacagggctggaggggaccttcaaagacaaaggatatcatcactagagaatcctgaacctcagaacagcgcctttaatcccagcacttgggaggcagaggcaggaggatctctgtgagttcgaggccagcctggtctacagagggagtgccaggataggctccaaagctggtacagagaaaccctgtcttgaaaaaccaaaataaataaataaataa

SEQ ID NO: 6535 - DNA, 981 bp, Cricetulus griseus
atgtggaatttgctttgattcacaaagagagaaagaaagcaaaatgaagtggaccggatggttctggtgggcgatgtgaaggaccgtgtggccatcctggtggacgacatggctgacacatgtggtaccatctgccatgctgcagataagttactctcagctggtgccaccaaagtttatgctatccttacccatgggatcttctctgggccagctatttccagaataaataatgctgcctttgaagctgttgttgtcaccaacacaattccacaagaggacaaaatgaaacactgctccaagattcaggtgattgacatttcaatgatcctggctgaggccattcgaagaacccacaatgggaatccgtgtcctacttgttcagccacgtcccacttcgtagtctggatgggagctcagtgtgtgtgtgtgtgtgtgtgtgtgtgtgtgtgtgtgtgtgtgatcttcagattttaatccccttatacaaatctgcctggctgtcctctgaactgaccactgatggtttctggttttacttggcctgagttaatattttaaagaaccttcaaaatacgttgataaactaattagactggactgagccttatacaatggaaatacagattttaaatatttggtggtttcagtttggccaaaatgacgtagcctgcttcaggtacagtctaagcccaggactttcctgttccttgctgcttgtggtaaggaaatgtaaagggaaatcaccaagagatcactctgtccagctctatgaaaggagatatacaatgttgtttagcctccagctaaaattttcttagtcaactggtagatgttcctatgctaacttccctttgttatatacaatgttgactaagttcaggaatatattctttacagtgcttgctctggttttagagactagagaattttgagatcctgtgaagtttactaagacatttcaataaaatcctgctgact

SEQ ID NO: 6536 - DNA, 981 bp, Cricetulus griseus
ccaggctttgatgctgaactctggtagaaggaggttgttctcagctctgctgcaagttcacaagagagcctgtcagccctctagagacatgagactggtgcagttccagacaccccacctggaggggcctcacctgggcctggagtcagggattggtgggggagtcatagacctaaacacttttgactccacactccccaagacaatgatgcagttcctggagcaaggagagactgccctctcagtggcaagaagagccctggctacccagttgccagtcctccctcggtcacaggtgaccttcctggcccctgtcacccggccagacaaggtggtatgtgtgggcatgaattatgcagaccactgcaaagaacagaatgtgcgggtgcccaaggagcccatcatcttcagcaagttctccagttccattgtggggccctatgatgagatcatcctcccaccagagagcgaggaggtggactgggaggtggaactggccgtggtcattggaaagaaaggcaagcacatcaaggccacagatgccatggctcacgtggctggtttcactgtggcccatgacgtgagtgctcgggactggcaaatgagacgcaatggaaagcagtggttactgggaaaaacttttgatactttctgccccctgggccctgccttggttaccagggacagcatagcagatccacacaatttaaagatctgctgtcgagtgaacggggaggtagtccagagcagcaacaccaatcagatggtgttcaagactgaagagctgatagcctgggtctcccagtttgtcaccctttatccaggggacatcatcctgactggaactcctccaggggttggtgtgtttaggaagcctcctgtctttctcaagaagagtgatgaagtccagtgtgagattgaagaaattggtgtcattgtcaacaaggtggtgtgatggcatccctataaccattgacttga

SEQ ID NO: 6537 - DNA, 980 bp, Cricetulus griseus
ccttttggcttcgaggtttaccccttccaggtggcatggtacaatgaactcctgcctccagctttccaccttgcccttcccaggacctaccctggccttcctggtactcagcacacctgctatgtttgacaaagccctcaaacccttcttgaagagctaccatctccaaccactgagagaccccgtggatcagtgcgtatcctaccacttgagaagtgttgtggagaagtttccagaactgcgaatggaagtcattgctgactatgaggtccaccccaacaggcgccctaagattctagcccagactgcagcccatgtggcaggtgctgcttactactatcaacgacaagatgtctatgctgacccatgggggacccagcacatagcaggtgtgtgcatccacccccggtttggaggctggtttgctatccgaggggtaatgttgctgccaggaacggaagtgccagatttgccactcagaaagccccctgactgtgtgcctacaagagctggccgcatcgctctgcttgaaggcttcaatttccattggcgtgactggacttatcgggatgctgtgactcctgaagagcggtactccgaagaacagaagatgtacttttccaccccacctgcccaacgtttggccttattaggcttatcccagccctcagaacaccttagcactacatctgagcatcccagttccatgcttaccaagcctcaggattccagcagagcacgaagctggcttagccccagtgtctcaccacctgtactccccaggccccttgatacctgtatccccattactttttttctgttattgttttgtttgttttccaagacaaggtttctctgtataacagttctggctgtccaggaactcactttgtagaccaggctggactcaaactcagagatccacctgcctctgcctccggagtgctgggattaaaggcatgcaccaccaaagcctggct

SEQ ID NO: 6538 - DNA, 980 bp, Cricetulus griseus
ggatggatgaagcacagtctttggatacagctgatagattcatcaattccaaatgtgcaaaatacatgcttcgagcaaatatgataaaagaagcagaggaaatgtgctccaaattcacaagggaaggaacatctgccatggaaaatctaaatgaaatgcagtgtatgtggtttgagacagaatgcattttagcatatcagcgccttgggagatatggggatgccttgaaaaaatgtcatgaagtagaaaggcattttttgagataactgatgatcaatttgacttccatacatactgcatgagaaagatgacccttcgtgcttatgttgacctcttgagattagaagatactctcagaagacactaccttttattcaaggctgctagatcagcaattgaaattatatttgaaattacatctaaatctgtatctaatcatagtaatattccagacattgtgagcaaagttctagctcaagaaatgaagaaaatatttgtcaacaaagatttgcaacgctttaatgaggatttcctcatacacaatgctacctctcttcagcatctactttcaggtgctaaaatgatgtattttctggataagtcaagacaagagaaagcaattgctatagccactaggttggatgaaaccataaaagataaaaatgtgaagactcttacaaaggtttctgaggcactgctggatggcagctttgggaactgtagttcccagtatgaggagtataggaaggcctgccataacctgcttccacttacatctgctttcctgcctgctgttttcttttttgttgtttgttttgtttttttgagacagtgtttctctgtgttgttttggaacctgtcctggaacttgctctgtagaccaggaacagagattcacctgcctctgcctcctgagtgctgggattaaaggcaataaattattttcatgcagaaaaaaaaaaaaaaaaaaaaaaaaaaaa

SEQ ID NO: 6539 - DNA, 980 bp, Cricetulus griseus
gggacgcggggaggcagagcccctcagccccgggacaccatgtaccgcccgagccggggggccgcccggcgcctcgggccctgcctccgcgcctaccaggctcgaccccaggaccagctttctcctcgggctctaccattcccacccctctgttcccactccactccagcttctccaccttttcctcttcctggtcactcacacccccacatcctgccacccaccctcttcctcaggctctaccaccacctctgtttcaggtccaggctgtcaactcattgtgggtggttctcctctgggaaagggggaggagggaccgggacctgagttgcacaatggctgtctggatgggcttaggagtcaatggatgtggagttcatcaatgagatcctgagcattcgtaccaagggccggacatggtacgttatgtccctgaccctttgccgcttcctggtttggaactattttgcacagtttcggctggagattctacagctgacccgccaccctgagaactggaccctgcaagcccgctggcgtctagtaggcctgcccatacacatgttcttcatgcgtttctacaggcgtgataaagaggatctttaccggacctttgatgcctattccaccttctacctgaattccagtggcctcatttgtcgccatcacctagacaagctgacaccctcacactcgccgtcaacgcctgtcaaaaagctgctagtgggagccctggtggccctggggctgtcagaaccagagcccaacttacacacgtgttccaaggcctgacccagacttgggtcaaggcatcactgaagactttgctacgcacaagaggaggtgaaggtggacaagaatgtcgagggccagccacctccctccatgctctctctttcccacctcatgctgtgtaaagctgctgtgtaatttaattgtaaataataaagtttaagcaaacgaataagaaaaaaaaaaaa

SEQ ID NO: 6540 - DNA, 980 bp, Cricetulus griseus
ctgggacctggagcaactgcagagtacaccaagaacacctcacacgtcactaaaagaggaatcacacttgttggacatgaggcagaaaaatattccacctcctcaagggaacacccctgaatgttgttgtccttaataactccaggttttatcacattggaacaacggaggagtatctgctacatttcacttccaatggttcgttacaggcagagctgggcttgcaatccatagctttcagtgtctttccaaatgtgcctgaagactcccatgagaacaccctgtgtcattcacagcatcctgaattcaggatgctgtgtcggcccctggctcagtggtagaatattccagattaggacctgaggtgtccatctcggaaaactgcattatcagcggttctgtcatagaaaaagctgttctgcccccatgttctttcgtgtgctctttaagtgtggagataaatggacacttagaatattcaactatggtgtttggcatggaagacaacttgaagaacagtgttaaaaccatatcagatataaagatgcttcagttctttggagtctgtttcctgacttgtttagatatttggaaccttaaagctatggaagaactattttcaggaagtaagacgcagctgagcctgtggactgctcgaatttccctgtctgttcttctctgagtgagtcggttgcagcatcccttgggatgttaaatgccattcgaaaccattcgccattcagcctgagcaacttcaagctgctgtccatccaggaaatgcttctctgcaaagatgtaggagacatgcttgcttacagggagcaactctttctagaaatcagttcaaagagaaaacagtctgattcggagaaatcttaaatacaatggattttgcctggaaacaggattgcaaatgcaggcatattctatagatctctgcttacttgtaaaaaaaaaaaaaaaaaaaaaaaaaaaaaaaa

SEQ ID NO: 6541 - DNA, 980 bp, Cricetulus griseus
agcgtgtatttgggacatatttccgagtgggcttctatggtgcacgatttggtgacctggatgaacaagagtttgtgtacaaggaaccatcaatcacaaagctggcagagatctcacaccgactggaggaattctatacggagaggttcggggacgatgtggtagagatcatcaaagattctaacccagtggacaagtccaagctggacccacagaaggcctatatccagataacctatgtggagccccactttgacacctacgagctcaaggaccgggtgacctacttcgaccgcaactacgggctgcgggccttcctcttctgcacaccgttcacaccagatgggcgagcgcatggggggctggtagaacagcacaaacgcaagaccctgctgagcacggagcacgcctttccctacatcaagacacgcatccgcgtgtgccaccgtgaggagacggtgttgacaccagtggaggtggccattgaggacatgcagaagaagacacgggagctggcctttgccactgagcaggaccctccagatgccaagatgctacagatggttctgcagggctcggtgggacccactgtgaaccagggtcccttagaagtggcccaggtatttttggcagagatcccagaggatcccaaactcttccgacatcacaacaaattacggctctgcttcaaggatttctgcaagaagtgtgaggatgcactgagaaagaacaaggccttgattgggccagaccagaaggaataccaccgggaactggagcgccactacagtcgcctccgggaggctctgcagcctctgcttacccagcgcctgccccagctgctggcaccaagctccagcagcctcaggaactccctgaacagatctagcttccggaaggctgaactctgaccccacaggactgaaagccacaccagaagaccagcacccacacctcagctgtctgtgccttcctggagt

SEQ ID NO: 6542 - DNA, 980 bp, Cricetulus griseus
aagagtttagtcctctaggacgctccaccttgtgccctgatctgaagcctcagcttttgctaaccaggtgaccatgtctgtgaccctccaaaatgtcctctgcagtcttcaggaggagcaatccaggctcaagacgaagctgcaggagctgcagcaacagaaaaggacacccctgatctctcccaaagaggggatcccgttcccggtgcccgaggtccccctggcattccaaggccgcattcagcaaggcaggcaagtacccaagtttctggtttctaacttgaagatctgctgccctctgcctggaggttctgctatagtcacctttgatgatcccaaagtggctgatcagttgctacaacaaaaggaacataaaattgacatagaggaatgctggcttcgggtgcagatccagcccttggagctgcctgtggtgaccaacatccaggtgtccagtcagccagatagtcacagggtgctagtcagtggctttccttctggacttcagctgagtgaggaggagctgctagacaagttggagatcttctttggcaaggccaagaatggaggcggggatgtggagacccgggagatgctgcaagggacagtcatgctaggttttgctgatgaaaaagtggcccagaacctatgccagattggccagttccgagtgccactgggccggcagcaggtccctctgagagtttctccctatgtgagtggggagatccagcaagccaagatcaaattccagcaagcacttcactcagtgctggtgacaaatattcctgacatcctgaatgcccaagaattgcatgacatcctggcgatccacttccagaagcccacccgtggaggcggggaggtggaggccctgtcagttgtaccctcggggcagcagggcctggctgtcttcacttcttcatcaagctaggtctgcatgtccacctgctggggactgggatcacacactgcctaat

SEQ ID NO: 6543 - DNA, 979 bp, Cricetulus griseus
cccgggaagttttcttcctcacccttgggagaagagcctctggctgaatggcagctgcagatgacttgcagtttgaagagtttggcgatggagccactttgctagcagcaaacccagatgccaccacaataaacatcgaggaccctggtgagacttccaaacaccaacccagaccccgaggaggctctgggagaggagaggatgaggagctgctgggaaacaatgactctgacgagactgagttacttgctggccagaagaaaagctctcccttctggacatttgaatactatcagacattctttgatgtggacacttaccaggtctttgacagaataaaagggtctctgttgccggttcctgggaagaacttcgtgaggctgtatgtccgcagcaacccagatctctatggccccttttggatatgtgccaccttggtctttgccatagcaattagtgggaacctttccaacttcttaatccatctgggagagaagacgtaccgttatgtgcccgagttccaaaaagtgtccatagcggctaccatcatctatgcctatgcctggctcgtgcctctagctctctggggcttcctcatgtggagaaacagcaaagtgatgaacatcgtttcctattcttttctggagatcgtgtgcgtctacggctactcgctcttcatttatatccccacagcagtactgtggatcattccccagagagttgttcgttgggtcttagtcatgattgccctgggcatctcggggtctgtgttggcaatgacattttggccagctgttcgagaggataaccgacgtgtggccttggccaccattgtgacaattgtgttgcttcacgtgctgctgtctgttggctgcttggcttacttctttgatgccccagagatggaccatctcccaacaattacagccactcccaaccagacagttgcagcagccaaatccagctaacagggaaagca

SEQ ID NO: 6544 - DNA, 979 bp, Cricetulus griseus
  modified_base (529)..(529): a, c, t, g, unknown or other
gtgcagtacatcggggagatctgccgctacctgctgaggcaaccgattcgtgacgtggagcggcggcaccgtgtgcgcctggccgtgggcaacgggctgcggccggccatttgggaggagttcacgcagcgcttcggcgtgcggcagatcggcgagttctacggcgccaccgagtgcaactgcagcatcgccaacatggacggcaaggtcggctcctgcggcttcaacagccgcatcctcacgcacgtgtaccccatccgtctggtcaaggtgaatgaggacacgatggagcccttgcgggacgcccagggcctctgcatcccatgccagcccggaagacgcccggccttctggtgggccagatccaaccagccaagacccctctgcggcgcttcgacggctacgttagcgatagcgccaccagcaagaagatcgcccacagcgtgttccgcaagggcgacagcgcctacctctcaggtgacgtgctggtgatggacgagctgggctacatgtatttccgcgaccgcancggggacaccttccgctggcgcggggagaacgtgtccaccaccgaggtggaagccgtgctgagccgcctgctgggccagactgatgtggccgtgtacggggtggccgtgccaggagtggagggcaaagccggcatggcggccattgcagatccccacggccagttggaccctaacaccatgtaccaggagttgcagaaggttctggcatcctatgcccggcccatcttcctgcgtcttctgcctcaggtggataccacaggcaccttcaagatccagaagacccggctgcagcgcgaaggctttgaccctcgacagacctcagaccggctcttcttcctggacatgaagcagggccgatacctgcccctggatgagggagtccacacccgcatctgcgccggagacttctcgctctgatgcacctggcgagtgtgatgggcctggactcc

SEQ ID NO: 6545 - DNA, 979 bp, Cricetulus griseus
  modified_base (335)..(335): a, c, t, g, unknown or other
agccaacatgagtctgtttggatcagcctctggatttgggactggtgggaccagcatgtttgggagcacagccacagataatcacaacccaatgaaggacatcgaagtaacgtcttctcctgatgatagcatcggttgtctgtcttttcagcccaccaaccttaccagggaatttcctcattgcaggatcatgggctaatgatgttcgctgctgggaagtacaagacagtggacagaccattccaaaagcccagcagatgcacactgggccagtgctggacgtctgctggagtgatgatgggagcaaagtcttcacagcatcatgtgataaaacngccaagatgtgggacctgaacagcaaccaggccattcacctgagcgctgttactgtgcagatgtcatatacccaatggctgtggtggccactgcagagagaggcctgattgtctaccagttagagaatcagccttcagagttcaggagaatagagtctccactgaaacaccagcatcgatgtgtggctattttcaaagacaaacagaacaagccaactggttttgctctgggaagtattgagggcagagttgccattcactacatcaaccctccaaatccggcaaaagataacttcaccttcaaatgccatcgatccaacggcaccaacacttcagcccctcaagacatctatgcagtgaacggaattgccttccatcctgtccatggcacccttgctaccgtggggtctgatggtaggttcagcttctgggacaaagatgccaggacaaaactaaagacctcggaacagttagatcagcccatcgcagcctgctgcttcaatcacaatggaaatatatttgcctatgcttctagctacgactggtccaagggacatgagttttataatccccaaaagaaaattacattttcctgcgtaatgcagctgaagagctaaagccgaggaataagaagtagtggcctg

SEQ ID NO: 6546 - DNA, 979 bp, Cricetulus griseus
cggaagcggaagaggctgcggagccgggaagcctctctcggaactggccgggtccccgggaccgccgcccgccgcgatgccgagcccccggaggaccatcgagggacggtcgctgggcgcctcgggcgggaacagcgtcccgggcagcccggcccacggcggcggcggtggcaggttcgagtttcagtcattgctgagctcccgtgcgggcgcggatcctgcctgcgcccggctgcgcgcgtccgacagcccggtgcaccggtgcggctccttcccgctggcctccgcgggccccgctcaagcagccccggccctgccgcccgaggacgaccgcatgaacttgaacccgtccttcctgggcatcgccctgcgctccctgctggccatcgacctgtggctatccaagaagctgggggtgtgcgccggggaaagctcggcctggggcagcgtgcgacccctgatgaagttgctggagatctcggggcatggcatcccctggctgctatgaagccctgctgcccatcatctctactcaacagagcaaatggtcctctattaagtaaaaaatggaaaagtgatgtgatttttcagtgtgctatcatagttttcttgtgtttatcacaaagaagactgtatgctatccatttttcatatcaattccactttgctgtatctagcacattttaggtaatagcacttaacttgaaattcttcaggagagcctattgccctacgtgaccactaggtatgactcctaaatatctgtttacatggaaagctgttcactcacacgcctcccccagtcataagaccaaagatgaccaaataatgtggtagactctgattactgtctgacctggaaagaccaaagagagtatgtgctatataaatctgtaaatgctgctctatctggaaagaaaccctttaaatcactggggcagtggtatgtcagataatcttaatgaccaattgttctggc

SEQ ID NO: 6547 - DNA, 978 bp, Cricetulus griseus
agtgccgcgcaatggcaggcacgggtttggtagccggggaggtggtggtggatgcgttgccgtactttgaccaaggctacgaggctcccggcgtgcgggaagcggctgcggccctggtggaggaggaaactcgcagataccgacctaccaagaactacctgagctacctgacagccccggattattctgcctttgaaactgacataatgagaaacgaatttgagaggctagctgctcgacaaccaattgaattactcagcatgaagcgatatgaacttccagccccttcctcgggtcaaaaaaatgacattactgcatggcaagagtgtgtaaacaattccatggcccagttagagcatcaagcagtgcgaattgagaatctggaactgatgtcacagcatgggtgtaatgcctggaaagtatataatgaaaacctcgttcatatgattgaacatgcacagaaggagcttcagaagttaaggaaacatattcaagatttaaactggcagcgaaaaaacatgcaactctcagctggatctaaattgagagaaatggaatccaattgggtatccctggtaagcaagaactatgagattgaaaggactattgtgcagctggagaatgagatctgtcaaatcaagcagcagcatggggaggcaaacaaggaaaacatccgccaagacttctgaccttgggcagaagggaagagaaacctcaggcccctggactttctcagagcaactggttagttgtttagagactgtggactgtgtatactgttgtgttgctttatatgtgtgtgtgttagcaaaataaggattttcaacatgttgctatttttgtagctataaaaatctgagttttcaaaatgagtatgactttagaataatgtcatattttgtagcagaagttcttgattgaaggcttcaaattttgtaactaagctgctttatttttaagacttctaacatgttttgg

SEQ ID NO: 6548 - DNA, 978 bp, Cricetulus griseus
tgtctcagcatggttgagatagaatgggccgaggcccagctctcagagttagacctcctggccagtatgttccctggtgagaatgagctcacagtgaatgaccagctggcattagcagagctgaaagactgtattgagaagaggacaatggagggacggtcatcgcaagtatacttcaccatcaatatgaacctggacttctccggggaagcaatggagatgttttctctgtcttgcattcttccctttaagtaccctacagtcctgcctgagattactgtcagatcacgctgagtagatcccagcagacccagctgaacacagatctgatcgcatacctgcagaagaactgtcttggagacgtctgtatactgaacgccacagactggcttagagagcatgcctctgactatgtcaacagagatacctcaccttcccctgccaaggaaagcccagcccagcccgtggatctcaccctcaccaggctctggatttatagccatcacatctacaacaaatgcaaaagaaaaacattctggagtgggcaaaggaactgtccctgtctgggtttagcatgcctgggaaacctggtgtggtttgtgtagaaggcctacaaagtgcttgtgaagaattctggtcaagactcagaaaactaaactggaagagaattttaattcgccatcgagaagacatgcctttggatggcacaaaggatggaatggagaaacagcggcgatttgccagttttgaagaaaaggtattcagtgtccatggagccagaggaaaccacatggactttggtcagctgtatcagttcttaaatgccaggggctgtggggatgttttccagatgtactttggtgtggaaggacagtgactgagcaaaggggctgtcggacctgtggagtccctgttcctcctttgattatgtcttctcattctttctcaaattttaattttagttccatcctagaatgt

SEQ ID NO: 6549 - DNA, 978 bp, Cricetulus griseus
tcctaatcgaacgttttacagtcctggatacccagccctttgcgaggtccgaagtcccagaaaccacccctcatttcggacctccaacccagaaagtccggatgggacatacagcgagaccggagcgcttcttcggtgtctacctgctctactgccagaaccctcggcatcggggccgcgtttacgtgggattcactgtcaatcctgctcgtcgggtccggcaacacaacgccggtcgcaaaaaggtggcgcctggcggaccagcgggcgaggaccctgggacatggtgctgatcctgcacggttttccgtctgctgtggccgcccttcggtttgaatgggcctggcagcatcctcaagcctcacgccgcctgactcacgtggggccgcgcctgcgcagcgaggcttcctttgccttccacctgcgcgtgttggcgcacatgctccgagctccaccatgggtgcgcctccctctaacactgcgctggctgagacctgactttcaccatgaactttctccagcgccaccattacacatgcccatagcctttggaccgccaccccagcccttggaaccgaagcaactcgctgcaagtgagactgacagcaagccccagttggatctaggacccaaggccagctgcgtgttgtgcgcgcgcatgctgcaggatgaagagggccccttgtgctgcccccaccctggttgtcccctaaaagcccatatcatctgtctggcagaagagttcctgcgggaagagcctgggcagcttctgcctctagaaggccattgtcctagctgtaagaagtctctgctttggggaagtctgattgggcagtgccatgtggacgccgaggaggaagaggacttgggattggaagaggaacactggacagacttgctggagacctgatcctaggcatccccatgaacactgttcctgcccctctcttcagtgcctggcagcttttacttgagcac

SEQ ID NO: 6550 - DNA, 978 bp, Cricetulus griseus
cacgccgcggcacgtacctctcggccttccgacgatcctcggccgcggcgtccgcgtcccttcagctcgcccgttcgccgtccttccctgaggcccgctgcgccatggcgttggcgttggccgcgctggcggctgtggagccggcctgcggcaccgggtaccagcagttgcagaatgaagaggagcctggggaacctgcacagactgcaggtgatgctcctccaccatacagcagcatttctgcagagagtgcagcatattttgactacaaagatgaatctgggtttccaaagcccccatcttataatgtggctacaacactgcccagttatgatgaggctgagagaaccaagactgaagccacgatccctttggttcctggaagagatgaagattttgtgggtcgggatgattttgatgatactgaccagctgaggataggaaatgatgggatttttatgttgacttttttcatggcatttctcttcaactggattgggtttttcttgtctttttgcctgaccacctcagctgcgggaaggtatggggccatctcaggatttggtctttctctaattaagtggatccttattgtcaggttttccacctattttcctggatactttgatggccagtactggctctggtgggtgttcttggttttaggctttctcctgtttctcagaggatttatcaattatgcaaaagttcggaagatgccagaaactttctcaaatctccccaggaccagagttctctttatttattaaagatgttttctggcaaaggccttcctgcactgatgaagtccctcaagaatcgagagcacctgcaggaagtgaatcaccaccagaacagaggaacagtcacctgctttaaaaaataaagtactgttgaaaaagaaaaaaaaaaaaaaaaaaaaaaaaaaaaaaaaaaaaaaaaaaaaaaaaaaaaaaaaaaaaaaaaaaaaaaaaaaaa

SEQ ID NO: 6551 - DNA, 978 bp, Cricetulus griseus
ggtggagtgagtgagtgagtgagtgtgtgtgtgtgtgtgtgtgtgtgtgtgtatgtgtgtgtgtgtgtgtgtgtgtgtgtgtgtgtgtggcctctctcgggcttgtgatgttctatctggccatgatgttctgatattgacccttttcaggttcccccgcctgtcaggattgagttggtccttgttttcctctcaagtgtcctgcttgttactgtccccctcatgaactggccgtattgccgaagctctgggaccacacagctccttcagggctcccaacctcccatggacaaggccaggagcctcaccatcaaccatggggagcatgtgccccccaaaccatcttcatccatgcattcttccttatccagtctgtaaaccttcaaagtttggggatcatcttgtccatctgtgtaaatgtaaatgttgacccggttggtatttattctaatttttattgtattttattttattttgtctgaagggtgggggtggaagtataccactgtttgcacccagggcagctgcagggacagagcccggacagcccaggagccaagagaagcagctccttaggggccactctagacggcagcctctggatagccacatctaggctgttatttggcatcagaagccagccagtgggtgtcccttgtcccagacactcaggcctgcccatggcgtcatgtccctcagctgtctggcactgtgttgggaaacctgactgtgtctttgaggaggtgggtgggagagcgtagaactctcccctgctcaggacacttgcaccagaagatctggcacctcacctgaaccagctgggggcctgacaacaggagctacctccctggagcagggtctggagcttcccgccaaagctatgggccaatcctgctcgcgccatcccttcctccacccgtatgtcctgcttcccagctgaacccaaactacaaataggtttaaaaaataaataaataa

SEQ ID NO: 6552 - DNA, 976 bp, Cricetulus griseus
cctggctgccccgcagcccagagcatggcctctccccggactcctgcgtcggctccggagttacccgagcggaacttccagtactgccaagtccagtactgggaccagcgctacaaagatgcggctggctctggaccctacgagtggttcggggacttcgcttccttccgtgccctcctagagccggagctgtgtccggaggaccgtatcctcgtgctaggttgcgggaacagtgccctgagctacgaactattccttggaggcttccctaatgtgaccagtgtggattactctccagtagtggtggcagctatgcaagttcgctatgctcatgtgcccagtctacgctgggagaccatggatgtgcgagcactggacttccctagtggttcctttgatgttgtactcgagaagggcacactggatgccctgctggctggggagcgggatccctggaatgtatcttctgaaggtatccacactgtggaccaggtgctgagtgaggtgagccgagtgctggttcctggaggccggttcatctcaatgacttctgcaggtccccactttaggatcagacactatgctcagtctcgttatggctggtcactgaggcatacaacctatggcaatggttttcatttccacttttacctcatgcataagggcagagagctcactgtggcccagctggccctgggggcccagatcctgtcaccccgcagtcctcctgcctcaccctgctttctccaagactccgataatgaggacttcctcagtgccattcgtctgtgagactgaaatcatggtctccaagccctctctgcctttgtgtattaggctcctagggagctggaattcccaatttggagctggggaattggttattgggttctcaaatcccagaggtctcatgcataaaacattgctggtgggataaagcccatgtacaaccaatacagtatgattccaaactaaa

SEQ ID NO: 6553 - DNA, 976 bp, Cricetulus griseus
gcttgaaggatggcctcagatctagaacagttatgctcttatgttaatgagaagattgacaatattaagaaaattctgtcgataagaaatcttggccaagcacctgccttgaagaccaccttaagtaaaatagaaaatgagatcattacagtaaatgaacttctaaatcattttgagttggaaattcagtatcaagaacaaaccaacaagtcacttaaggagctctgtgaatctcttgaagatgatttgaaagatgtggagcatctcaaagaacacattccatcctatttgccgcaagtgacagtgacccagagcttggttaacaaatccaatctggattctaaagagccagtcgaagctgaggaacctgtcctggcaaagaagcctcccagagaacagagaattataaaggaaatgcagtttataaccactgatgaattcaatggtgttcctgcgtacatgaaatcccgtttaacatattgtcaaattaatgatgttattaaagaaattaataaagcagtggttagtaaatacaagattatacatcaaccaaaagcatctatgagttctgtgaagagaaatctctaccaaagatttattaatgaagaaacaaaggacacgaaaggtcgttatttcattgtggaagctgacttaaaggactttacgaacttgaaggctgacaagagattatatgtgatcttgaacatcttacggcattgccagagactgtcagaggttcgagggggaggacttacccgttatgtcctaatctgagactttcgaaggctcggaactgactggcagtagggtttagaggacagtcttgaaatttcttatgtaatattattagctgctacacttcctggtcttgttttttacagaaataaaactttgtttgggtcaagcatatgtattttcaaaatgtactgcccttaggaatgtggatgaagctgggcacatctggcatcatcaactc

SEQ ID NO: 6554 - DNA, 976 bp, Cricetulus griseus
agtttccttctagatcgacttctgcagtacgagaacgtggatgaagattcttccgattcagatgccactgcatcttcagataacagtgagacagaggggacacccaagttgtctgacacaccagcccccaagaggaagagaagtcctccgatggggggtgccccatccccttccagcctctccttgcctccttcaacaggatttcccctgcagacctctggagccccctccccatacctgagctcgctggcttccccccttaccccccattcccttctgactacctggccctgcagctgcctgagcccagccccctgaggcccaagctggagaaacggccccgcctaccccggaaactcaagatggctgtaggaccccctgactgccctgtgggtgggccactggccttccctgccaggggttctggggccagtgttggggcagccctgagccccctgcctcctcccaagatgcccccccacacgatcctgagcaccgtccctcagcagatgttcagcgatgcaggcagcggggatgatgccctggatggagacgacgacctggtaatcgacatcccagagtagccatccatccagtgctacttgccaggccccgcacagtgcttctcccatgccagcacacttgagcccatttctcaagagatgtttattgatgctcagttgccatgcttcggccactgacacaatcagaaaaggcgtaaacatgcacaaatgtccccgaggaaggtggcaggggccctgccctcacatcccagccccatccaggggacagtgatttaaatgagtggccaagaggatcttccccatcttaggaggcagagaccccgtggaggccgtccctttagaagagcagctgagcagagctgggactttttcatgaaggctctgtattaaagggttggctctttctaaaaaaaaaaaaaaaaaaaaaaaaaaaaaaaaaaaaaaaaaaaaaa

SEQ ID NO: 6555 - DNA, 976 bp, Cricetulus griseus
cgccggccactacgagctgccgtgggttgaaaaatacagaccaataaagctggatgaaatagtcggcaatgaagacacagtgagcaggctagaggtctttgcaaaagaaggcaatgtgcctaatatcatcatcgctggtcccccaggaactggcaagactaccagcatcctctgcttagcaagagcgctgctgggcccggccctgaaggatgcagttctggagctcaatgcatcaaatgacagggggatcgatgtggtgaggaataaaatcaaaatgtttgctcagcagaaagtcacccttcccaagggccgacataagatcatcattctggatgaagcagacagcatgacagatggtgctcagcaggccctcaggagaaccatggaaatctactccaagacgacccgctttgctctggcttgtaatgcttcagacaaaatcatagagcccatccagtcacgctgtgcagtgctccgctacaccaagctcaccgatgctcaagtcctcaccaggctcatgaatgtcatcgagaaggaaaaagtaccatacacagatgatggcctggaagccattatcttcacagcccaaggggacatgcgccaggcactgaacaacttgcagtctaccttctcaggatttggctatatcaacagtgagaatgtgttcaaggtctgtgatgagccccacccactgcttgtgaaggagatgatccagcactgtgtggatgccaacatcgatgaggcctataagattcttgctcacctatggcacctgggctactcaccagaagatatcatcagcaacattttccgagtgtgtaaaaccttccctatggccgaatacttgaaactggagttcatcaaggagattggatacactcacatgaaagtggcagaaggtgtgaactccttgctgcagatggctgggctcctggccaggctgtgtcagaagaccatggctccagtggccagttga

SEQ ID NO: 6556 - DNA, 975 bp, Cricetulus griseus
gatggttcctatcatgaggacgtgggttatggagttagtgagggcctaaggtcaaaggccttgtcactggagaaggccaggaaggaggctgtgactgacgggctgaagcgggcactcaggagttttggaaatgcacttggaaactgcattctggacaaagactatctgaggtcactaaataagcttccacgacagctccctcttgaagtggatttaactaaagcaaagagagaagattttgaaccatctgtggaacaggcaagatataatagctgcctacagaatgaagcaccgggacccccaaaaccacaagaagcggcttccccttgcagaccaagccacccacatgattcgaacattaggctgcagggggctaaggactgcagcagctcctgcagtctggccgcccccatggagagtgatgccattcaccagcgcaagctccggaagctccggcagaaacagctgcagcagcagttccggcagcagatggaggcccacctacagggccacacacctgccgtaaaagtgaaagccgagcgtgaggcagtgcttccagaccttcctccaaaacacagtacccctgtaactgctgcctcagaactcctcagggagaaagccatttttccagataaccctgaagacaaccttgaaatgtgggacctgactccggatttagaggacatcattaagcccttgtctagaccagaaccacctcaaacctctgccaccagagtccaggtgatccaggatggtgtcctacacggcctttgccaccagatgccaccagaaaaacatgaagctggtcacctgcaggcccacagcactcaccagcatgtattaggaaactctgactctcataggaagagccaggacctgaagaaaaggaaactggatccatcctgaagctcaagacgttactggattctgtcacaaaaagtttagaaaactgaagtttggtcacaaaattgttcc

SEQ ID NO: 6557 - DNA, 975 bp, Cricetulus griseus
ggccggggctctagccgcccgcgccgcccgggccgctccggggacgggccggggcggggcgcggtcgcaggaagccaggcggggacgcgcggaggcgttggggagcgagggagggcgcggccaactcccggagggacggcaggccgaaagagcggcgccggggcctggcgcgcagcctgagatcgccggaccgcaggccgtcccaccacgggctctatcccggccccagccccgccagcatggccggccggaccgtgcgggccgagacccggagccgggccaaagatgacatcaagaaggtgatggcgaccatcgagaaggtccggagatgggagaagcgctgggtgactgtgggtgacacttcccttcgaatcttcaagtgggttcctgtggtggatcctcaggaggaggagaggcgtcgggcaggaggcgggacagagagatcccgtggccgggagagacgcggcaggggcaccagtcccagagggggtggccccctcatcctgttggacctcaatgatgagaacagcaaccagagtttccattcagaaggttcactgcagaagggcactgagcccagccctggggggactcctcagcccagccgtcctgggtccccgactggacccccagaagctattacagaggatactcagcccccacagttgggccaagagagagacccagggggtacacccgcaggcggtactgatgaccccccgaagttgaccaaggaggagcctgttccagaattgctggaagctgaggcccctgaagcttaccctgtctttgagccagtgccacctgtccctgaggcagcccagggtgacacagaggactcggagggcgccccccactcaagcgcatctgcccaaatgcccctgacccctgagaagctgcctgcctcctgtcctgttgctccaaggcccttggcttttataaataagacccttttaaaagaaaaaaaaaaaaaaa

SEQ ID NO: 6558 - DNA, 975 bp, Cricetulus griseus
ggaagactaaaaccatgacacagctgtgtgtagtgatgagcagcaatggtgagcagtgttacagtggtggtacagatgggctgattcagggctggaacaccaccaatcccaacatcgatccctatgattcttatgatccttctgttctgagaggccctctgctgggccacacagatgctgtgtgggggctggcctacagcgcggcacaccagcgcttgttgtcctgctcagcagatggcacttttacgttatggaatacaaccgaggttgctccggcactgagtgtgtttaatgataaccaaggaagacaggcacatcaagttctatgataacaatacaggcaaatccactcgatggtagcccacctagaagctgttacaagtttagcagttgatccaaatggcctgtacttgatgtctggcagtcatgactgttcgatacgcttatggaatttagaaagtaagacatgtattcaagagttcacagctcatcggaaaatttgaagaatccatccatgatgtagcattccacccttccaaatgctatatagccagtgctggcgccgacgcgctggctaaggtctttgtatgatgtgacgcatcaacttcaccttctagctctttataaaaagtcaactgcacaacagagatgcagaagaccagggcaagcatcaactcaccctgcccttttgttctgctgaaggagcacagagaacatttgttagagtgtagttttgcaattcgtgcactgttttctaaaagtgaaggtttattcaggtggctgcaagctcagctgactctgggagcctgaaaactttgaaatttccccccaaagaggcacttttgttctgaaattgttctcattcgctaggcaggcctgagcgaaacaggtttagcatctcccttccttctgagtaaacagggcatgctgtctgtgttggataattaaaagttggatggctgggaatgagtagag

SEQ ID NO: 6559 - DNA, 975 bp, Cricetulus griseus
agctgccggggtccatcgtgcttgaggtggatctggatgactaggcccagggatcccagttttcccccaacggggagactgggaagccattaggccctccctgcgcttaaggcctgttttgacgtagaaaagcttggagtctgctgaatgccttgtagtagattaggtctgttccacaattcaggattcatttattgcattagcaaatcccgatatagaagctattagatttctgtggaataaatatatgcacacttgagcaatttacatttggtgggtaacaactttacatactgctgtttgaacgttttcaaactgtttgcaggtttgatagctgctaattagtgccaataacttacaattaagcatgatcaatcactgtatcagagctttatatatacaaatctcatggatgcctccatttgattgctgtgagacaagtcctgttaatatttattgtattaaaaaagaaactgacattccagtattttgagacagatggcttacatcagtgaccttgcctttatgtacagtgaattaccagaagtcagaagtcttttgtgttgggggttgggtgagtgaagaaatgaagtgcctggtgggaattttgtgtcactgtcaattactaagtaaaatttcctgctttgtcagagctagggacaaactgtgatagtctatattaggttagtgactccctttctcccttgttttctgtctttgttcccacacctttccctagatattagaaaataagaacttgatttttcagtgtggatgatatttaaataagagtagtccaaataaccttcaggagaatttggctgctttcattgttactgaattaactgccaatggaatgtaaatgttactgtcacatccgtgtaacttatttcagtagacttttaacatgtgtaattatatgtttggatctgttttactgtgatattgatatacttgtgaacaatacagacaaaa

SEQ ID NO: 6560 - DNA, 975 bp, Cricetulus griseus
  modified_base (965)..(965): a, c, t, g, unknown or other
atcgacgagcagtcccgacgttttgggggcgctcagggtccatgaccctctagaagaaaggtcggttgctttggtgaatttcatgcgcatgaaaagccaaagtgaggggtctatccggcagtcagacatgctggagtttctccgagaatactcagatcagttccctgagatactcaggcgagcctcagcgcacctggatcgggtctttgggatgaatctgagagttcttgatcctcagactgacacttacaacctagtcagcaaaccaggtccccagtccactgaacggctagcagagactctggacatgcccaaagcaggtctcctggccttggtcctagggcacatcctcttgaatggcaaccgggcaagagaggcctccatttgggacctgctgctaaaggttgatgtgatggatgagcctcagaggatcaacacctcttggaacacaagagtctccttactactgtactttgtaagtcaggctgctggcttagagttctggtcagaggacgctattgaatagataaagcaaatgaattggtccagttggtccattaatgtcactgaggagttgctgcctatacatcaggatgagctattggctcatactggtaaagaattcgaggatgtgttcccaaatatcctcagccgagccactctgatccttgatctgttttatgggttctctctgattgaggttgataccagtgagcacatctacctcctggtccaagcaaccagaatcagaagaagagcaagtaatgttagagagcctgggcaggcccacccaagaatatgtgatgccgatcctgggcttgatcttcctgatgggcaaccgtgtcaaggaggccaacatctggaacttactccggagatttagtgtggatgtaggaagaaagcacgccatcacctgtaagcttatgagacaacgaaataaaaataaatgaataagataaaaaaanaaaaaaaaaa

SEQ ID NO: 6561 - DNA, 975 bp, Cricetulus griseus
  modified_base (85)..(85): a, c, t, g, unknown or other
ttttgttctactttttatttcttgtttattttctctctgatgatggcttaaagatgctgaggccaatacatcagcctttggaacnccttttggacttgaccttcttccagaacttcatccacccaacgcccccttggaaaacaaagttgacttccaaaagagtgatagaatcaacatggaaacaaatacaaaggatttaaaagctgctgttgagactgtgcagccacctaaagcctctgaagtgaacctagaagaactgcctcctctgaattatttcttacatgtattttattacagttggtatggaaacccacaatttgatggtaaatatatacactggaatcatccagtcctggagcactgggatcctagaatagccaagaactatccacaagggatacatactcctccagatgacattggctccagtttctaccctgagttaggaagttacagctctcgggacccttcctgtcatagaaactcacatgagacaaatagttgctcagcctcaattggagtactggccctttcttgctacccgcctgactcaaatgatgagaatggagaagctactgatcacttggtaccaactattttggataaagctcataaatataatctgaaggtcacttttcacgtagagccatatagcaatcgaaatgatcaaaacatgtatacaaatgtcaagtatattatagacaaatatggaagccatccagccttttataggtacaagacaaggactgggcattctctgcctatgttttatatctatgattcctatatcacaaagcctaatgtgtgggccaatctgttaacaccttcaggatctcagagtgttcgcaattctccatatgatggattgtttattgcacttctagtagaagaaaagcataaaaatgatattcttcaaagtggttttgatggaatttacacatattttgccacaaatggctttacatatggctcatc

SEQ ID NO: 6562 - DNA, 974 bp, Cricetulus griseus
aggtacaccctggctccgcgtacatctggacggcccagtgctcagctgccagcagcgccgcgctctgcaggggcgctcgtgctgtcgaaccgcgcacccttcaaggccccttcacctttcgctgagttagtcctgccaccgaccttcgctcagccctaaatccgaccccaccgcagccaggagcttcatgtccatggtgctacaggctctagggcccagagtttggcccaggctctcccagttcaaacctccagtcctcaggatcccaggaggcgaaactctgtatgtaaagtccagacactggtcagggcagagccagccccaaggtcccgggctaagaactaggctgctgatcactgccctgtttggagctgggctgggctgggcctggctggcagcaagagctgagaaggaacagaggcgtcaacagcaacgaacggaggccctgcgccaggctgctgtgggccagggtgacttcagcctactggaccacaaaggccagcctcgatgcaaagctgacttccaaggccagtgggtactgatgtactttggcttcactcactgccctgatatctgccctgatgagctggaaaagctggttcaagtggtacagaagctggagacagagcctgacctgcccctggtgcagcctgtcttcatcactgtggacccagaacgggatgacgtggcagccatggcccggtatgtgcaggacttccacccaagactgctgggtctgactggttctaaagaacaagtggcccaggctagtcgcaactaccgtgtatactacagtgctggtcccaaggatgaggaccaggactatattgtggaccactccattgccatctacttgctcaacccagatggactcttcacagactactatggtcggagtaggtcagcagaacagattgtagacagtgtacgtcagcacatagctgccttccgtagcatcctgccttgaagtatac

SEQ ID NO: 6563 - DNA, 974 bp, Cricetulus griseus
gagggtggccgcccgcagccgtcatggcagccgaggagaaggacccgctgagctacttcgcggcctacgggagcagcagctccgactcgtcgggcgaggagagcagcgagccggaagacgggggccgcggggaggcggcggcggcggcggcggctccgacgacgggccgcaagcaggtggagaagcggctgccgggccccgacgagctgttccgcagcgtgagccgcccggccttcctctacaacccgctcaacaagcagatcgactgggagcggcacgtggtgaaggcgcccgaggagcctccaaaggaattcaaagtctggaagtccaactacgtaccgcccccagagacctacgctgccgagaagaagccgccgccgccgcccgagctggacatggcaataaaatggtcgaacatctatgaggacaatggtgatgatgccccacagaatgctaagaaagcccggcttctgccggaaggggaggagacggtggagtcagatgatgacaaagatgagcgtgcttctaaaactcgaagagtggagccaggagaagcagccaagaagaagaagtagagagtcgtgactcctgagatggggcttgggcggagtgtttgctattgtgcgctattatgacagacatctccatgaaagtatttatgttaatgaactaacacgtatcgcctcaagactttccactatagaattcatttttatttaaaacctgtatgtatttacaactctaatggtggcctgtgattgtgaactgacagtacttggaagcattctggctatcacagaattggtgacaggctttgagagttttgtcacgtggacatgccagtgttctttgaaccttttataaaggaatatatttttaaagtaaatatattgtaatgtactgtgaacttgtgggtgcttttcattagtgtctgtacagtgtaaataaatgatcatggaaataaaactacttaa

SEQ ID NO: 6564 - DNA, 974 bp, Cricetulus griseus
cccccttgtctttgttgtaagagacaaagggggaaacaaaagtgtctccctgaggaaaggcttaactgtgaaggcagcagcttttataggcaaagcagcagaaatctgaggtttcccttcggttgttaatttggttgagataaacattcctttttaaggaaaagcaaagggcatcgcgctttagtacccattcagccaaaggttctgacttgaataaaggaaatgcaaggagttttgttatttgttttaaacagatttaattcataacacatgatctaacaggctcggactgatagtgaaagagaggagagcttgtgccagggttaagaagtcattaaaggaaggtaaacttcaaagtgattctggagttctttgaaatgtgctagaagacttaaatttattaatcttaaatcgtatactttatttcccctgtaatggaagtctggttctttggcgtaatgatgtaaagctaagcagagcatcgtgagagctaaccgttagtccacctttcacactgattgtcctcccgtcctgcagggctgctcagttcctcagagcagttgttaaatgccaatcagggggtactgtcgtgagtacaaattactttatacatatgtcacattcagttgaatggagctgctttttaaagtgatcttgtatttctgaaactttcaagaaatgatctcaacagtcagtatttttttaactgccactacacaggtttggcatcttttgtgttttatctcttaagtgcatgtgaaatttgtaaaatagagacagtgcagtatgtatattttgtaaatctcccatttttgtaagaaaatatatattgtatttatacatttttactttggtatttttgttttgttttgccttttaaagatctacaatgaagccccactttatcacatgtacagatcacaaataaattttttaaaaaataaaaaaaaaaaaaaaaaaaaaaaaaaaaaaaa

SEQ ID NO: 6565 - DNA, 973 bp, Cricetulus griseus
ggcggcggcggcggcgggagggggaagatggcggccgcccgtcctgctgagagtgtcggtgccgcggtgggaacgggtggcccggtatgcagtgtgcgccgccgggatcctgctctccatctacgcctaccacgtggagcgggagaaggagagggacccggagcaccgggccctctgcgacctggggccctgggtgaagtgctccgccgccctggcctccaggcatgacggccagtgcagttgcagctcttgtcctcatgacctcctccatcgtgtctgttttggggtctttgtacctggcctacattctgtactttgtgctgaaggagttttgcatcatctgcgtcaccacatatgtgctgaacttcattctcctcatcatcaattacaaacgactagtttacttgaatgaggcctggaagcgacagctgcagcctaaggaagactgacggctggcggattcccacccaactgtctcaaacacttctttcattaagtttattttgtctaagttttttttttttttttttttttaaaattcacaacagacacttttccctgagaatcttaaactgatttttaaaaatactgtaaattagaaggggccctagctattttctgtgtcaatcttcattttaaatccggatacaaaaaaggatacgccgagccaatcaaagacaagctttaactttaccttgaagatgtttctgaaataataaaatgtagccctagcccccggtcctcaaccgtaaagtgagcagccattgctagtaattctttaatgtgcataaattcaatttcaggtataacaaatgtgatcatgaacatgaaaatattttagaatagatactgtattaaatattgccatgtttacaatatgtaatatgtttttagccgatggatttaaacctgtagattcatttagagtccattcgtgtgatatttgtaaataaaggtagaaacattggatcca

SEQ ID NO: 6566 - DNA, 973 bp, Cricetulus griseus
gcggggcgcggaggttggggacgcggaggagcaagacacagtgctaccagcaccaccaaaaaagacatagaagaaaaacctgaactacaaactggggcaaaagagactgacagggtgcccagtggccccgaacctcgacaacatcctagtgccttatttgccagaggaagtaagaaagcaaccagaagcccccaaagatcaacaagcaaaataaaagagaacaagcacccatttgctctgtatggctggggagagaaacagatggatacggggagtcagaagacacacaatgtctgtgcatctgcctctgtgcacgagattcatgaatcagcacttcgagccaagaacagaagacaggtggagaaaaggaaactggctgcccagaggcagcgggctcactcggtggatgtggaaaagaaccggagggtaaagccatcttccgcagagaacccgtggctgacagagtacatgcggtgctactcagcaagggcatagatgctgggacatgctctttcaagtgtttatggaagaaaagaatgaccaaaactagcaaatgggaccacacacaggtggaagaaacagactggtcctgcaaggctcttcttaggaatttccaagagatggttttgctttcatgatggttgatcacctaccttcatagttagggcagatcatcaaagccatagtgttggcttgtttatgaagacaagtccccgagtcttgatattcttgtaagagttttattttaaagattttaatctttggagatacccacaccaaatgcctttaaccggctctaggcgcttcccatgcacaccctcctcgtagtacagtcggagctgtcccttttgaccacctagcacattccacatctggcagggcatcccatcccacagtgcgggactcacatatttaattaaagtttaagttagtaaaaaaaaaaaaaaaaaaaaaaaaaaaaaaaaaaaaaaaa

SEQ ID NO: 6567 - DNA, 973 bp, Cricetulus griseus
  modified_base (114)..(114): a, c, t, g, unknown or other
aaggatacggtagccacaggactcacaggggctgcaaacatggccaaggggacagtgcagacaggcctggacaccaccaagaggcctggacaccaccaagtctgtggtcgtggngaccaaggacacgatgaccacaggactcacggggccatgaatgtggccaaaggaacagtgcagacaggcctggacaccagcaagagtgtgctgacaggcaccaaggacactgtttgtgctggagtcacgcagttcccaggtctgaggaggagtgtggtcagctggctgctacaagctttgctgcacttcatgatgagttggaagggctaggggacatcttccagcccatgacagccgaggaacaagcccagctggcagcctcggagacagggccccgggtgctctctgctgaccggagaagctactttgtccgcctaggtgacctggcacccagcttccgccagcgggcttttgaacatgccctgagccatatacagcacaatcaattccaagctagggcttcgctggcccagcttcaggaggccttccaggtgacagacatggctgtggaggctccaggtgggcacctgcgttgggaccagggcttgagctccacagtggaggctgctggtacccaaaaggtgcgtgtttccatggctcaggacagactgtgcacgctagcctgccagctccatgcagcttatagcagcctgacagcctgcctgcagggcctgccagagttgcagcagcaggcagggctggcacggcacagcctctgcaagctgtatggcctcgtgtcctctgcaagtggtgtcgacctgcaggcagagcagctggcccagagcagtgccggtgtggtccaggcatggcagggtctggaggtgctgctggacaggctgcagcagagccccccacttgcctggctggtgggacccttcactgtgatgcctagtggccagctgtaggcatctgagggctg

SEQ ID NO: 6568 - DNA, 973 bp, Cricetulus griseus
gctgatggaagaccccctgcggccttttgtgcctgcttattatggcatggtgcatcgggatgggcaggccttcaaccagatggaagatctcctggcagactttgagggcccctctatcatggactgcaagatgggcaagcaggaacctaaacctggaggaggagctggtgaatgacaaaggtgttggaagactttgtcgatggggaccttggactcctgagaaagtacgtggcgcgactggaggacctccgtgaggctttggagaactctcccttcttccaagacccatgaggtagtgggcagttcccttctcttcgtacatgaccacaccggcctggccaaggtctggatgattgacttcggcaagacagtggccctgcctgaccaccaaatgctcagtcacaggctgccttgggctgagggcaaccgtgaggatggctacctctggggtctggacaatttgatccgcctccttcaggggctggctcagggctgatctcatcggctgctgctaggctcacttgcaagatagcacgtgtctggccagaggagccctaagatgctgtcagctgccgcagggccagaccacggccacatccactggtgccagcactgtgaccatcttccttccttggtgtgtgccagtgacagtctcaggacttcctccttgtgccacggaccccggcgctctcctgtctcaggagagtccagtgacaggaagccatttctgaggcaggggaggaggtttctccttgggaactagagctgccttgcctcaccgaataagtgcccctacctactacacacagaaggaactgccaggttgcccagaagcacaagtgggcggggcttctggccctaaccatggactacctggttctaaccaaagactccaggactctgggatgggaataaaaaggactaaattcaacaaaaaaaaaaaaaaaaaaaaaaaaaaaaaaaaaaaaaaaaa

SEQ ID NO: 6569 - DNA, 973 bp, Cricetulus griseus
gagctctgctttcgctttcccttcccgctgcccactccaggctcctcgtgcggcgctcagccacccccccccccgctccgaccatggccaccctgagggtccatcctgaagcccaagccaaggtggatgtgtttcgggaagacctgtgtagcaagacagagaacctgcttgggagctattttcccaagaagatctcagagctggatgcattcctaaaggagccagctctcaatgaagccaacctgagcaatctgaaggctccactggacatcccaatacctgatccagtcaaggagaaagagaaggaggagcggaagaaacaacaggagaaagaagagaaggatgagaagaaaaaaggggaagatgaagacaaaggtcctccctgtggcccagtgaactgcaatgaaaaaatcgtggccctcctgcagcgcctaaagcctgagatcaaggatgtcattgagcaactcaatctggtcactacttggttgcaactacagatacctcggatagaggatggaaataattttggagtggctgtccaggagaaggtgtttgagctgatgaccagccttcataccaagctggagggcttccacactcaaatctctaagtacttctcagagaggggtgatgcggtgaccaaagcagccaagcagccccacgtgggtgattatcggcagctggtgcacgagctggatgaggcagagtaccaggacatccggctgatggtcatggagatccgtaatgcttacgctgtgttatatgacatcatcctaaagaatttcgagaagctcaagaaaccccgtggagaaactaagggaatgatttattgagcctcctctcttattctgtgatgggtacagcagagaccttcctgctctttaccaggaactatatagactgtacccaatcttcttcctgcgctggggtttttcccttgctctgcctcccaaacacaataaatatatggttg

SEQ ID NO: 6570 - DNA, 973 bp, Cricetulus griseus
gtgctaaaaggtgatgtctccctgaaggatatcattgatcctaccttcagagcatcgtggatagctcaaaaagttaatttggctaaaatgcaatacatggatggaattaatatagacatagaacaagaagttgattgcttatcacctgaatacgaagcattgacagctttggttgaagagaccacacagcgtttccaccatgagattcagggatcacaggtaacctttgatgtagcttggtcaccaaagaacatagacaaaaggtgctataattatactggaattgcgggtgcctgtgattttctcttcgtgatgtcttacgatgagcaaagtcagatctggtcagaatgtattgcagcagccaatgctccctataatcagacattaactggatatagtgactacatcaagatgggcattagccctaagaaactcatcatgggtgttccctggtatggttatgattacacctgcctgaatctatcacaggatcctgttggccattttcatcaagtgtggtatgataacccccagagcatttcactaaaggcagcgtatgtcaaaaactatggcttgcggggcattggcatgtggaatgcaaacagtcttgactactcagaagatgctctagccagacagcaaacaaaagaaatgtggggagctttaaaaccaagattgtgatggagagaggagcatctcttgtcagactattagattttgtaagaatgagctgtttaagtggttctagcttcttgcagagataaaaatgtgtatattctgtcatgttgccatacttatctattgttatacttcaacacaacaggtaagagataaagagattcttcatttgaacatgaaagatacatatatatcttaaatagtgaggaatataaaagcaagaaacaaggcaacattctattaaatatttttctatgtttaatatatttaattaggaaattgctttcaaaatttc

SEQ ID NO: 6571 - DNA, 973 bp, Cricetulus griseus
ccgacgcggcggctgggctggtgcctctagtggtgcgggcgctggaactcttggaaaaggcggccgtggggcctgctccggactcgctgcaggtgtccgcgcagcaggcggaactggagctgcggcggctgcgcgaggagaaccagcgcctccgcagggagctaggctcagggccgcaggaggagcgcgcactgctgcgacagctcaaggaagtgacggacagacagcgggacgaacttcgggcacacagccgagatctaatgcgccgaagtcaagaatcagaagctctgcaggagcagctgcagcgcctcctgctggtcaactcggagttgcggcacaagctggccgcagtgcagacccaactcagagcggcgcaggacagagagagggagcgccaaatagctcaggatggctgccgccagctggctgaagaacagaggctgaagcccgaagcagcaaccccagatgaccgggtggatgctctgcagcagccagggcgccctccagaggacgttcagtgtggcttcagccgggaggagcttaagcagatccttcaggagaggaatgaactcaaagccaacgtattcttgctcaaggaggaattggcctacttccagcgagagctgctcacagatcaccgggtccctgggcttctacttgaagccatgaaggtagcagtcaagaaacagcggaagaagatcaaggccaagatgttagggacagcagaggaagcagagagcagtgatgatgaggacgactcgtggctcctgctctccaatgacaaggaagaggctccactagttcctggatccagaatacagaatttctttagcttatggtatcggggtgaaactgaggcccctgaagctgagaccagcagtatagctcccagcagtctacaggaaggagaagcaaccccacacgccaaccccacctggaacctgtggacagccttccaaccaccaactcctga

SEQ ID NO: 6572 - DNA, 973 bp, Cricetulus griseus
ggctaagaagccaactatcaaaaaacccctcaatgccttcatgctttacatgaaggagatgagagccaaagtcattgcagagtgtacactcaaagaaagcgctgccatcaaccagatcctgggtcgcaggtggcatgcactgtctcgagaagagcaggccaagtactatgaactggcccgtaaggaacggcagctgcacatgcagctatacccaggctggtcagcgcgggataactacggaaagaagaagaggcggtcaagggaaaagcatcaagaatccaccacagggcacaggacacctggcttgctccaggggcccaaccctaactcaagaggaggcaacaagaccagatcacatggaaccagctaagggtccttaaggtgctgaagattgcaaaggctgacttcactattcccctgaaccagaggccatccattgaagtggtggggatcagatctgtgcagctatatgtctcactaagggcatcctggtgcctgtggcagccacttattatgtcttgatagctggatgcccctatgtcttttggttttgttttgttgttgttgttgcaggtcagatgggctggattgagttccagctgccttctctgcaagtgcttctcttgccctctgccacgccttcccatcgccaataccttcttggaccaagaatacctcttcccagttccattttatgtcagctgagtcatagctcctgggcagctgtgagagggcaaattccccaaccgctggagcccatttttcagcatttagaactggccagcttcaatttctctatagggctgcaggaaggaacatatctgttacaactaaagcaaggagtccataaatctcttgtggacatggttctttgccacattctagaaaccctttttgagccaaacttaaccctgagccttgaaaaacaagttttttgttttttaactttttttttttccttctcgcatgtaga

SEQ ID NO: 6573 - DNA, 973 bp, Cricetulus griseus
gggtattgctgccagctcgtcggtggtgtcctagtggaacaatgtcccagcaggtctgaaatgggaaggcgattgctggtggtatcagcccagctcagccactgcaggactgtcttgcgactctttgatgatccggccatgtttgtctacactaagcagtatggcctggggacagaggaggaggacatcttcatccgattgttgtctgtcctgagtaacatggctgatcagctgtactatccatgtgagcatgtcgcttgggctgctgatgccaaggtcctccaggtggacgctgctcggtggtggacactgagcactgccctctggattctctctctactccttggagttgtcaggtccctgtggacggcactgaagctaagacagatgctgcggagccccacaggcgccttcaccagccagctgcccagaagcaagcggagggctatggaggcaaggatgtggtcagaggtcttaactctactcagcaacctggctgacctggcaaacgctgtgcactggctgccccgaggtgtcctgtgggctggccacttccctccttggctggtgggcctcatgggtaccatctcctccctcctcagcatgtatcaggctgccagggctggcggcacggctgaggcagacagctcttgatgaggccctggagtggcaggtagaagatactgtgggttatcaacaaaaggctcagattcccagagtgggagccactggccaaagatacatccataactgtgcactccagtagctgtcccctgggtggggtgggaaaagggctgataggagatctcaggtcccagctagggtttcaggggaagctgcccccttgggaagtaaggggcatatgaggaggaccccagggactcccagagccaaggccaggcttgccaagtcccaggaggactctgctagaacctcccatttgatggcatgcctgaaggtgagtgggagagac

SEQ ID NO: 6574 - DNA, 973 bp, Cricetulus griseus
aaggcaagcagtgcagtctctccttgcccagtcccagatagcgaactgggagctacacaggcccttgtggggaagcaccatcaacatctgccagcttgccaacaacccaggattatatgtgccctcttcaggaagccatgccatatgcacctgctgcttccagcctatgcctgaccggagagctgagcgtgagcaggattcccgtgttgcccctcagcagtgtgcagtgtgcctgcagcccttctgccatttgtattggggctgcacccggactggctgctttggctgcttggccccattctgtgagctcaacctgggggacaagtgcttggatggagtgctgaacaataacaactatgagtcagacatcctgaagaattacctggctgccaggggtctgacatggaaaaatatgttggcagagagtctcctggctctacagcggggcatatttctactatctgattacagaatcactggaaacactgtattgtgttactgctgtggtctgcgtagcttccgagagctgacctaccagtatcggcagaacattcctgcttctgagttgccagtgactgtaacatcccgtcctgattgctactggggccgtaactgtcgcactcaggtgaaggctcaccatgcaatgaaattcaatcacatctgtgaacagacaaggttcaagaactgagcagttggaggatacaacaataaaaacagttaacagagcaacaggaggcaatgcccagtaacctgggaggcctactggccacactggccaggaggatcagcgcaggaggatcaacagcgtaagatctctctcctactggacagcttttcccttgtgcttggtgaggcagtgacagtgcaggtttatacttttgtatcttttgtaccttgtaccttgactacagttaaaatggaaacgtctcatggggaaaaggtcaggtatgtcagaagcattctatgtaaggaa

SEQ ID NO: 6575 - DNA, 972 bp, Cricetulus griseus
tctctaggtggcttcccccggctggggctccagagggcgatggggcccgccgtcgcgtgaccagccgcagtcacgctgagcttaatcactacgagctcgtgctcccgccggcggcgctcaccctgtccgagcagcgcgacccggagggtttctcttgaggtggcttgttctgaaatgccaaaggcacccgactattcagaaccgagtgactcttgcacgcttgctgggggaacaggaagattttcgggaccattgcacagagcatggagaatgatgaacttccgccagcggatgggatggattggagtgggattgtatttgctagcaagcgcagcagcattctactatgtttttgaaatcaatgagacttacaacaggctggctttggaacacattcagcagcaccctgaagagcctcgggaaggaaccacatggacacactccttgaaagctcggttactttccctgcccttttggttgtggacagttatttttctgataccatacttacagatgtttttgttcctttattcttgtacaagagctgatcccaaaacagtgggctactgtattatccccatatgcttggcagttctctgcaatcgccaccaggcatttgtgaaggcttccaatcagatcagcagactacaactgattgacacataaagccggtcaccgttttgtccctatgattacaagactgccattacattatggaggttgatcacaagactacagtttcttcacaaatctcaggaagttgtggtggaacagagacttaaaaaatgtgacaagaggactactttatctgaataataatgacttttaggtaaagcctgagaaacagtaccacagaatcatgttaataacttcagattttggaagtaaaactagtgggttgttatttgcaatcttagaaacttgaaaaagtacctgaattttattctagtctatgtgcaacatagtatgatt

SEQ ID NO: 6576 - DNA, 972 bp, Cricetulus griseus
  modified_base (954)..(954): a, c, t, g, unknown or other
gagcggcgtcgtcctggttgctgtggagccggctcgcgtggccgcacgccctgtctgcctactgtcatgggcagcgccgagagcgccgaggcccgaagggtgtctttcgagatggatgaggaggagcgggtccgggtgctgcagggcatccggctgtctgaaagtgtggtgaaccgcatgaaggattccagccagccttcagcaggcagaaggcgcctttaaagcccctccgacagactccaaagtgcccagggcagagagtggtggtggtcagcaaccctcagcagtgaaagaggatctcaagaggttccaacaggagcaggctgtagtccaggatgagctggccaaggtggcgaaaagggagaaagaggcagttgagaagcacttgaaggcatcactgcctaagaagcgggccagccccacccgtgagcagcagaagtcagcactgctggccagggaactggagaagagagaggccgagctcaaccgccgtgacaccttctacaaggagcagcaggggcgcatccaggagaagaatgccgagatatataaactgtctagccagcaattccacgaggcggcttcaaaagcagagagcacaataaagccccgcagggtggagcctgtatgttccggcctacaggcccagatcctccgctgctaccgtgaccatctgcatgaggtacttctgtgctcggacctagtcaaggaataccagcactgtgtgagcactgcccgaaagggctgaggagcagcatccttcctggagccttgaagaaaggacccatcataggaccacagaccatggcccctgtaccctgcagttcccagctgggcacccatatgcctctgagcatggggtcaccatgcttgagaaacagtatgtgctactgaccaaaaacaaataaagcagatgtctttgtttgcagtcattcaaaaaaaaaaaaaaaaaanaaaaaaaataaaaaaaaa

SEQ ID NO: 6577 - DNA, 972 bp, Cricetulus griseus
cgggctgcggcgccgtgggcccgggctgccgctgtcatggacgcctgggtccgcttcagcgcgcagagccaagcccgggagcggctgtgtagggctgcccagtatgcctgttcccttcttggacatgctttgcagagacatggggccagtcccgaattgcagaaacagattcgacaactggagggtcatctgagccttggaagaaagctgctacgcctgggtaactcggcagatgctcttgagtcagccaaaagagctgtgcacctatcggatgttgtcctgagattctgcatcactgttagtcatctcaatcgagccttatactttgcctgtgacaatgttctgtgggctggaaagtccggactagctccccgtgtggaccaggaaaagtgggcacagcgttcattcaggtactatctgttttccctcatcatgaatctgagccgtgatgcttacgagatccgcctactgatggaacaagagacctcagcttatggcaggagaatgaaggtttctggagtcccaggaggggtggagactgggggacctggaggaccagggactccaggggcaagcctgccacaactggctctgaagtttcgactccgagtcctgctcctggctcgtgtccttcgaggtcacccccctcttctactggatgtgctcagaaatgcctgtgacctcttcatcccactggacaaactaggcctctggcgttgtggccctggcattgtgggcctctgtggcctcatctcctccattctgtctattctcaccctaatctgtccctggctacgactcaagccctgatattccaatacaagataaggagggagtcttgaattgtgagacagaatcttagattgtcccccatgtgccagcctcattctaattcgactccctgattgaagtcacaatccagacacttaggatgaagggaagaaccttgccaaagatgaggtcaggaaggca

SEQ ID NO: 6578 - DNA, 972 bp, Cricetulus griseus
  modified_base (961)..(961): a, c, t, g, unknown or other
tcaagatggcgctgtactccgtgcggaaggcgcgtgagtgctggagcctcatccgggcacttcacaaaggacccgcagctgctcctgctccccagaaggacagtgtggaacgagtattttctggcatccagcctacaggaatcccccacctgggaaattaccttggagccattgagagctgggtgaagttgcaggaggagtatgacacagtgttatacagcatcgttgatctccactccatcaccgtcccccaggaccctagcgtcctccagcagagcacactggacatgactgctgttcttcttgcctgtggcataaacccagagaaaagtatccttttccagcagtctcaggtgtctgaacacactcagttaagctggatcctcacctgcatggtcagactgcctcgactgcagcatttacaccagtggaaggctaaggccgcgaggcagaagcgtcaaaatcagaccctgacaaactggccactgtaggaataacagacagcccagaggagatcgtacagaaattccgaaaagctgtgacagactttacatccgaggtcacctatgagccagagagcagagctggcgtctccaacatggtggcaatccatgcagccgtgtcaggcctctcggtggaggaggtggtgcgcagtagcgcaggcatggacactgcgcgctacaagctgctggtggcggatgctgtgattgaaaaatttgctccaatcaggagtgaaattgagaaactgaaaatggataaggaccatttaaagaaggttttacttgttgggtctgcaaaagccaaagaattagcctatcctgtgttcgaggaggtgaagaaattggtagggattctataggaaatcagccagtcactacactccgtcaaggcaacttccctctggcagattttagtctgtacatattcagggccagcaagatggctcagcacacacaaaaanaaaaaaaagtt

SEQ ID NO: 6579 - DNA, 972 bp, Cricetulus griseus
ctagcagatgtggctgacgcagatagcgaagcagatgaaaatgagcaggtgtctgcagtctagcttttggatgcccattggagcccattggaagtcaggagcatggacaagagctcgtggctctacagaccaaggccaacagctcaactgctgccaccaaccctggggtttcctcgctaagctgaggatgagttcttctgagtcgtgcttcctttcttctgtcctgcaggtgcagtttccttaactggatgttgcacctgatcccagcctacactttgcacatcactcctgcctcggactacatttaagctcagagttcgcccccctatatcactataggtctctctcttgtaaatcactttaaagatagtggtattattatttccaagccatagcttgggctaaaggacacattcaaaatgtctgccaataccaaggatagtcttgtgtatttgaaaagtaacttattatttaaagtattgtggttttgtttgtattcaagagctcttgttagctattgtttgtctgaggctataaaactgtctgtggtctgagcagcagacgtcatcctgacataggtacagagatgtggcactattgtagtagacactcaggtgggaaacacacctgtataggtgtagtgtgagcagcctgctcatcatggatgttttaaaattgaaatgtgagtttatcaaaaagcaaaattgcacagttgctataatcaagtgacaattatctgcacaattcaatgattgtaaggcatcctgtaacaagcaatgttgtctcctagtttttgatgcctcttaaacttatgtcttttagaaagacagtgcctctgtatgcttttgttatttttactaagtgtaaatacttgttattatttttggttaagagaatgtaagggtatcatttattaccacatctcctaacacattggaaccaaataaaagaacctccaattaaaaaaaaaaa

SEQ ID NO: 6580 - DNA, 972 bp, Cricetulus griseus
cggccgcgggaagcggagcctggggacgggtgtcggagacagggcccccgagggaaggtcgtcacgatgaacaccgtcctgtcgcgcgcgaactccctgttcgccttctcgctgagcgtgatggcggcgctcaccttcggctgcttcatcaccaccgccttcaaagaccggagcgtccccgtgcggctgcacgtctcgcggatcatgctaaaaaatgtagaagacttcactggccctagagaaagaagtgacctgggattcatcacatttgatataactgctgatctagagaacatatttgattggaatgttaaaacagttatttctttatttgtcagcagagtattcaacaaaaataatgctctgaaccaagtcgtcctttgggacaagattgtgttgagaggtgataatccgaagctgcttttgaaagatatgaagacaaagtattttttcttcgatgatggaaatggcctcaagggaaacagaaatgtcaccttgacgctatcttggaatgttgtaccaaatgctggaattctacctctggtgacaggatcaggacatgtatctgtcccatttccagataaatatgaaataacgaagagttactaaattattctgaatttgaaacacatttttatacgtcatgaattgcatctcatctctcccctgtggatctttgaagtctggtttacaaaagagcagagtggtaaaattttattccatttgtttagaaattcccataatccttgtcttccttaggtgaatagaagctttctccaaagaccaagaatctctttgtatgctgtaaaatcttgcaggctcattttaaagtctcaactcaaccaaatgtgtgtcttttagtgtttgcagaatgctcctttgaatatctgtataaattttaagctttgccatggaaagttgaaaatgtttgtttgcatggattgccttcttgaactggatttgtcccactga

SEQ ID NO: 6581 - DNA, 971 bp, Cricetulus griseus
gcgccggaggagagagaattgcaggttgctgcgtggttgaaaaaaatatttggaaaccatcccattccaaaatacgaggcgaacccacggacgacagaaattttatatcacctttcagaacgcaacagagtccgggacagggacatcaacctggtaatagaggacttaaaacagaaagcaaacgagtatgaatcagaagccaaacatcttcaagattttcttatggagagtgtgaatttttcccctgccaatctgtctaacactggttccaggtttctgagtgcattggttgacagtgcaatcaccctggaaacaaaggacacttcactagcaagttttatccctgcagtgaatgatttgacttccgacctttttcgtaccaaatccaagagtgaagaaatcaagctcgaattggaaaaacttgaaaaaaatctgactgcaacattagtgttagaaaaatgtctacgagaagatctcaagaaggcagagctgcatctgtctgcggaaagggccaaagttgacagtcgtcttcagaacatggacttcctgaaagcaaaggcagaggagttcaggtttggaatcaaagctgcagaggagcagctttctgctagaggcatggatgcgtctctatcccaccggtcactagtggcactttcagagaaactcacagaaataaaacagcagactatacccctgaagaaaaaactggagtcctatttagatttaatgccgaatccatctcttgctcaagtgaaaattgaagaggcaaagagagaattagatgccattgaagctgaacttacaaggaaagtagacatgatggaactgtgactagagcccagtagacattcttctcccaagaagtcaatgactgttcttagaggagataataatatccttcttgataaaataacagtttttggtcatgcatttaaattttttggtcctaagtacagttttcatatgaaaag

SEQ ID NO: 6582 - DNA, 971 bp, Cricetulus griseus
aggcctcttggtggtagagaaattatttcttctgaggatgagaaaatgcttttggaaagtgttaattggacaggagacacagacaatcagaattttcagaaatccttaaaacatagaagagttaaacattttggttatgaattccactatgagaacaacactgtggataaggataagcctttacctgggggtcttcctgacatttgcaacagcattttggagaaatggttgaaagaaggttacattaaacataaacctgatcagttgaccataaatcagtatgaacctggacatggaattcctgcccatattgacacacattctgcctttgaggatgagatcatttctctcagtttggggtcagagattgttatggattttaagcacccagagggtgtcacagtacaagttatgttacctcgtcggagtttgctggtgatgacaggagaatctagatatctttggactcatggaattacacccagaaaatttgatactgtccaagcatctgagcagttcaaaggtggaataatcaccagtgacatcggagacttgactttaagcaagcgtggaattcgaacatcatttacgttaggaaagtgaggcatgtgccctgcaattgtagttacacctcggtctgtgacagacagaggaaggccactcctccctgccttccagagagcagtaaagagcatggcagctggagcgagaacatgtccagtcgtgtgtatgatttgattgcaagaagctgttgagccatttggcttagcaggatgccctgacccaagtcctgtgtttcatcgttactaccatgtattctgtgatggagaattggaggcttcctgccaggctctgggtgatgttagcattctgaagagctactatgatcaagggaattggtgtgttgttcttcaaaaggtctgatcatttatctgaacatatcaagtataaagaaaaaaaaaaaagttaat

SEQ ID NO: 6583 - DNA, 971 bp, Cricetulus griseus
atggaccgccgcgccgagttcgggcgctggaaggcgcagagcctgggcaaggcggacctcagccggaaaggcagcgtggacgaggacgccgtgcgggtggtgcagctcctgaacgcgcaggaagagttcttcaccaccacgctcctcgcgccggccgaatcctcctcctggacgcgagcacaagcgattctgggattcagaaacagcactgctgctggctcctggtgacacacaaaccttgtgtgaaagatgatgtgatggcagctctgaagggcgcaaccagcaatgctgtcctgaagtttgaaccatttatcctccatgtacaatgccagacactgcaggacgcacagaccctgcactcagcggccgttgcttctggcttcaggaactctggcatcaccgtggggaagcgaggaaagaccatgctggctgtccggagtacacatggattagaagtcccattaagccatcagggaaaactgatggtgacggaggaatatattgagttcctgttaactatagcaaaccagaaaatggaggaaaacaagaaaagaattgaaaggttctataactgcctacaacaagcaatggaaagaaaagccatttccagctcacattctgagaccaaagagaaaaatagcctactttgtactcataagaataaaaggaaccaaggaaaagcacatgacccatccattactgaagaccatgaaaaggagctggaaggtgctgatggcctgggaatcagtgctgcactcttctcagaggaagactaaggtttggccctgatcgtgtccgacacacattataaagctgctctttacaagagtactgtggtctgtgagtgtatccgcgctgcaggggccagacttaagttctctggtctagagaaaaagtgtaaatggcttttcaaagtagctttgtatatatttgctctctgctctctctctctctctctctctctctctctc

SEQ ID NO: 6584 - DNA, 971 bp, Cricetulus griseus
  modified_base (196)..(196): a, c, t, g, unknown or other
atgtaagcctgtcatcattaatgccctaaaggccatgtatgacctgaacatgaacggaccctccaattctgacttcaccaacccactcaccaggccccgtctgccctatgccattctatttgctattggtggctggagtggcggaagccccaccaatgccattgaggcatacgatgctcgggcagacagatgggtnaatgtcacttgtgaggaagagagtccacgagcctaccatggggcagcctacttgaaaggctatgtttatttcatctatgccatgggagggttttgatggctatgtgcgtctcaacactgcagaacgatatgagccagagaccaatcaatggacactcattgcccccatgcatgagcagcggagtgatgcaagcgccacaacactctatgggaaggtctacatatgtggtgggtttaatggaaacgaatgcctgtttacagcagaagtatacaacactgagagcaatcagtggacagtcattgcacccatgaggagcaggaggagtggaataggtgtaattgcttacggggaacatgtatacgcagtaggtggctttgatggagctaatcgactgaggagtgcagaagcctatagtccagtggctaacacttggcgcaccatccccactatgttcaatcctcgtagcaattttggtatcgaggtagtggacgacctcttgtttgtggtggtggctttaatggctttaccaccacctttaatgttgagtgctatgatgaaaagaccgatgagtggtatgacgctcatgacatgagcatataccgcagtgctctgagctgctgcgtggtaccagggctagccaatgttggggagtatgcagctagacgggacaacttcacaggattagcactgcgagatgaagtaaagtattccgcttcgacaagtaccctacctgtatgagcctcttctattagctaaataaaaagtactaagacaa

SEQ ID NO: 6585 - DNA, 971 bp, Cricetulus griseus
  modified_base (720)..(720): a, c, t, g, unknown or other
atcatgtctcgtatgttggttccctgtcatgtgaaaagacaccgtagccctgcaagtgggcgacatgaggacctcccaaggtcggcctggcgtgctggtcgtcgatgtcacctttcctaacgtcgcgcctttcgagttactggagatcacatttaagaattactacacagctttcttgagcatccgggttcgtcaccataccccactgcacacaccgtccaaatgggtcacttgtcttcgggactactgtttgatgcctgacccacacagtgaagagggagcccaggagtatgtgtcactgttcaagcaccagatgctgtgtgacgtgagcagagtcctagagctgcgtctgatcctgcggcagccgtcaccgctatggctgtccttcacagtggaggagttgcaaatctaccagcagggaccaaagagcccctccctgattttccccaagtggctttcccacccagtgtccagtgagcagcctgctcctcgccttgagggtctcccagaccccagcagagtatcctactgaggtgcagcagatgtgggcagttgtttagtcatgattcctagtggggtcgattttctgtcttgtctgacatgcaaattcagtctcttcctctcaaaattcacaggttctacttagaatcatcgagttcctcctgcctgtcctgccagtatgcacacctgtgtctgctaccattttccccattgttgagntaaacctgttccaggtagctcaggaaggcctgctgtttttacattcatgacctgggaagcttgaggaagagatgacccctattcattcctctgcttctgctagtggcctttttccttatgtattctatccatgaaaaagatgatgtcctagagcccagcatggtagcacacacttttcacctcatcagtctgtgagttcaaggatagcctggtttacacagtgactcccaggccaatcagggttacacagt

SEQ ID NO: 6586 - DNA, 971 bp, Cricetulus griseus
taccacagatttcgtgtccctcacttcacatctgaactctgccactgatggctttgactctgacttttgcaaggcactccgagcctatgccggctgcacccagcgaacttcaaaagcctgccgtggcaacctggtgtaccattctgccgtgttaggtatcagtgacctcatgagccagaggaactgctccaaactgctactaacaagaatcactattatcttcaaagcacaccatgagtgtacagatcagaaagtataccaagctgtgacagatgacctgccagctgcctttgtggacggcaccaccagtgggggggatggtgatattaagagccttcacatcgtggagagggagagtggccgctacgtagagatgcatgcccgctacataggcaccaccgtgtttgtgcgacagctgggtcgctacctaaccctcgccattcgaatgcctgaagacttggccatgtcctatgaggaaagccaggacctgcagctgtgtgtgaatggctgccctttgagtgaatgcatcgatgatggacaaggccaggtgtctgctatcctggggcacagcctgccacacactgcctcggtgcaggcctggcctggctacacactggagactgccagcacccaatgccatgagaagatgccagtgaaaggacatctatttccagtcttgtgtctttgacctgctcaccaccggtgatgcctaactttaccgctgcattggttattagttgtttttttgtattgttacctaattttgttttttgtggttttgtgaaatgttttataatgtcccttcctagggacctcttagaaagcactttattttttatatattaaatatttatgtgtgtacctggctaatatgtacagtgcatattcacagacaccacagccatccatttgaaggtgacagtttgtagctaccctgggtgttcttcctgcacttcccattgctactgatt

SEQ ID NO: 6587 - DNA, 970 bp, Cricetulus griseus
gactcctgctatggctgaagtactgtcggttgggaaagaatcggtggccggctgccgggcgcgggtagcgcacaacgtgctgaatcaggtggttctccctggggaggagctggtgctgccggagcacgaggacgtagacggccttggcggcgccggggagcagcctttacgtctgaattcgggggcgcgcccgcggctgcgcgtcgtgtgtggcccgggtttacgacgctgcggggaccgcctgctggtcaccaagtgtggccgcctgcgccacaaggagcccggaggaggcggcggtggcgtttactgggtggattctcaacagaagcggtacgtacccgtgaaaggagaccacgtgattggcatagtgattgctaaatctggagatatattcaaagttgatgttggagggagtgagccagcttctttgtcttacctggcatttgaaggagcaactaaaagaaacagaccgaatgtgcaggttggagatctcatctatggccagtgtgtggttgctaataaagacatggaaccagaaatggtctgtattgacagctgtggacgggccaatggaatgggtgtgattggacaggatggtctgctcttcaaagtgactttgggcctaattagaaagctattagctccagattgtgaaatcgtgcaggaactgggaaaactctatccattggagattgtgtttggaatgaatggaagaatatgggtcaaggcaaaaaccattcagcagactttaattttggctaatgtcttagaagcttgtgaacacatgaccacagatacaaagaaaacaaaatactttgccagactggcagaaagttgacatgaacacctctttaatggctcattttagtcaagactaagtttcctggggaaatcttttttcagatgaacctcttcctatcacatattcagaagatgcatattgtcttactagaatccaataaaatatttt

SEQ ID NO: 6588 - DNA, 970 bp, Cricetulus griseus
gcagctgtgattagtcagttgcaggtgttgtaagggatctttggttgtgggcttttggctgcacagctgatgacatcatttatataaccctccctctataccatagctcaggggctctccttggaattggtggctgtatagagttgggtgccacatgtgtactaaagaagaaattctctgcgagccaattttggaatgattgcaagaagtacaatgtgactgtgtttcagtacattggagaactttgccgttatctgtgcaaacaacctcagagagaaggggaaaaagaccatcaggtgcgtttggcagttggaaatggcatgagcaatgatgtgtggagacagtttttagacagattcggaaatattaaaatgtgcgaattttatggtgctaccgaagggaacatatgtttcatgaaccacaccgggaagattggatcagtcgggagagcaaacttcggctatgctggttcttacaagcacacaaaaagcaagctgctttttgtatgtttttaagaagggagatgtttacttcaacacaggagacctaatggtccaagatcatgagaacttcctttatttttgggtaccgtattggagacacattcaggtggaaaggagaaaatgttgcaaccacagaggtcgctgatgtgatcgggaggttggacttcatacaggaagcaaatgtgtatggtgtgcctgtgcccggttatgaaggaaaagcagggatgacttctattattctaaaaccaaataagtctttagacttagaaaaaatgtatgaccaagttgtaacatctctaccagcttatgcctgtccacgatttttaagaattcaggataagatggaaacaacagggactttcaagctacagaagatgcaattggtggaagaaggatttcatccactgaagatttctgacccactttacttcatggataacttgaaaaaatcttatgttccattgacc

SEQ ID NO: 6589 - DNA, 970 bp, Cricetulus griseus
ggatggagttcagcgcctctgcgattggttgcaaaggtactaatgtgacgggagggaggggctctgagaatggggtctctaaggatgtctgggtgtatgacactgtccacgaggaatggtccaaggcagcccccatgctgattgcccgctttggccatggctcggctgagctggagaactgtctctacgtggtggggggacatacatctctagcaggtattttccctgcctccccttctgtctccctgaaacaagtagaaaaatatgaccctgtggctaataagtggactatggtggcccctatgagagatggcgtcagcaatgctgcagtagtgagcgccaagctgaagctctttgtgtttggtggaccagcatccaccgggacatggtgtccaaagtccagtgttttgaccctccgagaaccggtggacaatcaacagcctatcgcttcgactgtgagaccaaccagtggactcggattggggacatgaccgccaaacgcatgtcctgtcatgccctggcttcgggcaacaagctgtatgtggtgggaggctactttgggacccagaggtgtaagaccctggactgctatgaccccacttcagatacatggaactgcatcaccaccgtgccctactctctcatccccacggcctttgtcagcacctggaagcacctgcctgcatgagaggcaccttcggagcccagccagacttcatggttcttcctgccgggccagaagctgacagtaccagctccgggtagcagcagttcaggctgtcctgaactgtagcagaagagtgaaggtctccagagacaccgtgtgcttgggcatcctaagctgccagcggcttgtgtgcagagagggaacaacaggggtccctcggcaccagcaacacagcctttgactgcaaggctgcctgtgggaggtgggaatgttgctctgtagtgtcccggacatcagggagca

SEQ ID NO: 6590 - DNA, 970 bp, Cricetulus griseus
cccttccacagggcctcctgtgcagaacgccgccagcttacataccccaccgccacagctccccgcgaggctgcccacagccagtgtcccagccacagccctcccttccaccttacagttttcacagcagtcacagatggtggaagctccaacgcagctccaaatcccagtgaagactcaacagctgaatgcccccattcctccccccatgcccagccagcttgctgctcctcctcaacagcccgctcagcccagccctccacgttccgatgccagggaaggcgcagatgcagacctctcagctttcctcccagacccaggcccaaccagcccttaaaacccagtttctaaccacacccatctcccaagcccagaaactggctgggactcagcaggtgcagacgcaaatccaggttgcaaaacttcctcaagttgtgcagcagcaaacacctgtggccagcatccaacaggttgcatcagcttcgcagcaggcttctccacagacagtgacactcacacaggcaacagcagcaggacaacaggtgcagatgatcccaaccgtgactgcaacagcccaggtggtgcagcagaagctcatccagcagcaggtggtaaccacagcctctgcctcactgcagacccctggtggtccaagcccagcacagcttccagccagctctgacagtccaagccagcagccaaagttacagatgcgagtgcctgctgtgaggctgaagacacccaccaagcctccgtgccagtaggaaggaaactggttggtactatgacaaggctgttttagcagaatgttgtactgtttctggactctgtgttttttttttttttaattgtaagaaacaggactgaaattgtaaatactttgtaaacacaagcatttgtacttgaataggattttaaaaggacaccgatgtcctaccaagcaaaggctaataaaagtgacctttctaca

SEQ ID NO: 6591 - DNA, 970 bp, Cricetulus griseus
gctcccgctgtcccacacagtaactctgtccgtcgtacgcgtgaggcgaggcatttgcgggctcgggatgttctatgcggtgaggaggggccgcaggaccggcgtcttcctgagttggagtgagtgcaaagaacaggtggaccgatttcctgctgccaggtttaagaaatttgctacagaagatgaagcttgggcctttgtcaggaactctccaagcccagatggttcaaaagggcaggaaaccactcgtgtgcaggaatcacaggtgaagatcagcaagcggcctcgggagcctgtgggtgaagaggaagagctaccagagccagggtcaaagcacaccagacagaacacagagccggctcccccagtgagcaaggacaagttttcttatatgggagaatcagttgttgtctacacggatggctgctgctccagtaacgggcgcaggcgggcgagagcaggaattggcgtttactgggggccaggccatcccttaaatgtaggttttagacttcctgggcgacagacaaaccagagggcggagatccatgcagcctgcaaagccatcatgcaagccaaggctcagaacatcagcaagctggttctttacacagacagcatgttcaccatcaatgggataaccagctgggttcagggctggaagaagaatggctggagaacgagtacagggaaagacgtgatcaacaaggaggacttcatggagctggacgagctcactcggggtatggacatcaagtggatgcacattcctggtcactctggatttgtgggcaacgaagaggctgacaggctggcaagggaaggcgcgaagcagtctgcagactgagcaaagcagttgctgtacactcagacccaaggcagtggctgttcctttacccagatgtgcagtgaggccacagcacggaggactcgactgggacctgtgatacagcttgatgagaagtgctta

SEQ ID NO: 6592 - DNA, 970 bp, Cricetulus griseus
ggcggcggctttcgtggtgactgaacgaagcccggtgacaggatgttggtgttggtgttaggagatctgcacatcccacaccggtgcaacagcctgccggctaaattcaaaaaactgctggtgccaggaaaaatccagcacattctctgcactggaaacctttgcaccaaggagagttatgactatctcaagactctggctggtgacgtccacatcgtaagaggagacttcgatgagaatctgaattatccagaacagaaggttgtgactgtggggcagttcaagattggtctgatccatggacaccaagttattccatggggagacatggctagcttagccctgctgcagaggcagtttgatgtggacattcttatctcaggacacacacacaaatttgaagcatttgagcatgaaaataaattctacattaacccaggttccgccactggggcatataatgccttggaaacaaatattattccgtcatttgtgctgatggatatccaggcttctacagtggtcacttacgtctatcagcttattggagatgacgtcaaagtagaacgaattgagtacaaaaaatcttaagctaggcttgtcttgatcactttttttttcccatttccttgttcacatcaattaattaaacacttaaaggcacacagttgtatcacttttataatattttgcactaaaatgtcttctctgtttaatacatacttgctctgagcttcttgtaaactataatatacttagtttgcagtatatgttttctttgaaaggaagtccatcatacaggatagggccatgctagaaaaatttaaacttgtaaatatcttcctacttggtaattggacttcattacaaaactagtgcatgaagagaaagaatccagaatttctatgtatgttttctcttctctggtaataaatgtttaccttaccaaacttaaaaaaaaaaaaaaaaa

SEQ ID NO: 6593 - DNA, 970 bp, Cricetulus griseus
  modified_base (212)..(212): a, c, t, g, unknown or other
ggctacttcagtatcgagtgtgtgctgtatttatggagtttaaagattaactatcctaaaacattgtttctgcttcgaggaaatcatgaatgcaggcatcttacagagtacttcaccttcaaacaggaatgtcggattaagtattcggaaatggtgtatgaagcgtgtatgaacacattcgactgtcttcctcttgctgctctcttaaaccngcagtttctctgtgtacatggaggaatgtcacctgaaattaattgtttagatgacataaggaaattagataggtttaccgaacctcctgcttttgggccagtgtgtgacctgctttggtctgatcccttagaggagtatggcagtgagaagaaccaggagcactatagccacaacactgtccgaggctgctcctacttcttcagttaccccgctgtttgtgaatttttacagaacaacagtttattatcaataatcagagcccatgaagcccaggatgctgggtaccgaatgtacaggaagagccaagcaacgggctttccatcactcattacaattttctctgcccctaattacctcgatgtttataacaataaagctgcagtgttgaaatatgaaaacaatgtcatgaacatcaggcagtttaactgctctccacacccctactggcttccaaatttcatggatgttttcacgtggtctttgcctttcgttggagaaaaagtcacagagatgttggtcaatattctcaacatatgctctgatgatgagctcatctccgaggacgacacagaaggagtctcttcagttcgaaaagagatcatcaagaataaaatcagagccattgggaaaatggcacgggtcttttcggttcttcgggaggagagtgagagtgtgctaaccctcaagggcctcactcccacaggcacactccccttgggggtcctctctggaggaaagcagaccattgagagtgcca

SEQ ID NO: 6594 - DNA, 970 bp, Cricetulus griseus
gggatcgcgccgctgccgttaaggcgggaaccggcgttatctctgttccagcgcaagccactccaactaccgtgcgcgtggatctacaggctcgcgctggcggcctgagagctcgcgccgagccccggacactgcgcctgcgccgcggcggagactcgtctctaccgggtccgctcccctccgacacctcggcaacgctgacttctcacccctttgagccgcttgaccagagcactcttctgcccgctcttggctaggcctcgctgctccagtgcggccttcaggtcggtcacccgcagagcctgaagaggcttcccgtccagagtcacctcctccagctccgccatcttgcgtgaggtactcgggtccgtcccgacggcttcgggcatcttcggggatgccactcggaatcgtcttcctcatcaatgccaccatccttcccttctgtgttgccttcagtgccagacgatattgccagttcttcccctcctcccaatgtcttacatcacttctcaggagatgaagtgtattcttcactggtttgccagttggtcgggtccccagcgggaacgttttctacaagacctggtagctaaggcagtgcctggaaagctacagccactgctggatggtctggagcagctcagtgtgtctggggcaagccggccaccttgtatcttcgagtgtcagctacgtctttgggatcagtggtttcgaggttgggctgagcaggagcgcaatgaatttgtcagacagctggaggtcagtgagccagattttgtggcaaagttttaccaagcagtggccgccactgctggtaaagactgataggccttcagatcaagaagataactatgtgtgatcaagccaaagaccatgactctagtgaagattcagtgctagtgtgtcatttaagattgcctgaactgcaggggtagtggtgcatctttctccccagcaccaggaggca

SEQ ID NO: 6595 - DNA, 970 bp, Cricetulus griseus
ccccgacgagccgagagtctccaagatggccgcgtggggaaggaggcgtctgggtccgggcggcggtggctcccgagagagggttagcctgtcagccaccgactgctacatagtgcatgaaatctacagtggggagaatgcccaggaccagtttgaatatgagttggagcaggcgctggaagcccagtacaagtacattgtgatagagcccacccgaattggagatgagacagcacgttggatcaccgtgggcaattgcctgcacaagacggccgtgttggctggcactgcctgtctcttcaccccattggcattgcccctggattactcccactacatctccctgcccgctggtgtgctgagcctggcctgctgtaccctctatgggatctcctggcagtttgacccttgctgcaagtaccaggtggagtatgatgcctataaactgtcccgcctgcctctgcacacgctcacctcctccacaccagtggtgctggttcggaaggacgacctgcacagaaagagattgcacaacacaatagcactggctgccctggtgtactgtgtaaagaaggtttatgagctctacgctgtatgactgcaggagagtgggacgtgaagcagaaccacagggccacaggactcagatccctacagcaacaccttgggttttctccgtgaggcaacagcacctgggaaagtgtttggtttaatacttgttatttttaaacaaaataacagatcatgggtatgccaggggtttattcagctcattacactaagatgtctctttccataacccaggagtaggtcccaggttgaaatctgactgggcaatggaatatggatggagccaatgctacttactgaggggtatgaacttgctgtggggttgtcttaagtatattgtttaactataccattcagaagccaaccggaagctattgaccattaaaattatgagaatttc

SEQ ID NO: 6596 - DNA, 970 bp, Cricetulus griseus
  modified_base (505)..(505): a, c, t, g, unknown or other
gagcagcatcccaacatacaatgcagctatggactccaacagctttctgaagaaactccttccacaaattcccctacccaaccaaagctgagctctgctacttgactgtggtgaccaagtatccagaagaacaacttaagatctggttcacagcccagaggctgaagcagggaatcagctggtcgcctgaggagattgaagatgcccggaaaaagatgttcaatacagtcatccagtctgtgcctcagcccacaatcacagttctaaacaccccccttgcccttgacaactgcatctgttccctaagtcaactgtggcacccattaacactgtgtgttcaaatacaacatcagctgtgaaggtagtcaatgcagcccagtcactcctcacagcatgccccagcataacttcccaagccttccttgatgcaaacatctacaaaaataagaagtctcatgaacagttgtcagctctgaaagggagcttctgccggaaccagtttccngggcagagtgaagtagagcacctaaccaaagtgacaggcctcagtaccagagaggtgcggaagtggttcagaagaatggccagctcaagtggtacgaagactataagaggggcaacttcccaccaggtctgctcgtcattgcccctggcaaccgagagctgctgcaagattattacatgacacacaagtgtgtgagggagacttgcaaaccctctgtgacaagacccagatgagtgcccagcaggtcaagcaatggtttgctgagaaaatgggtgaagagacccgggctgtggcagatacaagcagtgaggacaagggccctggaactggagagcctgtggcagttcacagagtgctgggtgatgcctattcagagatgtctgagaacagtgaatcatgggagccaagtgctcctgaggccagctcagagccctttgacactctgacgtccccagtctggacgtc

SEQ ID NO: 6597 - DNA, 969 bp, Cricetulus griseus
ggttccggtcctccttccaaattccagcctcccctcccccaccagtgtctctccccagcccagggatggaggctggaagaccccaggaagaagaggatgatgagcagcagggtcccccgcaagatgatcagggctggccccctgtgaactccaccactcggccttggcgatctgcgcctccctcccctcctcctgcaggaacccgccacacagccctggggccccggtcgggctccctgctctccctgcagacagagctccttctggacctggtggctgaggcccagtcccgccgcctagaggaacagagggccaccttccacacccccaaggtccccaggagccaaaccccaaccccaccccggcttcttgaggaccaagaacagctctacagcaccattcttagtcaccagtgccagcggatggaagcccagcggtcagagccgcccctgccccccgggggacaggagctcctggagttgctgctgagagttcagggtggagggcgaatggaggagcaaagatcccggccccctacacacacctgctgagacctgagctcccaaccagccccttctctcagggactcaaagctgggccaccccgcaagccttcaaccctgcgtggcaggggtgccagagactgaagacccacccattttcccagggaactggacagggggcaagtaccctaaccttgaaaacgagcaaggtagggtggacacgactccccaagaccgttcaagagtctctatcctgagctgtcaagctactcaacggggtgtgaggactgaggcctgcccctcctgcctagcaagaaaaggggaagattaagacaaccgcccagcactggcaccccaagccccaaggccgaggagcccagaggccctgaagcgaacctcagccccacccacacaccctgctgctgaataaaccaaattctccctcctgaaaaaaaaaaaaaaaaaaa

SEQ ID NO: 6598 - DNA, 969 bp, Cricetulus griseus
  modified_base (849)..(849): a, c, t, g, unknown or other
cgatcgtggctcgctggccagagactgagtagtgttcccagaactgccggaggagtcggcctagagggcggacagacagacggcagggagggccagcatgcacctactgttgcaccccgcctggccgctgctcctgggcgccacactgaccttccgggcactccggcgcgcgctctgtcgcctgcctctgcctgctcacgtgcgcaccgaccccctgcgcacctggcgttggcacaacctactcgtctccttcacccactccattgtatcagggatctgggcactgctgtgcatatggcaaacccctgaaatgctggtggagattgaaacggcgtggtcactttctggctatttgcttgtttgcttctctgcaggatacttcatccacgacacggtggacatcgtgattagtaaacagaccagagcttcttgggaataccttgttcatcatgtcatggctatgggtgccttcttctctggtatcttttggaaaagctttgttggtggtggcgtcttaacgctactggtggaggtcagcaacatcttcctcaccctaaggatgatgatgaagataaacaacgcccaggatctcctcctctaccgggtcaacaagtatgtcaacttggtcatgtactttctcttccgcctggcccctcaggtctacctcactaagttcttcctgcagtacgctggccagaggactctgggaacatttttgttggtcatcctgctcatgctggacttgatgatcctcatctacttttctcgactcctccgctctgatttctgccctgaacgtgtgccccagacgccaacacaaagacaaattcttgactgagtgagaaaggntaaacccaggacatgcggcagggacagcaagcacagccaacagttttgtaacataaactagggctctgcctcaagcctgggtgttataataaataaccagttgctgaaaaaaaaaaaaaa

SEQ ID NO: 6599 - DNA, 969 bp, Cricetulus griseus
cctgctggtccgccggccgggatgacccagtcggtggtcgtacaggtcgggcagtgcggaaaccagatcggctgctgcttctgggacctggcgctgagggagcacgctgcggtcaaccagaaaggaatttatgacgatgcaataagcaacttcttcaggaatgtggataccagagtggtcagtgatggtgacagtatttccaaaggaagaatatcttctttaaaagcacgagctgttttgattgacatggaagaaggagtagtgaatgaaattctccaaggaccactaagagatgtgtttgatagcaagcagctcatcactgatatttctggctcaggaaactgtaacaaagcgccacaagaagccttttgatgcaatgaacaacattgtggccaatctgctcctcagcctgacaagctctgcgagatttgagggatccctgaatatggacttgaatgagatcagcatgaacttggtccttccctcaacttcactatcttgtgtcaagccttacaccttctgtatactctggcagatgttaaccattccccctcgaagattggaccagatgttttcgctctgcaattgtttcctggaatcaagaaggctggaagactagcctgtgttcagtaccgcctgtgggtcactcccattcattattagctttagcaaacaacacgtgtgtgaagcccaccttcatggaactgagagaaaggttcatgaggtctctacaagaagaaggctcatctccatcactatctgcaagttgacgggatggaggaaagtgcttttgcagaagctgtgtcctctctgtcagcgctcatacaggagtataatgaaacttgatgccaccaagagcatgcctgtgccagacgtgcctaggctaagtgtggccatgtgaaggaagaagctcaaactcacagagatccgcctgccctctgccctcccaagtgcgttaggggttaaagg

SEQ ID NO: 6600 - DNA, 968 bp, Cricetulus griseus
ggcggctcggagcgagcagggctctctttaccagtggattgtggagggtgcacggccagtctcttgtcttctgttcgacatggcatcttctgatattcaggtgaaggaactggagaagcgtgcttcaggccaggcttttgagctgattctcagccctcggtcaaaagaatccgtccccgattttcccctttccccccaaagaagaaggacctctccctggaggaaatccagaagaaattagaagctgcagaagaaagacgcaagtctcatgaagcggaagtcctaaagcagctcgctgagaagcgtgagcatgagaaagaagtgcttcagaaagccattgaggagaacaacaacttcagtaaaatggcagaggagaagctgacccacaaaatggaggccaacaaagagaaccgcgaggcgcagatggcggccaagctggagcgtttgcgagagaaggacaagcacgttgaagaggtgcggaagaacaaagaatccaaagaccctgcggatgagaccgaggctgactaatttgttctgagaactgactttctccccgaccccatcctaaatatccaaagactgtactggccagtgtcattttactttttccctcctgacaaatattctagaagctgatgtaggaccgtataggtagatccagaccgtgagatgttttcggggctcaaggggagaaactgaaagtgttttactcttttttaaagtgttggtctttctaacgtagctatttttctcgttgcatcttctccacttcagcacacttggtgtgctgggtaatggctagtactgtattgactctgtggaagacgtttgtgaagagtatgtagtggcttcttccaacctgttagatgctgattatctgttcactttgccatcccaattctgtcccaatcttatcagatgctactgtacttgaatggttaataaactgcacagtgctgttggtggca

SEQ ID NO: 6601 - DNA, 968 bp, Cricetulus griseus
cggcggctgcggctgctgggagcggggcgcccagagaggaggaggctcccggaggggaggcagcagctacgcaggccccagtcccgacgagtgcacccggggctcggctctcgaggctgcctctggcgagagtgaaggctttggtgaaggcggaccctgacgtaacgctcgcgggacaggaagccatctttatcctggcgcgtgccgcggagctgttcgtggagaccattgcaaaagatgcctactgctgcgctcaacaaggaaagaggaaaaccctccagaggagagatttggataatgcaatagaagctgtggatgaatttgcttttctagaagggactttggattaattgcggagctggatgattttgtgagcctttgctgtatccttcatctttccctgtgtaagcctcagctttggagagtccgtgtgcatacaaatcttcttgttctactttacccaagctacaagacgaagaaacctctgatacattctccacaaagtcttccattattcgagtctgtcttccagttcaggcctggatgtagctgatgctgcttggggcagagatgaaaggactgtattgcataagtggctcagtgatggaggaaaaccaggataaaggtctttggtcagcttctttcctgttttacagttttgcctttgctcttgccctgtgactggagaaccatgcaatcaggcacagactttccttgtgtatgacaaaatttagataatgttatttaaattttatctatgctatggtatgtatttgtaccctttcctttaagttgtgaaatatacataatataaagtttcccattttaacttgcttttcagtgtgttgctcagtggcattgaatatattcaaagtgttgcacagccattaccatcatttgcctccagaactttgtaataatgttctcagcctggaacatcatgtacatggaacagtagcttcctgtcc

SEQ ID NO: 6602 - DNA, 968 bp, Cricetulus griseus
gaggtgtctggtccggtagagtggtggcggctgccgtgggctctggtcctttccagccttcttctcgcctcgcccttgtctctcaggtcccgagagcactctcccggagaagcaaagctgtggttcgtgacagcacagccagtgacatcatgacaagtgaggtgattgaagatgagaaacagttctattcaaaagccaagatctactggaagcagatcccacccacggtggacggcatgcttggggggtatggccacatctccaacatcgacctcaacagctcccggaagtttctgcagaggtttttaagggaaggtcctaacaagacggggacttcctgtgccctggactgtggcgctggcattggaaggatcaccaagcgcctgctcctgccgctcttcagggtggtggacatggtggacgtgacagaggactttctggccaaagctaagacctacctgggggaagagggcaagagggtgaggaactacttctgctgtgggttgcaggacttcagcccagagcccaactcctatgatgtgatctggatccagtgggtgataggccacctgacagatcagcacctggctgagtttctgcgccgctgcaagcagggcctgcgccccaatggcatcattgtcatcaaagacaacatggcccaggagggtgtgatcctggatgatgtggacagcagtgtgtgccgtgacctcgaggtggtacgccggatcatccgcagtgcaggcctcagcctcctggctgaggagcgccaggagaacctgccagatgagatctaccatgtctacagctttgccctgagatgaggccggggccagagctgggggccttaaacacacctgccatgacctttgactccagtggggagggacaagcctccagtgggaaggtgtgctgtggattagggcagtgcagccctgccactcgaacagcatcctggcaactctccacag

SEQ ID NO: 6603 - DNA, 968 bp, Cricetulus griseus
ccgatcggtgccaggccaggtgtacgcgtccgtcggtctttccgtgaccgtgccggagaccagccccggaggccgcctgggcccgtccctgtgccaggcaccatgaagcaggagtccgctgcccagagcaccccgcctccctcactgtcccctgcaccgcccgcgcagccttcctgggaggatggcgacccccaagccctgtggatttttgggtacggatccctagtgtggaagccggactttgcctacagcgacagccgtgtgggcttcgtacgtggttatagccgccggttctggcagggagacaccttccataggggcagcgacaagatgcctggccgagtggtgaccctcctggaagatcgtgagggctgcacttggggtgtggcataccaggtacgaggggagcaggtgaacgaggccctgaagtacctgaatgtgagagaagcagtgcttggcggctatgacactaaggaagtcaccttctatcctcaagatacccctgaccaacccctcacagccctggcctatgtagccaccccacagaaaccctggctaacctgggccctgctccagaggaggccattgccacacagatccttgcctgccgaggtttctctattgaccctgacttactacttgaaactttatttattgcaccatgttggtgtggtgggcagggcaggtgggggacctgccctggacgtgggccctgctgtgcggtggctctgccctagtcttctggtgcctgaccagaatccccccattgctgctgctaatcccacaccacccaggcctccacacctctcgggagcctccaagagccttgatcctctgtccacccagactaactatcccagccctggacatatcacctgcccatgttccaacccactggatgaggggcagcagagaacgaggaatggtagccagcccatcaaggaccaaggtccagcatctctcttcat

SEQ ID NO: 6604 - DNA, 968 bp, Cricetulus griseus
gagtccggcgccggagctgcgggcgggcgggcacgagcgcgcgggccagagctgatcggcgctgcacggtgcggtacggcggcgcggcgcggctgtgcaggctttgcccaggcgccttggggtcgggtggtctcccgtgcggccagccgggggctctgaaagccagcggcgggcggcggtggctgcgtgcgtgccaagaggctgggggctcggcagcttcgtccgagcctctgtccctgcaaggttccctctctcccgggcaggcagcctagctggagaccaacagctccagctggaggcatcaactcgcaccaatttatctgacttctgcccagactctgaaatgccaactatgtcgaggcctgcacttgatgtcaagggtggtagcacctctgtgaaggaggatgccaaccaggaggcgaactctctggactactccaaccttggggtgaaggatcgcaaagcagtggccatcctgcactaccccgcagtcacctccaatggagccaaagccaatggggctcccactggctcccctggatcagcatctccaacaggctcccctaccaccgcctcccctaccaaacccccacccttcaacctgcaccctccccctcacctgctggcaagtatgcagctgcagaagcttaatagccagtatcatggggcagcagcggctgctgctgccactccaggccaacctgcggaggcagggccgctccaaaactggggctttggagcccaggcaggagcggctggaggggcaggatcagcctctcctcctgcaggtgctcagagccctgctatcattgattctgacccagtggatgaggaggtgctgatgtctctggtggtggaactgggcctagaccgagccaatgagcttcctgagctgtggctggggcagaatgagtttgatttcactgcagattttccctctggctgctgatgccaagtgtccctaaaaa

SEQ ID NO: 6605 - DNA, 968 bp, Cricetulus griseus
  modified_base (231)..(231): a, c, t, g, unknown or other
ggctgcggctgcgcctaggacggggagccccaggcgagcgcgggccggcagaacacagacagcatctcggcgtcccggttccagacggcgtggcccgcgggtcatggccaaaggagagggcgctgagagcggttccgcggcggggctgctccccaccggcatcctccaagccagtgaccggccggtccaggtgaagaaggaaccaaagaagaagcagcaacctcatgaagngtaatctaatcgtcacttacgtggtggccatagccgctggtgtcagtgtagctgctgctttcttactaccctggtccatgctgcctgatgtcattgatgacttccacctgaacgcaccctaactcccctcggcacccgagcccatcttcttttccttctatgttttcttcaccaagtttgcctctggagtgtcactgggtgtctctaccctcagtcttgactttgccgagtaccagacacaggggtgctcccagccagaacaggtcaagtttacactgaagatgctggtgaccatggctcccatcatcctcattctactgggcttgctactcttcaagctgtatcccatcgatgaagagaagcgacggcagaataagaaagctctgcaggctctacgagacgaagccagcagctcaggttgctctgacacagactccacagagctggccagcattctctaggacctgccatgttacctacatccaccacacaaagcacctggagcaccaggtagcatgtggcacgggatcttttgtcctcgcactgaacagctgttcttcctgtgtcaagacaggaaccaaggactggatggagggtgagcggcccaggacatctgtgcccactgaagggctggccgctctgtagccctcctcactgcctgcccacagggccaagccctagggctgctactgtgaatatgccaaggactgactgggcctagctcagaacactaatgt

SEQ ID NO: 6606 - DNA, 967 bp, Cricetulus griseus
attcaacagtaggagaaatctgctcatcatatccaattgaacatccctaccatacacatacaagccgtggcgctatgtttccgaccttcacatcacctaaggacctctacacaggtgttaaagcccgcacgcagcagccttttcctcctacgatgccaaccaagacctatgacacaacagttctgaagacaagaggtaacccttacagatatgaactgcttgattaccccacggattcaaagaaaaagcattgacttggccaggtcagggtgtatattatgattttcctaaatgtgttgagaaaaacaagccaatattctaccccaaacctcctaaaacttttgctcctaactcatctttgaatccatgggatcactcccatcttgttatccatcaaaagatctgacaaaatctttatgacctaaaaccattttcaaagatcacagacactaaaaagacagatgatttgtactggagacagctggtatactatgtgtcagagccctgctcgactcagtaagtctaatattctacaaagcaaaacagttatggatgatttgaatcttgacagctttttaagtaaaccagaatatttggacatagacatggaaagcaatgacgaaacaagacctattttgggatggatttctggagctggtgtgtccaagcctcagaccaacctgctagatcttaggaattcattttcaaagagcatggcacagaagcgtttgcataattccatccaagaagaacaaaaagatctcagggataaaatacaacgtgggatgagacatcagttctatggccacaatgcccattattctataactgatcaggaaaatcagtgtgtagacaaaaataatcatcattttgtgagaaaatgaaaaagttgaaaaaaattcaaatattgaagatttgacagacaactatagaatgtatcatgctttaataaaattaatatgtcaac

SEQ ID NO: 6607 - DNA, 967 bp, Cricetulus griseus
cgaggagtaacagcggcacgaacagaacaatgggtctgttctcagagttgaagcccggctgtgccttggggccacattgctgtcaaagtctggggctcccacgaagaaccctccagttctctgcctgcatggctggctggacaatgccaactcctttgacagactcattcctcttcttccacaagattttcattatgtggccatggatttcgggggccatgggctctcctcccattacagcccaggtctcccgtattaccaccacaattttgtgagtgaggtccgaagggtggcagcagcatttaaatggactcgcttctccctcctgggccacagttttggtggcactgtgggtggcatgttcgcctgcatcttccctgagatggtggaccaactaatcttgctggactcaacaccatttttcctggactctaatgaaacagagaacatcctgacctacaaacggaggaacatggaacacatgtttcaagtggaagcttcccagaattccttgagggtgtccagcctggaggagatgttgcaggggctcctgaataaaaatagccacttgaataaagaatgtggggaactcctgctgcagagaggaaccacaaagatggccacaggtgtggtgctgaacagggaccggaggctctctgtgccagagcacagctttgacttcgtgagcaaggagatgtttgttcactttatcagacgcctgcaggccaatgtgttgctggtcaaagcaacacaggggtactatgatgtcagacgagccaacgatgagaacaaggaacccctattcttcatggtggacacactaagaaccatcctaaaagagcggttccagtatgtggaaatcccaggcaatcactacgtccacatgaacaaccaacaccttgtggctggaattgtcagcgccttcctccagagccaacccaggactgcttccaggctgtagctctgg

SEQ ID NO: 6608 - DNA, 967 bp, Cricetulus griseus
ggtctccagcgcgccgttttagccttctggcggcaggggactccgcgctttcgctgagggacgtgtttgcgcgctcgctcagtcatggaggcgcggtccaagctgctggacgcgacgactcagtcccgtcgctggacccaaaagctggtgctgatccttccgccgctgctgctgttcctgctgcggaccgaagctctgcagggtttggagagtgaggatcggttccggacccgcgaaaacgagtgccacttctatgctggtggacaagtgtacccgggagaggtgtcccggctttcagccgcagatcactccctgcatctaagcaaagccaagatttctaagccagcaccttactgggaaggaacagctgtgataaatggagaattcaaggagctgaaactgactgactatcgtgggaaatacttagttttcttcttctacccactcgatttcacttttgtatgtccaactgaaatcattgccttcggtgaccgaattgaagaattcagatctataaatactgaagtggtggcatgctctgtcgactctcagtttacccacttggcctggattaatacccctcgaagacagggaggactggggccaataaggattccacttctttcagatctgaaccatcagatctcaaaggactatggtgtatacctcgaggactcaggccatactcttagaggcctcttcattattgatgacaaaggaatcctaaggcagattacgctgaatgaccttcctgtgggtagatcagtggatgagacactgcgcttggttcaagcattccagtacactgacaagcatggagaagtctgccctgctggctggaaacctggtagtgaaacaataatcccagatccagctggaaaactgaagtatttcgacaaactgaactgaaaaatacttcagttttgatgtttggaccttctcaataaaggtcactgtgttattacca

SEQ ID NO: 6609 - DNA, 967 bp, Cricetulus griseus
gctgcggggcgcgggcgtcgggaacgcgcctcccccgccgctcgcgcagccgcgggcactcggcggaaaccgaaggcgagcgagggaggaaggcgggaagcatgaagaaaggggctccctgcgagcggaaaccggcgtggatgccgtcggggaaggcgggagcaccatgtggatttcttatggaagtatgtgtagattcagtggagtcggccatgaatgcagaaagaggaggtgctggtcggattgaattatgtgctggcttactggaaggaggaaccacacccagcatgggtattcttcaagtagtaaaacaaagtgtccagattccagtttttgtgatgatccgaccacggggaggtgactttttggattcagatcgtgaagttgaagtgatgaaggctgacattcgtcttgccaagcattatggtgctgatggtttggtatttggggcattgactgaagatggacacattgacaaagatctgtgcatgtctcttgtggctctttgccgtcctctgccagtcacttttcaccgagcctttgatatggttcaagatccaatggcagctctggagactctcttaaccctgggatttgaacgtgttttgaccagtggatgtgacagttcagcactagaaggactgcctctattaaagcaactcacagatgaggcaaaaggcaggattgtggtgatgccaggaggtggcataacagataaaaatcttcaaaggatccttgaaggttcaggtgctacagaattccactgttctgctcgatcttctagagactcaggaatgaagtttcgaaactcctctgttgcaatgggagcttcgcttgctcattcagaatattctctgaaggtaacagatgtgacaaaagtaaggactttgtatgctattgcaaaggatatcctagtttagttaaacttctgtgagagacatggatgtcacagtgtgaaggtagaagt

SEQ ID NO: 6610 - DNA, 966 bp, Cricetulus griseus
aagtcttcagagcttaccgaagctgtggaaaccaaggagactgaagagggtgatacagagccagaagagggctcaccgcttgaagaagataatgaaaaggtgtttgacccttcctccagtgagaaccgagaggagacacttagggagtctgtgaatgatgagaaggatgactcttataaggacagttctggaaacaccagtgcagagagcagccacttctttgcttatctggtgactgcagctgttcttgttgctgtcctctatattgcttaccacaacaaacggaagattattgcttttgccctagaaggaaaagatccaaagtcactcggaggccaaaaggccagtgactaccagcgtttgaacctaaagctttgattattttttattgtctgcaagaaccttgtcctccctgctgatttgtttacgaatcaagagaaatgaaaagactgaccccctctggggtttggtggcaagtctgggctggccgagacggggttgcttcaggtttgcacctgcactttggtgacattgaactctgctgatgttttctttacgtttgtgtcctctttatgctggtgtgttccagcatcctttcttctttggagtgtgaggaggagcatgtggaaacattactgtgaccaaaggaagaccccaccctaggcaggccacacaatggaccaccctgcggtagcatcttatctttgcaactctagtagggaagctgtagagatgtgctttgtagacaggaggtagaaaatggtgagtgggatgttgatgggcagagagatttgaacacatattctacagaggccttaactgcaaaccagaatagcaagtttaaagagtgttaaagtctgagctgtctgacagtctacatgtttttctgaaagtgtgctactttttggttgtactagcataaaagggaacttggagtttctgaaagtaaagtcactgttccatggg

SEQ ID NO: 6611 - DNA, 966 bp, Cricetulus griseus
tggaagctctgcgcggcctccggagttggcaccatgagctccattgggaccgggtatgacctgtcagcctctacgttctctcctgatggaagagtctttcaagttgagtatgctatgaaggctgtggaaaacagtagtacagctattgggatcagatgtaaagatggtgttgtgtttggggtagaaaaattagtcctttctaaactttacgaagaaggctccaacaaacgactttttaatgttgatcgacatgttggaatggcagtcgcaggtctgctggcagacgctcgttccttagcagacatagcaagagaagaagcatccaactttagatctaactttggctataacattcctctaaaacatcttgcagacagagtggccatgtatgtacacgcttatacactctacagtgctgttagaccttttggttgcagtttcatgttagggtcttacagtacgaatgatggtccacagctttatatgattgatccgtcgggtgtttcatatggttattggggctgtgccattggcaaagccaggcaagctgcaaagacagaaatagaaaagcttcagatgaaagaaatgacttgctgtgatgtagttaaagaagttgcaaaaataatttatatagtacatgatgaagttaaggataaagcttttgaactagagctcagctgggttggtgaactaactaaaggacgacatgaaattgttccaaaagacataagggaggaagcagagaaatatgccaaggaatctttgaaggaagaagatgaatcagatgatgataatatgtaacattttcatcatctcttctgttttacatttctgtgacagtttgatattactagtaccatggatcataaatacccatttaccaattttcatttaaatttttgtcttataaacattaggttcaattcccagcacctacatggcagcttacacccgtctgtaactcca

SEQ ID NO: 6612 - DNA, 966 bp, Cricetulus griseus
gactacagagcttccatcactaggctaccacattgacccagtggctatttcatatggacttgagggcccttgcctatcctgtaaatctaccacacagtgggtctggctgactgcctagccagacaacatttgggaagatgatcagccctctgaatgcccacccagggtaagtctggtgtgcttttggttcctgcctcaagggttggaactcagtagctctcttcctgtggaggtagccacctttcctccttactgggagcaagacttttgtcagttctttggtccggcctctgttctgattccttttgtatggaagaaccaattgttttcacattgggccatgtggattccttatccttttattacatatattttttgcaacttggatttccagtttgtttacagaatagtcttaggtagtagcaaaaagagccaaagaagagatttgtatagctgagctctaagccgagctgaggccgccagcaaagctgagcagtgggaactctccaggctcctctgcccgtcaaacaacgggccccagcaccccacccctttggtgctcccttctccccatgtgccactgcgtgtgcagctagaacaggatgccctcatctttaggaatctagcgatgcctcttgcctcagggaaacgtttctttgatggggagtttatgagatttcttttccttgtttatgctttatttgtggtaatgaaagagtgagtgacttaaacagccatggccagggagaactgcggcccggctacagcagaaggtgggggtagagagcgctcagtgggatgcaagggtttctttggtgggtgtaaggctctgagcacttaaccaggcgtggccgtttcttaggtgtgagaggggcttttgtgcagcaactatgttggtgttagggggtggtgtggaaattgttaatcttgtataaagcaacaacaataaattgttttgaggtttcc

SEQ ID NO: 6613 - DNA, 966 bp, Cricetulus griseus
ggactctaattctgtaatatatcaaggaatctcgtaaaaccgacactaaaacgtccctgactacaaatcatccggccaaattatgagttcattgtattatgcgaatgctttattttctaaatatccagccgcaagttcggttttcgctccaggagcctttcccgaacaaacttcttgcgcctttgcttccaacccccagcgcccgggctatggagcaggtccgggcgccccgttctccgcctcggtgcagacactgtaccccggcggggggggcatggcgggccagagcgcgccgggcgtctacgcggccggctacgggctcgaaccgagttccttcaacatgcactgcgcgccctttgagcagaacctctccggggtgtgtccgggcgaccccgccaaggcggctggcgccaaggagcagagggactcagacttggcggccgagagtaacttccggatctacccctggatgcgaagctcagggactgaccgaaagcggggccgccagacctacacgcgctaccagacactggagctggagaaggagtttcactacaaccgctacctgactcggcggcggcgcatagagatcgcgcacgcgctctgcctcaccgaaagacagatcaagatctggtttcagaaccggcgcatgaagtggaaaaaggagaacaaaacatctggccagggtgtcactggccaggacaaggctgaagcagaggaggaggaagaagagtgagggacagaaaaaggagatggatgaaatttgggcttctcaacactgtaaaagaaatactacctatggggaagtgtgttgtctgtttttgtacagtatgggaaggacattatcggcctgcttcatggctttctggaatgtgcctccccttttctatgttgctagtaaggtctctgtaaaatcttgctgttttgtacaccctctatggcactgtctttgtggactgtggttcc

SEQ ID NO: 6614 - DNA, 966 bp, Cricetulus griseus
tggcggggaggttgctgggctcagtgcgagccggcgggggcgcgatggcgagcgcggccctcagggtggccgtgcgacggctgagccagcacagctcacccagggccccggtcctcctgcggcagatgtttgagcccaagagctgcacctacacctacctgctgggtgacccggagtctcgagaggctcttctgatcgaccctgttctggagacggcgcaacgggatgctcatctggttaaagagttggggctgaagctgctctatgccgtgaatacccactgccatgctgaccacatcaccggctcaggggtcctccggtccctactccccggctgccaatcggtcatctcccgcctcagcggagcccaggccgatgtgcatatcgaggaaggtgattccatccgatttggacgatttgccttggagactcgggccagccctggccacaccccaggctgtgtcacctttgtcctgaatgaccagagcatggcctttactggagatgccctgctgatccgagggtgtggacggacagacttccaacaaggttgtgctaggactttgtaccattctgtgcacgaaaagatcttcacacttcctggcaactgtctcatctatccggctcacgattaccacgggctcaccgtctctactgtggaggaagagcggactctgaacccacggctcaccctcagctgtgaggagttcatcaaggtcatggacaacctgaacttgcccaagccgaagcagatagactttgctgttcccgcaaacatgcgctgtggggtccagacgccaccttcctgactggtcccagccggctgcttgtatccgttgcactaggtggggtgaggggaggggcggcaccccagagcctctctcctctcccacccctactctcaccagctatttgagcttcttaaataaaacttactttgtttttgccacgaaaaaaaaaaaaaaa

SEQ ID NO: 6615 - DNA, 966 bp, Cricetulus griseus
gctactacaaccagagcgagggcggctctcacaccatccagaggatgtacggctgtcacgtggggtcggacgggcgcctcctccgcgggtacagtcagatcgcctacgacggcgacgattacatcgccctgaacgaggacctgaggacgtggacggcggcggacacggcggcgcagatcacccggcgcaagtgggagcaggctggttttgcagacagatacagggcctacctggagggcacgtgcgtggagtggctcggcagatacctggagcacgggaaggaccagctgctgcgcacagatcccccaaaggcacatgtgacccatcatcctggacctaaaggtgatgtcaccctgaggtgctgggccctgggcttctaccctgatgtcatcaccctgacctggcagagggaggaggaagaacagactcaggacatggagctggtggagaccagaccttctggggatggaaccttccagaagtgggcatctctggtggtgccttctggggaggagcagaaatacacatgccatgtggagatgggagcctcctcctcagtccactgtcctcatcatggcagtcattgctgctctggttctccttggagctgtgatcattggagctgtggtgttttttgtgaggaagaggagaaactcaggtggaaaaggagggaactatgctccagctccagcttgaagacagctgcctggcatggacggagtgacagacaatgtgttcagccctctcctgtgacatccacggttgactctctgcaacagtgtctgatgttccctatgatcctatgggctcaatgtgaagaattgggagcccagcacagcccagccctgcacaccaggaccctgtccctgcactgcctgtgttcccttccatggccaacccttcctgttccagtagacaggaggggacatcttcatcctgtcacctccgtgctaccttgagctgcca

SEQ ID NO: 6616 - DNA, 966 bp, Cricetulus griseus
gagacagacctggcgaagcacgatgaggaagactacgtggagatgaaggagcagatgtatcaggacaaactggcatctttgaagcgacagctgcagcagctacaggaaggtaccttgcaggaatatcagaagaggatgaagaagctggatcaacagtacagagagagaatccggaatgcagaactcttcctccagctggaaactgaacaagtggaaaggaactatattaaggagaagaaaggcggcagtgaaggagtttgaagacaagaaggtggagctgaaggagaacctgatcgccgagcttgaggagaagaagaagatgattgagaatgagaagctcacgatggagctgaccggagattctatggaagtgaaacccatcatgaccaggaaattaaagaggcgaccaaatgatcctgtccccattccagacaagaggagaaaaccggctcctgctcagctaaactatttgttaacggacgagcagatcatggaggatctgagaacattaaataagcttaagtcacccaagagaccagcttccccatcctctcctgaacacttgcctgccacacctgcagagtctccagcccaaagatttgaagctcggatagaagatggcaaactgtattatgataaaagatggtaccacaagagccaagccatctacctagagtcaaaggacaaccagaaactgagctgtgtcatcagctctgtgggagccaatgagatctgggtgaggaagacaagtgacagtactaagatgaggatctacctgggccagctgcagcgtgggctcttcgtgatccgccggcgaaaattcttaacttaccgggactagctacttggcctgggacatggagagcactgtggaatcgtcaaggcactgacgtcacatggccggccacttccgtctctgtaccgttctttcctgcctcggctccctccagactcagtcaccagaga

SEQ ID NO: 6617 - DNA, 965 bp, Cricetulus griseus
ctcagcgtcggccgttttttcgggttttccggccactttggctctggcgagcgcgcccgcagctacgcggccggggccagtgcggcgcccgccgagcccaggtacagccagccggccacgtccacgcactcgcctccgcccgatccgctgccctgctcggcggtggccccctcgcccggcagcgacagccaccacggcgggaaaaactccctgggcaactccagcggcgcctcggccaacgccggcagcacccacatcagcagcagagagggggttggcacggcgtccgcaaccgaggaggacgcccctgccagcagcgagcaggcgagcgcccagagcgagccgagcccggcgccgccagctcagccccagatctacccctggatgcgcaagctgcacattagtcacgacaacataggtggcccagaaggcaaaagggcccggacggcctacacgcgctaccagaccctggagctggagaaggaattccacttcaaccgctacctgacccgccgaagaaggattgaaatagcgcatgctctttgcctctccgagagacaaattaaaatctggttccaaaaccggagaatgaaatggaaaaaagataataagctaaaaagcatgagtatggctgcagcggaggggccttccgcccctgagcctgtgggcgctcaaagtactgagcagtgttagcggagctctccgtagtgtcagtactaaggtgactttctgaaacctccccctgtgttccttctgtgaagaagccctgttctccttgccctaattcatcttttaatcatgagcctgtttattgccattatagagcctgtataagtagatctgcttctgttcatctctttgtcctgaatggctttgtcttgaaaaaaaaatagattgttttaacttatttatatgaagcaagctgtgttacttgaaagtaactaaaacaaaaaaaaaaaaaaaag

SEQ ID NO: 6618 - DNA, 965 bp, Cricetulus griseus
ttcttctccacgttctatcatgcctgtgacccagccaggcattgtggttttctgcatcatggactacgatgtgcttcagttctgtgatttcctggggctccttaatgtcagtttgggtcactgtcattgccatggctcgtttgcagcctgtgatcaagcaggtgttgtatttgctaggggctatgctgctgtccatggccttgcagcttgaccggcacggactctggaacctgcttggacccagtctcttcgcccttgggatcttggccacagcctggttcgcagcgtccggcgccggcaacctgttacccaccaacatggcgccgctggctcttctacctgtgcccaggcagccttattgcaggcagtgccgtcctactgtatgctttcgtggtacgacccgggacaactacttctacattcatagcatttggcatatgctcattgctggcagtgtgggcttcttgctgccgcctcgtgccaagactgaccgccgggtcccatctggagctcgggcccggggctgcggttaccagctgtgcatcaatgaacaggaagagctgggccttgtgggcccaggaggggctactgtcagcagcatctgtgccagctgagaggggctttgggccaggctcctaggggttatgaaccctgcctagggttcctcctggggctgtggagcccttctaggaacaagggacaagttgtgtttcttaaagacacagtctttctcaaggatgactgttttcagggactaggaggccttcccaagacacagagaatttcctgagagcctatggagtccttgtgtgtgtgtgagtgtgtgtgtgtgtgtgtgtgtgtgtgtgtgtgtgtgtgtgagagagagagagagagagagagagagagagagagagagagagagagagagagagagagagagagagagagagaggagagagagagagagagagagagagagagag

SEQ ID NO: 6619 - DNA, 965 bp, Cricetulus griseus
gtccagtcgctatgaccagagccaaaagaacgaagtgtttttagatgtggtcgagaggctgtctgtattgattgcagctaatggttcattgttgaaggtggatgtccaaggggagatacggctcaagagcttccttcctagtggttctgagatgtacattggcttgacagaagaattttgtgtgggaaagtcagaactgagaggttatgggccaggaattcgagttgatgaggtgtcattccatagctctgtcaatctagatgagtttgagtctcatcggatcctccacctgcagccacctcagggagagctgactgtgatgagataccagctctccgatgacctcccctcgccactccccttccggctcttcctctgttcagtgggaccgaggctcaggccggctccagatttacctgaagttaaggtgtgacctgcccccaaagagccaagctctcaacattcgtctgcaccttcccctgcctcgaggggtaatcagcctgtctcaggaattgagcagcccagatcagaaggcagagctgggagaaggagccctccactgggacctgccccgggtacaaggaggctctcaactctcaggccttttccagatggatgtccctggctcacaggggccttcaagccatgggccctccccattggggctgggtcctgccagcctctcctttgaactccctcggcacacatgctctggcctccaggttcgattcctaaggctgtccttcagtgcctgtggtagtgccaaccctcacaagtgggtgcgacatctgagccacagcaacgcctatgtaattcggatttgaagctccccaaacaaggatatggacagcaaagtcagcagcaggcagttgaacaggaagaggacatttttcttcttgtgtctttggatctggacaggaagttactaaatccaactttattctgaggaacttactgtacagtat

SEQ ID NO: 6620 - DNA, 965 bp, Cricetulus griseus
gtgcacgctcgcggatcccgcccgtgcagcgagtcatccagtaagctccgcggagattgggctagcggccgaggctgaggccgagtcggagccccggtttttccagcctggtggagcagttgattggcaagtgtgctgactgtccagtgcttcctggctcctactctgcctgtattctgtctctcctgggaagatgttcctggtgggcctaacgggaggcattgcctcaggcaagagctccgtcatccaggtgttccaacagctgggctgtgctgtgattgatgtggatgtcattgcccggcacgtcgtccagccggggtatcctgctcaccggcgtattgtacaggcctttggcactgaagtcttgctggagaatggtgacatcgaccgcaaggtccttggagacctgatctttaaccagcctgaccgtcggcagctactcaattccatcacccaccctgagatccgcaaggagatgatgaaggagaccttcaagtattttctccgagggtaccgctacgtgatcctggacatccccctcctgtttgagaccaagaagctgctcaagtacatgaagcacacagtggtcgtgtactgtgaccgagacacacagctggcacggctgatgaagcggaacagcctgaagcgtgaggacgcagaggcaagggtcaatgcccagctgcccctgaaggacaaggcccggatggccaaccacgttctagacaactcgggcgagtggagcctcaccagacgccaggtcatccttctgcatgccaagttggaacgatccatggaatacctgccactgaggctcgggttcctaacgggcctagcaggcattgccagcctcctttacctgctcacccgttacctcctcccttctccctagctaggtacaccaaggcagcaagccttaggcctcctccttagagacctaagtcaggtaccatgtcctcaacactaca

SEQ ID NO: 6621 - DNA, 965 bp, Cricetulus griseus
acttctccgctatgccagtcgttggctccaagctgcactccgctgctcagcagcagggcgcggaggcaccgcggcacggggagctgcagtacctggggcaggtggagcacattatgcgctgcggttttaagaaggaggaccgtaccggcactggcaccttgtcggtgttcggcatgcaggcgcgatacagcctgagagatgaatttcctctgctcacaaccaaaagagtgttctggaagggagttttggaggagttgctatggtttatcaagggctccacaaatgctaaagaactgtcctccaagggagtgagaatatgggatgccaatgggtcccgagattttttggacagcctgggattctctgctcgacaggaaggggacctgggcccagtttatggtttccagtggagacattttggagcagactacaaagatatggattcagattactcgggtcaaggagtagaccagctgcaaaaagtgattgacaccatcaaaaccaatcctgatgacagaagaatcatcatgtgtgcctggaacccaaaagatcttcccctgatggcactgcctccttgccatgccctctgtcaattctatgtggaaaatggggagctgtcttgccaactttaccagaggtcaggagatatgggcctgggtgtgcccttcaacattgccagctatgccctgcttacctacatgatagcacacatcacgggcctgaagccaggtgattttgtccatactttgggagatgcacatatttatctgaatcatatcgagccactgaaaattcagcttcagcgagaaccaagacctttcccaaagctcaaaatccttcgaaaagttgagacaattgatgatttcaaagttgaagactttcagattgaaggttataatccacatccaacgattaaaatggaaatggctgtttagcgctctttcaaagatgctgtgaataccacc

SEQ ID NO: 6622 - DNA, 965 bp, Cricetulus griseus
ggacctccagacatgagcgtgggtttcatcggggcagggcagctggcttttgccctagccaagggcttcacagcagcaggtgttctggcagctcacaagataatggccagctccccggacatggaccaagccacggtctctgccctccggaggataggggtgaacctgacagcccacaacagacagacagtgcgccacagcgatgtgctcttcctggctgtgaagccacacatcatccccttcatcctggatgaaattggtgctgacatcgaggacaggcacatcgtggtgtcctgtgcggcaggtgtcaccatcaactccattgaaaagaagctgacagcattccagccagcacccaaagtcatccgctgtatcgaccaacaccccagtggtggtgcgggagggtgttactgtgtacgccacgggcactcatgctcaggtggaggatggcaggctcgtggagcagctcatgggcagtgtgggcttctgcacagaggtggaggaagatctgatcgatgccgtcacggggctcagtggcagcggccctgcctatgctttcaccgccctggacgctctcgctgatggtggagtgaaaatgggacttccaagacgcctggctgtccgcctgggggcccaggccctcctgggggcagctaagatgctactagactcagaacagcatccaggccagctcaaggacaatgtctgctctcctggtggggccaccatccatgccttgcatgtgctggagagtgggggctttcgctccctgcttatcaatgctgtggaggcctcctgcatccgtacacgggagctgcagaccatggctgatcaggaaactgtctcccctgctgccatcaaaaagactgtcctggacaaggtgaaactggattcctctgctggggccgctcagtcttcttctgggcccatattaagtcactgccctgcagcctggccccagcagg

SEQ ID NO: 6623 - DNA, 965 bp, Cricetulus griseus
aagtggtcgtgagcgcgggattcgggcgggatgcgggtcctggatctagaagggctttgcctgaaatggatagccggatctcttatgatgactacccagtggttttcctgcctgcctatgagaaccctccagcgtggattcctcctcatgagagagtataccacccagactacaacaatgagttgacccagtttctgccccgaatcgtcacactgaagaagcctcctggtgctcagctgggatttaacatccgaggaggaaaggcctcccaactaggcatcttcatctccaaggtgattccagactctgatgcacatcgagcaggacttcaagaaggggaccaagttctagctgtgaatgatgtggatttccaggatattgagcacagcaaagctgttgaaatcttgaagacagctcgagaaatcagcatgcgtgtacgcttctttccttacaattatcatcgccaaaaagagaggactgtgcactagagtcttgcagcccacagcactccatgtggaatctgccagagcacgctggctagccctctgagaagccagtcaggaaattctactctcagcgccttcctggcttagtggatgggggaggatggggagatagcttaccagccacattctatataaactctactgtacttggagttccctagtttcctaggtgagtttcattctggaaaaggagaaagataatgatgtctagatgtctgtagcctgtgtggaaagccagctagaaagcaagtagcgtttatcaggtaccacagatacttacacagcttattttatttttagaaatcagtagaaaaaaatagagtctggggaccttccatgtgatttgcctggccatgccatcccgtccttgtacataaactttggagtccaacacacttggaagactccaaagagacactgttttggccccttccctccccaaaagtaaaaacacaatac

SEQ ID NO: 6624 - DNA, 964 bp, Cricetulus griseus
gccgcgggaccggcaatcatggctccggcttggccgcagcctctgccgcagatcctcgtgttgggactcgggttggtgctgatgcgcgccgcggccggggaacaagcaccaggcaccgccccatgctctagcggcagctcctggagcgcggatctcgacaagtgcatggactgcgcttcttgtccagcgcgaccgcacagcgacttctgcttgggatgcgcagcagcacctcctgcccccttcagactgctctggcccattctgggaggtgctcttagtctggccttggttttggcgctgctttctggtttcctggtctggagacggtgccgacggagagaaaagtttactacccccatagaggagactggtggagagggctgcccaggtgtggcactgatccagtgaggagcacccgcgccggtgcccactcatcgtccattcattcattctggagccagcctggccttccagacaaccccagccagactcttccaaccacaagggggtggggtgaggtggtgattcacctcccaggactgggcttagggttcaggggagccttccagggtgtctagattgccctgtctctggttccagggcagggagcctcaagctgggtcacaaagcaacacacactaaggaaccgcagcatttgcacaagggggtctcctgctctccccaagtcctggagacctggctgacttgaggggcagacacactaggtcccacccactcagatgggctgaaattcaattacactaagtttcagccctgggagtgggtcagatttagggacctgtgcttaacactaagggggctggccctctgggagggctggccctaatacacacacacccatcctctaaaagggggggggatagtttatttgggggataaagtttgaaggggtgggagaatttattaataaaagaatctttaacttgaaaaaaaaaaaaaaaaa

SEQ ID NO: 6625 - DNA, 964 bp, Cricetulus griseus
tacatgcgctgtaagatgaatgaagacaccggcactgattatttagcaccttggcagctgtctcaggtggttgatggtggaggtattggaattatagaagagagcaaacacacaaatttggccagaggtgattttgtgacttctttttattggccctggcaaactaaagcaattctggatgggaatggccttgaaaaggtagacccacaacttgtggatggacatctttcatattttcttggagctataggtatgcctggtttgacttccctgattggagttcaggaaaaaggtcacatatctgctggatccaatcagacaatggttgtcagtggagcagcaggtgcctgcggatctttggctgggcagattggccacctgcttggctgttccagagtggtgggaatttgtggaacacatgagaaatgcctctttttgacatcagaactggggtttgatgctgcagttaattataaaaaagggaatgtagcagaacagcttcgagaatcatgcccagctggagtggatgtttactttgacaatgtcggaggagacatcagtgatacagtgataagtcagatgaatcggaacagccacatcatcctgtgtggtcagatttcccagtacaataaagacgtgccttatcctcctccgctgccccctgctgtagaagcaatccagaaggaaagaaacattacaagagagagatttactgtgttaaattataaagataaatttcagcctggactgctacagctgagtcaatggtataaagaaggaaagctaaagatcaaagagactgtgataaatggattggaaaacatgggagttgcattccagtccatgatgaccggaggcaacatagggaagcagatcgtctgcatttcagaagatgtttctctgtagtctttgtgtatcttcatcaaggaaaccctacatttcctacttgcacaaagattcttaa

SEQ ID NO: 6626 - DNA, 964 bp, Cricetulus griseus
caggtcttaggagtgcgagctttggagtcagagaaagagttggaagagttaaaaagagaaatctggacttagaaaatgacatactatacatgaggacccaccaagctcttccaagagattctgttgtggaagacttacatttacaaaataaataccttcaagaaaaacttcgtactttagaaaaacaactctcaaaggatgcgtatccccagtcgttgacttcagaaatagagtcagatgatcactgtcaaaaagaacaagaacttctgagggaaaacttgaagttgtcatctgaaaatatcgagctgaaatttcaacttgaacaagcaaataaagatttgccaagactaaagaatcaagtaagagacttgaaggaaatgtgtgaatttttgaagaaaggaaaaataggaagttgaaacggaaacttgggtacaggtcagagggtctggtagaagtggaaagacagtcccagagctagaacagattgagatcctcaaaacgtttctgaaggtgtggagacagatcaagagcttatccaggaactccagctccttagattagccaatagtaagctggataaagaaaggcagaactaatccatcagataaaagctaacaaggaccaaactggagctgaaagcagcacacctgatcctgatcaactaaaggaaaggtaaatgacctagagacacagctcagaaagtcagacctagacaagcaacacttgaaggaggaaattaaaaagactgaaaaaagaactagcaaaattttagatccttcattttttgaagaaattgaagacctgaagtacaattaataagaaagaagtagaaaaaaaatattctcttagaacagaagttaaaaaaactttctgagcaatttggatttgaattacctagccctgttgctgcttcggaagatggagaaagtcctggagaaagtcctaataatttccctatttatta

SEQ ID NO: 6627 - DNA, 964 bp, Cricetulus griseus
ggtagccgcgcttctctgcgcgctgtgcttcggcctcctggccacgtcttctcgtgccggctactccaaggaccgctgcagctggaggggcagcggcttgacccaggagcccggcagcgtggggcagctgaccctgtattgtactgagggcgctatcgaatggctatatccagccggggcgctgcgcctgaccctgggcagccccgatccgggcacacagcccagcatcgtctgtctgcgcccctcgcggcccttcgccggtgcccaggtcttcgctgaacggatgggcggcaacctagagttgctactggccgagggcccagacctggctgggggccgctgcatacgatggggtccccgcgagcgccgggcccttttcctgcaggccacaccacaccgcgacatcagccgcagagttgctgccttccgttttgagctgcataaggaccagcatgcagaaatgcctccccaggcccaaggtcttggtgtggatggtgcctgcaggccctgcagtgatgctgagctccttctggctgcatgtaccagtgactttgtgatccatgggaccatccatagggttgcccacgacatggagctgcaagaatcagtcatcactgtggtggccacccgtgtcatccgccagacattgccactgttccaggaagagggctcagagggccagggccagggccaggcctccattcgtaccccgttgcgctgtggtgtgcgtcctggcccaggctctttccttttcatgggctggagccgatttggtgaagcctggctgggctgtgctccccgctttcaagagttcagccgtgtctattcagctgcccttaaagcccacctcaacccatgtgaggtggcactggactgagagacctgggagcaacgcccccatcggagcttcttctgggaatggggtaactgggaagggtggtagggagggtgggtgggaagggtg

SEQ ID NO: 6628 - DNA, 963 bp, Cricetulus griseus
ggaggagctgttcaaaccccaggagctgtactctaagaaggccctgaggactgtgtatgaccgcctggctcatgcctccattatgcgactgaaccaggccagcatggataagctctatgacctgatgaccatggctttcaaataccaagtgttgctgtgtccacgcccaaaggatgtgctgctggtcactttcaaccatttagactccatcaagggattcatccaggactccccaactatcctacatcaagtggatgagaccttccggcagctgacagaaatatatgggaatctctctgctggtgagttccagatgatccgacagacactgctcatcttcttccaagacctgcatatacgagtatccacatttctaaaggacaaagtccaaaattctaatggtcgatttgtgttgccagtgtccgggcctgttccctggggaactgaggttcccggagtcatcagaatattcaatgacaaaggcgaagaagtaaagaagacaggattcaagcatggtggaaactacgtggctgcccagaaggaaggtgcttttgagctttatggagacagagtcttgaaactgggaactaacatgtacagcgcgaatcggcctgtggaaacccatatgtctgcaacatcaaagaacttagcctcaaagacacaggaaaacattgccaccaaaacccctcttagaccaaaagaagagctgaatttcttggccaggctaatgggagggatggagatcaagaaaacgagtggccctgaaccaggattccggttgaatctatttacgactgatgaagaggaggaacatgcagcactgtccaggccagaggagttatcctatgaagtcatcaacatacaggctacacaggaccagcagcggaatggaggagttggcccggatcatgggggagtttgagatcacggagcagcaaaaccaaaacaaaacaaaaaaaagtt

SEQ ID NO: 6629 - DNA, 963 bp, Cricetulus griseus
gtgaaagaaagaagtctccgccatcacatagactccgtaaacgctctctacaccaaatgcctccagcagcttctgagagactctcacctgaaggttcttgcggagcaggaggcccagatgaaccttatgaagcaggcagtagagatgtatgtccatcacgatatttatgacctgatctttaaatacgtggggaccatggaggcaaatgaggatgccgcctttaacaaaaatcacaagaagccttcaagatcttcagcagaaagacattggtgtaaagcccgagttcagcttcaacatccctcgagcaaagagagagctggggcagctgaacaagtgtacatccccacagcagaagctgctgtgcctgcggaaggtggtccagctcatggcacagtctcccagccagagagtgaattttggagaccatgtgtgctgacgaccttctctctgtcctgttgtatctgctcgtgaaaacagagatccccaactggatgggacgatccggatgaggccatcggcacggtggatcttgaattatgtcatcccttatgccagtgccccaagtgtgctccagcccagaagaaactggcaaaggttcctgctagtgggcttggtgtgaatgtgaccaaccaggacggctcctctcccctgcatatggctgccttgcatggccggacggacctcgtctccctcctgttgaagcatggtgcctactcgggtgccagaaacacaagccaagctgtgccgctccacctggcctgccagcagggacactttcaggtagtgaaatgtctcttagattccaatgcaaaacctgataaaaggacctcggcgggaacacgcccctcatttacgcctgttctggtggccaccatgaagttgctgcactattgctgcagcatggagcctccatcaacgcttccaacaacagaggcaacacggcctgcacgagcagtgataggg

SEQ ID NO: 6630 - DNA, 963 bp, Cricetulus griseus
agcggcgctacagcaagaagtcgagcgaagatggcagcccgaccccgggcaagcgcggcaagaagggcagtccgagcgcgcagtccttcgaggagctgcagagccagcgcatcctggccaacgtgcgcgagcgccagcgcacccagtcgctcaacgaggccttcgccgcgctgcgcaagatcatccccacgctcccctctgacaagctcagcaagatccagacgctcaagctggccgccaggtacatagacttcctgtaccaggttctgcagagcgacgagatggacaataagatgaccagctgcagctacgtggctcacgagcgtctcagctacgccttctccgtgtggcgcatggaaggagcgtggtccatgtccgcctcccactagcgccgcgccacccacctccggacccgctccgccagggcctgcctgcacatggacagcagacccaggttcacatccttcccagagatgccccatgggatgggcaccagcctgcctgcctgcctgcctgccagtgacttttgtgtcctcatcattggattatcctcctgggttttagtttgggggaatctttctggaaagctctagattcaagagtgcatttgtaaggatatattggatttgtatttccctctaagtgccttttaaatgtatatttttaaataaaactgacatgcattcttgtagaacctgtttaaactggaccaaggctcttagaacaagaacccaagacccctcccgccccagacctcccatggctgttccgaggaagcctggaattcttgctggcacactcctgctctttatttcttcatggcctgctcagctagccattcttttatattccctgttcagtgtatatgttgcttatttgttttatttattgagatattttaccagctaagtgactgccacacgctgtgtgtaatgccccacacccaggaacaataaagaggcc

SEQ ID NO: 6631 - DNA, 962 bp, Cricetulus griseus
ccaaagagctcttacagatggatctatacgcgctgcttggcattgaggagaaggcggcagacaaagaggtgaagaaggcatacaggcaaaaagcactttcctgccacccacgacaaaaaccaacgataacccaagagcagctgaactcttccaccagctttcccaggccttggcggtactgacagatgctgcagccagggccgcatatgacaaggtgaggagagccaagaagcaggcagcagagaggacccagagacttgatgagaaaaggaagaaagtgaagctggacctggaggcccgggagcggcaggcccaggcccaggggagtgagggaagaggatgagagccggagcaccacaacactagagcaggagattgcacgccttcgagaagagggttcccgtcagctggaggaacagcaaagactggtccaggagcagatccgccaggaccgcgagcagaggctgcgaggaagaacagaaaatattgaaggcaggggaacccccaaactaaagctcaagtggaagtgtaagaaggaagatgaatccctaggtggctactccagagatgtcctcctgaggcttttgcagaagtatggagaggttctcaacctggtgctttccagaaagaaggcaggcaacgccatagtggagtttgcaagtgtcagggccgcggagctggctgtcagaaatgaagtgggccgggtggacaaccctctgaagatttcctggttggagggacagccccagggcacagtggaccccagtgacacaggattatcaaagggctcagtgctgtcagaaagggactatgagagtcttgtcatgatgcgcatgcgccaggcagctgagcgccagcagctgattgcccagatgcagcaggaagatgaggggcaacccacgtagcccggtaacagctctcccaccccaccaccctttctcgatcatcaccaataacttttt

SEQ ID NO: 6632 - DNA, 962 bp, Cricetulus griseus
aaaagacactgctggtcccaacaccacgactcaggacagggctgtttaataagatcacaccacctcctggagccactaaagacatactgaggaaatgtgccacctcccagggtgtgcggaacttcagcatccctttgggcttggattccaatgttctcgtggatttaattgtggtggaatctgttgctgtgtctgagaaaggctggcgaattgggaagggagaaggctatgcggatctcgaatatgccatgatggtgtctatgggagctgtccatgaggggacaccagttgtcaccattgtccatgactgccaggttgttgacatccctgaggctcttctggaggaccacgatctcactgttgactacatcatcactcccaccagggtcattgctacaggctgtgtgcgcccaaagccaacagggatcatctggtccaaggtcagttgtgagatgcttacgaaaatcccagtactcaggaaccttcgtgagcgagaaaagcgggccgggaaggatgtcactcttcaagctgagactggcagccagcacctagctccaagcactatcaggagaccttgagatataccacagtcacaaacaggttccgtaggaggggcccatagccccctgcagggcgtggacacccacctagctgccactgtggctgtgggaaacctgccctacagtgctcgtgtgagtgagctgaagagagccctccaagagctgggggcagtgccccttaggctcacctggcaggagccacagcacagggccattctacactatgtagactcagctgctgcccggcaggctgcctctctccttcagggcctacacctgggtgccaacaccttgagggtggcactggggcatcagagggatatatgacctggtgagcagctctcaccagaagagctgtgtcctctccgttgatgggatgcctctggcatgtgacagtttgcc

SEQ ID NO: 6633 - DNA, 962 bp, Cricetulus griseus
ttttcagatcccaccacatgctccggcaccccgggatcgtgaacctcgaatgcatgttcgagaccccgaaaggtattcgtggtgatggagaaactgcacggggacatgttggagatgatcctctccagtgagaagggccggctttcccgagcgcctcaccaaattcctcatcacgcagatcctggtggccttgagacacctgcacttcaagaacatcgtccactgtgacttgaaaccggagaacgtgctgctggcatcagccgacccatttcctcaggtgaagctgtgtgacttcggctttgctcgcatcatcggtgagaagtccttccggcgctcggtggtgggcacacccgcctacctggcgcccgaggtgctgctcaaccagggttacaaccgctcgctggacatgtggtccgtgggtgtgatcatgtacgtcagcctcagtggcacgttccccttcaatgaggacgaggacatcaatgaccagatccagaacgcagcctttatgtacccagccagcccctggagccacatctcatctggagccatcgacctcatcaacaacctgttacaggtgaagatgcggaaacgctacagcgtggacaagtctctcagccacccctggttacaggagtaccagacgtggcttgacctccgagagctggaggggaagatgggtgagcgatatatcacgcacgagagtgacgatgcgcgctgggatcagtttgtgacagagcgccaggagacggctgcggcaggggacctgggtggcgcccttctgccgcaggaccacgagatgcagggactcgccgaacggatcagcatcctgtgaggccagagattccccgctctgagctgcttcctttggactcctgcgcactatccccgaagcgaactgttctgggggaagcagcttcctacacaaactggataaggctggagggatgactctgggggtaaag

SEQ ID NO: 6634 - DNA, 962 bp, Cricetulus griseus
aaaaggtcatactatccccagcatggggcatgagcagcttgaaattgctgaaatatgtcctgtttttctttaacttgctcttttgggtctgtggctgttgcattttgggctttggtatcttcttcctggtccaaaaaccaccttattggtagtactcttccgtaaccttcccttcctgacactgggcaatgttctcgtcattgtgggctccattattatggtagttgccttcttgggctgcatgggatcaatcaaggaaaataagtgcctgcttatgtcgttctttgttctgctgatgattattcttcttgctgaggtgaccttagccatcttgctctttgtgtatgaacaaaagctgaacacatatgtggcagaaggcctgaatgacagcattcaacattatcactcagacaacagcaccatggcagcatgggacttcatccagtcacatctgcagtgttgtggtgtgaacagctcaagtgattggaccagtggtccaccatcttcctgcccaccaggtgcagatgttcagggttgttataacaaagcaaaattgtggtttcattccaactttttgtatattggaatcattaccatctgtgtatgtgtgatacaggtgctggggatgtcctttgcactgacactcaactgccagattgacaaaaccagtcaggccttagggctgtgacttgcaactgccctgagcttaaaagacttttttctctctggaaatccaaaacacccatagcatgaggccctaaacaattacctgcctgcctggcattttggctttctcttacctcttccttcatcggcccctgttatacatccaaggaagagaatatttgccatgaacttcccatctcaagcagaagaaaatcattcaccaactgatagcagtagccatatcccttaaagatggtagaaacatacatgggttaagaaaaaaaagttaattaatc

SEQ ID NO: 6635 - DNA, 961 bp, Cricetulus griseus
gaacaagatgctggagaccaagtgggcactgctgcaggagcagaagtccaccaagggcaaccggcttccccggatctttgaggcccagattgcagggctgcgacagcagcttgaggcactgcagctggacggggccgcctggaggtggaactgcgaagcgtgcaggacgtggtggaagatttcaagaataagtatgaagaggaaatcaacaggcgcacagctgcggagaatgagtttgtgttgctgaagaaggatgtggatgccgcctacatgaacaaggtggagttggaggccaaggtggatagtctgaatgatgagatcagctttctcaagacccttaatgagacggagttagcagagctgcagtcccagatctcagacacatccgtggtactgtccatggacaacagccgctccctggatttggatggtatcattgccgatgtcaaggcccagtatgaggagatggctagccatagccgggctgaggctgaagcctggtaccagaccaagtttgagaccctccaagcacaggctgggaagcatggagatgacctgcgcaacacccggaatgagattgcggagatgaaccgaaatatccagaggctgcaggccgagattgacaacatgaagaaccagcgtgccaagttggaggccagcattgctgaggccgaggagcgtggggagctagcactcaaggatgctcatgccaaacaggaagagctggaggttgctctgcagcaggccaaacaggatatggcgcggcagctggcgtagagtgccaggagctcatgaatgtcaagctggcactggacattgagatcgccacctaccgcaagctgctgaggcgaggagagtaggttgtctggagatggaatgggccctgtgaacatctctgtagtgaattccactggagcagtggcagcaggctcatcttcggggaaccagtggcagcaatgct

SEQ ID NO: 6636 - DNA, 961 bp, Cricetulus griseus
gtgccagccagcgagggctctttggtatatactatgacatggaccctcagcagagtgtgctgatgtccgtgatcacaggggaggcagttgcatccctcaggaccatggatgacaagcaggtgttgcagcagtgcatgagcgttcttcgggagctattcaaggagcaggaaatcccagatcccaccaagtattttgtcacacggtggagcacagagccatggatccagatggcatatagtttcgtcaaaacatttggaagtggtgaggcctatgacatcattgctgaagaaatacaaagaactatcttttttgctggtgaggcaacaaacaggcatttcccacaaactgttacaggggcatatttgagtggtgttcgagaagcaagcaagattgcagccttttaaaaagaacgtctggacctagctttcttctgtgtcccaaatggaaaaagtttgaaacacaaagttaagttctataagagagaggggactctgtatagtaaaattgaaatgtttctgtggtgataggaaaatgtaaacacatttcattcttctgaaatcactgaccctcaaaatccttctaggcacttatgctttatttctgcttttaaaagggagctacaaaggactttaaagccactttttgaaatatcaggtatttctgaaattcaaaattagcttgttaacaaaagagcttatataaagaatgtacagtgaagtgagctctagacagtgtagacaccttccctgtcaaagtctgatacaagccagtaactacgtatttaaagttaattattcactgtgcttagaggttatttgttgagactcattggtactgataagagaagtattctgctttaaagtgtaagtaattaaaatgtttagtgtgtgtgaagtgataaatgacaaaatgttaaaaatttcagtccttaagttatttagtttctaggcacttgagtctt

SEQ ID NO: 6637 - DNA, 961 bp, Cricetulus griseus
ttctcatcagcgtggccagcacaccctttgttgtgctgcagttcaccactgggaggtggaccctcggcagcgccatgtgtaaggtggctcgctacttccagtacctcactccaggcgtccagatgtacgtgctgctctccatctgcatagaccgcttctacaccgtcgtctatcccctgagcttcaaggtgtccagagagaaggccaagaagatgatcgccgcctcctggatcttacacgcagccttcctgactcctgtcttctttttctatggctccaactgggacagccattgtaactacttcctccctccctcctgggagggaactgcctacacggtcatccacttcttggtgggctttgtcattccctccgtcctcataatcttattttaccagaaggtcataaagtatatctggagaataggcactgatgggcggaccctgaggaggacgatgaacattgtccccaggacaaaggtgaaaacggtcaagatgtttctcctcctgaatgtggtgtttctgttctcctggctgcctttccacgtggctcagctctggcacccgcatgagcaagactacaagaagagctcccttgtcttcacagcggtcacgtgggtatcctttagctcttcagcctcgaaacccactctctactccatttataatgccaattttcggagagggatgaaagagactttctgcatgtcctcgatgaagtgttaccgcagcaatgcctacaccatcacaaccagttcaaggatggccaaaagaaactatgttggcatttcggaaatccctcccatgagcaggacgataaccaaagactccatctatgactcatttgaccgagaggccagggaaaagaagcttgcctggcccatcaattcaaacccaccaaacacttttgtctgatttctaagaattccttcactgttatgtgccagagattaaaaggcttt

SEQ ID NO: 6638 - DNA, 961 bp, Cricetulus griseus
ggatggcgactgcgatggctgcgagcgccgcggagcgggcagtgctggaggaagagttccgctggttgctgaacgctgaggtgcacgccgtgctaagacagctgcaggacatcctcaaggaggcctctctccgcttcactctcccaggacccagcacagagggacctaccaaacaggagaacttcatcctaggcagctgtggcacagaccaggtgaagggtgtgctgactctgcaaggggatgccctcagccaggcggatgtgaacttgaagatgcctcggaacaaccaactgttacacttcgccttccgggaggacaagcaatggaaactacaacagatccaggatgccaggaaccacgtgagccaagctatttacctcctggcaaaccgggatgagagctaccagttcaagacaggagcagaggtcctcaagctcatggatgctgtgatgctgcaattgaccagagccagaaaccggctcactaccccagccaccctcaccctacctgagattgctgccagtggcctcacgcggatgtttgcacctaccctaccctctgacctgctggtcaatgtctacatcaacctcaacaagctgtgcctcaccgtgtaccagctgcacgctctgcagcccacctccaccaagaacttccgcccctctggaggtgcagtgctccacagccctggggccatgtttgagtggggctcacagcgcctagaggtgagccatgtacacaaggtagaatgcgtgatcccctggctcaatgacgccctggtgtacttcactgtctccctgcagctctgccagcagctcaaggataagatctctgtgttttccagctactggagctcccgacccttctgagcaagcacctgctagactactactcccaggatggtagccctgccttaggcccctctccccagcacataccccttgtagtgcctgtcactgtcact

SEQ ID NO: 6639 - DNA, 960 bp, Cricetulus griseus
tttgacatgtaccagcagtatgctgcatttagaagatggcattttgaaacactggaatatttcccaagtgaactaggtggcctgaggcatgcctcagctagcattggaggtccagaagcatataaactcatgaaatttgaaggaggtgtacatagagtacagagagtgccgaagacagagaagcaaggccgtatccacactagcaccatgacagtggcagttctgccgcagcccactgagattaaactggtgattaatcctaaagatttgagaattgatactaagagagcaagtggagctggagggcagcatgtaaataccacagacagtgctgttcggattgttcatcttcctacaggtgttgtttctgaatgccagcaagagagatctcagctgaagaatagggagctggctatgaaaaagttacgtgcaaggctatacagcatgcatctagaagaagaaactaaccaaaagatacaacgctagaaagatccaggttggaactaaaggaagatcagagaaaataaggacatacaactttccacagaacagggtcacagaccacagaataaacaagtcactacatgaccttgagaacttcatgcaaggagactgtctactggatgacatgatacagtcactgaaggactatgcggattatgagtctctagtggaaatggtttccagaaaagactaagtgctgcataaagctctttctacatagactaggaaaatcctcaagcaaatccattgcgtgcacagacttaactggtattgtcttgagaaataggagttaacagtttcttggactcttctttataaaaaaaaaattagacacaaaggaagacaattgttcttacgcgaaatatttagtaagtgatcaaaaatttcaaatactaagcagaaatatctatgttaatgtgctataaagaaacagcatctgacagtggaattaacaag

SEQ ID NO: 6640 - DNA, 960 bp, Cricetulus griseus
cccagaacagccgattctacgccatctctgcgagcttcaagccatcagcaataaagggaagactctggtgatccagtacacagtgaagcacgaacagaagatggactgtggtggtggctacatcaaaggtgttcccctctgacctggatcaaaagaatatgaacggaaagtctcagtactacatcatgtttggacctgatatttgtggatttgatatcaagaaagttcatgttatcttatatttcaaaaaccagtatcattcaaataagaagacaatcagatgcaaggtcgatggcttcacccacctctacaccctgattttaaggccagatctttcttacgaggtgaaaattgacggccagtccattgaatctggcagcattgagtatgactggaacctgatgtcactgaagaaaatggaaaagacatcagctgagtctagggactgggatcaggtggaaagtgacaaagcccaggattgggaaaagcactttttggatgcaggcgccagcaagccaagcgattggaacagtgagctggatggggactggctgcagaagccaccataccaggatggcctgaaggctgagggcatagataaagatgtgtggctccaccgggagatgaagcctgccaactatctgactcagtacgacctctcagagttcgagaacattggtgccgtcggtctggagctgtggcaggtgagatctggaaccatctttgataacttcctgatcacagatgatgaagaatatgcagagcggtttggcaaggccacctggggggagactaagggtccagaaaaggagatggatgccatacaagccaaggaagaagtgaaaaagcccgagaggaggatgaggagctgctggtagggaagtttcacagtcacagcagccatttcagcagattccacaggcaaggtgaactatagtcgcccccactgtgcacgcagag

SEQ ID NO: 6641 - DNA, 960 bp, Cricetulus griseus
actctctccccaactgtagtctcctttgggacagtggccacacctgctgataggctggccttgatggggggcctggaggggttcctgggcaagatggcagaacatggtctccagccggacatcaaaaccctcactctgctggctgaggtggtggaacctgggagcccctcggagtcctcactgctgaccatcttggacaagtatgaggtagaggccgatgtgaccttcttcaacacgctgattaggaagaagagcaaggtgggagacctgggagggagcaaaggcactgttgccagtactggcaaagaagggaattgttcccaatctgcggactttctgcaacctggccattgggtgccataggcccagagatggtatgcaactgcttgcagacctgaagaaatcccagatggtccctaacacccacatctacagcactctcatcaatgcggccctcaagaagctggactatgcctatctcattgagatcctgaaggacatgaagcaaaacagtgtcccagtgaatgaagtaatcatccgccagctagagtttgctgctgagtaccctcccacctttgaccggtacaaagagaaaaacacctacttggagaagatcgatggctttcgagcttattacaagcagtggctaaaaatgatgccagcagaggaagccccccaaccctggcaggaattccagacgaagcctaaggggaaccaagacaacactgtcacctgtagagcccatgctccctctgggtctcttctctaggcaccactctgagaagagctccttcaggaggagggtagcccaataaggcaggagccaacgaggtccaaagtccagaatgtagagaggggtgtcagccagagcaaccccggcagccacaatgcgtgcactcaatgatgcgaccctgtaacagaggatggggacatttgcatacactgctacagccctgcaca

SEQ ID NO: 6642 - DNA, 960 bp, Cricetulus griseus
cagcttcacctggctttgcagccaggctcacaccagcatggtgctgcagctgaggggccacattgtggaagactttgaccgggagttccgatgtctgtatgccgagtcacagcctgtggaaggcttctgtggcaatgaggacccactgtcttcccgggtacctcgtcctcctcctgtgaccctggcctttggacctggaattccaagtgctacgggctcttcaccctccagtaacagcctcggcagtatcaagcattcaccttttctggggctgcagtgacatggtgatggggtccttgtccccaggtcctgcccaccatgaagctggtagcccaccatccctgtaccgtcagctttcagatcctaaccatagctcaactcctggaccctacagggccaacctgagcaagctgggggcatctccatggtcccagtcctctcctgcccttaaccactgtagtgccagtcccttgaccctggcagtggggtcacctctgctcccatgttcccgcccccttctccacttcactaggggagtcccagcattgtcccggcttccagagaatgggctcccagccaagtcaagagcccatccttccacgaggtcgctgggtacctgggccaattcttcagccaggcctgacaagccaagtctagatgaacgacggcagactctaggccacagtcagctggacctcatcaccaaatttggccattccggagtgaggggcctggacccaatggtctcccagaaccaaacccagttcgcatggccggagtagggtctgcagatgagaagcggctgactctgggccacagcaaactggacctcatcaccaagtatcatcaactacagggtgccaggcagagacctgagccaggcctcccgggagcctcccataagtggccatcaaaatagtaatagcaatgacctatttgcacctgagaaacgctgacctt

SEQ ID NO: 6643 - DNA, 960 bp, Cricetulus griseus
  modified_base (505)..(505): a, c, t, g, unknown or other
  modified_base (650)..(650): a, c, t, g, unknown or other
gggaatcccacagtcactgaaaccaggctgcacttgctgtcatcagtcaccgcagagctgccagaggacaaaccaaggctcatctgcggtgtaagccggccagatgaagtgctcgagtgtgttgaaagaggagtggactagtttgagagttttttcccatatcaagtgacggagcggggctgtgccctgtctttcacctttgattgccagctgaatcctgaagagacattattgcaacaaaatggaatccaagaagaaataaaatgcttggatcaagtaaagaaaattgaaacaactgggtgcaaccaagaaatgacatcatttgaaattaatctgaaggagaaaaagtatcaggaagattttagaccactcgtgaatgggtgctcctgttactgctgtaagaatcacactcgagcatacatccaccatctgctcgtgaccaatgagctcctggctggtgtcctgctgatgatgcacaacttcgaacactacttcagatttttcngctccgtccgggaggcactgaaaagtgacacgctggcacagctgaaagaactcatccacagacaaatgtcttgagaactggaaaatacaaacctgtcttgtttaccaaaaacggttaaagactagagatctgagctctttttttntttttgtgtgtctgtctgtttttgaagtgttttggttgatttggcatctgcaggtcctgaggctggttgtccttcctgggttctctgtgattctgtatttttgttggtggtatgacaggggttttttctaagaatccatataaatttatgagttttatttatgtccaaaacactgaaaattctcttaaacattgttcaggtccctaggtctttttcttattagcacatttgaaaaaatcttttatgttttaaatgtgtataaagggcaatagccaataaacatttttaattaaaaaaacaaacaaaaaaa

SEQ ID NO: 6644 - DNA, 960 bp, Cricetulus griseus
  modified_base (15)..(15): a, c, t, g, unknown or other
ttaattaactttttntttttattttatatatcatcgtgtattgtgtgtgcgatcacggcgcaaagacgtggcagtagtgcagcgcaaagagaaagagctcacacactctcgtcggggagtctatgagcagtgtcactaagatcagtggcctctttggggacacccagtccaaagaccccaaagacctgaggccatcctcactccactcatgcacaacggcaagctggccacgcctagcaacacggccaaaatgctcatcaaggctgatcagcatcacctagacctcaccgccctgcccaccccagaatccactccgacactgcagcagaagcggaagcccaaccgcggcagccgcgagtgggagaggaaccagaacctcatcaatgcctgcaccaaggacatgccccctatgggctcccctgtgattcccacggacctgccccttcgggcttccccaagccacatccccagcgtggtggtcctgcccatcacgcaggcccaatgatgcctgtacataatctctggggttggggcccaggagtcgaagcatcagacgaggtgaggcacccatccagttcagcaaggtctccactgcctcaaggatccacccgaccaagatggccctggaggagttgaggatgctgggtcctcctccctgggacacagggacactgaaaatcaggccatgtggtttggtgaaggtttagcaacagtcacctccattctcttccttcacactcccccacatcgtacagcaggtcggactcacaaaagacttgagtatcataacaaacatgagccaaaagcacattcgtaccctgtccccacattaacacacacccacacctaacgctcacaatgcgtgcaccacacacacacacacacacacacacacacaccataccacaccacaccataccacaccacaccacacacaccacacaccacccacaccacaca

SEQ ID NO: 6645 - DNA, 960 bp, Cricetulus griseus
ctgcttctttgcggaagttcacagcacacaggcggctttgttggctgtagcattcctggctggtacctgtgggtctcactgaagaatggcatcaccccttatcttcgctgtgctgcattgtttttccactacttacttggggtcaccccacagaactgtttgccaactctgctgaaggagagtacagtgcactctgtagctatctgtctttacccacaaatttattcatgcttttccaggaatattgggataccataaggcccttactgcagaggtggtgtgcagatcctgccttactcgacgttttgaagcagaaaagtgctgtggtcaggtaccctagaaaaagaaacagtttgatcgagcttcccgatgactacagctgtcttctaaaccaaatagcccagttcatcactgagttttgcttgttgagagtgaagtttctgcaatggaagtgaacatatgccacagtactgccccaacccaagagatttctagtgatattatcatgacaaatgatttaagtctgcttatgaagtttatataagtaaccaagtcactttatttagtgtatgtgaaaggaaggattggttcagtaggatggctccaactctatgtgtttctaatattggtgaggggtttggcaaggattttaatgatgcagcaaagagaaaaacatatctgtataattaatttattatgttagtgtatgtatgggctgtgagttcacttttagtggtcatgtgtcatttcataacaactatgcattttggttcactgtgatgatgatctatatttagtgactgcaacatgtttataccactgattcaaattccattcatgatgaagttatacaaatgatgcatatactgatatcttttattgcaaagatgtaaattaaaacttgtataatgttcttgtgctttttgaaataaaatatcttacatgtgtataatttaaaaa

SEQ ID NO: 6646 - DNA, 960 bp, Cricetulus griseus
gagggagacggccgcagcatggcggccggcggtgccccgtcctgccctccgccttcctgttgcagctgccaggaccccgtggtctccgagtgctcgctgtgagcccgccgcgcgtcagccccgcgccgcgcccacccgccggggccctgggaccatggaggacgtgaagctggagtttccttcgctcccacagtgcaaagactacgccgaggagtggacttatcctatgagacgggagatgcaggaagttttgcctggattgttcttaggcccatactcttctgctatgaaaagcaagctacctatattacagaaacatgggataactcatataatttgcatacggcaaaatattgaagcaaaacttcattaaaccaaactttcagcaattgtttagatacttagttttggatattgcagataatccagttgaaaacataatacgctttttccctatgactaaagagtttattgatggaagcttacaaaatggaggaaaagttcttgtccatgggaatgcaggcatctccagaagtgctgccttcgttattgcatacatcatggaaacatttgggatgaagtacagagatgcgtttgcttatgtccaagaaaggagattttgtattaatcctaatgctggttttgtccaccagcttcaggaatatgaagccatctacttagcaaaattaacaatacagatgatgtcaccactccagatagaaagatccttaactgttcattctggtaccacaggtagtttgaagagaacacatgaagaagaggatgattttggaaacatgcaagtggcaactgcacagaatggctgacctctgagaactgttacatggatatgaatttctatttgaaaaggagaaaatcgtagtaataatgtaaagtagggaaaaacacaaatagtttcttttcaattatatgttgcttccagacatgtttctctgcaac

SEQ ID NO: 6647 - DNA, 960 bp, Cricetulus griseus
gaggtgaatgataaaagatacttacgatgcccagcagcaatgactgtgatgcacttgaggaagtttctcaaggagtaaaatggacatacctaatactttcagattgatgtcatgtatgaagaggaacctttaaaggattactatacactaatggacattgcctacatttatacctggagaagaaatggcccacttcctttgaaatacagagttcggccaacttgtaaaagaatgaagatcagtcaccagagagatggactgacaaatgctggagaactggaaagtgactctgggagtgacaaggccaacagcccagcaggaggtgttcccaccacctcttcttgtctgcccagccccagtactccagtgcagtctcctcacccacagttccctcacatcctccagtactatgaatggaaccagcagcagccccagtggtaaccaccaatcttcctttgccagtagacctcgaaaatcatcaataacttttgtaagaatcagatggcattatgcttgttgtacaatgccatattggtatatgacaaacaggaaaacaggctgaaggaaagcattttatctacaattattttagtatatgtggcgtaataataatttcaaatttaagagttgttttcatagttaaaggtatctgccttttctgtaatgtcaggaaacagaagcaatttattatgagtttctacaggtatttttaaacagagcaaacatgttgactttcaaatatgaatgaccccaccagttctgctttgctctggtcgaacttagtgtgtgttcatcatctatcgtttgtgaggatgtttactctatatgaatattgtttcattgtttgtatgggaaattgtagctaagcatttcatttgtctccagtctgggaaagaagcacaattctatttctttgtcttgcttatagccattaaatcatttacttttacatatattgct

SEQ ID NO: 6648 - DNA, 959 bp, Cricetulus griseus
gggcttgtgctcgccggggaggccttactcccgcaccgccctctacgagctgctgggcgtcccctccacggccacgcaggcacagatcaaagcggcgtactaccggcagagcttccgctaccatcccgatcgcaaccccgggagcaccgaggccgccgagcgcttcacgcgcatctccgaagcttatctggtcctgggcagcaccgtcctccgtcgcaagtatgaccgaggtctgctcaccgaccaggacctacgcgggcccggggtcaggccctctaggctttcgggcctctcccggcgaccgtcgcactatgttcgactttgacgccttctaccaggcgcactacggagagcagctagagagagagcggcgtctgcgcgcccggagagaggcccttcgcaaacagaaggagagccgggccaacaaggggctccgatgggacgacacccgagatgccactttctttgtcctccttttcctcatcttcgtcttcgtcggctttcgtatttgatcggagaaaaggagggaaggagaacaagccaagaaacttgccattttggacctttgaactattggtcgtgggttggattgactacctctagtggtgttctcttgactctcctggcaccttcccagcctggccgctcatcgacataaccttctcctatggtccagaaaaaaagaagctctttcctggccaagaaagaggccccagggtaaagatacccggaaaccagcaatttatgtgctggtttccagagacccctgggtgcctgcttgtttctacaagttgccttccagatgtcaactccctgaacaattgctctggttttatccagaagccctgagcaagttttgtcttgtcccctgccacatgtttataacatcgggcagcacttcctctgtaacttttgaaccctcaagtgtcactggttgtctgctgccaaagagattaatt

SEQ ID NO: 6649 - DNA, 959 bp, Cricetulus griseus
  modified_base (626)..(626): a, c, t, g, unknown or other
  modified_base (638)..(638): a, c, t, g, unknown or other
ctgaccgcaggagcagaagccttcctgctgcggctctacaggaaaacctttgagaaggacagcaaagccgaagaagtgtgggtgaatcttagaaagggggacggtccaaagagaaccatgaaatctgacaaaagacccaaagacaccaaaaacaaagagcgtgcctctaccaaaaagggggctcctaaaaggaagaagcgagagctaactctgacgcaagtgatggggactgctgaggagccaccagaggaaggggctgcagaggaagaccagcagagacaagccaccagtagtccagaaggctgcgggggagagattcagcatgaagcttttgatttaaatttgtcatctgactcggcctatggcatcctgaaagacgcccctgaccatcatccatccgcttgtggggtgcagcgacccctatgccttgacgcgggtactgcatgaggtggagcccagatacgtggttctgtatgatgcagagctcacctttgtacggcagctggagatctacagggccagcaggccgtggtggcacatgcctttaatcccaggctactttggggaggcacgagggacaggtggatccctctgagtttgaggctaacctggtctatagagaaaanaaaagaaaaaanaaaaaaaaggaaaagctttgtcctttggaaataccaatttgttgaaaacaacaaatgtgtgtgtctggggcatccaaacaaagagtcatctcctgtatttttattccttttaactcacaagttgtaaaaggcaaattgccttttgatagcaatggaatgtatgatttcttaagccagtttaattatagtttgaattggatcaccacagtggtgtcctggccactgcctctgctttgagtgttcatgcacagccttttctagtggatgggagactggctatgtgttgattgttgttttaccctcagaataaagactggcaaa

SEQ ID NO: 6650 - DNA, 959 bp, Cricetulus griseus
cggggaagatggctgaggacttcggcttcttctcgtcgtcggagagcggggcccccgaggccgccgaggaggacccggccgccgccttcctggcccagcaggagagcgagattgctggcatcgagaatgacccgggcttcggggcacctgccggcggcggccaggtggcctctgcgcagccgggactcgcgagcggggctggctctgaggacatggggactacagtcaacggagatgtgtttcaggaggctaatgggcctgctgatggctatgcagcaattgcccaggctgacaggctgactcaggagcctgagagcatccggaagtggagagaggaacagaaaaaaaggctgcaggagctggatgctgcctctaaggtgactgaacaggaatggcgggagaaagccaaaaaggacctggaggagtggaaccagcgccaaagcgaacaagttgagaagaacaagatcaacaatagggcatctgaagaggcttttgtgaaggaatccaaggaggagaccccaggcacagagtgggagaaggtagcccagctgtgtgacttcaaccccaagagcagcaagcagtgcaaagacgtgtcccgcctgcgctcggtgctcatgtcactgaagcagacaccgctgtcccgctaggtgcctgccctaagaatggccacaaagcatgggtcttgctgaggcagaggagtggctgcttcagccagggtggaacttcctccggcagctgccacacacagcctgttctgttcctctgcatctctgggagctgggaagtgggaccctaacccctttcaacccccactccctcctggccccatgtcccagccctcacgactcctctcagtccactcaattgtgactgtccctcctgatgtattttttcttggcttaaagggtgtgttaactctttttacacttatttattattatcctcatttctctggaagc

SEQ ID NO: 6651 - DNA, 958 bp, Cricetulus griseus
  modified_base (869)..(869): a, c, t, g, unknown or other
ctcggcgtctgtcaactggcgaggccccggggcagccgtgggcactgtggtgcccggggattcctgggctccgaggtaataggaaacacaagacctttcaagagaggccttttgttctcagccttgtcttatttgagttttgaaacctatcaagtcatttctcaggctgccgtggttcatgccacagccaaaagttgaagaagtacttgagcaagcagactacctatatgaaagtggagaaacagagaagctttatcagttgctcatacaatacaaggaaagtgaaagatagcagagttactgtggcggttggcacgagcatcacgtgacatagcacagcttagtaggacttcagaagaagaaaaaaaagtttaggtagtatagaagccctagattatagacaaaaagagcactagagaaaaatgaatcaagttttgctgctcataagtggtatgcaatctgcattagtgatgtttggagacctatgaaggcatcaaggttaagattgcaaatgcctacattatcaaggaacattttgagaaagcaattgaactgaaccctaaagatgctacttcaattcaccttatgggtatttggtgctatacatttgctgaaatgccttggtaatcaaagaagaattgctaaagtgctgtttgcaaatcctcctagttccacctatgaggacggccttgaaatactttcacagggcagaacaagtggatccaaacttcctacgagcaaaaacttggctgctgttaggaaagacatacttgaagctaaaacaacaaaaagcttgctgctttctggctggtaaaagccaaagggttatccagcacacacagaagaagataaacagatacagacagaanctgctcagttgcttacaggtttgtgacagaactgagaactttatggagaaggcaacaatgtacctaacactttacatttcattgattta

SEQ ID NO: 6652 - DNA, 958 bp, Cricetulus griseus
ggtgcgggtcaggccggcctctcgggcccgcgtgttccctgcccgacgccccgacgcctcggcggggccttcggcgcggccatggtggtgctgcacgtgaagagaggcgacgagagccagttcctgctgcaagcgcccgggagcacggagctggaggagctcacggctcgggtgacccgcgtctacaacgggcggctgaaggtgcatcggctctgcacagagatggaagatctggcggcacacggtgtgttcctccctccgaatatgcaagggctgactgacgagcagattcaagagctgaaactgaaggatgagtggggagagaagtgtgtacccagtgggggctcagtcttcaagaaggacgacattggacggaggaatgggcaagctccaaatgagaaaatgcagcaggttttgaagaagacggtagaagaagccaaagcgatagtgtctaagaaacaagtggaagctggagtctttgttaccatggagatggtgaaagatgccctggaccagcttcgaggcgcagtgatgattgtttaccccatggggctgccaccgtatgaccccatccgcatggaatttgaaaataaagaggatctgtcaggaactcaggcagcactggaagtcattcaggagtcagaggcacagctgtggtgggctgccaaggagctgagaagaacgaagaagctttccgactacgtggggaaaaatgagaaaaccaaaatcatcgtcaagatccagcagagggggcagggtgccccggcccgggagcccatcatgagcagcgaggagcacaagcagctcatgctgttctaccataggagacaggaggagctcaagaaactggaagaaaatgacgatgactcctgcttaaactccccatgggccgataacactgcgttgaaaagacattttcatggggtaaaagacatcaagtggcgacccagatgaggcc

SEQ ID NO: 6653 - DNA, 958 bp, Cricetulus griseus
ccctggcagtgacttttctccaggggacagctacgcctcagatgcagcatcgggcctcagtgacatgggagaaggggggacaaaatgaggacaacgccagcaaaagaatcttcgacggagaccccgatcccggcttcgggtcactagtgtctcagaccagaacgaacagagttgtagagtgccagctacagaccctccaggtcctctgtctagcacaccccttcctcttgcttcttgcggccaggagagcctttcaccccaaaaggctgagacagagtgtgaggtttcccaaaattctgttcagccactactgggtgaagctagactggcacctatctctgaagagggaaagccccagcttgttgggcgtttccaagtgacttcatccaaggaaccagcagagccacccctgcaatcagcacccccaactctctctagttccctaaagcttccaacccctcccctgacctcagagagctcagacacagagaacagtgctgcaggaggaccagagcccagggaggctctggcagagagtgaccgcgcagcagagggcctaggggttgcgattgaagaggaggggcacgacggagtccgcattgggggaagttccccactcttgagtcatcccagcccagtgtggatgaactattcctacagcagcctgtgtctgagcagtgaggagtcagagagcagcggggaggatgaggagttctgggctgagctgcagaatcttcggcagaagcacttatcggaagtggaggcactacagacccttcagaaaaaagaaattgaggacttgtacagccggcttgggaagcagcccccacctggtatcgtagccccagctgccatgttgtcctgccgccagcgccgcctgtccaagggcagcttccccacttcccggcgcaacagcctgcagcgctctgatctccctggccctggcatcatgcgaagg

SEQ ID NO: 6654 - DNA, 957 bp, Cricetulus griseus
cagtgaaagccgcctgaagcaactcaacctcaaccatgagtggacacctgagaagctgaggcagaagctgcagcgcaacgcacgtggccggctggagctggccctttgcatgctccctggactgcctgacactgtctttgagctcagtgaagtggaagcactcagactcgaggccatctgtgacatctggggctctgcaggaactggaccttcgaaggacaaccaccttaggtctattgaggaaatcctcagctttcagcactgtcggaagcttgtcactctcaggctgtggcacaaccagatagcctatgtccctgagcacgtgaggaagctccgaggcctggagcagctctacctcagtcacaaccagcttggccagtgctttggcctccgcctgctggatgtgtcccacaatgggcttcgatccctgccacctgagttgggccttctccagagcctccagcatctagctctctcctacaatgcactagagagcctgcccgacgaattgtcttctgccagaagctgcggacattggctcttgggatacaaccacctaactcagctttcaccccatgtggctgccctccggaaggccagacatgttggttttgtgcagttcagacaagatcctgggactggtttgtctggggagaaacaggaggtggtggatttggggtgtaaccccacagggaaggattaactcagtcttagattcttggaccaaaaccacacctgtgtctttggctggctggcttgtccttcctctgaacattccagctaaattagtgtcccatacaagagtggggcatgatagcacacacctttaattccaacgctcagaaggcagaggcaggtggatccctatgagtttgaggataacctgccctacaaagagagttccaggacagccagggctacacagagaaaccctgtctacaaaaaaaaaaaaaaaaa

SEQ ID NO: 6655 - DNA, 957 bp, Cricetulus griseus
cggcggcgcggagatgtggcccttggtggcggcgctgttgctgggctcctgctgctgcggttcagctcaactactgtttagtaacgtcaaatctgtagaattcactaagtgcaatgaaactgtcgtcatcccttgtatcgtcctcaatgtggaggcacaaagcactgaagaaatgtatgtgaaatggaagttaaacaaaacatatattttcatctacgatggaagtaaaaacaattctactgtagagaacaaactttaccagtgcaaaaaatactcagtctcagacttaatgaagggtgatgcctctttgaaaatggaaaggcaacaagctgtcttgggaaactacacatgtgaagttacagagttatccagagaaggcaaaacagttatagagctgaaataccgtatggctttcacgagaaggagaaaggaggttgcaaatttagcttcctggttttctccaaatgaaaagatccttattgttattttcccgattttggctatactcctcttctggggaaagttcggtattttaactcttaaatataaatccactcgaacgaataagagaatcattctgctgctggtcgccgggctggtgctcactgtcattgttgttgttggagccattcttctcatcccaggagaaaaccctgtaaagagtgcttctggacttggcctcattgtcatctctataggaacactaatactacttcagtacaatgtgtttatgactgctttcgggatgacctctttcaccattgccatattgatcactcaagtgctgggctatgtccttgctttggttggactgtgtctctgcatcatggcttgtgaaccagtgcacggcccccttttgatttcaggtttgggtatcatagctctagcagaattacttggactagtttatatgaaatttgtcgcttccaaccagaggactatacaacctcctaggaa

SEQ ID NO: 6656 - DNA, 957 bp, Cricetulus griseus
cctggtgtgtgtgctacggggtgcagtgtgtgcttgaaatagtgggaacgccatgtcccgtggttccagcgccggttttgaccgccacattactattttctctccagagggccgactctaccaagtagaatatgcttttaaggctattaaccaaggaggactcacatctgtggccgtcagaggaaaagattgtgcagtaattgtcacacagaagaaagtacctgacaaattattggattctagcaccgtgactcacttgttcaaaataactgaaaacattggctgtgtgatgactgggatgacagctgacagcagatcccaggtacagagggcacgctatgaggcagctaattggaaatacaaatacggctatgagattcctgtggacatgctgtgtaaaagaattgctgatatttctcaagtctacacgcagaatgctgaaatgaggccgcttggttgttgtatgattttaattggtatagacgaagaacaaggccctcaagtgtacaagtgtgatcctgcaggctactactgtggctttaaagccaccgcagcaggagttaaacagacagaatcaaccagcttccttgaaaaaaaagtgaagaagaaatttgattggacatttgaacaaacagtggaaactgcaattacatgcctgtctactgttctgtcgattgatttcaaaccctcagaaatcgaagttggcgtagttacagttgaaaatcctaaattcagaattctctcagaagcagagatcgatgcccaccttgttgctctagcagagagagactgaacgttgccattagtctaccaaatccatgatgccacttgcctgggtgtttggtaacagcaaaccaacatcatagaggcctctgggttgaagatggaacctctcccactcctcctgcctctgaattggttaggactctgtataaataaaacagtgcttttaggaaa

SEQ ID NO: 6657 - DNA, 957 bp, Cricetulus griseus
gatggaacctgggtgttgcctcggaccccagcccccgccactcagccgcctcccgtccctgcagtgaatcttggttccctggggacccagcccgatggagctccaccgtggggcagtgtggtccagcctcctcccccacaggcctacgtggagagggcccctcctcttgcagggccctccccccacatctgggcccccagccctcacgggttcctctgggccccacaggccaatccatgggtatctctcgggatggttcctaccacactgctagccccaccgtggctcccctggccgccttcccggcacctgctacctcctctccagctgccccagcccccatctctactccccaggtcaccatctcagtgcccccggcctccactccatcctccgtgggcctcccaccccccaatcacctgaattcaagacgtctgagcctaaggcgggagctggtgacgcctggaccactgctccgcctgcctcaggccaggctccctctgaggacttgctagcccaggcctcacgacttctgcaggctgctgaagactcggatggcagcgagtttcaggaagaccctgtgttgcaggtgctaagagctcagagggcagagctcaggcagcagaaaaggaaagtggatgcccagttatctctcctcttgaaccacactgaagacccaggatcttcctctcctccagccagctcacctcccgggtccccaagaatgcggctgaggagggaaggggcctcctttgaggccaggcaactttgaattataaaattctgtttttcctggtctggggagaattaaaaaaaaaaaaaaaaaaaaaaaaaaaaaaaaaaaaaaaaaaaaaaaaaaaaaaaaaaaaaaaaaaaaaaaaaaaaaaaaaaaaaaaaaaaaaaaaaaaaaaaaaaaaaaaaaaaaaaaaaaaaaaaaaaaaaaaaaaaaaaaaaaaa

SEQ ID NO: 6658 - DNA, 956 bp, Cricetulus griseus
gaggtccctgccggctggcgagccagcgaggtgcgggggagagggcgagcgttagggacggcaagggcgacggtccatgggcacgatcgggagtccaactttcagaagagagactccccagcaagcccgcttggagggtccccccggctgctcacctcatgggccagacggcccttgcaaggggcagcagcagcacccccacctcgcaggctctgtaccctgacttctctcctcccgagggcctggaggagctcctgtctgctccccctcctgacctaggggcccagcgacaccacggctggaaccccaaggattgctccgagaacatcgacgtcaaggaaggggggctgtgctttgagcggcgccccgtggcccaaagcactgatggagtccggggaaagaggggttactcgaggggcctgcatgcctgggagatcagctggcccctggagcagaggggcacacacgccgtggtgggcgtggccaccgccctcgccccgctgcaggtcgaccactatgcggcgcttttgggcagcaacagcgagtcctggggctgggatattgggcggggaaaattgtatcatcagagtaagggcattgaggccccccagtacccagctggacctcagggtgagcagctagtggtgccagagagactgttggtggttctcgacatggaggaggggactctgggctactctgttgggggcacctacctgggaccggccttccgtggactgaagggcaggaccctctatccctgtgtaagcgctgtttggggccagtgccaggtccgcatccgctacatgggccaaagaagagccgaggaaccacaatcccttctgcatctgagtcgtctgtgtgtgcgccatgcgctgggagatacccggcttggccaaatatccactctgcctttgccccctgccatgaagcgctacctgctctacaaatgaccc

SEQ ID NO: 6659 - DNA, 956 bp, Cricetulus griseus
tctctggaccctaactgttttgcggcccaggcggtttgactacatccaggatggcttcggattcccgggacggtgggaccatgtgtgcgctggagtttgcagtgcagatgacctgtcagagctgtgtggacgcggtgcacaagaccctgaaaggggtggcaggtgtccagagtgtagaagtgcaattggagaaccaaatggtgttggtgcagaccactcttcccagccaggaggtgcaagcgctcctggaaagcacaggaaggcaggctgtactcaagggcatgggcagcggccagttacagaatctgggagctgcagtagccattgtggagagctctaacaccatacgtggggtggtccgattcctacagctgacctctgaactctgcctgattgaggggaccattgatggcctggagcctgggctgcatggattccacgtccatcagtatggggatctcacaagggattgcaatagctgtggggaccattttaaccctgatggaacatctcatgggagccctcaggatactgaccggcaccggggagatctcggcaacatcctggctgatgctgatggccgagccaccttccggatagaggataaacagctgaaggtgtgggatgtgattggccgaagcctggttgttgatgagggagaagatgacctgggccagggaagacatcccttatccaagatcacaggaaactctgggaagaggttggcctgtggcatcattgcacgctctgctggccttttccagaaccccaagcagatctgctcttgtgatggccttactatctgggaggagcgaggccggcctattgctggtgaaggccgaaaggactcagcccagccccctgctcacctctgatcagggcctcatctcatgttattttgtccccctagttgaaatctacctgcagaggaaacaggggactttgcttgggcaggc

SEQ ID NO: 6660 - DNA, 956 bp, Cricetulus griseus
aggaggtgacagctctgggggaaggttcaagagagacatctgggagactttcaagagaacagatttatgtactggtgtcagcagcatccatgaacttgggttgcatgatggcctattccattcttggaccattttttcccaaggaggcagaaaagaagggagccagcaataccatgattgggatgatctttggatgctatgctttatttgagttgctggcgtctctagtgtttggaaaatatcttgtacaaattggagccaaatttatgtttatagcaggaatgtttatctcaggaggagttacaattctctttggtgtcttggaccaacttccagaaggacccatatttattgtcatgtgttttctggttagaatagtagatgccataggttttggtgcagcaataacagcattctggttttttggaaactttaatcacagctgcgtgctactttgctctttaggacctgtccccatttttgcacattaaaagtcagctctggctcctggtactggtgttagttgtaaatggcttctctgctggaatgagtatcatcccaactttcccggagatgcttagctgtgcatatgaaaatgggtttgaagagggaataagtacactgggactcatctccggtcttgttagtgccatgtggtcagttggtgctttcatgggaccaatgctgggcggatttctgtatgagaagattggtttcgagtgggcagcagctttgcaaggcctatgggctctgataagtggacttgcgatgggcttattttatctctgggagcactcaaagacgagaagaagaagatctaaagctcagaacctcattggcacagaggaggaacaaactgctctattgcccaatgaaacctagccttgcaaactctggattgatgcagatcaagacacaggtgcctggagctgtgatagcagctgctggaggacctt

SEQ ID NO: 6661 - DNA, 956 bp, Cricetulus griseus
agggctgccaggcacaatgaaagttctcttattgaaagatgccaaggatgatgacagtggccaggacccatatatccaggagctgggattgtatggactggaagctacactaattcctgttctgtcatttgagtttttgtctcttcccagtttgtcagaaaagctgtctcatcccgaaggctttggaggactcattttcaccagtcccagggcagtggaagcagtgaagctgagtttggagcaggacaataaaactgaagaatgggaaaagtctctgaaaaacaaatggaatgccaagtctgtgtatgtggttggaaatgccactgcttgtctagtgaataaaatcggcctggatgcagaaggagcacacagtggaaatgcagaaaagcttgctgaatatatttgctccaggccatcttcagcactgcctcttctctttccctgtggaactatcaaaggagatactcttccaaaaatgctcaaggacaaagggatccccatggaaagcatgcatgtctatcagacggttccacaccctggaatccaagggaacctggagagcttctatgagaatcagggtatcccagccagcatcacatttttcagtccctcgggtcttaaatatagcctggagtatattcaggtgttatctggtgacagctttgatcaaattaagttcgtagccattggccccagtacaactcgtgctatggccgctaagggcctgcctgtgagctgcacagcagagagtcccacaccacaagccctggctgcaggcatcaggaaagtgctgcagccaaacacctgctgctgaggctgtgctgggccagctccttccctgtgcctaggacagcttgctgctgcctctaggatggagcccagaatcagagaggggctctggagaagcatgtcactgtcctccgtggagtccagcttggaacctaggccaggtgcac

SEQ ID NO: 6662 - DNA, 956 bp, Cricetulus griseus
ccggatccagggttgcgcccgtgccatcgcagccacttctaccgctcactatgatcccgggtccccgtctgctgctgcccgccgtgctctgcctggggctcggcacgctcgtgtcttcttcggggtcctcgggcgtccgaaagcgaggtccctcggtgaccgccaaggtcttctttgatgtgaagattggagacaaagatgtgggtagaattgtcattggcctctttggaaaagtggtacccaagacggtggaaaactttgtggctctggcaacaggggagaaaggctacgggtataaaggaagtatcttccatcgagtcatcaaggacttcatgatccaaggaggggacttcactgctagagacggcaccggaggaatgagcatttatggtgagacatttcctgatgagaacttcaaactgaagcactatggcattgggtgggtcagcatggccaatgctggccccgacaccaatggctcccagttcttcatcaccttgaccaagccctcatggttggatggcaaacatgttgtatttggaaaagtcctggatgggatgactgtggtacactccatagaacttcaagcaacggatgatcatgaccgcccatttactgactgcaccatcgtcaacagtggcaagatagatgtgaaaacaccctttgtagttgaggtccctgactggtgacagaaatgttggaaaacaggaacactctggctggtccgtgtgttcatcactacccactagctgtcttttgtttagtttcactcagttccttgtaacctccatgttggctgatctggaaggtttgtttgagaaaggtgactacaatgaggcttagcattctttgttcatataattcttgacaggtaaagggaaatttgagtcgtatcatatgttgtatgtcatcagattttctgtgtcttgatgctctttatattaaatactttttaa

SEQ ID NO: 6663 - DNA, 956 bp, Cricetulus griseus
ggcgacggcgacatggagacgcggggcctacggcgcggccaacgcgggcggctccttcgacctgcggcgcttcgtgtcgcagcctcaggtgctgacgcgcttcgtgagcatggtcttggccttgatcgtcttctcctgcatcttcggcgagggctacagcaacactcacaatactgatcagttacactgtgtgttcaacaagaatgaggatgcttgccgctacggcagtgccatcggggtgctggccttcctggcctcagccttcttccttgtggttgatgcccttttctcccagataagcaatgcgaccgatcgcaagtacctggtcattggtgacctgctcttctcagctctctggactttcctgtggttcgttggtttctgcttcctgaccaaccagtgggcagccactaaagctgaggatgtgttggtgggagcggactcagcacgggccgccatcaccttcagcttcttctccatcttttcctggggtgtgctggctttcctggcctaccagcgctacaaggctggagtggatgccttcattgagaactacgttgaccccaccccagaccctaacacagcctacgcctcctaccccagttcctcggtggaaaactaccagcagccacccttcacccagaatgtggagaccactgagggctaccagcctccccctgtgtactgagcagcccaggggtcttcaggggtcaccactgtgccaactgtccccagactgcttgcctgacagctgtggagcaggtaggggactggctatctctctcttcttgctcctgcccctggcaggagggagcttagcctggagagaacacccagctttatgtaaatattccccagcagctattagatacaaatgaggagggcaggaacccctgcactgaatgtattggagacttggtggggacacccctgccctcaggttctgtagactagtt

SEQ ID NO: 6664 - DNA, 956 bp, Cricetulus griseus
tttgacgccgagttccgacgttttgcgctgccccgcgcttcggtgagaggcttccaggagttctcgcggttgctgtgtgtggtacaccagatatctggcctggatgtgctgcttggctatacggatgctcacggcgacttgctgcccctcaccaacgatgacagtttgcaccgggccctggccagcgggcccccgccactgcgcctattggtgcagaagcgggtagaaggtgactccggtggtctggcttttgcctccaactctctgcagagacgcaagaaagggctcctgcttcgaccagctgcacctctgcgcacccgaccacccttgttaatcagcctgccccaagatttccgacaggtgtcttcagtcatagatgtggacctactacctgagacccatcgacgtgtgaggctccacaaacatggctcagaccgtcccctaggcttctacattcgagatggcatgagtgttcgggtggctccccagggcctggagcgggttccaggtatcttcatctcccgcctggtacgtgggggcctggctgagagcacagggctgctggcagtgagtgatgagatcctcgaggtcaatggcattgaggtggctgggaagaccttggaccaagtgacagacatgatggttgccaaacagccataacctcattgtcactgtcaagcctgccaaccagcgtaataatgtggtacgaggggcatctgggcgtctgacagggccttcctctgtagtgcctgggcctactgaccctgacagtgacgatgacagcagtgacgtggtcattgaaaaccgccaccctccttgttctaatgggctgtctcagggacccatgtgctgggacctgcaacctggctgcctacttcctggtgctggcagctctctgccctccttggatagccaagagcaagccaactctgactggggaatgacatacgaggtga

SEQ ID NO: 6665 - DNA, 955 bp, Cricetulus griseus
gaagttttcagatgaaaaccagttgacaggttttgatcgagacagaccactgagaggacgtggaggccccagaggcctgaggagcagaggccgaggtggtcctgggaacagagcttttgactcctttgaccaaagagggaaaagagattttgaaagatacagtagcaatgataaagtcacaaacagaatggaggacagcatgggtagctgtggtgttcgaccctggggatctggtaaagacgctagtgacacagagccatctgcatccatggaagagagctcaatgatggaggaatcccagggtgccctggacgaggagtctccagccaaagctcctgagttggaggtagaagaggaaaatcaagtccatgagatgaccttagatgagtggaaaaaccttcaagagcaaaccagaccaaagcctgagttcaacatccggaagccggagtccacagttccttccaaggcagtggtgattcacaagtccagatacagagacgatctggtgaaagatgactatgaggatgagacccatgtcttccggaaagccgccaatgacatcacatcccagctggagattaactttggtagcctccctcgccctggacggggagccagaggcagtgcccgaggaggccgaggaaggataagaagaacagagaactatggcccccgagcagaagttgtgatccaagatgtcgctcccaacccgaacgaccccgaggacttccccgccctggcctaacagccattcccctgcagcagagcagcactatgaagagactttccctgccgcgagaagagtccgactctaagaacaatagatgttgcttttcccgtgtcgtgtgaacttgctgccctttcttgctctgtggaggatgtttgctttgggtgccctcctgcttctgatccccatgtttattaaatgaatgagtacaaaggtaaaaaaaaaaaa

SEQ ID NO: 6666 - DNA, 955 bp, Cricetulus griseus
ctttcttccctcggttgcacccaagcggggctggccaacagctcccggggcgtcctgtttgtggctggaagaaaataatgatgcttgaattgagctactaaggaatctgaaataaaaactcatactattaataatggcaggaaaatcatctctctttaaagtaattcttcttggagatggtggagttggcaaaagttctcttatgaacagatatgtaaccaataaatttgatactcagctcttccacaccataggtgtggaatttttaaataaagatttggaggtggatggacattttgttaccatgcagatttgggacacagctggtcaagagcgattccgaagcctgaggacaccattttatagaggttctgactgttgcctgcttacatttagtgttgatgattctcaaagcttccagaatctgaataactggaagaaagaattcctgtattatgctgatgtgaaagagcccgagagctttccgtttgtggttttgggcaacaaggttgacataaacgaacggcaggtgtctatagaagaagcccaagcctggtgcaaggacaacggcggccatccttactttgaaacaagtgcaaaggattccaccaatgtcgcagctgcctttgaggaggccgttcgaaaagttctggcttcagaagagaagtcagatcatctgattcagacaaacacggtcaatctgcaccgaaagccgaagccaaactcatcttgctgttgatggcattgaagagatggtcggtgcatgcatacacacacacacacatacacacacacactattctagaagttacactttaggttgtttttccccacaagaaaatggagaattacttttatatgtgtatatttttatgtaattagcattctattcttggtccagggaagtaaattactatagtgatactattaaagattaaaatctaaaaaaaaaaaa

SEQ ID NO: 6667 - DNA, 955 bp, Cricetulus griseus
  modified_base (944)..(944): a, c, t, g, unknown or other
ggcgcgcggcggcaagatggcggtgcagatttccaagaagaggaagtttgtggctgatggcatcttcaaagcagagctgaatgagtttctcactcgggaactggctgaagacggctactcgggagttgaagtccgagttacaccaaccagaacagaaatcattattttagccaccagaacacaaaatgttcttggtgagaagggtcgtcgaatcagagagttgactgcggtagttcagaagaggttcggcttccctgagggcagcgtagagctttatgcagaaaaggtggccacaagaggtctgtgtgccattgctcaggcagagtctctacgttacaaactcctaggaggacttgctgtgcgaagggcctgctatggtgtgcttcggttcattatggagagtggggccaagggctgtgaggttgtggtgtctgggaagctccgaggacagagagccaagtccatgaagtttgtggatgggctgatgatccacagtggagaccctgttaactactatgttgatactgcggtacgccatgtactcctcagacagggtgtgctgggcatcaaagtgaaaatcatgctgccctgggacccaagtggtaaaatcggccccaagaagcctctgcctgatcatgtgagcattgtggaacctaaggatgagatcttgcctaccacccccatctcagagcagaagggtgggaagccagagccacctgccatgccccagccagtgcctacagcataaacagggtcttggcagctgcatctggaggctggatgttgtcctgtacagacatttaataaaatcttgcacaaagacaaggcctgactggattgtgactgagttatgttggcctgaggagtgttgcttatcctgttagattaagctggagggcttgagcagagctgaccagagaagtcatgctttttttttttttttnttttttctcta

SEQ ID NO: 6668 - DNA, 955 bp, Cricetulus griseus
  modified_base (342)..(342): a, c, t, g, unknown or other
atagtgcgatggctaaactttggaggaatgtagagttaccttggaaggcttgaaaatggagaatggggtccttgaaggctcatttggaggctgataagcaaaaggctgtagaggccagcagtaccatgggacagatagcagagaactttgaggttcaggaaatgctgaaagtggttcgagctgagaaagatcaattgcagctgtctttcacagagctcagacaagaattgctaaaggcaaatggtgaaattaaacatgtttccagcctgctagcaaagaatgctgctgccggtggcgtggagtctatgtcaacagaacatctccagcaccttcagactctgnaaccactgtaaagtcactgatcaagtcatttgacgtagggcacacaggtggtgctggacagagtatttctgtccacaagactcccagaagcccccctgagtgggatcccagtgaggactgctccagcagctgctgtctctccaatgcagagacattcaacttacagcactatgcggccagccagcaaagggatggcacagcgcttggatctgccggacctgcccctctcagatcttctgaagggaagggctgaggaccggaagtcagacccttacctccgaaagagtccctcactggagtccctgagtagacctccctccctgggctttgggctgccacttggcctgaaattagtcctggaagcgcctgctcactgtccaccacacctgctgtgcccaccacctagccatctggatttccaaggaaggcttaagccaagtgaaccagcgctccatgcagaagcagagctggctccaccatctccatcgcagatgcagacgtgtctggagcccatgctcaggaatccttgttcccaatgggaagtttctagagaggcaggccccgcttctcacacattgggtcccaaatccaggccctcttctgtgagattcca

SEQ ID NO: 6669 - DNA, 955 bp, Cricetulus griseus
cctgccagaacctggccgagaatgtgggagaagccagtccctgaggaggcggcgaagctatgtgctgaggaaatcaaagctgtctcctatattgaatgctcagccttgactcagaaaaacctcaaagaggtgtttgacgctgccatcgttgctggcatccagcactcagactcccagcaacagccaaagaagtctaaaagcaggaccccagataaggtgcgggacctgtccaaatcctggtggagaaagtattgctgcctggcctgacccttgcaaacagttggtgtttaagctgcaacaactctttacgacatgtgggtgtggtcataggacaagccctcaaagcaacccctttctgtccttaatttcctgtctgtgaggttagggttgagatccatatgcaaaataagttcacacacacacacacacacacacacacacacacacacacactggccctactatgcatggctgtctggaaagcccactccgagtgggactctgcctgcctgtgtacagagggtgggtgggaaggtgagttatttaattttaaatgttatagtaaaagcaaatgtagtggagaccaaggaaataattagaacacaaacttgaagttttgtgcgagaactgttgggcctcaagccctgcccctttgggccactgggaagtggcatgaaggatgctgtgatggagttctggacacttgcttctaggataaatacccctggaccattcacaacacaaatgtagtgggttgccattggccttcaagctttcaatatgttactacattcgatggaggcataaggtctgactgtacttgaggttttcctgcattttacttttgaaaatagagattcgggctgagaaattttaaaagtatgtgcctgggtgaaatgtaaagttggttctctttgaagctgaaagtggcacatgtacagcgtggtgtctcggg

SEQ ID NO: 6670 - DNA, 955 bp, Cricetulus griseus
ggcggtggcggttggtgtctccttgaggcgctgcttcccggcaacggctctcggcagagcccgcctgcagattcaggcctgccgaggggcacagacagctgctgctgcagctccccgaatcaaaaaatttgccatttatcgatgggaccctgacaagactggagataaaccccgaatgcagacttatgaagttgatctgaataagtgtgggccgatggtgttggatgctctaatcaagattaagaatgaaattgattccactttgaccttccggagatcatgcagagaagggatctgtggctcttgtgccatgaacatcaacggaggcaacactctggcatgcactcgcaggatcgacacggacctcggcaaagtctcaaaaatttaccctcttccacatatgtatgtgatcaaggatctagtccctgatctgagcaacttctacgcacagtacagatctatcgagccctatctgaagaagaaggacgagtcccaggagggcaagcagcagtacctgcagtccatcgaggaccgggagaagctggatggattgtatgaatgcatcctgtgtgcctgctgcagcaccagctgccccagctattggtggaacggagacaagtacctgggacctgcagttctcatgcaggcctatcgctggatgatcgactccagagacgacttcacagaggagcgcctggccaagctgcaggaccccttctctctctaccgctgccacaccatcatgaactgtactcagacctgccccaagggtctgaatccagggaaagccattgctgaaatcaagaagatgatggcaacctacaaggagaagagggcactggcgtgactctctccgtgctgaatgtgtctgtcaactctgaatctcttcagacacctggattctctaggaaaacagcatgtataataaacattttaagaaaataaaaaaaaaaaa

SEQ ID NO: 6671 - DNA, 954 bp, Cricetulus griseus
ggtcgtcactcactccgcacgtgtcttcctcaccatgctttctctgctgcgctgcgtgccccgcgccctgggcgccgctgccacgggcttccgcgccgctgccccggcctcgcctctcccgcagctgctgcagcccgcgcttcgaccgtgcctccggcccttcgggctgctcagcgtgcgggccggctccgcacggcgttccgacctcttgaagcccccggcgccctgctcctgcggctgtggagctctgcacaccgagggagacaaagcctttgttgaattcttaacggatgaaattaaggaagagaagaaaatccagaagcataaatcccttcccaagatgtctgggaattgggagctggaagtgaacgggacagaggctaaattatcgcgcaaagttgctggagaaaagatcactgtcactttcaacattaacaatagtatccctccaacatttggtggtggtgaggaggagccctcccaagaccagaagactgaagaacaggagccggaactgacgtccactcccaattttgtggttgaagttacaaagagtgatggcaagaagacccttgtgctggactgccattatcctgaggatgagtttggaaacgaagaggacagcgatattttctctatcaaggaagttagcttccaggccactggtgactcggaatggagggatactaactacacactcaacacagattccctggactgggccttatatgaccacttgatggatttccttgaggaccgaggggtggacaacaactttgcagatgagctggtggagctcagtacggctctagaacaccaagaatatatcaccttcctcgaggacctcaaaggttttgtcaagagccagtagaactgtcagagactgggggcttggctttaaatggcaagctttggccagtgaacaaaagctactttgccatcagaagtatgctt

SEQ ID NO: 6672 - DNA, 953 bp, Cricetulus griseus
gtacatgcagtggaaggcagagctatggatctatgtatgttaccctgaaaatttaaaaaaaagggagacttaaagaaaatagaatttaattgacctaattgttaggcagagctcaggaattatgcaacagtgaaaaagatgacaaattttaaaaagtagcttattttttaatgaacgtaatgtatgatgtggactaggaagttgtgctcaattttctgtttctgagagcgtaagtcgtaaggctgttatagagtgacagttctggtgaattgcaataaacggctgtgagcttccctgcttggggaggagggaggttctagcctgaaagcaccttgcatctagttttcaaacttgcatatatgtttgaattcaagtactggtcagcacacgagcaggcaaacttgtttaagtcaccagacatgtggactcggccttccagaaagtcttcctggctaacagtagggatgtaaagggacgaagcaaatgttaaccaatcttcgaccctgagctagaaaggtatttgtcttcagtgttaaaggcatgatgagtactgctaattagtctaataaacccccatactttctgcagtgaacactaatggtattgttctaaccttttttttttttttttaagtggtcagtcattcacagtaagctatgagggtaaaaatgtgtcatgacatataaatcgtagttgtaagaaaataccatgacagctcaagtagttgggtggcatttccatttcacctcccacacatattgcattgtaaggttgactttaattggcaccacacctgttgtatattatacattatttatataaaataaaatgccttatatattgaagagtaagtgcaataatatgaaatggcctgtacatttaaaaatgttagtcgccaagttatgtaaatccacatctctgtaaacaatttttaagtaatttcaaaaaaaaaa

SEQ ID NO: 6673 - DNA, 953 bp, Cricetulus griseus
catggctccgctgcgcttctcggccaacgtgtcctggctgttcccggagctccccgggctccccgagcggctgcaggccgcgggccgtgcgggcttcgaggcggccgaggtggcctggccgtacgccgagccgccccaggcgctggcgagcgctgcgcgggccgcggggctgcggctggtgctcatcaacacgccgcggggaaaccaagagaagggggagatggggcttggggctgtccccgggagacaggcggccttccgagaggggctggagcaggctgtgctgtacgccaaggctctgggctgccccaggatccacctgatggctggccgagtgccccaaggggctgaccgagctgcaatccaaggtgagatggagacagtttttctggagaacctgaaatatgcagctggggttttggctcaggagaacctcgtgggactgctggagcccattaacactcgaatcacggacccccagtacttcctggatacaccccagcaggcggcagccatcttgcagaaggttgggagacccaatcttcaactgcaaatggacatattccactggcagatcatgggtggtaatctgacagcaaacatcagggagttcctgcccattgttgggcatgtgcaagtggcacaggtcccagaccgaggggagccaggcagttctggagagctggacttttcttacctgttccagctgctagaagatgaaggctaccaaggatttgtgggctgcgagtatcggcctcgaggagacacggtggagggtctgagctggctacgttcatactgggacagacggggccacccacagacaggccagtaaggttctacacagtacctgcatgctgctctggggcagcgggcaagggtcctgaggcccctcctctgaattaaagacacactgaccgttaaaaaaaaaaaaaaaaaaaaaaaaaaaaaaa

SEQ ID NO: 6674 - DNA, 953 bp, Cricetulus griseus
cggcggcgtccggtccaggcgaggtgaaactgcaggagttccggcaggaggcccgtgctgacggcccgcaccttcaccatggcctcggccgagctggattacagcatcgagatcccggatcagccctgctggagtcagaagaacccctgccatgatgggaagaaggccaggaagcgactgcctgtggtgattctcttgggctggggaggctgcagggacaagaacctggccaagtatagcgccatctatcacaaaaggggctgcattgtgatccgatacacggctccctggcacatggtcttcttctctgaatccttgggcatcccctcccttcgtgtgatggcccagaagttgctcgagctcctctttgactacgagattgagagggagcctctgctcttccatgtcttcagtaatggcggcgtcatgctctaccgctacgtgctggaaaagctcctccagacccatcagcgcttccgccacctgcatgtggtgggcaccgtgtttgacagtggtcctggtgatagcaacctagtaggggccctgagggccctggcaatcatcctggagcgccggcctactgtgctgcgcctgttgctcctagtggcttttgccttggtggtagtcctgttgcacttcctgctttccccgttcactgccctcttccacacccacttctatgacaggctgcaggactcaggctcccactggcctgagctctacctctactccagagctgatgaggtagtctcagccagggatgtggaacgtatggtagaggaacgcctggctcaccaggtcctggtgcgctcggtggactttgtgtcatcggcgcatgtcagccacctccgtgactatcctacttactatacaagtctgtgtgtcgacttcatgcaaaactgtgtccagtgctgaggtcctgcttcagaaataaacgccgggcacctcccttc

SEQ ID NO: 6675 - DNA, 953 bp, Cricetulus griseus
gctggtggtggtcgtgtccatgctgaacacggctcctttgccagtcaggagcatagtgctgcaggctgcagtgcccaagtcaatgaaagtgaagttgcagccaccctctgggacagaactctcgccatttagtcctatccagccacctgcagccattacccaggtcatgctgctggctaacccaatgaaggagaaggtgcggcttcggtataagctgacctttgctctcggggagcagctgagcacagaactgggtgaggtagaccagtttcctccggtggagcaggtgggggaacctatgaccccagcaagtgctgccatctctacttagaaggcaggcaacctgagacaggctctggctagtccagcagtgcacaccctggacagtgcttatagcttggcgtagaccagggccctggacatttgtcaagagccaagccgctgctgtgatcatctccctgtgtgccttgaagtggccgtactgtgtgggtgtgtggcttcactggctgccctgggatggtggactctgggcctagagtaggttttccctttttactggcatcccttggtaccagggagagggctctgaagagcgcctttctaacccttcaagaactgcatctctgcaccctgaagaggcatggctgagtgaggtgcttgtcctggcagtggcaggttgtgtcctatggacatctcaacgggacagggaatactgccttatagcctcacctggggacaggaagggtaatggaagcgtgcgggttcccttcagaagcgggcaccgtggctctcctggaaagcatacctgcagcagtgggaatggggacatcctactcactacctcttgcttggcatgaaataaactgctgtgctccccttaacctttttaagggaagacaacctcttgccactctgcaccctcctgctttggtcactccccttcccctgccaca

SEQ ID NO: 6676 - DNA, 953 bp, Cricetulus griseus
gaggctgagccagtgggtcaagggaagccatgcaaaccatccctgttgtgggcttgggcacctggaaggcctctccaggagaagtggtcgatgcagttaagaccgctatcaactttgggtaccggcacattgactgtgcttacttataccacaatgagggtgaggtcggaatgggaatcaattccaagatcaaggagggtgtggtgaaaagagaggaactgtttgttgtcagtaagctgtggtgcacctaccataagaagtctttggtgagaacagcatgcaccaataccctgaaggccttaaacttggattacttggacctctacctcatacattggcccatgggtttcaagcccggagataaagatgtgcctttgaattgcaatggcctggtaatacccagtaataccagctttttggacacatgggaggccatggaggacctggtgactgagggactggtgaagcacattggggtgtcaaactttaaccatgaacagcttgagaaacttttaaacaagcctggtttgaagtttaagccaatcactaaccagattgaatgccacccatatcttaaccagaagaatctgattgagttttgccataatagaaatgtgtctgtgacagcttaccgtcctcttggaggttcaagagatggggctgagttgttggatgacattgtcattcgcaagatcgcaaagaagcatgggaaatctgctgctcagattgtgatccgatttcagatccaaaggaatgtgatagtaattccgaaatctgttaccccaagtcggattagggagaatttccaggtatttgattttgaattaacagaaaaagatatggaggaactcctcagcctagacaagaacctccggttggccacattccccttaactgaacaccacaaggactatcctttccatatagagtactgatgacagcttcactcagcc

SEQ ID NO: 6677 - DNA, 952 bp, Cricetulus griseus
tcagttattaattggattatgactatattgaaggataaatttctagagaaggaacagcacatgcttgtctctcgatttggaatgttctgaaaggcagccgccccatgtgtggtctcctgctcccctgggggaggaggttcaccataactgctaaaaggaaacaaccgtcaagtgaacttttgatatctccagttttgtgttcatatgtgatactcatattgcattttacacttgatctaggcatcttacagagtgtactcagtaggatgtactgactgcagttacatggctgcctggccatgttaactgggtggtaattttagtattttttttttagttaaaacatgttatacatagaatgtttattataaactaatataaaatgtgctctacccactggctcagagctggggtaaatatcaaacacccaaactgtcttacataatgggtagacacctggaagttagaaccctggaacattggagccttttgaatgtgttctgagacctacagtcaacctgtgtcattcctgctgtttggctgcctcgcagaaatctagactggctgaccacccatctggtgggctcagttttctcctttttgagtccagattgtcaagtagaagtgtatatgcaatgtgcactgtggcccttctggctagggctgatgggccactgtgtagcctgctgagtggcctgcgcacctgtgtgggctgcccgaggacgtgctcctcccacatgctggcagggagtgcccatcctgaaggcttcgcccacaggtagccatggaactcggcagtctgccttttttcagttaagttcggtctttgaaactgacaatctttaaaatgtgaatactgtaacaatgtgttttctcggattgttgtctttaaaaggatttttgtgaagcaattgatttatcaaagaaaaaaaaaattaaaaacaaaaacatg

SEQ ID NO: 6678 - DNA, 952 bp, Cricetulus griseus
gcccctgggaccagccaccagccccctcgggatctttgtcttcagactgccgagccatctcacatctggaccacagccgggcagggtgacagtgctgccaaccaaggcctgaaagatggcgtctggacaaggaccaggtcctcctaggcaggactgtgatgactccccctccccttctgaacagcaggtggcccaggacacagaggaggtctttcgaagctatgttttccatctccaccatcaggaacaagagacccagggggcggctgcccctgccaaccccgagatggacaatttgctcctagaacccaacagcatcttgggtcaggtgggccgcagcttgctatcattggagatgacattaaccggagatacgacacagagttccagaatttactggagcagctgcagcccacagctgggaatgcctacgaactcttcaccaagattgcctccagcctatttaagagcggcatcagctggggccgtgtggtggctctcctgggcttcggctaccgcctggccctgtatgtctaccaacgtggtttgaccggcttcctgggccaggtgacctgctttttggcggatatcatactgcaccattgcatcgccaggtggattgcgcagagaggcggctgggtggcggccctgaatctgcgcagagacccaatcctgattgtgatgacaattcttggtgtggttctgttgggccagtacgtggtacacagattcttcagatcttgactcccggggagccctctggggccccagccccatgccatttttgcctttgtggctggactctcagggatactgtgcccagagtgagggtggagatgagagttcagaccacagctgtctgaatgtgttcatcaaggccctccaaacctgtgtccttcctctgtgtctggaaataaactgtgcaatcccccacaccccaaaaaaaaaaaaa

SEQ ID NO: 6679 - DNA, 952 bp, Cricetulus griseus
  modified_base (345)..(345): a, c, t, g, unknown or other
cctttctgcatgttcgagattgttcaccaccatgtcccaatatgtactttaggagagaagaactgtcatttgctcgctatttcataggactgatttcaatcatttgcctctctgccacgttgtttacttttttaacctttttgattgacgtcacaagattccgttaccctgaaaggcctatcatattttatgcggtctgctacatgatggtgtcattgattttcttcattggctttttgcttgaggatcgagtagcctgcaatgcatctagccctgcacagtataaggcttccacagtgacacaaggatctcacaataagcctgtaccatgtttttttttttttntttttgaagaaacgtgtgtgtgtgtgtgtgtgtgtgtgtgtgtgtgtgtgcagctctgctcaatgatgggaaatttacaggtgaacactgtccgtgcctgctcaaaaaaagtctttccctattttctgttaacaattttccaagggatgtgaaggcaggaaaaaatactcctttttcattattccaaaacttacttttaaataattggtacttagtaattttgtctttaaaatgctattcttaattaaattgttgaggtgattctaaattctaaaactaaccttgttttatcacataaacatctagttagaaagtgtttgtgatgaagacttgtatcttgtggcattagttctccatgtttcttctccatacgttggctaaaactgttcatgtccagatgagtggacagtcactgttgttggggtctgtgtagggcgagcacacccagttagagcatggactgtacttcacggtagctggatgtgcttttcactctactgttgtagattttattttgtttacagtagactgatgtcagttttgtaaatgtttttcttagcactttaactgtgagtgtaaaaactgattttaatgtagtggctgtata

SEQ ID NO: 6680 - DNA, 951 bp, Cricetulus griseus
  modified_base (84)..(84): a, c, t, g, unknown or other
ctttctatgatctggctcctttgctacaggcatcaggacatcgatacctggtccccggcttagccgagcagagttggtaagggngtcctgggaagtttggacaggattccaaagaatagaagattcagtgctgattggatgctccaaccagcaggaagcatggtttgctttggatctaggtctgaatagcgcagcctccaaacacgtttccttgccaaaatctgaaatggaagcagagcttggaggctctttcatcaagctgaggcaggctctttttcagctgaactccatggattcctccttgctgttcacggctcaggctcttctccgctggcacgatggtcaccagttctgcagcaaaagtgggcagcccactaagaagaacatggccggcagcaagcgagtgtgtaacatcatctactatccacagatggcccctcgtggtgatcacactggtgacagatggggcccggtggcctacttgcccgccagagctccttttcccaagggaactgtattctgccctggcaggcttctgtgatataggtgaaagtgtggaagaggccgtccggcgagaggttgcagaagaggtgggcctggaagtggaaagcctacagtactcttcgtcccagcactggcccctttcccaatagctcgcttatgattgcttgtcatgcaacggtgaaagcagggcagacagagatccaggtgaatcagaaagaactagaagcagctgcctggttcagtctcgatgaggtggccacagccctgttgagaaagggctcctttcttcagcagcagagtgatgctctcccattgttgttgcctcccaagttagctattgcccaccacatgattaaaaaagtgggtggaaaggcagacctgtgcttccctggctgcttagctcaaatcaggccatcaagactccctcccgggcactgctgaagggca

SEQ ID NO: 6681 - DNA, 951 bp, Cricetulus griseus
  modified_base (889)..(889): a, c, t, g, unknown or other
cacagagtggattgaaccacctaacgagaaggaagccaactatgctgttgatgcgtatttcagggaagcactccgtgtcagtgaacctaagcacccaaggcacagcacaggcaacaagaaaagaagaacaacttaaaattgatgaagcagagccccttaatgatgaggagctagaggaaaaagaaaagcttctgacacaggggtttactaattggaataagagagactttaatcagtttatcaaagctaatgagaagtggggtcgtgatgatattgaaaatatagccagagaagtagaaggaaaaactccagaggaagtcattgaatactcagctgtgtttgggaaagatgcaatgagctccaggacatagagaagattatggctcagattggaaaggggagaggcaagaattcaaagaagaataagtatcaagaaagcactagatacaaagattggaaggtacaaagctccctttcatcagctaagaatatcatatggtactaacaaagggaaaaactacaccgaagaagaggaccgttttctcatttgtatgctgcacaagcttggatttgacaaggaaaacgtttatgatgagttacggcaatgtattcgaaactcccctcagttcagatttgattggtttctcaagtccagaactgcaatggagctccagaggaggtgcaataccttaattactttgattgaaagagaaaatatggaactagaagaaaaggagaaggcagagaaaaagaaagaggaccaaagccttcaacacagaaacgtaaaatggatggtgcccctgatggtcgaggaagaaagaagaagctgaaactatgaacgtatattggtcttataatcactaagctagtagttctttaattacgggtnttcataagatgtgctgtacagtgctcaactgttatgtcattcaaagacatcagctccatctg

SEQ ID NO: 6682 - DNA, 951 bp, Cricetulus griseus
ccatcagctctgacactggcacttagttacagctgaactcctccaccttccaactcagtcaggctcatccatctcctgcttccctctcctcacccaacccacccccttcagtccctctcttgagcaaggtggttgggctgttgtggggacaggtgacccaagcaggctcctagtttctggagagttgggcgagtgttataaccttttggcctctccatcagttcagctttcccccaaagcatggtttggtaccagtcttctcatttccttctagagcctgagaccaatgcttaagttttgggggacacagtcaccatcccctggtactgatgcttgctggattttcgggaaggcattttgctacccagtctcttttcactgcctggggatcagtcttttgttttcattgtttgatgttccatgttcccactgcatgctatgacttccctactggacaaaacagctcattaacggggtcttgcaaggggctctgtatgtacccagggtactggcccaacccccaattctagccatagacaaactccaggccagacccctccaccctggttcagcctgggcagcttgggctgagccaccaggaccaatagatttaagctggcatttcagtccaagaaggcttctaagtggatttaggacctgagaggaagaggggcctctgtgggtgctgggtactccagaggtgcccctggtggaagggtgggtcagtggtcctagcaggaagggagacccagcaaggccattcttgctgggttgagtcaaggagctagaacaagggaccaagtggctgtaaagtctcaagccaatgatggggcttctccactgggctcctgtagtcctcaagtccctggcctccaccttaccaggtgccacttctcagaaggccactgcccaggcccccaggccgccccttcgtggccagagactggttaa

SEQ ID NO: 6683 - DNA, 951 bp, Cricetulus griseus
gttgacgaggaccttatctgccctatttgcagtggagtcttggaggagccagtacaggcacctcactgtgagcatgccttctgcaacgcctgcatcacccagtggttctctcagcagcagacgtgcccggtagaccgtagtgttgtcacggttgcccacctacgcccagtacctcggatcatgcggaacatgttgtcaaagctacagattgcctgtgacaacgctgtgtttggctgcagtgctgttgtccggcttgacaacctcatgtcccacctcagtgactgtgagcacaacccgaagcggcctgtgacctgtgaccagggctgtggcctggagatgcccaaggatgagctgccaaatcacaattgcattaagcacctgcgctctgtggtgcagcagcagcagactcgaatcgcagaactggagaagacgtccgctgaacacaagcaccagctggccgaacagaagcgagacatccagctgttgaaggcttatatgcgtgcgatccgaagtgtcaaccccaaccttcagaacctggaggagacaattgagtacaatgagatcctcgagtgggtgaactccctgcagccggcaagagtgacccgctggggagggatgatctccacccctgacgctgtgctccaggctgtaatcaagcgctccttggtggagagcggctgcccagcctctattgtcaacgagctgattgaaaatgcacatgaacgtagctggccccagggtcttgccacactagagacaagacagatgaaccggcgctactatgagaactatgtggctaagcgcatccccggcaagcaggctgttgtggtgatggcctgcgagaaccagcatatgggtgacgacatggtgcaggagccagggctcgtcatgatatttgcgcatggtgtggaggagatctaagagagcagcataactggctatgaggaagag

SEQ ID NO: 6684 - DNA, 951 bp, Cricetulus griseus
cccaggtctacccccgcgcccggtcggcaactagcgcacaccgtgtgttcacaccctcttccggtccgggctcccgcgaccgcttctccttgctttcggtggatgctgcgcatctcggggcgcaatatgaaggtgcttttcgccgccgccctcatcgtgggctccgtcgtcttccttttgctgccgggaccctccgtggccaacgataagaagaagggacccaaagtcacagtcaaggtattctttgatcttcacattggagatgagcctgtaggcagagtgacctttggactctttggaaagactgttccaaaaacagtggataattttgtagccttagctactggagagaaaggatttggctacaaaaacagcaagttccatcgtgtcatcaaggacttcatgatccaaggtggagacttcaccagaggagatggcacaggaggaaagagcatttatggtgagcgcttcccagatgagaacttcaagctgaagcactatgggcctggatgggtgagcatggccaatgcaggcaaagacaccaatggctcccaattcttcataactacagtcaagacatcttggctagatggcaaacatgtggtttttggcaaagttctagagggcatggatgtagtgaggaaggtggagagcactaagacagacagtcgggacaagcccctgaaggatgtgatcattgcagactgtggcaagatcgaagtggagaagccctttgccattgccaaggagtagagaatctcagcgacctcacccctccaagtggctgtatgtgcagatcctgttactaccctcacagaggtgaagatagccaggcacatgattccgtgccactcagccccagtgcttccacctgagggggtggacccacaccccctcacattccacaggcctgatttttatatcaaactcctatcaatgctgatcaataaa

SEQ ID NO: 6685 - DNA, 951 bp, Cricetulus griseus
aggaaaagatgccagaaacattcagggccagaagcagggagaacaccaattagccgagatcagctgcagtgccaatgcactctgaacaacccggattcctttggagggctcctgatgccatatatggccatgcatgggcttactgtggctctcctgctcatcttcctggctggtgggactgaagcctttcgtatctgtgccttcaatgcccaaagactgacattgagcaagttggccaaggagccagtgatggataccttagttcaaatcctggctcgatgtgatatcatggtgcttcaggaggtggtggattcttcccagaaaactgtctctcttctgcttcgagaacttaaagttccaggacttacagcttcctaaacagctccctgctagggcgcagcacatacaaggagaagtatgtgtatatctaccggtctgacaagacacagattctgaattcctaccagtacaatgacacaaatgacctttttgcccgagaaccttttgtggcccagttcgctctccctagcaaaatccttccaagtgtggtactggttccactccacactacacccaaggatgtagagaaggagctgaatgccctatatgatgtgtttctggatgtctcccaacgctggcaaaatgaggatgtgatcctgcttggggacttcaatgctgactgtgcatcactgactaaaaagcgtctcaacagcctgctccttcggactgaggcaggcttccactgggtgatttctgatggggaggacactacagtgcgggccagcaccaactgtacctacgatcggattgtgatgcatgggcagggctgtcagaccctgctgagggctgcagcacccttcaacttccccaggagctttcagctgactgaggaagaggctctcagcatcagtgaccattatcctgtggaggtggagctgagtcaggcaactc

SEQ ID NO: 6686 - DNA, 950 bp, Cricetulus griseus
tgcagaggacattttaagctgggttcatggtgtgatgttttctccgtgatgggtcatcatttttgacagcttctgatggaccaaacaatacgggtctgggagaccaagaaggtatgcaagaactctgctgtagtgttaaagcaggaaatagatgttgtgtttcaagaaaatgaaatgatggtccttgcagttgacaacatcagaggcctacaacttattgccgggaaaacaggccagatcgattacctgcctgaaactcaagttagttgttgttgcctaagtccacatcttgattatgttgcatttggagatgaagatggagccattaagattatagaactcccaaacaacagagttttcagttctaggattggacacaagacagctgtacggcacatgcagttcacagctgatggggagacacttatttccagttctgaagattccataattcaggtatggacttggcaatcagaggactatatctttttgcaagcccactcaggaaacaagtgaaggacttcaggctcctaaaaattactaagattgactttcttggtcatttgatggaacagtgaaggtatggaatatcattactggaagaatagaaaaaagactttaattgccatcaaggtgcagtactttcttgtgatatttcttctgatgctaccaagttttcatctacctctgctgataagactgcaaagatctggagttttgaactgccttcccctcttcatgagttgaagggtcatactggctgtgtccgctgctctgccttctctctggatggcatcctgttggcaactggagatgacaacggagaaatcaggatatggaatgtctcaagtggccagcttcttcatttgtgtgctccaatttcagtagaagaaggaactgccacccatggaggctgggtgactgatagagttcatcctccctttctgcct

SEQ ID NO: 6687 - DNA, 950 bp, Cricetulus griseus
tggatgcttaatgaagattctttgaagtctgcttttggagtcaagagcatggatccaagcagtgactaccatttccttaaccacattttgtggagaagagtgaagctcacattggtttctgctttgagggcgtgctccagcatgtggatcctaacaagattgttgtcctgaaaaacgtgaagaatatagagacaggccgaagtgttccaggagtgaaaatgttttgggcatgagatttgaacagaagtatggttgacaagacctcttctaccccctttattgaaaatcctggccttggaaacaacctacttgcttccactccgcttggtactcttagatgagatgatgtcagacttaaccacactggtggacgggtacctgaacacctatcgagaaggttctgcagaccgacttgcaggcacagagcctgcatgtatggagctgccagaagagctacttcagctccaggacttccagaagcagcggcgagagagagctgccaaggagtacagggtgaatgcgcagggtctcctcataaggcccttgctgcacccaaagaagccagggactcgcacagcagggaaagaggaccgagtcaatggcttttattttgtaaaacttctggcgtggacaaagctccacgctttctatgtcatgaatctcatctcaaagatgagagttttttggataaagcatctaaacaaaccacagcaaagtctcatattctgcctcccatgaaggaaggcaaagccagtgaggattctgaggacaaaccagtatgttgggagtcaacagggccagaagacctgagaacccagaaagcttgctccctgactcccacacatgagctgccatcacatttttctttgaaagaggagatagagcagttgctgatggtagaaaacaagggagctttacaaagcccaaatgaagacactttggtgtctcct

SEQ ID NO: 6688 - DNA, 950 bp, Cricetulus griseus
atggcgaattgtggatgattgcggtggagccttcactatgggtgtcattggtggtggagtcttccaggctatcaagggctttcgtaatgcccccgttggaatacgacaccgcttcagaggcagtatcaatgccgtgaggattagagcacccagattggaggtagctttgcagtgtggggaggcctgttttctaccattgactgtggccttgtaagacttcgaggcaaggaagacccctggaactccatcaccagtggagcgttgactggagcagtgctggctgcacgcagtggtccgctggccatggtgggctctgcaatgatggggggcatcctgttggccctcatcgagggtgttggcatccttctcactcgctatactgcccagcagttccgcaatgcacccccattcttggaggaccccaaccagctaacccctaaagagggagctccagccccaggttatcccaactaccagcagtaccattgaggaagccgctgcctgcccctgccaccgtggagctactcctcagtttcctcccggatgatctacctccaagggaggactggctcctacataaccctgaaactctccagagagggcctctattctactcccttgttctgtggtaggggtgggggcaccccagcagccttgtcacttggtccccttttttgtctctcagggcacccccagcctcacacatgtaacagtatctcattccagatcctccatgtggcaccctgatgaacgtttaaagccagttttgaaatgtggcgcacacctgtaatcccagtgctcagcaggcagaggtagtgcatctctgaatttgaggccagcctagtctacatagtgagttacaggccagccagggttacacagagaaaccctgtctcaaagaaacaagcaaacaaaaaagagctgttacacagagaaccctgtcttgaaaa

SEQ ID NO: 6689 - DNA, 950 bp, Cricetulus griseus
tggcaccacatctgcattgtctggactaccagggatgggctgtggtctgcataccaggatggtgaacttcggggctctggtgagaacctggcagcctggcaccctatcaagccacatggtatccttatcctgggccaagaacaggatactctggggggccgatttgatgccacccaggccttcgtcggtgacattgcacagttcaacctgtgggaccacgtcctgacacctgcccaggtcctaggcatggccaactgcactggaccactgatgggcaatgtcctcccctgggaagataagctggtggaaaccttcggaggtgcaaagaagtccacctttgatgtctgcaaggggagggccaaggcatgaggagccaccttgttcagaacccctcccttgcctgtcactttggggaccttgaaggggcactgcccttctcagcctgtactgagagagagagagagagagagagagagagagagagagagatttagaggaggccttgggaggatagagtcttaggagggatagggcagaaactgctgggtcatttgaacccaccagacacaccatcctgatcctttctgctttgtcccagtggtgatgagaaatgacacctctgccacattcccatgccaggtcaccctggttaaactccagccacctcccccagttatacatgaatggggaccacagacatgaaactcaacccttggcttgcagatggggaagctaaggcctggccagggagctcaaatgacccttgaggctcctctgactgtgccttgtcttctccactattttgtatataagtaacatgagatattttgttgtgtgtgtgtgtgtgtgtgtttgatctgtgtcatggttttgttaccatttttgtttttgtaaatttgaatgttcaaaataaaacaatggtttacttcgaaaaaaaaaaaaaaaaaaaa

SEQ ID NO: 6690 - DNA, 950 bp, Cricetulus griseus
  modified_base (41)..(41): a, c, t, g, unknown or other
caagatgacgaagttcgtattttgtatggcgaaatggagcncctttacgacagactggctgggaacttctccacttcatctggccgcacagtatgggcattactctaccacagaggtactcctccgagccggtgtaagtagggatgccaggaccaaagtggaccggacaccactgcacatggcagcttctgagggccatgccagcatagtagaggttttgcttaagcatggtgctgacgtcaatgcaaaggatatgttaaagatgacagctctgcattgggcgacaaaacataatcatcaagaggtggtggaacttttaatcaaatatggtgctgatgtacacacgcagagtaaattttgtaaaactgcatttgatatttcaatagacaatggaaatgaagatttagcagagatattacagattgctatgcagaaccaaatcaataccaacccggagagtcctgacactgtgacaatacacactgccacaccacagttcatcattggacctggaggggtggtgaacctaacagatgaaacaggagtatctgctgttcagtttgggaactcctctacgtcagtattagctacattagctgccttagctgaagcgtctgccccattgtccaattcttcagaaactccagtagtggccacagaggaggtggttactgcagaatctgtggatggtgcaattcagcaagtagttagctcagggggtcagcaagtcatcacgatagttaccgatggaatccagcttggaaacttgcactccattccaactagtgggatgggccagccgatcattgtgaccatgcctgatggacagcaagtgttgacagtgccagcaacagacattgctgaggagactgtcatcagtgaagagccaccagctaagaggcagtgtacggagataatggagagccgggtggagtctgcagaaattgaag

SEQ ID NO: 6691 - DNA, 950 bp, Cricetulus griseus
caagacataccactggtggagagctactcctttgaggctcgaatggaagtagatgctgatggaaatggtgctaagatatttgcatatgccttcgacaaaaaccgaggaaggggctcgggcaggcttctgcatgagctgctatgggaacgacataggggaggtgtggctcccgggtttcaggtggtacatctcaattctgtgactgtggacaatcgcctggacaacctgcaattggtaccatggggctggcgacccaaagctgaagagacctccagcaaacaaagggagcaaagcttatattggcttgctatccagcagcttcccacggaccctatagaagaacaattccctgtcctgaatgtgacccggtactataatgccaatggagatgtggtggaagaggaagagaattcctgtacctactatgagtgtcattaccctccttgtacggtgattgagaaacagcttcgggaattcaacatctgtgggcgttgccaggtagctcgatactgtggctctcagtgccagcagaaggactggcctgcccacaagaagcactgtcgggagaggaagcgtcccttccagcatgagcttgagccagagcgatgacgggctgaagagtggctactgctgcaggttcaaggtttccagctcatcatgagcacagtggaagacagactggcagttgaacctggaggtgccaaagaagccagcaatggatccagagcagctgccataagacctcacagcaacatgaagcctgtggggacagtgcccctccagtgttcacccccagcagagacataggggaggctccctaggacctttctcattatttatatgttaatatgtttgtaaactcatgtacagttttttggggggcggcggtaaagggagggttagaaacttcaaatagaatcatttgttgtattcctcaaatggcaaacagt

SEQ ID NO: 6692 - DNA, 950 bp, Cricetulus griseus
gaagggtctaccacagagaccaccaccctcagcccagaaaccacaagcttcaatggcaccagaatccctgacatggcaggtggtgcggttggtgtgggtaccatgcttctgtctttcgatcatcacagtgattggcttggctgtggccatggttttatacatcaggaagaagaagaggctggagaagctgcgccatcagctcatgcctatgtacaactttgaccccacggaggagcaagatgaactggagcaggagctgctggaacatgggcgagatgcggcctccatccaggctgccgcctccctgcaggccacacagggcaagagcactctcccttcccaaggcccactgcagaggcctagcaggctggtgtttactgatgtagccaatgccatccacgcgtgagtggcctgagaacaggcctggacctctgacaagacacctgccacagtgccagccgtgctgcccacttcctgactgtcaagacctactctcaggacctgagccatcgccaccacaagacaggaaagggctgcaacagaccccagctctgccgaggtcccacccaccgactctcaggcttgaagagagagctctgactaggctagccatctggccactgacttctcctgaaccgctggccctgaattaattttattttattttattttattttattttattttattttattttattttattttattttatttttttgaggaaaagacctgagaaacccagtctggtttttagtttttcccttccaccttatgggctaggaggatcccatggggatggctctggttttatccctgcctctagatgctataaatatgttagcacttgagcaactggaggggctgtgagtaatttaggatgcacagggctgtaatttaactcgcagcatctccacgtgtgagagcattaaagatgtaattaagatgttt

SEQ ID NO: 6693 - DNA, 949 bp, Cricetulus griseus
tctggtgccgctatgcggatcactgggaagactttccgccggcggcgggctgactcggagtcggaggaagatgagcaggaatcagaggaggttcggttaaaacttgaagaaacccgagaggtgcagaacttaaggaagaggccaaacggggtgagtgctgctgccctgctggtgggagagaaggttcaagaggagactactctggtggatgaccctttccaaatgacgacaggtggcatggtggacatgaagaagctgaaggagaggggcaaagataaggtcagtgaagaggaggacctgcacctggggacatccttttctgcagaaactaaccggagagatgaggatgcagacatgatgaaatacattgagacagagctgaagaagaggaaggggattgtggagcaagaggaacagaaggccaagcctaagaatgctgaggactgcctctatgagctaccagagaacatccgtgtctcctctgctaagaagacggaggagatgctgtccaaccagatgctgagcggcatccccgaggtggacctgggtatagatgcgaaaataaaaaatatcatttccacggaggatgccaaggcccggctgctggcagagcagcaaaacaagaagaaggatagtgagacatcatttgtgcccaccaacatggccgtgaactatgtacagcacaaccgcttttatcacgaggagctcaatgcacccatccgaagaaacaaagaagagcccaaagcccggcccttacgagtgggtgacacggagaagccagagcctgaacggtctcctcccaaccgcaagcgtcctgccaatgagaaggccacagatgactaccactacgagaagttcaagaagatgaacaggcgctactgagacagtggtaggggctggataacgttattacttctttgtaaataaaaaaaaaaaaaaaaaaaaaaaa

SEQ ID NO: 6694 - DNA, 948 bp, Cricetulus griseus
aaaaagaagaggaagaaagcacaaaaggaaatctcaggaacagaaagctacagagcacaagactaagcccctagtgaagacggctcctccctcttctagggccaagaaaccaatggaatctaaacaagagaagaactctagctccctggagtcccctgaagatagccaagtcacagcacctgattctgtctttgcactggatttcctgcgacagcggcttcatgagaagatccaactggcccggggccagggcagcaccaaggagctgtctgctgccacgctagagaaaagacagcggaggaagcaggagagggaacggaagaagaggaagcggaaggagcttcgagcaaaggagaaggctgcaaagactgagaaaaaagaggagccagctgaggcacctccagaagtgccctgcaaggagccgcaggcatcaggactgatgtttaataaggtggaagtgactgaagaggagccggccagcaaggcccagcgtaggaaggagaagcggcagaaggtgaaagggaacctgacacccctgacaggcaggaattacaggcagttgctggagcgtctacaggcgcggcaggaccggctggaggagcttcgagatcaggatgcgggcaaggcccaggagctggaggcgaagatgaagtggaccaacttgctgtacaaggcggagggtgtgaagatccgtgacaacgagcgcctgctgcaggaagccctgaagcgcaaggagaagcgaaaggcacagcggcagcgccggtgggagaagcgctcggagcatgtggtggagaagatgcagcagcgccaggacaagcggcgccagaacctgcgcaagaagaaggcggcccgggctgagaggcggctgcagaaggcccgcaagaagggccgggtgctgccacaggacctggagcgtgcgggcctctcctgagcagcttgtacctgcca

SEQ ID NO: 6695 - DNA, 948 bp, Cricetulus griseus
ggaatggagggagccttggtggagcgtgtcagggcagagcctttccacagggtcacgcccttattggagagctgggcactgtctcgggtggcaggcatgcccgtcttcctcaaatatgagaatgtacagccggctggatcctttaagatccggggcatcggacatttctgtcagcagatggccatgaggggatgcaggcatctggtgtgctcctcagggggcaatgcaggcattgcagccgcatactcggctcggaagctgggcatccctgttaccatcgttctcccagagaacacttccatgcaggtggtgaggcggctgggagggagagggggcggaggtccagctgactgggaaggtctgggatgaagccaacataagggctcaagacttggccacaagggatgggctgggtgaatgtctccccatttgaccatcccctgatatgggaggccatgccagcctaatgtgcccattattgccatggagacccgaggggcacacagcttcaacgcggccttgcaggcaggcaggctggtcgctttgccagatatcaccagtgtagccaggagcctgggagccaagacggtcgctgcacggaccttggagtgtgcgaaggagtgtgaggtactctctgaggtggtggaagaccaggaggctgtgagagctgtgcagaggtttctggatgatgagcgcatgctggtggagcctgcctgtggggccgccctggctgctgtatactcaggcatcctggggaggctccaggctgaaggccgcctgggcccggccctggcttccattgtggtcatcgtgtgtggtggcaacaacatcagtagccaacagctccaggagctgaaaacccagctgggctgtagctgagggctcccaaggactccagagaggctcctcggaccccttcatggccacccgaaggggcctcagttccag

SEQ ID NO: 6696 - DNA, 948 bp, Cricetulus griseus
gccctagagtggccatggggactggcgggcgtcgggggacgcggtccgggaagggcaccgagggcgcggcgacggttgcctctccttgtttgtaccgctgtatcgagtgcaaccgggaggcccaggagctgtaccgggactacagccacggcgtactcaagataaccatctgcaaatcttgccagaaaccagtagacaaatatattgagtatgatcctgttattatcttgattaatgccattttatgcaaagcccaggcctatcgacatattcttttcaacactaaaataaatatccatgggaaactctgcatgttttgtttgctttgtgaagcatacctgaggtggtggcagctgcaagactcaagccagaacacagccccagatgacttgatccgatatgccaaggagtgggatttctacaggatgtttgtgattgcttctttcgaacaagctgccttttttgctggcatttttgctttcctgtgggtagagctacccatgacaacaaaaaaaaagcccaactttgttttactactgaaagcgctgctgttgtccagctatgggaaactcctgctaatcccagctgtcatctgggaacatgactacacacctttgtgcctcaggctcattaaagtatttgtcctgacatcgaatttccaggcaatcagagtgactctgaacaccaaccgcaggctctccctgctggctgtgctgagtggcttgctgctggagagcatcatggtctacttcttccagaggatggagtgggatgtgggcagcgactgtgcagtctacaaatctcaggacttctgaagaaccagttaccgaagaagagaaagcacaagagaaagcaagtctctactttctgtgagtgaaatcaagcctggggattcctgaacccacccagacacccccaggaagatctgaaccacctagacacaaggct

SEQ ID NO: 6697 - DNA, 948 bp, Cricetulus griseus
ccctcgagtgtgtaaactctggagcagccggcgtcccaggaccagaaggaacctgctgctgggcactgcctgtgccatctacctgggcttcctggtgagccaggttggcagggcctctttccagcatgggcagaccactgaaaggggggcaccccacagccgcgacatctccaaggtactctttccggagatccccctggatggtaccctggcccctccagagtcgcaggataatggcagcacactgcaacccaacgtggtgtacattaccctacgctccaagcggatcaagcctgccaatatccgtggcacggtgaaacccaagcgcaggaagaagtatgcagtggtatctgtggcccctcgtcaggaggcgctggttaagccatcttttatactgcaggaagtcgcgcaggcagcagatgctgaagtacctggctatgctcagggttatggggctgcactgaaatccatcaccacgagtggtccaagatggctctctttgattttttgttacagatttataatcgcttagatacaaattgctgtggattcagacctcgaaaggaagatgcctgcatacagaatggactgaggccaaactgtgatgaccaaaattctgtgactttagcacacattatccagcgaaagaatgatccaaggcatttggtcttcataaacaataagggcttctttgacagaagtgaagacaacttaaaacttcaaaattgctagaaggcatcagagagtttccgactctgcagtttcagttttgaagagccagccattacgacagaagctccttcagtctctgttccttgactagtaactcactcctatgccactctgtagaccaggctgaccttgaactcagagatctgcctaataataataataataataataataataataataataataataataataataataataagtaatata

SEQ ID NO: 6698 - DNA, 948 bp, Cricetulus griseus
gccgcccgtgacgtcacggggcgccggcctccgcccggctgcaagcggtggtccacggaggcccagacccctctgctccccatgggcagctgccaagcagggcacaacctgcatctttgtctggctcatcacccacctttggtctgtgccactttgatcctgctgctccttggcctctctggcctgggccttggtggcttcctcctcacccatacatctggcctacgtagccctgacattccccaggattgggtttccttcttgaggtcttttggccagctgagcctgtgccctgtgaatgggacagtcgcagggaagtggcgagggcctcatgtcgtcggcttactgactactttgaacttcggagatgcttcagataggaacaaaacccaaacattccaagccaacgtccatggtagtcagataggattgaaagggtcctctgcaggagagtctatcctcatcacagccagagtggcctcaggaaggactccagagacctgcctctatttcagtgctgttccagaaatcttgccctctagccagccacctatatcctgctcagaggagggagctgaaaatgctaccttgagcccagtgatgggtgaagagtgtgtcagggtctggagcctcgaacgctttgtgctcaccaagctccttacttcggaggagctagctctgtgtggcaccagactgttggtcctgggctcgttcctgcttctcttctgtggttttctctgctgtgtcactgctgtgtgcttccatccacgcccagagtcccaccggtccagaacacggctttaagggcactggcctgctccttactctgttctcaggtgaagatcaaattcttgggcctacttctgagtttagaagacctattacaaaaacgaagatctggaatgtgggaaaataaatggctttttgactacaaaaaaaaaaaaaaaa

SEQ ID NO: 6699 - DNA, 947 bp, Cricetulus griseus
  modified_base (810)..(810): a, c, t, g, unknown or other
tcggtaaaggtagaaggagctgggttgaagacggaactgtggtctgtgagttgctggtgggcaggtttgatcggtgcatcgtttctccctggaaagggagggaggtttggaggtcgagagggagtcgccgctgccgcccgaactcgaagtcgctaggacttctctcaaacttgtgtgctgaggagactcgatgttggcctcagctcccaggctgaaatcagcagattggctcatgaaaacttatgtattgagacaaagaaaaggatctagcagaaagcaacatctcttatcctgggcgtggcagcagggaagaggacacagagtggaaaccctgcgatctgaaaaggagactgaaaggtgacaaagaagctgaagatgggtggtggagagaggtataacattccagccccccaatctagaaatgttagtaagaaccaacaacagcacaatagacagaagaccaaggatcagaattcccagatgaagatggttcctaagaaaaaagaaagaggacacgggtacaatccggcggcagctgcgcggcaggccatgcagaatgggggcaagaacaagagcctcgccaacaacccaagttggaatgctagcctatcaagcccaagcttgctttttaagcctcaagctaaccagaactatgccggagccaaatttagtgaaccaccatcaccaagtgttcttcccaagccaccaagccactgggttcctgtttcattgaacccttcagataaggaaacaatgacatttcaacttaaaaccctacttaaagtacaggtttaaattaacttttttttnttttatgagaataattaaatttacatgtaaatacatgtaatcttgtaacatatgtaaagttttctggcctttattctacaaaagactttttagtgtcaatttgctgaatgtaagaccatgaactttttttttattaa

SEQ ID NO: 6700 - DNA, 946 bp, Cricetulus griseus
caggtcaccctctcccgcggcgctcgccagcccctgcgtgtctgtccccgggtgggagggcgccatggaggcgccgccgcccgcgccccgcggcctgcttagcccggcctggggtcctttccccgagtctttgctgcgggtgctgtggctgcggattcccaagactttgcggagcaccgggagccgcatccctatgtctcagagccgggttccccggagtccggatgggaccgcctccggcagctgttgtcaaagatgaacattgaatatatctgcagggcagctgttttcagcaggcatcattggctgggcatatggaggaatacctgcttttattcatgctaaaaaccgctacatcgagcagagtcaaggggagatgttccataaccgctttgacgctgtgcaaagtgcacaccgagctggcacgaggggcttcctccggtatggctggcgttggagttggagaactgcagtttttgtaaccatattcaacacagtgaacactggactaactgtgtatcgaaataaaatgccttaagccattttgccattgctggagctgtcacaggcggtttgttcagagtaaacttaggtattcgaggcttggtggctggtggtataattggagccttgttgggtacgcctatgggatgcttgatgatggcactgcagaagtactgtgatgagactgttcaggagagaagacagaaggaccagaaggcactccgtgagcagaagctggaagagtggagacgaaagctgcaacacactgagctcctccctgagaaaattgcaagtgacttagagaagattcggtctgaggaaaatgctcagagaatccaggagctgctaaaccttcctaggaacccttcatcgccagataaaccaagcaaagactgaggacaaggggtctgtgtgtgaaggaatgccagtgccaggctactcc

SEQ ID NO: 6701 - DNA, 946 bp, Cricetulus griseus
cccgccatgttctccttggcgctgcgagcgcgggcggccggccttgccgccctgtggggaagacatgcaaggaatttgcataagacagctgtgcaaaatggtgctggaggagccttatttgtgcacagagatactcctgagaataacccagatactccgtttgatttcacaccggaaaactataagaggatagaggccatagtaaagaactacccagaagggcataaagccgcggctgtgcttccagtcctggatctagcccagaggcagaatggatggctgcccatatccgctatgaataaggtggcagaagttttgcaagtacctccaatgagagtatatgaagtagcaaccttttatacgatgtataaccgaaagccagttggcaagtaccacattcaggtctgcaccaccacaccatgtatgctgcgtgactctgacagcatcctggagacccttcagagaaagcttggaataaaggttggagagactacagctgacaagctcttcactcttacagaagtggaatgcctgggggcctgtgtaaatgcccctatggttcaaatcaatgacaactactatgaggatctaacacccaacgatattgaagacattattgatgaactcaaagctgggaaagttccaaaacctgggccaaggagtgggcggttctgctgtgagccagctggaggcctcacctctctgactgaaccacccaaaggacctggctttggtgtccaagcaggcctttaacttatactcaactctgaaaactgtccccggagaaataaaataggaagctatctacgtatgctttatagtgtttattcccacctgcacatcttagtagtaatctagcaacttggagttgctgactagtgtgtcagaacaacagacactaccttactctacctgtgaggactctgttattataacataatccagt

SEQ ID NO: 6702 - DNA, 946 bp, Cricetulus griseus
ggagcagatggcggctgagagctgggggctcagcaggaagaaggaggaggctgttcaggccctcacacaggaacggagccggctgtttgagctcaattgtcttcagggaacatgtagtggggacttctctgagcccgaccaagcgctcaccaagctgctgttcacacagaagacagaccgccagctactggttctgcaggaccctactgcgaatgtggcctccacctcctcgtgcctcttctccgtccacagttccctgaaggggtctatcggtctccagagaacaggaagcctgccccggaggaggggagacagggccagccagaggggatcccccgacctttgtccctccattgtacaggacccttggaggcctcggctcttgcgcaagcagtggggactcctgggagacaccctttctaccagctgctcaactgtggccctgggaatagacaatcggcaattcacccagacatcgtccacatggagcggctcctgcagaaggctgtggcagagagggaaaggctgctcaaggccagggaagggatgagaagaagccagaagggccacaatccggaaagctgccctcacttgcgggtgtccgggggctgctgtcgcgggcccctggtgaagatgggtggccgcatcaaaacctggcggaaacgctggttctgctttgaccgccaggctcgccgtctggcttactacgctgacaaggaggagaccaagctcaaaggtgtcatctacttccaggctattgaggaagtctaccacgaccacttacgctgcgccttcaagagccccagcccccgcctgaccttctgcgtcaagacctacgaacgccttttctatatggtggcccccagcccggaagccatgcgtatttggatagacgtcatcgtgaccgctgcggacgaaaaccacgccccgtgatcggccccgcccc

SEQ ID NO: 6703 - DNA, 946 bp, Cricetulus griseus
cgggaatcaagctagcgggaagatgaggcccttgactgaagaggagacccgagtgatgtttgagaagattgcgaaatacatcggggagaatctgcagctcctggtggacaggcccgacggcacctactgtttccggctgcacaacgaccgagtgtattatgtgagtgagatgatcctgaagctggccgccaacatctccggggataagctagtgtcactggggacgtgttttgggaagtttaccaagacccacaagttccggctgcacgttacagctctcgattaccttgcaccctacgctaagtataaagtgtggataaagcctggagcagaacagtccttcttgtatggaaatcatgtgttgaaatctggtctgggtcgaatcactgaaaatacttctcagtaccagggagtagtggtttactccatggcagacgttcctttgggttttggggtggcagcaaagtctactcaagactgcagaaaagtggaccccatggcaattgtggtgtttcatcaagcagacattggagaatatgtacggcatgaagagacattaacttagtatgggcatcccaaactttgctgattgagaggacttagctttgttcctatatgtgtgcagacatcatcgtgtcaaatttggaataacactgatatatgcaacttggattcttactcaacagaaaatggcgactgctcttccagaggtcctgagttcaattacccacgcaaccacatggtggctcacaaccatccattatgagatctggtgcccttttctgcttttttttttgtttctgtttgttttttagacaaggtttctctgtataacagttctggctgtccaggaactcactgtgtagccctggctggcctcacagagatccacgtgcctctgcctcctgagtgcttggattaaaggcatgcaccaccacaccaggca

SEQ ID NO: 6704 - DNA, 946 bp, Cricetulus griseus
gagaaactggacacacaggtcaagtctacggcagacagagtgaaagaagggtcggagtcctcttctatttcctcaggaaacgggggaaggcttcctactccaaagctgagagaacttggcatccagaggactcaccacgatctcacgactccagctgtcggtggagcagtcttagtgtcgccatctaaagggaagccttcagccccagagcagaggaagagagagtcctcccaggatggcttagacactctgaagaaggaccttcctaagaaaggaaaccactgtgctgtgtctctcctgacttctcctgctgccggcatcaagacagtagaccccctgcctttgcgggaagattgtgaagccaatgcccacagatttgctgaggctattcttccagtttcaaaagttccagaacatcagataagcacccttggacaaccttctactccctgtgtcctaccttactggcatccttccagcaggatccaaggctgtcttcgagaccctgaatttcagcacaatacgcagtttcagtgttaagggaattgtactttgaaaatccggttgtgtatatattcttatttatgtaacaattttctgagagaatatgtatattttttatctttttatgtaattctatttgtacaataactgacatacatttgaataatgtctagattttgagaaattatttatgtaacggaggataaaaactttgtagacatttaaaaatgaaaattaagtgtgcttgacttctccaaaaggttatcatgtggaataaatgccttctaggagcattctactagaattggttaataaaattatactatgtctgcagctgtcaactgcagtgaatccaagtctacagtattttctatactttttgcacaaatacaaggttttaaaagcaaattcattaaaaaatttcacatacaaaaaaaaaaaa

SEQ ID NO: 6705 - DNA, 945 bp, Cricetulus griseus
acttgtccatccttgtaaacatgtacatacttctttttgaattttctatttctgagcccggtgtcatattgacactggtgtttcagggcttctcagatgggctctccgtgttgcccttggtcatgctcctactttgggggccacatacataggtgcagcagggaatcagcagcatactttcaggtccctggttggttgtgagacacacacacacacacacacacacacacacattcacacacgctcacactcctctaagactccaaaggagaaccactgggaagtcggttttgtttccctgtagcagtgtgtctggaaggcctgtccactttggactctgctctgggggtggagctcagatgacctatggagaatcaaaccactttgactttgggatgggagtaacttaagctaaaggtattctatttataaagcaagagactctatttttatgaaaggaataggtttttaatgtaggataggccgttgtggtggcccagcattttgctgtggatgagataaccaccatgtttgttgactcggggtgtatagcaatcagtacccccctttcctcaccttgtcttctgtcttcactgaagatttccaggctcagtgtgggctgcgtgtgagtcttaggccaacccctcacttttccagttccctcccaagctctcaaagaactgtggtgaactccccacaacgccccctttacgcacagtgtagcatccacctggtttttagtcccaccctaccccacggttgctgtgtctgtcagctgggtctaaaatcaccgggaggggtttgtactcaactaaaagactactgaccctaccagaaaaccaacctgtttactgtactgttgtaaataccgtgccctttatatcctgtatattggcttcttttaaataaagtaaaaatgtcttaaaaaaaaaaaaaaaaaaaaaa

SEQ ID NO: 6706 - DNA, 944 bp, Cricetulus griseus
cagcaatggcaagaccatgccgcgacactgctccgccgccggctgctgcacacgggatacgcgcgagactcgcaaccgcggcatctccttccacagacttcccaagaaagacaaccccaggcgcggcttgtggctggccaactgtcagcggctggaccccagcggccagggcctgtgggacccggcctctgagtacatctacttctgctccaaacacttcgaggaaaactgctttgagctggtgggaatcagtgggtatcacaggctgaaggaaggggcagtccccaccatatttgagtctttctccaagttacgtcgaacaaccaagaccaaggggcatggttatccacctggcctgcctgatgtcagccggctccggcgatgcaggaagcgctgctctgaaggtcaaggacccacaaccctgttttctccacctcctgctgacatcatctgcttccctgtggaagaagcctcagcgcctgccactctgcctgcatccccagctgtgaggctggaacctggccttaacagccccttctcagatcttctgggcccggtaggtgcccaagcagaggaagcaggctgtagtgcccagccttcaccagagcagcacccctcccctcttgagccacggcctatctccccatctgcttacatgttgcggctgccaccacctgctggagcctacatccagaatgagcacagctaccaagtggggagtgccttgctctggaagaggagagctgaagcagctcttgatgctctggacaaggcccagcgccagctgcaggcctgcaaacgtagggaacagcggcttagacttcgactgaccaagctgcagcaggaacgggcacgagagaagagggcacaggcagatgcccgccagaccctgaaggaccatgtacaggacttcgctttgcagctgagcaatagcatggcatgag

SEQ ID NO: 6707 - DNA, 944 bp, Cricetulus griseus
aagactgtctggatccagaccaagggctctagctcacgggactcctcagcacgaagaaggctgcagtcttgaatccctggtggaggacggactctaccattctcctgtcttgcccctgatgatgaaagtgtgactgctggcttcttcatgagctccagaggtcacagcacgctcccacggactctcatggctcctcggatgatttccgagggagacataggaggcattgctcagatcacctcctctctcttcttgggcagaggcagtgtggcttccaaccggcacctcctccaggcccggggcatcacctgcatcgtgaatgctaccatcgagatccccaacttcaactggccccagtttgaatatgttaaagtgcctctggctgacattcctcatgcccccattagattgtactttgacactgtggctgacaagatccacagtgtgagcaagaagcatggggctaccttggtgcactgtgctgcaggagtgagccgctcggccactctctgtattgcgtatctgatgaaattccacaatgtgtgcctgttggaggcatacaactgggtgaaagcccgaaggcctgtcatcaggcccaacgtaggcttctggaggcagctgatagactacgagagccagctctttgggaagtcgacggttaagatggtacagacaccctatggcgtcattccagatgtttatgagaaggagtcccgacacctgatgccttactgggggatttagtgctgccacagctggcatccgcagcccctcagcagtaccagcatctgccacacacagtcttctcccctcttcctctctctcgttctcccgagagtgtttctacactggtgttcaggtttaagagacagggaggggaaatacatacattgctagtaacgttttttaaaactagcattttgaaatagcaaacatgaaaatct

SEQ ID NO: 6708 - DNA, 944 bp, Cricetulus griseus
gggagcggagcggggcctcggggggcctcgctagggccacagcggccggcagttgggccccccgccccggccggcggttcgaggagtgcaggcaagggggccggggggacccgcccccggtcggccgaagtcatgaactccaacgtagagaatctgcctccgcacatcatccgcctcgtgtacaaggaggtgacaacgctgacggccgaccctccggatggcatcaaagtcttccccaatgaggaggatctcacggacctgcaagtcaccatcgagggcccagaggggaccccctatgctggaggtctgttccggatgaagctcctcctgggcaaagacttccctgcctccccacccaagggctatttcctgacgaagatcttccacccaaatgtgggtgccaatggtgagatctgtgtcaacgtgctcaagagagactggacggctgagctgggcatccgacatgtgctgctgaccatcaagtgcctgctgatccaccctaacccagagtctgcgctcaatgaggaggcaggccgcctgcttttggagaactatgaagagtatgctgcccgggcccgtctgctcacagagatccatgggggtgctggtggctccagcagcgggagggctgaggctgcccggggaagtggggctgcagcctcccccactgaccctatgactccaggaggcctgggaggagctgagggtcccatggccaagaaacacgcaggcgagcgagacaagaagctggcagccaagaagaagctggacaagaagcgggcgctcagacgcctgtagtgggctctcccttcctccctctgctccgtccccgcccaccgcccactctgtctctaagttatttaaattatggctggggtgggggagggaacaggggagggcaccagaacctggatttggttttctaaataaaagttggaaaagca

SEQ ID NO: 6709 - DNA, 944 bp, Cricetulus griseus
ggtggtcgagtttggtgagccttttctggaccccagtaggcatggcggcggcttttcgcaaagcagctaagtcccggcagcgggaacatcgagaacgaagccagcctggctttcgaaaacggctgggtttgctggagaagaagaaagattacaaacttcgtgcaaatgactatcataaaaagcaagatttcctcagagctcttcggaagaaggctcttgaaaaaaatccagatgaattctactataaaatgacccgggctaagctccaggatggagttcatatcttcaaggagaccaaggaagaagtgacaccagagcagctaaagctgatgagaactcaggatatcaaatatatagagatgaaaagggttgcagaagcgaagaaaattgaaagactgaaatcagagctccacctgctggatttccaggggaagcaacagaataagcacgtgttcttttttgacaccaaaaaggaagttgaacggtttgatattgcgactcacttgcaaacagccccagagctagtagacagggtctttaatagacccaggatagagaccttgcagaaggagaaagtgaaaggcgttacccctcagactcgactcaagaggatagctaaagaaagacaaaagcagtatgattgcttgacacagcggattgatcgggagaagaagctgttcgtggttgcacagaaaattcaaacccgcaaagatcttatggataaaactaacaaggtgaaggtgaagaaagaaacagtgaactccccagctatttacagattccagactcgccgaaaacgttgatgtgttaaaaataagcctcgtcgttctacattgaaaagtaacttcttttttttttttcctccttttgtaataacttcagtatttcattagttcagatatcttggtcttattgttttgtaatcatgacttattgtcaacctg

SEQ ID NO: 6710 - DNA, 944 bp, Cricetulus griseus
atggaaggtgtggagctcaaagaagaatggcaggatgaagattttccaatacctttaccagaagatgacagtattgaagcagatatactagatgtaactggtccagacagccaacctggctcattagaagttaatggaaataaagtgcgtaagaaactaatggctccagacatcagcctgaccctggatcctagtgaagactctgtgtggtcggatgatttggatgaaggtggagaggttgacctggaaggcttggacaccccatcagagaacagtgatgaatttgagtgggaagatgatcttcccaaacccaaaactactgaagtcattaggaaagactcagttactgaatacacagccacagaagaaaaggaggatggacgccgctggcgcatgttcaggattggagaacaggaccacagggtggatatgaaggcaatcgaaccctacaaaaaagttattagccatggaggatattatggggatggtttaaatgccattgttgtatttgctgtctgttttatgcctgaaagtggtcagcctaactatagatatctgatggacaatctctttaaatatgttattggcactttagagctgttggtagcagagaactacatgatcatttacttaaatggtgcgacaactcgaaggaaaatgcccagtctgggatggctgaggagatgctaccagcagattgatagacgattacgcaaaaacctgaagtctctaatcattgtccacccatcttggtttatccgaacacttttagctgttacaagaccatttatcagttcaaaattcagtcagaaaattagatacgtctttaatttggcagaactcgcggagcttgttcccatggagtatgttggcataccagagtgcatcaaacaagttgatcaagaacttaatggaaaacaagaaccaccaaacagtgagcagta

SEQ ID NO: 6711 - DNA, 943 bp, Cricetulus griseus
cttactggcaagagcttatagacctcaatactggagaatcagctgatattgatgttaaggaggctctaattaatgctttcaagagacttgataatgacatttcattggaggctcaagttggtgatcctaattcttttctcaattacctggtgcttcgggtggcattttctggggctactgcctgtgtggcccatgtagatggtgttgacctccacgtggctaacactggtgatagtagagccatgcttggtgtgcaagaagaagatgggtcttggtcagcagttacgctttctaatgaccacaatgctcagaatgaaagagaactagaacgtctgaaactggaacacccaaagaatgaggccaagagtgtggtgaagcaggatcggctgcttggcttgctgatgccttttagggcttttggagatgtgctgttgatcatgagcgtctctctaaaatgcttagtcttcccgaagaacttgctcgcattgtatagagatgacattacaatcattgtagttcagttcaattctcatgttgtaggtcacaaacatttattttagcctgaagttttttcaggtccagtactttaagccataaatgaccatgaaccaagatacctggttttaagtttttgtgattgtatcataaaatattcttcccagataggattctacactgcccttccttcctcacccatgatttcctcagtgtaactgagaagttttgttttgctacacttaaaaaacaataaaggttcttagttttatttatccttctagtgaatgttaagtaaagggaaatgtgttttttcagtttgtattcatgaaaagatttatttagtttgaataaagatacccagaatgaaaagaaaggaatggtggtatgacacttggttgaatgctgtctatggttagagaatgcccacagtgaattaaagacttta

SEQ ID NO: 6712 - DNA, 943 bp, Cricetulus griseus
caggagaaatggccctggtaccctatgaggagagcatggagatagggctccagaaattccataagcctctcgccaccttctcttttgcaaaccacaccatccagatccgtcaggactggaggcaactgggagtcgcggcagtggtttgggacgcggccatcgttctttccacgtatctggagatgggtgccgtggagctcaggggctgctctgttgtggagctgggtgctggcacagggctcgtgggcatagtggctgccctgctgggtgctcatgtgactatcacggatcgacaagtagcattagagtttcttaagtcaaatgttgaagccaacctacctccccatatccaacccaaagttgttgttaaggagctgacttggggacagaatttggaaagtttttcgcctggagaatttgatctcattcttggcgctgatgtcatttacttagaagataccttcacagatctccttcaaaccctgggacatctctgtagcagccgctctgtgattcttttagcttgcagaattcgctatgaacgggacaataacttcttaatgatgctggagaggcagtttactgtgaataaggtccactacgatcctgagaaggatgtacatatttacaaagcacagaagacagaccagagggaggacttgtagtaggcattggtttctaagaacaatgtgtcagttaaggtcttacaatcagaattcccatgttaatgtgatggcagactgcaagcctgtccaaccagagctgctcaaggaacaaagcacttgtgttctttgtgtgtcgccttggcatctggcctactatttagttcttaagcaccttgagatgaagatgagttttctggttctcataagatacctttttaccagatttcaggggtatgtaagcaaagaagtaaataaaaataaatttttacatttaaaat

SEQ ID NO: 6713 - DNA, 943 bp, Cricetulus griseus
caggagttggaacgactgcagaatgccctgaggcagacagaggccagggagatcgagtggagggagaaggctcaggacttggcacggtccctggcccagagcaaggccagcaataacagtctgcaggagatcgctatgctcctacaagcctctgtcctagagcgggaatcggaacaacaaaggctacaggaggagttggtgcttagcagacaggctctggaggagcagcagtcacatggctcacattcaaccagcagagcagaccgggggcccaaagctggacaagatgtacatcctggaaaggtagttgtggctgagcccagtcctggggtggaggagaaggagcagtggacacaaaggcttgaacgtctgcagcaagcagttgcacagctggaatttgaccggagcaagctgcaacaccacaatgcgcagctgcggattaccttagagctggtagagcgagaacggaggaagctgaagagggattccatgcgtgcttcccgagcagggtcactggagatgaaagaagctatggcttcgtccccgcacagcaggatgggagagcagctcagaggggttcctcggatagcatgcgtgtggttgaacttcagagagaggtagcgctgctgcgagcccagttggcattggagcgaaagcagaggcaagactacattgcacgatccgtgcagaccagccgcgagctagcaggcctgcatcacagcctgtctcactccctcctcaccgtggcccaggcccccgaggccactagttcttgaggctgagacccgaaagctggatgagtccctgagtcagagtctggcatccccagagccagttctgctacatcccagtctggacactgctcaaacctacccccaggtagcagccatagccagggcagaacataggccagtaaggtggtgcacattggacaattgcagag

SEQ ID NO: 6714 - DNA, 942 bp, Cricetulus griseus
cctcgagaaccaccttgcgcatgcgccccagctcctggagataagccgctgtgtacggatggtctcggtgaaggtgcaaggctgcggtggcggcgtgacaagcctgcgctaccagtgcgcccgtgggccaggaaaaaggaggctgagatagatccttgcgtaacactaagtactgtacaaggatctgcggctccgcgccagagcctgccatcttcttgatgatctgaatggccggaccgactctgcggtgcatgctggggattagcaatgaagacccaaacagaacagtggagctcagtgagcaggaggaatctggcaaggcagtggggaaacgtgaaagacattctacaggcctatcgttttacagggctcagtgggaagctgaccagccgtggagtctgtgtgtgcatcagcactgcctttgaggggaacctactggattcctactttgtagaccttgtcatggagaaaccactcaggattcatcaccattccatcccagtcttcatccctctggaaaggatagccacagaatacctacagactgatatccagcgcttcctcttcagtctctgcgagtacctcaatgcctactcagggaggaagtaccagacggaccaacttgagactgacttcagtgccttcctcactggacctttgcagagaaatgccctgtgcaacttgctgtcatttacctataaagtggatcagggacaccagaccttctcctttagtgccacattgctgtatgaggacctcacagcagctcttcccacaggtgtcactgtgatgtgcccaggggcagaaacatcatccgctcgttgggaagaacacagagcatcccatgaaatgctcttccgaaccaagccactgcaccaggtgtttgcttccttttcaaaacaagttgaaatcctggatttgagcctggtctcctgaaaaact

SEQ ID NO: 6715 - DNA, 942 bp, Cricetulus griseus
cggatcgtggcgcgcggacggcggcccgcggaaccggacggtaaagctcctctccgagccgctgactaagaagataaactggattgtacagtatgcacaaaataaggatatggatttggattctgagtgttccaaaaatacccgacatcacctgttaattccggcataaaccagataagaaattactcccacagtttgactctcaagtgccaaagtactctgtgaaagggatagctgggagcaccggtggcctctcaagctacacacaaagaattttggagcagagggaaaatacagactttgggcttgctatattgcaagactcagatgcgttgtggcctcacaaacacaaccaggcacagaaaaagaagagacgagctctggtccagagaatgtccagacccaaaatccacgttatagcagagaggaactgaattcaatgactcttgatgaagtagaacaactgaatacaaagctccaacagcaaatccaggaagtgtttgaagagttaacacaccaagtccaagagaaagactctttggcgtctgagctgctatcgagcagctcctcaagaactattccaagttaccatgcctgcaagtgggacgggcaggaccgaggtcacacctgcccataaacaactgaactgaacgtagcgtctgacttttaccctctgttagtctgccaagcatgtgtacctcgaacacatttgaagaaagttatagtccattcttacggttgttgtacttgcaaaacctaagataatatctattatcttaatctaataaagaaggtcactctagtctagggttaatcatttggcttcatttggggactttttcttatagtcactaaatgcccctccctaacttttaccaatactgttactgacagacattgctactgttcagtgtgtgtgtgtgtgtgtgtgtgtgtgagaca

SEQ ID NO: 6716 - DNA, 942 bp, Cricetulus griseus
  modified_base (150)..(150): a, c, t, g, unknown or other
aaagttcatgccagggaagaggaagaaactgcgggagatccgagagagcatccgcctgctgcgccaggtggggaaggattgggtgcagcgtcgccgagaggccctgaagaggggtgaggacgtgcccgccgacatcctcacgcagattcncaaagccgaggagggagcccaggacgaccaggtcctgctggacaactttgtcaccttcttcatagcgggtcacgagacttctgccaaccacttggcattcacagtgatggagctgtctcgccagccagaaatcgtggcaaggctgcaggccgaggtggatgaggttgtcggttccaagaggcacctggactatgaggatctggggagactgcagtacctgtcccaggtcctcaaagagtctctgaggctctaccccagatggaggtgaaggtggtcatggctaagctgcttcagaggcttgagttccggctggtgcctgggcagcgttttgggctgcaagagcaggctacgctcaagccgctcgaccccgtgctgtgcaccctgaggccccggggctggcagcctgctcccccacccccaccctgctgagccctgccagggcctcattggcccccatttgcttgcccatggccacccactggcacccctgaccccttcttccgccaccttccatgatggctcctggcgggccctgtaccctcatccgcttcaacaccctcagtgcttcctgtcatctgctggcttttcagccctttctggtgggctctgcctgactcccagccaccaccaccaccgccaccttctctcctgaacctctgaacttctgcactggccacacccctcaaaaagagacaccctaaactcttgctcattccctaaaatcttcaaagtgacatcccgcaggaagccctcctcactcccacggcggccagggtccctcctctctgttcc

SEQ ID NO: 6717 - DNA, 942 bp, Cricetulus griseus
  modified_base (507)..(507): a, c, t, g, unknown or other
tggacgagtcggggaaaaccggatcatggtgtccaaggtctacatattcttgatcttcatggtactgatcctgccctccctcggcctgactagcctggatttcttcttccggtggctctttgacaaaacttcctcagatggttccatcaggctagagtgtgtcttcctgccagaccagggcgccttctttgtgaactacgtcatcgcctcagccttcatcggcagtggcatggagctggtgaggcctgcccggcctcatcctctatacctttcgcatgatcatggccaagacggccgctgaccgcaggaatgttaaacagaaccaggcctttgaatacgagtttggagccatgtatgcatggatattgtgtgtcttcactgtaatcatggcttacagcatcacttgccccattatcgtgccattcggcctcatctacatcctgctgaagcatatggtggaccgccacaacctctactttgcttacctcccggccaagctggagaagnggatccactttgccgctgtgaaccaggccttggccgcccccatcctctgcctcttctggctcttcttttactccttccttcgtctgggtctaaaggcccccgccactctgttcaccttcctggtggtgctgctcaccatcctggcctgcctgctctacacctgctttggatgcttcaagcacctgagcccccggaactacaagacagaagagtcagccagtgacaaaggaagtgaagcagaggcccacgtgcccccaccattcacaccctatgtgcctcggattctgaatggtttggcctccgagaggacggcgttatccccacagcagcagcagacctatggtgccatccgtcacatcagtgggactcttcctgggcaccttgtggctcagaattctagtgacagtgtggccagtatcgaccaggaatcttgag

SEQ ID NO: 6718 - DNA, 942 bp, Cricetulus griseus
aggagatgacacatggggtctcagcattcctcctctgcccgcacattttgtcaacggaggaaggatgacaacctggaggacttggaggctgagagagagcaggaggaagccatcgctcagttcccctatgtggaattcactgggagaaatagtatcacctgtcacacctgccaaggagcgggctacgtcccagcagagcaactcaatgagttggtggctttgatcccccacagtgaccagaggctgcgaccccagagaactaaacagtatgtcctcctgtcagtcctgctctgtctcctggcatctggcttggtgtttttcttcctgtttccacattcagtcctcgtggatgataatggcatcaaagtggtgaaagtcacatttaataaacaggactcccttgtaatgcttgatgtcatggccaccctgaaaatcaggaactccaacttctatcctgtggcagtgaccaacctgttcagccaggttcagtacatgaaagctgtggttggcacatacatgaccactaacgtctcactcattccccctcggagtgagcatctggtgaattttacggtgaaggctaaggtgggaggaccatcttcctacgtgtacttcatctgcacggtacctgccatcctggtgcacaacatcgtgatcttcatgaggacttctgtgaagatttcatacattggccacatgtcccagagcaccttggagacacaacactatgtggattgtggggcgaattccacagctgtttagagcctgcctttagttctccactggctgtacctgtagaaggaagctaacatctgccccaaatcactgcccagtgcctagtctgtgcctagcaaatagttagcactcaattacagtttgaggaattgaattcattggggatttgatagaaaaataaaccatgttttgattgaaaaaaaaaaa

SEQ ID NO: 6719 - DNA, 942 bp, Cricetulus griseus
gcctcaacctgactcagttcacacagtacgatgagaacacgtggacagaggtgaacgatgtgaagctgcgaaactatgtggtagagaagatgccagaaaagctgggctacgacctgagccacagggagaaaggccattctccagaggacatctaccagatggcactggacaaggctctcaagtacctcaaggtcatgggctgcaagaaagccatgaagaagttccacaggcacacactcctggaataccttactggtgagggcaacctgacctggccggccgtgcagctcctgggagacgtgatgtccaaggagggcttcttctacctcagctttgcagaggcattgcgtgcccacagctgcctgagcgaccgacttcggtacagccgaatcgtgggtggctgggacctgctgccgcgcgcgctgctgagttcattgtctggcccggtgctactgaacgcgcccgtggtggcgatcactcaggggatacatgatgtgcgcgtgcatatcgccacttcgcttcacagcttgaagtcgatgaccgcagacttggtgctgctgacggccacgcgggcccgcactacagcgcatgaccttctcgccgccgctgacccgcaggaggcaggaggcgctgcgtgggctgcactacgtggcagccaccaaggttttcctgagtttccaccgacccttctggaacgaggagcacatcgagggcggccactccaacacagaccgcccagctcgcctcatattctatccggccccgggcgagggcgcattgctgctggcctcgtatacgtggtcggacgccgcagcccccttcgcaggcctgagcacagagcaggccctgcatgtggcgctcaaggacgtggcggcccttcatgggccggttgtgtaccggctgtgggacggcacgggcgtagtcaggcactgggcggaggac

SEQ ID NO: 6720 - DNA, 942 bp, Cricetulus griseus
atgtttcaaatccttttgggaccccatttggctccagtgtagtgaatcggatggctggaattttgatgtaaacacctgctatgggtctccccaaagtcctcagctaataagaagagggccccgattatggactcatgcttctgatcagcaaatatctgacttttctaatcccatctccttgtacctctgccactgctgagggtaagacagtgagacagcccaatgtgatttactcatggattcagaataaacgtgaacagattaagaatttcttgtcaaaacgggtgctgataatgtactttttagtaagcatccagaggcctccattcaggctgtattttcagatgcccaaatgcatatttgggctttagaaggtctgtctcacttagtagcagcatcatttacagaagatagatttggagttgtccagaccacactcccagctatccttaatactttgttaaccctgcaggaggctgttgacaagtattttaagctgcctcatgcttctagtaaaccaccccggatttcaggaagccttatggactcatcctacaaaacattaagatttgccttcagggcctctctgaaaactgctatctaccgcatagccaccacgtttggtgaacatctgaatgctgtgcaagcatctgcagaacatcagaaaagacttcaacagttcttggagttcaaagagtagttgagtaatataaactgtgttcattaccctgctgatacaactacagatgtgttcagcattcttggatcagaagaaataggactaattagatgcttcctttgtcgtggtgcttgcttttgaaaactatactttaatggggagaaatcatggaaagaaattctcagcagaataaccgaaaaactgccttttctgtaccaaatgctttttgtgtgtgtggtataataaaatctttattcagcttt

SEQ ID NO: 6721 - DNA, 941 bp, Cricetulus griseus
  modified_base (843)..(843): a, c, t, g, unknown or other
aaaataatattaatcagaacttcatcttctggaacaagactctgaatagagaccaatatgcttcacttcatccagaaattttctgcagcctcttcaaagatgctgaagtacccttctatagtgagacccagagccaacagaatagatgtattttcttccaagacatctgttcagcagaacctttcccctttgtctccaaggaagttggcttcccacatcatttcaagtgtgtatgaagaatatacaatgctaccatgcatcaccgtgcaactttaaaagacatcagaaggaagcattccttccctccaagccaccaagcaccatcacttacctacctgatagcccaaagccagcattatatataagcttggtggggttaatcccctttattgctccaccactcactatggtcataacaaagtcttacatccccatactagcttttactcagatggcttatggagctggtttcctagctttcttgggaggggtcagatggggttttgctctgccagaaagtagtccagccaaaccagactacattaatttagctagcagtatgagtcctgttctattttcatggtagcatcctcttttctgaaagactcactgaagccatagtcacagtaataatgggtttagggatagcattacataatgaaattttcctcttgccacattatcccaactggttcaaagccttgaggttagtaagtactttagtggctttttttctcatttgtagtcactttaatacttaaaagtgtttatccagaaaaagggcccaagagattttagtcaagtagaaatataaaactcctttctttttttttttgttttgtnttaagaacacaccagaagagggcaccagatctcatagcagatggttgtgagccaccatgtggttgctgggaattgaactcaggacctctggaagagca

SEQ ID NO: 6722 - DNA, 941 bp, Cricetulus griseus
gcccctaggtggggtgaagcttcctgtcttttgcctttgctccggtgctggctgcaggatgaactgtcgatcggaagtgctggaagtgtcggtggagggacggcaggtggaggaggccatgctggctgtgctgcacacagtgctcctacaccgcagcacgggcaagtttcactacaagaaagaggggacttactccatcggcaccgtgggcatccaggatgttgactgtgacttcattgacttcacatatgtgcgtgtctcctctgacgagctggaccgagccttgcgcaaggttgttggggaattcaaggatgcactgcgaaattcaggtggtgatgggctaggccagatgtccttggaattctaccagaagaaaaagtctcgctggcctttttcagacgagtgcatcccttgggaggtgtggacagtcaaggtgcacgtggtagccctggccacagagcaggagcggcagatctgccgagagaaggtgggtgagaagctctgtgagaagatcatcaacattgtggaggtgatgagccggcacgagtacctgcccaagatgcccacgcagtcagaggtggacaacgtgtttgacacgggcctgcgggacgtgcagccctacctctacaagatttcctttcagatcacggatgccctgggcacctcagtcaccaccaccatgcgcaggctcatcaaagacacccttgccctgtaggccttgctagaggcctacatgggtcactccatgatggctctgggagtctgatgcggggatcttggagctctagaatctgccctggacccttgatgagacttgaagagaagctcctggtgtccttgttttgtggttaccggcctctggtgaccctgccacctttgcagtggttctgttctgggtgtagcctctccacacctcccctggtggggttctctttctacac

SEQ ID NO: 6723 - DNA, 941 bp, Cricetulus griseus
gcaagatggctaccaccaagcgtgtgctgtacgtgggtgggctggcagaagaggtggacgacaaggttcttcatgctgcttttatcccttttggagacatcacagatattcagattcctctggattatgaaacagaaaagcaccgaggatttgcttttgttgaatttgagttggcagaggatgctgcagcagctatcgacaacatgaatgaatctgaactctttggacggacaattcgtgtcaatttggccaaaccaatgagaattaaagagggctcttccagaccagtttggtcagatgatgactggttgaagaagttttctgggaagactctagaagagaataaagaagaagaagggcccgaacctcccaaagcagaaacccaagagggagagcccactacaaaaaaagcacggtcaaatcctcaggtgtacatggacatcaagattgggaacaagccagctggccgcatccaaatgctcctacgatctgatgttgtacccatgacagcagagaatttccgttgcctgtgcacccacgaaaagggttttggcttcaagggaagcagcttccaccgcatcatcccccagttcatgtgccagggcggtgatttcacaaaccacaacggcacagggggcaagtccatttatggaaagaagttcgatgatgaaaacttcattctcaaacacacaggaccaggccttctctccatggccaattctggcccaaacaccaatggctcccagttcttcctgacctgtgacaagacagattggctggatggcaagcatgtggtatttggggagatcaccgaaggcctggatgtcctacggcagattgaggctcagggcagcaaggatgggaagcccaagcagaaggtgatcatcgctgactgtggagagtacatgtgatgcttcgctcggctcccacctctgtaagac

SEQ ID NO: 6724 - DNA, 940 bp, Cricetulus griseus
  modified_base (853)..(853): a, c, t, g, unknown or other
atgacatctgcattctgaatcatgagaaagcccagagaagagaggcagtaatgccactctctgtgtattcaggggatgaatcggtcgcctcacactttgctcttgtcaccgcatatgaagacatcaagaagagacttaaagattcagagaaagaaaactctttcttaaagaaaagaataagggctttggaagaaaagcttgttggcgcgcgagtagatgaagaaacaagttctgtgggacgagagcaagtgaataaggcctatcatgcatatcgagaggtttgcattgatagagacaatttgaagaacaaattggagaaaataaataaagacaacactgaatctttgaaagtattgaatgagcagctacagtctaaagaagtagagcttctgcagctaagaacagaggtggaaactcagcaggtaatgaggaatttaaatccaccctcatccaactgggaggtggaaaagttaagccttgacttgaagatccatggtttggaacaagagctggaagtaatgaggaaagaatgccacgacctcaaaatagagctacagaaagccaaacagacgggtccacctcaggaaaacattcctcaggacagagatctcatcagacggagcctgtcgagggaggaagatggtccacatcaaggccttctccacagtgataatatgcaacatgcatactgggaactgaagagagagatgtctaacttacatctggtaacacaagtgcaagcagagctactcagaaagctgaaaacctcagctgcaatcaagaaaggcaagtcactgctggctggaaatgctgattccagccaaactgcttgaagaacagctagctactttancttatcaaaatctatcctacgactttgataagcaggctgtatgcagtgtgcacactgcacacccattccctgctttggcttcagtct

SEQ ID NO: 6725 - DNA, 940 bp, Cricetulus griseus
  modified_base (627)..(627): a, c, t, g, unknown or other
gtgtgtgtgtgtgtgtgtgtgtgtgtgtgtgtgtgtgtgattgttatgagccaggcagtggtggcacacacttttaatcccagcactcaggaggcagaggcaggtggatctctgagtttgaggccagcctggtctacagagtgagttccaggatagccagggctacacagagaaaccctgtctcaaaaaacaaaaaacaaaaaaacaaaaacaacaaaaaaaaaaaacaaagcctcttgagggtagggattgatccctcatgtccacaaaggtcccctggatcttgaactggaactcaagatacttcagtctcacacccagaacctactgacctgactgaaggccggctcaaaatagccctttagaccaagagagccactggaacttgaattgggaaatctggagtccttttcccatctcaggacactgaggatcatgtagctggtggagaacttcccaccctaaaaatacctgcctccacccaaccacccagagacattccacctacttggatctccaagcacagctatccagagaggctgggatgatctttcagtagccattactcaatacctccatgctgagccctgtgcacagactcacaggtagggaaaccgtggcagaacngtttccgcccccccccagacgcctttatcttgagaggccaggactcttgacttcttctctaggccctgctgattgtgacaccgagatgcatgtggaaatggggtttgtcagatactctgcaggacacagctgttcctgctttgagcagtgatttctagcctgatgctagagagcccccaccacccctgggtgctgctgagttggctgctgagacaagcctccaaaaaccaggtccatctttatggcctaggaactgcctgccctccagagaaacagctggggggactctagagcagcaggacctggaatttct

SEQ ID NO: 6726 - DNA, 940 bp, Cricetulus griseus
aaagaaagcacttaaactcttcaattcataacaaagaagtttatcatgaaaaggacatcaaggtattttttgtataaagccaagcatgaaatcagtaccatcaaaataagtaggaccagaagaaaatactaagtcaagcagaagccagaaacatgggaatggatttctgccgtcaggatgaaaagtgtgattactacttttagtgtggatgcagatgttgttttgacaaaccccagaactttaaaaaatttgattgagcaaaacaggaagatcattgctcctcttgtaacacgtcatggaaagctgtgggtatgtttatgtacatttctaacagacatgaatttggacggctgttgtcaactgccaattacaatacccccccatctcaacaatgacctgtggcagatttttgaaaaccctgtggactggaaggaaaaatatataaatcgtgattattcaaagattttcactgagagcatagtggagcagccttgtccagatgtcttttggtttcctatattttctgaaaagagcctgtgatgagttggtcgaagaaatggagcattatggcaagtggtcgtgggggaaaggcatcacgatagccgaatatctggtggttatgaaaatgtcccaaccgatgatattcatatgaagcaaattggtctggagaatgtttggctttcactttatccgagagttcattgctccagttacactgaaggtctttgcaggctattacacaaagggatttgcactgctgaattttgtagtaaagtactcacctgaaagacagcgctcgctccgtccccatcatgatgcctcaacctttaccatcaacattgctctcaataatgtaggagaggattttcagggaggtggatgcaaatttctaaggtataattgctccattgaaataaaataatttaaaataaaaaaaaaa

SEQ ID NO: 6727 - DNA, 940 bp, Cricetulus griseus
tgcccaccgcctgagatctgcaagctgcgtacccacgagcgcccacttggattttgcaaccagagatagcagcaatgacatcaaaatggagaactactgcatcttggtattcccacccagtatatgcaagatactggcgacattatcatcatgcaatggcttggatgcaaagccaccagagagcctacaaaaagtccagggattcatatttcacttccccatggttctccccttatggagttcttccctggagctctcttgattatgaggctgggcatccttggaactatcaaggccagcacatggcctggcaggagtctccctacaatgtttcacatctcaaaagctctgggcagcctctgtatagcaacagtagaacccagacatccgcaagagaatatgaagccccgcaggaagaggaagagatagagtcagattcagataacgaagtagagtgtgacctgagcaatatggaaatcaccgaggagctccgccagtactttgcagagactgagaggcacagagaagagcgacggcgacagcagcaactagatgcagagcgcctggatgactatgtgaatgctgaccatggcctgtactacaaccaccaccggtccgtggagcccccctctgagaagcctggggaacggcgtcaagccgagatgaagcgcctgtatggggacagtgctcccaagatcctggccatggaggctgctgtgcaactgagctttgacaagtactgtgacaaaaagcagccgaaatactggcctgtcattcccctgaagttctgacgccggcacacaggaaccctagggaatgcgcctttaatcccagcactccggaggcagaggcaggtggatctctgagtttgagtccagcctggtctacaaagtgagttcctggacagccagaactgttatacagagaaaccttgtcttgg

SEQ ID NO: 6728 - DNA, 940 bp, Cricetulus griseus
gctgatgcaaatctccaccttccaagtccgtgtggagcaggttggatggacaatggcctgagggtttattggcttcagacaatactcttcattttgtctctccactgactttcaattattctggcatttatatctgtaaagtgacaaattcccttggtcaaagaagtgatcaaaaaggtcatctacatttcagatcctcctactaccaccacccttcagcctacagttcagtggcatccctcaactgctgacatcgaggagctagcaacagacctaaaaaattgccctttccattgtcaactttggcaacaattaaggatgacacaattggcaccatcattgctagtgtagtgggtggggctctcttcatagtgcttgtgagtgttttggctggaatattctgctataggagacgacggacgtttcgtggagactactttgccaaaaactatattccaccatcagacatgcacaaagaatcacaaatcgatgttcttcaacaagatgagcttgatccttacccagacagtgtaaaaaaagaaaacaaaaatccagtgaacaatctaatacgtaaggactacttagaagagccagaaaaactcagtggaataatgtaccactaatgtgacttcactgtgtactaatgtttcattcatactattgatcattttcagattgttcatactttttcttgaggaagaataagctttttcaacttgatttcgagcttactttttatattctgatctgacaaatgaaaatgtaaaatctgggttcaatgtatctgagctgctttacaatttttttcactgctgtactactgtctcaagatttaaattctaatgcagagtactttattggtctgaggcacacaggtaagaagaaatgtcaacgttaaatgtatgatgtttttggtacaaaaattaaaaacagaaaaaaa

SEQ ID NO: 6729 - DNA, 939 bp, Cricetulus griseus
tgattctgatggattagtacaagaactcagacactttagtcatgaaggcacacagttggttgaagaatctgtaaagcactgtgattcactcaacagcaacctggaaactgtatctcaggagaccacacagaagtgtgaatctttgaacacaagcacagtttattttctgaacagtgggcatcttgcttaagcaagagtaaggaggaacttcagaacctaatggagtttataaatgaatgttgtgaggctacaggttcagagatcactgcaaaacagagtgtgcatgcagctgccattgagaaccagcacacttccttcatcgtgcagataacttcggatgacgaaaaattaaaagcaggaaatctaaagcttgatgaaactataaaaactggtttgacaaagcttaattgctttcttcaagaggatctgaaactagatatcccaacaggtatgacaccagagaggaaaaattatttatatccatcaacactggtaagaactcaaccacgggaacagctccttgatcagctgcaaaagaaacagcacaaccagttaaactgctcagaaaatgacaaagaggcctttcaggacacagatgtcaaggaggtggttcaggaacaatgtactgaagaacttttaagtcaagagacatttgtacataccagtgtggattgctcttcaaatggcggtgttccgtttttccagcataaaaagccacatggaaaggacaaagaaaacagaggcattaacccagtggagaagtctaaagtggaagagacttcagagtactctgtcacaaaaagcagattgccacttcgagcctcaaatctctaattaatctgagggctaaggttttctttacttaaaaagtaaacctgaaacttttaaattaaattattttaatttttaaaaaaaaaaaaaaaaaaaaaaaaaaaaaaa

SEQ ID NO: 6730 - DNA, 939 bp, Cricetulus griseus
tcatggagacgctgctgaagcgtgagctgggctgcagctcggtcaaagctacgggccactcgggaggcgggtgcattagccagggccagagttacgacacggacaaaaggacgagtgtttgtgaaagtgaactccaaggcagaggcaagaagaatgtttgaaggtgagatggcaagtttaatggccattatgaagacagacacagtgaaagtacccaagcccatcaaggttctggatgccccaggaggtgggagcgtgctagtgatggagcatttggacatgcggtatctgagcagtcatgccgccaagcttgggtcccagcttgcagatctacacctcgagaacaagaagcttggagaagggctactcaaggaggctggcaccgtggggaaaggaagtggacaggcagagcggctctttgtggaccagtttggatttgatgtggtgacatgttgtggataccttccccaggtaaatgactggcagaatgattgggtcacattctatgccaggcagcgcattcagccccagatggatatggtagagaagaggtctggagaccgggaagctcttgagctgtggtctgctctgcagttgaagattcctgacctattccatgatctggaaattgtgccctctttacttcacggagacctctggggagggaacgtagcagaagattcctctgggcccatcatttttgatccagcttccttctacggccactcagaatatgagctggcaatagccggcatgtttgggggcttcagtagctccttttactctgcctatcatagtaaaatccctaaaaccccaggatttgagaaacgcttgcagttgtatcagctctttcactatctgaaccactggaatcattttggatctgggtacagagggtcctctctaaacataatgcggaatctcagcaaatgaactggc

SEQ ID NO: 6731 - DNA, 939 bp, Cricetulus griseus
gctgagatcctctgtggcctaaggaagacttacaccgtgagaacactgtggctacatggccccagaagtcctgaacaaccagcgatatggcctgagccctgactattggggcctgggttgtctcatctatgagatgattgaaggccagtcaccatttcgaggccgcaaggagaaggttaagcgggaagaggtggatcgccgggtgctggagactgaggaggtttactcctccaagttctccgaagaggccaagtccatctgcaacatgctgctcaccaaagactcgaagcagaggctgggttgccaggaggaaggggctgctgaggtcaagaggcacccattcttcaggaacatgaactttaagcgcctggagggctggggatgttggatcctcccttcgttcccgatccccgggctgtgtactgcaaagatgtgctggacatcgagcaattctccactgtgaaaggtgtcaacctggaccatactgacgatgacttctactctaagttctccacaggctctgtaccaatcccatggcaaaacgagatgatagaaacagaatgctttaaggagctgaatgtgtttggacccaatggtaccctctcaccagacctgaacagaaatcagcctccggaacctccaaagaaagggctgtttcacagactcttcaggcgtcagcatcagaacaattccaagagttcacccaactccctaagaccagttgtaaccaccgcataaattcaaaccacatcagttcaaactccactggaagcagcagtttcagctctggccttgaagtccaaggtggaaccatcttagacccttctacttggaagcagaacttgtagctgatggagcttccactgtggctgggtagccaggagagcttccctgggaactgggttaggatactgttcatcccaacaacaagcctccaag

SEQ ID NO: 6732 - DNA, 939 bp, Cricetulus griseus
aggcgtccgagatgctggactcgctgttggccgtcggcggcttggtgcttcttcgagattccgtggaatgtgaggggcgcagtctactaaaggctctcatcaagaaatctgcacttcgtggggagcagatccacgtcctgggctgtgaagtgagtgaagaagagtttcgcgaaggttttggccctgatatcaacagccgtgtggtttaccatgacctctttaaagaccctcttaactggtcaaaatctggtgaagctgtccctgaaggacctctaggaaccttgagaaccttgtgcagaaggaccgatcctggccctgtcaccattgctctggattctgtcagctggctgctgttccatctcccctgtattacactctgtaaaaccctgcatgccctgagccagccaagtgtctcctcaggtgctgactccctagtagatcaggtacgtgtcctgggcctactgcatgaagagcttcatggtcccggccccatgggagcactgagcacccttgctcaaacagaggtgactgtgagtggtaaaatgggccagacttcagcctccatcctctatcgaaggccccaacaacgtgcaacttaccagacttggtggttctccattcttcctgacttgagtgtggatctccgtgagaagcttcccctccattccgagctacacccggatcctcacacaacccaggtggatcccacgactgatttgacctttaaccttcacttatccaagaaagaaagagaagcaagagacagcctcactctacccttccagttcagctctgaaaaacaacaagctctgctgcgccgtggaccaggccagacaactagccacatcttctatgaaccagatgcttttgatgacgtggaccaagaagacccagatgatgacttagacatttgactagacaaatgggagaggaagactg

SEQ ID NO: 6733 - DNA, 939 bp, Cricetulus griseus
ctcatcatctgtggggacttcctacagttgccaccagtgaccaaaggctcccagcaccctcgattctgcttccaggccaagagctggaggaagtgtgtgcccgtgactctggagctgactgaggtgtggagacaggcagatccgaccttcatctctctgctgcaagctgtgaggttgggcagatgttcagatgaagtgacccaccagctcagggccacagctgcccataaagtgggaagagatggaattgtagccacgagactctgcacccatcaggacgatgtggccctcaccaatgagaagcggctgaaggagctgccaggtgaggtgcatagcttcgaggctatagacagtgaccctgagctagcccggaccctggatgcccagtgtcctgttagccgtgtccttcagttaaagcttggggctcaggtcatgctggtgaagaacttgtcactgtctcggggcctagtgaatggagcccggggagtggtagttgggtttgagtcagaagggagagggcttccccaagtacgattcctgtgtggtgtcactgaggtcatccgcactgaccgctggacggtacaggtcgactggggccgagttcctcagccggcagcagcttcccctacagctggcctgggcaatgtccatccacaaaagccagggcatgtctctggactgtgtggagatctctctgggccgtgtgtttgccagtggtcaagcctatgtggccctctcccgggcccgaagcctccagggcctacgtgtgctagactttgaccccacggtggttcgctgtgactcccgagtattgcacttctatgccaccctgcggcagggcaggggcctcagtctggagtcccaagatgatgaggagacaaactcagatctggagaacatggacccaaacctctgactcagctgacagagaagacaaac

SEQ ID NO: 6734 - DNA, 939 bp, Cricetulus griseus
aatgtcaaggttatgtatgtgatatgcttagcttggccttcccctgactctctagccatgcctcctcttcaccgcagaactgggacttgtggggagccagagcacacaggacccagctgtgggaggtgggacaaagctgcagcaaagagcgtggagtcctggcactgcaggccaggccagggagcccacctacgccacacacctgcctgctggagcctggcccctgaaccccgctgggaaagagctgccagcttgcctgtgtctgcccagtgaagagcatgcctgttccggaggccttcctgagacccctgtccagcctcagtgcggaggatgtgaggcctgtgggctgtgcaggcttgctgtgagagcctaacacggaaggctgagagtggacaaccggcaggagcagcagggcttacagagccaggctcacattctcctcacgtgccgccggcctggttttgccaatcaccagtggacgctgacagccatctgacgggaacgtcaccttttttcccacgtcttcccccagcatgttgctttaaagtagacgtgctcgagtgtgttcatgcacaccaaagcaggtcatgccaaaggagtcgcagatcggaggctggggtgggagctctcctctcaccttctgatagcctgggacccctgacccaggccagaacctcccaccgaggaactgccttgcccacaagcactttcttatggcctaaaagtctgtgtggccactgaggggcctggaatctgggacgtaatggtcacagtgagggaaggcatgggacatagtgattgtgtgcatggagtgctgtctccatttaatgcaatgcagtgtgtggtttggtgcacatattcctgttttccattaaattaactttatttctaaagcatattttgatttaccgtcaagagcaataaagcaattaaatactt

SEQ ID NO: 6735 - DNA, 938 bp, Cricetulus griseus
cggccgctcctccctctgaccctgactccgcctgaggccagcctgcctgaagctgaccttgaaactgagggatgatctttttaactgaaggctgctttcccctcctgccaccccctctaccccctcacgtctttttcataaaactgtgtcagcctcttcccagagtttccagctggaggggctgagcacgtttgggaacaatatttaagggaatgtgagcacaatgcagtgtcttcagcacacttgtgatatgtacattgtgattactttctgtcttagcaaccatttgtaacatcccaagcacttccacagcttggagcagcacatttcagcctaaggacactgctgtctccatagaggaacacaggactgggcctgcctcgctgacagccagcagagcccaggcaggctcccctgtgggaaacctcagttctcctcaccaagtcctagccaaacaacggattctaggaagttagccaaaaacaaaatactctgccgggctgtgaaggttttcagctttgatatctttgaataactttaaccttttttatttttttctttttccatcagatgtgaccaaataagacggtgagccgtctgagacacccccacctcccagggccatgtgcatgttaggcaagcgtgttactgtgtggcccagcccgagaccaagcttgtctcatttctaccccattcctaactgctcacacagtggaccatgttgccccttagccccctaggagaaaggaaaggaaaattatgtttgtgccattgatttagccacatggaagtcatctcatccgtcccctttcctgaagctgctgtctctaaagtgccatctcattgttgctttgtatcagccagtgctggagaaatcttgaatagcttatgtaaactaaaataaaaataaattttaaattttaaaaaaaaataaaaaa

SEQ ID NO: 6736 - DNA, 938 bp, Cricetulus griseus
gaggccacttcccaggcctctcacctacacctgatgctggggcgcctaaaagagtggaaatccttgccaggctccaacctgggctccacgcccatggcactggagcggaacctgtcagagttgcagcttcaggcagctgtggaagcaactggggacctggaggtagactgctaccgggcaccttgctgtgagagccaggatgaacaggccctgtggcacctcctgaaagagaagcagttggctcagctggaggagaagctgcgagtgtttgagaacattgttgctgtcctcaacaaggaggtagaggcgtcccacctggcactggcccgcctccatccaccagagccagctggaccgagagctcatcctgagcttggagcagagggtggtggagttgcagcagaccctggcccaaaaagatcaggtcctgggcaagcttgagcagagcctgcgactcatggaggaggcctcctttgatggcaccttcctgtggaagatcaccaatgtcaccagacggtgtcacgagtcaatgtgtggcaggacagccagcctcttctctccagctttctacacagccaagtatggttataagttgtgtctgcggttgtacctgaatggggatggctcaggcaagaagacccacctgtccctgttcatcgtgatcatgagaggagagtatgatgctctcctgccttggccattccggaacaaggtcacctttatgctgcttgaccagaacaaccgtgagcacgccattgatgccttcaggcctgacctgagctcggcctccttccagcggccacagagtgagaccaatgtggccagtggctgcccactcttcttccccctcagcaagctgcagtcacccaagcacgcctacgtaaagatgacacaatgttcctcaagtgcattgtggacaccagtgcttagggagtggg

SEQ ID NO: 6737 - DNA, 938 bp, Cricetulus griseus
ctttgaggaagagatatcagaacttgagcctggatcacaggctggatcgagatggaactcttaagctcctgggccgcctctccctcctctctgaagagatcctctgggctgccaatggcttacccaaccccttctactcttcagaccatctctgcctgctcgccagcttcggcatggaagtcactgccccatgagggcctccagggaaagagctcactggatcgacgactgcaaatgccccgtgctgtggaaacttacatccctcccctcattctctcctgcccgtggtttagactttctccaggcctgtccacgttctctgcctgtggtccctgccctgccccagcctcttccctaaatcctgtgccacatgctaggtggccctgggagaggtggaaagcgttctccttccttccatgtacccagagccccctcccccattgattttttttaatgaccagggttgcgggagttattgatctcattggttatttgctttcaggccatttcttggtggcaccctctgacctaacttctccatccctttattgcctctgggctctggcatgcacatgcaaaggtgtgtgtaaagtgtgagtgctgctgcatcgctgactctcagcttctctcgctcaggttctgggggaactttgtttcctgtgtgtgtctatttttaagttttgttttctgggtactggacatatgcctgtctgagccccaggcccatctgtccacagcccacttttcaccgtctctctctgggcacctcctgagatggtttcacgaccgtgccctgttggttctcaggacaagggcccatgactgttccctctgccaggatatgcaggttcaactgctaaagaaggtggagggccagagtttgacggtttatcttttccttgtttcttatttgtttcttgttttagaatgagtgtggg

SEQ ID NO: 6738 - DNA, 938 bp, Cricetulus griseus
gcctgacccctttatgttaccccaccatgcctaggcagctctgggccctggggtctgaaaccaaacatgcctctgcccacttgctctcctggctacttagctcctttctgggtctgggctccacctcccactgtgtcctgcccataagaagaggagccaagagcagggtatcatgagtcctggctggaaacccctgtctactgccaaggggaggggccagggactcaggctgtcccaggttagcctgaggccttcataggttttcctgtggtttggagaagcagtccaggaagtaggaacctagcctttccccaagctggggggggaggttgtgcatgctagtgtcgggtgtgtgcgtgcatgcgcgtgaatgtgcaccactcctaaggaaaggggctgcagagggctgcccgccttccctgccttgcctgcctcctgatgctcctaacctgccaagaatctagcctgtgaagcaaagccttgggacaagccagttacttgggtgtgcaggcaagccactgcccacttgtgcccttgtctcctgggaagcaaggtccctaccactccagccccactcacagcctctctaggctgtctccctgccccctgccaaggcagtgcctccacctagcacagaagtaaagataaaaaattcaagtggttcttagaaattcaacgtgttagacaaaaatcttaaatcagagaaacaatgcaacaagcaccccagccagcagcagagttgtggatctggccttttaactcttcctctgccagggtagggtgtgggggggctcctctagggtgtgcccctatgcccaggactgagccatcagggacatacccccgcccccaaggctgcagccatactgtgttacaggcttggggctggggcaggcttggactcagccctagacacccagggccagcccacccctccc

SEQ ID NO: 6739 - DNA, 937 bp, Cricetulus griseus
gggacaaatgcacgtctagatgagtcgtaatttttgccatgtgtcaagtgaaaaaccagccgttggttcaccttatgctcaccacacatcccagtctgtatagagttgacaacctctcagatgagggagctctcaacatcaatgacagaaccatacctcagcccccattcttcagctctcggtggaaaagttgagcagggatggagctttcctcatggatgcaggctctgtactgatgctttgggttggaaaaaattgtgcacagaattttctcagccaagttctgggagttcaaaactatgcatcaattccacagatgatgacagaccttccagaacttgatacaccagaatctgccagaacagtagctttcatctcatggcttagagaacagaggccatttttcccagtactctatgtaatcgagggaggagagtccgatgaaagcagccttccttcagaacttggtagaagacagaacggaatccgcactgtcgtattatgaattcctcctgcacatacagcagcaagtgaacaagtgatttttagtttttgttttgttttggcagtaagacactacccatcctatcatcctatattactttctgatgtaaagcaactaatatttacactatgccatattttttttattgtagttgtaaattatgaaagatccttgaattttctacagatctacaactactaaagtaacagacaagggcaatcttgatatataagtctgagcatggcagttctaccataaaaagtactctatttttctaatttctagaatttttaaaataatgtttctctaagtctgacatactaatattcactcaagcagtacaatttattttagtcttgcatatattttaatttaatgtaatgtattgagtctaatagactgttttgtcaataattaagaataaaaaattta

SEQ ID NO: 6740 - DNA, 937 bp, Cricetulus griseus
gcgcaaaggctgccgggaggctgtggagtcctgggcagcgcgatggcgtcggctgtggctcgcggcgcgctccctgcctgggtctccgtgctggcttggggcctggcgctgtggtgcctgtgcggggctggtccgctgtggagtggcagccacgagtggaaaaaactaattttgacccagcactggccccccacagtatgcaaggaagttaacagctgccgagacaccctggattattggacgatacatggactatggcctgatagagcagaagactgtaaccagtcctggcactttaacttagatgagattaaggaccttttgcgagacatgaagatctactggcccgatgtaattcacccatcttccaatcgcagccgattctggaaacatgaatgggataagcatgggacgtgcgctgcccaggtggatgccctcaattctgagaagaagtactttgggaagagcctggatctgtacaagcagcttgacctcaacagtgtactgctaaaatttgggatcaagccatctatcaattactaccagcttgcagatttcagagatgccctcaccagaatctatggcgtggtgcctaaaatccagtgccttctgccagaacagggggaggaggtacaaactgttggccagatagagttatgcttcaccaaggaggactttcatctgcgaaactgcactgagccaggtgagcagctgtcctccaagcaggaagcccagctggccacaggggcttccacacatgggatgatggtctgtgaagatggtccaatcttctatcctccacctgcaaagacccgacactgatgctcacattttgaaaatattttatgttccacaaagtaagaaaaaaatcacaaattatggctttctaaaaatctgctaaaaagtttacttaaaaaaaaaaaaaaaaaaaaaaaaa

SEQ ID NO: 6741 - DNA, 937 bp, Cricetulus griseus
ctgctgcggcttgcgcctcctagttacccgcgtcaccgccgccgccatgcccggaggactgcttctcggggacttagcccccaactttgaggccaataccaccatcggccgcatccgcttccacgatttcctgggagactcatggggcattctcttttcccacccacgggactttaccccagtgtgcaccacagagcttggcagagcggcaaagctggcgccagagtttgccaagaggaatgtaaagttgattgctctttctatagacagtgttgaggaccatcttgcctggagcaaggacatcaatgcttacaatggtgatgagcctacaaataagttgccatttccgatcatcgatgacaagaacagggaccttgccatccttctgggcatgttggatccagcagagaaggatgataagggcatgcctgtgacggcccgtgtggtgttcatttttgaccctgacaagaaactgaagctgtctatcctttacccggccaccactggcaggaactttgatgagattctcagagtaattaagtctctccagctgacagcaacaaaaaaagttgctaccccagttgactggaaggagggtgatagcgtcatggtccttcccaccatccctgaagaggaagccaaacaacttttccctaaaggagtcttcaccaaagatctcccgtctggcaagagatacctccgatataccccacagccttaagtctttgtaggagttggggctgcagctgctcgctgcaatggacctgaggatgccagctgacagtcatgtgtccttacacagttccatagaaatatcctagtgtggtcacagccaaaatcgttaggtcactatacctctggctcattaaatggaaatggcaccaaaactttcttgggattctttactctgtgccttcttcaacagcattctgtccct

SEQ ID NO: 6742 - DNA, 937 bp, Cricetulus griseus
agggccatggcggactccaagcttctggtaccagagctaagcgacgcagagtcgatgggtgatgagacggtgcggtttcaggagctgctactgcaggcctccaaagagctccagcaagcccagacagacaggccagaatctacacagatccagccccagcctgggttctgcataaagaccaactcatcggaaggaaaagttttcatcaacgtctgccactctccctcccatccctcccccggtggacgtgactgaggacgaactgcttcagatgctgcaggaggaccaagctggcttccgaatccccatgagcctgggagagccacatgcagagcttgatgcaaaaggccagggctgtactgcctatgatgtcgccgtcaatagcaacttctacctgaggatgcagaacagcgatttccttcgagagttagtggtcaccattgccagggagggccttgaggacaagtatggtttacagctaaatccagaatggcgcatgttgaagtaccgacctttcctgggctccatctcacagcagaatatccgttcccggcagcgccctcggatccaggagctggggaccctggggaccctgcagggtccagaacggccccacctgaacctttggttggaagcccctgacctcctcttggctgaaattgacctccccaggctggatggagctcaaggactgacgctggaaataggagagagtcacctggtgatgggaggttctcagcaactgtaccacctcaatgcctccattcccctgcggatcaaccctgaggccagcagggctgctttccatcacaggagaaagcaactgatggtgtccatgcccctcctgtcggtgtcttgaccagagtccccttgtatttccagatgtggagatgatgttggtgtcttctaagtgtgaaataaacagttttccagttct

SEQ ID NO: 6743 - DNA, 937 bp, Cricetulus griseus
caaccacagtatcccgacagtcatttccagtgttatgctgttaggtgggataatactgaaattgaaaagcttagcccatgggacatggaaccaattcctgacaatgttgatccaccagaagaattgggagcaagtatctctgtcacttcagatgagctagagaaattgctctacaaaccacaggatggcgaatggggccagaagtcgagagatgaggagtgtgaacgcatcatcggtggcatagatcagcttttaaaccttgatatagcagcagcttttgcaggcccagtggatctgtgtacatatccaaaatactgcactgtggtggcttatccaactgatctttacacaattcgaatgagacttgttaatcgattttacaggcgattatctgcattgatttgggaagtccgatatatagagcataatgcaagaacatttaacgaacctgaaagtgtaattgcaagacctcctgaagcccgaagctcctctgctggcccttctcggaaagatcccacaagccatgccccagatagtgagattagcttgtcttctgagtccgtgttggcccaaaaagctaccacagagaataactttgaagaagacctgaattatgggttgcgaaggtggaatggcagaagactgaggacgtatgggaaagcccctttcaacaggacagcacaagtgactcacagtatgcaggtgtcagcagaggctggggtgaagaggagagtgcatcctgagttagaccttgtggacatccctggacaaccggagagttcagtgtgtgtacctgacaccagtcccaaatcgtcagattcaggatcagcaactgaatccgatattgactgtactgacaacacaaaaacccagaaggaggagaaaaaggaaaggaaaaacaaaagtggttaagaaaaggtaaaacctttacatccaa

SEQ ID NO: 6744 - DNA, 937 bp, Cricetulus griseus
  modified_base (829)..(829): a, c, t, g, unknown or other
catgccgcctgtcccggcggcgcggccccggagctggtttgacgggcggagcggcggcggaggatggaggcggtggtgttcctcttctcgctcctcgactgttgcgcgctcatcttcctctctgtctacttcatcattacattgtctgatttagaatgtgattacatcaacgctagatcatgttgctcaaaattaaacaagtgggtaataccagagctgaccggccacaccattgtcaccgtgttaatgcttgcttcactgcactggttcatcttccttctcaacttacctgttgccacttggaatatatacaggttcattatggtgccaagtggtaacatgggagtgtttgatccaacagaaatacacaatcggggacagttaaagtcacacatgaaagaagccatgatcaagcttggtttctacctgctctgtttcttcatgtatctctatagtatgattctagctttaataaatgactgaagctggagaagccggggttgaagccaacctacactacactgcacaattgaggagccagagactacttaaaccacccttaaaaccgtgaccatagcagtatctattttggtctttgaacaaaaaactatttttgctgtattttttaccacataaagtatttaaaaaaatgaattgagtttttgtagatttctgattctcaaccccagcatatgaaggtgttttgtgtcctctgtggctttttggcaaaggcaggaatgtgtgctggctttgtatgccacagaaataaagggcacacctaggagagcccttactagattgtgcgctcctggagagcagattccactcngatcatgactgtattgtcttcctttctctcctggagcctaatacagtgccttgcacacacaaacaataaatggctgttgaataacaagctagaaaaaaaaaaaaaaaa

SEQ ID NO: 6745 - DNA, 936 bp, Cricetulus griseus
ggaaaggggcagggaggagtggggggggggtggttctggttcctcccctcggtgctgtggctttcgcttcacttccttgtccgagagtcgacggatctccggggctgaacggtcatggcgttattggatctgtgcggaggcgctcgggggcagcggcccgagtgggctgccctgggtgcagaaagagggtatggctcggacccgggacactacagtttctctgtgcaagctccggagctcgcacttccccgggggatgcagcccacggacttcctgaggtcctttggtggtgatcaagaaaggaatgttcagattgagatggcccatggcacaaccacactagccttcaagttccagcatggagtcatcgtggccgtggactcccgggcctctgcggggacttacatcagcaccttaagggtgaacaaggtgatcgagattaacccttacctgcttggcaccatgtctggctgtgcagctgactgtcagtactgggaacggctgttggccaaggaatgcaggctgtactatctgcggaatggggagcgcatctccgtgtctgcagcctccaagctgctttccaacatgatgctccagtaccggggcatgggcctctccatgggcagcatggtctgtggctgggacaagaagggtccaggactctactacgtggatgaaaacgggactaggctctcaggacaaatgttctccacgggcagcgggaacacctacgcatatggggtgatggacagtggctaccggcaggacctcagtcctgaagaggcctacgaccttggccgcagggctattgtgcatgccacccacagagactgctattctggaggcgttgtcaatatgtaccacatgaaggaagatggttgggtgaaagtggaaacctctgatgtcagtgatctgatgcacaagtaccgagaggcc

SEQ ID NO: 6746 - DNA, 936 bp, Cricetulus griseus
tgcacgggcagcagcgcgggccacgatgacagactacggcgaggagcagcgcaacgagttggaggctctggagtccatctatcccgactccttcacagtgtttatcagaaactccacccagctttcaccatttaccgtgacgtcggaggctgaagaaaatgatgaaactgtgcagactactctgaagttttacatacagtgaaaaataccctgatgaagctcccctttatgaaatattctcccaggaaaatctagaagataatgatatctctgacattttaaaattactggcattgcaggctgaggagaatcttggcatggtaatgatcttcactcttgtgacagccgttcaggaaaagttaaatgagatagtcgatcagataaaaaccagaagagaggaagaaaagaaacagaaagaaaaggaagcagaagaagcagagaagaaactgttccatggcactcctgttacgattgagaatttcttgagttggaaggccaagtttgatgcagagctcctggaaattaaaaagaaacggatgaaagaagaagaacaagctgggaaaaataaactcagcggaaagcagttattttgaaacagatcataatcttgacacatctgatatccagttcctggaggatgctgggaacaacgtggaggtggatgagtccttgttccaggaaatggatgatttggagctggaggatggcgaggatgatcctgactataatcctgttgccgcagagagtgactcagactgacagactgtccctgactccagagaggcgtgactgccacagcatctgtggctatgctgagagggtttggatcttccttttcttttttttctaaagaaaaacattatttttcaggagaatattcttctgatagtctttcaacattgaaactttaaataaactcgcccaataaattacaaa

SEQ ID NO: 6747 - DNA, 936 bp, Cricetulus griseus
ttctccaaactcaacccatacgtcagcatccatgatgactacaggccacagtagtttaaagacatctataacgataacagcaactattcatcctgacaaaagtaaaggatcaaagtttgacaccggcagctttgttggaggaatagtgttaaccctgggagttctatctgttctctacattggatgcaaaatgtattattcaaggagaggcattcggtatcgaagcattgatgaacatgatgccatcatttaaggtacccccaaccttggccaaagaaagaagagattacagccctatcaattagtttggtttatattagctcaaaatattattttcttggaaatagtataagcaagccatttataaaatgaacagtgtgttccatgaatatctggaaatccctcattactaaaggtaaagggtgtggtttgggcagttcagtgaatatttggaactcacagataatttatccagtgattatatttgctctagaaagagttctatagtttgtattccaggtcaaactcagggtcacgtttaacaaaggaggtatttagttacaaaatactaatataatatttctattgtagagggccaaaataaattatagcaatttctgaaagtgtataaataagccaaaaatatcctaatgagtgcacacctgttacagttaaaaaaaataagtgtaacttttgtaatctgcttctagttttcaaaaagcacaaactagcaagaattttttatataaataagaatcatttctacttgctatgagagttggcaacatattttatggtgtgataattttgtatcttcaggggaaagattagccaactcttgttacccatttttctataatgaccaattttggtattttgttgttactaagatgtatttttagaataaaattcattctccattcaaaaaaaaaaaaa

SEQ ID NO: 6748 - DNA, 936 bp, Cricetulus griseus
cccccgcggccaccatctgagtccgccgcccaaaatagcccttggcacgagctggcttgtctcatggcggggagatggctgctgcctccgaacccgtagggctgggtggcccacggggccctgcgcgcccggagccccctcccacccgcttcccatgaagtgcacggagccaacatccgcgtggacccgtctgggacccgagccacacgtgtggagagcttcgcccacggtgtgtgcttcagtcgagagcccctagccccgggccaggtgttcctagtggagatagaggaaaaggagctgggctggtgcgggcatctgcgtcttggcctgaccgctctggacccggccagtctggcctctgtgcccgagttttcattgcctgacctggtcagccttggccagagctgggtcttcgccatcacacgccaccacaaccgcgtaccccgggagggtcaagcagatgcagagtcggcggcccccagccgcccccaagccctcctggttgaaccctatctgcgcatccagcagttccgaataccccgggaccgcctggtgggtcgcagtcggccggggctctatagccacctcttggaccagctctacgaacaaaacgtgctgcctcctacagcgcgccgtagccgcctgggtgttctcttctgcccgcgtgaggatgggaccgccgacatgcacatcgtcatcaacggggaagacatggggccccagtgcccgggggctgccgtgtgcccggcctctctatgccgtggtagatgtgtttgcctccaccaagagtgtgcgcctggtccaactggagtatggcttgccatctctacaaactctgtgccgtctggtgatccagaagagtgtggtgcacaggctggccattgatgggctccacctcgcccaaaggactggaaggatttctgcaagtatgaatga

SEQ ID NO: 6749 - DNA, 936 bp, Cricetulus griseus
aggatgacacggcatggtaagaactgcactgcaggagctgtctatacctaccacgaaaagaagaaagacacagctgcctcagggtatggcacccagaacattcgactgagccgggatgctgtgaaggactttgactgctgctgtctctcactgcagccctgtcatgaccctgtggtgaccccagacggctacctgtatgaacgggaggccatcctggagtacatcctgcaccagaagaaagagattgcccggcagatgaaggcctatgagaagcagagaggagcccggagggaagagcagaaacagcttcaaagagctgcagcacaggaccaagttcgaggcttcctggagaaggaggcagccatcgtgagccggcccctcaaccccttcatgcctaaggctgcccctctacccaacacagatggtgagcagccagggcccagttcaggtccacctggcaaggacaaggacaaagcgctgcccagcttctggatcccctcactgacacctgaggcaaaggccaccaagctggaaaaaccatcccgcaccgtcacctgcccgatgtctgggaaaccgctacgcatgtcagacctgacgccagtacgctttacgcagctggacgattccgtggaccgcgtggggctcatcacacgcagtgagcgctatgtgtgtgcagtgacccgagacagcctgagcaatgccacaccatgtgcagtgctgcggccttcgggggctgtggtcactctggagtgcgtggagaaactgatccggaaggacatggtagaccctgtgaatggggacacattgacagagcgggacatcattgtgctgcagcggggtggcacaggttttgcgggctcaggagtgaagctacaggcagaaatgtcccggccagtgatgcaggcctgagccataacctaataaacctgcctgtga

SEQ ID NO: 6750 - DNA, 936 bp, Cricetulus griseus
ggcgttccactacatgagctttgcaatcctggtcttcttcatggtggagattttctttaaaatctttgtcttccgcttggagttcttccaccataagtttgaaatcctggatgccgtggtggtggtggtgtcatttgtcctcgacctcatcctcctgtttaaaaagcaccagtttgaagctcttggcctgctgatcttgctgcggctctggcgggtggcccggatcatcaatggagcatctggaattcagctgctctgagaaggaacaagaaattgagagactcaacaagctgttgagacagaatggacttcttggggatgggaactagccttccagaagcaccaccctagagaagctgggctgtggccagacagcaattgtgtgctgacaagtccagtcctcatctttgccttggcttgcgctccctggatgctgggaacacatcttccctacggggagctatcctggtgcccacgtctcctcctctgcagcctccagctgcaccatcagcttcaaactggctctgtacccaccagcatctccctcaattactatacaattaatgtataaaataagcaccctccttcccctgggcccgcctaccacattctccccttggtggcagcccacaatagcccaccagttatagagctagctcactgcagggagggggaactgccctgtaattagcatcatcttggggtgcaatgccctcgtgggcacacgtttttacacagcctcttgttggtttgtacttctcaaatgcgctgaagggcagcctggcgttgatggtgggtggagctcggaagcctgcctctgcaggggctgacacgtccacaaatgtcactgtagtggaaatgacaatcgtcctctcaggccctgggagggctgtaacggaagacagaacaggcacgctcatccatcttcttcactca

SEQ ID NO: 6751 - DNA, 936 bp, Cricetulus griseus
tgatcgagcgcccgcgtcgccgaggaagccgcccctgctggagccgcagccaccgaaggcacggggagcagaggtcgaactgagtggaggatggaggaaccgtccaagcccagcccggacatgctagccactgcagagtccagctccagtgagctcgacaaggaggtggcgtctccagagggaccaatgaggacctgaggttgcccagacgacgtccaccaccagggaaacagataccctgctctagccctggctgctgcctcagtttccccagtattcgtgatctggcacagcatctccgtacccactgcccacctacacagtcactggaaggcaaactcttccgatgctcagccctgagttgcactgagagtttccccagcatgcaggagctggtagcccacggcaagatgcactacaagcccaaccgctacttcaagtgtgagaattgcctcctgcgcttccgaactcaccgctcgctcttcaagcatctgcatgtttgtgcagagcatgctcagagcccagccccgccacaaccccctgccctggacaaagagccacctgtcgcctgacgcccccccccagacgtccgaccctgcatctcgccctgagtctgccattcccactacttgaacctttcacctctcgccccctctgggcccttccttccctacttgaaccctgccgccctttggcctcacgtcccccgcgactgccgcccgttcctggctgctgctccaggacccaccagcctctagcacagccatctaagagtcaaggtgctaccggaagtccccagaagacctcagggtggtcccgatgcgccctcaggtgcgtgcaggtgaccaccagggtagggtggaggggccttcttcattcctttgccccctgcaggccctttgaatgctcagaagtagcagtgtctgtcctttaaaa

SEQ ID NO: 6752 - DNA, 936 bp, Cricetulus griseus
agtggcagacctgctgtactggaaggacaccaggacgtctggagccgtcttcacgggcctcatggcctctctcctctgcctcctgcactttagcgtggtgtctgtggctgcgtacctggccctgctgggtctctgcgccaccatctctctcagggtttaccgcaaagtgctgcaggccgtgcaccggggtgatggcaccaaccctttccaggcctacctggacatggatctgaccctgactcgggagcagacagaacgtttgtcccagctgattgcttcatacgtggtctccacagtcacacagctgcggcatttcttcctggtagaagacctggtggattctctcaagctggcccttctcttctatatcttgaccttcgtgggagctgtcttcaacggcttgacccttgtcatcctgggagtggttgctttgttcaccgtccccctcctgtacagacaacaccaggcccagatcgaccagtatgtggggttggtgaccaatcagctgagccacctcaaagctaagatccgagctaaaatcccggggaccggaccggatccaaagccaaagccgaatgagagaggtgtctctgcccgagggactcctgcccacaccccagcagtcctgtttcccttctcttcccgagcatccacagcctctcccactcggccgagccatttcccggtgggaagtgcctaagcgacccggactacatttcctaagaggctctgctctaagagtccaggaaaggccgcggagcctgctgggacttgtagttgagtagtcagacgctgtcctgcacttccgtgacccgccgctggaggcgccgtgagaggttggtgtctctgaagccaccaacccctatgctggggctttgcatggggtccagtcgagccctgagcttggatttacaactgtaataaagactcctgtgg

SEQ ID NO: 6753 - DNA, 936 bp, Cricetulus griseus
  modified_base (152)..(152): a, c, t, g, unknown or other
tcacgtttcacagcagaatctgcttaataagttactggacgccgtttgtttggtgcctaacagaacataatggaataatacttacacatggagcatcaggagatatgaatcttcctcatttgatgtcactggcatcccatcttgcatctcanggttttttttttgtcctaagatttacttgcaaaggccttaatattgtacatagaattaaggcatataaagcagttttgaattatctaaagacctcaggagaatacaaacttgctggtgtttttcttggaggtcgttcgatgggctcaagagcagctgcttctgtaatgtgtcacactgagccagatgacactgatgattttgttcgaggtctcatttgtatttcttacccactgcaccatccaaagcagcagcagaaactcagagatgaagatctctttcgtataaaggatcctgtactatttgtgtctggctcagcagatgaaatgtgtgaaaagaacttgttggagaaagtggcacagaaaatgcaagctcccagtaaaatccattggattgagaaggcaaatcattccatggcagtgaaagggcgatcaacaaatgatgttttcaaagaaattaatacacagatcttgttttggatccaagaaatcactgaaatggacaagaaataattgtcattaaaagccatgttattttgaataaaagtacggttaatttgataaagaacaatatacctctcaacattgtgagatatatttcagaataatgttctttaatgttgccctatttttgaaacatggtattgtgaaaatatcctttacaaaatgtcctttgtaaagcactgttatagttatatgaagataatgtacaaatattgaaggttgtttataatttattttcattagtattagttaagttttgaaaaattaaacatttgcattttgt

SEQ ID NO: 6754 - DNA, 935 bp, Cricetulus griseus
gcatgggcggcgcgcgggacgcgggctgggtggcggcagggctggtcctgggcgccggcgcctgctactgcatctaccggctgactcggggcccgcggccaggcgggcgcaaactgcgcccctcgcggtccgcagaagacttaactgatggttcctatgatgaggtcttaaatgccaaacaacttgagaaacttctctacctgctggagttaactgatgatcctataattgttgaaaaagcattggtcaccttgggaaataatgcagctttctcagctaatcaagccattattcgtgagctgggtggtatcccaatcattggaaacaaaatcaactctctgaatcacagtattaaagagaaagctttaaatgcactaaataacctgagtgtgaatgttgaaaatcaagtcaagataaaggtatacgtccagcgagtctgtgaggatgtttttgcggatcccctgaactctgctgtgcagttggctggcctgaggttgctcacaaatatgactgtcaccaatgactaccagcatcttctcagcagctacatcactggcctgctccacctgtcacttattggaaacggaagcaccaaggttcaggttttgaagctgcttttgaatttgtctgagaatccagccatgacagaaggactactgagtgcccaggtggattcttcatttctttccttttttgatggccacatagcaaatgagattcttcttcgggcacttacactgtttcagaatataaacaactgcctccgagtggaaggctgcccagctggtcagcctcccttcgctaaagggtcattgttctccctgctgtatggagaggactgcgcccaaaaaatgagggctttagcccaccatcatgatgtggatgtgaaggagaaggttttagcgataatgccgaaggtctgattggctgcccct

SEQ ID NO: 6755 - DNA, 934 bp, Cricetulus griseus
aaagaagacagtgtcaatggtgtgacttctaaatgtgaaaaagaaaatgttgacttattaagttcacttttagatggaaaaactcatacattgctggagcagtttgcctgtgacatcaaagggattgtggaattcaaaaactgagttaattgaaccatctctaggaactctctctaggtaggatccttgacaaaagccaaagggctgtttacacagtgccgttaggctaaaggttttgtgaattactatggaccacagaagatttgggaaaggaaggaaattcaaacagaccaaattggattggctttactgaagaatgaaatggtgaaggccataaaattatttcttacaccagaagatgtggatgatcctgtaaataaagcaaaggaatactttcttcaaactgaggacgccaaaggcacactcgtcactgatgccggagttccgagttcgagagcgggctctgctagagtcactgcatcgctttggcatgacagaggaaggctgtatccaggcctggttctcttttcctcatttccatgcgcatattctacgtccatgcctacagcagcaagatttggaatgaggcagcgtcttacagacttgcagcctatgggtccagagtggtggagggggaccgtggatctgcttggatgaagatgttgacgaacatgtctcaagcagtaaagttcatctggtgaccaaacaagaggaatcagctaggacatatgcaatacaccaggtggttctgccagtacttggatacaacattcagtacccagacaacaaattagggcagtggtaccaaggagtcctcagcagggatggactgcaggcctgtaggtttagagtgcctgccctgaagctgaatgtaccaggatgctacaggcacatcttgaaatatcctcacaatgtgtcataccaactagtccat

SEQ ID NO: 6756 - DNA, 934 bp, Cricetulus griseus
cagttaacatggctgccgctagtcgttctccctgacgaccgtgagcaaagcaaggccgggtactgggaggctttgcctacgtcccatcggcgatggcgcttcagccgcgggtctggaaatggctgtcagtttgcgggaagctggagtgtgggttcgcagcccgctcgaccagttcctcgccagcgattcagcccgaagtggagactaaggaaaacgaagctgtggccccagtgttcaccaaccggaaccctcggaatctggagctcttaggggtagccaggaaagaacggggctgggctacagtgtggcccaaccgtgagttctggcacaggttgcgagttataaagactcagcatcacatagaagcactggttgaacaccaaaatggccaggtggtggtttcagcatccactcgtgaatgggctattaaaaaacacctttataataccagaaatgtggtggcttgtgagagtataggacgagtgctggcacagcgatgcttagaagcaggaatcaatttcatggtctaccaaccaactccttgggaggcatcctcagactcgctaaaatctctccagaatgccatgacagaaagtggtgtggtgcttcaggagcctcggagaatctatgaatgaaatagaagaaatagaagcattaactgctttgaaagtgtaaacataaaatcatcacttgctactccagctataagtgtctgcatctaaaaacagaaagaaaggaatgaaggaagaaaagaagagtttgcagggagaaccagactgaaagcttcatagcaacaatgttaacagtggagagctatttaaagtcgacctcttcccacttctgtgtgtgcttgtgtggttttgttcttttaatcaagggctaaacttggccttcttttgtgaacatgaggagtacttaagagaagcagtcacta

SEQ ID NO: 6757 - DNA, 934 bp, Cricetulus griseus
agaaacttctccccacctttaaagacctggacttcctacaagatatccctgacggtcttttttttagatgctgacatgtacagtgctctgtgtaagactctgcaacgtgactgtttggtgctacagagcttcaagataatggactatagcctcctgatgtcaatccacaacatagatcatgcacaacgagagcccataaacaatgaagcacaacacgcagttgacacgcgaagaccagccccacagaaggctctctattctacagccatggaatccatccagggcgaggcgtcgacggggtggcactgtggagactgaggaccacatgggtggcatccctgcccggaataacaaaggggaaaggctcctgctttatattggcatcattgatattctgcagtcttacaggtttgttaagaagttagagcactcttggaaagcactggtacatgatggggacacagtatcagtgcatcgtcctggcttctatgctgaacggttccagcgcttcatgtgcaacacagtgttcaagaagattcccttgaagccttctccttccaaaaagtttcggtctggctcgtctttctctcggcgatcaggccccagcggcaactcctgcattacttaccagccatcggtctctggggaacacagagcacaagtgacaaccaaggcggaagtggagccagatgtacaccttgggcgtcctgatgtcttgcctcagactccacctttggaggaaatcagtgaaggctcacctgttcctggccccagtttctcacctgtagttggagagcctttgcaaatactaaatttgagttcagccttggaaaagcttgaagttgcagagtccgagttcacccattgagcagtgagcctcagaagactaaaacaagactctactatcgctttgatcccaagatgtcagcccttg

SEQ ID NO: 6758 - DNA, 934 bp, Cricetulus griseus
  modified_base (850)..(850): a, c, t, g, unknown or other
gtggggagtgggctccaggaagagccagcatcctacccccgtttcccaccggggatctgtacagagatttttctacgttttattttttttgttctcagaggggataatggggagtatagtggaggagggcggggtgggggctacaggttctgtgtccacctctcacctccactaatgctgtctcagtgtttttctctctctctttcgagctcgtactccagcacctgaccctgcgtgctggcctatcccatgctggggggccagcagaaagaagacaggccgttcagcccgcacccgcctgcagcggggcaccagccagccatacctattgcctcgtctgcttcttcatagactcttgttgcccagccattggggcctcagtgttgagggtgaggggagctgcttaaagactgtgccccaccttccacccctcaccccagaaatgccagccagcgccacccacacagccagaccagcgccacaccgcactgaggactccaaggccttcgcgggaccatgccggccgggctgcctcgtcttactaaagttgtattaagttgtctccgtgtcccttcctccctctgccccaatgtttcttctgatttttttccctcccctcccccctcttccttttccctccctgctccctggttcaacacaggtaaaatggttgccctcccttcctccctcccctctgccttcatggatcaccagctcacgtcatgtttccttctcttttctctgtgtgtgtctttatttaagttatttttctcctttctcccttttcttttcaccctcccctccccctcttctgccatgtaatggaggatgtgctgtgaggttgcaaacngctggactgtcaggctgcttttcttccagatgcctccccgcctccctccccgcctcctcccctcccctcccctcgttctccttg

SEQ ID NO: 6759 - DNA, 934 bp, Cricetulus griseus
  modified_base (307)..(307): a, c, t, g, unknown or other
ctcagatatcctgtcttggattaaacaagaggaagagcctcaggttggagtcccccaggagtccaaagagaatgagctgtacaaaggctcctatgctgatgaagaacttgtcatcaaagctgaagaccttgctagagcctccttgtgtcctgaagttccagtcgccttttctgcccccctaccacaagcagccaaggatacgttttcagatgtagctttcaaaagccagcagtgtgcacccatgacaccttttggacgcacagccactgacttgcctgaagcctcagaaggacaagtgacttttacncagttaggaagctacccacttccacctccagttggagagcagatgttctcatgccaccattgtggcaagagtctcaaccaagacatgttaatgacacatcaatgtagccatgctgctgaacaccccttaacctgcctttccagtgtctgcactgtggcaagagcttcatccgcaaacaccacctcataaagcaccagcgcatccacacaggcgagcggccctacccctgcgcactgtgtggaaggagcttccgctacaagcagacactcaaggaccacctgcggaccggtcacagtggaggctgtgccggtgatagggatccttccacacagccaccagacccacctggtccactcttaacggccctggaaacctctggcctaggtgttagcactgaaggtctagaatctagtcagtggtatggggaaggggaatggaggggtgggtttttggtagacctgtggcccattggttatttatgttcacagcagagcagaaggtcaaggagaaagcctacaagctccacaacccacagtaattattatctggtacataaaggaatttgggagtctatactcaactagagacatgcttgtgctttggaagtccacaacagtacaagaatac

SEQ ID NO: 6760 - DNA, 934 bp, Cricetulus griseus
  modified_base (798)..(798): a, c, t, g, unknown or other
  modified_base (924)..(924): a, c, t, g, unknown or other
ttaggtcctgatgaagtgactgtggatattgatgccattagaagggtctacgcccgtttgctcgctaatgaacaattagaaactgcctttctcaatgcacttgtatatctgtcacctaacgtggaatgtgacttgacatatcatagtgtgtatgcccgagatcctaattatctcaatttgttcattattgtaatggagaatagtaacctccacagtcctgaatatctggaaatggccctgccattattttgcaaagctatgtgtaagctaccccttgcagctcaaggaaaactgattagactttggtctaaatatagtgcagaccatattcggagaatgatggaaacatttcagcaacttattacttacaaagtcataagcaatgaatttaatagccgaaatctagtgaatgatgatgattccattgttgctgcttcaaagtgtttgaaaatggtttactatgcaaatgtagtaggaggggaagtagacacaaatcacaatgaggaagaagatgaagagcccatacctgagtccagtgaattgacactgcaggagcttttgggagaggatagaagaaaagatatcacagacagatctttttggtaacccaatgatgtatgatctaaaggaaaatggtgataaaattccaattacaaatgaaaacaggaaggaatttgtaaatctctattccgactacattctcaataaatcagtagaaaaacagttcaaggcgtttcgcagaggttttcatatggtgactaatgaatctcccttaaagtacttattcagaccggaagngattgaatttgcttatatgtggaagccggaatctagatttccaagcattagaagaaactacagaatatgatggtggctatacaagagagtatgttgtgattagggagttaaaagaaaaagaaaaanaaaaagttaa

SEQ ID NO: 6761 - DNA, 934 bp, Cricetulus griseus
gctgagcagacaggagtttttaggaatggtgggcctatttggaacaattatcagtggcatctattgattgtggaatataaggacattgccaggattcactgggactggagaattgcgctgctgtttgtggcgtttgccctctgcatgttttgcctgtacagcttcatgccgctggtgattaaggtcaccagtgccacttctgtcaacctgggcatcctgacagctgacctctacagccttttctttggcctttttctgttcgagtataagttttcagggctctacatcctgtcattcacagtcatcatggtaggcttcatcttgtactgttcccacccaaacacgcacagcagagccggcaagaaagcagtgtcgccccctcgtccaaccaacatcgggatcgacaacttgggactgaagcttgaggagagcggtgtctcagacgacccactctgcagtcttgtagttggacaagccacagattcccatgtgtcaccagaggagagcagagcctgacactgccaaggacgtatctgaggagacatcagccccagagtgaataccctctgagtcggattgcatctgtggttagattttagaaagggccactgaacaatggttccaaactagaaataccaaagtagagcagacccaagggtagtgtttctgtgtgttgagtaccagtacctgtcagtgtcaggtgctggagtcctggaatctagactgtaagaggacagtgtcttccttcttcccacaggtttacattgctccaaggtttctgacagctcctcagtacagtgtcaacatgtagcctcagcgtaatgtcagccaccagaatgccatcttcagaaaaccatgtaaattttttgtataattataataaaggaacttggggtaagtgttcatattattaaaagactttgaactcatggaa

SEQ ID NO: 6762 - DNA, 934 bp, Cricetulus griseus
agctgccgaggacccgccgcctgcgccgcagccatggtgatgtcccagggcacctacacgttcctcacgtgcttcgccggcttctggctcatctggggtctcatcgtcctgctctgctgcttctgcagcttcctgcgccgccgcctcaaacggcgccaggaggagcgactgagggagcagaacctgcgagccctggagctggagcccctggagctggagggcagcctggctggaagccctccggggctggcgccgccgccgccgccgcaccgcagccgtctggaggcgcccgtgcacgcgcacgctcactcgcacatgcacgtgcacccgctgctgcaccacgggcccgcgcagccgcacgcgcacgcgcacccgcaccatcacgcactgccgcaccctccgccaccgcacctctccgtgccgcctcggccctggagctacccgcgccaagcggagtcggacatgtctaagccgccgtgctacgaggaggcggtgctgatggccgagccgccgccgccctacagcgaggtgctcacggacactcgcggcctctaccgcaagatcgtcacgccctttctgagccgccgcgacagcgcggagaagcaggagcagccgcctccgagttacaagcctctgttcctggaccggggctacacttcggcgctgcacctccccagcgccccgcggcccgccgcgccctgccccgccctctgcctgcaggctgaccgcagccgccgggtcttccccagctggaccgactcagagctcagcagccgcgagcccctggagcatggagcttggcgcctgcctgtctccatccccttgttccggaggactacagccgtatagaggggcgcccggcgtcccgggccccacgggcgaactcctagcctgactgcggggctttttaaatgcttcccttggactgcaggga

SEQ ID NO: 6763 - DNA, 934 bp, Cricetulus griseus
ccagacatgactgccataaaaccttctacactcggaacacaggtttcaagactttgcaagagttgtcatcaaatgacatgcttttacttcagcttaggactggaatgacactttctggcaataatacaatttgtttccatcatgtaaaaatttatattgacagatttgaggagttacaaaagtcatgttgtgacccatttaacatacacaaaaagctagccaaaaagaatctgcatgtaattgatttagatgatgccacgtttctgagtgcaaagtttggaagacagctggttcctggttggaagctttgcccaaaatgtacccagatcatcaatggaagtgtggatgttgattccgatgaccgccagagacggaaacccgaggcagatggaagaactgctaaagctttgaggtcactgcaattcacaaacccgggaaagcaaacagaatttgctccagaaggtggtaaaagggagaaaaggaagctcaccaagaactcaagcgctggctctgacagacaagttatcccagcaaagagtaaagtctacgacagccagggtctgctcattttcagtggcatggatctctgtgactgccttgatgaggactgcctgggatgcttctacgcctgtcccacctgtggctctaccaaatgtggggctgaatgccgctgcgaccgcaagtggctgtatgagcaaatagaaattgaaggaggagaaataatccataataaacatgctggcaaagcatatggtctgttatctccctgtcacccatatgatattttacaaaagtgatcagccaaataactggccagcaaagatgaaagtgcagcaaagaagtgagcagtgaccattctgggaagtaaatttgcatcagtcgtaaatggaaattgtagacaattaactttttttttttttttttttatttggtg

SEQ ID NO: 6764 - DNA, 934 bp, Cricetulus griseus
gtgcaagatggctgcggcgtgtcggagcgtgaagggcctggtcgcagtaataactggaggagcttcgggccttggcctggctacggccgaaagactggtgggacaaggggccacagctgtgcttctggacctacctaactcggggggtgaggcccaagccaagaagttaggagagagctgcttgtttgccccagccaacgtgacctctgagaaggatgtacaagcagctttgactctagcaaaagaaaagtttggccgcgtagatgtggctgtcaactgtgcaggtattgcagtggcaattaagacatacaaccaaaagaggaaccaggcccataccttggaggacttccagcgggttctcaatgtgaatctcttaggcactttcaatgtcatccgcctggtcgctggtgagatgggccagaatgaaccagaccagggaggccaacgtggagttatcattaatactgccagtgtggctgcctttgacggtcaggttggacaagctgcatactctgcatccaaagggggtatagtgggcatgacactgcccattgctcgagatctggctcccttaggcatccgtgtgatgacaattgctccaggtttgtttgccaccccactgcttaccacccttccagagaaagtacagaacttcttggccagccaggtgcccttccccagccgactaggtgaccctgctgaatacgctcatatggtacagaccataattgagaacccattcttgaatggagaggtcatccggcttgatggggccattcgaatgcagccttgaagggtggcagcaggaaaaacaccagcttcttttcagcttgaaggaaaccgaacagccattttgtaactctgctccagtcaccctctgtgcctaataaactctcaaaacttaaaaaaaaaaaaaaaaaaaaaaaaaaaaaaa

SEQ ID NO: 6765 - DNA, 934 bp, Cricetulus griseus
ccaggcacagcttcctgttcttaaaagagggacggacaggagaaatgatggatgtctacttttcctctgcagttcatctgtctgggatgacctgagctgggtcatatctcctcagtccaaaaacctgtggcattaggagacatccctttctatttttcccgagaagaatggggctccctggaccctgctcagagggatctcttctgggacataaaagagagagaactcccggaatgctgctctcggtttgggatccaaaagccagagcgagagagctcccccagacgaggccatgacagcattgtcgggacagactgactgtgaagtgactgtgtcctggaatcccgaggaggctgagaccgaggtctgggagagtgagaccccaccgaggacagctctgggcgcgctggtggtgacgcgtcggggccgaccgcccactcgcaggcgccagtttcgggatttagtgactgagaaaccgcacagctgcgggcaatgtgggaagcgcttccgctggggctcagacctagcccggcaccagcgaacgcacactggtgagaagccacacaagtgtcctgaatgtgacaagagcttccgcagctcttctgacctggtgcgtcaccagggtgtgcacacaggcgagaagcccttctcctgtgctgagtgtggcaagagcttcagccgcagcgcctacctggctgaccaccagcgcatccacacgggcgagaagcccttttggctgtagcgactgtggcaagagtttctcattgcgctcctacctgctggaccaccgtcgtgtgcacacgggcgagcggccttttggctgtggcgagtgtgacaagagcttcaagcagcgtgcacacctcatcgcacaccagagcctgcatgccaagatggcccaacccgtggggtgagtcaccagtggggcctgagcagc

SEQ ID NO: 6766 - DNA, 934 bp, Cricetulus griseus
agaaactaaaaaccaagaaatgcctccttccacaaacaaagtaacttgatccttggcatcatggtgggaactgctggaatcagtttgctggccttatggtaccacaaggtccgtaaaccaaggacaacaatgaatttgcctaaatttctttccctgggtaagaaattcgattcactaactttgcaagatgaaacacacagtgaacaaggatcatcagtggtctttcaaagaaggcaacttcagatactggaaaagttaaacgaattactgaccaacatggaagaacttaaggaggaaatcaaatttctgaaagaaacgattccaaagctggaggaatatctacaagatgaacatggagggaaggtaacagctcataagatcagtcctcagcacagagctagaagaaaaaggatgacaacagttcaaagtgcagcaacaagtaatagctcagaggaaaacaagaaaagtgaaggaagggtatattacagctacaagaaaagaaacattatgctaatattgggaaaacattaggagaaagagcggtcatgagggcacccatgaatggacactgccatctgtgaactgtggacatctattcaaggagcatctagatatagccatccagctcttacctgaagaaccctttctgtattacctcaagggaagatattgttatactgtctcaaaaactcagctggattgaagaaaaaaaaatggctgctactctgtttggggaaataccatcttcaacggttcatgaagctttgcataacttccttaagactgaagaattgaaacctggttattctatgtccaactacatgtatgtggccaagtgttacattgatcttgacgaatctcaagatgcttggaaattctgtaacttggcattattgctgcctattattaccaaagaggacagagatgcacataa

SEQ ID NO: 6767 - DNA, 933 bp, Cricetulus griseus
caatggatctggtgaaaagccatttgatgtatgcagtaagagaagaagtggaagttctaaaggagcaaataaaagaattagtggaaagaaactctttacttgaacgagaaaatgcactgttaaaatctctttcaaacaatgatcagttgtcccaactcccagcccaacaggccaatcctggtagcacttctcaacaacaagcaatgatagcacagcctcctcagccaacgcaacctccacagcagccgaatgtttcctcagcataaagctttcttaagcctcattaaggaaaaaccgaagcaatctttccttgtgtgccactggtgttctatccactttatagaaagcaagtagccatgcttcggctgtgtgcttggccttttcagtattagacaatcgttctacaggagtccttttccctctctaaagatgtcatgcagcactgttgatgtctaaaatttttggtggctcttccatgtttcttatcacccatggattcaccttgagccttcctgtcacataaataacagttcatctaaagagccacttttctttcaatatcaataacatttgcctacgtaagttttcatttattttgtgttttatttattacagggctgctattttcataatgtacatgaacaatgtcacagaacttttttaatttttgaataattataagtatcagtaaaggaattgaaagacaggattacatttaataaataaaacgtttaggcaataattgaacaaaagaatcctggcacatttctaacactaatggcaatttaccgttggtatttattttcaatagtaaagatccagcttgaatgtaaattttgtatagtgtaagtatgaaaaacacagtgcacctgtacaggtagtcaccagttattgtgatataataaataattgggctattttcaataaagaaaa

SEQ ID NO: 6768 - DNA, 933 bp, Cricetulus griseus
  modified_base (315)..(315): a, c, t, g, unknown or other
aggacaggtcgtgccccacagcagggcgatcggtgcccccactggcctgcaccagggggtcactgtccccaccacaaggcctcatgacccagcagaattttatgctgatgaagcaaacggggtgtggggggtgaagtcctataccccagcctcctcacatgctctccccacagggctccctcatgggccccccaccccagcagaaccttatggtgtcccaccctctgcggcagcgcagtgtgtctctggacagccagatgggctacctcccagcgccgggcggcatggccaacctacccttctagcaggcccctnagaagaggtctggagctggggatactgagaatatgttgactttaagaatttttcttttctccagtgttgggatggatggcctgggtccaggggtagggtggaagggtgggaaggggcttgtgtggggagtggcatttgtggaaacctgatgtgctggcagcttagggggaagcggcaagagtctgggtggggagttggaattgggttttgctccactttagccaccaggactgcccctccctccccttcctgttcctttggggcttctgtttccctctgtctttacacttctcccccaatttcagctatgtttgggggtcctcggggagaggagggggtcttccgtcctctgtccctttgtgaaactgtcacctcattgatgttccaggtccatttgtcccctcctggtttctctgtttttacccccctttcctctctgtcttcctcatttcctctccctgttgacatgctgacctcctctcccacgccccctgcaggcagctggccaggtgggcaggtgccagcggagctgtaaatagagctgcgcttttgtgccggtttgtgcgtgtgccgtatttctgtgttttgatagaaagtcacacacaaaagaaaaaaaaa

SEQ ID NO: 6769 - DNA, 933 bp, Cricetulus griseus
ctggtccacccatcgacccccggatctcagttggctttcctgccccgagatgctgaagcaggcagtggaacacagaggaggcttctctttcgagaactgccagaggaatgcgtccttggaacaggtcctctcgggccttcgggtccctcatgcacgcaaaaccgggactaccatcgcgggacttgtgttccgagatggagttatcttgggcgcggatacacgggccactaacgattcggtcgtggtggacaaaagctgcgagaagatccacttcatcgcccccaaaatctactgctgtggagctggagtggctgcggacactgagatgaccacgcggatggcagcttccaagatggagctacacgcgctgtccaccggccgtgagcctcgggtggccacggtcacccgtatcctgcgccagacactcttccggtaccaaggccacgtgggagcatcactgatcgtgggcggggttgatctgaccgggcctcaactctatggcgtgcacccccacggttcctacagccgtctgccctttactgccctgggctctggacaggatgcagccttggcactgttggaggacaggttccagccaaacatgacgctggaggctgcacaagagctgttggtggaagccatcactgcagggatcctgggtgacctgggctctggaggcagtgtggatgcatgtgtgatcactgcaacaggcgcccagctgctgaggacactgagctctcccacaaagccagtgcagagaactggccgttaccactttgctcctggaaccacagctgtcctgacccaggaagtaagacctctgaacctggagcttctggaggaaacggtgcagaccatggaggtggaataaagtggcctaagacttagagcttggtacagggggaataaaccccggaaatacaaacatttaaa

SEQ ID NO: 6770 - DNA, 933 bp, Cricetulus griseus
gacaatcagctatgccattggcaggaacagtacagaggggcggacccacaccatgtgcatcgagggcacacacggttgcgagaaccctaagccaagtctcacagagctgttggttctggagcatggacagtatgctggagaccctgtgtccaaagtgctgctgaaaccactcacaggccggacacaccagcttcgagtacactgcagtgccctcggccaccctattgtgggtgacttgacttatgggcaggctgaggaccaggaggaccaacctttccgcatgatgttgcacgccttctacctacgcatccccacacaggccgagtgtgtggaggcctgcacacctgaccccttcctgcctgcccttgatgcctgctggagtccccatacctgcattcaaccccttgaagagctcatccaggccctacagactggccctgacccaaaccctgtggacggagggcacagtccctccacacccctaggatcctcctgggccccatgatgcctgagaagagccatcctggcattagcctagctaggctcgattacctgcagccccccactgcctcttgctgcctgccactgtcatgtgcctttgcctttgctgaactctgccagggcctcacctcctctgcctgcatccagcgtttggccccaatgcattggagtgtgttggggaatcaacagaggcgtcctccatgcatgcccatctctccaagcctggtgtggatgctgcttctgctctatgggctcctggctggagcttctgccatgtcaccacctgcctggcttccacatagccatagacagtcagtgtcagtcctttgggtccttcctggaagccttctgggcctctcctatccaccacaacatggccacagcaccctagctgcagctaggctctaggattaagaataaatgtttagtgat

SEQ ID NO: 6771 - DNA, 932 bp, Cricetulus griseus
aataattaatgatcgaacagaaacccctcctccactagcatcacttaatgttagtaagcttgccagcaaagcacggacggagaaggaggagaagttgagccaggcctatgcaatcagcgctggcgtctccctggagggccagcagctcttccagaccattcacaagaccattaaagaactgtaaatggcaagaaaaaaacatcgtagtcatggaagaagttgttattacacccccatatcaagtggaaaattgtaaaggcaaagaggggagtgcactgagccatgtacgaaaaatagttgaaaaacattttagagatgtggaaagccaaaagatactgcagcgttcacaagcccaacaaccacagaaggaggctgccctgtcatcctgagtccacaaacatggaggactcttccagcatccagccacagagatggtggtggtggcttgagcggaggcaggccgggggagggaagggatcctatatttcttgctgactctcactaaagagtcagtgtttcaaacaacctagacttgaacaaacacccaacaaaaagaacaagaggataatttaaaagttgaatcattacttgactaacagactgcggcccaccatgtccttttcacagccccttctggaacagtcatcttgttagttttatttttgcaaattcctttccactctgcccttcacctgtgactttcctttcctagtctgtttctgccattctgtttttataagtggatatacttgccttctgaatgattgaaagaaacttttacatcttttcttccaaaataaaagtaacaagactgactgtgattctgaagctgagaccagaggcagaagacagaggtctcactttcttttttcttttttgcacagggcatggcttgaattagttttattttcttaactttaaatatatatatg

SEQ ID NO: 6772 - DNA, 932 bp, Cricetulus griseus
gctgcagaccaagatatttggtcatgaccgagtgaagctgatggaaagtatagtggttggagacattgcagactaaagcctaaccagggaatactgtcactgttactaacgaggctggaggcatcttagatgacttgattgtgaccaatacttctgaggggcacctgtatgtagtgtctaacgctggctgctgggacaaggacttggctctcatgcaggacaaggtcaaggagttccagaacaagggcagtgatgtcggcctggaggtggtagataatgccctgctagctctgcaaggacccactgcagcgcaagtgttacaggctggtgtgacagatgatttgaggaaaatgcccttcatgactagtgctgtaatggaggtgtttggtgcaggactagcagccagagatagcctgcgcttggaggcaggcctttgtctgtacgggaatgacattgatgaacataccacacctgtggagggcagtctcagctggacactggggaagcgccgccgaactgctatggacttcccaggagccaaaatcattgttccccagctaaagggtgaggtgcagaagagacgtgtggggttggtatgtgaaggggccccggtgagagcacacagtcctatcctgagcacagaaggcactgtgattggcgctgtgaccagtggctgcccttcacccagtttgaagaagaatgtggccatgggttatgtgccattcaagtatagtcggccagggacacagctgctggtggaggttcggcggaagcagcaaatgacggtggttagcaaaatgcccttcgtgcccacaaactactacactctcaagtgaagatgtcccgtggaaaagcccttccctccaggaatcttgtcctaggtggccttccatagtgcttaatcagagtagtgaagcacaactcacaggggt

SEQ ID NO: 6773 - DNA, 932 bp, Cricetulus griseus
gctctctctcgtccggccacatcgtccaagcgggatgtgcccaacatgatcgtggaggagtgtggcggcaaggggaagaacccagaggaggcagtggtagagtggagtggtatggggagttgcttaactggtcttagagagaccggaaattttcagtggctttgcagaagttgtccctgtgggtgggccctgactccaacagttgtccctggacatggctcctgccctcttcactggctcacctgcctgcccctcaaagcacttgcggtcctgcatgaacgcacatgacaagagcacttgcaggtctacgtgtgtccagaagtggccctggggcaagagctgccgtgactgtccctgtggatgtccaagtgccacgtgaactatgcaatgtaaagggttgacccacactaggcgaaactggactcgtccgtctcttttatatttttatacttgaaatgaaatcctttgcttcttttctaagcgaatgattgctttcaatgtttgcactgatttagttgcatggttagtcagaaactgccatttgaaaaaaagttatttttatagcagcagaaaaatgaatacagttaaatgtattatacataattttggaaccaaagaggccagcggatcagttttaattttattagatggtaaggccatcttctatgaggtagatgttctaaacaaccccttgagtggcctgccagcatttcagggtataaatgaatttttttttattcagttgatgtgtctcttctgttcttacacacccagaaggtaaagaaaataaatgatagaatacaatgcaggtgtctctctgtaagtcctcatctttagtttatttaataagccctccttaggttctgtttcataataataacttaaaccaacaacttcccccacagactggctgtctaagtattttacattca

SEQ ID NO: 6774 - DNA, 931 bp, Cricetulus griseus
cacatcggaagagtcacatccgggacggcgccttctgctgtgccatctgtggtcagacctttgacgacgaggatcgactcttgatgcaccagaagaagcacgatgcctaagaggggcggtaggccaaggagaacaggcctggttgtccttggcaacagtgtggcagtgggcccgggtggggtgcctacgttgatgctgctggagggacaggtggggatcccagaggcacaggggcggtggagtgagtgatctgggctctgtgtaggaatggggtttccccaaggcagggagctgattttagaatgcagggacctggctttgagctagccggtccccagctgggtgttctaagggtcaactcagactgccctgtaccctggaaaagtagcaatagaagctccatctatcctttgagtcctcggctagaggagcgaccagtgggaagggagccactccatcctctggtgttaacgccttaatgtcccagtctttactatgagttacttcaggtcattttttgctctctccctgagtatagggcttccctggtggttttgtttaaacccctaactctcctcaactctctccagcacttcaggagttctgggaaagactagcccacagatgctgagggtttgactgtaggaaaggtcctgggtagatttccttttaaagtttccagggtgtggatgccagcctccacccatgcacctgggtgctggggcactcttacccccagaggtacgggttctattgtagggtgattctaattgttagaaatccttacttaaaatgattggattctgctttcctatgatttctgcctactgggtcttgttttgttctctggatcgaaacagaacaaccatttaccctccttttcaaactagagaataaacattttggttttaagaaactaaaaaaaaaaaaa

SEQ ID NO: 6775 - DNA, 931 bp, Cricetulus griseus
ggctttgtggccacccgggtctgagcggctcggtgcggtttggcttggttccgcgctgccctcttgtcgccgggctccggattctactgtaggagctggggacaagaaggtgatcttgaagcctgaatttccagggatgaaaattcacataatatgatgtcagacaaactcacagtgctggagccttccgtctctgagcctggggaatttcaggaagacagattagtgcagctgctggggaatccagaaaggaagatcatagagagttctccctctcaggaggggagcctcaaacagatgacagtgacccgctggaaaattcaaacaggagaaacagcacagatgtgtagtaagtcaggaaggaatcctactcttaactcaaatcttcttatacttcagagagagcttatagaagggagacccattcttgtggtattggtagcaaatatgagtgtgacgagtgtgggaaagccttcttctgagttcataccttatacgacaccagaaaatccacactggtgagcgggtgtatgaatgcaaagaatgtggcaaggcttttctgcagaaggcccacctcactgagcatcagaagatccacactggagacagaccctttgagtgcaaagactgtgggaaagccttcatccagagctctaagctgttgctgcatcaaattgtccatactggagagaagccctatgtgtgcagttactgcgggaaaggctttatacagaggtccaacttccttcagcaccagaaggtgcatactgaagagaagctctacaagtacagtcagcatggaaaagatcttacgccacccccagatcttgtccaccaggaggatctttccctgagtgagacttccattcatttaggagagagagctacagatcaggagtgtcatgcagataatttataagataattactct

SEQ ID NO: 6776 - DNA, 931 bp, Cricetulus griseus
gctctcagaaagtccaggctagtctgacactgagcctgtcctttcagaccacagaatcatgcccatgacactgggttactgggacatccgcgggctggctcatgccatccgcctgctcctggagtacacagactcaagctatgaggagaagagatacactatgggcgacgctcctgactatgaccaaagccaatggctgaacgagaagttcaagctgggcctggactttcccaatctgccctacttaattgatgggtcacacaagatcacccagagcaatgccattcttcgttaccttggccgaaagcacaacctgtgtggggagacggaagaggagagaattcgtgtggatattttggagaatcaacttatggacaaccgcatggtgctggccaggctttgctataaccctgactttgagaagctgaagccagggtacctggagcaactcccgggaatgatgaggctctactccgagttcctgggcaagcggccgtggtttgcaggggacaagatcacctttgtggatttcatcgcttatgatgttcttgagaggaatcaagtatttgaacccaagtgcctggaagagttcccaaacctgaaggacttcatatcacgctttgagggcctgaagaagatctctgactacatgaagaccagccgcttcctcccgagacctgtgttcacaaagatggccacttggggcaacaagtagggccttggcagggtaggatgtatgattaagatgccaggttcccttggtttgcagggagccttgaggagcagccaggaccactgcagcccagagccaccttttccttctcctttctttccatcccgttccagaccccaagcctcaccagctccctctttttgctcatccaatcctcccatgcagaggctctttaaagtcccagcaactcctttccat

SEQ ID NO: 6777 - DNA, 931 bp, Cricetulus griseus
gcctcgcgcccgagcgctctcggcgcgcccaggcgcggtcccgtgtgaagcgcgcacctgctgaagacgaagcgcgggcagggggtcgcaggtccccccacaccccagccgcctgtccgtgctagccagcccgggccacttcccggaggagcgagatgaagcaccagaacatttggagaatgctcacagtggcaatgtgcttggccctcctgggctgcctgcaggcccaggagttcaagggacatgtttccatcatcctgctgggagcaactggggacctagctaagaagtacctgtggcaaggactgtttcagctgtacctggatgaggctgagtcagtaccgccaactgaagacagccgaggactatcagactctgaacaaggacattgagacgcaggtccagcaggatgggctctgggaagctggcaggatcttctacttctcagtgccaccctttgcctatgcagacattgcccgcaacatcaacagcagctgcagaccacacccaggtgcctggctgcgcgttgttctggaaaaaccctttggccatgaccacctctcagcccagcagctggcttcagaacttggaagcttttttccaggaagaggagatgtatcgggtagaccattacctgggcaagcaggctgcctctctgtcttcttagccccacgtgcaatctcatctgttctttaaggacttggtcctctgaagtttcaaaatcagaggggccttgaatgcctctggagtgagagtgaacaggccttgtgtcagcgttctgaataacagtgagtcactgcccagcctgagcctagaatgtcctgttcttacccagaagaatgactcgctctatctgtggggagttgcacaggggaggtcaggacggggaaataccaaagatttcctttccgggagcaagcactaataaaat

SEQ ID NO: 6778 - DNA, 931 bp, Cricetulus griseus
gggattaattcatgaaattatgagggaaaacttgcacctggaacaggagatcaaaaagcttgaagcagagttatgttcggacgccagagaattccaaattaaagagaatataccagaaagaaatcttaaattcatctcagtggagagttcggagcatgatgaccggttctcaaatagttgctgttcatttcaagtgagctcacaaatttcttatgagatccagaagggacaagcacttatcacctttgagaaggaagaagttgcacagaatgtgataacgatggggaagcatgtcgtgcagatggagaaagcccctgtgaaggtcactgcacatccagtcccgctaaacataggagtcaaattccaggttcacgtgaacatttctaaaatgaagatcaacgtgacgggaattcctgatgaacttcctgaagagcagacaagagacaagctggaactgagcttctgtaagtccaagaatggaggtggagaggtggaaagtgtggactatgataagaagtcaggaagcgctgtgatcacgtttgtggaagctggagttgctgacaagattttgaagaagaaagactatcctcttaacatgaattcaaagtgctatagagttacagttactccgtttatagagagacgcttggaaaagtaccaggtgttttcagccatatctaagaggacggtgcttctgactgggttagaagacgtttggatggatgaagagattgtggaggatctaatcagcattcacttccaaaggaagaataatggaggtggagaagtagacgtggtcaagtgttctttagatcagccttacatagcatattttgaagactaggccagagaaaccatatggaaattatagctttgagctcaaattactgtaaacatctacaaaatactgcttttccttaaaaaataaaaa

SEQ ID NO: 6779 - DNA, 930 bp, Cricetulus griseus
ggcatcatcaacctgcagggactgaaggctcccacgttcaaggtgcacatgtatgagaacctgtacttcaccaacaggaaggtgaactctgtgtgctgggcatccctcaatcacttggattcccacatcctgctatgcctcatgggccttgcagagacaccaggctgcgccaccctgctcccagcatcactgttcgtcagtaatcaccaagcaggtacagaccagcccggcgttctctgcagtttcccggatccctggtgcctggtcctgtgcctggtccctgaacacccaggccaataactgcttcagtacaggtttgtctcgaagggtcctgttgaccaacgtggtgacaggacaccggcagtcgtatggaaccaacagtgatgtcttggctcagcaatttgcagtcaagactcctttactgtttaatggctgtcgttctggggagatctttgccattgacctgcgttctccaagtcaagccaagggctggaaggccacccacatcttccatgattcagcagtgacctctgtacgggtccttaaggaagagcaatacgtgatggcatcagacatggctggaaagatcaagctgtgggacctgagggccaccaaatgtgtgaggcagtatgaaggacacgtgaatgagtatgcctacctgcccctgcatgtgcatgaggaggaaggaatcctagtggcagtgggccaagactgctacaccagaatctggagcctccatgacgcacacctgctcagaaccataccttctccataccccacctccaaggctaacattcccagtgtggccttctctcctcgccttgggggcccccagggagccccagggctgctcatggctgtccagcaggacctttactgtttctcctacagctcattctgtccaggcaatctggaggaggacaggtggga

SEQ ID NO: 6780 - DNA, 930 bp, Cricetulus griseus
acagctgtatatgatcatgtgatgaaatccctgaacgctactacaaagaatctgaggatcctaaacacttcaagtctgagaagacaggccgggggcagctaagagaaggctggcgggatagccatcaacccatcatgtgctcctacaagctagtgaccgtcaagttcgaggtgtggggccttcagacacgagtggagcaattcgtgcacaaggtggtccgagacatcctgctgattgggcacagacaggcctttgcgtgggtcgatgagtggtacgatatgacaatggatgatgttcgggaatacgagaaaaacatgcatgaacaaaccaacataaaagtttgcaatcagcactcctccactgtggatgacatagagggccatgcgcagaccagtacatgacaatggatgaggtgcgagaattcgaacgagccactcaggaagccaccaacaagaaaatcggcgttttcccaccgccatttcgatctccggcatcgccctgctgccttcctcggtacgcagcgctccgtccagccgctccgtccacccctctcctccacaaacttttttttttttttttggttaggtaacaacaacaaaaaaaaaaaaaaagtcatcaaagtggcagaaagagaagtctgtcactgttgcacctcactgcctttaaacccacaaggaaggcaagcagaatgtcaacgacgaacaacaggtagccggggagctccagagcttatgtccgtcctagctgtccttcctgactgacctccaacctcaggaaaggaaatcaccccaacccagatcccaaaggaaacaaaacagaccaaggcgtgtattctccttccctggcccctctcagccagtggaccctgcccgtaccctttcttgagtgctccactatccccaatgtctctcgggtccttgacctctccca

SEQ ID NO: 6781 - DNA, 930 bp, Cricetulus griseus
attgaattcaaggtagaaggcaagaaagacaatcataccgaacatgtcctgaaggtgaaaggctctctagttaggctgggaagtgatagacacggcagacagttcataggcacaaaagcatttgtctagaacagcttggatacctctcagtgccaatcctactactgcacatgtgagcctttcgttcttgccttctagaaatcactgttcatctgatatttgtaagtttgtgtttcttacagagttacagttttgataaagagacatctcagttactgccccttgtatttgagtcccttccataccgccctttggagactgaccacttggggagaagagaaaaggtagtgtgctgttagggttaccccacctcttactctccctcacttccctattttctctgtgggtggcacaggaaggcacctgacctagtaagtggtaggaagtttgatgtaaaatgtgtattgttgtgcgtagaatatttggcagaagaccctaacggtgctcgaccagagtgctcaggagtgactttactgttgactgctgtgtcatctgttcacatcccattgctgctgaggtcagtgttatcttcaagaattttatgactggcacaggcttgttctcctgagtgtgtgcaggctgtgtgcacgtggctaaggataagtcatgctatcagccacgtgtgatctcattaggaatagtgtttggaaaaaggaacactattacgtgctagagtgtccagaatttcatttaataatggagggaaaatgtgtggttattaaatgtgcattgaagcaaaatttcccaagagatttcttgttggacagactacccccaccccaatcttaactgctgcatccgtttctgtagagtcaaaaatgctctgtacatatttgggaatctgaagactatgtaaatcatttgttactt

SEQ ID NO: 6782 - DNA, 929 bp, Cricetulus griseus
tttggatcagaggaggaagaagccaactattggagagacctggccatgacctacaagcagagggcagagaatacacaggaaggaactaccgagaaattccaggagggaagtcgggaagtatgaagctgaattggagactcagctacagcaaattgaaaccaggaaccgggacctcctgtcagagaataaccgccttcgaatggagttggagactgtgaaggaaaagtttgaaatgcagcattcagaaggctaccggcagatctcggccttggaagatgatctggctcagacaaaagccattaaagatcaactgcagaaatacatccgggaattggaacaagccaatgacgacctggagagagccaaacgagccacaatcatgtccctggaagactttgagcagcgcttgaatcaagcaattgaaagaaatgccttcctggagagtgagctggatgaaaaggaaaatcttctagaatctgtgcagaggttgaaggatgaagcaagagatcttcggcaggaattggctgtgcagcagaagcaagacaagccccggacacccatgccaggctccgtagaaactgaaaggacagacatggctgtgcaagccacaggctctgtgccatccactcccacagctcaccgaggacccagctctggtttgaacacaccaggaatattcagacgtggtctggacagctctaatagtggaacaccactcacacctgcagcccggatatcagccctaaacatcgttggggacctgcttcggaaagttggggccctggagtccaaactagcatcatgcaggaacttcgtgtatgatcagtccccaagccggacaagtgggccagcctcagggcgaggaaccaaaaacagagatggtggtgacagacggccaagcggcaccagtgtgggtgataagggagccc

SEQ ID NO: 6783 - DNA, 929 bp, Cricetulus griseus
cagctccggaccatgaaatcctactttgccatcaaccacaacccggatgccaaaggacctcaagcagcttgctcaaaaaacaggcctgaccaaaaggagttttgcagggagaacaaatcttggggcagttacagccaaacatcccgacgtttgaaaattccctaaagtattaaaagaaggggaaaagtttgatcggaaatccactgcagtgaagacaaagacactattaggttatgataatcatacatttaaaagtttatgaaccaaagaagagagagagagagagagagagagagagagaaaaataagcattagaataaattattatgtaaaatttcaacttgttttaagattttagggtaacatttatagattctctgtgagtttacattttcactatgcaatgagcaaatttattgaagtatatgagtatattctgaactctgacatttggttctttgaatagttcaggttgcacaaggtatcagaaacaaaggatcagtggggaacaaatatttaaggcatgaggtttcttttcatcgttaaagggaatacttgaaggaaaaatgttgtaaagctactcttacttagctcaatatccaaagcacatgttaaacaaattagcatatagaatactttccagaaaaaatttctttatgaaattttattatgtataaataaattacattttatcttgtgtgctgaagtggcaagaaacaggcaaggataaagatccaggcatcagccatgggtagaaagttctgtgtctgttcctgtgtcccttcaggtcacttagaattgtcaggaatgtttctttcctttgggatttttttcttgtttacactgtgcatgatctcatgaattactctgaagagtacctggattaccttttatggtttatttagaaaataaaatttgttacaaaataa

SEQ ID NO: 6784 - DNA, 928 bp, Cricetulus griseus
aagaagagtgatagtacctgaaactttgggctactgtatcaaatcagagaatccgtctcctccaacatggcaggtaagaaagtgctcatcgtctatgcacaccaagaacccatgtccttcaacgggtccctgaagaaagtggctgttgaagaactgagcaagcagggatgtacagtcactgtgtctgacttatatgccatgaactttgagccaagggccacaagaaatgacatcactggttccctctctaatcctgaagtcttcagatatgggatagaagcctatgaagcctacaagaagacagctctgaccagtgacatacttgaggagcagaagaaggtgcaagaagctgatctagtgatatttcagttcccactatattggttcagcgtgccagcaattctaaaaggctggatggatagggtgctgtgccaagggtttgccttcgacatcccaggcttttatgactccggtttgctcaagggtaaattagccctcctttccttaaccactggaggtacagctgagatgtacacaaaaactggggtcagtggagatttccggtacttcctatggccactccagcatggtacattgcacttctgtggatttaaagtccttgccccacagatcagttttggtattgatgtttcatcagaagaagaaagaaaagtgatggtggcatcatgggcgaagcggctgaagagcatctggaaggaagagcctatcctctgtacacccccttggtacttccaagagtaacactttgtgctctgagtacagcaaattagcagcatggtgagagacctaaagcatgtacaaagagcaggtggtgctgtatccagagatgcagtgaatatgtccacaaatgagtgttttcagtttcatgcaactagatcagatattcaacaaacatcttggtgcactg

SEQ ID NO: 6785 - DNA, 928 bp, Cricetulus griseus
  modified_base (29)..(29): a, c, t, g, unknown or other
  modified_base (920)..(920): a, c, t, g, unknown or other
gatttcctaacatcaaagacgcaataaanctttggacaaatagagtgtggtacatgtacagttgctgtcagacctgtgtggctcagagtttagaagtattgaaagatgccatcttcccttcccgagtctaccacagagaacttcacagtctaaaacaacaattttgtgctttgaaaagtgaattatgcagtctccaagaaacactgaagactatctcagaaaattcctcttattcaagctgttgtcatacatgtggcaagagcaataagcttacgaacgtgccagcctgtgctccaacaacccatggagaatccccaactgtacttcctcccacactgccacagccagccagccatcctaccaccaccaccagaggaacggaatccactagtcactatctctgacctgcagcgtgtcactctgaaacccaactccagggtgttagcaacacgagttaaaaatgtcttaattactccgggtaaaagccaactagatctgcggaagctgctgagaaaagtcaatgtagacaggagcccaggtggaacccctctcaccaataaagaaaatatggaaacaggaactggactgactccagtcatgactcgggccttaaggagaaagtttcagctggctcaccctcaaagccctactcagtctctgccactttctacaagcagctttgatgaacaaaactgaggccgactctgcctgactctgtggagggatccatacaatgactgatcaaacccctcaattttaatgtactaaaatatgtattcttctggcataaaagctcatttagaggtagctcagcagttgagagcactgactgttcttccagaggacctgagcttgaatcccagcacccacatggtagtttatgaccatctctaactttttaaaaatttttaaaaaaaaanaaaaaaaa

SEQ ID NO: 6786 - DNA, 928 bp, Cricetulus griseus
gaaatgacgcgctgccccgctggcggtgcggaagtggagatggcggagctctatgtgaagccgggcaacaaagaacgcggctggaacgaccctccgcagttctcttatgggctgcagactcagactggtggacccaaacgcacaccccttactaagagggtcgcggccccgcaggatggatcccctagagccccaacttcagaaacttctggaccaccttcagtgggtcatccacctccttcaagtaaggcttccaggcctccacctatgggaacttgtcctgctactggtgtggagcccccaagttccccagtccctgagtctgaggctctgatggaagatgtgctgagacctctggaacaggcattggaggattgccgtggccacacaaagaaacaggtatatgatgatatcagccgccgcttggcactgcttcaggaacagtgggctggagggaagctgtcaatacctgtaaagaagaggatggcgctactagtgcaagaacttttacaccaccactgggatgcagcagatgacattcaccgctcacttatggttgaccatgttactgaggtcagtcagtggatggtgggagttaaaagattaattgcagaaaagaggagtctgtcttcagaggaggccaaagaagagaaatctacagtgacacctgagaaccagacagtactgggcttccatagtcttcataatcctggggtctccctggactcactcaaatgatcttctatgctttggtatggaaggcctttcctcacttggctcccattaccaccagggagactattgatcctgttgggcctgaccaaagatcctacctgggccactgcaagatcacttgttactcataatatgtacatttcaataaacatctcaatggtgggagtgggtaggaagatgagccattctgatg

SEQ ID NO: 6787 - DNA, 928 bp, Cricetulus griseus
ggctgtggggacaatgtggagtatggctaccgctttgccaaagagtttgtagatgcccgagagcgtgagaagaactttgtcaagggatcagaggagcagggccgagccctcatgaacctacagaacaacgaggctggccgccgggctgtgtataagatggctgatgtcgcctgcaaatgtcacggagtctcagggtcctgcagcctcaagacctgctggctccagctggctgagttccgcaaggtaagggaccggttgaaggagaagtatgacagcgctgccgccgtgcgcatcacccgacagggcaagctggagctggctaacagccgcttcaaccagcccacgccagaggacctggtctacgtggaccccagcccctgactactgcctgcgcaacgagaccacaggctcactgggcacccagggccgcctctgcaacaagacctcagagggcacggatggctgtgaggctgtggccgcggctatgaccgcttcaagagcgtccaggtggagcgttgccactgcaggttccactggtgttgctttgtcaggtgcaaaaaatgcaccgagattgtggaccagtatgtctgtaaatgatggcacccatgcctccagcccactcctctctgcctctcaaaagtctgtattacataaatctatctaaatatattttatatttgtacaaatgaatggacggatggtaaataagcaagagaagaaaatggagaggaaggacttaagagatgctggccctctgtgaggactgggctttgctggtaacctgcagccagtggagagaaatgggcttttccatgctttctggccaggactctcaggacacagaggcttgagagcgtcatgcgccatagcctccaggaaagaggaagtgattagatgaaggagatgggcttgtttcaaatctgcagtc

SEQ ID NO: 6788 - DNA, 928 bp, Cricetulus griseus
aggactcatgttcaacacagggattgggcagcacattttgaaaaatcctctaattgttaacagcattattgataaggctgcattaagacctactgatgtggtgctggaagttgggcctgggactggaaacatgactgtcaagctgttagaaaaggccaaaaaggtagttgcctgcgaacttgatccaaggctagtagctgaacttcaacaaaaagagttcagggcacgcctctggccagcaaactccaggtcctggtgggagatgtattgaaatcagatttgccgttcttcgatgcttgtgtggcaaacttgccctatcagatctcctctccctttgtcttcaagttgttgcttcaccgaccatttttcagatgtgctgtacttatgtttcaaagagaatttgctcttcgtttggttgcaaaaccgggagataagttatactgcagactctccattaatacacagcttttagcacgtgtggaccatttaatgaaggtggggaagaataacttcagaccgcctcccaaggtggagtccagcgttgtaaggatagaacctaagaatccgccaccacctatcaattttcaggaatgggatggcttagtaaggatcgcttttgttcggaaaaacaagactctgtctgctgcattcaaatcaagtgcagtacagcagctgttggaaaggaactatagaattcactgttcagtacataacactgtaataccagaagatttcagtatagcagataaaatacagacaaatcctaaccagcacaggttttagtgacaaacgggcccgttccatggacatagatgactttatcaggttgttacatggattcaatgcagaaggtatccacttttcctagcaatttgaaaacaattttttcaagaccaagaaaaaaatgaaattataccttcctaatatt

SEQ ID NO: 6789 - DNA, 928 bp, Cricetulus griseus
caaggagcggcagattgaggccctgcagctgcttttcctcatcttgcctccagccaaccgtaacctgctgaagttactgcttgatctcctttatcaaacagcgaagaagcaagacaagaataagatgtctgcccataaccttgcccttatgtttgcaccccatgtcctgtggcccaaaaatgtcactgcaaatgaccttcaggagaatatcaacaaagttaaataccgggatggcgtttatgatcaaacactcccaagtaaactttttaaggcttcctgcttatattcgggaatgtgccagattatactatctgggctccagaactcaagtgtcaaaggatgatcttgatctgacaacctcatgtcatgccttgtcctcccagctggcaagatctcagaaacggaacagggtagattcttgttctcaacaggaggagacccagcaacatacagaagaggcactgaaagagctcttccaacatgttcataacatgccagactccacgaagaagaaacagcttattaaacagttccataagcaatctttgactcaaacaccggggcaagaaccttctactcccagggtccagaaaagagcccgttcgagatcctttagtgggcttattaagcgcaaagtcctgggcaatcagatgatgtcagaaaaggaggctgtgagcccttttctaatctttcacagaagtagattttctcactgaaaatccagtgatcaggtttgaacctggaggtgggctatcgaggagatggaggatacatagcctgagtgcttgtgtctaccatggaaactggagtgtgtgaggccacagcccatgtgaaagagccttggagtatgcctctgggatgcttggaccagtgggctgtaggaagggcattctctcacccaaggcctttcagcaaggcttgcctgtgc

SEQ ID NO: 6790 - DNA, 927 bp, Cricetulus griseus
gtgcagcctcccaacccccgcgggatggcctagtccttttcacagcacccggcaagagtaccgatctcagaaccactgtgatctggttctcggatgctaccgaagaaagcgagaggagagcggtccaaaccttgctgctgatcctgtgccgaccctaaagacgaacccatgttacaatcaaaaccattcgctttcgaacggcaagtttcaccttctgtaatgttccgtgccagacgcctgtgcaaactgtagagcccgagctatggcgaccgagcatcccccggcagagggagcccagtccggccctctcctctgccaacccaaacgggaggaaaagccgcacgaaacccaactatgctgtcaaacttactcttacggggcacgtcggcggccatatcatatttctgctgtacattttaattgtaatgggtccttgatagtgtcaagggagctatgatggtctttgtagaatctgggatgctgcatcaggccagtgtttaaaaacacttgctgatgatggtaaccctcccgtgtcttttgttaaaattttctccaaatggtaaatatattctcactgcaactttggacagtactcttaaactgtgggattacagcagaggcagatgcctgaagacgtacactggccataagaatgagaaatactgcatatttgccagtttctctgttactggtggaaagtgggttgtgtctggctcagaggacaacatggtttacatctggaaccttcagactaaagagattgtacagaagttacaaggtcacacaggatggttgtgatctcagcaacttgtcaccctacagaaaacatgattgcatcagcagcattagaaaatgacaaaacaattaaactatggacgagtgactgctaaagtctctggcattgttctaaaaaaaaaaaaaaaaaaa

SEQ ID NO: 6791 - DNA, 927 bp, Cricetulus griseus
cgctgggagactgacgcgtctgcaggagagcgtggatcgctccggtgcgactttattggaaagatgaaacctgatgaaacgcctatgtttgacccaagtctgcttcaagaagtggactggagtcagaatacagccacattttctccagccatttctccaatgaatcctggagaaggcctggttttgaggcctctctgtactgccgacttgaataaaggttttttaaggtactgggtcagttgacagagactggtgtcgtcagccccgagcagttcatgaaaacttttgagcgtatgaagaagtctggggattactatgtcacagttgtggaagatgtgaccctaggagaaattgttgctacagcaactctgataatagaacataaatttatccactcatgtgctaagagagggagagtagaagacgtggttgttagtgatgattgcagagggaagcagctcggcaaactgttgttatcaactctcactttgctaagcaagaagcttaactgttacaaaatcacccttgaatgtctaccacaaaacgttggcttctaccaaaagtttggctatacagtgtctgaagaaaattacatgtgtcggaggttcctaaagtaaagacaaccaccaagacaatgaatgctccaaggcttaataaaggggatgatttttaaccaaaggaatatattttcaacttgaatcttttcttgcattgtatttttctaaagtttgtcttcatttcttggtaggcaagagtatgggtagtaaaagcttttctattcaatgtgattataatggtactattactctgatcattgtcctgttttatttatttattttaatgattttgtaaagtaaaattacattgttaacaatggttctaatcttttgcattccatgttactacattaaacttgtttatatagaa

SEQ ID NO: 6792 - DNA, 927 bp, Cricetulus griseus
gtatcatctacaagagggctgctgatacaaacgatagaagcctgtggctttcagcatcaagagtttctattatctccttcctcccttcggtattccaaactcaaggctacgatatttcctcattgcaaagcttcagtcagagcctttaacctttcaggcccctgatcagatactgatggagtttcctaaaattgcaactatacagacacaaagctatgcagtagttgcaagaaaaaaacattaagagtgaaaagacctgaaccaagcacctgctttgatagcagcagcacacagtattccagaaaggatagcattctttttaagcttgaaactgcagaagaaattgacaggaagcaccagcaggacaatgacctctctgtgcagatgctaaaagattttcttgaagatgaggacacaagtcaatactttttaccaccaaagttactgcttcgatatgctcttttactagatattgttaagcccacttctagaaggtccatgtgctttaccaaagggtatggaagctacattgaagggacaggctcagtgttacagacagcagaagatgtgcagattgaaaatgtcttcaaatctcttaatgatttgcctccagaagaaaagatagctaagttgtcaacacttaaactgcgatatttcacacctagagaaattgcgaatctccagggatttcctccagaatttggatttcctgagaagataacagtgaagcagcgttaccgtctccttggcaacagcctcaatgtgcatgtagtagcaaaacttatcacaatcctgtgtgaataatttgtgcatacctctgagaggtgtcatagtgttcctccaattctagacagtaattctaaaagatttgaactaattcatataaaatttaactaaagtattttactagcattttaatgggtaatt

SEQ ID NO: 6793 - DNA, 927 bp, Cricetulus griseus
aggaacatggctgctgtacttgccttgcacctggagcattggtttggccgctgaaccaggctgttttcctgactggtacatgctgtcactttttggcactggagctattctgatgcgtggagcaggctgcactattaatgacatgtgggaccgtgacttcgataaaaaggttatgagaacagcaaatcgccctattgccgctggagacatttcaaccttccagtccttcgtcttccttgggggacagctgacgttggcactgggagttctcctgtgcttgaactactacagtatagccatgggcgcagcatccttacttcttgtcgtcacctacccactaatgaaaagaatcacgttctggcctcagttagccttagggttgacttttaattggggtgcattacttggatggtctgctatcaagggctcctgtgacccagctgtatgcctgcctctttatttttctggagttatgtggacactgatatatgatactatttatgcccatcaggacaaaaaagatgacgctgtgattggcctgaagtccacagcactgctgttcagggagaacaccaagaagtggctcagtggctttggggtggccatgctgggagcgctgagccttgcaggagccaactgtggtcagaccctcccctactacactgctgtggctgtggtaggaacccacctcgctcatcagatatacactgtagatatccacagaccagaggactgctgggacaagtttacctccaaccgcacactaggaatactcttgtttttaggaatcgtccttggaaatttgtggaaagaaaagaaagaagaaacaaaacaacctgaagatgttagaatggaaaattagcaaatcagctgaacttggtggtgcactcaggaagcataggcaggatctgttatagatgtaggaag

SEQ ID NO: 6794 - DNA, 927 bp, Cricetulus griseus
gaaggtggcggctcttgtcttctggagaaggcccttgcaactgggctgggactggccttcagtgagtgaggtcaccatgccagcttcccagagccgggcccgtgccagggaccgcaacaatgttctcaatcgggctgagttcctgtccctgaaccagccccccaaggggaccccaagacgcccagaagctcaggtaggaaggcctcagggccctcgacacagcccccaccctctggcgacggggcccgggagcgtcgccagtcgcagcagctgcccgaggaggactgcatgacatcatgacagtggctggagtccagaagcttatcaagcgccgtggcccctatgagacgagccctggactcctagactacctcacaatggacatctacgccttccctgccggccatgccagccgtgctgccatggtgtccaagttcttcctgagtcacctggtgctggcggtgcccctgcgtgtgctgctggtgctctggggccttctgcgtgggcctgtcacgggtgatgatcggacgccatcacatcacagatgtgatttcaggcttcattattggcttactttccaagttccgcctggtggagcttgtgtggatgtcctctaacacctgccagatgctcatatctgcctggtgagccagcacccaccacccacccaggctctgggcagagcttggtctcagagaggtggctagaagcgggtcagtggggatggactgactcaacttccccttcctggttggaggctggcttgtcagtactgtgggacttcctgcctgtctccctgcactctggactctgaggcagccaggacgactcacatgggctgtcatgcttagcctccattctttgtctgaagacaacagacaagaacaagatggccataggaggggcagagtctggtcccctcatcac

SEQ ID NO: 6795 - DNA, 927 bp, Cricetulus griseus
tccgctgccatggtgaccctgctgcttcgctccctgcgtccccaccgcagtctcccgctccgtctgcggctggttgtagatgtacccctcagggccgggagccatggcccccgcctgctgtacccgggccacatccccaccacctcgctgcaaaagatgttgctggccgcaggctcggcgggaatggcactctacaacccctatcgccacgacatggttgcagttctaggggagaccacaggatactgcaccctgaaattcctcagggaccagatgaagaaggatccagagggtgcccagatcctccaagagcgtccccggatctcactgtctactcttgacctaaggaagcttcagagcctgcctgaaggctctctgggccgtgagtatctccgcttcctggatatgaatagggtctccccagacacacgagcacctactcgtttcgtggacgatgaggaactagcctatgtgatccagagataccgagaggtgcacgatatgctccacaccctgctggggatgcccaccaatatgctaggagagattgtggtgaagtggtttgaggctgtgcagaccggtctgcccatgtgcatcctgggagcactctttggacccatccgcctccgtgcccagaacctacaagtgttgttctctgagctgatcccttgggcaattcagaatgggcgaaaggccccatgtgtcctcaacctctactatgagcggcgttgggagcagtctctgacagcccttcgggaggagctaggcatcagtcctcccccaaaacatatccagggcctggcctagtctgagctgctgcacagggagggcctagtccacttctccacacactgccttccttgggacaagggagacccttccactgcctttgtttcttcttttgaaccttgaactcagagtgtcact

SEQ ID NO: 6796 - DNA, 926 bp, Cricetulus griseus
atcttgtgcggtggaaaatgaagagcttgtccagcacctgggagctgccaaggatgcccagcggcaactcacagcagagctgcgcgagctggaagacaagtacgcagagtgcatggagatgcttcacgaggcgcaggaggagctgaagaacctgcggaataagacggtgcccaacaccgcgtcccggcgctaccactccctgggcctgttccccatggactcattggctgcggaaatcgagggaactatgcgtaaggagctgcagctggaagagcctgagtctccggacatcacccaccagaagcgtgtctttgagaggctccaaccagtcctcagccatgacctccctcctgtccagctgcgccagcaccccccgctccagtttctacggcagtgatgtcggcaacatggtccttgacaacaagaccaacagcatactcctggaaactgaggcagctgatctggggaatgaggagcgcaataagaagccaggcacgaccaggcaccccaggctcccacgacctggagacagcacttaggcgtctgtccctgcgccgtgagaactacctgtctgagcggaggttcttcgaggaggagcaggagaggaagctgcgtgagctggctgagaaaggcgagctgcacagtggctccctcacacccaccgagagcatcatgtccctgggcacacattcacgcttctctgagttcaccggtttctccggcatgtccttcagcagccgctcctacctgcctgagaagctgcagatcgtgaagccgctcgaaggttcagccacacttcaccactggcagcaattggcccagcctcatcttgggggaatcctggacccccgtcctggtgtagtcaccaagggcttccggacattggacgttgacctggatgaagtgtactgccttaacgactttga

SEQ ID NO: 6797 - DNA, 926 bp, Cricetulus griseus
aagtgtcaggagtcagaccaggcagaaacagaatcacagcaacaaatggcctcaatcagttctggagataatcaaggaggaggtgacctgtcctatctgcctggacctcaaaggtggaacctgtgagtacagattgtggtcacagcttttgccgagcctgcatcacactgaactatgaatccatcaaaggcaaagaagaagagggcatctgccctgtgtgtggagttacttacctgttttgggcatctgagacctaatcggcatgtggccaacatagtggagagtctactggggttcaagtccaacccagaggaggagcagaaggtcaatgtctgtgcacaacatggagagaaacttcagctcttctgtgagaaggacatggtggccatctggctggctttgtgagcgatccattagggtgtccttggatatccagctttccagtcagggaagtattactgggaagtagacgtgtctagaagtgatgcctggctcctaggattaaatgatggaagatgtgctcaaccccaacttcattcaatgaatcaaatgggcatcatgtataattctcatgataaacaacatgtaaattttcaacctaaatatggctactgggttataggtaagaagaataagtctgtatataatgcctttgtagagtgctctgtcacccacaatgccagtgtcttggccctctctctgactcatcctcccaatcgtgttggagttttcctggacagagaagcttgcactctctcattttatgatgtttccaaccatggagctctcatctataaattctgtgaaccttccttccctaatacagtttatccatattttaatcctatggaaacatcacagccaatgacagtctgtggaccaccctcctaaaccctcacctatatctgcacagtgcccccatgtct

SEQ ID NO: 6798 - DNA, 926 bp, Cricetulus griseus
ccgtggaacggatggcagatgatcagaactgtgttgcagagctggaaaaagtggatccttccagtgaagacggagttgatgctaagcccgaccgctcctccattatctcatcaattctctggaaaaagaagaaaaatgcccctccgtgccccatcaagaccaccgggaccgcgtgcccacgcacctgtacagaatggattttgagaagatggggaaatgtatcattataaacaacaagaacttcgacaaagtgacaggtatggacgtccggaacgggacagacaaagatgcagaggccctcttcaagtgcttccgaagcctgggttttgatgtggttgtctacaatgactgctcttgtgcgaagatgcaagacctgcttagaaaagcctctgaggaggaccacagcaactcagcctgcttcgcctgcgtcctgctgagccacggagaagagaatctgatttatgggaaagatgtgcaaaaccctgttagagaaacccaaactcttcttcattcaggcatgccgagggacggagctcgatgacggggtccaggccgactccgggcctatcagcgaaactgatgctaacccccggtacaagatcccagtggaagctgactttctcttcgcttactccacagttccaggctattactcatggaggaacccaggaaaaggctcctggtttgtgcaggccctctgttccatcctggacgagcatggcaaagacctggagatcatgcagatcctgaccagagtgaacgacagggtggccaggcacttcgagtcccagtgtgatgatccctgcttcaacgagaagaagcagatacccatgtatggtctccatgctcaccaaagagctctactttggccgttgacatccctcccttccagctgagagcctgctttttttttttttgtttaataa

SEQ ID NO: 6799 - DNA, 925 bp, Cricetulus griseus
gggattttgtggacctaagaagagattgccccagtagccaccctcccattagagtcatgcagtggaacatccttgcccaagctcttggagaaggcaaagacaactttgtgcagtgccctgttgaagcactcaagtgggaagaaaaaaaatgccttattctggaggaaatcttggcctaccaaccagatatattgtgcctccaagaagtggaccactattttgacaccttccaaccactcctcagtagactgggctaccaaggcacattttttcccaagccctggtccccgtgtctcgatgttgaacacaacaatggaccagatggctgtgctttgtttttctccaaaaccgtttcaagctcatcagcagcaccaatattaggctgacagccatgacccctaaaaaaccaatcaggttgccaatcgcacagaccctggagtgcaaggaaatccggccgacaattctgcgttgctgttacccacttaaaaagcccgctctggctgggagcggtttcgatcagctcagggctgcgaccttcttcagaacctgcaggacatcacacaggaagccaagattcccttgattgtctgtggggacttcaacgcagagccaactgaagaggtctacaaacactttgcttcctccagcctcaatctcaatagcgcctacaagctgctgagtcctgatggacagtcggagcctccgtacacgacctggaagatccggacctcaggggagtgtcgccacaccctggattacatctggtactccagacatgctctgagtgtcacatctgctctggatctgctcactgaagaacagattgggcccaaccggctcccgtcctttcattatccttcagaccacctgtcactggtgtgtgacttcagctttaatgaggagcctaatgaacttttataaacac

SEQ ID NO: 6800 - DNA, 925 bp, Cricetulus griseus
  modified_base (339)..(339): a, c, t, g, unknown or other
tggaggtggtccgcgagaggaaggcccagccacctgcagtgctccagcctagcacccagaacccccaacctcatcttctgcaggcattctccagtgccaagaacagcacaggctgcctcctcccaagcatgccgggtcagcaaactacaaagagagacagccacaaagggcgtccacggctgggaacgtgcgggactgaagctacctccttccaagttcctgtagcagctccaggtggcctccggccaaagcccaagactgtatctgagctgcttcgtgagaagcggctccgtgagtctcgtgctaagaaggctactcaggccctcactgccatcaacngccagttgctgatctcctcacctgtgaggctcctggcaggtgactgggatgtcagccacagacaagccagccccctactccagcaaaccattcccctaaatgcttcccacaaagggacccagattgcagcccctgctgcttttaggagcctggccctggctcccaggcaggtccccacaggctgccctctgagtactctaggacagtctcaagcctctgtcacatcccagaagcagggcctgtccaaggtcttgccccttctcccagcatcccccagccccactcagctgcctgtacagcccctcagtcagaggcagctccaggacaaccccagcttacctcctgctaaagacacgtttcctggctctcttctcccttcctgcactcctggccactctgccacccaacagtgtccccaccaccctgtcaccagctgtggctgttggttctgaaagtgacagtgaagacctccttggtgacctggaacttaaggacagggccaggcagttagattgtctggcctgcaggatacaagcaagcccagcagctacagaccctgaacagagagctccaggtcctggtgagg

SEQ ID NO: 6801 - DNA, 925 bp, Cricetulus griseus
agtaaccaaataaaggcaaataggaagaagtaaagatactacgaaaaaagtaaagtaggaattcttccatttgttgctgaatttgaagaatttgctggactcgcagaatcaatcttcaaaaatgctgaacgccgtggagatctggacaaagcatacaccaaactaatcagaggagtgtttgttaatgttgagaaagttgcaaatgaaagccagaagacccccagggatgttgttatgatggaaaactttcaccacatttttgcaactctttctcgtttgaaaatctcgtgtctagaagctgagaaaaaagaagccaagcagaagtacactgatcacctgcagtcttacgtcatttcctctttaggacagcctcttgaaaaactaaatcatttctttgaaggcgttgaagcccgagtagctcagggcatacgggaggaggaagtgagctaccagcttgcattcaacaagcaagagcttcgcaaagttattaaagagtatcctggcaaggaagtgaagaagggtctggataacctctacaagaaggttgacaagcatttatgtgaagaggagaacttattgcaggtggtatggcactccatgcaagatgaatttatacgccagtacaagcacttcgagggtttgatagctcgctgctatcctgggtctggagttacaatggaattcactattcaggacattctggattattgctccagcattgcacaatcccactaaagccttgtaaaggagaaaaaagaaatgaacacgcactctcagtataccgacactacataaaaaatgaagcaagtgcttcgagaagccagacttaaacgactgtgtgttatggaatgtcagataatgtgtagtactctgctgcagaaataaaagacaaattaaaagttaaaaaaaaaaaaaaaaaaaaaaa

SEQ ID NO: 6802 - DNA, 925 bp, Cricetulus griseus
ggttttcagagatcttccagaagaggagcatccttccttctttctcttcgagctgaccgtgcagtggaccatccatgcctctcctaacccagcacgttcaggacgaggacgaacagtactgcttagtggccagccttgacaacgttaggaatctctccactgtcttgaaagccattcatttcaaagaacatgccgcgtgttttgctactaaaaacggactcaaggttacagtggaaaatgcgaagtgcgtgcaagcaaatgcctttattcaggctgaagtgtttcaagagtttatcattcgggaagaatctgttactttcagagttaacttaactatccttttagactgtttatctatttttggatcaagtcctacaccaggtactttaactgcacttcggatgtgttaccaaggttatggtcaccctttgatgctatttctagaaggaggaggagtggtgacagtttgcaaaattaacacccaggaacctgaagagactctggattttgatttctgtagcaccaatgttatgaataaaattatcttgcagtcagagggtctccgtgaagcattttccgagttggacatgacaagtgatgttctgcagatcaccgtgtctcctgacaagccctatttcaggttatctacttttggaaatgcaggaagctcccaccttgactatcccaaagattctgacttgatggaagcatttcactgtaataagacccaggtcaacagatacaaactttctttactgaaaccctctacaaaggcattagctttatcctgtaaagtatctattcggacagataatcgaggattcctctcattacagtacatgattagaaatgaagatgggcaaatatgttttgtggaatattactgctgtcccgatgaagacgttgagtcttgaataatttactg

SEQ ID NO: 6803 - DNA, 925 bp, Cricetulus griseus
tcgcgcgaaggctgaagggagtgtgagcgccggcggccgggggaaccccggagagccggtatgcctcggtatgcgcagctagttatgggccccgcgggcagcgggaagagcacctactgttccaccatggttcagcactgcgaagccctcaaccgctctgtccaggtggtcaacctggatccagcagcagagcacttcaactaccctgtgatggctgacatccgggaactgatcgaggtggacgatgtgatggaggacagttctctgcggtttggtcccaatggaggattggtattctgcatggagtactttgccaacaactttgactggctagagaactgcctgggacacgttgaggacgattacatcctttttgactgtccaggtcagattgaactgtatacacacctgcctgtgatgaagcaattggtccagcagcttgaacagtgggagttccgagtgtgtggagtgttccttgttgattctcaattcatggtggagtctttcaagtttatttctggcatcctggcggctctaagcgccatgatttctctagaaatcccacaagttaacatcatgacaaagatggacctgctgagtaagaaagccaagaaggaaattgagaagtttctagatccagacttatactctctgctagaagattcaacaggtgacttaagaagccaaaaattcaagaagttgacgaaagctgtgtgtggcctgattgatgactacagcatggttcggtttctgccatatgatcagtcggatgaggagagcatgagcatcgtgctgcagcacatcgactttgccattcagtatggggaggacttggagtttaaggagccaaaggaacaggaagaagagtcttcctccatgtttgacgaatattttcaagaacggcagaatgagtgaggttgactac

SEQ ID NO: 6804 - DNA, 924 bp, Cricetulus griseus
ggatgactgtaagcaggaggctgaggtggtcatctacgagaccaactgccactgggcagactgcaccaagggaatacgacacgcagggagcagctggtgcatggaagagcaagtcgcatgtttacccagtcctatttttccttgtgcactaccaccctaccgtggaaagttctagggctcctccacactgtgctgggtggccagctgtctacacctaaccaacacatgcagtctcagtactttctgatcccctgacctctgccctcctctcctggttatttggcatggacttatgacatgcatggtgtttgtggtcgggtgggagggtgagggattgattcttggactttgaggaactgttaactgaattttcttgttcagtgtggcctggccccaaataagaaagggcatgtggaaactgactccagaaagaatcagtccagaacacactgcagggtgaacccacgcctcttccccgccacacacatgatccgaaacttctccctttgaattcatagaaactttgccaaaccaaacctcaccactcagaacttccttctggccatggctctggcttcagtgaggaactttttagcagagcctggacctctgggtcctaagaagcagacttctctgtttacaatccagagacaagaccaaccccaaaggagagctctgggccacgcccatgggtctgtggctccagtggtgtggtctcactgcctgacataggccctaacttccccttctccatccatatctacctaccgtagacatagacaatcccatccatacacacacggtgaatcgaatcgtccagccaaatttatattgccaaacatttttagctttttctacttgctataaattgagatgacatgctcaacttgtaaataagtcctttttgacattaaaataattttt

SEQ ID NO: 6805 - DNA, 924 bp, Cricetulus griseus
  modified_base (340)..(340): a, c, t, g, unknown or other
cacaaaatggcttcctgcgattcttgcttcggggctgtgacctggagctgttcacctcagtgctcaatggtctggggccatttttggaggatgaggaagccccagtggtcgtcccaatgcagattgagctcctggactccagtatcaccctcaaggatgatatccctcccatctacccaacatcccctggccctgtccccatcactgtggcagtggagcatcttgtgctgaagcgaaatgatgacggtgtgtttcaccttggcgctccggctcaagcactgtaccattgccaaccaggacaagaaaaacttctccaggagattaggaaatacaaccctcnctttgagctctgacagcagctcagccatctgtgccaatgagagaggatgtcaccagcaaagcaccgcctaggacagaggtgccgaggtgctgtgaggagtggggtctgtgatgaagattttcttttgtcagttcactagttttggtcaaaatttagcctgagtctcccagcatctttgtggagtgctcccctggtgtcttctgctttggctaagccaatgagttttaatgtaagctactaaaagtcagatctgtccaattacgtgagtctgagctgtttccctaactcagggtgctaaaaacaagacttgctcaggaaagcttcagaagagagcagcttccaagccgccttcctgtgacactcaacagtggatgggaaacaggccagtggatcgattgccaattatatcaggtagccttactgctaatcactgtcaataaagtcacttcattctccgaggagagcagtgagaatgtatacaaggaactggaatcctagtcagtattgggaaattttaatgttgcaatatctaatcaaaccctgagtatactggttctgtgaaccacctgaaaagcaaaattaaa

SEQ ID NO: 6806 - DNA, 924 bp, Cricetulus griseus
gaccagactcagacggtgtcgcccgcggagcggaaagggcaggatttcagcgcggccgtcggtgacaccatggagaaaaacgaattcacgtatgaagattaccagagcaccgctgagtggcttctgtctcacactgagcatcgacctcaagtggcagtgatctgtggttctgggttaggaggtctgactgctaaattaactcaggcccagatctttgagtacagtgacatacccaactttccccaaagcacagtgcaaggccatgctggtaaactggtgtttggattcctgaatggcagagcctgtgtgatgatgcagggcaggttccacacatatgaaggatactcactatcaaaggtgacattcccagtgagggttttccgtcttctgggtgtggacactttggtagtcaccaatgcagctggagggctcaaccccaactttgaagttggagacatcatgctgatccgtgatcacatcaacctacctggtttctctggtcaaaaccctctccgaggccccaacgaggaaaggtttggagttcgcttccctgccatgtctgatgcttatgaccggaatatgagacagaaggctttgactgcctggaaacaaatgggggagcaacgggaattacaggaaggcacctatgtgatgctggcaggacccaactttgagactgtggcagagagccgcctgctaaggatgctgggagcagatgctgttggcatgagcacggtcccagaagttatcgttgcacgacactgtgggcttcgagtctttggtttctcactcattactaacaaggttgtcatggattatgcaaacctggagaaggccaatcaccaggaagtcttagaagccggaaaagcagctgcacagaaactggaacagtttgtttccattctcatggagagcattccactc

SEQ ID NO: 6807 - DNA, 923 bp, Cricetulus griseus
tcgggcctactgggttcgaggtcctggaggaccgcaccccgatctctatctaccctcgactttcagcgcctctaaaccgaggcccgcgctgccactgcccgggccacctggtccggtcggcttacttcattcaccagccttgccaattgctgcactgtccccagccccaatgggggagtgagaggccactgccggccggacatgggtctccccaccgtgcctggcctgctgctgtcactggtgctcctggctctgctggtggggatatacccctcaggggtcactggactggtcccttcccttggggagcgggagaagagggatagttcgtgtccccagggaaagtacccccaccctctgaataattccatctgttgtaccaagtgccacaaaggaacctacctggcgaatgactgtccggagcaagggaagataacagattgcagggagtgtgctaaaggcacctttaccgcttcccagaaccacgtcagacaatgcctcacttgcaagatatgtcggaaagaaatgtcccaggtggagatttctccttgcagagcggacaaggacactgtgtgtggctgcagggagaaccagttccagcaaatctttggtgaaaaacactttcgatgcgtggactgcagcccctgcttcaatggcaccgtggctattccctgtaaagagagtcaggacaccgtgtgtaactgccatataggattcttccgaaatggaaatgagtgtgtcccttgtagtcgctgcaaaaaaatcaggattgtttcaagttgtgcctacctccaactggaaatgtcacagacccccaggacccaggtaccccagtgttattgcccctggttatcttcctcgggctttgccttttatccttcatcttcatcagtttaatgtgccagtacccgcggtggaagccc

SEQ ID NO: 6808 - DNA, 923 bp, Cricetulus griseus
gatgagatgcggatgcaggccctactgatacgggagaggatcctgggtccctcgcaccctgacacatcctactacataaggtaccggggtgctgtctatgcggactctggaaatttcgagcgctgtatccgtctgtggaagtatgccttggacatgcaacagagcaacctggagcccctgagccccatgactgccagcagcttcctgtcatttgcagagctcttctcctacgtgctgcaggactgctcagctaagggcaacctgggcatgcagctcggtttccctgacctcatgggtgtgctcagcaaaggggtacgggaagtggagcgggctctgcagctgcccaaggagccaggcgactctgcgcagttcaccaaagccattgccatcatcctccacctgctgtacctgctggagaaggtggagtgcacccctagccaggaacatctcaaacaccagacagtctaccgcctgctcaagtgtgccccacgcggcaagaacggcttcaccccattgcacatggcggtggacaaggagaccaccaatgtgggccgctaccgagtgggcgtcttcccctcgctgcacgtggtcaaggtgctgctggactgcggggccgaccccgacagccgggacttcgacaacaacactccgctgcacatcgctgcccaaaacaactgcccggccatcatggatgcgctaatcgaagcaggggcccacatggatgccaccaatgccttcaagaagacagcctatgagctgctggacacaaagctactggccaagagcaccgtgcagcccttcaactatgtgacgctgcagtgcctggccgcccgcgcccctggacaggaaccaagggtcccttataagggattcatcccagaggagctggaggccttcatggaactgaatggctgcagcgtatg

SEQ ID NO: 6809 - DNA, 922 bp, Cricetulus griseus
gggaaacatggagtacagtctggcgaccgcggcgctaaccggggtggaccggcgctcgctgcagcgatcggctcgactggggagggaagtgctggagcgcgccaagagaagggcagtgaactggcattctccagagcgatccaaaggcagcgtgggggtcctgtaccgccagggcccctaccaggaacgatggtcggtccccggtccccagcgccccctaggagagagagaagaaaggcgcccgactcttagtgcttccttcagaacaatagctgaattcatggactatacttcaagtcagtgtgggaaatactattcatctatgccagaggaaggcggggcaacccacgtctaccgttaccacagaaggaagcctccagaaatgcccatgtactcagacatagggcatggtcaagaacagagaaacagcagaggagaggcatctgttgattcaggaagcatctaccaaacatcagagcattctcaagaggcatcctggcctgctgagaacatctctaaggacctctacattgaagtgtatccagggacctattccgtcactgtgggctcaagccccttaaccaggaagactcatgtggtcgccgttgactcagggcaaagtgtggacttggtcttccccgtatgaagttgaccatcactgccatcattttactcttaagtaacaagaagaataaagctacattataattgccttaataatgaatgatatgttgatcctactttaatgctggctgtagagagggcagcctttgtgaactggagtctgtctctttcaagcttctttttaacttgagattatagaaatcccccatcctgtgtgcctgaaaacaataatggaatggtgctgtctaaacagctcttactactgatttcccaagaaagtgttaaattatgataataa

SEQ ID NO: 6810 - DNA, 922 bp, Cricetulus griseus
tccaagggcgttagtaccttctgagctccccgggaggatggattccggggcggacgtggagccgctggcgggcctggtctggtcgtcagccttaacaccgccgcccccgggtttcagcgcgatcacctgcaccgtggagggcgcgaccgccagcttcggccgcggtttcgctcagaaagccggctactttctgtgtctgagcccgctgggcagcctgaggaaccctcaggacaatgtggtagtagacatgcagatcgtgatggacaagggccccccgccatccggcttctctacagtgaacgaccctctagactccaaggcctctgtgtccaagaagaagcgcatgtgtgtgaagctgatgcccctgggggctgccgacatggttgtgtgtgacgtgaaactgagtgggaagaccaagacagtgcctggatacctgcgtgtgggggacatgggtggttttgccatctggtgcaagaaatccaaggccccaagaccagtgcccaagccccgcactgtcagccaggatatgcggggcctctcactggatccacccacacagcccagcaaaggcagccaccctgagcggacactgtctaggataggctctcgagcatccactctgcggaggaatgactccatctatgaagcatccagtctctatggtatctcagccatggatggggttccctttacactgcacccccgttttgagggcaagagctgtgggcctctgaacttgtctgcctttggggacctgaccattaagtcgctggcagacattgagaaggagtataactatggcttcgtggtggaaaagacagcagctgcacgcctgccccccagcgtctcatagtctctgcctcaggtgccccctgaccaccacctgcctcccagcattactgactgattgatgcccagcctc

SEQ ID NO: 6811 - DNA, 922 bp, Cricetulus griseus
gcgcgggctggaaccaagatggaggagtacgcgagagagccgtgcccctggcggattgtggatgactgtggtggtgcctttaccatgggtaccataggtggcggtatctttcaagccttcaaaggttttcgaaattctccagtgggagtaaaccacagactccgagggagtttgacagctattaaaaccagagcgccacaattgggaggtagctttgcagtttggggaggattgttttccatgattgactgtagtatggttcagataagaggcaaagaagatccgtggaactccatcactagtggtgccttaacaggagccatcctggcagcaagaaatggaccggtagctatggttgggtcggctgcaatgggaggcattctcctagctttaattgaaggagctggtatcttgttgacaagatttgcctctgcacagttccccaatggccctcagtttgctgaagaccactcgcagttgccttcaagccagttaccgtcctcaccctttggagactaccggcagtatcagtaggacttctttcccaggattcctgtcactgggtggactgcagttcagtaggatttcagaagatcaagttacagtctgtttaaagccctaggtggggcagtggtggccaagcgggccacgaagagacattcacacatttttctatttaaaagagactcagaggggagaaaagatactaagtttatttattcacacttgggttgcatttgtgatcaaaataaatgtctaataccatttcaagagcgtacatgtacatgtgcttagaagataaaggaccaaagggcaaataacagtgaaactcgaccgtcatttccttcaggacttctccgcctggtgtcttgtgtacagttattcagacaataaaaggttcctgggactgaaaatttccttt

SEQ ID NO: 6812 - DNA, 922 bp, Cricetulus griseus
  modified_base (123)..(123): a, c, t, g, unknown or other
agtttgggaccctgctttagagccagggttggtggtcacatacatgagtgttgaggaaattataaagatagagctatggcatgtggggattgtggaggagggtgatgggaggaagaagggaanagggcttattctcactgtgccaattagggggagtaattatggccctttctcaggagccatcattgatttccccattcccacctccaaggccttgtagcaggggccagcaatgctattagaaatgtgaagtcaccagtggccttattacccctgcctttgggagcaggattattattttttttgtagagagtcttactagagctgggccaggctaggtcaggcctgggtttttatgcagtgggtggggggcggggggtgtgcctagaagagggtgctgttgcggggcatgcacactcttgtttgaccagtgcgggttagtgctaccagagagcatccaaggcctggaattggcttggggcctgggaggggcgtgaaagaaggaaggatttagggtagtaaagttaggtacagagacctccctgttcagggcttgtgacagctgtccctgcccttcttcccagtcatggactgccagggttatgtgggagactgtgtgttgacaggcagggctgtggagaggaacagggaagggggagcttggagagtttggccgagggtctgggaaatgagcagggatggggggaatgtggatcaggtttactagcacctgccagagaggccatctggggctcctccaccccagcccccaagccacgcccctcccccagtgccctttgcattgtcccctcatttcctgtgtcagcgcctagcctaccccagattgtatcatgtgctagattggagtggggaagtgtgtcaaatcaataaaatgagttcaataaaatgtctataaatcaga

SEQ ID NO: 6813 - DNA, 922 bp, Cricetulus griseus
ctggaagcttttctcagagagccaaagctgaatcctcagagtaccaaggccctctgccagccagaagctcgaggaagctcaggggaaatgacatgggtagagcgcatctgtagtcggtgggcttccctatctgcctgcttggttcccaaggttctgcacctttttagacagcagaacatcttagcaggaagacatgccaccactggtcatcattgtcttcagttccagagagactagtttgcacagaggtgtgtatcagcgtgtgtacatatgtaatatacccttatattatgtataagggagttgttttttaaacattcaaatggtgccccagaggtaataggaagactgaataataataacctattttctggttgttgtcaggttgcctctgtgtatgcagcttgttacgtgaattcaacaagctgcctccttaaagggtgccctcatcgtactttatttattatggacttcaacgttatttaaatgaagattttcttctgcagtattctcttggaataacatacttgctttccgccatgttctgggaacctggcaaattcctgacctcggggtgtggtggggcagttgtctgccctctctactcattgcctccctaggaaagaagggattgctttatgaataaagcctgtagaagctgatacttctaatgactcccggctgcacaggaagaaattgtggtgtgtctcctgtagatgcttccaagtatcctagcaaagccagtagcgatgaggatgaggaggtttctgccattggcttgtagcttttctgtgtgttttgcgcttgcctttggagggagatgcatttctccagagggaagggctgacatcctgggttctagcccagcacctgaagatgtttgtgatgtataactctatatagccttttctcttcttatctg

SEQ ID NO: 6814 - DNA, 921 bp, Cricetulus griseus
gttctttcaaaccccagaaggccttactcacgggatacagatggagccagtggacctcactgtgaacaagcggagctcaccaccctctgctggcagttctccctcctccctcaagtttccatcgcacaggagagcatcccctgttctgagcatgccaccctccagcccgcccattaagaaatactcgccccttctcctggtgcgcaacccttcggtgtaccactgtccatgccaccagtgatggcagctgcactgtccagacatggaatccggagaaccacccttcggtcatagtgcagcctgggaagaggcctctacctgtggagtccccggatacccaaaggaagcggaggatacacagatgcgactatgacggatgcaacaaggtctacactaagagctcgcacttgaaagcacacagaagaacacacacaggagaaaagccctacaaatgcacctgggaaggctgcacatggaaatttgctcggtctgatgaacttacaagacatttccgaaaaacataactggaatcaaagcctttccagtgtccggactgtgaccgaagcttctctcgctccgaccatctttctctgttcctctcctcctgcccattatctaactcatttttatatgtacatttaatttcgattcagctggtctgaatctctgaatttatatcattcaagacttccatatggtcagtagttgattctctaacccgccctttccttaccacgggtcagacctaaagaatgtgaactatttttttttttctggggatgctaagcaaaccctccttattacagatgcgtttaatgtaatgagaacaagggaacatgtaaactaacgaccaatttgtcagtttctccatgtatttctcaaaagaatgtcagagtaaatatatcagaaatacagtatcca

SEQ ID NO: 6815 - DNA, 921 bp, Cricetulus griseus
attcccaagatggcggacctactgggctccatcctgagctccatggagaagccacccagcctcggtgaccaggagagccggcgcaaggcccgagagcaggctgcccatctgaagaaactacaagagcaagacaaacaacaaaaagtggagtttcgtaaaaggatggagaaagaggtgtctgatttcatccaggacagtggacaggtcaagaaaaagtttcagcccatgaacaagatagagaggagcatactccacgatgtggtagaagtggcaggcctcacatccttctcctttggagaagatgacgactgtcgctatgtcatgatcttcaaaaaggagtttgcaccctcagatgaagagctggactcctaccgtcacggagaggagtgggacccccagaaggctgaggagaaacggaagctaaaggagctggctcagaaacaggaggaagaggcagccaagcagggacctgcggtggtgagccctgctagcgactacaaggacaagtatagccaccttattggcaaaggagcagccaaagatgcagcccacatgctacaggccaacaagacctatggctgtgtgcccgtggccaacaagcgggatactcgctccatagaagaggccatgaatgagattcgagccaagaaacgtctgcggcagagtggggaagagttgccaactacctcctaggcatcgcacccaactccctttgacctccagcaaggcaggggcatggaggaacaaggctgctgctatcaggacccatcctggagccccacctctaaactatgaggtcctaccagctgtcactcaggctggagaagcaggtgtttatcactgctgcaacttggatgtatggttggtgcttgtgtgtgtgtgtgtgtgtgtgtgtgtgtgtgtgtgtgtgtgtagtaaaaa

SEQ ID NO: 6816 - DNA, 921 bp, Cricetulus griseus
  modified_base (905)..(905): a, c, t, g, unknown or other
accacactgattgggacagaggtaatcaccctgatgaacagtttacacacatgttgatgcagtggggccagttccttgaccatgacctggactccacagtcgtggctctgagccaggctcggttctctgacgggccagcattgcagcaatgtgtgcagcaatgaccctccctcgtttctctgtcatgattccccccaatgacccccgtgtgcggagtggagcccgctgcatgttctttgtgcgatcgagccccgtgtgtggcagcggcatgacatctctgctcatgaactctgtgtacccgcgagagcagatcaaccagctcacttcctacattgatgcatccaatgtgtatggcagcacagaccacgaagcccgcagcatccgggacctggctagtcatcgtggcctgttgcgtcagggcatcgtgcagaggtctggcaagcctctgcttccttttgagcccaccaagagagcaaggcggcttagaaggcactaagcgtgaaatatggcaaacatctcagcaatgccacatcagccacccataagcacttggaaggaccagcaactaatgatttaaagaagttcattatggaaatgcaaacggtcatcacagacctcagaaaacagataaccagcctggagtctcggctcagcaccacagagtgcgtggacgacagtggtgaatcccatagcaacaacacaaagtggaaaaaggacaggtgcacagtttgtgagtgcaaaaaaggacaggtcacctgctttgtggaagcttgccagcctgcagcctgcccagagcctgtgaaactggaaggtgcctgctgtcctgtctgcttaagggcacagaagaggaaaagccttagtgtccctgcgctaagcacctcgaagctggcccatagaatccttgngagcttagatggcaac

SEQ ID NO: 6817 - DNA, 920 bp, Cricetulus griseus
atggctgacaccgtcttcagcagtgggaatgatcagtgggtttgccccaacgatcggcagctcgctctgagagccaagctgcagacaggctggtctgtgcatacataccagacggagaagcaaaggaggagccagtgtctgagccctggagagctggaggtcatcctgcaggtcatccagagagcagagcggttggacatcctggagcagcagaggatcgggcgtctggtggaacggctggagactatgcagcggaatgtgatgggcaacggcctctcccagtgtctgctctgcggggaggtgttgggattcctgggcagtgcctctgtattctgcaaagactgcaggaagaaagtctgcaccaaatgcgggatcgaggcctcccccggccagaagcggcccctgtggctgtgtaagatctgcagtgagcaaagagaggtctggaagaggtcgggggcctggttctacaaagggctccccaagtacatcttgcctctgaagacaccaggccgggctgatgatccccatctccgacctttgcctgtggagcccatagaaccccagcctcagagtgctgaagccagccgtgtctacacatgggcccgagggagagtggtttccagtgacagtgactcggacctcagctcctccagcctggaggacagtgccacacccaccgtggtcaaggacacaaaaggtgacaagcctagaggggatgctggtggcagcatggagttgcccaggatggggcctgcatgctcacccagccatctctcgggcagccagagcagcctggccagtgagactggggcaggtgcctcagacccacagggggacaacccaccccggcctgagcccagggtgtccggtaaaagacatacatggacaactccccgctgctgatgtgaccacctggcatc

SEQ ID NO: 6818 - DNA, 920 bp, Cricetulus griseus
gatggcggcggtgtcggtgtttcaggcaccagtcggagggttttcttttgacaattgtcgcaggaatgccatcttggaagctgattttgcaaagaaggggttcaagcttccaaaagcccgaaaaactggcactactattgcgggggtggtctataaggatggcatagttcttggagcagacacaagagcaactgaagggatggttgtcgctgacaaaaactgttcaaaaattcacttcatatctcctaatatttattgctgtggtgctgggacagctgcagacacagacatgacaacccagcttatttcttccaacttggagctccactctctcaccactggccgccttccaagagttgtgactgctaatcggatgttgaagcagatgcttttcaggtatcaaggttacattggtgcagccctagttttggggggagtagatgttactggacctcatctctatagcatctatcctcatggatcaactgataaattgccttatgtcaccatgggttctggctccttggcagcaatggctgtgtttgaagataagtttaggccagatatggaggaagaagaagccaagaagctggtgagtgaggctatcgcagctggcatctttaatgacttggggtctggaagcaacatcgatctgtgtgtcatcagcaagagcaagctggactttcttcgtccatactcagtgcccaacaagaaggggacaaggtttggccggtacaggtgcgagaaaggcactacagcggtcctcactgagaaagtcaccactctggagattgaggtgctagaagagactgtccagaccatggacacttcgtgaatggtgctggggtagttggttatctctctggatgactggggtataccccaccccaccccaccccaccccaccccaaccaaaaaac

SEQ ID NO: 6819 - DNA, 920 bp, Cricetulus griseus
ggacgaggccgacttccgggacaagctgagccctattgtgctaagcctcaacgtgtcgctgcccccagaagagactggagtagaccctgctgtggtgttgcatggagaaacccatgtccaggagcagacccggatcatcctggactgtggggaagacgacctgtgtgtgccgcagctccagctcacagctactgaatcagaatgctggtgagcgtggagaacctggaagaagcaggacactatgtgtccttccagcttcagatcaggagcaagaacagccagaatcccaacagtaaggttctgctgttgcctgtggcagtccaggctgaggccacagtagagcttcgaggggaattccttcctttgtccctggtggtggcggcagaagaaggcgacagggaccaggaaagctggactggaggctacccactcccagcccctccctcctcccggtccatcaccagcgcgagcgcagacaggcgttcctgcaggaacccaggctgccagggcagcaagacccggttctggtgagctgcaacgactcggcgccctgtacggtggtggagtgcgagctgcgggagatggcacgagggcagcgagccatggtcacggtgcaggccgtgctggggctgcccaccctccgccagaggccgcaggagcagtttgtgctgcagtcgcacgcctggttcaacgtctcctccctgccctactcggtgccggtgctcagcttgcctagcggacaatctctggtgcagacccagctgcttctggccttggaggagagggccattcctctctggtgggtgctggtgggagtgctgggcggcctgctgctgctcaccctgctggttttggccatgtggaaggctggcttcttcaagcggaatcgaccacctctggaggaagaggaagaggaagag

SEQ ID NO: 6820 - DNA, 920 bp, Cricetulus griseus
  modified_base (912)..(912): a, c, t, g, unknown or other
cgactcccggctccaggcttggactgacctgaaaagatgtctggatttctagaaggcgcaagatgctcagaatgcatggactggggagagaagaggaacacggttgcctccatcgctgcgggcattctatttttcacaggatggtggatcatcatagatgcagctgtcatttatcccagcatggaggaattcaaccactcataccatgcttgtggcgtcatagcgaccatagccttcctcatgattaacgcagtgtcgaatggacaagtgcgaggtgacagctacagtgaaggctgtctgggccagacaggcgctcgtatctggctcttcattggtttcatgttggccttcggatccctgattgcatccatgtggattctctttggaggatatgttgctaaggaaaagcccatagtatatcctggaattgctgtatttttccagaatgccttcatcttttttggagggctggtgtttaagtttggtcgcacggaggacttatggcaatgaagacaccgcctctacagcacagtcgccctgcatgggatttttttttcaactgctcactgagtcttttgtaatgctgttttctaaacttatttctgagtataatctcagcttaaacttgtataatgctagaatcatgagaactcctatgtaaactgcaacagactagtgtggcatgcccctgttcagcttttgcagtgggaaaggaaactgttgacatgagtaactttgtcagcttctatcatggtctaaagggttgagcacttgggaggcagaggcaaaaggttctttgagagtttcgaggaccagcctggtctacaagagcgagttccaggacagcctccaaagccacagagaaaccctgtctcgaaaaaccaaaacaaaaaaaaaagtggtaagaaaaanaaaaaaaa

SEQ ID NO: 6821 - DNA, 920 bp, Cricetulus griseus
ggtttcagattatcttgaagtaatcaaagaaccaatggatttatcaacagtaataactaaaattgataaaacataattatctaacagctaaagatttcctgcaagatattgacctcatctgtagcaatgctttagaatacaatccagacaaggaccccggagacaaaattattaggcacagagcttgtaccctgaaggacactgcacatgccatcattgcagctgaattggacccagaatttaataaactctgtgaagaaattaaggaagctagaataaacctgatgtggaggttaaagatacagaactggataaagaaggtgcttctaaaataaagaaataccgtaaattaatttcggagcaggcaaaaacaacaagcctggaactggttccagaagagccatcagaacctgtgccacctctggtagttgatcatgagagactaaagaaattgcttgatttgttggtagataaaagcaacaacctgacagttgatcaacttgagagattgtattcccttcttagtcagtgcatctatcgccatcgtaaaagattatgacaaaatcacagcttgtggaggaaatggaaagaacagttcatatgtttgagacattcctatgaacttgtcaagatgagtggtttatcctctacaatctgctcctgatgagcagtcttctgagccattcactttcaaattgcaccaattatgtgcagagccttggtgtaaagtgctcgctcactcagctcagctgtgaggaccctgggagcttcttgaagatgatggaactgcattaggtttgaaactgatggctgtggaataaattgtgtttttgagcttgaatcttacctgtgattaattttttaatgtcctttcatgacttgatttttctcatatgccaatgtatttgtaggtttactgg

SEQ ID NO: 6822 - DNA, 920 bp, Cricetulus griseus
cccgtcggcccaccccccactgcagccatggacgccatcaagaagaagatgcagatgctgaaactggacaaggagaatgccatcgaccgtgcggagcaggccgaagccgacaagaagcaagctgaagaccgatgcaagcagctggaggaagagcagcaggccctccagaagaagctgaaggggacagaggatgaggtggaaaagtattcagagtctgtgaaggatgcccaggagaaactggagcaggcggagaagaaggccaccgacgctgaggcagatgtggcctccctgaaccgccgaattcagctggtagaggaggagttggatagggcgcaggagcgcctggctacagccctgcaaaagctggaggaggctgagaaagcggctgatgagagcgagagaggaatgaaggtcattgaaaaccgggccatgaaggatgaggaaaagatggagctgcaggagatgcagctgaaggaggccaagcatatcgccgaggactcagaccgcaaatacgaggaggtggccaggaagctggtgatcctggaaggagagctggagcgctcagaagagagggctgaggtggctgagagccgagccaggcagctggaggaggagctccgaaccatggaccaggccctcaagtcgctgatagcctccgaggaggagtattccaccaaagaggacaagtatgaagaggagatcaaaacttctggaggagaagctgaaggaggctgagacccgagcagagtttgctgaaagatctgtggcaaagttggagaaaaccattgatgacctggaagatggagattcaccagaccttggaccagacccttctggaactcaacaacttgtaagggctggctgtgctgcctaccagactatatagttgcctcctcaggccaataactgattgttcctgg

SEQ ID NO: 6823 - DNA, 920 bp, Cricetulus griseus
tgtaatgaacaaacccacaacatggaccgatggctcggcaagctggaggcctccaactggctgacacacatcaaggagattctgaccaccgcctgcctggctgcccagtgcattgacagggagggagcgtcggtattgattcatgggacagaagggactgattccacgctgcaggtgacttccctggcccagatcatcctggaaccgagaagcaggaccatccgtggctttgaggccctgatagaaagagagtggctgcaggctggtcacccattccaacagcgctgtgcacagtcagcttattgcaacagcaagcagaagtgggaggcacctgtatttcttctcttcctggactgtgtgtggcagatcctccggcagttcccctgctcatttgagtttaatgagcactttctcatcatgctctttgagcatgcttacctggtcatctggccttctgtagctccgcagagtctccagctatgggaaggaattttcctacgttggagcagatcctctaagtatctggatgaagcatatgaagaaatggttaacatcattgaatataacaaggagttacaagccaaggtcaatatcctgaggaggcagttggccgaattggaaacagaggatgggctacgagagagtccttgaaagacctccccacctgtcctgaggacctatctaggcctgagtccatctctccttctgtttgcccttcagttcactgtacacagtagccttgaacttggctgtaggtatgggatcctgaaacgttatggattttgcagcactgcaagatggaagtcactaacaccagtatggcctgttaggcctttgctttgggagcaggaggtgctgtcattttttaaaacaaaaaaaaaaaaaaaaaaaaaaaaaaaaaaaaaaaaaaaaaaaaaaaa

SEQ ID NO: 6824 - DNA, 919 bp, Cricetulus griseus
ctgcgcacggagcccgcgctgtactcgggccgttccccttctaccggcgcccgtccgaactgggctgcttctccctggacgcacagcgccagtaccacggggatgcccgagcgctgcgctactacagcccgcccccagcccacggcccgggccccgactttgacctcagggacggctaccctgagaggtaccggccccgggatgaggagctcagggagaggctggaccacctgctccgctgggttctggaacaccgacaccagctggaggggggtccaggctggctggcaggggccaccgtgacgtggcgaggacacctgactaagctgctgaccacaccgtatgagcggcaggagggctggcagctggcggcctcgcggttccaagggacactgtacctaagtgaggtggagaccccggcggcccgggcgcagaggctcgccaggccgcccctcctccgggagctcatgtacatgggctacaaattttgagcagtacatgtgtgcagacaaacccggaggctccccagacccctctggggaggttaacaccaacgtggccttctgctctgtgctacgcagccgcctggggaaccaccccctgctcttctccggagaggtggactgcgtgaacccccaggccgcgtccacacagcctccagcctgctatgtggaactcaagacctccaaggagatgcacagccctggccagtggaggagcttctacaggcacaagctcctgaaatggtgggcccagtcgttcctcccaggggtcccacatgtcgtcgctggcttccggaacccagagggtttcgtctgttccttaaagacccttccctaccatggagatgtttgaaaacgtgaggcacgaccgggatggctggaacccctctgtgtgcatgaacttctgtgctgccttc

SEQ ID NO: 6825 - DNA, 919 bp, Cricetulus griseus
catcaacaacagggccctttttccatgccaggaaccacccgttgccatgtcaacatggcaggctacagttcgagcagctgcatcttctgttgttttaatgagtggggaaaattctgccaagcccacaccacttcgagaagggtgcacgagctggtattactacgtgaccatgccaatgccagcctccaccttcacaattgcagtgggatactggaccgaaatgaagcccaagacatccccatcagatgatctggtgtcagagtgccctctcctgcctgtgaaaactgacttcaggtccgccgacacctgcagtcatgtagaatacccctgccgattccaaaatgctgccgctgccacccaggagaccattcctcatcgagtgttcgccccactgtgctcgagctgcctgccaagaggccctgcaggcgctgcgggaggagcgcgaggccgaggactgcgcgccgagtgggctggcacgacgagtgggtgcagaggtggcgaaatggattcgagtgaaccgcagacccggaaaacgcaaacgagggaagcgagaagccgcctttgaaaagctttctccagaccagatcatcttgcttctggagtgtctcttagagcagaagaccctgagcccccagacactgcagcgcctccagcagatatatggcctccaagagcaggacgcagaggttcgccatcgatggtgtgaactggtggttaagcacaagtatgcaaaagcatatgagcaggtggagaggttcctgcaggaggatcaggccatgggtgtgtacctctatggggagctgatgttgagcgaggatgccaggcagcagcagcttgcccgaaggtgctttgagcgggtgagggaacacatggacagagcctcggcccaggtggtgtctgaaatgctgttttaaagagg

SEQ ID NO: 6826 - DNA, 918 bp, Cricetulus griseus
cggctgcagtggctcaggccaaggtccccccaaagaagaaaactactagaaggatccccaaggctatactggaaccagcccttggggacaaactccaggaagcggaactcctcaggaaaattcgaatccatattcgagccataaacatgctccagatggcttcgtcccctatcagcacttccagcagccgggctccccgcaccgctacccgtacccgggaggaaaagctgagctttctccagaccgagttcgaattccggcctcgggtgaaccctgtggtccctgactatgagggcctttaccaggctttccagaaaagagctgccaagagaagggaaacccgggagacaactcgaaacaagcccttcctactccgaactgccaacctgtgtcatactccacggccctgtgatgccactactgctgagaagtcccctcagccagcagctaccccgctgccaagaaggcattctctgagtgctgtagcttccttttctgccaacaccctccctgtgcacatcactgatgctaccaggaagagggaatctgcagtcagaatgtcacttgaaaaaaaggacaaatcagacagcattcagtggttggaaatgcacaaaaagaaccgtcaagccatgtctaaatctgtgatcttgcgggcaaaggccatggatccccataaaagcctggaagaggtgttcaaagcgaagcttaaagagaaccggaacaatgaccgtaaaagaacaaaggaatataagaaagagttggaggaaatgaagagaagaatacaaacaaggccctatctcttcgaacaggttaccaaggtgcttgccaggaaagaagcagaagcacactaccgggacaccctgaggcaggccggcctagaggaagagttcgtgaaaaccaagagtcaaggcacacagg

SEQ ID NO: 6827 - DNA, 918 bp, Cricetulus griseus
aaaagaaccatccagagagcactgttagcgttctgtccctgtgtgttagtgctgtgttattttacactgttttgtatcgtacagtatacctgctcagcactgccctttgatcgcttgtgtaaaagaaaatgatgtacattactgtgaatttttataccactcattttttaaagggctgcctttttaatttcccatagtgttgtggcgtgcacgggaagaacatacttttgtaaaacactactttcctcttaaaaactgtgtgctgacggttaagtccaccagattcaccgagacccctttgctttattacacaggcatttggaaatatccattaatgtgaatattgcctgagttcagtcttctcggtatctgctcaaacaagaaatctatcaatattgatcttatttcctaaataagaaataaatatttcaactaatattctaatttttcataataagaacttttcagccctttcatatccagatgttattatgcactttttaatgtttgtaaacttttactaatgttagtgtaaattgcattctgatacaataattatctcctaaccacacttttactgatgctgttgagcatagctacagttccaggttaaagaaagagcagtgtttcaacacagtccatggatgtgataggaacttagcctgtctctgtagttaactcacaaggtggaagtgatacctgctcacatcttcctttacagtgcattttttactgactgggagtacatgagtctcattcagtccccaactggaagttttccagaaaaacaggaatattaaatatgtcttttgggatatagaacagcaaaatagatttaagtatgggatgcctggctttgatctaactcattggaggctagttaggagggaaacaaatctacgcatggatagactcaaa

SEQ ID NO: 6828 - DNA, 918 bp, Cricetulus griseus
  modified_base (395)..(395): a, c, t, g, unknown or other
tattgctggcagcatgcagcccgaggaagaagctgccagggccacaggtgcagctattgcaggccaagcttccctgcctgtgttacctggggtggaccgcttgcccatggtggctgggcccctatcccctcaactgctgacttcttcattccccaatgtggcatccagtgctcctcaactgactggtaagcgaggccggggacgtcccaggaaggccaacctgctggactccatgtttgggtctccagggggcttgagagaagcaggtatccttccatgtggcctgtgcgggaaggtgttcactgatgccaatcggctccggcaacatgaggcccagcacggcgtcactagcctccagttgggctatatcgatcttcctcctacaaggctgggtnagaatgggctacccatctccggaggaccccgacctgaagacgccagagaaacagagtgccaacggctctttctcctgcgacatggcagtcgctaaaaacaaaatggagtctgatggggagaagaagtacccatgccctgaatgtgggagcttcttccgttctaagtcctacttgaacaaacacatccagaaggtgcatgtccgggcccttgggggtcctttgggggacttaggccctgccctcggctcacctttctctccccagcagaacatgtctcttcttgagtcctttggatttcagattgttcagtcagcatttgcgtcatctttagtggatcctgaggtggaccagcagtccatggggcctgaagggaagtgagacatgctgtgtctccacagaacaaacagcctttggggactgctgagaaacgctgtgaatgcagagggaagtgatgtctttgggttctgtagctgagagtatttttattcatttttaaccccatccctgcccctaacctgcctcc

SEQ ID NO: 6829 - DNA, 918 bp, Cricetulus griseus
cacgggaccacggagtggctttcagaatggcttcctttgggtggaagaggaagattggtgagaaggtatctaaggccacgtcgcagcagtttgaagctgaagctgctgatgagaaggatgcagctgagaatgaggatggaagctgggttcacgccagcaaacggaggaaggaaaccctccaggaaggctgcaaacagaagagtaaacagctgaaggatgaaggcgctagtctggctgaaaagaaaagataccaggaggcaattcaaaagtgggatgaagcactgcagctgaccccagatgatgccaccctttatgagatgaaatcacaggtcctgatgtctcttcatgaaatgtttccagcagtacatgcagcagaaatggctgttaagcgtaacccacactcatgggagtcttggcaaactttaggtcgtgctcagcttggattaggagagatagtcctggcaattcggagttttcaagtagccctccacatatatccaatgaaccctgaaatatggaaggaagacctttcttgggcaagaaagctacaggaacagcagaaagtagcacagaggattgaaaaaaaagaaattccaccagaaggaacagacatctcaccagagtcaatccctgactatgactttgaaagcgatgagattgttgctgtgtgtgcagctgttgcagaaaaacagaagtcagtgtctgcaaataaaacaatggttattgtgtcagcttctggaactgtggagatagtaaatgagaaggaagagggctcttctaccccagatggctctgtctttatcaaagcccgatgaagcatacacaatgaaaaggtgtttgaatctttttttttttgttgtttgttgttgctacttaatgcttacataacatacagatatctgctctggcggaggaggg

SEQ ID NO: 6830 - DNA, 918 bp, Cricetulus griseus
  modified_base (894)..(894): a, c, t, g, unknown or other
  modified_base (902)..(902): a, c, t, g, unknown or other
  modified_base (911)..(911): a, c, t, g, unknown or other
ctggctcctgggcatggcacttgtcctctgctcggtgcacaccccatagcctcaggagatgtctgatttctgtggacaggagccttattgaaaagagtttcccagaaatcaaaagagccctgcaaactaacgacaccttcccaaatgtcaccatcctgtccacattggagaatctgaaaagcattcagcctgtagatgtgtgctgtgtgaccagccgcctcctgaccttctacagagacagggtgttcaaggaccatcaggagacaagcccagaggtcatgaggcaaatcagcagcattgccaactccttcctctacatgcagaaaactttggagcaatgtcaggtacataatcagtgtcactgtagtcaggaagccaccaatgcgaccagaaccatccatgacaactacgatcagctggaggcctcatcagctgcccttaaatctctaggagagctagacatctttttagcctggattgacgagaatcatcaagagacttctacagcttgacactaagtgccttgtctgattatctatgtgctcaacacctaactttgaagaggagagatatgtggaaagccccatcattatctgcagtgagggggtcttttcttggaaattgctgatgtggaaggaaccttctcttctgggctggggcctcgctggaaaatcagggtttgaatagatctcagctgctggctgaggtctcagctctctgatcgcacctgaaaatagccgagttggcagctatggtatttatagcaacatgtggctgttgagacatcccggatgctgtcaccggacagctcctctaatttattgtgaagtggctctcccaggcctatgctgtgtaccacatggtgtgctgtagtgcatattgtgatgaaaaaanaaaaaaanaaaaaaaanaaaaaaa

SEQ ID NO: 6831 - DNA, 918 bp, Cricetulus griseus
gggctgcgaccgagcagggatgtggaggctccgctggacttggagctgccggcctttccgagaactctgtgcaagcactgagcgactgggaggtagaggatttactgagctctctgctcagtccctcggcatcgctggatgttctcagctcctccatctcttctattcgacatgaccacaactactccctcccacaggaacatgtgtccatagatctagatattgggagctttgaaaaggaggggttccgcgtgactccaatgcctgtgggggatacagttacagagcaggagatttctaggctgatgctgactgaggaagagaagaagctcttggagaaggaggggcttagtctgccctcagcacttcctctcacaaaggtggaggaacaggttctcaaacggatacggagaaagattcgaaacaagagagctgctcaagaaagccgcaagaagaagaaggtgtatgtgggagggttggagagcagggtcttgaaatacacagcccagaaccaggagctgcagaacaaaatacgaattctagaggaacagaatctgtcccttctagatcaactgaagaaacttcaggccatggttattgagatagcaaacaaaaccagcagcggcagcacgtgtgttctggtcctactgttttctttctgccttcttcttgtacctgctatgtactcctctgacacaagggggagtgtgccagctgagtatgttgtgttgcaccgtcagcttcgtgcccttcccagtgaggactgtcatcaggagaagctgcctgcccagcggtcaaagtcactgaaggacagcacaagccagctgctgggtagctcagagcagatgctccaggcctccagcaacgcttcctgcctcctacactgcatgcctcaggcagacgccacccctgcactgg

SEQ ID NO: 6832 - DNA, 917 bp, Cricetulus griseus
cgcgtcgccggtgcctgcgccgcccgcctcacatcttttttcctgtcccggcggaggcccgggcggccagcgcgagcagcggggaccatgttccgacgcaagctcacggccctggactaccacaaccccgcaggcttcaactgcaaagatgaaaccgaatttagaaactttattgtttggcttgaggaccagaaaatcagacactacaagattgaagacagaggtaacttgagaaacatccacagcagtgactggcccaagttctttgagaagtatctccgagatgttaactgccctttcaagattcaggagaggcaagaagcaattgactggcttcttggtttggctgttagacttgaatatggagataatgctgaaaaatacaaggacttagctcctgataacaagaaaaatactgacaacgcagctaaaaatgcagagccattgatcaacctggacgtaaataatccagattttaaggctggtgtcatggctctggctaacctccttcagattcagcgtcatgacgattacttggttatgcttaaggcaattcgaattttggttcaggagcgtctaacacaggatgcagttgctaaagcaaatcaaacaaaagagggcttacctgttgctttagacaaacacattcttggctttgacacaggagatgcagttcttaacgaagctgctcagatcttgcggttgctgcacatagaagagctcagagagctacagacaaaaattaatgaagccatagtagccgttcaggcaatcattgctgatccaaagacagaccacagactggggaaagttggaagatgagcacaccaggactcagcttctcacctgcttagtgtgatgggaaccatgtgcaccagcatgtgtttggaaatcaaatgtcacattttcaagggaga

SEQ ID NO: 6833 - DNA, 917 bp, Cricetulus griseus
gatcaacaatgtaaactgctggcagccactatgagacttacagggccaagaggctcaatgacaatggaggcctccctccggtgagcgtggacacagaggaaagccacgacagtaatccatgatgaccccttctctgtgttatctgtcatacatagcccacttctgcaaacacacacacatcccaagcaccacctccagccaccttttcctttcagctctgtcctgcaggcctgtctggtgtttgtggagtatttttgccgtgtgtgtgtgtgtgtgtgtgtgtgtgtgtgtgtgtgtgtgtgtgtgtgtgtgtgtgtgtgtgtgcttgtccaacccaccaccacagcccctctcagccctccttagcaggtgggaggggccagctgcctctaggacagtagcttcctccctttagccaaacttctcctctcctcctaatggaatggagttcctgccagccagcattgtcctgctccatcgtctgtcagcagccccagaccatgtgtagggagaaggaactcacccaagagcttctcctgcccttcgcaagcccatagcagtgacttggaaccatctccaagggaaccagcattgctccctagccatccatctgcatgagtactctcttggttcccttaaatggtcaagaaagcaattttcctgcttgttagagtcactgaggtcagctgtgtgagcccccactgtgggacaagggtgtctccttcattgcttaaaggtatttataaggtgattcattacagatgttggggaggcaagggggctagcatcacttaaaaaaaaatcatcactggtggctggcccagtgtgtgtagacaacctgtttactccaaaaaatggccatttgggaagtgattttcctgaaaagaggttgctgagtttgatttccttattcccaa

SEQ ID NO: 6834 - DNA, 917 bp, Cricetulus griseus
cacacatctgaggggagagggaaggggactcgttttcctgtgttcttgttttttaaaaagtgagagactgatacttgagtgtgttcatgtgaagtacctcagatccctgaattctcacgtttacaggttcatctcaaaatggcaaaaagaaaatcccataagtagctaggtcattttggtggagcaggaccgtgtgcacagagttggaaactgcactggaaagtaagggagcatcatgtatagatcatacacacttcctttgctccatggatacccgtaagtcagactgtttacccctcatagataataataatctctctttccctggtgctgaaaaacctggacacagtagcagaaccctgtgagcacactgcacacacaaagccttccttgtagaccctgcactttctttcctttgcaatcggactctgtaatgactatcagtggagaaaccccgattttgtgcttgcttggttaaaaagtcaattcgaatgttttatggtggttgatagaactttgtcctaaaacttgctaattcagatttttaaaaccctaatgtttataccaaaggttacactgcaggcgtaggtggtgcacagagggtaaagcccacagtgggcactgtgtgcattgctaaggggacacagtgcctggtgagaccatacgggattcaactaaaacatgtcagtcatgggtcacactaccactgttgtcaagtatttgttcttaattgttactgtaatatattttcgattgtttttctaatttaattctctcactctgttgtctgactgtgaactgctaacagtgttaaacttgatgtaaataaatgatgcccttggcagggactgcttcctgtcgtatctcacatggtttgcaagttgtgttttgtttaataaaggttgaaattatttata

SEQ ID NO: 6835 - DNA, 917 bp, Cricetulus griseus
aagaagtgaccatgcttgccaagagccaccatgcccatgttcttctggagaccagcagtgcccaagcacagccagcactggggagattctggaaatgctgaagaatggagatgcttttgtttagatattgacttggatttcttttctgtcaaaaatcccttcaaagaaatgttcactcaggatgagtacaaaattctacaggagctttaccagtttaaaaacgcctagaaagtaaccttactgaaggaagatttggtagatattgtcgatactcgaactcatcaattagaagatttagaagcaatttttgctgatttgtgtgatggtgatggtgaagaaactgtacagagatgggcttcaaatcctggaatggaatcactagttccacttgtacagagtttgaaaaaaacggatggaagtaccagactatgaaatggttcaccaggctgggctaacctgtgatcattcagaactccctcatcatgtcagcacagaagaagaaattgagtatcttatccagtctgtgtattgtttactgaaaaatcttccaaagcctactcttgtgacaatcgcaaggtcaagtctggatgattactgtcctcctgagcaagttgacaccattcaggaaaaggtcctccgtgtgctgcactcactctatgggaccctggacactcacctggtgtattcagaggagtctcctctttttttttgtttgttttttgctttttgagacagggtttctctgtgtagctttggtgcctgtcctggaactcgctctgtaaaccaagctggcctcgaactcacagagatctgcctgcttctgcctcctgagtgctgggatgaaaggcgtgcatcaccaagcccgctcaaatgatccacccaccttggcctcccaaagtgctgggattacaggcgtg

SEQ ID NO: 6836 - DNA, 917 bp, Cricetulus griseus
catggacgtggagcggagccgcttcccctactgcgtggtgtggacgcccatcccggtgctcacgtggtttttccccatcattggccacatgggcatctgcacatccaccggagtcattcgggacttcgctggcccttactttgtttcggaagacaacatggcctttggaaagcctgccaagttctggaaattggaccctgcgcaggtatatgctagtgggcccaacgcatgggacacagctgtgcacgatgcctctgaagaatacaagcaccgaatgcacaatctctgctgtgacaactgccactcacacgtggcattggccctgaacctgatgcgatacaacaatagcaccaactggaacatggtgacactctgcttcttttgcctgatttatgggaagtatgtcagtgttggagcctttgtgaagacctggctgccctttgtccttctgctgggtatcatcctgaccgtcagtctcatcttcaacctgtggtgaaaacttttagatggtctaagcccaccaggtccctaaggagtctccaccacccccctggtccagttcttttgccccccccaccccctcaggcaattgtcttcctgggttggaagtagggtcagggctccggatggaagtgcagtgtataccccattgcccctcatctgggccctggctagcaaggtgaatggccttacatgcagagtgggtcccctgtaaatcaggtaatgtgaaccccacttatttccagcccagggagtcctcatgctggtgatagaaccccttatgtacaaagtgagtaacccatcagagcagctggtggcaccatggatctgctgggtctacttccggttgctgcaatgaaccctgtgcagcctgccttaccccctgcctcctttataaggggctccctggcaggaaa

SEQ ID NO: 6837 - DNA, 916 bp, Cricetulus griseus
  modified_base (910)..(910): a, c, t, g, unknown or other
gcatggcactctggcgggcataccagagggccctggctgcacatccgtggaaagtccaggttctgacagctgggtcactgatgggcctaggtgacattatctcacagcaactggtggagaggcggggtctccaggaacaccagacaggccggactctgaccatggtgtgcatgggctgtggctttgtgggccctgtagttggaggctggtataaggttttggaccgctttatccctggcaccaccaaggtggacgcactgaagaagatggtgatagatcagggggcctttgccccgtgttttctaggctgtttccttcccctggtaggggtgctcaatggaatgtcagcacaggacaattgggccaaactacagcgggactaccctgatgccctcatcaccaactactatctctggcctgctgtgcagttagccaacttctacctggtccccctgcattacaggttggctgttgttcagtgtgttgctgttgtctggaactcctacctatcctggaaggcacatcagctctaagcctgcctggttccatggcttgcaccttgcactgatgcaccttcagcctggaatgcttggacattgtcctcaaagggaatgcatcaggactggagaggtggctcagctgctaacatcacggactgctctacagaggacccaagtgtggctccgagaagccacatgatgtggctcacaaccacctgtgacccaagctccaggcatctgatgtcctcttctggcctctgaaacacctgcactcacacgcacatgcacgcgaatagatactgacttatagttaagcaagagcactgactgctcttccagaagtcctgagttcaattcttagcaatcacatggtggctcacaacgcatctataatgagatcaggtgccctnttctgg

SEQ ID NO: 6838 - DNA, 916 bp, Cricetulus griseus
attggagtgactagcacttaaatgctatggctgaagagtgcatcactgaccagaagaccttgtggcggattccagaaaacgtctctctacaagatgctgcagtcctacctgtatcttacggcacagctattttggctgtagagcatcgggcccgcacccagcctggggaaactgttctagtgacagccgccgctggagccacaggccttgcagtgatagatgtggcgacaaatgttctccgggccaaggtcatagctgcagctggaagcgacgagaagtgcaagctggcgatgcagaggggtgcacagtccagcgtgaactacagccagggcagcctcaaagatgcagtgaagaagctggtgggcagcggtggggtgaatgtggccattgacatggtgggaggagatgtcttcctggagtctgtccgcagcctggcgtgggaaggcaggattgtggtgttgggattcgctggaggaaacatcgcatctctgcccagcaacttgttgctcctgaagaacatctctgccatgggcctgtactggggtcgctaccaacaccaggactttgccttgttttccaagagcttgtcctctgccctgcggtactgccagcaagggctcatccgcccgcacattggtgctgtgttcaaactggagaagatcaatgatgccttcctccacgtgattcagcgcaaatccacgggcaaggtgctcctctcccttaagtaactcctcacccaggcagcagacccgggatctgatctccctcctgcattttaaaggtctctgtcttcctcactgaccctggtgatgcatcttggtgtcagttccccttggttctgctttcttgctgctcataatcagtgtgatcgagagattcttgccccaactctgctctttctgagagaaaagggtac

SEQ ID NO: 6839 - DNA, 916 bp, Cricetulus griseus
gagctcatcgatgctctgacagctgaaattacttctcctcagagaagaacatagtaccacgcaggcgagacttcagcagtacatggtcactacagatgagcagcttatatcgctcacacatgccattaagaactgtcctgtgataaataactccagacaagagagtcaagcatcagaacgggcagctatgggtagaagacttatcgataatgtagaggttcctgttgtaagcagtaatgtctccatgccattgatgttccgaggggaagaagccgttgaatttccacaggaagagttgcctgttaaactatctcaggggccggcccccacagagaacttgaatctggccaataatttcccagcacatattttttgagccagctgtgatgttaacaccacccaggcagaagagcaactcggaattctctcctgaggagaactgttcagactcgtcctgctccacgaatccctcccactgtggaagtcatagagaacagcaatcaagaacacctgtgttctcagaagagcccccagtgcttggagatgggcagcagcttagaacaaatgaggcaatagtacaaaggaaggacataatgacacggattgctgagttgacattgcagaattcagccatcaaggcacacctgaataatattgtcgggtcagtgggagaacaaggggatggacttcgggagccaagcaaacagggaagtgcccgtgacctggctgctgcttttccagtagttcaatctccagcaccaagtagcatggaggaacggattgcagagttgaaccgacagagcatggaggctcgcagcaaaactgctccagctgatagagcagcagaaacttgttggtttgaacctttcctcttcaccagtgtcacctgttcagtcccctctcagagcatgggccg

SEQ ID NO: 6840 - DNA, 916 bp, Cricetulus griseus
  modified_base (251)..(251): a, c, t, g, unknown or other
aagaggaggaagtccttaccacaggccacctcccaaggctcatgtctgaagacctcaccagaccccaggcatgctgaggaggtaagcaaagctggtaagaagtccaaaaaacacaggaaggaaaaaaaggttctggacatggaaacctttcttccccaagactcttggctctatgaggctggggatgctctgcacccatgctcatggaggatggaggctgaggagcagtcagccttggggcagaaagagcngggagcccagagagcacagcatgaagaagaagaagaagaagaccaccagtcgggcaagacagaggcttcagaacaccggaagtggaagggaacccagtttggccagtgggacactgctggctttgaaaacgaagaacagaagctaaaaattcctgaagcttatgggtggctttaaacatctgtccccatcattcagccgctctcccagcatgactaacaggtccaacatggccctagacaagaagtcttcagacatgctccggcagaatctgcagcaggactatgaccgggccatgagctggaagtgcaatcgtggggctggcctgggcttctcctctgaggcccgcaaggtcttctacattgaccggaacgcctccaagtctatcaagttgcaagattaaactttattgtcctgttcctcaaactgcatttcttaatcaattttgcatctgccaaattggcttggatcaggcacctgcagatactgaggacttttttttttttgttttgttttgtttgttttttagagacagggtttctctgtgtagcccttgctgtcctagaactcactctgtacatcagggtggtctcaaactcacagaggtccacctgcctctgcctctgcctcccaagtgctgggattaaaggcgtgcaccaccaccacc

SEQ ID NO: 6841 - DNA, 916 bp, Cricetulus griseus
ccagaggccagagtctgtctccagctggggcagaactgggcctgcatcttcttaggcccagagaggagtgaggcagggagatggctgactgctatacagagctggagaaggccgttgtcgtcctggtggaaaacttctataaatatgtttccaagcacagcctggtcaagaacaagatcagcaagagcagcttccgcaagatgctgcagagagagctgaaccacatgctgacggacacagggaaccggaaggcagctgacaagctcatccagaacctggatgccaaccacgatgggcgcatcagctttgatgaatactggaccatgataggcggtatcaccagtcctatggccaacctcatccgccagcaagagtgccagcaggagcagcgccagcaagagtgccagcaggagcagcagggcagcagctagaggcccctcttaggcccttttcattgtcctgacccatgcatgtcctgccagtgttcttcccatgctttctattcactctacctttcctctcttctccctccagacctgctcctacccttgctgaatagcacaagagggtgggccctcaagagtttcctcatttgttgagtctgtatactctcaaaatgttcctgtctgaaccttgtctgattctgggtctgtcctgacctctggaggtcagcttgctgcttgaggtctcccagctcctggctgtggcagctggggaagtggcagcaccagtattatcttcttctcttcctaccaatttcttagctgggtggagaggcattcccagggtgcctgtccagctgtctctgtctgggaatgacctaacctgggttgagcctcctctctgctctgccactaaaataaaggctggatttggagtttagtaaaaaaaaaaaaaaaaaaaaaaaaaaaaaaaa

SEQ ID NO: 6842 - DNA, 916 bp, Cricetulus griseus
ggtgtgtccggggcggggcgcgcaggtccgagaaggtgcgactgtcccgggccctcgcgcccgggcgctggtggagaggtcaggctggcagggcatcgggccgcgacggcgggtcatggcggcgggcggcaggctggaggacggttccttggatattcttcaaagtacggatgatgacccactcctggacacccagcctctcccacagcactccttacatgcccactttagacccagattctatcctcttcccacggtcatcatagcgaatcttctgttgcttatacatgttgtatttgttattttagcatttttaacaggtgtgctgtgtttgtaccctaatccaaatgaagacaagtgcccagaaaagtacaccaacccactgaaagttcagacagtcataatcctcggaaaaattgtcctgtggattctgcatttgcttcttgaacgctacattcagtatcaccacagcaaagtcagaagccgaggctattcccagatctaccggtctacaaggcatctcaaaacactcgccctcatgatccactcttctggcaacacagcactcctcctcctcttctgtgtgcagcattctttccctgagcccagcaagctgtacctggagctgattctggccgtcctggccctggagctgatctgctccctgagctgtctgatgctgtatgcagtgagaattaggagattcaatcgagccaaacctcagcctgatgtacttgaagaagaaaaaaattatgctcaccccaggaatattgcctcagagaccggcttcaggactatgtcaagcctagaagaaattgttgaaaagcaaggagacatcatagcatacctaaagcggcacaacgccctgttgagtaagcggttgttggacctggcctgtcagccagccaggacatga

SEQ ID NO: 6843 - DNA, 915 bp, Cricetulus griseus
ggtttctgcctgccagccctcccgatcccgcctaccagtgttggcttttcccgacccctcccccggcgcccccagtgtccgccatggccaaagcctacgaccacctcttcaagttgctgctgatcggggactcgggggtgggcaagacctgtctgattattcgctttgcagaggacaacttcaacaacacttacatctccaccatcggaattgatttcaagatccgaactgtggaaatagagggcaagaggatcaaactgcaagtctgggacacagctggccaagaacgattcaagacaataactaccgcctattaccgtggagccatgggcattatcctagtatatgacatcacagatgagaaatcgttcgagaatattcagaactggatgaaaagcatcaaagagaatgcctctgctggggtggagcgccttctgctggggaacaagtgtgacatggaggccaagaggaaggtgctgaaagaacaggctgataagctggctcgagagcatggaatccgattttttgagacaagtgccaaatccagtatgaatgtggatgaggctttcaattccctggcccgtgacatcttgctcaagtcaggaggccggagatcggggaaccacagcaaaccctccagcactgacctgaagccatctgacaagaagaacaccaacaagtgctccctgggctgaaggacattccttgtggcctcctcaccctgaacctggaggctagacctgagggagttgggctgaggattacactggggagaaactggtgggaactagaggggtagatgaactgctgataaggagaatgaggggaaggacaggaaggaggagcagggaaaaggaaggggaaggaatcaagggtgtgaacgttgaaaggggtttgagaaggtgaaaggcagaa

SEQ ID NO: 6844 - DNA, 915 bp, Cricetulus griseus
  modified_base (451)..(451): a, c, t, g, unknown or other
gaccagccgggccagaccagactggaccccaggggcgatgcggctgctgcccctgctgcggactgtcctctgggccgcgctgctcggctcgcgcctccgggggtgctccagcctccgccaccctgtctactggaactccactaaccccaggctgcttcgaggggatgctgtggtggagctgggcctcaacgattacctagacatcttctgcccacattatgaaagcccagggcccccggagggacctgaaacctttgctttatacatggtggactggtcaggctatgaggtctgcaaggcagagggggcaaatgccttccagcgatggaagtgctcgctgcctttcgccccttttggccctgttcgattctcagaaagattcagcgattcacacccttctccctgggcttcgagttcttggccgggagagacttactactacatctcggtnccaacccagagagttctggccggtgcttgagactcctagctgctttgatggtcttgtctcctccccctagaagaccgggatttgatgggatcaaatccttgagccactgggggccaaagccaaagacatgggaacaagtgggctcctggccaagagcaaaggggaagccatgtcatctgtgccctctaggactcttcccaggggcaattgttgccctcccagggggccattcacttgtcttctatgaagacggacttgccatgaggttgaatttcatgctggtttgtatttttgtaagtgtttggaccaaaccttcaataaatcacccattctcatggggcatggtagctcacacttgtaatcccagcactggggggtggggtgaaggtggtgagcaggaagtcggccttggggtaagggagaccctgtctcaaaaaaaacaaacaaaacaaaacaaaacaaac

SEQ ID NO: 6845 - DNA, 915 bp, Cricetulus griseus
  modified_base (351)..(351): a, c, t, g, unknown or other
  modified_base (382)..(382): a, c, t, g, unknown or other
gatgagtgcccacatgttctactctgagccaggtcatccctatgatccacatcctcagcaggaaagtcgagatgctctttggggagacaatgggcattgacaccatgcttaagtccctgaaggaagccatggcaagccgcctgtctgccaccctccacgaccccaggtaccatctttgccacactgctggatcctcgctataaagcttccctgttcacagaggaagaggcagagcagtacaggcaagacttaatcagggagctagaaatattgaattctacctcagaggacacggccacctccaatggctgtgactcagggtccccacttaaagacactggcacagggganagcctgtggtcactcgttgcaccaataaganagataagagagagaagctaacctgttttgcgtctctatacaataaagcttatctcataagaagtgtgcactgactccccctcccatttgatcagacgatagctcagattctactttgaggagatagcttgttaacagggaaagcgcttgtttattgcagtcgtcagaaaagccttaggcatttagattttgttcctatgataggaagattcaactatcactggggtgttattatagaatcccaaggatatcaaaatgaagtcctgtcagattcttttaccagactccaaagtttgctttaatgtctaaagaaaaaaatacattttctcatttcaaatcaattaaatattatgggtgagacaaatcacttatttgcctctgaccttttagaaaagctattcttttgttgaaatactgtatgtaggctcagtctaagtttgcgtggactatgctttagtgtatttataaatgatgaacttggattctgaaatttaatttttatttgattttctaaagaaaaaaaaaaaaaaaaaa

SEQ ID NO: 6846 - DNA, 914 bp, Cricetulus griseus
gagtgcgcgctgcgacgtgagcagcctccttccgcgaccgcagctcgtcccgcgcgcccatttcgggcgtcggcgctccggcgtcctggctgcgggcgctgtggcctggctgctcctctgggcggctgggctggtcgtcaggctcgccgcggacttgagcgacgcccccttcggctctggtataagggccacttgttctgaaatcattttgaggcaagaatttttgaaagatggtttccacagagaccttttaataaaagtgaaatttggagaaagcattgaggacttagagacttgccggctcttaattagacatcgcatcccagcaggactttttgtggatccatatgagttggcttcattgcgagagaaaaacataacagaggcagtgatggtgtcagaaagttttaatatagaagcccctgactatttgtccaaagaatctgaagtcctcatttatgcacggaaagatgctcagtgcatcgattgtttccaggcctttttgcctgtgcattatcgctatcaccggccacataggaaagatggagacaccctgattgtggtcagcaatccagatttactgatgtactgtgaccaagagttccctattttgaaatgctgggctaagtcagaagtagcagctccctgtgctctgaaaagtgaggagatctgccggtggaacagcatgcagtataaatcaatacttaagaacttgaccctacaagttccagtgggactgactatacacacttctttagtgtgttctgtgactctgctcattacaatcctgtgttctactttaatccttgtagtctgttttcaaatatggccatttttccctgtaagttttatacagttacatgttttctatgaacctaataaatgagaccagaactaaaaaaaaaaaaaaaaaa

SEQ ID NO: 6847 - DNA, 914 bp, Cricetulus griseus
  modified_base (87)..(87): a, c, t, g, unknown or other
  modified_base (417)..(417): a, c, t, g, unknown or other
agctcatctgtgaaaccctgcccagtggatggaaggccacctgttggccgcccgccatccgggagattgattacactgcgtacccanggtttgctggcaacatggaacggcagcagacggacaatctgctcaagtctcatcccagtgggacctacctcatcagagagcgaccagcagaggctgagcgcttcgccatcagcatcaagttcaatgacgaggtgaagcatatcaaggttgtggagaaagacaactggatccacatcactgaggccaagaagtttgagagcctcctggagcttgtggagtactaccagtgccactctctcaaggaaagcttcaagcagttggacactacgctcaagttcccctacaagtcccgggagacgtgctaccaccaggacctcaagccggtccagngtttacacctcgggtcattggcacagctgtggccaggtacaactttgctgcacgggacatgcgggagctgtcgctgcgggaaggtgacgtggtgaagatctacagccgaatcggtggggaccagggctggtggaaaggcgagacgaatggacggatcggttggtttccttcgacgtatgtggaagaggagggtgtccagtgaaggcgagacttggacaggactcacagatgttcttcgggaggtctcccccacgctctgaagtccacctcctggcctctccatggctctgggaactgcctgccaggcctgcaagctgttatgacccatagggatgggtgttccactgtcacctgccctgggttacctgtccctgggtacattccttgtacatagaggaatcctgtgctgaccacacccagagcaccaaggagagggagctcaggcaacatggccaggcgggtgtggatgacagccaaggtcagaagtcaccgcctgc

SEQ ID NO: 6848 - DNA, 914 bp, Cricetulus griseus
tcggctgtggagactaagatggaggcgttgtgggagtcacgggctggccactgggccgggggccggctccggggcagttttaccgcgtcccgtccactccctgcgccctcatggacccggcgtccgcgctctgcgagggtccaatcacccggacccagaaccccatggtgactgggacgtcggtactcggggtgaagttcgactgcggagtggttattgctgcagacatgctgggctcctacggctccctggctcgtttccgcaatatctctcgtattatgcgagtcaacgacagcactatgctgggcgcttcgggagactacgccgacttccagtatttgaagcaagttctcggccagatggtgattgatgaagagctgttgggtgatggacacagctatagccctagagctattcattcatggttgacaagggccatgtacagccgacgctccaagatgaatcctctgtggaacaccatggtcattggaggctatgctgatggagaaagcttccttggttatgtggacatgcttggtgtagcttatgaagccccttcactagccactggctatggcgcatacttggctcagcctctgcttcgagaagttctagagaaacaaccagtgttgagtcagactgaggcccgagagcttgtagaacgctgcatgcgagtgctgtactaccgagatgcccgttcatacaatcggtttcaaattgccactgtaactgaaaaaggtgtcgagatagaagggccactgtcagcagagaccaactgggatattgcccacatgatcagtggctttgaatgagatacagatgaactgcccgcagttgaagctgttcccttctatgcttgaattagctggctcaaaggtagacttttataaaataaatcagccctttgaaatgtt

SEQ ID NO: 6849 - DNA, 914 bp, Cricetulus griseus
tgagtgtcagcgctattgtgttagccaacctctgtgtctcctatattatgacaagtcaaaacgaggaagctgaggagctgatgaggaagattgaaaaggaggaagaacaactctcgtatggtgatccagacaagaaaatctaccacctttgcattgtgaatctggtgataggaacactttattgtgccaaaggaaactatgactttggcatctctcgggttatcaaaagcctggagccttaccataagaagctgggaactgacacgtggtattatgccaaaagatgcttcctgtccttgctagaaaacatgtcaaagcatacaatcatgctgagggacactgtcattgaagaatgtgtccagttcctagagcactgtgaactttatggtagaaacatccctgctgtcatagaacagcccttggaggaagagaggatgcacactgggaagaatacagtcacgtatgaatcgagaaaattaagggctctgatttatgagatcattggatggaatgtgtaattatggctgacaatttttaagaactgagaaagatgttttgtctatcatgttttcatctttttggtttggtgtatcttgggcagaatttgtatttacattatcaggggaccagacactaagttcagaacttaatagtatgtaatgtcttttagtaatcactgcagggagtgtgttttctctttgcataactcccattcatgtttcttatagagaatttagagtatttgtcagaattttctaatatagtattttgtccagattataaattccttaggtaataaatggttttgctagtatgcaagattcagtagattcatggaacaaactatcaacactaaataaaatactaacaaaaaaaaataaaaaagaaaagaaaaaaaaaaaaaaaaaaaaaaa

SEQ ID NO: 6850 - DNA, 914 bp, Cricetulus griseus
tataaccggcaaaagatgaacactcgcccaatgaaacggtgtttgaagaggtattccaggtcctccctgaaccggcagcaggacctgtctcattgtcctcctccccctcagctgagattacttgatttcttacaaaaacggaaggaaaggaaagcaggtcagcattatgacctcaaaatttctaaagcaggaaattgtgtggacatgtggaaacggagcccctgtaacctggctgtgccttctgaagtagatgtggagaaatatgctaaagtagaaaaatccatcaaaatctgatgactctcaaccaacagtctggccaagctcatgatgtaaaagacgaattatgtattgaatgtgaaggtggtactcaatatacaagaaaacaaagctgaccatcttgcagtctcttggtgatccactttattatggtaaaatacagccttggaaagcagatgaagaaaatgacagtcaaatgtctccatcccactcctctgcagatgatcattcaacttggtttattattgggtcaaagactgatgcagagagggtagttaatcagtaccaggagttggtccagaacgaggccaaatgcccagtgaagatgtctcatagctctagtggttcagccagtctcaatccaggggaggagacagaacagcccgagactgtgtctgttcagtcttcagttttgggaaagggagtaaaacatcgaccccacccatcaaacttccctcaagctcaggaaatagttcctcaggtaactattttactagcacaacaggccagcagcttccttaaatctccaactcctcctccatcatctaagccaagtctctctcggaaatcatctgtggagctcagtcaagtcagcatgctttctcctgccgccctgtcacctgccagctcttcacaga

SEQ ID NO: 6851 - DNA, 914 bp, Cricetulus griseus
gggaccgtaggccggctcagatggcggcggcgctgggcgcctaggcgggcgggggccatgagcggcacccgaccccagttcagtatcgatgacgccttcgagctgaccctggaggacgcgggacctgggccggagtccagcggggttgcccgcttcgggccgctgcacttcgagcgccgggccaggttcgaggtggctgatgaagataagcagtcccggctgcgctaccagaacctggaaaatgatgaggatggagcccaagcctctccagagtccgatgggggagtcagcaccagggattctgggcacatgtccatccgtagttctcagtggtccttcagcaccatcagcagtaccacccagcactcctacaatgcctgctgcagctggacccagcatcctttgatccagaaaaaccggcgggtagttctggcctcctttctgctcctgctgctggggctagtgcttatcctggtcggcgtgggactggaggtggccccctctccaggtgtctccagcgccatcttctttgtgccaggcttcctgctgctagtcccgggagtctatcacgtgatcttcatctgctgtgctgtcaagggccaccggggcttccaattcttctacctgccctactttgagaagtgagctgcagctggcctttgggataccagagatccaaagcatcaggccacctccacgtgtccacaaggcagtcttccaacctatgtacacccgtttcttccccctttcacctggaaggaaaggccctctgggactctcatacccaccagtcccctcaggatttgctcaggaagtttggggcatgctaccccttagcctgatgtgtgccttaatttattactgggccctgaactcctgggttggtgtaattttgtgctaataaagggtaatta

SEQ ID NO: 6852 - DNA, 914 bp, Cricetulus griseus
  modified_base (101)..(101): a, c, t, g, unknown or other
ggcaacatgctcttctactttgagtcggaggcgagccgagagccgctgggtgtcatcctgttggagggttgcacggtggagctggtggatgcccgggaagngtttgccttcgctgtgcgctttgccggtggtcgttctcggtcctatgtgctggcagccgacagccaggcagccctggagggatgggtgaaggccctgtctcgagccagcttccactacctgcgcttggtggttcgtgagttggagcagcagctggcagccatgcgggagggaagccctgccaacaccttgtctgccaacccaaatccaatctcgaacccgagacccaaggagaatggccgggcagtatggagcgcgctgcccgaacaacccactgcagccccgaagcgcccaccgctcccaccccgtcgaagggcctctgcacccaacaggcccttggcatccttcgcccagctacatgagcactatggacgggaggtgcgggccctcaggagccagtggcgtggaggccaggctggcctagctggcctggaggtctggcatcgttctagctctgggtgggactcatacccaggaccagcccctgacctccaatcccgggctgtggcctagcttcctcgaaggctcacctggaggagacagacacctccactgattccatgcctgcagggggagagcccaggcactgctccctgccacccagatagccagtgggccctctctgctgggtccattctcaccacagtgctggctctcttccagtgttgggtgggacaacctgccccactgggttctgccaccagggcctcttggctccctgctggctcaggggccaaggcttgtctgtggattttactttgaagtaagctgattctagggctaagagatgtcagtcatggacagggtacgagggc

SEQ ID NO: 6853 - DNA, 914 bp, Cricetulus griseus
gcgaggcccttggggttggggtctgaggctcgggctcggccggggccgcgcggaccccgccgtggcgaggcggccccgggagcatgagcgggcagcgcgtggacgtgaaggtggtgatgctgggcaaggagtacgtgggcaagacgagcctggtggagcgatacgtgcacgaccgcttcttggtgggcccctatcagaacaccatcggggctgccttcgtggccaaggtgatgtgcgtcggagaccggacggtgactctgggtatttgggacacagcaggatctgagcgctacgaagccatgagcaggatctattaccggggtgcgaaagctgccattgtctgttatgacctcactgacagcagcagctttgagagagccaagttctgggtgaaggagctgcgcagtttagaggagggctgtcagatctacctgtgtggcactaagagcgacctgctggaggaagacaggcggcgccgtcgtgtagacttccatgatgtccaagactatgcagataatatcaaagcccagctctttgaaacatccagcaagacaggccagagtgtggacgagctcttccagaaagtggcagaggattacgtcagtgtggctgctttccaggtgatgacagaggacaaaggtgtggatctgagccagaaggcaaacccttacttctacagctgttgtcatcactgagtcacaactcatctggcctgggagaattaaatgaattccccagaggggctggacccaattcttgtctgggctggcatggtcaagtgtctgagctactccaggtgcccatgacagcagaggtggcacctgcctgtgctggcccatggaacggaggcagtactgggcagactgtgggcatgaagagggttaagggcagatttgaatcccaggcttctatcc

SEQ ID NO: 6854 - DNA, 914 bp, Cricetulus griseus
  modified_base (11)..(11): a, c, t, g, unknown or other
aactttttttntttttttcctaggtagaaaagtaaagtaggattttactgcaaaagaggatctaaggacatttttggagttcaccacaagaagccatcatgcctggggaaggagggaaaaccgatatggagaggattggcctcttcagtgagatggaatacatcaccgtgggagataaatatgagtcaccatttaatcgaccctttaatgaggctgcaagcaaaatagacagatgctacccgggggaacaaaggaaatgtccggtctccaagcagggtactttgacccccagttttcaaggattttgaggggaggctaccagaatctgaatcaagttcggagacagtatatgatggcagaataccaaaaatcttctgacttgtatgatgcagcaaaactgaattataagaaagataatgaagaacaccatcggctactcaaagggtcacccttcaagttgaaccttcaccctaaagactattttgatagtaacccctatttgctagagcgtcctttacctccaattagaagagaagaaaagaaggaaatcgtccttaagcctttcaagccctcctctccgggtaaaaaggctggtggcatgaaggcagggacatttgaaccttacccactgcattcagctgacccttatatggccaaaatggaaaagatgattcctgaaaagggggagaaggttttccatccaccaaatggaccaaaaagcagaccaattcatagcataatggcgctgaatgtcaaaaaggcaataaatgtgaagaactacaagactatctcggcagacatactgggaaggcagttagttttctagctcatctcagtaactcactggaatacaaaatgctctggaacgcatgattccagagcatttaaaggaaatttaaacctgagactcaact

SEQ ID NO: 6855 - DNA, 914 bp, Cricetulus griseus
ggtggcgacatgagcagcggggcggcgtccgggactgggcgggggcggccccggggcggggggccgggacccagggaccccccgcccggcgagactcacaagctggtggtcgtgggcggcggcggcgtgggcaagagcgcgctgaccatccagttcatccagtcctacttcgtgtctgactacgaccccaccattgaggactcctacacaaagatctgcactgtggatggcatccctgcacggctggacattctggacactgctggtcaagaggaatttggtgccatgcgggagcagtacatgcgtgctggcaacggcttcctgctggtgtttgcaattaatgacaggcagagcttcaatgaggtgggcaagctattcacgcagatcctcagagtcaaggaccgtgacgatttccccgttgtgctagttgggaacaaggcagatctggagacacagcgccaggtcctccgatctgaagcctcctctttcagtgcttcccaccacatggcttactttgaggcctctgccaaatggcgtctgaatgtcgatgaggtgtttgagcagctggtccggactgtccggaaataccaggagcaagaactccctcctagcccaccaagtgctcccaggaagaagggtgggggctgcccctgcatcctgctgtagccaaatagctccaagcgaccaccacaagctctcttgggaccagctgcctcacactttgtgtggcctgaggctctagctgggcctcagtctcctctaggttcctcaggacacactacaccctcttaccttcacattctggcctcctggggctaccactgagtgccttctttagtacctcctttcccacccaagcccctggtgggttcaggaggtccttgtcactgctgtatatatgtccagtctttcag

SEQ ID NO: 6856 - DNA, 913 bp, Cricetulus griseus
gaggtggtgggtgctcctggagccctagaggaagtgatgcctcaaaggcccttgtaggattctttaaaacctcgctaatgtccagactcaagtctcagatctatggagcccaccagaaactttccactattcggaggcgccttctccgccgttctcccccctggggccatggatgtgagcgacctccgaccggtcccggacaaccaagaagttttctgccatcccgtgaccgaccagagtctgatcgtggaacttctggagctgcaggcccacgtgcggggcgaagcggctgcgcggtaccattttgaggacgttggcggggtgcagggggctagggccgtgcacgtgttatctgtgcagcctctctctttggagaacttatctctgaggggctgctgtcaagatgcctggttcctttctggcaagcagcaggtagctaaagaaaaccagcaggtagcaaaggatgtcacactacatcaggccttgcttcgtctgccccagtaccagactgatctcttgctcaccttcaatcagcccccgtacaggaggtctcttggccctgaaaatctatcatgtccaccttggagcctgggtaactttgaacaactggtgactagtttgactcttcatgatcccaacatttttggtccccagtaaagatggtggaatacaacataatgctgctgaggactcggggacccagttctgagcggggagtgtctacttcttccctggacataaacataagacacctcctctgcagaaataaacttgctttataaagaacaaaaaaaaaaaaaaaaaaaaaaaaaaaaaaaaaaaaaaaaaaaaaaaaaaaaaaaaaaaaaaaaaaaaaaaaaaaaaaaaaaaaaaaaaaaaaaaaaaaaaaaaaaaaaaaaaaaaaaaaaaaaaa

SEQ ID NO: 6857 - DNA, 913 bp, Cricetulus griseus
gatgagatggttgtaaagaccggagaggcccagatcagcacccacctcatccggccctatgtgggcattcatctgcgcattggctccgactggaagaatgcctgtgccatgctgaaggacggaactgcagggtcacacttcatggcttcccctcagtgtgtgggctacagccgaagcacagcgacccccctcaccatgaccatgtgcctccctgaccttaatgaaatccagcgggctgtgaagctgtgggtgagggcactgaatgccaggtcaatctacattgctacagactctgagagctatgtgccagagatccagcagctcttcaaagagaaggtgaaggtggtgagcctgaaacctgaggtggcccaggtcgacctgtacatccttggccaggctgaccacttcattggcaactgcgtctcctcattcactgccttcgtgaagcgggagcgggacctccatgggaggcagtcttccttctttggcatggatagaccctctcagccacgggatgaattttgatcacacctggagcccccatattatatatatatatatatatgtgtgtgttatatatatatatatatatatataaggttaagatgatctcatagccgaggctggccttgaactcctggtcctcctgcttctacctccttcagtgctgagattataggtgtgtgccaggacactcaactgatctctatagttttgatgcaaagccatgactacttgaaaactcccccttgtttttaaaaatcagtggaatcccttagcacagatacctaaagtgaccttataaatacagacaaagccaaggagaaggtgggccttggccgcttttcagggttgaaggttgtgacaggacagtggcatattaaagttgggttttgcaaacaaaaaaaaaaaa

SEQ ID NO: 6858 - DNA, 913 bp, Cricetulus griseus
ctccagcggcctgtggccctgcagctggaccacaactctgttggagacgttggagtggaacagctgctgccttgccttggtgtctgcacagctctgtatttgcgagataacaatatctcagatcgaggtgtctgcacactgattgagtatgctctccactgtgagcagctgcagaagctagctctcttcaacaacaagctcacagacggctgtgcctactccatggccaagctccttgcacacaggcagaacttcttgtcactgagggtgggaacaatcacattacagctgctggagcccaaggtgctggcccaggggctcaagagcaacacctccttgcagttcctgggttctggggcaacgagtgtgggtgataagggcaccgaggcccaacaggacctcaccccagacagccaacccaatacctatccttctcttcattcttaacacaaacaacagccatttgccttcaggatgttctggatttataagaaaaaacatgaccacactccagctgggaccacatgtggactttggtttccagtaacatcaattactctgtagctgagcctttggaatcagttcctccctcagctacagctttttagagttaatctgggctagaatttcaaacaaccccaccaggcctcgagttgctgcctgtgaactgaactataacaacggacttctgaaacatattcataaaagacagctccattttatctgtgacagaatgctttaggatatagagtcaggggttgggcatctacaggggacaaaaaccaggtcccttttttttttctaggccaggtcttttgtgttttcaaaatgtcacctttgtaatttgtaaatcatagaaatgcttactgccttccatatcattgtgtgtagaaaacaggttaatatttataaa

SEQ ID NO: 6859 - DNA, 913 bp, Cricetulus griseus
ttggccgagatggaaacgcagaacaccggggcggaggacggctttactcccgtcacacacagagggggccggcgggcgaagaagcgacaggcggagcagctgtcagcggcgggacaggacggagacgccagccgcatggacacggaggaggccctgccggcgaagaggcccatcttccctccgctctcgggcgagcggctcctgactgggaaagaagagacgagaaaaatcccggtccccgcgaacagatacacgccattaaaagaaaactggatgaagatatttactccgatagtagaacatttgggacttcagatacgctttaacctgaagtcaaggaatgtggaaatcaggacttgcaaagacaccaaggatgtcagttccctgacaaaagcagccgattttgtgaaagcctttgttctcgggtttcaggtggaggatgcacttgcccttatcaggctggatgacctcttcctagagtcttttgaaataaccgacgttaagcccctaaaaggagatcacctgtcaagggcaataggaagaattgctggcaaaggaggaaaaaccaaatttaccatagagaatgtgacacggacacggattgttttagcagatgtgaaagttcacattctcggctctttccaaaatatcaagatggcgaggactgccatctgcaacctcatcctaggaaatcctccatcaaaggtttatggcaatatccgagctgtggccagcagatcagcggaccggttctgattcccctcgacccttgagatgttcacagaaaaccatgggaagatttcccagccacctactgctcaggttccttttcaggtctcagcccaagcagaagcagaaagggaaggtttaacaggacttgcactcccctgcttctagaataatttaaatatga

SEQ ID NO: 6860 - DNA, 913 bp, Cricetulus griseus
cagaagctgggacgcggagagctggggtccgggctgcggggcggcccgggggcccggggtggggatgcaccggcgcggggtgggagctggcgccatcgccaagaagaagctcgccgaggccaagtataaggaacgagggactgtcttggctgaggaccagctggcccagatgtcaaaacagttggacatgtttaagaccaacctagaagaatttgccagcaagcacaagcaagagatccggaagaaccctgagttccgtgtccagttccaagacatgtgtgctactattggggtggatcctctggcctctggaaaagggttttggtctgagatgctgggcgttggggacttctattatgagctgggtgtccagattattgaagtgtgcctcgccctgaaacatcggaatggaggtctgataactctggaggaactccatcagcaggtgttgaaaggaaggggcaagtttgctcaggacgtcagccaagacgacctgatcagagccatcaagaagctgaaagcactgggcactggctttggcatcatccctgtgggcggcacctatctcattcagtctgttccagctgagctcaatatggatcacaccgttgtgttgcagctggcagagaaaaatgggtacgtgactgtcagtgaaatcaaagccagtcttaagtgggagacggagcgagctcggcaagtgttggaacacctgctaaaggaaggactagcctggctggacctccaggctccaggggaagcccactactggctgccagctctcttcacagatctctactcccaggagatctcagcagaggaggccagagaggccttcccttgataaagtgtggaggggtacatagcagtaggccaaaggggacctgcctgtgaacaaacctggacaattttgttt

SEQ ID NO: 6861 - DNA, 912 bp, Cricetulus griseus
gatgacgctcgctatcctggtcctccgattgatcgtgggcatcctggcatttcccatgtatctgctcaaccttttaggagtgtggaactggatatgcaaaatgtggtttccctacttcctgtcgcggttcacggtgatgtacaacgagcagatggcgagcaaaaagaaggagctctttagcaaccttcaggagtttgcgggcccctcggggaagctgtcactgctggaggtgggctgtggcaccggggccaacttcaagttctatccccccgggtgcagggtgacctgtgtcgaccccaaccccaacttcgagaagttcttgtacaagagcgtctcagagaaccggcagctgcagttcgagcgcttcgtggtggcggccggcgagaacatgcaccaagtggccgatggctctgtggacgtggtggtctgcaccctggtgctgtgttcagtgaagaaccaggagaagattctgcgcgaggtgtgtcgagttctgaggccgggaggggctttttactttatggagcatgtggcggatgagcggtccacctggaactacttctggcaacaggttctggatcctgcctggtaccttctgtttgatggatgcaatctaacgagagagagctggaagaccttggaacaggctggcttctcaaagctgaagcttcagcatatccaggctccactgtcctggactttggtgcggcccccacatctatggatacgctgtgaaatagtgggaggtgtcaggagacttggactgctccaacggttcaaggcttcagttttagatgtaaaattctaactgggagaggtgaagtccaattcatcctcacaggcttctgtttaaccgttttctgtattatttctggtggcccatgccttagtcccagcactcaggaggcagaggca

SEQ ID NO: 6862 - DNA, 911 bp, Cricetulus griseus
ccggcaactctgccggctgcctggggccttgaagcccaacgtccacccaaccctacgctcccgggcctctccatccatccttcgaggccacaggccctgggatcagctgtccccaaattctaaccctctttcagccaccctcctccccaatccctgctagaggctggttaccatggtgaagctagcagccaaatgcatcctggcaggagactcagctgtaggcaagacggccctggtacaaatgttccgaagtgatgggacccatttccaaaagaactatactctgacaacaggtgtggatttggtggtgaagacagtgccagttcttgacacaaatgacagtgtggaactcttcatttttgactcggcgggcaaggagctgttctctgaaatgctggataaattgtgggagagtcccaacgtcctgtgtctcgtctatgatgtgaccaatgagcagtccttcatcagctgcaacaagtggctggagaaggttcgggcccagactccgaatacctccctcccaggtgttttagtgggaactaagacagacctctctggccgacgaacagtggattcttctcaggcccaggcatgggctctgggccaaggcctggaattctttgaaacatctgtgaaggagatggacaattatgaggccccatttcactgtctggccaaacagttccaccagctgtaccgggagaaggtggacatgtttcataccctggtgtgaaggtatggtggactgtcccacaggtggactgaccaggctgttgctgggctgttgggagcccagcagaccctcatctctccaggagacagaagatggaattgcctggtacttctcagatattaccacagctgtcaaataaaatgagaaaagaaaaaaaaaaaaaaaaaaaaaaaaaaaa

SEQ ID NO: 6863 - DNA, 911 bp, Cricetulus griseus
cggcgcgatggcggaggaggtgaacagtctgatgaaggccacggtcttgatgcggcagcccgggcgggtgcaggaaatcgtgggcgcccttcgcaggggcggaggagatcgcctgcaggtgatttctgattttgacatgaccttgagcagatttgcttacaatggacagcgatgcccctcttcccacaatattctggataacagcaaaatcatcagtgaggattgtcgcaaagagctcacagcgctctttcaccactattatcccattgagatcgaccctcaccagaccatcaaagagaagttgcctcatatggtacagtggtggtccaaagcccacaatctcctgtgccagcagaggatacagaaattccagatagcgcaagtggttggagagtccactgcgatgctcagggagggatataagatgttctttgacacactctaccaaaacaacattcctcttttcatcttttcggcgggcattggcgatatcctggaagaaattatccgacagatgaaagtgttccaccccaacatccacattgtgtctaactacatggacttcagtgaggatggtttcctgcaaggcttcaaaggccagcttatccacacctacaacaagaatagctccgtgtgtgagaactctggttacttccagcaacttcagggcaaaaccaacatcctcctgcttggagactccatgggggacctcactatggctgatggggtccctggggtgcagaacattctcaagattggcttcctaaatgacaaggtggaggagcggcgggagcgctacatggattcctatgacattgtgctggagaaggacgagacgctggacgtggtcaatgggctgctgcagcacatcctgagccagggcgactacatggagctccagggctcctaag

SEQ ID NO: 6864 - DNA, 911 bp, Cricetulus griseus
cgcaagcccagctctccaaggccgccctggctgctaagctgttgtcgctcagcggcgtgttcgccgtgcacaagcccaaggggcccacgtcagccgagctgctcaatcggctgaaggagaagctgctggcagaagctgggatgccttccccagagtggaacaagaggcaaaggcagacgttgaagattggacacggagggacgctggacagtgctgcacaaggtgttctggtggttgggattggaagaggaacaaaaatgttgaccagtatgttgtcggggtccaagagatacattgccattggagaattggggaaagcaaccgacacgctggattctaccgggaaggtaaccgatgagaagccatacgataaaataacacaagaagatattgaaggcattctgcagaagtttactgggaatataatgcaagtacccccactctactctgcactgaagaaggatgggcagaggttgtcaacgctcatgaagagaggcgaagctgtggaggccagacccgccaggctagtgactgtgtacagcatcgccctcctgaggttccagccaccgctcttcacactggatgttgaatgcggaggcggcttctacatcagaagcttggtcaatgacattggcaaagaactctcttcctgtgcccacgtgctggagctgacccgcaccaaacaggggccgtttacacttgaagagcatgccctccccgaagacagatggaccattgatgacatcgcacagtcccttgaacactgcacatctcttttgccagatgagttggcatttaaaaaccaaaatctgagaaatccagtgaccaggctttaagctatgaatacattactctaagtgagacaaagagggaagaggatgaaattaagacactctgaggccagcctcggg

SEQ ID NO: 6865 - DNA, 911 bp, Cricetulus griseus
atggcggccggattcaaaactgtggaaccactggagtattacaggaggtttctgaaagaaaactgccgacctgatggaagagaacttggtgaattcagaaccacaactgttaacataggttcaatcagtacagctgacggttctgctctagtgaagctggggaacaccacagtcatttgtggaattaaagcagaatttgcagcaccaccactagatgcccctgatagaggatatgttgtccctaatgtggatctaccaccgctgtgttcatcgaggtttcggactggacctcctggagaagaggcccaagtaaccagccagttcattgcagatgtccttgaaaactcacagataattaagaaagaggacttatgcatttctccaggcaagcttgcttgggttctgtactgtgaccttatttgcctagactacgatggaaatattttggatgcctgcacatttgctctgttagcagctttaaagaatgtgcagttgcctgaagttactataaatgaagaaactgctttagcagaagttaatttaaagaagaaaagttatttgaatgttagaacaaacccagttgcaacttcctttgctgtgtttgatgatactttgctgatcgttgatcctactggagaggaggaacacttgtcaacaggaaccttaacgatagtaatggatgaggaaggcaagctgtgttctcttcacaaaccaggtgggagtggacttactggagctaaacttcaggactgcatgagtcgtgcagtttcgagacacaaagaagtgaacaagctgctagatgaagtcattcagagtatgaaacacaaatgaatagccaccaccattgcaaaacagctgtaaaaattgtatttgttacactgtgcacaggctttttatactaaataaatacc

SEQ ID NO: 6866 - DNA, 911 bp, Cricetulus griseus
tgtgtatatggacagctcttgttcagacagtcactcttttagctctttgtaagaagttagaccaattatagattgaaacaattgggtagaattagtttgagaactgttttgtggacttactataattgattattggtcccacctctttcctcattatcatagataactgagaattgattatatgtagctctaagtaggtatttaagcaacccactactggatgtatcattatcatgttattaatttcactatcacaagggaatatgtctactctaagtgccctattttaagagatgtgtaaacttaattagtaaaaggacaagattcacatacattgacattttttctaaagaattaaataactcacttccctgcttctcacatgttggcttgttgtgagccatgggttttgattcttgcaatgtatgtgccttattttatgtttctcttgtcaatgagaaggaccagttgttattgtccagtcagcactccaaggctgcatgtccagacagtgttaccaagaagcgagcccaggattgtagtggtctgagctgtcgtgtgactgatttcctgtgttgtttgaagctgataggaggatgttctcctctgacaagttacccttgtatatcctgcaaatgtgtaagataaactatgttccttttctccacctttttttagatttttaaagaagaaatgtgtaatcctttttaaagaacaacacatgtaaatacattcaagtattgtaggtgtagagttggtatgtgatggccttgggccttcctcgaaaaagcctgtggctgctcagtgctcataggccacaggaatggcagcccagacacatgaactctgccttggctttcagaaccacttagtccttttgtaacaaaagaaaaaaaataaacaaaaataaa

SEQ ID NO: 6867 - DNA, 911 bp, Cricetulus griseus
gatttctacccctacacccactatcgtacgtcctggttcttctgcctctccacttaggttatgatccacttcacccaactcttccttccccaacctctgtcattacacaggctccaccatctaacaggcaaatgggatctcctactggctccctccctctcgtcatgcatcttgctaatggacagaccatgcctgtgctgccagggcctccagttcagatgccttctgttatttcgctggccagacctgtgtccatggtgcccaacattcctggtatacctggcccaccagttaacagtagtggctccatttctccatctggccaccctatgccatcagaagccaagatgagactaaaagccactctgacccaccaagtctcttcagtcaatggaggttgtggaatggtggtgggtactgccagcaccatggtgacagcccgtccagagcagaaccagatcctcatccagcaccctgataccccatcccctgcccagccacaggtctctccagctcagcccacccctagcactgggggacgacgtcggcgcacagtagatgaagatccagatgagcgtcggcagcgatttttagagcgaaaccgagctgcagcctcccggtgccgccaaaagcggaagctgtgggtgtcctccctggaaaagaaggcagaagaacttacttctcagaacattcagctgagtaatgaagtcaacattactaacgaaatgaagtagctcagttagaaacagctgctgttagctcataaagattgccctgtcactgcactacagagggcattggattccattatagatggctgtcagccaccatgtggtggctgggaattgaactcaggacctcctttggaacagcagcccctgttcttaaccactgagccatctctccagccc

SEQ ID NO: 6868 - DNA, 911 bp, Cricetulus griseus
  modified_base (895)..(895): a, c, t, g, unknown or other
ggccggctagggtctgaggaaagcggctgggcagagccgaggcactggagacagcagcctctgagacaaaatagttgcctacaaactatggatgctacaactccacttgatgtgaaagagcactttgacgctgaagtgcagaagaaccgggtactaagcctggaagaatgggaaagtaaatgggtgacccgaaacattggatttcaccaggaacaaggacatcagctattaaagaagcatttggacacatttcttaaaggccagagtggactgagagtgttattccccctctgtggaaaagcggttgagatgaaatggtttgcagagcggggccacactgtagttggtgtagagatcagtgaaattgggattcgggaatttttcgcagagcagaatcttccatatacagaggaaccattcaatgaaatccctggcgccaaagtgtttaagagttcttcagggaatatttcactgtactgctgcagcatttttgatcttcccagagcaaatattggcaagtttgacaggatttgggatagagggtcattagtggccatcaatccaggtgaccgtgagcgctatgcagatataatactgtctctactgagaaaagggtttcaataccttgtggctatcctttcttatgatccaacaaaacatgcaggtccaccattttatgttccagatgctgaacttaaaaggttatttggttcaaaatgcagcatccgctgccttgaggaggttgatgcttttgaagaaagacataaagcctggggaattggctccctttttgagaaattgtatctccttacagaaaagtaaaaaagtctggtggtgatggagcaccctttactcccagcagctgagccatctctccagtcccaagaaatgtaanaaaaaaaaaaagttaa

SEQ ID NO: 6869 - DNA, 910 bp, Cricetulus griseus
tctacaagcccctcatcattggcatttcactcatggccttccagcagctgtcaggggtcaatgccatcatgttctatgctgagaccatctttgaggaggccaagttcaaggacagcagcttggcctcggtcaccgtgggcatcatccaggtcctattcacagctgtggcagccctcataatggacagagcagggaggagactgcttctgaccttgtcaggtgtggtcatggtattcagcatgagtgcctttggtacctacttcaagctgacccagagtggccccaacaactcctcccatgtaggcctcctagtgcccatctctgcggagcctgttgacgtccatgtggggctggcctggctggctgtgggcagcatgtgcctcttcattgctggctttgcggtgggctggggacccatcccctggctcctcatgtccgagatcttccctctgcatgtcaagggtgtggctactggtgtctgtgtcctcaccaactggttcattggcctttctggtgacaaaagagttcagcagcatcatggagatcctcgggccctacggtgccttctggctcactgctgccttctgtatcctcagtgtccttttcacgctgaccttcgtccctgagactaaaggcaggactctagaacaaatcacagcccatttcgagggactatgacagcccctttctgtgactggcagccctgagctgggcttgctttgggtttcagaaggagtagagtggcctgtagctgagccacacctcagtttgagcctggagccccctactcctcaggcctcagagcccctccttgtccaggttgagacccagacctatgctacgaggttcaccagattctggatctagtctctgtagcctgcagcacacacaggacatctgagaagctgtg

SEQ ID NO: 6870 - DNA, 910 bp, Cricetulus griseus
  modified_base (475)..(475): a, c, t, g, unknown or other
gttagctgccactgtcccagagcagaggactgtgaccctggatgtcgatgtgaacaaccgaacggaccggctagagtggtgcagctgttactaccacggaaacttctctctcaatgcagcctttgagatcaagctacactggatggcagtgactgccacagtactcttcgagatggtccaaggttggcatcgaaaagctacctcctgcggcttcttgttagttccagttttggagggccttttgcactgcccagttacctgtatggcgatcctctgcgagcccagctcttcattccactcaacctcagctgcttgctcaaggacggcagcgaacacctgttcgacagctttggatttgtacaagataaatattctgcctctgcttttaacttccctgctgagaacaagccacagtatatccatgttacagggacagtgtttcttcagctgccttactccaaaacgcaagttttcngggcagcagcgccggcgacggaactccaccagctctaccaaccaaaacatagttctgtgaagagcgggttggctacaactgggcctataacaccatgctgaccaaaacatggcgctctagtgccacaggggatgagaagtttgccgatcggctgctgaaggacttcacagacttctgtgtcaaccgtgacaaccgactggtcatgttctggacaaactgcctggagaagatgcatgccagtgccccatgaaaccaaactgttcgacttaagaaaggctgtgggcattctagggttggctttccagttaggctctgggcatcaggttgctactgtcagtgagtggggccactgctgctttttggcctttgcacaagtatgagttgggagaaagactggaagcagctgctgccgctaccaccacccagatctcgcca

SEQ ID NO: 6871 - DNA, 910 bp, Cricetulus griseus
ggcggcgcccagctcctggggtcagcacctgcttctcctccacctctaactttagtcctcgcggggtcggcgggaccatggatgcgccgggcttcacggcctcgctggtggctggaggagtagcaggtgcctcagttgacttgatcttgtttcctttggatactattaagacaaggctgcagagtccccaaggattcaacaaggctggcggttttcgtggaatatatgcaggtgtcccttctacagctattgggtcctttcctaatgctgctatgttttttctcacctatgaatacgtgaaatatttgctgcacactgactcagcatcacacttcaggccggtgaagcacatgctggccgcctctgcgggagaagtggttgcctgcttgattcgagttccttctgaagtagttaagcagcgggcacaggtgtctgcttcttcaaaaaccttgcagattttttctactatcttaaatgaagagggcatccaaggactgtaccgaggctacaagagcacagtgttgagagagattcctttctcgttggtccagtttcctttgtgggaatccttgaaagcgctctggtcatggcgacggggtcacatggtggattcttggcagtcagcagtctgcggagcttttgcaggtggtttcgcagctgcagttactacacctctggatgtggctaagacgaggatcatgctggcaaaggcgggctccagcactgctgttgggagtgtgctctctgccatgcatgcggtgtggcgctcacagggactagcagggttatttgcgggtgtcttcccacgaatggcagcaatcagcatgggaggcttcatctttctgggtgcctatgaccagacccgcagcttgctgttagaagtgggcaggaagagcccgtgaagcagaca

SEQ ID NO: 6872 - DNA, 910 bp, Cricetulus griseus
tgcgcgccacaggcccgcacggtccccgcccggatgcgggatggcggccagcctgtggatgggagacctggaaccctacatggatgagaacttcatctctagagcctttgccaccatgggcgagaccgtgatgagcgtcaaaattatccgaaaccgcctcactggaatcccagctggctactgctttgtggaatttgcagatttggccacagccgagaaatgtttgcataaaattaatgggaagccccttccaggagccacacctgcaaaacgttttaaactgaattatgccacttatggaaaacaaccagacaatagccctgagtattccctctttgtgggggacctgaccccagacgtggatgatggcatgctgtatgagttctttgtcaaagtctacccctcctgccggggaggcaaggtggttttggaccagacaggcgtgtctaagggctatggttttgtgaaattcacagatgaattggaacagaagcgagccttgacggagtgccagggagcagtaggactggggtctaaacctgtgcgcctgagtgtggccatccctaaagcgagccgtgtaaagccggttgagtacagccagatgtatagttacagctacaaccagtattaccagcagtaccagaactactatgcccagtggggctacgaccagaacacaggcagctacagctacagctacccccagtacggctacacacagagcaccatgcagacatatgaagaggttggggatgatgctctggaagacccagcaccacagctggatgtgactgaggccaacaaggagttcatggaacagagtgaagaactgtatgacgctctgatggactgtcactggcagcccctggatactgtatcctcagagatccctgccatgttgtagccagga

SEQ ID NO: 6873 - DNA, 910 bp, Cricetulus griseus
gcgcaaaggctgccgggaggctgtggagtcctgggcagcgcgatggcgtcggctgtggctcgcggcgcgctccctgcctgggtctccgtgctggcttggggcctggcgctgtggtgcctgtgcggggctggtccgctgtggagtggcagccacgagtggaaaaaactaattttgacccagcactggccccccacagtatgcaaggaagttaacagctgccgagacaccctggattattggacgatacatggactatggcctgatagagcagaagactgtaaccagtcctggcactttaacttagatgagattaaggaccttttgcgagacatgaagatctactggcccgatgtaattcacccatcttccaatcgcagccgattctggaaacatgaatgggataagcatgggacgtgcgctgcccaggtggatgccctcaattctgagaagaagtactttgggaagagcctggatctgtacaagcagcttgacctcaacagtgtactgctaaaatttgggatcaagccatctatcaattactaccagcttgcagatttcagagatgccctcaccagaatctatggcgtggtgcctaaaatccagtgccttctgccagaacagggggaggaggtacaaactgttggccagatagagttatgcttcaccaaggaggactttcatctgcgaaactgcactgagccaggtgagcagctgtcctccaagcaggaagcccagctggccacaggggcttccacacatgggatgatggtctgtgaagatggtccaatcttctatcctccacctgcaaagacccgacactgatgctcacattttgaaaatattttatgttccacaaagtaagaaaaaatcacaaattatggctttctaaaaatctgctaaaaagtttctt

SEQ ID NO: 6874 - DNA, 909 bp, Cricetulus griseus
tcagctggacatttttatcaccagaattccaaaggcactggtggacagcataaagcagataaaattaaagagggacacagagtgtactcacacattgccaagctgcaggagttatgggaaactactcaagtccaaacaattcaaatccctaagtcaatggcagattcatcttttctaaagcatccagaactcactgcagggcagaagcgctacctgtgcagcattgctaagatctgtaactccggctacctgaggaccttaatgaagaggcaatacatgcacgtgcttcatcagggctcacaaaagccaggtgccctcactcatcacaggagccatatcagctctcactactcacagaaacagcattccccctgcactacatggcgacaccatctggagagagaggaatctttgagcattgcggctgcaacacctgaaatgatcatccattccctgtggagaccactgagacacaaggaagggttaaaaattggatacgcatcaaaaacaagatgtaagtcactgaagacatttagaagacaaggcagactggcttttgctaccagtttctttagatgattctcaaccatgcatgagtgaagaaacaaaggaggaagagctactgaataagtgcatgcagtccatgtctattcaagagccgggaacatctcaggtcaacctgacagcctccataccaagttcagccatcagttaacatccagatgctgaaccagaggtggacagcaagagttgtgagccatgtatgtgatagtgctagtcaccagtatgtcatttgggttgttgagacatttacagtatccttcttcatccaatatgtttctgtgtatgtgtaatgtatgcttgtttctagctagaacaattaaaattttacttgccacataaaaaaaa

SEQ ID NO: 6875 - DNA, 909 bp, Cricetulus griseus
gtgattaggcggcttggaaggaggtggtttagctcctcggcgtcctaacagcgtctgggccatggcggtttcggccctgcgggaggagttggactcccggttcctgcagctgctcagcgacctggaggaactagaggcgaagcgggcggcgttgaacgcccgggtggaggagggctggctctcgcttgccaaggctcgctatgccatgggcgccaagtcggtcgggcccctgcagtatgcctcacgaatggagcctcaggtctgcgtgcgcgccagcgacgcccaggatggaccccagaccttcagggtgatcaaagctgactcccagatccccgaggaagtggggcccggcgaggcatctctacgaaggcgcaagggccctaccaagacccaagagtcaggatcctctgtggtccctcaagatcccttgaactggtttggaatcttggtccctcacagtcttcggcaggcccaggccagcttccgggatggccttcagctggctgcggatatagccagcctccagactcgaatcaactggggtcggagtcagctccggggcctccagaaaaagctgaaggagttggaccctgggcctgcctgacctgaatctacttccgaaggcattgaacatagccatcttggatgccactgccttactcaggccatctttcataatagcccctgtctcagctaatgcccctgtagcaatgtccttagtctgtgttgattccagctttgtgagttaggaagttgagttaggaaatttgatgaggcaagctgagcagtgtagaagaaaggcacttggaaataggctagctcaggacaattccagtcaataaaatacctctggctgggcatggtactgcatgcctatagtcccagcaactctagcggctgaggcaggag

SEQ ID NO: 6876 - DNA, 909 bp, Cricetulus griseus
ggcggaatcgtcctgtgaagatggggaaagtgagggcgctgcgagcacgtgtgcaccgggcggccgtgaggcccgacgcggaggctgcgcccggccccgcgccccgcgccccggagccggtcctcccgctagcgtcggcgggcggagcgggggcaaagggactggacattggttcacaatgacatctttgccaggacacacgatacgaccctagtgccttggtgcagaggctggaactggaccagaagagtgtggtgtccctaaaagagaggtacagagccaaagaccattttgcccaagaaggaaaagctgaggcttcgccatgagcgatggctacagaaaattgaagccataaagctggctgagcagaagctcaaggaggcacgaaggcgcagggccacagtggtggtaggcgacctgcaccccctgagggatgccctacctgagctgcaggaactggaggccagccggcagcagcaaaccagatgcagggtgaccagcaagcccaggccagtggagcttagccggatgagctcagcccagagacagcagctccttgaggaagaaaggacccggtttcgggagctgctggccagcccgtcctacagagccagtcccctgctggccatcgggcggcagctggcccaccagatgcagctggaaggtggcggacagctctgaccgggacagtgcgtgctgtgagatctgggagactgccgtgtgggtagaggtgccagcagctcttgaatcctgccctgtaccggtgtggccgcctgaccagtcttgagacctagggaaggggcaggaagagatgccagtgaggacaaataaagtgatttatggactggcttccgtggcccggagcccttctgcggcttcacttcccacttggagccagccgctcctgct

SEQ ID NO: 6877 - DNA, 909 bp, Cricetulus griseus
  modified_base (824)..(824): a, c, t, g, unknown or other
gctggcctggtctgtttctggagtccgcacggtggctgatagtgaagcgtcagattgaggaggcccagtctgtgctgaggatcctggctgagcgaaaccggccccatgggcagatgctgggagaagaggcccaggaagctttacaggaactggagaacacctgccctctccctgcaacgtccaccttttccctcgcctctctgctcaactaccgcgatgctgccatcaccactttctctgtgcttggactcttctcctcccaagcttctgccatcctcagtaccctccttgcttctgaagtcatcccaaccactgtgcggggccgtggcctgggcttaatcatggcacttggggcgcttggaggcctgagtagtccagctcagcgcctccacatgggccatggagccttcctgcagcatgtggttctggcggcctgcgccctcctctgcatcctgagcgttatgctgctgccagagaccaagcgcaagcttctgccagaggtactccgggatggggaactgtgtcgtcggccttccctcctgagacagccaccacctaaccgctgtgaccatgtcccgctgctagccactcctaaccctgccctctaaacagcctctgagcacggcgatgggaagctggccacacagaaaggtgacaaagggtcctagtaaggtagacaggaaggcaaggccaccccacccaaaaggctcagaggctcctcactccagccatctaggagagctcagagggcctgtccccaaccccatctcctccctgctgctttttgttcactttgtcagcaagaatcagtgcgggtgggggancatcacactataaccattaggtctgggctccatcctgtgcccaaagacatcttccaggcctcactccttctcgctcttcattctg

SEQ ID NO: 6878 - DNA, 909 bp, Cricetulus griseus
aggtcctaccactgcctctggtgcctctggctcctctgagtctagtgggcagtgccggcaacaccagcaggagtctggacccaaaactccagagcaccagagagatcagagcttgaggcagcaggaaccccccactctcctccccctgcctactgggcaccttgctgtttccatcagaccagtgggcccgtggagggactgtgcagaggctcacggggcaggtcacaggcagagtggagtgtatgagctgcgactgggccgacgtgtgctatcagtgtggtgtgaacagcagcaggagggcggaggctggaccgtcatccagaggcggcaagatggctcggtcaatttcttcaccaactggcagcactacaaggcaggctttgggaggccagatggggaatactggcttggcttggaaccagtgcatcaggtgaccagccgtggggaccatgagctgctgatactcttagaggactggggtggccgtggggcacgagcccactatgacagcttctctttggaacctgagagtgaccactaccgtctgcggcttggccagtaccatggtgatgctggggattccctctcctggcacaatgacaaaccgttcagcactgtggacagggaccgagactcctattctggtaactgtgccctgtaccatcgtgggggctggtggtaccacgcctgtgcccactccaacctcaatggtgtgtggtatcatggaggtcactaccggagccgctaccaggacggggtctactgggccgagttccgcggtggggcgtactctctcaagaaggctgttatgctgacccggcttgtgcggtggtgactgtcccatgagtactccccaagggtatttctatctccttgagctggtatcttatagcaacacaatgtgtccac

SEQ ID NO: 6879 - DNA, 908 bp, Cricetulus griseus
tcacttccgggttgatgacttccggttgccgccatcttcctcgggcggaagccggcttctaggtgggagttcagtggcgggtgccgtgggtagcgcggacggtcggccggtgccatgccgtcatcaccgctgcgggtggcggtcgtgtgctcgagtaaccagaaccggagcatggaggcacacaacatcctcagcaagcggggtttcagtgtccggtcctttggaacaggaactcatgtgaagctcccaggaccagcacctgacaagcccaatgtttatgacttcaaaaccacatatgaccagatgtacaatgatcttctcaggaaagacaaagaactctatacgcagaacggaattttacatatgttggacagaaataaaaggatcaagccccggcccgaaaggttccagaactgcaaggacctgtttgacctgattctcacttgtgaagaaagagtctatgaccaggttgtagaagatctgaattccagagaacaggagacctgccagccagtgcatgttgtcaatgtggacatccaggacaaccatgaagaggccaccctgggggcattccttatctgcgacctctgccagtgtatccagcacactgaggatatggagaatgagattgatgagctgctgcaggagtttgaggagaagagtggccgggcctttctgcacactgtctgcttctactgagccacccgtggttggtgaatggtctgccctgcacagccacctttggagccactttttcaatctgttttcccttctgatgtttgtttatactgctaggtgtacgtcaccaatgtactgtacatatggaatgagaagtacacagaaatgccaggttgaaatccattgtttttaaccaaaagaaataaagacggtttactgtacagcctaca

SEQ ID NO: 6880 - DNA, 908 bp, Cricetulus griseus
  modified_base (203)..(203): a, c, t, g, unknown or other
ttcagctgcatacaccagcgcagacaccagctgcatcctacagctgcccaaagatgcaccctatctgctccagcctcatggagccccacctggggcgccatccctaaactacccccaccaggccgctcccctctggctcagaggccactcaggcgccaggcagcaataaggactgactccctggatgtacagggcctgggtanccgggaagacctgctgtcagaggtgagtgggccctcctgccctctgacccgatcctcatccttctggggcgggttcgagcatccaggtgcagcagcggtccagcagccagagcaaggtctccaagcacatccgcccgccagccgcttgcccaggcctggaccccggctgggccaaggagcctccagagaccagaagcagcttagagttggacacggagctgagctggctttcaggagacctcctgcccagcagccaggaggaacccctgtccccacgggacggtcctggctagatgacaaggagacactccattgcggtcagctgcctggacagtggctcccaaccccgcctatgtccaagcccctcaagcctggggggccaacctcttgggggccctgggagccggcctaagaaaaaactcagcccacccagtatctctatagaccccccggagagccagggccctcggcccccatgcagtcctggtgcctgcctcaggaggagggcgccatccagtgactccaaggatccctcagcctccggcccccttgacagcacggctgcctcaccctccccaaagaaagacgcactgagtctctctggtttgtcctctgacccaacagacctggacccctgagtcccacccactctccctctcacctttctctactgggtgcagatcctagctccgcctcctgggcagt

SEQ ID NO: 6881 - DNA, 908 bp, Cricetulus griseus
tatgaagccaccgcagcgaagtcgtaaggtcccagcccgctacgtaggtgaggccaccggtcccacagcttggagcccccgcgagatgcggcatctactgagactactccaggctggttcgtgaggccattcggaaggtgcacccaggtggcacagaaggtctaaggcgtcaagaagcaaagctcccagcccccatagaggtatggatggatcttgctgagaaactgacaggcccactggagggacccctgactgcagctttctcccaggtgctcaccattgctgctgcagaacccatcagcctcctgcactccaagccaggcaagcccacgaaggcctgtggaaagccactgctgttcttgagtacccaaggagggcagagggatcctggccttgaagccgggcctgcccttactactgctgactccactcccaaggcttctgtccctgtccctaagccctctgaccccaaccctgggctggcccatccacagagaagacttggctgtggacttcgagaagatctcaaatatctgtccttctcctccagaaatggccatggccctgaactctcagcagctgagtcagcagtggtccttgacctgctcatgtcacttccagaggagctgtcccacctgccttgtacagccttggtggaacatatgacgaaaacgtatgctcagctgatggcccccagacttctctccctgctgggaagagccccaggcctgggagtgaagacagagggactggctccaaggggccagaggaacctgaccaaaccagtcctcaagcctctgagagcacagaacagatgcctgcctggcaaacagttgggatctgccccattgaacccattcctggtacccctagagctattgggccaggtgcccacccctgcgaggtga

SEQ ID NO: 6882 - DNA, 908 bp, Cricetulus griseus
tggccagatggagcccagcatgtcaaccaggcgtttcaccatcaaggactttgacatcgggcgtcctctgggcaaggggaagtttgggaacgtgtacctggcccggctcaaggaaaaccatttcatcgtggccctgaaggtcctcttcaagtcccagatagagaaggaggggttggagcaccagctccggagggaagtagagatccagtcgcacctacaacacccgaatatcctacgcctgtacaactacttccacgatgatcgccgggtgtacttgattctggaatatgctccacagggcgagctgtttaaagagcttcagaggaaacagagattagatgagcagcgtacagccacgataatagaggagttggcagatgccctgacctactgtcacgagaagaaggtgattcacagggacatcaagccagagaatctcctgctggggctcaggggtgaagtaaagatcgcagactttggttggtctgtgcataccccctctctcaggagaaagacaatgtgcgggactctggactacttgcccccagaaatgattgaagggaggacgtataacgagaaggtggatctgtggtgtattggggtgctctgctacgagctgctggtgggacagccaccctttgaaagcagcagccacaacgagacttacaaacgcatcctcaaggtggattttaggtttccgaattcggtgcccttgggagcccaggacttgatctccaagcttcttaggtaccatccctcagagcggctggacctggcccagatcctgaagcacccctgggtgcgggaacactcccgtaggcttgtgcctcctgtttgtcagacggcttcctgagccctgcctgcctctgttcctttgtatttattcagggagctctccgggctctgtt

SEQ ID NO: 6883 - DNA, 908 bp, Cricetulus griseus
ggtgacaaatggagccaccatcgtcgtctgctgacaccagccttccactttgacatcctgaagccctatgtgaagatttttaacaagagtgtgaacatcatgcatgacaagtggaagcgcctgtcctcggaaggcagtgcacgtctggaaatgtttgagaacatcagcctcatgaccttggacagtttgcagagatgcctctttggctttgacagcaactgtcaagactctcccagtgaatacattgctgccatcttggaactcagctctctcatagtaaaaaggtcccagaagctcttcctgttttcggacttcctgtactacctcactgctaatgggcaacgcttccacaaggcctgtgacctggtgcatgacttcacagatgctgtcatcagggagagacgccgcatcctctctagccaaagtgttgatgagttcctgaaatccaaggctaagtccaagactttggacttcattgatgtgctcctgttagccaaggatgaacatggaaaggagctgtcagatgaagacatccgggcagaggctgacaccttcatgtttggaggccatgacaccactgccagtgggctctcctgggtcctgtacaacctggcgaggcacccagaataccaggagcgctgccggcaggaggtgcgggagctgctgagggaccgagagcctcaggagattgaatgggacgacctggcccagctgcccttcctcaccatgtgcatcaaggagagtctgcggctgcaccccccggtcacagacgatcctacgccgctgcacccaggacattgtgctgccagatggccgggtcatccccaaagggaatgtctgcgccatcagcatcttcggggttcaccacaatccttcagtctggccagaccctgaggtctatgacccct

SEQ ID NO: 6884 - DNA, 907 bp, Cricetulus griseus
tctgcagcagcatggccaccttcgtggagctcagtaccaaagccaagatgcccattgtgggcctgggcacctggaagtctccgccaggcaaagtcaaggaagctgtgaaggtggccattgatgctggataccgccacattgactgcgcctatgcgtattacaatgagcacgaagtgggagaggccattcaagagaagatcaaagagaaggctgtgagacgggaagacctcttcatcgtcagcaagttgtggcccacctgctttgagaggaaactgctaaaggaggcctttcagaagaccctcacggacctgaaactggactatctggacctgtatcttattcactggccacagggacttcagcccggaaaggagttatttcccaaagacgatcaaggcaacgtcctcaccagcaaaataacgttcttggatgcctgggaggtcatggaagaactggtggatgaagggttagtgaaagccctgggtgtctccaacttcaaccacttccagattgaaaggatcctgaacaaacctggattgaaacataagccagtgaccaaccaggtcgagtgtcacccatacctcactcaggaaaaactgatcgagtactgtcactccaagggcatcactgtcacagcctacagccctctgggttccccaaataggccttgggccaagccagaagacccttcactcctagaggaccccaagattaaagagattgctgcaaagcacaagaaaacctcggcccaggttctgattcgattccacatccagaggaatgtggtggtgatccccaagtctgtgacaccagcacgtatacatgagaactttcaggtctttgacttccagttgagtgatcaggagatggccaccatccttggcttcaacagaaactggagggcctg

SEQ ID NO: 6885 - DNA, 907 bp, Cricetulus griseus
gttatttgctggtgtgaaagatggagagagcttgaagctctttgaagaaagttctcgctctgttcacaagcaagagactcacaccatggaggctgtgaagcttgtggagtttgaccttaagcaagtactgacgaggcttatgacacatctttttggagatggactggaggttcggtgggtggactgctactttccctttacccatccttccttcgagctggagatcaagtttggtggagaatggattgaagttcttggctgtggggtgatggaacagcagcttgtcaattcagctggtgctcaagatcgaattggctgggcttttggcctggggttagaaagactggctatgatcctgtatgatatccctgacatccgcctcttctggagtgaggacgagcgcttcctggagcagttccacttgtcagacatcaatcagagggtccagtttcagcctcttagcaagtaccccgctgtgttcaatgacatttcgttctggctgccctcagagaattacatggagaatgatttctatgacatcgtccgaacagtcgggggagacctggtggaaaaggttgatcttatagacaagtttgaacatccaaagacacacaggaccagccactgctaccgcatcacttaccgccacatggaacggacactgtcccagagagaagtcagtagtgtccaccaggctgtgcaggaggccgctgtgcagctgctgggtgtggagggccgtttttgatgccctggttttccaaggctgaagccctcacagagctccaagactcgctgaaaaggtgaaacacattgtgaactggagtatctgtcatcttttgataaatgggtctgctctaggacgttcaggaaataaaggatcacttttgagaagcaaaaaaaaaaaaaa

SEQ ID NO: 6886 - DNA, 907 bp, Cricetulus griseus
ggtcgcatcgtctcctgcgcgcatcctcggatctgatttaaaccaccaccatgtcgagcaaaaaggccaagaccaagaccaccaagaagcgccctcagcgtgcaacatccaatgtgttcgccatgtttgaccagtcccagatccaggagttcaaagaggccttcaacatgatcgaccagaaccgggatggcttcattgacaaggaggacttgcatgacatgctggcttctctaggcaagaatcccaccgacgcctacctggatgccatgatgaatgaggccccaggccccatcaacttcaccatgttcctcaccatgtttggagagaagttgaatggcacagatcccgaggatgtcatcagaaatgccttcgcttgctttgacgaggaagcaacaggcaccatccaggaggattacctgagggagctgctcacaaccatgggcgaccggttcacagatgaggaagtggatgagctgtacagggaggcccccattgacaaaaaggggaacttcaactacatcgagttcacacgcatcctgaagcacggagcgaaagacaaggacgactgaagaacttgagctgaaactcctgctgcgttagctgaccgcttcatttctcagacgcttctcccactttgtaggacctagtgcatgccacttagtttcacagtaggacctagtgcatgccacttagtttcacagctttgcctctctttaatgtatttatttcagacctttctgtcacttagcacttgtataatcagactggaaatggggacaatgttgtaaattgtattgaaaatgagacacaaataaaaatcaaaaaatgtgaaagcccaggaaaatacatccgtatttctggttttgctggattttttacatttttatataataaaaatgttattttg

SEQ ID NO: 6887 - DNA, 906 bp, Cricetulus griseus
  modified_base (113)..(113): a, c, t, g, unknown or other
gatcaaagatgggctggagttcagtgcagcacaccgaaggccactggaaggactctgatatgcttgcttgccataattattggcactgggccctgtacttgatcgaaaagggngaatatgaggctgcactaaccatctatgacaaccatatcctccccagcctgcaggccagtggtgccatgctagatgtggtggacagctgctccatgctctaccgtcttcagatggaaggggtgtctcttggccagcggtggcaggctgtcctacctgtgactaagaagcacacccgagaccacatccttctgttcaatgatgctcacttcctgatggcctccctgggtgcacaggacctccagaccacaagggagctgctgactaccctacaggaggccagcgagtccccaggggagaactgccagcaccaattggcacaagatgtggggctacccctgtgccaggcccttgtggaggctgagaacgggaatcctgaccaagtcctagaacttctcttgccaatccgctaccgaatcgtccagattgggggtagcaacgcccagagagatgtcttcaaccagctgctgattcattcggccatcaactgcacctccagcgtccataagaatgtggcccggagccttctgatggagcgcgatgccttgaaacccaactcacccctgactgagcggctcatccgcaaggcagccactgtccatcttatgcagtgacccaagccaggttcttggcctacagctcagcactgacctcctagtgttaggttgactacctggttggattagagtttaggaaacagctgggtgtgcttgtcagatgataaagtgtctacgaaaaaaccaaaaaaaaaaaaaaaaaaaaaaaataaaaaaaacaaacaaaaaaaaaaaaaaa

SEQ ID NO: 6888 - DNA, 906 bp, Cricetulus griseus
cagtgaggctgtgcaggacgcagacctgctagtgtttgtcatcccccaccagttcattcacaagatctgcgatgagatcacgggcagggtacccaagaaagccctgggcatcacgctcatcaagggcatagatgagggccctgaagggctgagactcatctctgacatcatcagggagaagatggacattgacatcagtgtgctgatgggagccaacatcgccagtgaggtggctgccgagaagttctgtgagaccaccattggcagcaaagtgatgcagaacggccttctcttcaaagagctgctgcagacacccaacttccgaatcactgtggtagacgatgctgacactgtggagctctgtggtgccctaaagaacattgttgctgtaggagccggcttctgcgatggcctccgctgtggggacaacaccaaggctgctgtcatccgcttaggactcatggaaatgatcgctttcgccaagatcttttgtaagggccaggtgtccacggccaccttcttggagagctgtggggtagctgacctcatcaccacctgctatggagggcggaacaggaaggtggcagaggccttcgccaggaccggaaagaccattgaagaactggagaaggagatgctgaatgggcagaagctccagggaccacagacctccgctgaggtgtaccgcatcctcaagcagaaggggctacttgacaagtttccactcttcacagcagtgtaccagatctgctatgaaggcaagcctgtcacagagatgctgtcctgcctgcagagccacccggagcacatctgaaaggaactgggcagccaatagggaacagccttgcctgttgtggtgtcaccagaaaaccaggcttggcagtgagatccctgctgagctgtact

SEQ ID NO: 6889 - DNA, 906 bp, Cricetulus griseus
gcaagttgcaaaacgacaacaatcacaaacatcagaaatagaaaaacataagaaagttctcttccaattgcagattgagcttcatgatcttgaaaaacaaattgtagctactgctgcagaagctaaagaaacagagaggcaaatgcaccagcaagatgttgccatggagaattccaaacttcagtgtggacttttggaagctcaaatcaagtccttatattcagaaagtgtaaagcttaaatttgatatagaaacagcccaagaaaaatttgaggaacaaatgataaaatataatgcatattatgcaaaaataaaagcctataaagatagtttaggagagatagaaagcaaatgctcactcatgactgaactctatgaaaaacgagatctcatcaaaaacctaaagacgatgaaagaagatcttatggaaagtatccaaaatccacaagggaaatatgcagcacaaatacaggaagacatttcagagctaatgaataaaactatgacagtaaaagattcaatcgctgagaaaacatattttattgaagaagagaaaaagaaacatgaaaaactaagaaaagaaatagaggtacagcataagagatatgatgcaattcttaagcgtttgcattgtcagatgagcaagattcagttaaataggaggaatgcaatggaacatccaacaactaggaaaaataatgcatcaactattttattaagtttcttcttttctccagtaggtagcaatcattttcctttgttattaaataacatattttagaatgttacattacataagatttgtgtttgctcttcagtctataaattctttattcctgtattgtgactagaataaagttatagcatcatataaggcaggcatacaataaaagctcttcaaaagag

SEQ ID NO: 6890 - DNA, 906 bp, Cricetulus griseus
gcgatggagatgaggcttcctaaggctcgcaaacctctcagtgagagcctgggccgcgactctaaagaaacacttggttggtaccgggggacacgatcaccacggatacaggattcatgcggggccatggaacatacatgggagaggagaagctcattgcgtctgtggctggctctgtggagagagtgaacaagctgatctgtgtgaaagccttgaaaaccagatacaatggagaagtaggagacattgtagtggggagaatcacggaggttcaacagaagaggtggaaagtagagacaaattccaggctggattctgtcttgctcctctcatccatgaacctgcccggaggggagctgaggagaagatctgcagaggatgagctggccatgagaggcttcttacaggaaggagacctcatcagtgcagaggtccaggcagtgttctcagatggagctgtttcactgcacacgaggagcctgaaatatggaaagctaggtcagggagttttagtccaggtttctccttccctggtgaaacgacagaagactcatttccatgacttgccatgtggtgcttcagtgattctgggcaacaacggtttcatctggatctaccctacacccgaacacaaagatgaggatgctggaggcttcattgcaaacctggagccggtagcccttagtgatcgagaggtgatctcccggcttcggaactgcgtagtcttgctcgtaactcagagaatgatgctgtatgacaccagcatcctgtactgctatgaggcctcccttgcacatcagatcaaagatatcttaaagccagaaataatggaggagatcatgctagaaacacgccaaaggcttttggaacaggaggggtgaggccaggtgctgaaggatgggactg

SEQ ID NO: 6891 - DNA, 906 bp, Cricetulus griseus
  modified_base (63)..(63): a, c, t, g, unknown or other
ttgggtttgcccggcttctcactggaccaggtgactactacacagactatgtggccaccaggnggtaccgctcgcctgagctgctggtgggggacacacagtatggccccccagtagatgtttgggcgattggctgcgtctttgctgagctgctgtccggagtgcctctgtggccaggaaaatctgacgtggatcagctctatctgataaggaaaaccctgggggatctcattcccaggcaccagcaagtattttagcatgaatcagtacttcagtggggtgaaaattccagaccctgaggatatggaaaccctggagtcgaaatttccaaacatctcctaccctgccttgggcttcttaaagggttgcctccacatggaccctgctgagaggctgacatgcgaacagctgctgcagcatccatattttgacagcattcgagaagttggggatttgacaagacaacatgacaagtcagtgaggaagaccctgagacagagtcgaaagcacctgactgggctgcagtacctacctcagctaactagcagcagcatccttccagccttggacaataagaagtaccactgtagtaccaagaaacttaactaccattttccaaatatttaaggagctggcaaagtgatgaagaagtgatccataatttgaagaaaaaatttacatatttgattcctgtattgagcacacatcaggagaaaacacagaccggaagctggaggccacttggcaagatatgaagagaaattagagatccagacttccatgcttggtgaagatgtccagagaagaaattaaagcttggggttcactgtgtttgagtatctaagcagcagaacttacagacaggatataaactcttatctactcgccgtagctgcaacagtagat

SEQ ID NO: 6892 - DNA, 905 bp, Cricetulus griseus
gtccgggccccggggctgcagagaagacagctctcacccggcgtgtgccaaggtcgagtatgcctacagtgacaacagcctggaccctgggctttttgtagaaagcagccacaaggggagtgtagtgtccagagctaatagcatcggttccaccagtgcctcttccgtccccaacacagatgatgaggacagtgattatcagcaagagtcctacaaggagtcctacaaagaccggaggcggcgtgctcacactcaagctgaacagaagaggagggatgctatcaagagaggctatgatgaccttcagaccatcgttcccacctgccagcagcaggacttctccattggctcccaaaaactcagcaaagccatcgttctacagaaaaccatcgactacatccagtttttacacaaggagaagaaaaacaggaggaagaagtatccacattgcgcaaggatgtcacagccctgaagataatgaaagtgaactacgagcaaattgtgaaggcacatcaggacaaccctcatgaaggagaggaccaggtctctgaccaggtgaagttcaacgtgtttcaaggcatcatggactccctattccagtctttcaatgcctctatctctgtggccagcttccaggagctgtcagcttgtgtcttcagctggattgaggaacactgtgagccacagactctgcgagaaattgtgattggcgtcctccatcaattgaaaaaccaactctactgagggctcctggagagctgcagaggcccccagccctttctctaaccattgggtttctattcactatatatatataatttggaaattgttcgcctctgcttggtctcttgggcaacacttggctcaaggtttgggtattttggctagtttttgacttggaaaaa

SEQ ID NO: 6893 - DNA, 904 bp, Cricetulus griseus
  modified_base (251)..(251): a, c, t, g, unknown or other
gtccacaaggtcacaggttcgtgtggtgagcctgatccagtgcacttctcagaagcaatggaaaagttcatccacaaaccatccttaaaagctatgatgggtctggctggaaaagccagggtggcagagaagttttccgctgatgtgtttgcagaccagctctaccagtatgtcaccaaacttgtgtagtcaggggagtctatagtatggggtctgtattctacatgcaccacaatccttcttatgggttntagaaaaaggaagctagaatctagtgctagtgtagatttttttttaaagtagacttgagtcttgaatgtgatccccctgtccaccacaccttacctgtttcctgaaaatatccttaatgctgtaatcattccatatttcatcaatgttgttgaaagaatggtagaaatctgctgctagcagactatttttaattctggtttttctggattatttgctcctttacatataaaggtttaatcatccagtgccttaattggctttaatagttttaagtcttaccattgtcacagttgattgatttgacttcagagtacaatggaaacgaaggaagatctacctacttcaaattaagcaaaaatccctcacagatgagtcctctatctttggattttagttaattccaaatgtagacaagttgacaaccaagaatgaccatcagaggggacattgagcatctaaactgtataccaagcatcatatttcagaaatgtttcataatgtcactgagtctccagctctcagtgtttgtgtcctatattctctcccgagtttagcatgccagtgtttcctgtccttcatttaaatgactttgtgtgaagcttgcttgaaccctctacttcccctgaacttccatatccctgtgacactgccc

SEQ ID NO: 6894 - DNA, 904 bp, Cricetulus griseus
agcactgtctagaagcggagcctctgccacctcagattctctgggctccagctcactaggctgtgatgcatcccgaagtggggcaggcagtaagtgacacaagtcacaccagcaaatacttcggaagcattgactcttcagagaacaatcacaaagcaaaagtgactacagacacagaggaaagtgagcagttcattaagtacgtcttgcaggaccccatctggctgctgatggccaacacagatgacaagcatcatgatgacataccagctgccctcccgggatctccagtcagtcttaaaagaggaccgggagaaactgaagctgctgcagaggtcccagccccagttcacagagggccaaggttgtagccatgttttaacggaaattcaatgttacagacagctgcctccctcaccagttggatcttaagggtagatagatagatggtggtctaagcctatgcttgttacttaaacacaaaactgccaaaaccttctctctactatcttgaatgtttactgtcagcattattttatgattatttaatatatattccttgattgttaactgctcagaagttgacttcctaggataattttgtgaatgtgtttacaagatgccaagcatccagctctgttttctttagaatgtgtgctttacacgggtgtcctgagacattctctgttttaaactgagcctcccttttaatgtaaataagctctcagagtgtgtgtgaccacttgtgagccttgccggacaagcactttgctcatgtgcaaaccaaacgtacctttacccagtgcaatatatgtgtgactgcttgtgtctttttatgacttttttgcctttttagagaattgttaaaataaagcaagtatatttttattttacaaaaaaaaaa

SEQ ID NO: 6895 - DNA, 904 bp, Cricetulus griseus
gtgaacgggacagagggggagatggaatacgaggagatcacattggaaaggggtaactcaggtctgggcttcagcatcgcaggtggtactgacaacccgcacattggtgacgtacccatccattttcatcaccaagatcattcctggtggggctgcagcccaggatggccgcctcagggtcaatgacagcatcctttttgtgaatgaagtggatgttcgggaggtgacccattcagctgcggtagaggccctcaaagaagcaggttccatcgttcgtctctatgtcatgcgccggaaaccccagctgagaaggtcatggagatcaagctcatcaaagggcctaaaggacttggcttcagcatcgcagggggtgtagggaaccagcacatccctggagataaatagcatctacgtaacaaagatcatcgaaggaggtgctgcccacaaggatggcaggttgcagattggagacaagatcctggcggtcaacagtgtggggctagaggacgtcatgcacgaggacgccgtggcagccctgaagaacacatatgatgttgtctacctaaaggtggccaagcccagcaatgcctacctgagtgacagctatgctccccagacatcacaacctagagatcaataagcggatcacagaggagcaagcccggaaagcctttgacagagccactaaaactggagcaggagttcacagagtgcttctcagccatcgtggagggcgacagctttgaggagatctaccacaaagtgaagcgcgtcattgaagacctctcaggcccctacatctgggtcccagcccgagagagactgtgattcctgccctggcttggcctggactcgccctgcctccatcacctgggcccttggtctggactgaatagcccagccc

SEQ ID NO: 6896 - DNA, 904 bp, Cricetulus griseus
ccggccctgggtccctgcacgtcgtgcccagaaggtgttcactgtcatcgaacccgtggacataaacacacctgccctgttggaaccccaggctggagcccgagagaaggtggcacgatcctggtactgcacccatggcctcgtatccctctcagccaagatcgaccgcaagggctacactccaggcgaggtcatccctatcttcgcggagattgacaatggctccacacgagctgtgcagcccagggccgccctggtacagacacaaacttacatggcccgaggtgcctgcaaacagaagcgcactgtggtggccagtatggacgggggagccccgtgggccctggtcgccgtgtgctgtggcctggttgtgccctgcacactccccccagtcgggccccatccatcctgcactgccgggtgctcagtgtggactactctctcaagggtcttcggagtactcagaggtggtgagggacgagccagctgccagctgcctcacaggggcccttccccctcctgcacgatgtgggtgtgaccctggccgggccctactttgcctgtctccaggagttccgctaccgaccgcctccactgtactctgaggaggatccctcacccaccctcagaagctgggaggccacgctgcatgacctgttgatgtgtgggaatcgacacctcggtaccaggtgcacgtttctctggccactgcagtccagctgtctgctttaggaacacagtcttgaaggaagccaagtgtctcagaggggaggcagcaagcttccagagggaatttcagctgaggccttggcgtttgcacaggagttcagcaagcaggacaagcacagaggaaaaggtcagagctcatagcgcccaccacctccatcctaggattgggagccca

SEQ ID NO: 6897 - DNA, 903 bp, Cricetulus griseus
gggatccgactccggtgggatggaggcgggcggcgtggcagactcttttctttccggtgcctgcgtgctcttcaccctgggcatgttctccactggcctctcggacctcaggcacatgcagaggacacggagcgtggacagcatccagttcctgccttttctcaccacggatgtcaataacctgggctggctgagttatggagtcttgaagggagatgggaccctcatcatcgtcaatatcgtgggtgctgtccttcagacgctctatatcctggcatatctgcactacagtcctcagaagcatgctgtgctcctgcagactgcagccctgctgggggtccttctcctgggttatggctacttttggcttctggtgccagaccttgaggcccggcttcagcagctaggcctcttctgcagtgtctttaccatcagcatgtacctctcaccactggctgacttggccaagatcattcagactaagtctacccagcgtctctccttctcactcaccatcgccaccttcctttcttctacctcctggtccatctacgggtttcgactcagagacccatatatcacggtgcccaaccttccagggatcattaccagcctgatccgacttgggcttttctgcaagtatcccccagaacatgacagaaaataccgccttctgcaaacctgaccacagccaccttagggccaatatgataccaaagagctcctgtttctgctggtcctcctgaccacttccatgggtgcaataggttgtgagaaaaaggctgattttgaaaatagagggatcaaagaaggacttttacgtagatcagatgggacctatgggatgaaatcgaatttttgaagagagattatcttttctcattttggaggctgaggtggtat

SEQ ID NO: 6898 - DNA, 903 bp, Cricetulus griseus
aggagaggagagggagagttagagcattctcaggaattaacgaatgagaaggaaaaagccttgcaggcacaggttcagtaccagcagcagcatgaacaacagaaaaaggaggtggaagccctccatcaacgaaatgtccagcagcttcagaacagattgtctgagttagaggcaactaataaagacctcactgagaagaagtataaaggagatgccactgctagagagctgaaagccaagcttgctggtgtggaagaggagttgcagcgggccaagcaagaggtcctttctctgagaagagagaattgtactctggatgctgacatgagaaagaaaagcatattaaccagctaacaaacaaaagtggacagtttagaacaggaaatacaaagataaagaccagcttgtcctgagaacaaaagaagcattcgatacaatccaagaacaaaaggtggctttagaagaaaatggtgagaaaaatcaggtacaactgggaaaacttgaagctacaataaaatcgttatcagcagaacttctgaaggcaaatgaaattattaagaagttacaaggagatcttaaaactctcatgggtaaattgaaactgaagaatacagttactattcagcaagaaaaactgctggctgagaaagaggaaatgctacaaaaggagcgaaaggaatcacaggatgcggggcagtctcttcgagccaaagagcaagaggtatgcaaattacaagagcagttagaaactaccgttcagaaacttgaagaaagtaaacaacttttaaaaaataaatagaaaaattaaatacacttaggctaaacaaagaactaaatgaaaaccagactggtaagaaagcaaagacacattctggctatcttatgtagaccaggctggcctca

SEQ ID NO: 6899 - DNA, 903 bp, Cricetulus griseus
aacccagaccctgatgcagagaccctactacaaagcaatgaaggggattggaaccaatgagcaggccatcatagatgtgctcaccaagagaagcaacgtgcagaggcagcagattgccaagtccttcaaggctcaatttggcaaggacctcactgagaccttaaagtcagagctgagtggcaaatttgagagactcattgtggccctcatgtacccaccatacaaatacgaggccaaggagctgcatgacgccatgaagggcttaggaacaaaagaaggggtcatcattgagatcctggcttctcggaccaagaaccagctgagagagataatgaaggcatatgaggaagactatgggtctaacctggaagaagacatccaagcagacacaagcggctatctggagcggattctggtgtgcctcctgcagggcagcagagatgatgtgagcggctttgtggacccaggactggccctccaagatgctcaggatctctatgcagcgggtgagaaaatccatgggactgatgagatgaaattcatcaccatcctgtgtacacgcagtgccactcacctgatgagagtgttcgaggaatatagaaaaaattgaccaacaagagcattgaggatagcatcaagagtgagactcatggttcactggaggaggccatgctcactgtggtgaaatgcactcggaacctccacagctactttgcagagagactccactacgccatgaagggagcagggacacgtgatggtgggtcatttcttcctcccacaaaagctcctgggcacagattacaccaatgccttggctctgacccatctactcagccagggtgtttggagaaggagcagatcacatggatttctagcagatgtcttagctgataagcttca

SEQ ID NO: 6900 - DNA, 903 bp, Cricetulus griseus
gacggggcgcgaccccgcgagcgcggaggaggccgcgacctcaacctgagccggggcgagcgagcgcgcgccgctgcccagcccggccgcccggccgtgccgatgggggccccacggccctcgcccatccgggggcccgcgctcctgctgctgccgctactcctgttggccagcgcgcgaggccaggagcaggaccagaccaccgactggagggccaccctcaagaccatccgcaacggcatccacaagatcgacacgtatctcaacgccgcgctcgacctgctgggcggcgaggacgggctctgccagtacaagtgcagcgacggatcgaagccttttccacgctacggatataaaccgtcaccaccaaatgggtgtggctctccattgttcggtgttcatctgaacattggcatcccttccctgacaaagtgctgcaaccaacacgacaggtgctatgagacctgtggtaaaagcaagaatgactgtgatgaggaattccagtactgcctctccaagatctgccgggacgtgcagaagactctaggactttctcagaacgttcaggcatgtgaaacaactgtggagctcctgtttgacagtgtcatacatttgggctgcaagccttacctggacagccagcgagccgcatgctggtgccgttatgaggaaaaaacagatctgtaaggaagcccctgaagctggcgagcagacgagaactcgctgtctcagtggatccccaaattgggaagaaaagcttgaagactgtgtgacttggttttcatagctgtacttaacaataaaaatgagagcagatgtaaaattcattgtaagggcttttcaacattattttgaaatttaggacaaacttccgttagaagtattatttactttgaaatttca

SEQ ID NO: 6901 - DNA, 903 bp, Cricetulus griseus
ttcatggcttctgcggacacctggcgtgtgggggacggcgccgggggcgccttccagccttacctcgattccttgaggcaggagctgcagcagagggacccaacgctgctgtccgtggcggtggcggtgctcgcggtcctgctgacgctggtgttctggaagttcatctggagcaggaagagcagtcagagagctgttctcttcgttgggctttgtgactctgggaaaacgttactgtttgtcaggttgctaactggccactacagagacacacagacttccattaccaacagttctgctgcatacaaagtcaacaataacaggggcaacagcctgactctgattgacctccctgggcacgagagcttgaggcttcagttcttagatcgctttaagtcttcagccagggctgtggtgttcgtggtggatagtgcaacgttccagcgggaggtgaaagatgtggctgagtttctgtatcaggtcctcatcgacagcatgggtctgaagaagacaccatccttcttaatagcctgcaataaacaagatatcgcaatggcaaaatcagcaaagttaattcagcagcagctcgaaaaggaactcaacaccttacgagtcacccggtctgctgctcccagcacactggacagttccagtactgcacctgctcagctgggaaagaaaggcaaagagtttgaattctcccagttgcccctcaaagtggagttcctggaatgcagtgccaagggtggacgtggggatgccggcatggctgacatccaggacttggagaagtggctggccaagatcgcctgaggggcagccctggctgcaaaccctggtcatctatgactgactggcagcaggaaagggctgtggtgggtggaaggtctaaagtcaaggcag

SEQ ID NO: 6902 - DNA, 902 bp, Cricetulus griseus
accgtcagcagatgtgcttgtggccactccaggggcgtttgtggaaggccctgaaaagtcaactgatcagcttacagctttctttccttcatagtgttggatgaagcggacacgttgctggatgaaagcttcctggaacttgtggattacatcttggaaaagagccctatagcagaaagtccagctgagttagaagacccctttaatcccaaagctcagttagtgatggtgggagccacgtttccagaaaggcgtaaaccaattgctgagtaaagtcaccagcccagactatctcaccaccatcacaagctccaagctccactgcattatgcctcatgtcagacagacatttatgagactaaagggagccgagaaggtgacagaactggttcagatcctcaaacagcatgacaaagccaataagacaaaaccctcaggaactgtcctggtgttctgcaacagctccagcactgtgaactggttgggatatattctggatgaccacaaaatccaacatctaaggctgcaagggcaaatgccagcctcaatgagaacaggtatcttccagagtttccaaaagggctcccaagacatacttatctgcacagacatagcctcacgaggtctagatagtatccatgtggaactggttgtcaactatgattttccccctactctgcaagattatatccacagagcaggaagggtgggtcgtgtgggcagtgaagtgccagggaccattatcagttttgtgacccatccctgggatgtgagcctggttcagaaaattgagctggcagctcgtcgaagaagaagccttccaggactagcatcttcagtgaaagaccctttgccttaacaagcctaatctttggctggcttgaatctgatgctagaacagg

SEQ ID NO: 6903 - DNA, 902 bp, Cricetulus griseus
gccccggaaaggctggcactgctcactgaggagagtctccgtgacggggacagtcgctaggccccgcctctccacctggtgatggtcattgtccccctgaacagggatggaggaaacgcctcacgaagcagcaggatcaccaagggtccagtttcagtctttggagagccagtctgaatgcctttccccagagctttcgtttctgcaggacacagagatggagcagggattcacgtggggcaagtgctttctctggagaaacacttgcagtccttacggcaggaattaccaagagatggcccaggtatcggctttccatcggtagtgctcatccctgcacggaaactccttttccaagattgtaagatactaactttggttggtggaatagatgtctcttgggatgccactgtatgtaaagttgctgatccccaaatgacctttggtgaatcttttacatggaagccatccttaaaaccacatggatttggaactcagttaattcataaaccacacttggtggtcagctacttgtctgagaagccacaaagctaccctgtctcttcagttgttattgtttcctgttacattagagcagggaacacatgctgtgtactctttttagtagtgagtatagcctgttcactgtgttgcctcagtttcctgtgaccccgccccccagactttcttcatgtttggtataattttctccttcctttaaaagtgctgtcttcttgcctctgattctttgtggtgccataccaattgatgtatttatatttcctttcctaattaagtgttcttagcactgtccttgatggaggggaagtagggggcacaaaatgaaatagttcagggcattaaaatgaatgtatatttaaaagctttgtaaattgtaaaat

SEQ ID NO: 6904 - DNA, 902 bp, Cricetulus griseus
gatgtctgccaactgtgaagtgctgagtagcgtttcagggccgtgcaagcgaatcacacacgcggagggactcgaggcccggggccctagggcgggcttctggaacatccttgaggaaagcctgtttccacttagctaatttaaaaaaaattaagtccttcttatcgcctgcccaccctcaccgtcccaaacgcctttgatctcgttcctcattaacaagttcccttatgctctaggaacagagtggtaagagccttggaggaaggcgagccccgctctcagctcccggctcacactacttgctatcaggcagcaccgcggacacctccgctccacggtgattggccagcggcggggtcctcgccgtcgtccaatatggcggcgcccagtgacggtgtgaactgtgatgagttcgccgagttccaggaattactcaaggtgatgaggacaattgatgacagaatagtacatgaattaaacactacggttccaaccgcttcctttgcagggaagattgatgccagccaaacctgtaaacaactttatgagtctttgatggcagctcacgccagtagggacaaagttataaagaactgtatagcccaaacctcagcagtagtaaaaagtctccgagaagagagagaaaagaacctggatgacttaacattattaaagcaacttagaaaagaacagacaaagttgaaatggatgcagtcagaactaaatgttgaagaagtggtaaatgacaggagctggaaggtgtttaatgaacgctgccgaattcatttcaagcctaccaaagaatgagtagagagaatattttatagacctggtcatctcatcaactaagcatgacagatgtcaacagggcaggctcccaaggatggtctcccagccagcag

SEQ ID NO: 6905 - DNA, 902 bp, Cricetulus griseus
ggctcctagttctggagagttgggcgagtgttataaccttttggcctctccatcagttcagctttcccccaaagcatggtttggtaccagtcttctcatttccttctagagcctgagaccaatgcttaagtttggggaacacagtcaccatccccctggtactgatgcttgctggattttccggaaggcattttgctacccagtctcttttcactgcctggggatcagtcttagtctttcattgtttcattgttcccatgttcccatgttcccactgcatgctatgacttccctactcctcaaagaagagactcctttgcatgtctggagacagtagggggtggtaagctaaagggaagtggacaaaacagctcattaaccggggcttgcaaggggctctgtatgtacccagggtactggcccaacccccaaattctagccatagacaaactccaggccagacccctccaccctggttcagcctgggcagcttgggctgagccacccaggaccaatagatttaagctaggcatttcagtccaagaaggcttctaagtggatttaggacctgagaggaagaggggcctctgtgggtggctgggtacgtccagaggtgcccctggtggaagggtgggtcagtggtcctagcaggaagggaaaaccagcaaggccattcttgctgggttgagtcaaggagctagaacaagggaccaagtggctgtaaagtctcaagccaatgatggggcttctccactgggctcctgtagtcctcaagtccctggcctccaccttaccaggtgccacttctcagaaggccactgcccaggcccccaggccgccccttcgtggccagagactggttaaagccccccagtgcctccttgtgcatagaacttcctctg

SEQ ID NO: 6906 - DNA, 902 bp, Cricetulus griseus
gtcccgcgccaagcgcgcggtctgagatcctttcccgaagtcccttgcgcggcacctggcgacaaaatggctgcccgagggagacgggcggagcctccgagtcgggaggtgcccggcccggcgggcggcggcaggagccgatgggctggagtcggggccgggaacgtcacccgagagcggggacgacgaggtgtcgggctcaagtccggtgtccggtggtgtgaacttgttcgccaacgacggcagcttcctggagctgttcaagcggaagatggaggaggagcagcggcagcggcaggaggagccacccccgggcccgcagcgacccgacccatcggcctccgccgcggcgggccctgggaatccgaagaggaagggcggcccaggccccacgctcagcttcgtgggcaagcgcagaggcgggaacaaactagccctcaagacgggaatagtagccaagaagcagaagacggaggatgaggtattaacaagtaaaggtgacgcatgggccaagtacatggcagaagtgaaaaagtacaaagcccaccagtgcggtgatgatgataaaactcggcccctggtgaaatgaccccttcccgggtgctcattacctgggactctctgcgatgtacataactatttaatgtggtaatggcagcggccttcctggaggactgatacacagaaggaaaccaaggcgcttcccatggccgcagaccattctccaggactctttttttaccttgagcacttgcctcctgagacttactagaccagtggtttactgtcccctttcttcctaccacctcgctttctctggctctgtctgtctcttcttgctgtctctctccttttagctagtcacttctgagaagtaaagaacctgatttagtgctgaaaaa

SEQ ID NO: 6907 - DNA, 902 bp, Cricetulus griseus
gtgaccttcccgcctgcggagctatgctgccggcagcggcggcggcggcgagccgcctgtgggcgccgcggcttgggctgcggggcgcagctctccgcctcgccaggcaacaggtccccggtgtctgtgcagcgcggcagttgagcagcagcagccagcgaaggagtgaagctctcgccggtgcccctctggataatgctcccaaggaatatccccccaagatccagcagctggtccaagacattgccagcctcacgctcctggagatttcagacctcaacgaactcctgaagaaaacattgaagatccaggatgtcggccttatgcctatgggtggcatgatgcctggtgcagtccctgctgcagcagcagcagcccctgaggtggctgagggagaagacatccctaaacagaaagagcggacacacttcactgttcgcctaacagaagcaaaacctgtggacaaagtgaaactgatcaaagagatcaagaactatgtccagggcataaaccttgtgcaggccaagaagctagtggagtccctgccccaggaaatcaaagcaaacgtcgccaaagccgaggcggaaaagatcaaagcagccttggaagcagtgggtggcactgtagttctggagtgacactctctttctgaggactttcggactggggtccctgggacctgggcaaaggcctgctcacccctgcttcactcccaggtggcttgttgggagcaacagctgctgacacttggtgaccgaattctcctgggagagggacaggatggacctactgtgatggggaggggcagtttacagcctgtgcagactctcaagagattgccttgagatgctataaagtgaacacgcccctggcggcgactaagaaaatacactgttgaggct

SEQ ID NO: 6908 - DNA, 902 bp, Cricetulus griseus
gcgggcgccaggcggccccggggaggcgctcgcgccggcggccggggctccgcgaggcgacgaggcggcagagactttccacactgattaatccagagtgaaaaatctgaagagatgcgagcaggaaaacggaattaaactaggcctgaggagcgatgcgacaggcatgatggaggtcgagtcctcctactcggacttcatctcctgtgaccgaacaggccgtcggaatgcagtccctgacatccagggtgactcggaggccgtgagcgtgcggaagctagctggtgacatgggcgagctggcacttgaggggtcagaaggacaggcagagggaagtactccagacaaggaggccagcagccagcccgagaacagtaatgtgaacacctcgtcttgagtctggccttgatcctagaggctagaagagagacctgctgtcccctcctggaactggagccctggcacaaccagacaccatcaccatgggatgttatttattcagctaagcggggcttgagccaggctctgcccccaggtgagcagccccacctggacagggactgtccccacaccactcatctctctaaccagctgcctacatcagaaagatcttcctagcccttttttaaagcctcttttacattttttaaaaacataactttttcagcagagaagggggagctgacaatcactattttctgttttggtttttggttttgtttttgttttaagcttagttctgatgttctatgcagctctgagttcccccgtggagtcgcacagatccagatgtagggaaaggatttggactcaaaactaaatgaccaattctttgccctttgtaccaagagagtgtaccaagaggtcccaggaaataaacgctgatgatttgtgtgcctggc

SEQ ID NO: 6909 - DNA, 902 bp, Cricetulus griseus
ttgaagcctatctccaagaagaattgaagatcaagcgtgctctttttaactaccatgactctcgtatccatgtgtgcctctacttcattgctccaacaggccattctctaaggacacttgacctcttaaccatgaagagcctggacagcaaggtgaacattataccattaaattgccaaggcagatacaatttctaaaagcgaattacagaagtttaagatgaagctcatgagtgaattggtcctcaatggtgttcacatctatcagtttccaacagatgacgacactactgccaagatcaatggtgcaatgaatggacatttgccatttgctgtggtaggaagtatggatgagatacaagttggaaataagatggtcaaagctcgccagtatccttggggtattgtacaagtggaaaatgaaaatcactgtgactttgtaaagctgcgggaaatgcttatttgtacaaacatggaggatctgcgggagcagacccatatgaggcactacgagctttacaggcgctgcaaactggagggaatgggcttttcagatgtgggcccagaaaacaagccactcagtcttcaagagacttatgaagccaagagacacgagttctatggtgagcgtcagaggaaggaagaggagatgaagcagatgtttgtgcagcgagtaaaggagaaggaagccattttgaaagaagctgaaagagagcttcaggccaaatttgagcaccttaaaagaattcaccaggaagagagaatgaaacttgaagaaaagaggagaattttggaggaagaatcaatatctttctctaagaagaagactacctgtgatctgttccagagccagtcatttatggcatcaagtagcagcattaagaaggacaaagaccgaaagaa

SEQ ID NO: 6910 - DNA, 902 bp, Cricetulus griseus
gatggcggaagaaggggaaagaaaaaagatccctttggttccagaaaatctcctgaaaaagaggaaggcttatcaggctctcaaagccacccaagcaaagcaggcacttttggcaaagagggagaggaaatcaaaagaagtcaggtttaaacgactggaatcatttgtacgtgattcctggcggcagcggcgtgacgatgtgcgggtccggcgactagaagtgaagcctcatgcgttggaagtacctgataaacaccccttggcctttgttatacgcctggaaaggacagaaggagtcagtttattggtaaagaagacaatagcaaaacttcgcctgaagaaattgttcagtggtgtctttgtccttgtcacccctcaaagtgtgaagctgctgcgcacagtggagccttatgtgacatggggatttccaaatctgaagtctgttcgggagctcatcttgaaacgaggccaggcaaagattaacaataagactgtccctctgacagacaacacagtgattgaggagcacctggggagatttggtgtcatttgcctggaagacctcatccatgaaattgccttcccaggggagcatttccagaagatctcttcattcttgtgccctttccagctctctgtggcccgtcatgccaccaagaatagagtgggcttcctcaaggagatgggctctcctggctaccggggtgtacgcatcaatcagctcatccgccagctgaactagacagggaccaggactccaaaagcacagtgcattggaagagtgctttttgttatttaaaattatcaagtatcttcagagaagattattttctgctttcagcacctggaaggaccttctttctgggtatttaatactacatagggaaccctgtctcagaaaa

SEQ ID NO: 6911 - DNA, 902 bp, Cricetulus griseus
atcagcacacccagtggcatccggactcagatcccgggaagtggtctctacagcaaccttcagcagtatgacatcccgtaccctgaggccatctttgaacttgcttttcttcacacccaagcccttcttcaccttggccaaggagctgtacccgtgggcactataggcctaatgtcactcactacttccttcgattgcttcacgacaaggaactgcttctgcggctctacacacagaacattgatggacttgagagagcgtctggcatccctgtctccaagctggttgaagctcatgggtcctttgcatcagctacctgcaccgtctgtcgaaggtccttcccgggggaggacttcagggctgatgtgatggcagacagggtgccctgctgccctgtctgtactggagttgtgaaacctgacattgtgttctttggggagccgctgcctgcaaggttcttactacatgtggctgattttgccctggcagacctgctactcattcttgggacctccctggaggtggagccttttgccagcttgtctgaagcagtacagaagtcagtgccccgactgctcatcaacagagacttggtggggtcctttgcttacagtcctcgcagtacagatgtggtccagctaggcgatgtagttcagagtgtggaaaggctggtggacctcctgggctggacacaagagctgcaggatctcatccagcgggagactggaaagctggatggacaggacagataagactatggcctcatcacctgcgggaaatcacacaggagatcctctttccagggagacctcatgcccgaacacagctcggacaggtttataagtctgggccaaaccactgtgtgtgacctggctagtggtcttctgagactgcctttggaa

SEQ ID NO: 6912 - DNA, 901 bp, Cricetulus griseus
agcaggacttcggatcgcgcgggcgctgtgactcggggactctgcgatccaagctcccagactgcagtgaaggtccagagctggcaccacagaatctgtgcaaccctctccacccacacatgcccaccccacatgaggcggagaaacagcacacaggaccagaggaggcggacaggcccccctcgatgtccagccatgatgcagccccctcaggaccccccagtcgcaacccctgctgcttatgctggtgctgctgctgcagctgctcctggaaccaagaacgtcagcgagcttggcaggcttctcgggaaagcaaactgcaacccctccccagctgtgaagcttgcactccaccaagccctgaggaagtacaaagctgggcacagtcctttgacaagttgatgcatagccccacgggccgcagtgtgttccgggcattcctgcgcacagaatacagtgaagagaacatgctcttctggctggcctgtgaggagttgaaagcagaggccaatcaacatgtggtggatgagaaggcacgacttatctatgaggactacgtgtccatcctgtcccccaaggaggtgagcctggactcccgtgtgcgagaaggcatcaataggaagatgcaagagccatcaccccacacatttgatgatgcacagctgcagatctacaccctcatgcaccgggactcctaccctcgcttcctcacctctcctgcctatcgttctctactactccagggggctccacagtcctcctctgaggcctaggtgcttgccacacagatgttctactcctacaggcagactaggggctaaccctgccccatttggttggaagtagattcagtcccaatggcaactgcaatgttctgctctgccctatcctgctccaactg

SEQ ID NO: 6913 - DNA, 901 bp, Cricetulus griseus
tgaagctgagccagctgagggcttggggctttctggcttggccaagaatggccaggagcctgggaggtcaggacttccagtcaccttcattgatgaagtagactcagaagaggaggcctcccaagaaaccaaactgccgtcctcagcagttggtttaccttcccagtatcacctggaccttgccaggccaaggcacacctcagagctcccaaatcgagggagcaatactttcatagtggtgcccaagaggaagccagagacccttcaggcgccacacttcagtcaggccaatgggcagtcccagcaacaggaggctgaggaacaggatgctgatagtctctcaggacctcacactgctctggagaacacccttaagaaacgctaccccactgtgcatgagattgaagtgattggtggttacctggccctgcagaagtcctgcctcatcaaggctggctcctcaagaaagaagatgaagatctccttcaatgacaacagcctgtatacaacatttgagtacccttctgagagctccctggaacaggaagaggcggaggacgaagaggaaggagaagaggatggtgaaggggaggaagtgcagctcaggcctgtccagctatactcccaagcattccatggctttcagcaagtggcaggagcagacggtggtgcaggctccaagtgaggtggaactcccaccgaaggaagtcatgctgacacctgccagtcagaatgatctctcggacttccgcagcgaaccagctctctatttctgacccctggagctgccaggatggccaagacagccccaggtgtggtggctctggaagccagtcaatgcccaggagccctgactattattctgtgcccttccatctgctctttctgctttcctctctct

SEQ ID NO: 6914 - DNA, 901 bp, Cricetulus griseus
gctctgactaccactgtgccatatggaagactgataagcaggggccaccagcatccctgcaggtactgcaggtggaaaagggggccactggtgttagcctcagccctcacctgccaggagagatggccatctgcagccgttctggagctgtgtgtctatggaccccacaagatgggctgcagctggtctacaaggaccctgagacgcttgccttccgtgatccttctccctggcgctgggtagacttcactgctcatccccgggtgctgactgtgggtgaccgcacgggtctgaagatggttgacattcatcaggctagtgcccgttgcagacgatgggtggaggctctgatggagcctatccccggccttgtccggtatgggccgcccccaccttctcccaccgccgttttctgggccacgtggagcagcagaagagtcagaccatgtcacagaagctccgatcagctatggccaaggggaagctcctgggcggccgtgaggatctgggtacactccccagggcagagctgccccctgcacctcagtgcagccagcaggatgagctcacagagcgcttggcagaagcctgggaaggtggggcagccgcctggtggaaaaggcttcaaggtcagacctcagggtcccaggcacagatcaagcggcccaagcgccggactcagctggctagcacctttttcctcactcacgagctgcttggaccttcccagacaccagtagcccccttgtagccaaaaccttgctacctcagaggcctggcctcagcccccagggaggcggcaaacacctgtcctctctggctcccatcctccccggaaaagccacgaatgggcttctgagtgtggacagacgtgcttgaaaacttagccttcatcctggag

SEQ ID NO: 6915 - DNA, 900 bp, Cricetulus griseus
tgtgttgatagttaattcccgttaaaattgcctggaaaacttcagtagagagatgcaagactcctcgaaaccactcaccagttaacagtccagaccaggggtgggggtgggccctcactcagcagggtatgaacatttcagcccaccacagtggaggcatgaggggcttagaccttcaaggttaaagggaattttatgctcaaataacattatttaaaatgctgaaggccttcggtcacaaaataccctataactggaggcactatgatgcaaggcttcatgttctaagatgggctttctatccgtggagacccacacggaaggcttgagtgttgtcgattctatgcaatgcaggattgatagacctctgttctgtccatggcacacatatcacatctgttctgaggtgatggtgatgaggtgttaggggatgctctgttgatctctcactcagtaacactacaaatgtcaaatacaagaactgacacaactttgccttaaagagcaccagactgggattggtcgcattgtgttaataaggaagacttagagtgttcattgatgtttacgattttaatatttctgaaggccgttacagtggcctggatatgtgctgaaagccaaacttttaaattttttggttttttaaacaaagaaatattttaaataaatcctatttcaacacagaaattgttgaaaactgtctcatagcaaaagaaaaaatcatatttaagtttttgtttgtggccagtatagggaatggaagtgtcttgttaccctttcagctgataacctgaaagacagcagtctgctgtggcaactcccacatgacttgtggtattcagctgaggcgggcgagccccagcaccatctcagctgtccagacggcagaagtctgtg

SEQ ID NO: 6916 - DNA, 900 bp, Cricetulus griseus
gcgcccacctgagctgctcgcgccgaggtgcggcgtggcgggaccgcgcgcgcccggccgccaggggtgtggctgccaggaggccgcgacaggtgggttttgagcctgtttgctgacaagccctagcttacaagcccacccatgcatttctgtttttgtcaacactaaaatggaaggattttgagatctaatggatgagtcaggctgagtatttagagaatgctcctttgactgacagaagtctccagatggagtggacacacactgtggacacccctgtgatccacctctgcttcccatggtgctgaccatgttttgtggagtcactgctgagggctgggaggtaaacagaccagctttgagatgactcaggcagtgggggaggggacaattcaaggcattgagtagttgtctaaatgacaggaggcctaaaggctggatgggcagagtgaagagctataatttgtgggtgtgattggatgcacatgcatatttgaagtgccaccccaccaaagctggtttgagatagcttattatgcagcttttatctgtagtccaaggaaagtccaaagcatagggagatgaaggcatttatttgtctttgtgttggaagtgattgatgaaggtgtgtaactggtgcacatttagatgcaatgtttaaagttgattgttaataaaaaccaaatttacactggtgtgtgtagtgtagtttctaaaaagcacttcacatttaatttctaaaaaaatttctagtaatctgaatgtctaattttttaatccttttgtgtatgttcactgtttctcagtattactgcttgaataattctctgtacaggggatttgtttgtgctattcacggggtatctaaaggtagcaataaagcttttctttacaaaggaa

SEQ ID NO: 6917 - DNA, 900 bp, Cricetulus griseus
  modified_base (835)..(835): a, c, t, g, unknown or other
catcacagaatatcaaagaatatgaaaagggaacaaagaaaacctttgcttcacctacacaaaagtcacaccatgtgaaacctcaggctgactcatggaaggaggacccccaggggaccagctctctagaggcagaggccaagccacgccggcccagagccagcccaaagaaggagcagaagacagccacagagcatggtcccaacgggggccaggagaaaaagcgaaaggctcaagacaaaccagccaagaagaaaggaaaggaaaaacaaactcttaaccaatgcagaatttgaggagattttccagattgtactacggaagtccctgcaggagtacttgggaggaggtaatagtacctgatactcgagagattgcatcttctctagaagaggaagtggactctgagattaggacgtctaagccaggccagctggctgctgaaccctccaagaagaaatccaacagactttctttaagcaaaaggaggaagaaatccgaagatgagaaaatggaggaaatccaagatggatatgagtgcattctgaaagacaagcagaagacaacgattcaggatccttctcagatcaggggtcctcctatgttccaggatccatcgtctgggccaagcaatacggttatccctggtggccaggcatgatagaaactgatcctgacctggggggagtattttcttttttcgtctcatcttgattccctgccgtccaagtaccatgtgacatattttggagaaagagtttctcgtgcgtggatcccagtcagcatgctgaagaacttccaggagctgtccctggagctagttagagggaaaacntgtaggaacaaggactacaaccagaaactggaggcttgggatccagaagggagtgggaagaggca

SEQ ID NO: 6918 - DNA, 900 bp, Cricetulus griseus
gggctgagggccgcggtggcggccggcatggggctgagcgacgggccggcgggctctggccgcagatgccgccttctgcgcccgcccgcgccccgctccggcgagtgccggggcccggctgttgcggctcccggagagcggggccgtgcaggccgccagccccgagcgctccggttggaccgaggcgctgcgggccgccgtggccgagctgcgcgccggcgccgtggtggcggtcccaactgacacgctgtacggtctggcctgctcggcgagctgctcggcggccctggactgcgtgtatcgcctcaagggccgcagcgaggccaagccgctcgccgtgtgcctgggccgcgtggccgacgtctacaggtactgtgaggtgagagtacccaaggagctcctggaggacctgttgccaggaccagtgaccctggtgatgcagcgctccgaggagctcaacaaagacctgaacccctttacgcctcttgttggcatccggattcctaaccacgccttcatgcaggacttggcccaaatgtttgggggaccacttgcactgaccagtgccaacctcagctcccagaccagttctttgagtgttgaggagtttcaagacctctggcctcatttgtccctggtcattgatggtggaccgattggggatagtcagagccctgagtgccgcctcggctctactgtggttgacttatctgtgcctggaaagtttaccattattcgcccaggctgtgccctggaaaacactacagccatcctccaacagaaatacgggctgctcccttcccagaggtcatgttcatgaaacttgggaagacccaaggaccatgctggatactatgtgtctgctcactggttggcaaggcctcattggcagaggctcct

SEQ ID NO: 6919 - DNA, 899 bp, Cricetulus griseus
  modified_base (286)..(286): a, c, t, g, unknown or other
gctttagaaacccagcaacacatgggctcattctacagtcgatctccaatgatgtgtatcaaaatctggctttagaagactggatccatgaccacatacatctagaaggcatgccaattcttttccttttggagaaattctccctgcgttgtcatcggtaggcaccagaatccatggcaggaatgtaacctccatctgatgagacaggaaggtataaaaactggctcggagaaggagtggaggaggaacagtgtaccacgatctgggtaacatcaacctgaccttnttaccaccaaaaccaagtatgacagaatggaaaacctgaaattaattgtgagagctctgaacgctgtccaaccctacctggacgtgcagcctacaaaaaatttgacctgttactcgatgggcagtataaaatctacaggaactgcgtcaaagatcggccggattgccgcttaccaccactttgataatcacattaaactaataaacccagcagatgagacacagtttcctggaataaacagcaaagctaaagaactgcaaagctggcagtggatatatggtcggactcctaagtttagtgtgaacaccacatttcgcgtgccatatgagcaggcacatttggaaattcaagtgttcatggatgtaaagaatgggctcattgaaacctgtgacataaaagcacctgatcattggttgccactggaaatagttaacaaattaaactcaggttttattggcagcaaattctgtcccattgaaaccaccctgctaacaaatatattactgagaacatgtccagatgaacagcacttacacagtaaatggaatattctgtgtgaaaaaaatcaggggaataatgtgaccctgagtgactttctttatactgacagttt

SEQ ID NO: 6920 - DNA, 899 bp, Cricetulus griseus
ggtagatataaatataaaattgtggaaaaatggattcacagtcaatgatgactttagaagttactctgatggtgcaagtcagcagtttctgaactccatcaaaaagggggaattaccttcagaactacagggaatttttgataaagaagaggtggatgttaaagttgaagataaaaaaaaatgaagtatgtatgtctacaaagcctgtattccagcccttctcaggacagggtcacagactaggaagtgctacaccaaaagtcatttctaaagcaaagagtattgaagttgaaaataaaagtactttgtctgctgttccactgaacaacttggagccatcaccaggatccagatctggttggccaatggggaaaggactgtccaaaagatttaaatgtttctcacagggtgagccacatcaaagacttcattgaaaaataccaaggatctcagagaagccccccgtttgccctggcaacagcttttcctttcctcagacttctggatgagacactcacattggaagaagcagatttgcagaatgctgtgatcattcagagactccagataacttcggagccttttagaaaactctaacagttttgatttttgagagacagggaaatgatggttggaagtggacatgcagaagtgggagacagaagacagtttgattgagcttgaggtttgagtgctgcttaattccttatgaggggcttaaataatcacaagttagagaataatgtatagctggaaaccagttaatgtacatttctcaaaggccactcaagaaaaaaagtattttacaaatacttattatagttaaccaatatatattaaatagctgtatcattaatctttaaatgtgttactaaagtagaaagatgcaatgtctcaca

SEQ ID NO: 6921 - DNA, 899 bp, Cricetulus griseus
cgccaccgccatggcccggccactagtgcccagctcgcagaaggcgctgctgctggaactgaaggggctgcaggaggaaccggtggagggcttccgggtgacgctggtggacgagggcgacctgtacaactgggaggtggccatcttcgggccccccaacacctactacgagggaggctacttcaaggctcgcctcaagttccccatcgactacccatattccccaccagccttccggttcctcaccaagatgtggcacccaaacatctatgagacaggggacgtgtgcatctccatcctccatcccccagttgacgacccacagagtggggagctgccctcagagcggtggaaccccacgcagaatgtcaggaccatcctcctgagtgtgatctccctgctgaatgagcccaacaccttctcgcccgccaatgtggacgcctcagtgatgtacagaaagtggaaggagagcaaggggaaggaccgcgagtacacagacatcatccggaagcaggtcctggggaccaaggtggacgcagagcgtgatggcgtgaaggtgcccaccacgctggctgagtactgtgtgaagaccaaggcgccggcgcccgacgagggctcagacctcttctacgatgactactatgaggacggcgaagtggaggaggccgacagctgctttggggacgaagaggacgactctggcaccgaggagtcctgacccgcgtccctgaaataaacttacaaattttacctcagcaggacccgtgtgggcctcaggcgatagactacctcactgaggttccatgtgggctcccgtcccgtgacccttaggtcctcttaccccgtaaataaaataaaatagctttctgagaaaaaaaaaaaaaaaaaaaaaaaaaaaa

SEQ ID NO: 6922 - DNA, 899 bp, Cricetulus griseus
gcccggcttcctcctgcaacaggcgtgggttacgctctcgctcactcgctcgctctctttccgccgccatcttggttctgcgtcctccgcacaaaatgcctggtgaagccactgaaaccgtccctgctaccgagcaggagttgccacaacctcaggctgagacagcagctcctggagctcctcaaacagctggatctggaacagagtcagacagtgatgaatcagtaccagagctcgaggaacaggactccacacagacaaccacacaacaagcccagctggcagcagcagctgaaatcgatgaagagccagtcagtaaagcaaaacagagtcggagtgaaaagaaggcaaggaaggctatgtccaaactgggtcttcgacaggttacaggggttactagagtcactatccggaaatccaaaaatatcctcttcgtcatcacaaaaccagatgtctacaagagcccagcttcagacacctacatagtttttggagaggccaagattgaagatttgtctcagcaagcacagttagcagctgctgagaaattcaaagttcaaggtgaagctgtttcaaacattcaggaaaacactcagactccaaccgtacaagaggagagcgaggaggaagaggttgatgaaacaggtgtagaagttaaggacatagaattggtcatgtcacaagcaaatgtatcaagagcaaaggcagtccgagccctgaaaaacaacagtaatgatattgtaaatgctattatggaattaacgatgtaactgacagcaaggatgtttcccttctcccccccccccccctttttggtgtttcaaaagtggaactacagcttggtttgaaatttgtactgtttctatcactaataaagttatggcttcttgttggatgga

SEQ ID NO: 6923 - DNA, 899 bp, Cricetulus griseus
ccagctggccgtgctcaacgtctccaataatcggctgactgggctggagccattggctgcctgtgaaaacctgcagagcctcaatgttgctggtaacctgctggccactcctggccagctgcagtgtctggctgggctacagggcctggagtacctgaggctccgggaccctttggcccggctcagcaacccactgtgtgccactccctcctactgggctgtggttcgagagctgctgcctggtctcaaagtcatagatggagaacgtgtgagtgggcggggcagtgatctgtaccagttgtgccgagacctggacagttccttgcgccgcagctccagcccaggccccatagccatagaggcccagctatgggtggatcctgactactgggaatcctgccctatgcagagcagctccattctggaagaggcctgccggcagttccaggacacactggcaggaatgccttgacctggaccgccaggccggtgatagcttggcccaggcccagcaggctctgagcgctgcagaagccacctcctctgttgtcttctgaaggtgcctcatagcccaggttttctcatcgtagctctctctctctctctctctatttctctctctctatttctctctctctatttctctctctctctctctctctctctcttgatggaggaagtgcatcactagggcaggctttgagagtttaaagccttataccactcccagttcactctttctgcgtcctgcttgcttttgaacacgtgagctctcagcttctttctctgactgccatgcttgctggtagccacgtctccctgcctctctgacatgatggacttttagccctttggaaccataaaacaaaataaaccttcctactattaaaaaaaaaaaa

SEQ ID NO: 6924 - DNA, 899 bp, Cricetulus griseus
tcccgggacgtggccgcgtcgtggttcgtgtctgcaccatgtccggtggcctcctgaaggcgctacgcagtgactcctacgtggagctcagcgagtaccgggaccagcacttccggggtgacaatgaagaacaagaaaaattactgaagaaaagactgtacattatatgttggaaatactttccttttattacaactgaagaacagatttatgaactcttcagcaagagtggtgatataaagaagatcatcatgggtctggataaaatgaagaaaacggcgtgtggattctgttttgtggaatactattcgagagcagatgcagagaatgccatgcggtacataaatggaactcgtctggatgaccggatcatacgcacagactgggatgcaggctttaaggagggcaggcagtatggacgtggacggtctgggggtcaggttcgagatgagtatcgggaggactacgatgctgggagaggcggctatggcaaactggcacaaaaacagtgagtggtgaaagccccaagtacacagctcactctgttgatgatgttggagaacattacccaaggtctgatcagtatagtatctctgttgcactggaagccactttctgggtttttccctctgaaatattaaaagacagaatccaaaagaatgcctttaattctagtcttattaggttgtattttctgttactaggtcaaaaactgtattcctgggcagcagaatatgtgtcaattaaactgtcagctgaatgggacacttcttttagggagactggaaaaatgtaaggattgactttacaagcagtctggtaatcttcatggggacagaaatgattttttttatattgtaagtctgcatatgtattactgaggttttgctatagtctgt

SEQ ID NO: 6925 - DNA, 899 bp, Cricetulus griseus
gcgtctccccggccgccgcagggccgctcctcgcgacgggacaagtactcggttctgctgcccacctacaacgagcgcgagaacctgccgctcatcgtgtggctgctggtgaagagcttctccgagagttcaatcaactatgaaattataatcatagatgatggaagcccagatgggacaagagaagttgccgaacaactggaaaagatctatgggccagacagaattctcctaagaccacgggagaaaaagctcggccttggaactgcctatattcatggaataaaacatgccacaggaaattatgtcatcattatggatgctgatctctcacaccatcccaaatttattcctgaatttatcaggaaacaaaaggagggtaattttgacattgtctctggaactcgctacaaaggaaatgggggtgtttatggctgggatttgaaaagaaagataatcagccgtggggccaattttataactcagattttgctgagaccaggagcgtcggacttaacaggaagcttcagattataccgaaaagaagttctgcaaaaattaatagaaaaatgtgtctccaaaggctatgtctttcagatggagatgattgttcgagcaagacagttgaattacaccattggtgaggttccaatatcatttgtggatcgagtttatggtgaatccaagttgggaggaaatgaaatagtctctttcctgaaaggattattgaactctctttgctactacataaaagaattactcatttatacttaccatgttcatttcaattaaaagtaagagaagcctgggtcactgattttgtcaatgctctcttgatacattgagccaaaggtaagtgcatttcatactggtcatttctctggagaaactccatttta

SEQ ID NO: 6926 - DNA, 899 bp, Cricetulus griseus
gcagtgtccatgaagcagtgtttgaagtccaagagcagaaggagaggtttgaagctctgttcacccctctatgatgaccaggtcacgttccagttgttcaagagctttcgaagagtgaggatcaacttcagcaagcccgaggctgcagcgagagctcggatagagctccatgagagtgacttccacggccagaaactgaagctttactttgcacaggttcaggtgtccggggaggctcgggacaagtcctacttactgccaccacagcccaccaagcagttcctcatctctcctccagccctcccctccagtcgggtgaagcagagtgaagacgcaatgcctgtgatcaactatgacttactctgtgctgtctccaagcttgggccaggggagaaatatgaactgcatgcaggaaccgagtccacccccagtgtggttgtgcatgtctgtgaaagtgaaactgaagaggaagaagacacaaaaaacccaaaacaaaaatcactcagacccggcgcccggaagctcccacggccgcgctgagtgagcagctggactgtgcactgtgaacccagccactgcacccgtgcctcctgctgctactgctgcaccggcactagagcacagccaagaagatgccactgcatccatctggcagctgggctagctttgccaggccagaacatgaggtgaaatagcagatgtggccagctgtttgaaatttttgaacaatgttctaaatggcactttaagtgacaaggttagcccccactgtatggcatctgactcctccctgagaaacattagttcccctgaatgtatagctcgttgggtaccaaaggccagaactagaatcacccagtaaactaaccaattttacagatagttaaaattagtcttac

SEQ ID NO: 6927 - DNA, 898 bp, Cricetulus griseus
  modified_base (25)..(25): a, c, t, g, unknown or other
gataatacactgacaatgagcgggngttttccagctgttggcctacggtgcctgtctagggacgtgaggatggctgcgcccggcgcacctcgcttcctcctgaccttcgacttcgacgagaccatcgtggacgaaaacagcgacgactcgatcgtgcgcgctgcgcccggccaagcaactacctgagagcctgcgtgccacctaccgcgagggctactacaatgaatacatgcaacgcgtcttcaagtacctgggtgagcagggtgtacggccgagagacctgcgcgctgtctacgagtaccatcccccctgtcgccgggcatgggtgatttgctgcagttcgtagccaaacagggctgcttcgaggttatcctcatttcggatgccaacaccttcggagtggagagtgccctgcgtgccgctggccaccacggcttattccgccgcatcttcagcaacccggccgggcccgacgctcgaggactgctgacgctgcggcccttccacacgcacagctgctcgcgctgccccgccaacatgtgcaagcacaaggtgctcagtgaatacctgcgtgagcgggcccgcgacggcgtgcacttcgagcgcctattctacgtgggagacggtgcaaatgacttctgccccttggggctgctggcaagcggggacgtggccttcccaaggcgcggctaccccatgcaccgcctcatccaggaggcacagaaggctgagcccagctccttccgcgctccacgtggtgccctgggaaacggccgccgaggtgcgccaacacctgcaacaggtgctgaagatgtattgaagaccatcacctgccaggggaactcggggagagccggcggcggagacagggcaggattgggaattgcttaagaccacc

SEQ ID NO: 6928 - DNA, 898 bp, Cricetulus griseus
tactacctggccgtaggtggggctgtggcccaacacaactggtcccacataactacagttctacaggatcagaagttccgatgccagcttatggatagttctgaagatctgggcatgctcagcatccagggcccagccagccgtaccattctccaggatgttctcgatgctgacctgagcaatgaggccttccccttctccactcaccagctggtgagagctgcagggcacctggtccgggccatacggctatcctttgttggggagctgggctgggagctgcatgtcccccgtgcatactgcttaccagtgtaccaggctgtgatggctgcaggtgccaagcatggccttgtcaatgcaggctaccgtgccattgactccctgagcatcgagaaaggctatcgacactggcatgcagacctgagacctgatgacacccgggataagcagcgtgcggcaggcctctaccgacgcctggtgtgcctcactgtggaagaggaggtgcctatgtttggcctggaggccatctggagaaacggccaagtggtgggccatgttcggagggctgacttcgggtttactgtgaacaaaaccatcgcttatggctacatccgagaccccagtggtgggccggtctctctggactttgtgaagagtggagagtatgccttggagagaatgggggtcacctatcctgcccaggttcacctgaaatctccctttgaccctgacaacaagcgggtgaagggcatctactgatgtgctgcagggtagaggctaccgctgttcaggccattggaaaccgccacacttcccacaccctgcctgccgactcctgtactgcacaaatgccctgtgtcccgagacccaggatacaggcaaaacacagccttcccca

SEQ ID NO: 6929 - DNA, 898 bp, Cricetulus griseus
tctaggcgctgccctcatggttacttcagaatgggacagatgagaaactgctcacgctggttatcctgtgaggagctgaggaaggaagtcagacagctgaggcgcattggggaaggagccgtgaagagagtctttctgtctgagtggaatgaacacaaagtcgctctctcccggctcactgggctggagatgaaggatgacttccttcacgggctgcagatgctcaagtctctccagagcgagcacgtggtcacgctggttggctactgcgaggaagatggcaccattcttaccgaatatcaccccttaggttccttgagcaacctggaagcaacactaaaccttccaaagtaccaagatgtgaacacctggcaacacaggctgcagctggccgccgagtatgtgggcattattaactacctccacaacagcccgctgggcacgagggtcatgtgtgactctaatgacctgcccaaaacattgtcccagtatctgctgacaagtaacttcagcattgtggcaaacgacctggacgccctgcccctggtggaccacgactctagggtacttgtgaagtgtggccacagggagctccaaggagattttgtggccccagagcagctgtggccttatggaggagaaaggcccttccaagatgacatcatgccctcctatgatgagaaggttgacatctggaagattccagatgtctccagtttccttttggggcacgtggaagggagtgacatggttcgattccatttgtttgatatccataaggcatgtaagagccagatccctgcagaaagacccacggctcagcatgttctagacacttaccggaaggttttacattcactcagagacactgtgatgtctcagacaaaagagatgctgt

SEQ ID NO: 6930 - DNA, 898 bp, Cricetulus griseus
aggtacttcagcatcatcgacagcaaagtaaagaaggtcatgtccatccctaaggggagctccgccctgcgcagggtcatggaggagacctactaccaccacatctaccacacggtggcaatcgagggcaacaccctcactctctcggagattaggcacatcctggagacccgctacgcagtgccagggaagagcctggaggagcagaacgaggtgatcggcatgcatgcggccgtgaagtacatcaacactaccctggtctcccgcatcgggtctgtcaccatcgacgacatgctggagatccacaggagggtgctggggtatgtagacccagtggaggcaggaagatttcggaggacccaggtcctggtgggacaccgacatccccccccatccccgggatgtcgagaagcagatgcaggagttcacacagtggctcaattcagaggacgccatgaacctgcacccagttgagttcgcagccttagcccattacaaacttgtgtacatccaccctttcattgacggcaatgggaggacctcccgtctgctgatgaacctgatcctgatgcaggcagggtaccccccaatcaccatactcaaggagcagaggtctgagtactaccatgtattggaagtcgccaatgagggcgacgtgcggccctttatccgcttcattgccaagtgtacggaggtcacgctggacacattgctccttgccaccactgagtactctgtggcgctgccagaagcccagcccaaccattctgggctcaaggagacactccctgtgaggccctaacctgccagccctcccttggcattaatttaatttttttttcttaataaagtattttattacaaacaaaaaaaaaaaaaaaaaaaaaaaaaaaaaaaa

SEQ ID NO: 6931 - DNA, 898 bp, Cricetulus griseus
gggcgatggcggcttcttcaagtggggagaaggagaaggagcgtctgggcggcgtctcggtaatggcaggcgttggcagcacgcgcgagcggctgctgtctgcgctggaagacctggaggtcctgtcgagggaacttatagaaatgctggcaatttcaagaaatcagaagctgttacagctggatgaggaaaaccaggtcttggagctgctaattcaccgagatggggactttcaagaactgatgaagttggcacttaatcagggaaaagtccaccatgaaatgcaggcattagaaaaagaagtcgagaagagagacagtgatattcagcagctgcagaaacagctgaaagaggcagagcaaatcctggcaacagctgtttaccaagcaaaggagaaactcaagtcaatagagaaagcaagaaaaggtgctatctcctcagaagaaatcattaaatatgcacataggattagtgcaagcaatgctgtgtgtgcaccactgacttgggttccaggagaccctcggaggccgtacccaactgatttagagatgagaagtggattgctgggtcagatgaacaacccttccacgagtggtgtgaatggccatctcccaggggatgcccttgcagcaggtagactgccagatgtccttgctccacagtacccatggcagtcaaatgacatgtctgtgaacatgctaccaccaaatcacagcagtgactttctgttggagcctcctgggcacaacaaggaaaatgaagatgatgtggaggttatgtcaacagactcttcaagcagcagcagcgactctgactgaagaaggcgtgagagcacgcacagactagtgctgcagagccctgacaagagggacatgtaaaccccagacctctaaggagc

SEQ ID NO: 6932 - DNA, 897 bp, Cricetulus griseus
acgacaatgatgaagaaagtttgcttgaaaatgttgcttcattaagacatgaactgaaaataacagaatggagtttgcagaatttgggggaagagttatccagtgttagtccaagtgaaaattccgattctgtctgcaatccttcaaggtctgaaaggcttattttggaagagcttattcaacctagccgcctgggacatttaaattacccaccttataagaaagtttgtaaaacatctggtagtactgattttcaaaagaagccaagagataagatgtctttttcatctgcttctatggatcaagagattaaaaggcttcgagataaacttaataaacttaggcaacagaatgcttgtttggtcacacagaatcattctttaatgactaaaatagaatctatccactttgaattgacacagtcaaaagcaaaatgaagtcatttgaagctgcaaatgaagcattacttattaaagaatccgaattatccagattgcaagccaaaatttctggacatgaaaagacagaagacctcaagatcccaccagcttcatttaggactctaacagaaattatgcctgatattcaagatccaaagtttgctaaacattctcagatgtcatttttcaaaggcagaaaactacgtcgttctattagtgccagtgaccttagtttcaaaagtcatgtcaatgaagatctctctgaagaattgctacaggacttaaagaaatgcaattagaacagctttcggcattagaaggtggccataaagacctagctctcaagcattcagattcacttaaacctcttccatataacctagaagatgatagttctgaagtaatagactttagtactcttagtggaatgctgagatatataaacaaagaagtagag

SEQ ID NO: 6933 - DNA, 897 bp, Cricetulus griseus
actgctgcatatgcttttagagatgattcagtattaccattaaaacatgagactccttcccatttttgtggtgctgggaatcaaactgaggacttagcatgtgcttggtgagcatttgaccactgagctacactcctcagccccaagcatgggatacttaacactcatgaaaccacctaggagcagattgtagcatcattaggtattaaaagttctcctactgtgtcatcaaagctgctagtcattattggcaatcagtttaaattaccaaaaagctgctgggtaacactcaccattcgtattctttgcaagcactgcttgctagcattttggtatgtttggagccataaagagaaagtatcagttgttgactacttctgttgggtcctcgctgcatttcctgtgaactattaatggtgcttctcattttcagatgatttttctcattgttaaacaagtgtattaaaagatattttcataatgccaaacaacatagtggtccagtgatcatgagcaaatagcaaaaatacaaggatattccaaatttggggggggattaagttgaaaaggtaaagtaaaacttttaaataatgtttcattagtttgtagcgtttataactctacaggtatcagagtttaaacctgcactgagatctgggggctgccgtgtatttccatggaagtactccttttctcaagtcattctttgccaggctgggctctaactgctttgatcacccaagtgtctttacattcagttaagggagtttatgaagaacactgttaacttatatatagtacatgaaaaggaatcagatccttaaacagcaggtgaaatgagcaattaaaatatttaaagtaaataaattctattttaattaaaaaaaaaaaaaaaaa

SEQ ID NO: 6934 - DNA, 897 bp, Cricetulus griseus
aggatggctggcatggttctgggagtgggtgctggcgtgttcctcctcgctctgatctgggtcttggtgctgctgctgtgtgtgctgttgtccagagcctctgggatagctaggttctccatcatctttatcttcctcggtgctctgatcattactatagttctgctgcttttccctcgagccagtgaattcccagccccagaggttgaaatgaagattgtagatgcctttttcatcggccgctatgtcctgctggctttcctcagcgccatctttcttggaggcctcttcttgattcttactcaacatgtgctggaaccaatctatgccaaaccactgcggtcctgctgagtgcggtaacggaaacgggacattttgatgtcacggatgagcacagaggcactctctggagccttgatgacaactttcgtgtcttcagaccaatttgtcactaaaacaaacctcttgagccctggctttcaggaagtcagtagcaaaacagactccgtgggtgtagattgtcagcatccaaacacgatacaactctctgttcagtgcccacactccaggattcctgtctgttttgaatggaaagtagtaacagtgatctgcttggggtagatgttcagtcaagccatcagtagtggatttagggagaaggagttttaggctctgcccaccaacagaagatcctggtcctttttgataatgtgtaagttgtatgttcttagttgagtgactggaaccatttggaagagataggccttcagacatgaaaggctgctgtaatgtaacagcttggaaggtgtgtcaggcagcggttactgaccactccttatgtaattccacagagctctataaaggcagtgagtgcacttgcctgagttccaataaagc

SEQ ID NO: 6935 - DNA, 896 bp, Cricetulus griseus
actcttcaacatgaaggcgctgagcccggtgcgcggctgctacgaagcggtgtgctgcctctcggaacgcagcctggccatcgcgcggggccgcggcaagagcccggcggcagaggagccgctcagcctgctggacgacatgaaccactgctactcgcgcctgcgggaactggtgccgggagtcccgcgaggcactcagcttagccaggtggaaatcctgcagcgtgtcatagactacatcctcgacctgcaggtggtcctggcagagccggcgcctggacccccggacagtccacatctcccgatccagacagctgagctcactccggaacttgtgatctccaacgacaagaggagcttttgccactgacccggcggtcctggcacctcccgaacgcaggtgctggcgcccgttccgcttgggaccctgggactctgggaccctctctccggccggaagcccgagggcatggatgagcctcgatctcgcccggccctcttcacttcccctaaacccctgcctcgaggctggactgggagcccgagagcgaaggactgaacttgggtggcctgaagagctagcgctggtcagcagctgggcaacgtcacccggtccccaccctgactcccaagtcttaaaagactggcttttccgagaatgggggtgtcgagaatgggggcgagtgtggctgccctgcacactgccaaggcagcgtaagagctggttttctgatctccttggagaacggctctgctgccctgattatgaactctataatagagtatatagcttttgtacctttttacaggaaggtgactttctgtaatcatgtgatgtatattaaactttttataaaagttaacattttgcataataaacatttttgaacactttg

SEQ ID NO: 6936 - DNA, 896 bp, Cricetulus griseus
ctcagccacaacaacctgaccctccttcctgctgacatcggcctcctgcagaacctccagaacctggccgtcacggccaataggattgagacgctccccccagaactcttccagtgtcggaagctgcgggctctgcacctgggcaacaacgtactgcagtcactgccctccagagtgggtgagctgaccaacctgacacagattgagcttcggggcaaccggctggagtgcctacctgtggagctgggcgagtgcccactgctcaaacgcagtggtctggtggtggaggaggacttgttcagcacgctgccgcctgaggtgaaggagcgactctggagagctgacaaggagcaggcctgagcgtgtagcctgcaggagcagcaaggaccctcagcacaaccccaggccaaacgagcagcccagctctcctgggactgcacaacagccagccgggttttttttctcctccatgggtcttggcaagcacccttttcatgactgtcagccaaaaggaaggctttagagctgccaagaagggaggagacttgggctggctaatccccagatgaacggtgctccttccttgtccccaaccttatgatgcccctcttgcacagtgttaaggagtcccaagcagctgcttcccctggactctatccccacatcatgtgttttgctcagtgccaccactcacctctgctgctgcttacatcggctctgtcaccatttagtccttcgtgaagaacagacattagagacaagttgggcatggagaggtcaccactgggaaggcaggttccccagtttttggttccaagatagttttcatactgggcacctggtttcacacagtatagttagcgcctagtggcagtaaagccactctgctttagatc

SEQ ID NO: 6937 - DNA, 895 bp, Cricetulus griseus
ggcggcggtggcggcggcggcggcggcggcggcggcggcggcggaaccattccttagggccagcggtggacccccgggccctcagggcccccactgaccttccccagagtctggatacctctctcttcttcggaacctcggtggctggctatcagcagagccccttagacatggacgatgtctccggtggaaacgtggggctctttggctccttggctctgaaaagctccagcctggagccccaggctttgacacccagcaataagttaactgtggacaccgaagctctgactccctccagcaccctctgtgaaaaacagtgtctcagaactactgacccctgccaaagccgattggaacgtgcaccccgagtctgacttctttgggcacgaggaagaaacccagtttggattctccaacccggcaggaagccacgcttctcagaaagaaacagaccttatcacggtgactggcaccccgtttttggtatgaacctactcggcccgtgccctgaagtttaatagaaatactatttagtgccagaatattttcttaaatggtggtaagactgacaagacaaatagcaaagagaattgtgtttgttcttgtcattgttgatatttctgacatcttttggtggtagtagggaggctgtgttgtcgaattgccatccaggactttgacatgaaagcttcggagtccagtttgtgctctctggtattggagaggttgtcttgaagatattagtctcactaaacctcagtttcctgtttactgactaatgtgtatgcacatgactaacattccttagacttttcttctcatacagtttcaacacataagaaaaagtatgtatttcagtacatttttgatcactttatatgctctttttaca

SEQ ID NO: 6938 - DNA, 895 bp, Cricetulus griseus
aaagcctaaaacaaaaagggctaagagattccttgagaagagggaaccaaaagtcagtgaaaacattaagaatgccatgttgattaaagggggaaatgcaaatgcaactgtgacacaagtactccgagatatgtatgcactgaagaaaccatacggagttctgtataaaaagaaaatattacaagaccatttgaggatcagacatcattggagttcttttcaaagaagtcagactgttctttattcatgtttggctcccataataagaagaggccgaataatctaataataggtcgtatgtatgactaccatgtgctggatatgatcgaactaggtattgagaaatttgtgtctctaaaggatattaagactagtaagtgccccgagggaacaaaacccatgttgatattcgctggtgatgattttgatgtaacagaagactatagaagattaaaaaatcttcttattgatttcttcagaggccccacggtgtccaatgtccgactggctggattggagtatgttctgcacttcaccgcactgaacgggaaggtttactttcgaagctataagctgctgttgaagaaatctggttgcagaacaccacgaattgaactggaagagatgggaccgtcgatggacctggttctgaggaggacacacttagcatcagacgacctttataaattgtccatgaaaatgcccaaagctctcaagccaaagaagagaaagaatatctcccaggatacttttggtacaacttttggaaggattcatatgcagaagcaagacctaagcaaactacagaccaggaaaatgaaggggttgaagaagcgacctgcagagacagggacagaaaaccaggggaaaaaatcaaagagaattaagaaaaatt

SEQ ID NO: 6939 - DNA, 895 bp, Cricetulus griseus
  modified_base (864)..(864): a, c, t, g, unknown or other
tcggcggcggaggcggaggcggagacggcggggccaggcggcggccggagagcgagcgagcgagcgagcgcggcggcagcaccggggccatggcgcccgcgcagcgcccgctgctgccgctgctgctgctgctgctgccgctgcgggcgcgcaacgaggatccggcccgcgccaacgctgaccgctacgcagtctactggaaccgcagcaaccccaggtttcaggtgggcaccctgggtgacggtggtggctacacagtggaggttgtagtatcaatgactatctggacatctactgcccacactacggggctccgctgcccccggccgagcgcatggaacggtacatcctgtacatggtgaacggcgagggccacgcatcctgtgaccaccggcagcgaggcttcaagcgctgggaatgcaaccggcctgcagcgccgagggggggcccctcaagttctcagagagttccaactcttcaccccctttcctgggctttgagttccgtcctggtcacgagtactactacatcttcttctagccactgtcaagccctcctccctcagcatctcagaaagcccttcagccctgcaatccaccccgcaacccgggccccgccaccaggcacaaccggctctaaggcctggaagacgttttatttctgtaaatagaaaccagcaaatgtgtactgtgttttattttaatgtattcttgaggacagaatggaagttcttcaaaaaaaatttttttttcagacctgcgatttgaggggacttttattttggttggggaaaagaggggtggactttttaggatataaacaacactttgcaataaactcatttttttttccctgtcgttggancctccccccttgatcatgtgacctagtaatg

SEQ ID NO: 6940 - DNA, 895 bp, Cricetulus griseus
tcatgggtcgctcccgccggaccggcgcgcaccgggcacattccttagcccgccagatgaaggccaagaagcggcggccagatctggatgagattcaccgcgagctgcggccacagggtctcccgaggcccaagcccgagctggacgccgagcccgacccggacctgccagggggcggccggcatcgctgtctagcctgcgcgaggtacttcatcgattccgccaacctgaaaacccacttccgatccaaagaccacaagaagaggctgaagcagttgaccatagaaccctacagccaggaagaagctgagagggcggcaggcatgggctcgtatgtgcccccccagcgcctgagtgtgcccacagaagtgtccactgagatccctgagatggacacatccacatgagcggcctgaggattcagggcaggagaaactgcccgtggacagtggttcagtggctaggctgagtgtgttagatgtacttacctgtagcacccggaagtagccgggagtcagacgtcgaaatctcatactgggggtcgctggtctcgctgtcagcctgtggagtgggaacagaaacgaagactagatattgcctggggtatcaagaggtggagaccagggcataggagtccctgacctgttttgcctgggcactatgtgcacacaggatgctcacactgctggctcgcccaagtctggcagggggcggggcagctggatctttaaatctggtcccatcccccctgcttgccagccttaggagcagctgtcaggagagatcagcatcaggcctgagaggcagctcctccccattcaccagagagaccaggccaggcatgtaggcaaagccttggctggcagtgcccacaagtccaggcatctaacaggta

SEQ ID NO: 6941 - DNA, 895 bp, Cricetulus griseus
tccccaaagatggagatcccagcgacccactatgcagcctccagggctgcctcggtggcagagaactgcatcaactatcagcaggggacccccacaaggtgttccaagtgcagacggtccagcaggccagcaaggaggatattccgggaagaggacacaagtatcaccttaaattttctgtggaagaaattatccaaaaacaagttacagtgaactgcacagccgaagttctttaccctcaaatgggacaagggactgcaccagaggtcaacttcacatttgaaggagaaattggcaagaacccagatgaagaagataacacattttatcaaagacttatgtctatgaaggaaccactacaagcacaaaacattccagacagtcatggaaatgtgtctccacaaatgaagccagttcgccacttagcctgggtggcctgcagttatataatgtggcagaattctactgaagatacgtggtataaaatggcacaaattcaaaccgtcaagcaagtgccaagaaatgatgacttcattgaattagactataccattctactccatgacattgcatcacaggagattattccctggcaaatgcaagttttgtggcatccacaatacggcacaaaagtaaagcacaatagccgtctcccgaaggaagcaggagcagagtaaacaaagaccctaagacccagatgaaatggaaacatgttcctaatgatgtggatgactgtcctcattggcatctagcctaataagccaagtaaatcccacagtgtctctttgtttgtcttggctacagctccaagctgcatagattccataataaagagtgttactacataaagatgtctttccaacagtaacagtactatgtatatcccctaataaaa

SEQ ID NO: 6942 - DNA, 895 bp, Cricetulus griseus
gggatggaagcggaggtgcaggtcgaagaggccgggctagccgagcccattgcgggagcaactgcagcagctaggcagcatccagtggcgtgccaggcggcccagaccgttgctttacttttgctgcaccaacgtagtcattatgccgaagagaaagtctccagagaatacagagggcaaagatggaaccaaactaaccaaacaggagcccacacgacggtcagcccgattgtcagcgaaacctgttccgccaaaacccgagcctaaaccaagaaaaacatctgctaagaaagaacctggaacaaagattagcagaggtgctaaagggaagaaggaagagaagcaggaagctggaaaggaaggtactgccccatctgcaaatggtgacactaaagctgaagaggcacagagaactgagtctatagataatgagggagaatgaattgtcgtggaaaactggggttgatttcacgtacctcttgggacaacttttaaaagctatttttaccacgtattttgtaaatgctaattttttaggactcttattagttggcataaaatatatataaagatggacattttatcctcttatggtgatgtttttggaaatttccatcatccttaagtaaataaataccaatttaatatcggaagctgcgtgtaaaatggattcagcattccatgcccttgctttaaaagtttagtcctgtgcatactgtggtgtttttactgtgcatatttgaatttttcatgcaatttttctagagcaataatcagtggtgcttttgtgcctaggttttatgtgattttaatgaaatatggatagttgtggccacctgctatttgtggtttaaaataaaacagttttcatgtctgcaaaataaaaaaaaaaaaa

SEQ ID NO: 6943 - DNA, 895 bp, Cricetulus griseus
  modified_base (865)..(865): a, c, t, g, unknown or other
ccaacaccaaagaattcatactggagagaaaccccactctagagagaaccatacaatagtgaagaatgtggcaaaacattttgttatccttccatcctgaaggaacatcaagaattcattctggggtgaagccctacagctcgtgaaatatgtggcagtatgtttagaactcgctcagaactttactaaacaccaaaggattcatgctgaagtgaagctctacaattgtgaggaatgtggaaaagctttttctactcactcataccttatgcggcatagacttggtcattctggagagaaaccctacaagtgtgaagaatgtgggaaatcatatagctacccttcgctccttaaggaacatcaaagaattcattctcaaaatccctacaagtgtgatgtgtgtgggaaagtcttttgtactcgctcaggacgttctaaacaccagagaattcatactggagagaaaccttacaagtgtgaagaatgtggaaaaggcttttctactcattcataccttactctacacaaattactccatagtgaagagaaaccatacaaatgggaagaatgtggcgaggtattttatacttgctgaagacttactaaatatcagtaaattcacgctggagagaaactccacagatgtaaataatgtgtcaaaacattacttcaggctttttacaacaccaaaaaacttaattctgaagagaaaccttacctttattaatctttaaggtgtcattaaacacaaggtccttcctactatagagaaatcctacagatgtgaaggatgtggcaaaatgttttattgtacttcaaactttaagaaaacatacaaagggctcattctcaagagaatcccttnagtgtgaagtatgtgacaaggtagtgtgtg

SEQ ID NO: 6944 - DNA, 894 bp, Cricetulus griseus
atgccgcgctttgccctgaccgttatccgccatggcgaaacaagatttaataaggagaaaatcattcaagggcaaggagtagatgagcccctttccgagactgggtttcagcaagcagctgctgctggccgctttctgaacaacgtgaagtttacgcacgctttctccagtgatctcacgaggactaagcagaccatatctggcattttggagaaaagcaaattttgcaaagacatgatggtgaagtatgaccccagactgcgagaaaggaagtatggagttgtagaaggcaagccgctaagcgagatgcgggccatggccagagccgctggggaagagtgtcccctgttcactccaccgggaggagagacactagagcaggtgaaagtacgtgcaaaggatttctttgattgtatttgtcaactaatcgtggatgagacaggccagagagaaatcgtcttccccggggctccaggcagctgtctggagagctgtttggcggaggtattccctgtaggaaaccgtttgcagttgcatcctgatggtggcacccctggtttagcagccagcatcttagttgtgagccatggagcttacatgagaagcctctttggttaccttctgagtgacctcaaatgctcattgccagcaacactaggcaaattagaactctcgtcagtcactcccaatactgggattagtgtctttatcgtagactgtgaggaaggacgcgaaccagcacttcagtgtatttgtatgaacttccaggaacatctaaatggaatgatattattattattattattattattattttacccatattgtttgggacattatttatttgggaatgtatggatctatttaattgtaacaactattctattgaataaa

SEQ ID NO: 6945 - DNA, 894 bp, Cricetulus griseus
tccctccgctctagctgccgggagatggctcagcggcttctcttgaggaggttcctgacctcagccatccccaggaagccccctcagagtgggtggacttccctcacctctagagccctgcagacaccacagtacaatcctggtggtctgacaggaacattcggcccagcccgaacattatacacaaccagagtctgctcaacaacctttaatgtccaggatggacctgactttcaagacagagttgtcaacagtgaaacaccagttgttgtggattttcatgcacagtggtgtggtccctgtaagatcctaggcccgcggttagagaagatggtggccaagcaacacgggaaggtggtgatggccaaggtggacattgatgaccacacggaccttgccatcgagtacgaggtgtcagctgtgcctacagtgctggccatcaagaatggggatgtggtggacaagtttgtgggcatcaaggatgaggaccagctggaagccttcctgaagaagctgattggctgacaagcaggaaagagtcctggctgcccttgctttctggagcctctttggggaggagcctagtagaactctcagccctgagctattatccttcctgccctgctccctctgttttgtccctgtgggtcaaaaggaaaccagaggctgaacaagtgagagtaatgtatacttctctcattttttgtaggtctataataaagaactttatgtgaccttctacctcttgctatgaagaactgagcccaccctacaccttatagctgtccattctctcccttgtccccgccctgggttatctgggccttgattctggttccctgagcaggaggaggagctgtgaacaagtcagacaaataaaaccaggtttgcact

SEQ ID NO: 6946 - DNA, 894 bp, Cricetulus griseus
ggctcctagttctggagagttggcgagtgttataaccttttggtcctctccatcagttcagctttccccctaaaagcatggtttggttaccagtcttctcatttccttctagagcctgagaccaatgcttaagtttgggggacacagtcaccatccccctggtactgatgcttgctggattttcgggaaggcattttgctacccagtctcttttcactgcctggggatcagtcttttgtttttcattgtttgatgttcccatgttcccactgcatgctatgacttccctactcctcaaagaagagactcctttgcatgtctggagacagtagggggtggtaagctaaagggaagtggacaaaacagctcattaacggggtcttgcaaggggctctgtatgtacccagggtactggcccaaccccccaattctagccatagacaaactccaggccagacccctccaccctggttcagcctgggcagcttgggctgagccaccaggaccaatagatttaagctggcatttcagtccaagaaggcttctaagtggatttaggacctgagaggaaagaggggcctctgtgggtgctgggtactccagaggtgcccctggtggaagggtgggtcagtggtcctagcaggaagggagacccagcaaggccattcttgctgggttgagtcaaggagctagaacaagggaccaagtggctgtaaagtctcaagccaatgatggggcttctccactgggctcctgtagtcctcaagtccctggcctccaccttaccaggtgccacttctcagaaggccactgcccaggcccccaggccgccccttcgtggccagagactggttaaagccccccagtgcctccttgtgcatagaacttcctctg

SEQ ID NO: 6947 - DNA, 894 bp, Cricetulus griseus
cggcgagcgggcagcatggcgtcggttgcgctgagcgaggctgagaaggtctacatcgttcatggagtgcaggaagacctccgggtagatggccgtggctgtgaggactaccggtgcattgaggtagagaccgatgtagtgtccaacaccagtgggtccgccagagtcaagctgggtcacacggacatcttagtgggagtgaaagcagaaatggggaccccgaagctggagaaaccaagtgaaggctacctggagttctttgttgactgttcagccaatgccaccccagaatttgaagggcgaggaggtgatgaccttggcacagagatcgctaacaccctgtatcggatatttaacaacaagagcagcgtagacttgagctccctctgcatcagtcctcgggagcactgctgggttctctgtgtggatgtgctgctgctggaatgtggtgggaatttgtttgatgctatttccattgctgtgaaggctgctctcttcaacacaaggataccacgggttcgtgttctggaggatgaagagggggcaaaggacatcgagctgtctgacgatccttacgactgtatccgcttgagtgtagagaatgtgccctgcatcgtcaccctgtgcaagattggctgccggcatgtggtggatgccacacttcaggaggaggcctgctccttggccagcttgctagtgtcagtgaccagcaagggagttgtgacctgcatgaggaaggtggggaagggcagcctggatcctgagagcatctttgagatgatggagagcagcaagcgagtgggcaaagtgctacacatgtccttgcagagcgttctgcacaaggaagaaagcctggggcccaagaggccgaaggttgggttcctgggatgattt

SEQ ID NO: 6948 - DNA, 894 bp, Cricetulus griseus
cgggattgcggggcgcgagtcgcggcggggtagccggggcgctactggtgctgctgctggtgctgtcggtgcgcagcggtgacgcgtccaaggccagcgccgggctcgtcacctgcgggtcagtgctgaagctgctgaacacccaccacaaagtgcggctgcactcacacgacatcaaatacggatccggcagcggccaacagtcggtaaccggcgtggaggcgtccgacgatgccaatagttactggcggattcgtggcggctccgaggacgggtgcccgcgcgggctcccagtgcgttgtgggcaggcagtgcggctcacgcatgtgctcaccggcaagaacctgcacacgcaccacttcccgtcgccgctctccaacaaccaggaggtgagtgctttcggggaagatggcgagggtgacgacctggacctgtggacagtacgatgctctgggcaacactgggagcgcgaggccagcgtccgcttccagcatgtgggcacctctgtgttcctgtcggtcactggtgagcagtatggtaacccaattcgtggacagcatgaggtgcacggcatggctagcgccaatgctcacaacacatggaaggccatggaaggtatcttcatcaagcctggagcagatctctctacaagtcatgatgaactctgagaactggatgggtgaagggagggagggtggctgggtagggattctgtagggccactcttgtgtgagactttgtttgtagagtcctcaagtgcctttatgattaaaaaatgttggtttgtgtttatatttgctgtaaccccagggaagatctggaggtaccagccatgtctgtccatgttgccatctcacctgtctctaggtacctgttctaaactttttttttttt

SEQ ID NO: 6949 - DNA, 893 bp, Cricetulus griseus
ggaggcggagctggggtcgtacaacatggccggactggagctcctgtccgaccagggttaccggatagacggtcggcgcgcgggcgagctgcgcaagatccaagcgcgtatgggcgtgtttgcgcaggccgacggctcggcttatatcgagcagggcaacaccaaggcgttggcggtggtctacgggcctcacgagatccggggttccaggtctcgagccttgcctgaccgggctctagtgaactgtcagtatagttcagcaaccttcagcactggtgagcgcaagcgaaggcctcatggggaccgtaagtcttgtgagatggggctgcaactacgccagacctttgaggcagccatcctcacacagctgcacccacgctctcagattgacatctatgtgcaggtactgcaggcagatggtggaacctatgcagcatgtgtaaatgcagccacgctggcagtaatggatgctgggatacccatgcgggactttgtatgtgcatgctcagctggctttgtggatggcacagcactgtcggacctcagccatgtggaggaagcagctggaggtccccagctagccctggccctattgccagcctcaggccagattgcactgcttgagatggattcaaggctgcatgaagaccacttggagcaggttctagaggctgctgcccaagcagccagagatgtgcacactctagctggatcgtgtagtccggcagcatgtgcaggaggcctctatcttactgggggactgagtgccaaccacccatatccaaaataaaggcctgttcctctagacagggtttctctgtgtagctttggagcctatcctggcactcgctctggagactgactgcctctgcctcctgagtgctgggattaaa

SEQ ID NO: 6950 - DNA, 893 bp, Cricetulus griseus
caggtcagagctcatcttcgccttgataagaaaggtgaacctttgttggccagcattaagtaaggaggaaaagagttggaaagaagaaaagacaactaaagaaaatacgagtaaagtatggtttgcagaatacagactatgaagatgaaaaagcgttgaagaatccaaaatataaagacagagctggaaaacgcagggagcaggttggaagcgaagggactttccaaagagatgatgcccctgcatctgttcactctgaaattacagatagcaacaaaggccggaagatgttggagaagatgggttggagaaaaggagagggcctgggaaaggatggtggaggaatgaaaactccgatccagcttcagcttcgacggacacatgcgggcttggggacagggaaaccatcctcagttgatgatcttcactttctgcaaaataagagcaaaacaaattgggacaaagcacgagagaggtttgcagaaaacttcacagaaactaagcctctgaaagattttttttttaagttttgtagaaacggtgagtagtggagcataattttattatccttgaaataactgcagtaaattgaggaactgatgaccaggtgacatgttatagaaaattagtctcaaactgttttcttctgtgaagaatgttgatttgtactatatattcagcatttgcctttggtgttttcctagctgatgaaatatttgatatagataactgggtacatattggcatattcagtgtgctagcatttttagttttgataaacaccattgcaggcaatgggattgtgccagagaaatgtgacagctagtgtggattacggagccaaggcttcaaacacaagcatttcctggaaatgtcttcaaatgcaataaaaa

SEQ ID NO: 6951 - DNA, 893 bp, Cricetulus griseus
ttcccctccgggccccactgctctggcctccagtccccgagggagcagacaccgcgggggcccctgacttcctctgccagggaaccatcgagaggagagtcagctctggcttcaggagcagtgagcggcttctcctcctcaggggtgtcaggaggccaggctcagctgatggttcgggttttctttgggaatcagctcacggaagaaggggatggtggcaccttttcctccactcggtcgcacagatgtcaccgtcctggcgcctgtgtctcctcacctttgtcgccctgattctgctcagcagagggcagacaccagaaacggccacgtccagttctacagtgggcgggacttctgtgaatacgacagcagccaaaactgagttccagcaactgacagaaatggacaccaccaatccggtgacagatccagggacacacaagagcagcgaggaagggaccccggcactccctgggatccggtctccaagcccaaccgaagactactgggaaaggttcttcttccacgagccacaagactcgaaggagaacagccccttctactacgatgatttcactctccggaaacgggggctgctggtggccgctgtgctgttcatcaccgggatcatcatcctcaccagtgggaagtgtagacacttgtcccgaatgtgcctgaatcgccaaaggtgagtggcggccgacaccctgctggacatcccagctgggagcctccatagcacaccagctcaccacccttagcctcctccctcctacagagcctacagagtggtcaacacaaaaggactctccaaggaagaagcctctggaggaggccaggcctaaggctggtggcctccccaccctgagggtgcctggttccccaggcactgc

SEQ ID NO: 6952 - DNA, 892 bp, Cricetulus griseus
  modified_base (169)..(169): a, c, t, g, unknown or other
atgatagagcaagaagagaatggcttgtttgaaataccagattatgaacatgtagaagatgaaactttcctcccttccacctccagcctctcctgagagagatcctgcagaagctgaacctgatgaagagattaacttctgagagagggcttccagctttaaggcatgngtttgataagacaaaattcaaggggaaaggtcatgaggctgaagacttgaaaacgctaatcagacacatggagcactgggcacataggctattccccaaactgcaatttgaagattttattgacagagttgaaaacctaggaaataaaaaggaggttcagacctgtttaaaacgaattcgacttgatctccctatcatacatgaagattttgttagcaataatgatgaagttgaagaaactaataccctcgatgcaactgctgctggatttgatccctttttgacaagctcatctgacagcaagaagttggcgtctgaatcaagtagaagcctaacagaagaacagcaacagagaattgagagaaataaacagctggccttggaaagaaggcaggcaaagctactgagtaatagccagtccctagaaaatgatgtgacagtagaagagagcagtactggtgaggatcaagaagagccaagtggattaaacacagacactgcagatggcccacatgatgttccttctgccaatacaaatgaagaggaacagttcaaagcagaggaaaaacaagctggaccatactaacacagactaatccagaaatattccaaatagccagatttctacaatagaatcctgcaagtttggggttatttgtaaatctttctactttgtataagtctgagtcataagacttcatgtggattcctgcttaaaataca

SEQ ID NO: 6953 - DNA, 892 bp, Cricetulus griseus
cagagcccgggaacctggccggcgtgcgaaatatcatccttgtcctctctggaaaggggggcgttgggaaaagtaccatctccaacggagttggccctggcgctgcgccgaccagggcaaggaaaggtggggagtcttagatgtagacctatgcggtcccagcatcccacgcatgctccgtgcacaaggcaaggcagtgcaccagtgtgaccagggctgggtgcctgtctttgtggatcaggagaagaccatctccctcatgtctgtgggcttcctgctggaaaacccggatgaggcagtggtgtggagaggtcccaagaaacatgcactgataaagcagtttgtgtctgacgtggcctggggggagctggactatctggttgtggacacaccaccagggacttctgatgagcacatggccactgtggaagccctgcgcccctataggcccctgggagccctcgtggtcaccacaccacaggcagtgtctgttggggatgtgaggcgggagctgactttctgtaggaagactggactgcaggtcataggggtcatagagaacatgagcggcttcgcctgcccacactgcgctgagtgcaccaatgtcttctccaggggcggtggagaggaactggcccagctggcaggagtcccctttttaggctctgttccgctagatccccagcttaccaggagcctggaggagggctgtgacttcatccaggagtttcccaagagcactgcgtattctgcactcatttccatagcccagaaagttctgcacaggatgcctgctctgctctcctgacagagagcctccaggtgctgtgtgctctgttacagcctataggaactctgggagcagaggtcctcaggactgtagtgggacctg

SEQ ID NO: 6954 - DNA, 892 bp, Cricetulus griseus
  modified_base (320)..(320): a, c, t, g, unknown or other
tgtctacaaccgcagctctgggcacgtgtccaatgctcctggtgtacagatccgtgttcctggctttggcaagacctactctgttgagtacttagatgacaacaagctagcaggttacatgcacacactggtacagaatctggttaacaatgggtatgtgcgggatgagacagtgcgggccgcaccctatgactggcgtctggaacccagccagcaggatgaatactaccggaagctggcaggactggtagaggagatgtatgctgcttatgggaagcctgtcttccttattggggcacagccttggctgcctacatgtnctctacttcttactgcgtcagcctcagtcctggtaaggaccgcttcattgattggtttatctctcttggggctccgttggggtggctctatcaagcccatgctggtcatggcctcccacgacctccccctggatgtttccagcccgccaagtatggcctgaagaccatgtattcatttccacaccaaacttcaattacacaggccaagacttcaaacgtttttttgaggatcttcattttgaagacggatggtacatgtggctacagtcacgtgacctgctggcaggcctcccagcacctggtgtagaagtatactgtctgtatggtgtgggtctgcccacacctcacacatacatctatgaccacagctttccctacaaagacccagtggctgcactctatgaggatggtgatgacactgtagccacacgcagcactgagctctgtggccggtggcatggccgccaatcacagcctgtacacctgatgcccatgaatgggacagaacatctcaacatggtcttcagcaataagacattggaacatatcaatgccattctctcaggtgccta

SEQ ID NO: 6955 - DNA, 891 bp, Cricetulus griseus
ttccatgttcagaatttaggtacatccatattggcttacctttggcaccaatgtattatttggtttataattttcttcatccaacctcacaaagaggaacggtttcttttcccagtatatccacttatatgtctctgtggcgctgttgctctttctgcacttcagaaatgttatcactttgtatttcaacgatatcgcctggagcattacactgtgacatccagctggctggcattaggaacagtcttcctgtttgggctcttgtcattctctcgctctgtggctctgttcagaggatatcatgggccccttgatttgtatccagaattttaccgaattgccacagacccaaccatccacactgtcccagaaggcaggcctgtgaatgtttgtgtgggaaaagaatggtatcgattccccagtagcttccttctgcctgataactggcaacttcaattcattccatcagagttcagaggtcagctaccaaagccttttgcagagggaccacttgccactcggattgttcctgctcacatgaatgaccagaaccaagaggagccttccagatatattgacatcagtaaatgccattacttagtggatttggataccatgagagaaacacctcgggagccaaactattcatccaacagagaagaatggatcagcctggcccacagaccattcctggatgcatcaaggtcttcaaagctgcttcgggcattctatgtccccttcctgtcggatcagtatacggtatatgtgaactacaccatcctgaagccccggaaagcaaagcaaagcaggaagaaaagtggaggttagcaacaccccgtggctccaattgacagccatcatgttaattagtggttctgctgagctgacttc

SEQ ID NO: 6956 - DNA, 891 bp, Cricetulus griseus
ggtggcggcgcgatgctgcagctgcgggacacggtggactcggcgggcacgagccccacggcgctgctggcggccggcgaggatgcgggcgcggcccggccgggggcggggacgccgctgcgccagacgctgtggccgctgagcgtccacgaccctacgcgccgcgcccgcgtcaaggagtacttcgtgttccggcccggcaccatcgagcaggcggtggaggagatccgcgccgtcgtacggcccgtggaggacggcgacatccagggggtgtggctgctgaccgaggtggaccactggaacaacgagaaggagcggctggtgctcatcaccgaccagtcgctgctcatctgcaaatacgacttcatcagcctccagtgccagcaggtggtgagggtggcgctcagcgcggtggacaccatctcctgtggagaattccagtttcctcccaagtcgctcaacaagcgagaaggctttggggttcgcattcagtgggacaagcagagccgcccttctttcatcaacagatggaacccctggtccacaaacatgccctatgccaccttcattgaacacccgatggctggcatggatgagaagacagcatctctgtgccaattggaaagcttccagactctcctgatccaagctgtcaagaaagcccagaaggaaagcccactgccaggacaggcgaacagcgtgctggtgctggagcgcccactcctcatcgagacctacgtggggctgatgtccttcattaacaatgaagccaagctgggttactccatgaccaggggcaagataggcttctagacagctgtttcctcaagaaaaccaaggtggtagggactcggtgtgcaaccccatgctacccactgtggctggagagaa

SEQ ID NO: 6957 - DNA, 890 bp, Cricetulus griseus
aaagaagatatacacgaccccagctaccaggatgaggaggggcccccgcccaagctggagtacgtctggagaaacatcatcctcatggccctgctgcacttgggggccctgtatgggatcacactggttccgtcctgcaagatctacacctgcctcttcgggattatgtactatgtcatcagtgccttgggcatcaccgccggggcgcaccgcctgtggagccaccgaacttacaaggctcggctgcccctgagggtcttcctcatcattgccaacaccatggcttttcagaatgacgtgtatgaatgggcccgagaccaccgcgcgcaccacaaattctcagaaacacacgctgaccctcacaattcccgccgtggctttttcttctctcacgtgggctggctgcttgtgcgcaaacacccggctgtcaaagagaagggcggaaaactggacatgtctgacctaaaagccgagaagctggtcatgttccagaggaggtactacaagtccggtctcctattgatgtgtttcatcctgcccacactggtgccctggtattgctggggtgaaactttcctgaacagcttgtttgttagcaccttcttgcgatacactttggtgctcaatgccacctggctggtgaacagcgccgcccacctctatggatatcgtccgtacgacaagaacattgaatctcgagagaatatcctggtttccctaggtgcagtgggcgagggcttccacaactaccaccacgccttcccctatgactactcggccagtgagtaccgctggcacatcaacttcaccacgttcttcatcgactgcatggctgccctgggcctggcttatgaccggaagagagtgtctaaggctgctgtctttggcca

SEQ ID NO: 6958 - DNA, 890 bp, Cricetulus griseus
tgtcggcccagtgcgcaggcgcgggaaagttgaatttaccaagaaaagtttgatgaaattgagtgaaaccgtgggagccggcgccggcgcgactagagcagagccccaaaccaggtgcctccatggccggctctgaagatctggggctccgagaggacacacttagggttttggctgccttccttaggcgcggtgaagctgctgggtcccctgttccaactccacccaggaaccctgcccaagaggagccaacagatttcctgagccgcctccgaagatgtcttccttgtccccttgggagaggagcccctcccctggagtcctctcggccctgcttccttcccctacgcccctgctatggctcccagcctggcccagcttcttcagacttctatgccctggttgcccagcgtctagaacagttggtccaagagcaactgagatctccgcccagcccagagttccagggtcccccatccacagaaaaggaagccctgctaaggaggctggtggccttgctggaggaggaggcagaagtcatcaaccaaaagctagcctctgacccggctctgcaccgtagactggctcgactgtctgcaggctcttttgcccgccttgtggaactattctccagtcgggaagtcagctcctccccaaactgtgccagcccctcgctgccatgcccagcacccccaccgccatccccggaaccactggcccgcctggccctggccatggagctaagccggcgtgtggcggggctggggggtaccctggctggcctcagcgtggagcatgtacacagctttgcgccttggatccaggcccatgggggctgggcaggcatcctggccatgtcacctgtggacttgaacttacccttggactga

SEQ ID NO: 6959 - DNA, 890 bp, Cricetulus griseus
ttcaagtacatcatcatcggagacacaggtgtgggaagtcatgtctcctcctgcagttcaccgataagcggttccagcctgtgcacgacctcacaataggtgtggagtttggagcccgtatggtcaacattgacggaaaacaaatcaaactgcaaatctgggatacggctgggcaagagtccttccgttctatcacccgttcctactacaggggagcagctggagcactgctggtgtacgacatcacaagacgtgaaaccttcaaccacctgacctcatggttagaggatgcccgccagcactcgagctcaaacatggttataatgctgattggaaataagagtgatctagaatcccgaagggatgtgaaaagagaggaaggagaggcctttgctcgggagcatggccttatattcatggaaacatcagccaagacagcctgcaatgttgaagaggccttcattaacacagccaaagaaatatataggaagatccagcagggcttatttgatgtccataatgaggctaatggcatcaagattgggccccaacagtcaatttcaacatcagcgggaccaaattcatctcagcggaactcttgtgatgtagggcctgactctggctgctgctgaacatctggcctgactgactcaaaaagccaaaaaagtagtaagagagaaggaaaaaaaatacatacatctgttcctcacctaatttttagtagctagagtgaaggatgttctgattgaacatttaggactatgaatctgtataacttaggtgatatccctgtacatagtaatttcattgaactttatttccttgccttggaaacctgcttgtcatttcataggagttcctatagaagctgggcacctctgtactgtctc

SEQ ID NO: 6960 - DNA, 890 bp, Cricetulus griseus
gattatgtgaccccaccccagggcacctctgtctttgtcattatcaccaagatgatcgttactgaaaatcaaatgcaaggattctgcccagagaatgaggagaagtaccgctgtgtgtctgacagccagtgtgggcctgagcgcttcccgggtggggggatcctcactggccgctgtgtgaactacagctctgtcctccggacctgtgagatccagggctggtgcccccaccgaagtggatacccgtggagatgcctgtcatgatggaagctgagaacttcactattttcatcaagaacagcatccgtttccctctcttcaattttgagaagggaaacctcctgcccaacttgacagccaaggacataaagacatgccgtttccaccctggtgaatgagactacactgaagggcactgcctctaccaacccagtgttccccagtgaccaggccactgtggagaaacagtccacggactccggcgcctactccatcggccactagggcctcttcccagggtcccatgctcacccttaggctgcagagcctccaatgggccgctctgtctgggcaaatgggggtgggatgggggggggagagggaactctcatttctgctgctcacctgaaagaccacaggcaggtatctaggccctcactgttcagcagacaggtaatacttcccactaagatctgaatcttgcttttccccttgcatgcctcccatctgcttcccagggtcctggggcagcagtatccgtccctttgcaaaggatagagaaaatgttgctagggtaacacccatagaggcctaacaagtaccaggcacttccatacacattatctcattgagcccttaaaatatcctataagactctgggtcctaagagg

SEQ ID NO: 6961 - DNA, 890 bp, Cricetulus griseus
ccttcagtcgccaaccctagaagaggagaacgaatttcccgaggacctgcgcacagagcttatgcagacgttggggaattatgggacgattattctggtcaggatcaaccaagggcagatgctggtgaccttcgcagatagccactcggctctcagtgtgctagatgtggatggtatgaaggtgaaaggcagagccgtgaagatccgaccaaagaccaaggattggctgaaaggcttgagagaggagctcattcggaagcgggacagcatggcccctgtgtctcccaccgccaactcctgcttgttggaggagaacttcgacttcacgagtctagactatgagtcagaaggggatgttcttgaagacgatgaagactatttagtggacgagtttggccagcctgtggtctcagatggtgaacttggcggagatgactcttctgatatcatgagctcctcagcaccatccagcaaaatctcctgcactagctaaaaagaagcaacatccaacatacaaagccggtttagtggtgaagaagtcagcctcggatgcttccatctcctctggcactcacgggcagtattcaatcctgcagactgcaaaacttcttccaggagcacctcagcaaccacccaaggctagaactggaataagtaaaccctacaacgtcaagcagatcaaaaccaccaatgctcaggaggcagaagcagcgatccggtgtctcttggaagctagtggaggtatcccagaactggccccaggtgccatgcccctgagaggccaagggtcttctaagccagaggcctccctggaccctccagtcctcccccgccggcctgctcctagggttcctgccatcaaaaagccaacattgaggaggacaggaaag

SEQ ID NO: 6962 - DNA, 890 bp, Cricetulus griseus
cagagcagctgaagagggaggagacactaggaaaacattgtccacactgagatctttggtttctctaataattattgggagttaagaagatgcagacctaaactaaagaagctaaagaaacttctgatggaaaatacctatgaaggccctgacagtcataaagagggagatccaagccgctcaaaatatacaacggaagatttgcttgatcaaattcaggcaagtgaggaagaaataatggcccagttacaaaccctaaatgcctgtgagattggaggctattggaggattcttgaatttgattatgagatcaaacttctgaatcacgtgacccagcttgtggattctgaatcttggtcttttagtaaagtccccttgactgtatgcctgcaggaacttggacctttggagccagaggaaatgatcgaacattgtcttaaatgctatggaaagaaatatgtggaggaagataaagtttattttgaattggatgctgataagatatgcagagtgacggccgagatgctgttgcagaatgctgtgaagtttaatctagatgagtttcaggaagtgtggcagcagagtgtccccgagggaatgacaactcggcttgatcagctcaagggtttagcactggtggatagaagctcaagaccggaaatcatatttttgctcaaagtagatgatttgcccgagggaacacaggagcgattcaatagtctgttctctctaagagaaaagtggacggaagaagacatcgctccatatatccgggatttgtgtggcgagaagcaatctataggcacgttacttaccaaatattctcgttcttcaatgcaaaatggtgtgaaagtttataattcaagaagactcatttacttaaaagaatg

SEQ ID NO: 6963 - DNA, 890 bp, Cricetulus griseus
ctgctgctgctgctgctgctgctgctgctactgctgctactgctgctgctgctgctgcattcccagacagactatcatagatatcaatctgaagggtacccagaacctgttggaggcctgtgtccaggcttgtgtgccagccttcatctacaccagcacaattgaagttgcggggcccaactcctacaaggacatcgtcctaaatggcaatgaggaagagcaacatgaaactacatggtctcattcatacccatacagcaaaaagatggctgagaaggcagtgctggcagccaatggatccaccctgaaaaatggtgacactttccacacttgtgccttaaggcctatgtacatctatggggagaaaagtccattcatttctaacacaatgatcagagccctccaaaataatggtattctgggtattactggaaaattttccacagttaacccagtgtatgtgagtaatgtggcctgggcacacattctggctgccaggggcctacaagaccccaagaagtcaccaatcatccaagggcagttctactacatctcagatgacacccctcaccaaagctatgatgatttaaattatgccttgagcaagaaatggggcttccgccctaattccagttggaggcctcctctgcccctgctgtactggcttgccttcctgctggaaactgtgagcttcctgctgcgtccaatctacaattaccagcctccctttaaccgccatttggtcacactctcaaatagcgtgttcactttctcctacaagaaagctcagcgagatctgggctatgaaccccctgtcagcgtgggaggaagccaaggagaaaacttcagagtggagttgggtcacgtagtggagcagcacaaggggacac

SEQ ID NO: 6964 - DNA, 889 bp, Cricetulus griseus
ggccttcgctggttactggtcacaagtggactgacccggctcctccctcggcccgggacaagtttatcttgtgactgctgcccctgcattttccttcctagaccgcggagcttacttattcacgatgcgtttcctggccgccacggtcctactgctggcgctggtcgccgccacccaggccgagccccttcgctacaaggactgcggctctaaggttggactcataaaggaagtgaatgtgagcccatgtcccacccagccctgcgagctacacaaaggccagtcttacagtgtcaatgtcaccttcactagcagcactcagtcggagaacagctctgccacagtgtacggcatcctggcaggagtccctgtcttcttcccgattcctgagcctaatggttgtaagtctggaatcaaatgccccatccagaaagacaagacctacagctacctgaataaactaccagttaagagtgaatacccctccttaaagctggtggtgaaatgggagcttcaagatgacaaagagcaaaacctcttctgctgggagatcccggtggagatcaaaagctaaactctttgttggcctgtgtctgtgtggggaaagaggccatggctggagggaggggaaggaacagaagagaagtcagacctgaaattaaaccagtgccgaaagatgaacagaacttcaagactgctactttatgcctctcaacctccaaaaccgtatctgcgaccctgctcttgagagctagagtagtctccatggctgtttgctgttggattaaggtcatcggccccaccagacaggtcggcaggaggttgcttagggatgtcagataacttgacccaggactacggatccactgtgaaggatggctttctagag

SEQ ID NO: 6965 - DNA, 889 bp, Cricetulus griseus
cgccgcgtggttccaagcgacctttatcccctcgtgctcggctttctgcgtgataaccaactctcggaggtggccaacaagtttagcaaaagcgacaggcgccacgcagcaggatgccaatgcctcttccctgttggacatctatagcttctggctcaagtccaccaaagccccgaagcggaagttacagtcaaatggaccagtgaccaagaaggcaaagaaggagacttcctccagtgacagcagtgaggatagcagtgaggaagaggaaaagccccaggacttccggcaaagaaggctgctgtacctgctaagcgaaccagtttgcctcagcatactgggaaggcagtagccaaagcctcagagagcagcagtagtgaagaatccagtgatgaggaggaggaagaggacaacaaaaaaaaagcctgtccagcaaaaggcagttaagccccaagccaaggcagtcagagctcctcctaagaaagccgagagttctgaatctgagtctgactcaagctctgaggatgaagcaccacagaccacgaagctaaagacagctgcagcagccaaagctcagcctaaagccgcagctaaaccaggtacaccagctagagcacaacctaaagtagccaatggcaaagcagccagcagccctgccaaaccagctccagccaagaagaaagagagctcttcagacagctcagattctgatagttctgaggatgaagctcctgccaagccagtcagtacccccaagaatcctgtaagcaaggcagctgtcactcccaagccatctgctgctaagacagctgtaactcctaagcaaccagtaggcagtggccagaaacctcagaccagaaaggctgacagcagctccagcgaggaggag

SEQ ID NO: 6966 - DNA, 888 bp, Cricetulus griseus
ggtgagctttggaagaaggcgtttgcgtggcgaggccctgggtgtggggcccctgtgaatttcctcctgttccacgtttttcaggcgttagggcgtcctgctcgggaggcaccagcagcctcaagccggagaactcaacgcgctgcgcgcagacctcggctcccccgtcctgcttgcggtgccgcagatccgccccttgtcagtttagtgcaacctgcttgtgactctgccaccagagcacatcccacaggcaacactgtgtcgatgaagcaaaagaagaagaaaatcccgaacagggtctctgggacaaatggagacggaaagatctccgagaaacctgtcctagacgaagctccccccagtgctgaagcccaggcggagcaactggcgagggagctggcctggtgtgtggaacagctagagctgggactcaagacgcagaaacccaccccgaagcagaaagagcaggctgttggggcaatccgaaccttgcgcagtgaaaaaacccccctgccccggaagagacagctgatgcgatccttgtttggggactacagggctcaaatggatgccgaatggcaggaagccctgagggctctaaggactgctacccattcagcccgagtacagcttgtaggagagactgccagaaagaagagtggaagggtctgtaggcctcgtccaacaggaagaaccaaggccactgtggactttcctgatgaagaatttcggttcaatttcttttagattctcctacattctggactagtcatcctcctccagggtggtgtgaccatttgtcttgaatataggggtctttctatgaactcttttggcagaagtaggattgctttgtctaaggaaaaaaaaaaaaaaaaaaaaaaaaaa

SEQ ID NO: 6967 - DNA, 888 bp, Cricetulus griseus
gatgctctccacggctgctttcgggaaccccgagcgggagctgggcatggggcctcacggctccgccgtccctgtgcagatgcgtttctcgccgtatgccttcaacggaggtactgtattggcaattgctggagaagatttttccattgttgcttcagatacccggttgagtgaagggttttcaattcatacccgagacagccccaaatgttacaaactgacagacaaaacagtcattggctgcagtggttttcatggagattgtctcactctgacaaagattattgaagcaagattaaagatgtacaagcattccaataacaaggccatgacaaccggggcgattgctgcaatgctctctaccatcctgtactcacggcgtttcttcccttactatgtttacaatatcatcggtggacttgatgaagaaggaaagggagctgtgtatagctttgatccagtgggctcctaccagagagactccttcaaggctggaggctcggcaagtgccatgctacagcctctgcttgacaaccaggttggtttcaaaaatatgcagaatgtggagcatgttcccctgtctttggacagagccatgaggctggtgaaagatgtctttatttctgcagctgagagggacgtgtacactggcgatgccctcaggatctgcatcgtgaccaaagagggtatcagggaggagactgttcccctgcggaaagactgattgtgggccatacattagagctgtggcacaagtttgtttttattaaaaagaatataaagtactcattttcgtacagtgcttcttctctaagcataaaaaattgggaagaatttcttcctttgtgactgaagagatggttcatctgttaagaaagtatggctctt

SEQ ID NO: 6968 - DNA, 888 bp, Cricetulus griseus
aggagaagaatggctttgaagcagatttccagcaataggtgcttcggggggctccagaaagtttttgaacatgacagtgttgagctgaaatgtaaaatgagatttgctgtctacctaccaccacaagcagagagtggaaagtgtcctgcactctactggctgtctggtttaacttgcacagaacagaatttcatatccaagtctggctttcagcaagctgcctcagaacatggccttgtcgtcattgctccagataccagcccccgtggctgcaatattaaaggagaagatgacagctgggactttggcactggtgctgggttttacgtgaatgccactgaagatccctggaaaactaattacagaatgtattcttacgtaactgaggagcttccacaacttataaatgccaatttcccagtggacccacagaggatgtctatttttggtcactccatgggaggccacggagctctgatttgtgctttgaaaaatcctggaaaatacaaatccgtgtcagcatttgctccaatttgcaacccagtgctttgtccttggggcaaaaaagcttttagtggatatttgggaccagaccaaagtaaatggaaggcctacgatgcaacctctctcgtgacatcctattctggttcccagattgacatattgattgatcaaggaaaagatgacgagtttctttcaaatgggcagttactccctgataacttcatagctgcctgcacagaaaagaaaatccctgttgtttttaggctacaagagggttatgatcatagctactacttcattgcaaccttcatcactgaccacatcaggcatcatgcaaagtacctgaatgcatgaaaagctccagacagaagaatctcatcagga

SEQ ID NO: 6969 - DNA, 888 bp, Cricetulus griseus
ccctcttatcctcgtgagctctgccctcggatgtccgcccgcccggagcctgcatgcgccgtggggcgccccgggaccaggagctggtgggtccgggggcccctcgggcgggggccccgccgctctccttcttcttcaggacccgtcgtcccggtgctcgtcttccccccggatctagtattcagggcggaccaaaggagcggaccccggcagctgctgaccctctacaaccccacggggactgcgcttcgcttccgagttctgtgcacagcacccgccaaatacacggtattcgatgcagagggctatgtgaagcctcagtcttgcattgacattgtgatacggcacgtggcccccatccccagccactatgatgtccaggaccgattccgaattgagctgtcagaggagggggctgagggacgtgtggttggacgaaaagacatcacctctgttcttcgggccccagcgtaccccgtggagcttcagggacattctgagccaacacccaacccaggacctccttcgtggacaggcccaaccccagccagacaccttcaggagaatgccccccagcagctggccaccagctccttcctgctcttcttgctgacaggcatcatctctgtggccttcctgctactgccactgcaggacgagcttggcagccagctgcctcaagtcctgcacgtgtccctgggacagaagctagtggcagcttacatcttaggcctcctaactatggtgttcctccggacctgagctctcagctgcacccaccccacccaccctccctcttcttcgaaggcagggacctgaggcagccactgtgatgtttgcaccttgcctcttctctctctttgctgcccatccgttgtcatcctgccc

SEQ ID NO: 6970 - DNA, 888 bp, Cricetulus griseus
  modified_base (351)..(351): a, c, t, g, unknown or other
  modified_base (838)..(838): a, c, t, g, unknown or other
aacccctggccaccatgtctgtggagcttgaggaggccctgccgccgacgagcgccgacgggaaggcccgcaagacggccaaggcgagcggcccggtgcgggcgcccgcgcagcccaagagaaggaagaaccgcaagaagaaccagccgggcaagtacagccagctggtggtggagaccatccgcaggctgggtgagcgcggcggctcctccttggcgcgcatctacgccgaggccaggaaggtggcgtggttcgaccagcagaacgggcgcacctacctcaaatactcgatccgggcgctggtgcagaacgatacgctgctgcaggtgaagggcaccggcgccaacggcnccttcaagctgaaccgcaagaaactggagggcggcgcggagcggcgcggagcctcggcggcctgcagccccgcgccaaggcgcgcacggcggcggacaggacgccggccaggccgcagcccgagcggcgtgcgcacaaggccaaggcgcggcggctgccggcgcgaaccctgcggtgtaccggttccgtacggttcggcctggcccaggtccccactccctgcccctttcccgcccctcccccagcgatgctgcgttctgtttgctttaggtttttgaaacggccctggcgacgcctccattggctctcacccttggcaacggccgtcgtcatggttaccggcccggcggcgccaatggcctggcggcgcctgcctgccatgcccgccgctggccaccccgcgctcctccggttgcgcggcgctttgctccgcccgccgccctcctggggcgcaataaacggttccaacctagaaaaaaaaaaaaanaaaaaaaaaaaaaaaaaaaaaaaaaaaaaaaaaaaaaaaaaaaaaaaaaa

SEQ ID NO: 6971 - DNA, 887 bp, Cricetulus griseus
cgccgaggggtgggaacggacctgtagcgtgaactcttcgtcatggacgctgccgaagtggagtttttggccgagaaggaactggtgaccattattccgaacttcagtctggacaagatctacctaattgggggggacctggggcccttcaaccccggcttacccgtggaagtgcccctttggctggccattaacctgaaacagagacagaagtgccgtctgctacctccagagtggatggatgtggagaaattggaacagattcgagatcaggagcggaaggaggagacattcaccccagtgcccagcccgcactacatggagatcaccaagctcttgctgaatcatgcttctgacaacattcccaaggcagacatcatccggacactgatcaaagatctgtgggacacacgcatggccaagctccgggtgtctgctgacagctttgtgcggcagcaggaggcacatgccaagctcgataacttgaccttgatggagatcaacaccagtggggccttcctcactcaggcactcaatcacatgtacaaactccgcacaaacctccagccctctgagagcacacagtctcaggaattctagccagaggcctgtgatgtgcaaacccttgctgtctgctgttcaggccagtttagttcagcgtcttcaagtctgactgtgaaagctgtattcagttgaaaactgggggtggtggtggtggtggtggtggtaatataaaatgattttcctcttaacatgatttaggaagattttattttgggatgtcaaattacagcaatatattcataaatacctaattactacattcaaacaaataatattacaatacaagttaattcaaacaaaaaaaaaaaaaaaaaaaaaaaaaa

SEQ ID NO: 6972 - DNA, 887 bp, Cricetulus griseus
  modified_base (61)..(61): a, c, t, g, unknown or other
  modified_base (848)..(848): a, c, t, g, unknown or other
gctggactaaggaggaagaggaaacgaggcagatgtacgatatgtggtaaagattatagangttttacgaagtcataatgaagcttgccaagaaaataaaagatttacaaccttatatgcctattccacatgttcgagattccttaatacagccccatgacaggaaaaagatgaagaaagtctgggatagagccgttgacttccttgctgctaatgaatctagagtgcgcacggaaacacgaagaataggaggtgcagattttctggtctggcggtggatccagccatctgcatcctgtgataagatattagtaataccttctaaactggcaccagttgtaatgagttcaaatttatgtgagcaataaagaagcaattggcagatactggaaaaatatttgtgaaaagctgtatttattataaataccggggctataacagtgctattgggagtatgtcattttcccagtctgtttatagctacgttttctgcttagtaaacatgatgcacactattctgtaagaaaaccctttgtgccttacctgtgtgcttctgtgggcaccatgtttatgaagaataaatgtttgttatcagaagagagttaatgttaaattctcaatttatgtctcagatgctaatgtgttaaaagtataaatatataatatataaagtaaccagtctttctgtattttatgtgcatcatagtgatttatttgagcttagtgaccccatcttgtaacctgttgcaagagtgaatgtaaaaaatagttgtggcattttaacaggtcacctttggatgcagatgcattcttttttcttgctttttaagatgtatttcatgtaaacnttgtactattttattattgtaatatatactattatgcag

SEQ ID NO: 6973 - DNA, 887 bp, Cricetulus griseus
cttgagaacaccccgccattggtctgtgggcacgactggaaagtgactacactagcttcctagagacaaagatcacaagctgttttgacagcatcttgcagctggagcagaggcgttgggaagccggcgaggacctggaagtgctgcaaggcctctaccacacgcccctgtccatagacgtgcacatgctcgtggctgagcacgtgaaggcggccggcgctatctcctcggagctggaggccaccaccctgcagatctgcacgcgcgcgctctgcctctttgtgcccaggtttgaaaaggcttttctggcgtcaaaggcggtgagcgagtgctacctgggtgcctaccttaacgcctgcgtggagatgaggcgtgaccatatattggccattctggcactgcgtagactcggccgcccgtaaggaaccagaatctgctgcaccacacccaagacttgctgagagcagcgcccgaggtcaggtgctccccacaccgtgtgctctttgaagagatcgtagtgcccacctcccgtggatgtgctcatcacctgcatctaggactgaatagcaagcaggagcctggtaggcggagggtctgtcaccctccccggtgactgaccccaggtcgggagcccagtgagtcattctggcccaacccccagctttgaagccaggagccatggaatttttggtctcagttgcttaactgctcagccagggggagccaagagtggaggcattccaggcatttgtgggggagtctgttgggaccgctgaggctccttgcaggtctgcgggcgggcgagagaggacttccctttctaactgcccagcataaccccactacagcgaggagataaatattctaaaaataaatgtgaattaaaa

SEQ ID NO: 6974 - DNA, 887 bp, Cricetulus griseus
cgaatgtgcgggctgcggacgctgctgggcttcgggttgctggttgcaggctcccgcctgccccggatcgcaggccggcagagtgtgtgccgcgcaaggcctgcctggtggggaacgcagctccggagcgcggagaccatggcgagcgcggcggtgaagtacctgagtcaggaggaggcgcgggccgtggacgaggagctatttaacgagtaccagttcagcgtggatcaactcatggagctggccgggctgagctgtgccacggccattgccaaggcttatcctcccacgtccatgtccaagagccccccgaccgtcttggtcatctgtggccccgggaataacggaggggacggcctggtctgtgcgcgacacctcaaactttttggctaccagccaactatctattaccccaaaagatctaacaagccactcttcactggactagtgactcagtgtcagaaaatggacattccttttcttaacgaaatgcctccagagcccatgatggttgatgagctgtatgagctggtggtggatgccatctttggcttcagcttcaagggtgatgtccgggagccattccacagcatcctgagcgtcctgagtggactcaccgtgcccattgctagcatcgacattccctcaggatgggatgtagagaagggaaaccctggaggaatccaaccagacttactcatctcactgacagcaccaaagaagtctgcagcccattttaccggccgatatcattaccttgggggtcgttttgtaccacctgctctagaaagaagtaccagctgaacctgccatcctaccctgacacagagtgtgtttaccgtctacagtaagggaggtgggtggcagttttcaataagacttggtac

SEQ ID NO: 6975 - DNA, 887 bp, Cricetulus griseus
gtgtaaacaagtcgaggcggctgcgaaccgggccgggggggacggcgcccatcaggagcgccccccactcccaggccaggccacctcgcggaccgggccctccccgctcccaggcgaggcactgggctccctctgctcgccgtgggccgctccccgcgtggggccactgcccttggcccccgccatggtgcggatttcaaagcccaagacgtttcaggcctacttggatgattgtcaccggaggtatagctgtgccccaactgccgtgcccgacttggccaaccacgacgacctcatctccaagtccttccagggcagtcaggggcgtgcctacctcttcaactctgtggtgaatgtgggctgcgggccagcagaggagcgggtgctgctgacaggtcttcatgctgtcgctgacatccactgcgagaactgcaagaccactttgggctggaaatatgagcaagcctttgagagcagccagaaatacaaaggaggggaagtacatcattgaactcaaccacatgatacaaagacaacggctgggactgaccttcatcctggcctggccgccagggggagccactggtttcgctcctcctgaagggagctctggaccctcagggtccccacaggggaaggatccagctcctgtacatatattttattgcatgcactgtgaccttggggggagttagggaggggaattgcacccccaacaccttcctgcgatctggctggcttggatctcattttttaacccctctgtcctgcctgtcccatagatatggcctgtgtgctgctctcatggccccggtgcactatctttctgtgaactctcccccactggatccctcctacctgcagcgtgtctgttctcgttctgtagc

SEQ ID NO: 6976 - DNA, 887 bp, Cricetulus griseus
tgtgggatggtggctatctcctggtatgctatcaacatcactactgacttcttcaacccgttgtatgttggaaccaagtacgagctgggtcccgcctctacttgggctggagcgcctccctgctctccattctgggtggtatctgtctcttttccacctgctgctgtgctgccaaggaggacccagccaccagggccaggcttccctataagccctctacagttgtgatacccagagccacctcagatgaaagcaacatcagctttggtaaatatggcaagaacgcctatgtttaggagctctggcctggtggacaccatttttttgtctcacagtccccagaccagtctccagttaataacctcaggacagaccatttccaggctccaccctgtgcctggaagccatgacctgctctggatataccttatctggcactccagcctctcccagggacagaagctggggggcaactcgcatggcctcctacagctggacccaaggggacagaggtgtctgcagcttgtgacaccatataaatacatgcttaaataaatgtatattgtgattgttcgggggcttcagggctcatgaggttgcagccaagtaaggggttcattgtcataccataggctgtcaagactgcccactttcgagctgcctcatccagtgaaataatgtgccaaggagctgggcaaagggctcagtgagtaagagtgtttgctacacaagcatgaagacatgagttcaaatccccagaacctatagtaaaaagtggtgcctgatcacactccggtaaccccagtgttggggaggctctctgaggcttactggcttccaacctagctccaggttcaatgtgagatgctgtctcaaaggaataaggt

SEQ ID NO: 6977 - DNA, 886 bp, Cricetulus griseus
actaccgcctgcccagtgtccgcctagaccgtcccctgctttgtgatgactgcttcttgtgaatcccctgttcggacctacgagcggttcactgtcacctacacgctgctcaacaacctccaagacttccttgctgtgaggcttgtgtggaccccggaacacgcacaggctggaaagcaactgtgtgaggaagaacgacgggctatgcaggcagccctagattccatcgtctgccacacacctctcaataacctcggcttctcccggaaaggcagtgcacttaccttcagtgtggccttccaggccctgaggacggggctctttgagctgagccagcacatgaaactgaagctccagttcactgccagtgtgtcccaccctccacctgaggcccggcccctgtctcgcaagagtagccccagcagccctgctgtccgggacctggtggagaggcaccaggccagcctaggccgctctcagtccttctcccaccaacagccttcccgtagccacctcatgaggtctggcagtgtgatggaacgcagggccatcacaccccctgtggcctcccctgtgggtcgtcccctctacttgcccccggacaaggctgtgctttctctagacaagattgccaagcgcgagtgtaaagtcctggtggtagaacccgtcaagtagcaccaatctgcttgctcagctctgtacactccagaaaccctaagcccccggagggctccttgttcctaggctgtgcctcccactgtaggcagagaggccatgcagggctgcctgtctgtgtctgctggtgagagatgagggcagaagctgtgaaagggctggccccaccccagcagggcaagggctgcaggcgcccccttgccccatcctt

SEQ ID NO: 6978 - DNA, 886 bp, Cricetulus griseus
  modified_base (877)..(877): a, c, t, g, unknown or other
ctgcgagcggccggcgtgctccgatctgtcggagctaaccgctgcttggcgggcctccgtggcccggcacacgccccagccgagcgaaaatggtgggccggaacagtgccatcgccgcgggcgtgtgcggtgccctcttcatcgggtactgcatctactttgaccgcaaaaggcggagtgaccccaacttcaagaacaggcttcgagaacgaagaaagaaacagaagcttgctaaggaaagagctgggctttccaagttacctgatttaaaagatgctgaagctgttcaaaagttcttccttgaagagatacagcttggggaagagttattagcacaaggtgaatatgagaagggtgtagaccacctgacaaatgcaattgctgtgtgtggacagcctcagcagctgctgcaagtgttgcagcagactcttccaccaccagtgttccagatgcttctgaccaagcttccaaccattagtcagagaattgtaagtgctcagagcttggctgaagatgatgtggaatgagccagatttcaacacgataaaatctcagttaaaaatgatttaaccattagcttggaagctgatcagctctgggggaataagggcaaatatgcttgtcatgaactgtcctacactgaagtctaccaaagtgaatgtgtactttgagtagatccattgtctcttctatttattttttccagtgaaaagtattttgatagaacttttcattttataaatatactgagttaaccaaaatatcatgtatttcgtttattcttaagacatgcagttcagatgtaaatacatctgagtatttacttagtgtgaaaactaagcattaaaatcttgcagataccgtttacttaaaaaanaaaaaaaaa

SEQ ID NO: 6979 - DNA, 886 bp, Cricetulus griseus
gcctcgctgagctgggttaggatggccgcaggtgggttccttctgcgtcgactccgagcgcccttccgctcccttgctctgaacgcgctcatggacgcgccacgcgccaggagcatgcacgacgggggcggcccccggagcctctccatcgaaggcaacatcgctgtgggcaaatccacctttgtgaagctactcacgaatactcacccagagtggcaggtggctacagaacctgtagcaacatggcagaatatccaagctgctggcacccaaaaagacggcacttccaaaggtcctggaaacttgctagaaatgatgtaccaagagccagctcgatggtcctacacattccagacgctttcctttatgagccgtctgaaagtgcagctggaacccctcccggggaaactcatacaggcagagaagtctgtgcgaatctttgagaggtctgtgtacagtgacaggtatatctttgcaaagaatctttttgaaaatggttccctcagtgatgtcgaatggcacatctatcaagactggcattcttttctcctgcaggagtttgcaaaccggctcttgatacatggcttcatctatctccaggcttctccccaggtttgtttggaaagactgtaccagagatcccgagcagaagagaaaggcattgagctggcctatcttgaacagctgcatggtcaacatgaggactggtttattaacaagactaccaagctccacttcgaagctctgcaacatgtgccagtgctggtgctgaatgtcagtgacgatttctctgaaaatgccgccaaacaggaagagctcatgagacaggtaaacactttcataaggagcctgtaagcagtaattagacatcttggctatggtctgg

SEQ ID NO: 6980 - DNA, 886 bp, Cricetulus griseus
  modified_base (16)..(16): a, c, t, g, unknown or other
  modified_base (804)..(804): a, c, t, g, unknown or other
  modified_base (851)..(851): a, c, t, g, unknown or other
tacttggctggtggcnctttgactgatgtggtcacagagacctgtatggatgaaggacagatagcagctgtctgtagagagtgcctccaagctttggatttcttgcactcaaaccaagtgatccatagagacataaagagtgacaatattctcctcgggatggatggttctgttaaattgactgattttgggttctgtgctcaaatcactcctgagcaaagtaaacgaagcactatggtgggaactccctattggatggcacctgaggtggtaactcgaaaagcttatggtccaaaagttgatatctggtctctgggaatcatggccattgaaatggtggaaggtgaaccccgtaccttaatgaaaatccactcagagactgtcagctgtattccgtgacttcttaaatcgctctctccagcctcactcctctgattatcgctgcaaaagaagcaattaagaacagtagccgttagaactgcgagccttacccctcaccgtatccctgatgagtaagactgaaataaaactctgcttcaggaaacatggaagaaaagacagtcaaatggggtggggttctttacctttaaagtgaatagaaacttcttataagccttttttcctactccctcagactatgtaatttatttgtaagcctgaaccgcagcccacccagggcagcaatgttgaagtggccgtaaagtggtcacttccaccgtgaagcgaaagagccagtagtgaatcccctcattttgtgcatttactttgaagaaaaagattttctcaaaagatgcacactccctnttcatagtgttgtgtttgttttaagttagaagtagtcctcttgtttntttaaaaaaattaaaaaaaaaaaaaaaaaaaaaaa

SEQ ID NO: 6981 - DNA, 885 bp, Cricetulus griseus
agcctggaccaggctgggcaatctgggctgctgtccccaaggcttcagtcccagtccgagggccacagaggaagcttctgggaagcctgctgcaggaaaacctggaagtctttggctacctgcggttcctgtcagctctggctggcctcctctacgcctcagccattgtggcccatgaccgacagcctgagtacctcctccaggccacaccctggttcctgatttccctgggcagagcctcgctggaccttgctatcatctttctgtcctgtgtggtcaagagcaagatgagacaagccttcggatttgctgccaaagccagagagggccccgacacgcaagcccttttgacgtgcacagagaaagaagacagtcaggaagccaggactgaagaccagaactcagattgggtgcctctcaccagcctgtcgcactgcaagccgctgaggacaatgacagccgtcagtcgctacatggagctgaccgttgagcctgtacagcaggcaggctgtagtgccaccaggctacccggtgatggacagacgagtaccggagatgcctccctacaggagcccccatcataccctcccattcaggtcatccaggccagagtgtcttccggcagctcctctgaggtctcctccatcaactccgacctggagtgggaccccgaagatgtcaacctggaaaggaacaagaacaacgtggagagcctgagatcacagatgcacaagggctctttgagcccggtggacttgacctcagacaactgacatcactaggagacaagccatcagctcagaactcaagctcaagcatctgccagtgaccagatgggaaccaacctacagtgccacccacagcagaaatggaagctgctgcaga

SEQ ID NO: 6982 - DNA, 885 bp, Cricetulus griseus
ataaaagctgagcccatctcttgcttcagggatacactggtattggcagcatgaagctgagtttcagtggcctgagggccctggtgacaggggcggggaaagggattgggcgtgacactgtgaaagccctgcatgcctcaggagccaaagtggtggccgtgacacgcaccaatgcagacctggtcagcctcgccaaagagtgtccggggatagagcctgtgtgcgtggacctgggtgactgggaggccaccgagaaggcactgcgcaatattggccccgtggacctgctggtgaacaatgcaggggtggccctggtgcagcctttcatagagtctaccaaggaggtgtttgacaggtccttcaatgtgaatgtgcgctctgtgttgcaagtgtcccaggtggtagccaagggcatgattagccgtggagtggcaggatccattgtcaatatctccagcatggtggcctatgtcacctttcctggcctgaccacatacagctccacaaaaggtgcactaaccatgctgaccaaagccatggccatggaactggggccacacaagatccgggtgaactctgtaaaccctactgtggtgctgactgacatgggcaagaaagtctctgcagacccgaactttgccaagaagctcaaggagcgccacccactgaggaagtttgcagaggtggaggacgttgtcaacagcatccttttcctgctcagcgacagcagcgcctcgaccactggctccagcatcctggtggacgctggttacctggcctcctagaccgccagacgcagtggacccctggaggcctccctggccccaccctcgagccaaacttcctctgacctcatgacttgctccctatgccacagccccgccc

SEQ ID NO: 6983 - DNA, 885 bp, Cricetulus griseus
taccgcaccagcaccaacatgcacagcgctcgccttgacagcttcctgagccagctccgctgggaactgctgtgtggtcgggacacaggctcgcctccaatgtctggcccactgcaacccaaacccaaaagtgatccaagtgtacagccaaaccgccagttcagggcttcagatgctctggaagaggattctgtctgctgtgtggaagaggaggaggaagaggaagccttggtagctgaagacaagggtgtatctttgagacatcctagggagcatgccctagactgggactctggcttttcagaggtgtcaggcagtacatggcgagaggaggaactgtctgtaccccggcgccaagcatcctcagaacggccacctcatagccagcgtttctcagtcagtgacctccccctgcgtagcagggcaagctgtaactggcataccacctgcccaccgtcctcggcccaagtccactccagatgcttgcctggaacattggcagggattggaagcagaggactggacggcagcactgttgaacaggggccggagtcggcagcccctggtgctaggggataactgttttgctgatttagttcacaattggatggagctgcctgaggcagccagtgaggggagtgatggtggtgtaccccgagcccgtgctcgaccccctcagttcctgctaggcctctctgaacagctacggcgtcggctggccagggctcgtcgggcagctatggcaggaaagcggctgtcatgcccacctcgttcagagcctgacctgcctgcggacatctcacgatttgcagccctcatgaactgtcgcagcccgccaacccatcatctacagtgatgtcagccacctctgatcctgcccctcca

SEQ ID NO: 6984 - DNA, 885 bp, Cricetulus griseus
gagtgctgcgggaatctgacgctcgggctgcgggtactggagattgtgcagcgagcggctccgtcgccatgttcggctccagtcgcggcggcgtgcgtggcggacaggaccagttcaattgggaggatgtgaagaccgacaagcagagggagaactacctaggcaactcgctgatggcgccagtgggccgctggcagaagggccgcgacctcacctggtacgcgaaggaccgcgcgccgtgtgccggcccgagccgtgaggaagagctggcggctgtgcgcgaggcggaacgcgaggcgctgctggccgcactaggttacaagaacgtgagaaaacagcccaccggcctgagcaaagaggacttcgtagagatctgcaaacgggaaggaggcgatcctgaggacaaaggcgtggaccggctgctgggcctgggcagcgccagtggttccgcaggccgtgtggcactatcccgggaagacaaagaggctgccaagcttgggctgtcagtgttcacgcaccaccgcgtggacagcgaaggcccaagcaccaccccatctgctgccaggaagaagcctcgtgctgaggacaaggccgaactggatacagagagtcacaagaaaagcaagaaagaaaagaagaaaaagaggaagaaacacaagaaacacaagaagaagaaagacaaagaacacaagagggagactgacagctgcccatcctctccctctcctcggcccagacaccagagacatgattctgacttctccccctgctgtaagaggaagcggggacatagccaggacaatggaaggagtccaccccgaagacgacaagacagaggctctgatgactgagaatgtggctaaaccaaggacaccagagccttgg

SEQ ID NO: 6985 - DNA, 885 bp, Cricetulus griseus
ttaccgcccgggttccgacctctgctccccgcctgcccagatactgagcaatgctccttcaacagccctctgccttggtgttgccttctcaccgcccagtgcatacatccggggaccttaatgccaagtttgtgtcctggaagagttgcaccaagtacacagttaaaccaatgaagatgaggaagtctgggggtcgagaccatacaggccgtatccgagtacatggtattggtgggggccacaagaggaactatagaatgattgactttctgcggttccgaccagagaaagaaaccaagccagaaccctttgaggagaaggttgtcgttgtccgctatgatccatgtaggtctgcagacatagctctggttgctgggggcagccggaaacgttggatcattgccacagaaaacatgaaggcgggagatacaatcctgaattctaaccatataggcagaatggcagtggctgctcaggaagggaatgcacatcctcttggggcgctgcctgtggggaccctcatcaacaatgtggaaagtgagcctggccgaggagcccagtatatcagagctgcagggacatgtggcgtgctgcttcggaaggtgaatggaacagccattatccagctgccctctaagagacaaatgcaggtgctggagacatgcattgcaactgtaggccgagtctccaacgttgatcataaccaacgagtcatcggcaaggcaggacggaaccgctggctgggcaagaggcctaacagtgggctgtggcaacgcaagggaggctgggctggccgaaagattaggccactgccccccatgaagagttacgtgaagactccctctgctgctgctgcccaaagctgattcccctgactctaataaa

SEQ ID NO: 6986 - DNA, 885 bp, Cricetulus griseus
atgcggcggagttgggccttgaggcagcgcgtttccgaggctcggtcccccgggaagcggtggctggtggctggcctggggaaccatggaatgcctggcacacggcacagcgtgggcatggcagtgctcgggcaaatagcgcggcgactgggagtggcggagagctgggctcgtgatcctcgctgcgctgcggacctcgccctggccccgcttggggatgcccagctggtactgctccggccacgacgcctcatgaacgtcaacgggcgcagtgtggcccaagctgcaaagctgtttgggctgactgcggaggagatctatctggtgcacgatgaacttgacaagcccctgggaaagctgtctctgaagctggggggcagtgcaaggggccacaacggagtccgttcctgcatttgctgtctgaactccagtgcaatgccgaggctacgggtaggcatcgggcgccccacaaaccctagtatggtgcccgactatgtcctgggctacttctcccctgaggagcaggagctactgtccccattgttggatcaggccaccgacctgcttctggaccacatccgtgctcgaagccaggaaccaccatcgggcctatgactccagtggacatatctacttgtttgactgcctgccggtgccctgaagcccagacacagccacacaactgccatgacacattggtacccactgtttatttaacttctgggttgccccaggccacttgcagattgaaggagggactgtggccagaacagtctatttctgcggtggcttggtctccgtgcgctacttacggtatagaaaaggtttaggaaggctgaactttctgtaattttttgagtagcaccagatgggtagatctgcaag

SEQ ID NO: 6987 - DNA, 884 bp, Cricetulus griseus
  modified_base (728)..(728): a, c, t, g, unknown or other
  modified_base (732)..(732): a, c, t, g, unknown or other
gggatctggtggagtgaggcgcagcaagatggcgaccgagacggtggagctccacaagctgaagcttgctgaactaaagcaagaatgccttgctcgtggtttagagaccaagggaataaaacaggatcttatcaataggctccaggcatatcttgaagaacatgctgaagaggaagcaaatgaagaagatgtactgggagatgaaactgaggaagaagaaccaaagcctatagaacttcctgttaaagaggaagaacctcctgaaaaagctgttgatgtggcatcagaaaagaaggtggtaaaaattacatctggaatacctcaaactgagagaatgcagaagagggctgaacgattcaatgtacctgtaagcttggagagtaagaaggctgctcgggcagctaggtttggaatttcttctgttccaacaaaaggtctgtcatctgacaccaagcctatggttaacctggataaactaaaggaaagagcacagagatttggtttgaatgtctcttccatttctagaaagtctgaggatgatgagaagctagaaaaaaaggaaggagagatttgggattgtgacaagttcagcaggaactggaactacagaggatacagaggcaaagaaaaggaaaagagcagagcgttttgggattgcataatagaaaagttcaatgctttctgcttcatagtggtttccatttctcaaattcttcatggttttttanacanacacacacacacacacgtcatgtgcctcacagtgaggaagcgtgtaccttaggtgtgcatccttggattccagcagcagtttgatttaactgctactctgcatttaagttgttatatttttgtttttaattattttgcttattaataaaaaa

SEQ ID NO: 6988 - DNA, 884 bp, Cricetulus griseus
aaaaaggagaagccgaattctggaggtaccaagtctgactctgcatctgactcccaggagattaaaattcagcagtcttcaaaacacaacgccatctggcagcagatttcagccggagcagccatgggtggtgatactatggaaggtgaatggatagatttaagaatgtatcataagaatcccaccatccctattcagaagctacaggacatccagagagcaatggagctactgtctgcatgccaaggtccagccaggaacattgatgaggccacaaagcgcagataccagttctgggacacacagccagtgcccaaattgaatgaagtcattacatctcatggtgcaattgaaccagacaaggacaatatccgccaggaaccatattctttgccacaaggttttatgtgaaatcaactttctttgtgtccataagaaactgagatcaaaacgggtagccccagtgttaattcgagaaataactagaagagtgaacctagaaggaatctttcaggctgtgtatactgctggagtggttcttcctaagccagtggccacatgcaggtattggcaccgatccctaaatcccaggaaactggtagaagtgaaattttctcacttgagtagaaacatgaccttacagagaacgatgaagctttacagacttccggatgttacaaagacttcaggtttgagaccaatggaaccaaaagatatcaaagcagtccgagaactaatcaacagctacttgaagcagtttcatctagctccagtgatggatgaagaggaagtggcccactggttcctcccagggagcacatcattgacacatttgtggtggagagccccagtggaaagctgactgatttcctgagcttctacac

SEQ ID NO: 6989 - DNA, 884 bp, Cricetulus griseus
  modified_base (532)..(532): a, c, t, g, unknown or other
cgtggtttctccgcgggacgctggtgagggctgcggtgcggcgctacctgccctgggtgctggtggccgccatgctggcgggctctgtcctcaaggagctgtccccgctgcccgagtgctacctcagcaacaagcgcaacgtcctcaacgtgtactttgttaaagtggcctgggcctggacagtctgtctccttctgcctttcattgcccctcaccaactaccacctgacgggcaaggccggcctggtcctgcggcggttgagcaccctgctggtgggcacagccatctggtatttctgcacggccctcttctccaacattgagcactacacaggcagctgctaccagtccccagccctggagggcatcagacaggagcatcagagcaagcagcaatgccgaccgggaagggggcttcgtggcacggctttgacatctcaggccactccttcctgctgaccttctgtgcgctcgatgatcgtggaggagatggccgtgttggatgaggtgaaggacagatccgcggccaccncctccacactgccatcatggggaacacacttagtcctcagactccgctggtgatgccaccctgttgccagcaccaccattcctgtcagacactactcgtctctggcaagatgtgacctaagctgttcccagagggagagctaaggctcatcagagggacagtagacagcctcatggcatgggtcaaggggaaccagagctacaggactctctctgttgtgatctccctggctctggttctcttgagtagttttagtgaccacagtaaggctgtccttttaacagccaggctggcctcaaactcacagagatctgcctgcctctgcctcccgagtgccgggagcaaaggtgtg

SEQ ID NO: 6990 - DNA, 884 bp, Cricetulus griseus
atcactgacctggctggtcgaagctctgcagggaagaacccagctggggcgtacagctctgcttgactgtgcagttcccacgacaatatggaggcctggaggctggggctgtctacatctgcacagaggatgccttccccagcaagcggctgtggcagctcattgaacagcaacagcagctgcggacggatgttcctggggaggtgatccagaagatcagattcagcaaccacatcttcatcgagcatgcggccgacgtggacgccttgctggagtgtgtgagccaagagggttcccattctgctgtcaagggggatggcccgcctggtagtggttgactctgttgctgccccattccgttgtgagtatgatgctcaggccttggccaccagggccaagcacctgcagtctctgggagccgcgctccgcagactgagcagtaccttccggagccctgtgctgtgcatcaaccaggtgatggaaacggtggaggagcaagagtctatgcccaggccactgggggcctgggatgagcacctctctccagcccttggcatcacctgggccaaccagatcctgatgagactgatggttgaccgggcacatgaggacgatgcctccatgggcttacccagaagcccggcacggaccatacgggtgctctctgccccgcacctgcccctctcctcctgctgctacacggtcagtgcggaaggcatcagagggataccgggaaccgagtcctgctaacagtagctctggtggattagcctgaccaggtcccaagaactcctgactctgatacatacacacacacatgtacacacacacacgtacacacacacacacacacacacacacacacacacacacacacacacaca

SEQ ID NO: 6991 - DNA, 884 bp, Cricetulus griseus
tcgatctcggctcttcctgagacccggccctgacgatggcggagaaaactcaaaagagtgtgaagattgctcctggagccgttgtgtgtgtagaaagtgaaatcagaggagatgtaaccataggccctaggacagtgatccaccctaaagcacgaattattgcggaggccgggccaataattatcggtgaaggtaacctcatagaggagcaggccctcatcataaatgctcatccggataatatcattccagacaatgaagatccagaacccaaacctatgatcattggcaccaataatgtgtttgaagttggctgtcattcccaagccatgaaaatgggagataataatgtcattgaatcaaaagcatacgtaggcagaaatgtaatcttgaccagtggttgcatcatcggggcttgctgcaatctaaacacttttgaagttatccctgagaacacagtgatctatggtggagactgcctacgaagggtgcagaccgagcggccacagccccagacactacagctggatttcttgatgaaaatcttgcccaattaccaccacctaaagaagaccacaaagggaggctctaccccagttaagaactaagaagttgtcaaaatggtgaccatctatgctgacttttgaaagggcccagtgttttaacaatgtgttcactttgtgttggaagctttatggagagaggtgggtaacgtggtaactgcctttataatttatatggagtgtattgttttttgtccttgttgtggtaatttatagactcagtttttcttttcttgatacaaaatattagccatgcatttattatgtaaaagactatccatgatgacatgtcatagtgtgtgtttatattctaatgtaacc

SEQ ID NO: 6992 - DNA, 883 bp, Cricetulus griseus
  modified_base (567)..(567): a, c, t, g, unknown or other
tccccggcgtgatgccgtccccgttctcggtcaaagccttccccgtcagcatccccgcggtgatcatggagacagactggacagagccatggctcctaggacttgtcgtcttccacctgctgtgcctacttctcacatgcttctcatcacagaggtataaactacagatcggacacttcctgtgcctagtgttgttagtctattttgctgagtatatcaatgaagtggctgcaatgaattggagatcgttttcgaaatatcagtattttgattcccggggcatgttcatttctatcgtgttctcggcaccattgctgttcaacgccatgatcattgtgattatgtgggtacagaagactttgaatgtgatgtctgacctgaagacacagcttttcaaccgtttgctggtagacctcattatataactagagttcgctcaactttgcacgaggacactgagaaataaacagtgccaccctgctgtggcaccactacctgctcactcttctgtttctagcctgtagtggtcgctctcagggagtattgttctttatattgatgtcagcngtacccaggctgagggacctgtggggcaggtctgaaaagaatgcagtgtatcggttcccatgcagccaagcctctaaagaattgagttgggctatgccactgaaaatgttttgtttaaaaatattaagctagaatggatgctgtgaagtcaaggctccatggaaaatagtatgtcaaatgaaccgtttggttttgttttttctgggtacaaaattataaatacttgcatactcggtgaatgacttagctgtccctacaccgactgtgacaagtacagaccagttcctcctgagtgtcacatcttgtgcagctgggg

SEQ ID NO: 6993 - DNA, 883 bp, Cricetulus griseus
atgaagagtggcttagaaaagatccaggaggagctggagctccagcctccagcaatgctgtccatagagggcacagatgtggcaaatggcatgctgaatggccacaccccagtgcactccgagcccgctccgaatctcaggatgggagccggtgacagcactgggtgtcctctcccttgtcctcaacatcctgtgcgctgccctgaaccttgtccgtggagtccacctggcagaacactctttacaggttgcccaggaagaagttgggaacatcctggccttctttattccttctgtggcctgcattgtccagtcctcctaaatcgaatgatactgcaaaccactaggtcccgtcatggtagttttggtccttggcaggagtcttcaaggaaactctttacagtttaaattatttgcagtttcagtgtaactctggtcagttttccttggagtgtcagttcagggtaaattaaaagcttgaaaatatggttcataaatataagctaggtaaattttgtttacattttgataacttggattccatatacctttgggatatttaaatatattttggataaaaattgaagctcatttagaatgaaggcaaacgtatgctgaggagatgccaaggaaatccaagtttattagttgacagagacccttcatggtggctggactgtggatactgatgtggtttacatctgtttgcagggtctatctgaggatctctaaattaataaccgatatcactgggtcataagcacatcttattcttcctcctcttcttctttcttcttcctccttcttcctcctcctcttcttcctcttccctctgtacatcagggtggtctcaaactcacagaggtccacctgcctctgcctc

SEQ ID NO: 6994 - DNA, 882 bp, Cricetulus griseus
actttgagcatatcatggtggctcttgtgactgcaccagccctgtttgatgcaaagcaactaaagaagtctatgaagggcactgggacggacgaagatgccttgattgaaatcttaaccaccaggacaagcaggcagatgaaggagatcacgcaggcctattatacagcgtataagaagagtctgggagatgacattagttcggaaacatctggtgacttccggaaagtctctgctgactctggcagatggtagaagagatgaaagtctaaaagtggatgaacatctggccaaaaaagatgcacagatcctctataatgctggtgagaacaaatggggcacggatgaagacaaattcaccgaggtcctgtgtctgcggagcttccctcagctgagactaacatttgatgagtacagaaatattagccagaaggacattgaggacagcattaaaggagagttatctgggcactttgaagacctgctgctggctatagttcattgtacgaggaacacccagctttttttcactctcaacagaataatggtttccagatcagagactgacctcctggacatccggcatgagttcaagaagcattatggctactctctgcactcagccattcagtcagatacttctggagattacagactcgtgctcttgaagatctgtggaggagatgactgaagaagatgctctcaaaggctactgccctgacgacaggtctcggcaacagcaaaagctctgcttacagctttcctacagtgtcccaaagtgcagacaaatgcaagaccgcaacctgtctgcctgctaagaattgtcattgttcagtgcaagggcaaaagcaaacatgattttatagtagagcatctcattcat

SEQ ID NO: 6995 - DNA, 882 bp, Cricetulus griseus
aatgcctgtggaggagttcgtggctggctggatctctggagccgtgggtctggtcctggggcacccatttgacactataaaggtgcggttacagacccagaacacataccagggcattgtggactgcatactcaagacttaccaccatgagtcggtcctgggcttcttcaagggaatgagcttccccattgccagtgtagccctggtcaactccgtcctgttttggagtgtacagcaacaccctgctggcactcacagccacctcccaccaggaacgacgggcccagccacccagctacacaaacatcttcatagcaggttgtactgggggcctcctgcaggcctactgcctggctccttttgacctcatcaaagtccggctacaaaaccagacaagaagccaaggatgcagatagggagttctcaaccccggtaccgggggcctgtgcactgtgcagcctccatcttgagagaagaaggaccccagggactgttcagaggatcctgggccctggtgctgagggacacccctacgctgggaatgtactttgtcacctatgaagggctatgtcgccagtacacaccagaaggccaaaatcccagctctgccacagtactggtggcagggggctttgcaggcatagcctcctggatcacagccacgccttttgatgtgatcaagtcccggatgcagatggacgggctgaaggggagaaagtaccgggggatgctggactgtatggcaagcagcttccagcaggagggaatcggagtctttttcaagggcatgaccctcaatagtgcccgggcctttcctgttaatgctgctaccttccttagctatgaatatctgctgagcttgtggagatgagcctggccagg

SEQ ID NO: 6996 - DNA, 881 bp, Cricetulus griseus
gctgtcagagctggagagcggccggcgcgggagcagccatggagggtcagcgctggctgccgctggaggccaaccccgaggtcaccaaccagtttctcagacagttaggcctgcatcctgactggcagtttgttgacgtgtatggaatggagcctgaacttctcaacatggtaccacgaccagtgtgcgcagtgttactccttttccctattacagaaaagtatgaagtgttcaggacagaagaggaagaaaaaataaaatctcaaggacaagatgttacatcatcagtgtatttcattaagcaaaccatcagcaatgcctgtggaacaattggactgatccacgccattgcaaacaacagagagaagatgcactttgaatctggatcaacactgaaaaaattcctggaggagtctgtgtcaatgagccctgaagaaagagccaagtacttggagaactatgacgctattcgagttacgcatgagaccagtgcacatgaaggtcagactgaggcaccaagtatagatgaaaaagtagatcttcattttattgcgttagttcatgtagatgggcatctctatgaattagatggacggaaaccgttcaattaaccatgggaaaactagtgacgagacgttgttagaggatgccatagaagtttgcaagaagttcatggaacgtgaccccgatgagttaagatttaatgcaattgctctctcggcagcatagcttcttgacagaaacaccaaatactgtattattcgcaagaaaaaaaaaatctgctgccataactaactcaaaacttttgatattttcgttaacttgactgtttaaactttatgtgaataaactttgacattacctgacaaaaaaaaaaaaaa

SEQ ID NO: 6997 - DNA, 881 bp, Cricetulus griseus
ttcatgagccggtaccaggcagccctgctgggtctaggcctgctgctcatgtttctcctgtatgtggggctgcctggcccgcctgagcagacttcccagctctggagaggccccaatatcacagtcctggctggtctcacccgaggccactctcaaatcttttaccgtgaggtgctgcctctccagcaagcacacagggcagaagttgtgtttctccatggaaaggcatttaattcccacatatgggagcagctgggtacgctgcagctcctgtcaaagaggggctaccgggctgtggccattgaccttccaggttttgggaactcagcgccttcacaggaagcaagcacagaggcagggcgagcgaagctgctgaagcaggtgctgcgggacctagaggtgcagaatgctgtactggtgagcccctcactgagtggcagctatgccctgcccttcttgatgcgaagccaccaccagctacgtggatttgtgcccattgcacccacctccacacggaattacacgaaggaacaattctgggctgtgaagaccccaactcttatcatgtttggggaactggaccacaccttggcgcgagagtcacttcagcagctccaccacctgcccaaccactctgtggtgaagctatacaaggcgggacatgcctgctacctccacagtccagaagcctttcaccatgcccttcttgagttccttgaccatttgccttgaatcaactcacttcccagaactgaccctgaacggtctagaccctctctcctcttccagagaggccggccctgtgtgggattggggacagaggatcaagcccagccaggacctttgattccatttcacaggcacaataaagaaagcccttt

SEQ ID NO: 6998 - DNA, 881 bp, Cricetulus griseus
  modified_base (53)..(53): a, c, t, g, unknown or other
  modified_base (222)..(222): a, c, t, g, unknown or other
aagctcggcgcatcgcagcccacaacccgatgaggggcagctgcacagtttcngcagctacagcagtggccttggcagccagtgcagccttcagcctcccacccagaccatctccaatgcccctgtctccgagtacatgaaccaggccatactctttggtgggaacccgcgatacgagaatgtgccactcatcgggagaggttcccctccgcccacatactntcccagcatgagggccacctacatgtccgtggcggatgagcacctgagacactacgagttcccatcctagcaactttcagggtacctgcctcctcctgccagcttggttttcagctgatgcaggtccagctgtgtttctataacagaaactgaaaagttcctggactgggaaggtcctgtggctgcagagacacagctgggacacctgaccaaagccacaggttctggctaggagaaaataatgacccctgtcctgccagctgagggaccaggttaggctatttggtgcttccaacctcctgccaatccagagtacagaacacactgaagcccccatggccttgcacacctaagcagggcctgtgatagtgtatgacagggttgtttctatctcagaagcctcatcatcatcacactgacagctcccagccaaaccaccaggcgccggcctcactgtgtctcctataacccgtgaatactgtgagccatctttctgcatctgtgtgctgtgcaaatcttgggctgacctcaaggcactgcgttctaatgtccctctgcagcagctgaaggactttttaacgcatgtacattaaactaaaactcctctcggttctacaggagtcgggtgggcaaacttctgcttgatacatttcaccctc

SEQ ID NO: 6999 - DNA, 880 bp, Cricetulus griseus
gactcccgcaaagcgcgccggggaatcgtagttcgggaaggcaagccgggaagcgcggcgacatgtggccccgagtgctgcttggggaggcccgggtgactgcgagcggatacggtgctgtcttgtctcgcttcgccgtgcgtttcttcccgctatgggctgctgggagcagctcacccctacggaggagcctgcatggaactgctacgcgagctttcccgctcatccccatagtggtggaacagactggtagaggcgagcgtgcttatgacatatactcgaggctcctgagggaacgcatcgtgtgcgtcatgggcccgattgatgacagtgtcgccagcctggtcatcgctcagctgctgttcttacagtctgaaagcaacaagaaacccattcacatgtacatcaacagcccaggtggtgtggtgacttcgggcctggccatctacgacacaatgcagtatattctgaaccccatctgcacatggtgtgttggacaggctgccagcatgggctccttgctacttgccgctggcagcccaggcatgcgccattcactgcctaattccagaatcatgatccaccagccatctggaggtgccaggggccaagccacagacatcgccatccaggcagaggagatcatgaagctgaaaaagcagctatacaacatctatgccaaacacaccaagcagagcctgcaggtgattgagtcagccatggagagggatcgctacatgagccccatggaggcccaagaatttggcatcttggacaaggtcctggtccacccacctcaggatggggaggatgagccagaactggtacagaaggagactcccacagcatcctcagatcctcctgccccagcaaacaccta

SEQ ID NO: 7000 - DNA, 880 bp, Cricetulus griseus
gagccccctgcctggtgcccagccccctcaggaggcactgtcccttgtcttccgctttggtatgtctggatccttccagctggcacctgcagatgcactgccgccccatgcccatctacgtttttacacggccccacctgctccccggcttgccctttgcttcgtggacatccgccgctttggccactggggaccctggggggtgaatggcagccaggccgcggaccctgtgtcttgctggagtatgaacggttcagggacaatgtacttcggaacctatcagacaaagcctttgaccgacccatctgcgaagctttgttggatcagagattcttcaatggcattggcaactatctgcgggcagagatcttgtaccggctgaagatacccccttttgagaaggcccgtacagttctagaggccctgcaacagtaccggccgagcccagagctgaccctgagccagaagatcaaggccaaactgcagaacccagacctgctggaactgtgtcacttggtgccaaaggaagtggttgagctggggggcaaaggctatggaccagagcgtggagaggaggatttttgctgccttccgagcctggctgcggtgctatggcatgccaggcatgagttccctgcgagaccggcatggccgtaccatctggttccagggtgatccggggcccttggcacccaaagggggcagatcccggaagaggaagccacaggggacacagctagaggctgaagacagaaaagatgaccttccactttcaagcaagtccatttccaggactcggaggtccaggaaacaccctcctaagactatagctcaacagtctgaagggaccagcctccaacaaaaccaggaaactcctaca

SEQ ID NO: 7001 - DNA, 880 bp, Cricetulus griseus
agcgagccaagatggctgcgcccgcgctgcaggccgctcggcggtggtcggggctgggcccgcgcgtgaggctcgcggtctgcagccttccagggataacgcaggtgaggtggagccgctacgcccccgaattcagggatcccctggttgacaaggagcatcaccgcaagcctgtggcggaactcaccgaagaggacaaatatgaccaggagctcaggaaaacgcagctcttcaaagccgccgccgcgacccagacgagctccgtgtttgccgaccctgccatcagcaagtttaccaacatgatgatgaaaggaggcaacaaaatactggccagatccctcatggcccagaccctggaagccgtgaagaggaagcagtttgagaagtaccgagctgcctctgcagagcaacaggccaccattgaacggaacccctacaggatcttccaccaggccctgaaaaactgtgagcctgtcatcggcttggtgcctatcctcaaagggggccatttctaccaggtccctgtgcctctcactgaccgacggcgccgcttcctggctatgaagtggatgatcacagagtgccgggacaataagcctcggcggacgctgatgccggagaaactgtcagacgagctgctggaggcgtttcataacaggggtgccgtcatcaagaggaaacacaacatgcacaagatggcagaggccaaccgtgccctggcccactaccgctggtggtagcagaacagagagatggagaaagtccacgtcactgccacaagaaaccagagaggctgcagagatggctcagtagttaagagcactggctgctctttcagaggacctggctggattcccagcacccacatggaggctcactg

SEQ ID NO: 7002 - DNA, 880 bp, Cricetulus griseus
caagatggcgctggctgctgcgagtcgcgttctgctgcacgcggggtcccgcctcgggcgcagagaggtcgtggacggcgcgcggcgcttcgctaacaagcaggtgctggtggagacggaggacgcggcgggaatcgcagtgatgaagttcaagaacccgccagtgaactccctcagcttggagtttctgacagagtttgtcatcagcctggaaaagctagaaaatgagaagaccttccgtggtgtcatcctcacttcggacctcccgggtattttctcagctggcctggacttgagggagatgtatggcaggaacccagcccattacgctgagttctggaaggctgtgcaggagctgtggctgaggctctacatgtccaagctgatgttagtgtctgccatcaatggtgcctctcctgctggaggctgtctcatagctcttacctctgactacaggattatggctgacaaccccaagtacaccataggactcaatgaaagcctgcttggcattgttgcccccttctggttcaaagacacctttgtgaacaccattggacaccgagcagcagagcgtgcccttcagctggggatgctcttcccaccagcagaggccctcaaggtgggtgtggtggatgaggtggtgccggaggaccagatacacagcaaggctcgctcagtgatggcccagtggttggccattccagaccattctcggcagctgaccaagagcatgatgcgaaaggccactgcagacaacctgatcaagcagcgagaggcagacatccagaatttcgtcagcttcatctctcgagactccatccagaagtctctgcacgtgtacttggaaaagctcaagcaaaagaagggctaacctagg

SEQ ID NO: 7003 - DNA, 880 bp, Cricetulus griseus
gaagtcaagtttaagtaaaggctgctcaaataagaccacatcagtgagcaaacggagtatttctgtgagtggcggcagtggggctgctcagaattctggaactgtcagaggagcaagtgccccttccattgccacggttctcccacagcccgtgaggacagctgtgggcagaggagctgttgctgtgcaggacaaagcaggcttgcatcgaagcataaatacagatattttatctaaggaagcagatggtggaagaagtcaagattttctccaactttgatgatactggggaaaatagcttaggtgacatgttctcaccagtcagagatgatggtgtagtcaacaaaggaggtgatgagtctacaggcaaaggagatggccttgactttctatcacaactgatgagctcagtgttcccgtcgagaaaaaatccaaacaacttccggcactctggtcttgcactccagtcctcttaattatttatataggttcatcatgaaaagaatttacatgttggagcaggtggtcatgttcttctgcctgctgtgatccacagtttgataggatttggttaggagaactactcatccatttacattcttgttgcctcttgcccaaagatttcaactgtgtactttgtatataggtctgttgcccagttttgttttctggtataaaatgacttactaaaatgtagcttagctgtggtcttttctcgctggatatggcagcattatgacttgtaacaagtttccttatatgtcactcaaacaaggttagaatgcagaagtactttgtctatatgctatattttaatctattaatattttcctactccccttttctataggtgtatatattgttattaaaagggatctga

SEQ ID NO: 7004 - DNA, 879 bp, Cricetulus griseus
gtgactgctgaggtttacccaaagaactcaagtcttcgagcctatcatcaaaagatcgacaacaacctagatgagctgtccatgggattgggccgactcaaggacatagccttaggaatgcagacggaaattgaggagcaggatgacattcttgaccggctaacaaccaaagtggacaagttagatgtcaatataaaaagcacagaaaaaaaaagttcggcagctctaaagaaactgaaaaggaattctgctccattgtgatgaaaagattcaaagcctcttttaaactcctaagaaatgtcattgattgtacagtatgtaatttaacatatgtgttcaaatgtgggtcttaagaaattttagtttcaatgggaaaaaatgtgtgtgtacacatttgggtaagacctctgtgagttcaaggccagccaggactatatagcaagactctgtctcaactcaaacaatatagagacaaacccatatgttcttccactcgtaattgttttcagcttttctataaaaccttccaagatctgctggctgacaccagaccaatgaacatatccttgacatgtaagggctgcaaggcagactgaaacaaactgccttcagaaaggtgacatttggaacattagaccagctatatgctaagtgtgctactaaaataaatgcattccctaccttctaacacgtactgacttgtaacttagcagcactagagtgaccttgtgaattgtttttcctcattctgtaggagaggcctggagttcattcatgtaacaagtaaaaaaagatagtggtgcattttaattccctttctccttgtaaatgtgtgtaattttaagtgtacattgtgtcacttttagtaaaaaaaaaaaa

SEQ ID NO: 7005 - DNA, 879 bp, Cricetulus griseus
gaagaacaagaaaaagacattcaggagcctagatttgattattacagccatgaacttcctgatattgacctcagtgaatgtgaattcccacatgtcattgaaatttatgactttcctcgagaatttcgtacagaagaccttttgcggattttctgcagttaccaaaagaaaggatttgatattaaatgggtagatgacacacatgccctaggagtattctccagtccaatcacagctcgtgatgctctgggtattaagcataccatggtgaagatacggcccttgtcacaggccacaagagcagccaaggccaaagccagagcttgtgctgagtttctccagcctgcaaaggagcgacctgagacttcagcagccttagccagaaggttagttatcagtgcccttggggttcgaagcaaacagaacaaaactgaacgggaagcagagctcaagaaggacaggtcagagccaccagcacggccttttctgtctcacagctgccttcgtagttgtggaaagcagttctgtgctgaagaagtggcagtgctagtctctaagtgctgaggaggcaggaagtggagtcacactgtgctgccatctagggcagaagcctcttttcatgcccatgacaatgatggattattagctttgtctagaacatggtagaatggggctcttcatacagtccttaaatgatactggccttgggtctgagtcttggcctgtctctgttgctactccagtcttggaaccctgtcacagttctttagcattgtctcttcgttccaggtttcccagtgaccctatccagtgtataccaccattccatatgtgggaaaatacattgttttcttgatcctctatttctactcaagtctt

SEQ ID NO: 7006 - DNA, 879 bp, Cricetulus griseus
gtccggaattcccgcgagatagagcgtgaaagtgcgggttcttcgcttccgggtgggcgtgcggggtgagcgagctgctggccggcggcggggccgggacggggctatggagaagctgcggcgcgtcctgagcggccaggacgacgaggagcaaggcctgacggcgcaggtcctggacgcctcatcccttagtttcaacaccagattgaagtggttcatcatatgctttgttgctggtgttttctgttcaatccttggaactggtttgctgtggcttcccaatggcataaaactttttgcagtattttacacccttggaaaccttgcggcactggccagtacttgctttttaatgggacctgtgaagcaactgaagaaaatgtttgaaacaacaagattgcttgccacagttattatgcttttgtgcttcgtgtttaccctgtgtgctgctctgtggtggcggaagaaggggctggccttactcttctgcatattgcagttcctgtcgatgacctggtacagtctgtcctacatcccatatgcaagagatgcagtgctcaagtgctgctcatcgctcttcagctgaaagtttcgtctgctcaggagaggtgcttgggaaatcatcgccacttgtaaataatttctactcagtttttaatctttacagcttctgacatgtgaatatttaaggtgtaaacctgtgttgtaagatatatccagctcatttggctttttaaatggtctactatttttaaaagatttttaactttaaaaatgtgaaactttatatatactttaagcttaaaattacttacaacatgtaatacaaagtaatatatgtatctacagttttgaaataaacctgctcctggaaatgta

SEQ ID NO: 7007 - DNA, 879 bp, Cricetulus griseus
ccctgggttcaggccccagggcgacatgatcatctctgctactgcccctaaggtccacatgctgaggaaggccaagcagaagcccaggaaggctgtcaacatcagggatacccgagtggacaccttgcctgttcctgagagcagcccttaatggaaagaacagtcaagatgaaggatctcaaccacccagccttaggccctcagtgtctcttctcagcctggagtgggcacctaatgcccagaagagatcagaatagggccaggtggtacctggttgaggaatagtgtaaataacatctgttattgtggagtggctaaaactcccttagactcaacttatagcactttatatacatgctgtttgccagcctgcagccctccctgtggatgcagagcttctactctggctcctatataaaccaaggcagctctgatggtcaggccttgttggggcatcaggatcacagaatgagacaaagctgtcttttccatgcacccaagatttcattcacacctcagacccctgaggaatatagccaaaaacaagctgtctagccaagcctggtggtgcatgcctgtaattcatttctcctgcttctgccaaaagtgcatacaagcgcatcagatagccattggtgttctcagtatagatgttcctcgtgtttacatcattttctatgttcaaagaaattgtgatgttagtttttcacttttatttcaatctgtaggaactgtttgtaaattatggtcagtgtagcatgccctctgtatttaagtgagactgtccctttgtggagtgtgtcctgttcccataaaaaaaaaaaaaaaaaaaaaaaaaaaaaaaaaaaaaaaaaaaaaaaaaaaaaaaaaaaaaaaaaa

SEQ ID NO: 7008 - DNA, 879 bp, Cricetulus griseus
tgtgtggattcatctgtttaatatagggaaataacattttgtcaatactaggcaccataaaatgtaaacacaattactgtcataaacctggatataccttcaaggattaagagtggctttgttttagttaccctgtgtgcatatagtgcagaaaaaaggtcttaatattagcactatgtacatgagaagaggtccaaattacaagagacagcaaaaatttgaaattcttgaaacattaagttgtacagtaacatccaggtttatctcctttcactaaccacgttccctgttaagcacatcataacaacagcacagtgaagtgagtgatgactaaaagaatttgatacactagaaaacagtgttcagtgatacatttacattctatttatatgattaaacatttgatcatacagtaccttcctacaggattactggctaatttgggggtggggttttatactgttagaagtattactaacatgataactacttcccttatatgcaaacattagagctataattttgagaataaaaccgattatgcgagttaactgagcagcttctcaatgtggtttatgacatcatgggaaatatgagcaaagctgccctccacagaagatggtttctcaacctgctttcacatcaaatttaatcagcacagaccaacacggtcaatcaggtaattcttaatgtgaacaaaaggaggaaaagaaaatacatatgtacatgagtaaacaggaactagatgcctttttagcgaggaatgtcaggtgttggttctggatgcaactctgctgcagcttttcacttccacagttgtgtgctcagagtctgccccgatgagcttccagaccaccctgctgttgtgcttgggggctg

SEQ ID NO: 7009 - DNA, 879 bp, Cricetulus griseus
ggcggccaccatcctgtggtgaggtagcggattctctgcggctgtcggggagtcctttcgcgcctcctgcgggcccggtggctggcgcgtgaggaggcaccgctggccgagcttgcggcgaaggcggcgggatcggcggcgcggccaggggacgacgagggccccggggcgagcgagactcggcggggcgaaatgtgacaagcccccacccccaccgccttcctcctgagagcgcgaggatcgcggccaccccggggcggccaggccctggcgcaggcaccatgcaggtcactctgaagacccttcagcagcagaccttcaagatcgacatcgacccggaggagacggtaaaaggcactgaaagagaagattgaatctgaaaagggaagacgccttccagtagcgggtcagaagttaatctatgcaggacaaaatcctcagtgatgatactgctctgctagggtatagggcaggagtacatactgtgcatgtctgcttcaattagcagatgctgcagatccacagtgtaaaatactatacaaccaaacatccgcctttgcaggtctttattcttctaggcagtagataacatttcctgggtttcattcttctagtatactagatccagaaatttagtgtgatgccctgctttctctttctttgacttaacattggtttctgaaagaatctttgctacctagaatctacagtctgttttatggcaacactggataatggctttttgaaattggaaaaaaatggagcatctgtaaacagaaatgccaaactattgatggtcattgttgctgcttcacgtaaatatgaaattgatgcaaaaagaagcccattcttcatgttctgtacttggggtggggaggg

SEQ ID NO: 7010 - DNA, 877 bp, Cricetulus griseus
gcagtcatgttcattccctgcggggagtcgatccccgacctaacgaacttcacactcctgatgccagcagtatctgttggaaatgttggccagcttgcaatcgatcttattatttctacactggacatgtctaagattggttatttctataccgattgcctggtgccaatggttggaaacaatccttatgcaactgaagaagaagattctgaagaactcagtataaatactgaagtatatgcattaccatcaaagaagctagtggtgcttcagttaagatccattttcattaagtataaatccaagtcattctgtgaaaaattgctggcctgggtgaaaagtagctgctgtgccaggattattgttctttcaagcagccattcatatcagcgtaatgatatgcagcttcgaagtactcccttccggtacctgcttacaccttctatgcaaaagagtgttcaaaataaaataaagagccttaactggctagaaatggaaaaaagtccatgcattcctgaaatcagtgattctgaaatttgtattcgaattcctggaggtggaatcacaaaaacactctatgatgaaagctgttctaaagagatccaaatggcagttctgctaaagtttgtttcagaaggggacaacatcccagatgccatcagccttgttgagtatcttaatgaatggattcaaatactcaaaccatctagtgacagacatacatctgccttgccatggaagatccctagctcttggcagctcctctttggcagtggacttcctcctgcactgttttgatgggtttccagccttctccctcatcccaaagagatcacaaaatgaactatagaatgtatgctacacagaaatttgtgct

SEQ ID NO: 7011 - DNA, 877 bp, Cricetulus griseus
  modified_base (784)..(784): a, c, t, g, unknown or other
  modified_base (838)..(838): a, c, t, g, unknown or other
  modified_base (867)..(867): a, c, t, g, unknown or other
gttaatgaagtcaggatagctgctgccttgtggtggtactttgtgtcaaaaggagttgagtatttggatacagtgttttttatcctgaggaagaaaaacaaccaggtttctttccttcacgtgtaccatcactgcaccatgttcacactgtggtggattggaatcaagtggtggcagggggccaagcattttttggggcccagatgaattctttcatccatgtgatcatgtactcctactatggactgactgcattcggcccctggatccagaaatatctttggtggaagcgataccttaccatgctgcagctggttcagttccacgtcaccattgggcacacagccctgtctctctacactgactgccccttccccaagtggatgcactgggctctgatcgcctacgcaatcagcttcatattcctctttctcaacttctacactcggacatacaatgagcccaagcaatccaaaaccggctgacattttcttgtccagagatagagctgtggatacatttgaatttggattcacttactgacccttgtggtcaaatctctccacctctagtcggaatagtcccttttggctgtaattaaatttgaaaactctgctaatctctgtagaatcttagaggcttgatgattgatgatgatgatggtgttggtgaaaaataagaaagaataacagtaaaatcctgtcttgtgacccaaaggccaccatgacttaacggcgcaaatcactgtgggaaactattttttttttttatttttatttttgtnatgaggaggtagcctttgaatactcgtattattagcagaattaacttttttttntttttttatttttatttactttttttttntttttacaca

SEQ ID NO: 7012 - DNA, 877 bp, Cricetulus griseus
tccataaggtgagagcagggcagcccctcgagtcagacaatgtaaagcaagacatccgcatatttgtcaaggacattgccaagacagtgtcccctgagaaactactagagaaggcctttgccatccgcctattttcccgaaaggagatccagctcttgcaaatggccaatgagaaagcattaaagcagaagggcattactgtcaagcagaagaggcagttttttgttttttaagccactatttaggttgtagttttctatagaactacctccaatatagctaactcttcagcagctctcctcaggtttatgtggcaaagttattatgtcaagcatgagtgccaagcaggccttagagttctttcccgaagtatttacatcaggtcagaaggcttgtgaagtataaaaagataattttggtattaagattcttacctgggcctggtgtgtgtctaaaacaccagcacgtggaaggtagaggcagaaagccaggcgatggtcgcacacgcctttaatcccagcactcgggaggcagaggcagggggatccctgtgagttcgaggccagcctggtctacagagtgagttccaggacagccaggattgttacatagagaaaccctgtctcaaaacaacaacaacaacaaacaaaaaaaaaaaagttaatcttttaaaaaagaaattaggggctggagagatggctcagaggttaagagcaccgactgctcttccagaggtcctgagttcaattcccagcaaccacatggtggctcacaaccatctgtaatgagacctggtgccctcttctggtgtgcagaagacagaacactgtagtagactgtatacaaaataaataaaatctttaaaaaaaaaaagaaa

SEQ ID NO: 7013 - DNA, 877 bp, Cricetulus griseus
  modified_base (863)..(863): a, c, t, g, unknown or other
cgtgctgggaggatacctcgaggaatctagggagtcgcttcgcggaggaggtcagggagggtccctctcggtggcgctgagaggtctccacctgacgagaagacgttcgaacctgccgggaggacgtctccacgcggtgggatgacgtttcctcgcggtgggacgacgtctccacgcggatagtcgacgtttcctttggcgggtgctttccactcgcggggcgaaggatttactcctaaggggcgaggccatcctgctggcacacccaggtcagaagggacacagaggcccaagactcatgctctgtgtcacgtcacacaagggacggtgacgtcagggtgatgagctacgtcagtgtaggggctggttgtgttcgcgtctctctcctctctggttatggccgcggccgtcgctatggagacagatgatgctggaaatcgacttcggtttcagttggagttggaatttgtgcaatgtttagccaacccaaattaccttaattttcttgcccaaagaggttacttcaaagacaaagcttttgtaaattatcttaagtacttgctttactggaaagaaccagaatatgccaagtatctaaagtaccctcagtgtttacacatgttagaactgctccagtatgaacactttcgaaaggagctggtgaatgctcagtgtgcgaaattcattgatgaacagcagattctacactggcagcactattcccggaagcggatgcgtcttcagcaagccctggcagagcagcaacagcagaataacaacaacaaggaaaatagaagagcgtggggacagacctggctcgttgggacatgtaatataatgtattgttatttttatttaaaaanaaaaaaaaaaaaaa

SEQ ID NO: 7014 - DNA, 877 bp, Cricetulus griseus
tccctcctgggtggcattgggcacgaagccacagtcctgctccttaatcttcagcccctagtcactcctccaggttgggacacaggtacatagagccataggttaccggggcttcccgtgggccccggcctgtccccaccccactgaaaagccattggcggaagttcagggaaacgggggtgcagcttggctgatccccccccccaacatgggtactcaaatctcaggtgtccacaggttctgccctcaataagggccaccccacagccccagccctggaaatataggagacgctgcagttttcagcaaggatttgggggcccagagaaagttgggctgccccatattggctgtaggaggtttctggcaaccccatttgttccagaatcttccatcatccaatgagggaggctttgggtgccaccacctttacctgagcctacctggagggaggcctcccttctggagctgggctcggagggtcctaggccagctgccctcccaggtacttccatccgccccttctctttggccacagaaatgagatgccttagttggtggggtggggtgggagttgaggccccattcttttgtgtcttctggatgtatcttgcttcatcccagctcctgctggtcccctgcccttcctgcaaacaggggaaagtctgaggtcccaggaccttgggagaaaactccataagcaagcagagctttcttggtatccttacccttctcctaacttcaggttctggttggtcactggaacttgggtctaaccattgaggggtatgtctgcggctcaggcaggacaagcgttctaagagatttgttcttttttggggggaggtcacccctctccattccgcctggcctctca

SEQ ID NO: 7015 - DNA, 877 bp, Cricetulus griseus
ccggaaagtgcgagctcgaagagctatcgcagcccattatgaagttcatccacggccaggacaggagggagcacaggcaggtgtggatgggacagtgagtggctgggaagaggccaaaataaacagctccagccctctgcgctatgaccgccagattggggaatttacagtcgtcagggctgggctctactacctttactgtcaggtgcactttgatgaggggaaggccgtctacctgaaactggacttgctggtggatggtgtgctggccttgcgctgcttggaggagttctcggctacagcagcaagctcccctggaccccagctccgcctgtgccaggtgtccgggctgctgcccctacggccaggggcttcccttcggatccgtactctcccctgggctcatcttaaggctgcccccttccttacctactttggactctttcaagttcactgaggggccctgctttcccagactccctaaacttgctgctgcttgctccagccctgtctctctaaaggcagccggggcttgttcacgtgtttttcctcccacagaaatatccctgttcttcttcagcaccccatcccaccccaaccgtccgacttactagctcccaaagccccacttatccctgactcccctggccccagcccccaggacactgtgtttactgactgtgtgcatcaggcactgagatgggctggacctggtggcaggaggtcaaagagcctgggactaggccagacattcccaaatgtgaggggtaagagccttagacaggctcctccctggatccctgtggattttgaaaagatactatttttatttttattgtgacaaagtgttaaatggatattaaagagaatgaaccat

SEQ ID NO: 7016 - DNA, 876 bp, Cricetulus griseus
tgtgaccctgaatgacatgaaggccaagcaggaggcactggtgaaggagagagagaagcagctggcaaaaaaggagcagtcaaaggagctacagctgaagctagagaagctgcgagagaaggagcgcaagaaggaggccaaacggaagatctctagcctgtccttcaccttggaggaagaagaggagggaggtgaagaggaggaagaggtggccatgtatgaggaggaactggagagggaagagatcaccacaaagaaaaaaaaattggggaagaatcctgatgtggacacaagcttcttgcctgacagggaccgagaggaggaggagaatcggcttcgagaagagctacgtcaggagtgggaagccaagcaggagaaaatcaagagcgaagagattgaaatcacctttagttactgggatggctctggacaccggcgcacagttaagatgaaaaagggcaacacgatgcagcagttcctgcagaaagcactcgagatcttgcgcaaagacttcagtgagctcaggtcagcaggggtggagcagctcatgtatatcaaggaggacttaatcattccccatcatcatagcttctacgatttcatcgtcaccaaggctcgaggaaagagtgggccactcttcaacttcgatgttcatgatgatgtacgactgcttagtgatgccactgtggagaaggatgagtcacatgcaggcaaagtggtgttgaggagctggtatgagaagaacaagcacatctttcctgccagtcgttgggagccctatgacccagagaagaaatgggacaagtacacgatccggtgaacatccagaagttggcatgaccttggctctcctcagcgctcccccagggctccagg

SEQ ID NO: 7017 - DNA, 876 bp, Cricetulus griseus
gcagccatggctcgtggtcccaagaaacatctgaagcgtgtagccgctccaaaacattggatgctggataaattgaccggcgtgtttgctcctcgtccatccactggccctcacaagctgagggaatgtctgcctctgattattttcctaaggaacagacttaagtatgccttgactggagatgaagtaaaaaagatttgcatgcagcgctttattaagattgatggcaaagtcaggactgatataacctaccctgctggatttatggatgtcatcagcattgacaagactggagagaacttccgcctgatctatgacaccaagggtcgctttgctgttcatcgtattacatctgaggaggccaagtacaagttgtgcaaagtgagaaagatctttgtgggcacaaaaggaatcccacatctggtgacccatgatgctcgaactattcgataccctgatcccctcatcaaggtgaatgacaccattcagattgatttggagacaggcaaaataactgacttcatcaagtttgacaccggtaacctgtgtatggtgactgggggtgctaacttgggaagaattggtgtgatcaccaacagagagagacatcctggctcttttgatgtggttcatgtgaaagatgccaatggcaacagctttgccacccggctttccaacatttttgttattggcaagggcaacaagccatggatttctcttccccgaggaaaaggaatccgcctcaccattgctgaagagagagacaagaggctagcagccaaacagagcagtgggtgaaatggtctctaggagacatgctggagaaatgtctgtactcttgcctttttaggcaactgtgctcaattaaacagcatg

SEQ ID NO: 7018 - DNA, 876 bp, Cricetulus griseus
ttcaccgttcgggcgggacaggcagagctggaaggacaggggtttgcatctgcttttatcagcacaaggatgaataccaattagcacaaagtggaaacagaaagcgggaattaagtttaaacggataggtgttccatctgcagcagaaataataaaagcctccagcaaggatgccatcaggcttttagattctgtgcctcctactgccattgaacaactttaagcaatctgctgagaagctgattgaggagaaaggagctgtagaggcccctggcagccgcactggcccacatttcaggggccacttcagtcgaccagcgctcattgatcaactcacaagcgggctttgtgaccatgatcctacggtgctccattgaaatgcacaacattagttatgcttggaaagaacttaaggagcagctgggcgagagcattgatgcaaaagtgaggggaatggtcttcctcaaaggaaaactgggagtttgttttgatgtccgcactgaagcagtcacggaaatacaggagaagtggcgtgattcaagacgctggcagctcactgtggccacggagcagccggagctggagggacccaaggaaggatatcgaggcggcaggggtcagcgggatggcagtcgcggtgcctttagaggacagcggggtggaagcaggaacttcaggggacaggggcagcgaggaggaagagggggaaatagaaacttcagaggtgacaacaaaggccagaagcggagtttcagtaaagcatttggtccatgagtagagactagaagaaactattcacactgtggagcccactgtataaagtactgcattatgccataataaagatattaatgcttataaaaaaaaaaaaaaaaa

SEQ ID NO: 7019 - DNA, 876 bp, Cricetulus griseus
  modified_base (832)..(832): a, c, t, g, unknown or other
tgcctagttactgcaaaaatgatgaaggggatatattcctggcagccgagtcctggaagcctgacgtttgcaccagctgcgtgtgcatggatagcgtaattagctgttactctgaatcctgcccttccgtgtcctgtgaaagacctgttttgcggaaaggccagtgttgtccctactgcctagaagacacaatttcgaagaaagtggtatgtcacttcagtgggaagacctatgctgatgaggagcggtgggacattgacagctgcacacactgctactgcctgcaaggccagaccctctgctcaaccgtcagctgccctcctctaccctgtgctgagcccatcaaggtggagggaagttgctgcccgatgtgtccagaaatgtatgtgccagagccgaccaacgtacccattgagaagaaaaatcatcgtggtgagattgacctggaggccccccatgtggcccaccccaagtgaaaatgacatcatccatctccctagagatatgggtcacctccaggtagattacagagatagtagcaggctgcatccaagtgaagactcatcactggactccattgtctcggttgtggttcccataataatatgcctctccatcataatagcattcctgctcatcaaccagaagaaacaatgggtaccactgctctgctggtaccggacaccaactaagccatcttccttgaataaccagctggtatctgtggactgcaagaaaggcactcgagtccaggccagggacggttcccagacaatgctaagaattgctgaacctgatgcgcgatcagtggcttctatagcatgcagaaacngaaccatctacaggcagacaatttctaccaaacggtgtgaacac

SEQ ID NO: 7020 - DNA, 875 bp, Cricetulus griseus
cccttcttcgcacccggcaagagatgggtgcccccaccggcacactgtcctttggccacctgacatcatgcctcccaagaaggatgttcctgtgaagaaaccagcaggaccctccatctctaagcctgctgccaggtctacagcagggaccactccagccaagaccaagactgagtcagctgccccccagactcctgcaaaaacccaggagccccctgttgatctctccaaagtggtgatcgagtttaacaaggaccagctggaggagttcaaagaggcctttgagctgtttgaccgagtgggtgatggcaagatcctgtacagccagtgtggggacttgatgagagccctgggccagaaccctaccaacgccgaggtgctgaaggtcctggggaaccccaagagtgatgagctcaagtcccgacgtgtggactttgagacgttcctgcccatgctccaagcagtagccaagaaccgggaccaaggcacatatgaggactacctagaggggcttcgcgtgtttgacaaagagggcaatggcaaagtcatgggagcagagctcagacatgttcttaccactctcggagagaagatgactgaggaggaggtggagactgtcctagcaggccacgaggacagcaatggctgcatcaactatgaggccttcctgaagcacatcctaagcctgtgagctccacaggtagtcctccagcccctagtgtcgccctgagaggaaaaggctcctcgaccaaccagatagacgaccaggcagtgcgatttcccgtcggtccgtccgtccgcagcgcgagcgccggggctggacaactttctcctccccaaaataaaagacattgatcctgaaaaaaaaaaaaaaa

SEQ ID NO: 7021 - DNA, 875 bp, Cricetulus griseus
gggacttctgcaatggtgtggatcatggctgcgagttccagtgtgtgagtgagggtctttccttccgctgcctgtgccctgaggggaggcgacttcaggctgatggcaagagctgtgaccggtgccgagagggccacgtggatcttgttcttctggtggatggctccaagagtgtgcgtccacagaacttcgagctggtgaaacgcttcgtgaaccagatcgtggacttcctggacgtgtcccctgagggcacacgcatcgggctggtgcagttctccagccgggtgcgcaccgagttcccactgggccgctatggcactgcagctgaggtgaagcaggcagtcctggctgtggagtacatggagcgcggcaccatgacgggactggcgctgcgccacatggtggagcacagcttctcagaggcgcagggtgcgcggcctcgtgacctcaacgtgcctcgtgtgggcttggtgttcactgatggccgctctcaggatgacatttcagtgtgggcagctcgtgccaaagaggaaggcatcgtcatgtatgctgtgggcgtgggcaaggccgtggaggaagagctgcgtgagatcgcatccgaaccttcggagctgcatgtgtcctacgctccggacttcagcaccatgactcatctgctggagaacctcaaaggcagcatttgcccagaggagggcatcagcgctgggacagagcttcggagtccctgcgaatgcgaaagcctcgtggaattccagggccgcacgctgggggcgctcgagagcctgacacggaacctggcccagctgaccgagcgcctggaggaactggagaaccagctgactagccggaagtgaaggtcgcatgcggtctgagca

SEQ ID NO: 7022 - DNA, 875 bp, Cricetulus griseus
aagtgggtgaggaaacaggcccacgaaggctgatgggagctcctagtgttgacagagatggaactgggacttggagaccctactgcattgccccactgcctccggcctaggtggcagccagccttgtggccaaccctagttgctcttgccctgctgagcagcgtcacagaagcttccctggaccccatgtcccgcagtcccgccgttcgcgatggtccctcgccagtcctggcgcccccaaccggccacctgcctgggggacgcactgcgcatttgtgcagcgaaagagtcctgccaccaccgccacagtctccccagcctgcacccccgccgccaggtcccgcgctccagtctcctcccgctgcgctccgcggggtacgcgcagcgcgtgcagggacccggagcagccgggcgcgggccactgatgcgcgcagctgtcgcctgcgctcgcaactggtgcccgtgagcgctctcggcctgggccacagctccgatgagctggtacgtttccgcttctgcagcggctcgtgccgccgagcacgctccccgcacgacctcagcctggctagcctactgggcgccggggccctgcggtcgccccccgggtcccggccgatcagccagccctgctgccggcccactcgctatgaagccgtctccttcatggacgtgaacagcacctggaggaccgtggaccacctctctgccactgcctgcggctgtctgggctgaggatgctctccaagccttcgcacactggacctttacccatgtgtcgccctgcctggaacaattccacctggcttcactagtcaggaacctcagcccgaaatcgaggctgcagacctcaggccccaggccggtgagtgacagac

SEQ ID NO: 7023 - DNA, 875 bp, Cricetulus griseus
ccatcatcaacagcacagtcaccccaacatgaccttcaccaaacctcgcagaagttcgggcagtgggcagatagtcgagccaacactgtctatggcctaggctttgcctctgaacagcagctgacccagtttgctgagaagtttcaggaggtgaaggaagctgccaggctggctcgggagaaatctcaagatggtggagaattcactagtcctgccctagcccttgtgtcccaccaggttcccccaagccccttggtcagcaccaatggtccgggagaggagaagctgttccgcagccagagtgctgatgcccctggacctaccgagcgggagcggttgaagaagatgctgtcagaaggctccgtgggcgaggtccagtgggaggctgagttctttgcgctgcaggacagcaaccagatggagcaactggaggctagggtgcagaccaaggaccaggagatccagactttgaagaatcagagctcagggacaagagaagcgcctgacaccactgagcgggaggagacacagcagaaggatctggagactcggaatgcggagttggagcagcagctgcgaaccatggaatgcagcctggaggaggcgcgggccgagcgggagcgtgcacgggtggaagtgggcagggccgcgcagctgctggatgtgcggctgttcgagctgagtgagttgcgtgagggcctggcacgcctggcagaggccgcaccatagttggcccaggtgggtctgtggcatcccaggtgccctggctggggaccacctctgcctctgagctttgcactgtgtagagttttctagaatccatgggtggcgctgatacccagattacacttctacgtgtttagaaaaagcaaaat

SEQ ID NO: 7024 - DNA, 875 bp, Cricetulus griseus
tgggtccagctgcttctgggggcctcattcctgcttgggcccaccctgatctctttatactgccgatgccagccttgcaagcctgtggttcctgcagacacagctgggatggagaccctgacctcaccacagactacccatctctccgcctcagacagcgcccataccctcctggcacctcaagacagtgggaaagtctgcaccactgttcagttgttaggcaacaactggacccctggtttatcccacactcaggaggtggcctgcagccagtctccacagccctgggcgcctccttcaggctcgccggctgctatgctccagcctggcccgcagctctatgatgtgatggatgcagtccccgcacggcggtggaaggagttcgtgcgcactctggggctgcgggaggcagaaattgaggctgtggaagtggagatctgccgcttccgagaccagcagtatgagatgctcaaacgctggcggcagcagcagcctgcaggcctgggtgccatctatgcggccctggagcgcagtgggggtggaaggctggtggcgggaggacctgcgcagccgcctgcagcacggcccgtgatgtgaggcccaccagccactttggcattctagtgaccctagcaggaaccttaagtattgttacttatgggtgtagacattttatgtcacttactaaccccctagcacggtcctgcgtagcagcgccggctggcctcgaccctgcttgcttgccccatggtgctaagggaagcgtcatggagaaataccaggaggggccaagtgattggttgtacagctgtttatcagcccgagtttggacttggtattaaatatctttagtagcttaaaaaaaaaaaaaaaaa

SEQ ID NO: 7025 - DNA, 874 bp, Cricetulus griseus
tgatgctggcagctgttacagggcagttggcccctggtaccagctgctggtggagaagcatgcagacatggacaagcaggacagcgtgcatggctggacagccctcatgcaggccacctaccatggaaataaggaaattgtcaagtatctgctaaatcaaggggctgatgttgctcttcgggaccaaaaatggctacacggcctttgacctggtgatgctgctgaatgatcctgacactgaacttgttcgactgctggcgtctgtgtgcatgcaggtgaataaggaccgaggccggcccaaccaccggccacccctgccccacttgaaggccaggcaaccctggagcatccccatgctgcctgacgacaagggaggactgaagtcctggtggagccggatgtccaaacaggttccgaaagctgaaacttatgcagacactgccacgtgggctggctgccaatcagcctttgcctttctctgaggagcctgagttggcgctggactccaccatgcgggcgcctccccaggacaggactagccgccttggaccacctgaagtagtccatgcaaccaaagacagcggtcctgggagcccaagaagagagaaggaagatgtgttgctgacaaccatgctacgcaggccagtaaaattccccagcattcccggagcccagcctctcctgccagctctgggagcttcaaccactcacctcattcctcaggaggtgccagtggtgttgggggcatgagcaggctgggtggggagctgcataaccgctcaggtggcagtgtagacagtgtcttgtcccagatcgctgctcagaggaaaaaagcagctggattgtctgagcagaagcccacccagcgctccag

SEQ ID NO: 7026 - DNA, 874 bp, Cricetulus griseus
agaagatggcggtctccacaggagttaaagttcctcggaattttcgcttgttggaagaacttgaagaaggacagaaaggagtaggtgatggtacggttagctggggccttgaagatgatgaagacatgacacttacaaggtggacaggcatgattattgggccaccaaggacaaactatgaaaacagaatatatagcctgaaagtagaatgtggatctaaatacccagaagctcctccatcagttagatttgtaacaaaaattaatatgaatggaatcaataattccagtggaatggtggatgcacgaagcataccagtgttagcaaaatggcaaaattcctatagcattaaagttgtacttcaagagctaagacgtctaatgatgtccaaagaaaatatgaagcttccacagccaccagaaggacagacatacaacaactgattttagtggatctcaaacttgtcttaaatcaaacaaccttctactcatgttaatgtcttgttaaagcactgtcatttaaacatgaacctgaaatattcaaaattgaattcaggtttttcaagacaaaagcatggcaaaggagtttcagatggcagtggaaacctttgtctttctgaaaagtaaagtctcaagaaggaagaacagaaatggcatgctttatccatcatccttagactgcagtgaactgtttaaagtgcaggtataatgagtagtcacaattgtgttaaactcttgaagtggtgcggatgtgggtgctgactactatagcatcaaaaattgcttcaggattgttttgatacctgtatttataataaaagatgttggggtgtgtgtgtgtgtgtgtgtgtgtgtgtgtgtgtgtatgtgtgtgt

SEQ ID NO: 7027 - DNA, 874 bp, Cricetulus griseus
gcccttaacaaccgctgcgaggctgaaacctgcgtgaacccgatcggcattcttgagctgcaacttcctcccttcgtaggcatcaccgatagcccggcatcaggacgatttagaacaatggaaggtaatggatccatcgacatgttctcagaggtcatagagaaccagttcctccaggctgctaagctcgtggaaagtcacttggactctgaaattcagaaactggatcaaatcggtgaagatgagctggaactcctcaaagaaaagaggctggcggcactcaggaaggcccaccaacagaaacaagaatggctttctaaaggacatggggagtacagagaaattgccagtgagagagacttttttcaagaagtaaaggagagtgaaaaagtggtttgccatttctacagagacaccacattcaggtgtaaaatactagacagacatttggcaatactggccaaaaaacatcttgaaaccaagtttttgaagctaaatgtggaaaaggcaccattcctctgtgagagacttcggatcaaagtcatccccacactagcactcctgagagacggcaagacgcaagactatgttgtcggattcaccgacctaggaaatacagatgacttcaatacggaaactttagagtggagacttggttgttctgatgttatcaattacagtggaaatttaatggagccaccgtttcagagccaaaagaaatttgggacaaacttcacaaagctggaaaagaaaactatccaaggaaagaaatacgattcagattctgatgatgactagactgtgccatacttgtaaaccacctgtctgtctgtctgtctgtctgcttacttcaatgttaaatgttgtttctaaa

SEQ ID NO: 7028 - DNA, 874 bp, Cricetulus griseus
tagcttcatccagatctttgaaggtcctcagaacatcttccagcagcgagtggcccggtgagcccagcaagggcaattcactggactcagatgagtgcagcctgagcagtggcacccagagcagtggttgcccagtagctgagcacaggcaagactccaagggcaccgtgatagagaaagaccctcatgagggcctggcagaatttccggatggtctcaaagaaagtgacattctgagtgatgaagatgaagacctccaccaccctctgaaacagggcagccctactaaggacattgagcttcagttccagagactgaggatttctgaggagcctgacacgcacccagctgggcagcagcctaccacagggccaggcgagcagcctaggctggtcaggggccacttttgccccattaagcgaaaagcaaacagcaccaagaggggcagaggaactttgctcaaggcgcagacgtcgtcgaccagtcccttgacagccaccctgaaactgccagcattgatctaaatttggttctggagcgagaattcagtgtccagagcttaacttcagtcgtgaatgaggagtgtttttacgaagcacagagccatggcaaatcatagaagaacagctggggggcgagccaatgctcatttgtttttaaactggtggggagaatagaaactgcaggaaaaccgtttgggttttcgtgcagtttatattcttccacaaaacttgtaaagatttaagttattttaatttattgtggatcagaaaactagagattaagttggttaggaactgtaaattacatagcttacatcccttttgagcagaaatcaaatgatttagtcttgtaataaagttgaattctaatt

SEQ ID NO: 7029 - DNA, 874 bp, Cricetulus griseus
aggctaagatctgattctaaggacttcttacagttgatcccataaaggactgaaaatagtctggcttgagatacaatgaattggcttcaggatggcagtcagctgtcctccaatcctcctgatgactccagacattctgggatcttcaggagccgctgtgcacacctgtgtgaaagcaacctttcatgcctttaacaaatacaagagagaagggttttgccttcagaatgtggacaaggcccctttggctaagagaaggaagatgaagaggacaagcaccagcacagagacacgcagcagctccagcgagagctcccgctcatcctcttcccattcccatggcaaaacaacacccaccaagacgctgcagcccggcaattatgtacataatattttagaaccatacctatacttgttttgaaatgtttctgttaaattttaaatccataaggcattttataaacttatgcagagcactttttattgctcaaaagttctgaattgatacagacaacaagtgctatgccatgaagacatttcattgaaagactgccgcattttacaattaatacaaactgattaattccctatgacaaaaaagaaattacaggtatttttatgttttttttttctttaaagccattacatggaatgtcaggtctgagaaaaattatctttgctatgtttacaagaatcatgtttaaaaagatactgcccaacatgtttattttacagttttattagtgatgactcttcatagtttggaatttggacctatttatttctttcttaaggtgataacagcattaatttcaaccagtgataagtactaaaaatactgcattctgtgtaatggtagtatatttattactaa

SEQ ID NO: 7030 - DNA, 874 bp, Cricetulus griseus
  modified_base (834)..(834): a, c, t, g, unknown or other
aaggtctgaccacacggcctgccccagtagccacaaccgccgccctgaaggccgtggtgcagcgcgtcacccaggctagcgtcacagttggaggagagcagataagtgccattggacggggcatctgtgtgttgctgggtatttccgtggaagattcacagaaggaactggagcacatggttcgaaagattttaaatctgcgtgtgtttgaggatgagagtgggaaacactggtccaagaacgtgatggataagcagtacgaggtgctgtgtgtcagccagttcaccctccagtgtgtcctcaaggggaacaagcctgacttccacctggcgatgcccacagagcaggcagagagcttctacaacagcttcctggaacagctgcgcaagagctacaggccagagctcatcagagatggcaagtttggtgcctacatgcaggtgcacattcagaatgatgggccagtgactatagaactggagtcccctgctgctggagctgctaactctgacccaaagcagctgtcaaagctggagaagcagcagcagagaaaagaaaagaccagagccaaggggccttccgagtcaagcaaagaacgaagtgcaccccgaaaagaagaccgcagcgccagcagcggggcagagggcgatgtgtcttcagagcgggagccatagatgcagaagtgggagctcagcaaattaccattgggcagaaccggatcctgaaacattcaagatgctaaaccccctacactgcttaagaattcaggactcaaatatgaaaagaaaatcagaagtaagacactgggaacctgactacgcctgcagaaaaacncaaaggaccattctgttccttatgtaatgctgtggtctga

SEQ ID NO: 7031 - DNA, 873 bp, Cricetulus griseus
cccaagggggccgcccggtggaagctcctgcgacaggttctgaagcagaaacagctggatgactgtctgaaacatgtatccgtgagaagatttgaatcatttaatctgttctcggtcacagaagtcaaaaaaagggaactgaggaagaggctggtgtgtgggtccagtacataagcgtcctttatcctgaatacagtatctccttgaggcataatagtggacctttgaatgttgaagacattctcaccagcttcgacaatacaggaaatgtttgcatctggccatctgaggaggttttagcttactactgcctcaagcacaggaacatgttcagggaccttgctgtgtgtgagctcgggggtggcatgacatgcttggctgggctcatggttgctatttctgcagatgtcaaagaagttctgttaactgatgggaatgaaaaggccatcagaaatgtgaacagcatcatcgaaagcaatcagaagactggcgtgtttaaggctcagaaagtatcaagctgcgttttacgatgggataatgagacagatgtctctcaactggaaggacattttgacattgttatgtgcgctgactgcctgttcctggaccagtacagagccagccttgttgatgcaataaagagattactccggcccacagggaaagcaatggtatttgccccacgccgagggaatacgttcgaccagttttgcaatctagctgaaaaagctggtttctctctccaaagacatgaaaattatgatgaacacatttcaaacttccactccaagttgaaaaaagaaaactcggacatatatgaagaaaatctccattatccccttctgcttactttaaccaaaatgggatagaaga

SEQ ID NO: 7032 - DNA, 873 bp, Cricetulus griseus
cacatttgaccagaaacttgcagaagcatctgtcgtcattagttggcagtagctgaaggtgtgctcttgctctgagaagttcaccaccacactgtggtatggttggtcgtgccattgtgtttaatagcacacagtgttgtctttctctctcatcaaagactaaagtgaggttaggggactttagccttttctgatatctctgcaggtggcttcccagaagctcttgatggagacttaatacaacaggagacccaagtctggactatgtaggtattggaggcttgaacatgacagtctttgtttttaaattgaaattaagacagacctcgtcgcccccatccctcggttgattaccattttattgggacatcttactattagatagtccctggagtggcttcagatcttccccagatgcactcttggaggcagccatttgaagatgtgttttacttagcaggctagagatggctatcaaaacgtcttcagtgctctgcacatacgtatcactgtggcatggtccaaaaggctgacatctagtgctcaggatgattgttaccagtttaagtgcttactagttaactattagcatgctagttgacctgatggaactgtttgaaaactttaagtgaaatttaaccttatgacaaaagtcaaattcttcaagttgtagactttctacttgagcctggtaggcaaggctaagcatagatgtgtgagacaacttgatatgtaaagcacttgatattaaaggcataaacgtgagactgctaaatgtgtgtagagaaactgacatgtttaatatgtgggacagtccacaccctacatacatcagaaaattgattccagatccgtgatggccaaccgtatgca

SEQ ID NO: 7033 - DNA, 873 bp, Cricetulus griseus
ccgccgcctccgccgccgcttgagcccaacatggcgatgcacaacaagacggcgccgccgcagatcccagacacccggcgggagctggccgagctggtgaagcggaagcaggagctggcggaaacacttgcaaacttggagagacagatctatgcttttgaaggaagctacctggaagacactcaaatgtatggcaatattatccgtggctgggatcggtatctgaccaatcaaaaaaactccaatagcaaaaacgatcggaggaaccggaagttcaaggaggccgagcggctcttcagcaaatcctcagtcacatcggccgctgcagtaagtgccttggcaggagttcaggaccagctcatcgaaaagagggaaccaggaagtgggacagaaagcgatacttctcctgacttccacaatcaggagaacgagcctgcccaggaggaccccgaggacctggacggttccgttcagggagtgaagccccagaaggctgcctcctctacctcctcagggagtcaccacagcagccacaaaaaaggaagaataaaaaccgacacagaatgaatgtctcccccaaactggctggcaccagctccatctgtgattgtccccccatcgagaagtgcacatctctggttttgtgttatgctgaaagtagaacccaagttccattgcagatggaggctgtaaatatctgccattcttttgttttgttttgtgttgtattatttttttattgtttgtttttaccattctggttttcttttgggactattttgtgatgcctgtacccttcctgatgacacatctgatcgtctgtttcatgtggtgtcagcattcattactgaaaactaaagtggctttctagaa

SEQ ID NO: 7034 - DNA, 873 bp, Cricetulus griseus
ggacaggccacctcccctatgggcagagtcaatgggaggctctttgtcaatacgagagacttattcttggccagtggcatccagcgaagattcttccaccaggaccagtccccctgtggggggcctcacagctgaagacattgagaaggcccggcaggccaaggctcgccctgagagcaagccacataagcagatgctcagcgagcgggctcggggagaggaaggtgccagttacccggattgggcggttggccaactttggaggtctggcagtaggtactgggctttgggtgggccaggctaatgaggggccatgccttccctcaggctcagccaagcagagggagggtgttgagcggaagcacctccatgagtaggaagtgagcagtgcagagaccccactattgcttctgtactgtctagacaaaaaggcaggcttcttgtgccatctcctccctgctgtggatgtccaccaggaacacggagcaaagaagactaaagccggcctagctacctttggggtctagttggccatgtagaatgaagctttgtgtgtttctggatgagcgtgtgtccttgcccattgcccaccccagccggtggcctggagctagaagctcaggacagtagggcagccaccctagctgggtctcagcatggacaactgatccttttgagagcaaagcagggctgtcactggaggagctcaatcctaacagttccttatttttattgcagtacatcaaagtctggttaattaggtgacgccaacataaaatattggtgagaaattctttgttacatttttttactatcccaccttaaataattctgtgcaaaagaaccccatgtcatagtctgttggcagacact

SEQ ID NO: 7035 - DNA, 873 bp, Cricetulus griseus
  modified_base (852)..(852): a, c, t, g, unknown or other
caagatggcggaagccgaggaatcgcctggagaacaggaggcagggatgccgaggcctttgttttcaggcctttctgatatatcaatttcacaagacattccagtagaaggagagattaccattcccatgagagctcgtgcacgagagcttgaccactccacattaaatgaatctgttcgccataccatcatgcgtgatctaaaagctgtggggaagaaatttatgcatgttttatatccaaggaaaagtaatgcattgctaagagattgggatttgtggggcccattaatactgtgtgtgacacttgcattaatgctacaaaagagctctgtggatggagaaaaaagatggaggaccacaatttgcagaagttttgtccgtcgtttggtttggagcggttactattacactcaattcaaaacttcttggcgggcaacatttctttctttcagagcctgtgcgtccttggatactgtatccttcctttgactgtcgcaatgctgatttgccgcctggtgcttttggcagggcagggaccaataaacttcatgattcggctttttgtggtagtggtgatgttcgcttggtctgttattgcatctacagcctttcttgctgacagccaacctccaaaccgcaaggctcttgctgtgtatccagttctttttattctattttgtgatcagttggatgatactcacattcactccatagtgaatctggatacaagcactggaaaccaatgaactgaaagctcacctgaaagaacagcttaccaacaaccttcccctctcccttgtttaattcttgaggtattaaaaagggagccccatagccctgttgtcatttanagaaggaactaatatttgcaa

SEQ ID NO: 7036 - DNA, 872 bp, Cricetulus griseus
ttattgtcctggagataggacgcgtgaccaaaaccaaagatggccatgaagtgagatcctgcaaggtagctgatagaacgggaagcatcactatttctgtttgggatgagatcggagggctcatacagacaggcgatattattcgtttgaccagagggtatgcatcaatgtggaaaggatgcctgacactttatactggaagaggtggtgaacttcaaaaaattggggaattttgtatggtgtattcagaagtgccaaatttcagtgagccaaacccagattataaagggcagcagaacaaatcgatacaaaatgagaaggatagagtgagcatcggtacacttgggccagttgcaaatggtgttcagactggacctgagtcaaggggatatcatcttccatatactggtagaaacagtggctgggaacccatcaatcaacagcttccaggagctcatagtagtcaaacagtcatgaccacaataagtaatgccagggatccgagaagagcctttaaaagataacctaagccaaagagattcatgtagtttttaaactacgtgtcctacttgaatacttagtgcacttttatttatggttaactgtgaaaagtttttacagatttcctttgactttttgggtttgctaagaagaatggttggtttttctgcacaatgttgagctgctcagttacatcctattgaagaataggaactctgaaagcgggaacatttatttttagagcaagaacttactgggtatcacttgaaaacctgtccctgtttcaagggtgagctacttacgacaccagctttatagcctctgtgagtcttctgcatacattttgtaatggttgccctaacatttcatgg

SEQ ID NO: 7037 - DNA, 872 bp, Cricetulus griseus
gcaggcccggcccggtcgctgcgccctcccggggtggctcctccgccagccgatccccgccgcgcctgcagccggagcccgcccgcgtcctgcccgccccgcacctccgctcccgggctccgggtccccgctccgcgccgggagagatgagtgctgccgcggcgcccgagcgcggctggaagagcgagaaagtggacgaggcgcaggccctggctcggagctgcgccgcccgcagacccgacttccagccgtgcgacgggctgtccatttgtgccacgcacagccacggcaagtgcttcaagctgcactggtgctgtcacctgggatggtgtcactgcaaatatgtatatcagcctatgacccccgtggagcagctccccagcacggagactccccgcaacggccacgagacgcccaccaacaccattcagatctcggtctcactcactgaacgccccattcccagaagacgagccctgaggaggtctctgcacatgatgccttaatttccaaagagagtgacactccgaaactggatcactgctcctccccttccagttccgaggactcggggatcaatgcaattggggctcactatgtggaatcctgtgacgaggacacagaggaaggggcggaactgagttccgaggaggattacagccccgagagcagctgggaacccgatgagtgcacccttctctccccatcacagtctgatctggaagtgatcgaaaccatggaaaccactgtgtagtcagctgggaactgcggccggccgggatccaccctgagcttctggactttgatttgatgcattcttttccaatactcttggcattttccaagctctattaccaaccacagcagtccag

SEQ ID NO: 7038 - DNA, 872 bp, Cricetulus griseus
agggaggctcgtggaccagtgagacccagaagagggttttagcacccgggaggtcgcggaaggctgctccgcggctgtcatcatgccacaaaatgaatatattgaattacaccgtaaacgctatgggtatcgtttggattatcatgagaaaaagagaaagaaagaaagtcgggaggcccatgaacgttcaaagaaggcaaaaaaaatgattggcctgaaggctaagctctaccataaacagcgccatgctgagaaaatacaaatgaaaaagactattaagatgcatgaaaagagaaacaccaaacaaaagaatgatgacaagaccccacaaggagcagtccctgcctatctgctggacagagagggacagtctagagcaaaagtactttccaacatgattaagcagaaacgaaaagagaaggcggggaaatgggaagtccctctacccaaagttcgtgcccaaggagaaacagaagtattgaaagttattcgaacaggaaaaagaaaaaagaaggcatggaagaggatggttactaaagtctgctttgttggtgatggttttacaagaaaaccccctaaatatgaaaggttcattaggccaatgggcctacgcttcaaaaaagcccatgtcacacatcctgagctgaaagctaccttttgcctgccaatacttggggtgaaaaagaacccatcctccccattgtatacaactctgggtgtaatcaccaaaggcacggttattgaagtcaatgtgagtgagttgggccttgtgacacaaggaggcaaggttatatggggaaagtatgcccaagttaccaacaaccctgaaaatgatgggtgcataaatgcagtcttgctggtttgatagtgac

SEQ ID NO: 7039 - DNA, 872 bp, Cricetulus griseus
agactctgaccgagctcttgaatgactttggagacacagatgtttcagaatgggcattctggaagccaatggctgcttcaaccactgacaattttgctgctgtttgctcttgcagacaggcagactgcggatctcccgaaggctgtggtgaaacttgagcccccatggatccaggtcctgagggaagacagtgtgacactgaagtgtgaagggacccacagccctgggaactattccacccagtggctccacaatgggagatccatccggagccaggtccagcccagctacacgtttaaagcctcaagcaatgacagtggagaataccagtgtcaaatggggcagaccagcctcagcgaccctgtacatctgggagtgatttccgactggctgctgctccagaccctcaactggtgtttgaggaagggagaccatcaagttgaggtgccacagatggaggaacctagccatgagcaagatcatattctaccagaatggaaaatctgtaaaatatcaacattctgttggcagcttctccatctccaaagcaaatcacagccacagtggtgaatattactgcacagcacatctaggaaagtcacaatacacatcaaagcctgtgaccatcactgtccaaggttcagcaactacacccgtcatctctctactttggtaccatgccgctttctgcctagtgatgtgcctcctgtttgcagtggacacgggcctttatttctatgtacagagaaaccttcaaatccccgtggaggagtggagaaaaaccctgtcagtccgaaagtgtcaggttcctcaggacaaatgacattgcgtcatacggcagaaccgcagtggcagcagcatcttttcagcca

SEQ ID NO: 7040 - DNA, 872 bp, Cricetulus griseus
  modified_base (70)..(70): a, c, t, g, unknown or other
aggagtctacatctaaaagaagacagaaccttgtgcctgcctgcccaagcctcttgctgatgattttagnggcttcgggtctgagactccaactttcactgcacggctaagggtctctatgattcccacatttctagagccatccagctgagtgaacccaaggcttattatacctgagaacaaggactgggtgattagcaacaaaacaagagccctctctggggcctctggcagaggcctgaagctggaaccatcagggaatatgagtgaattttggcacaaactgggctgctgcgtggtagagaagcctcagccgaagaagaggcgaagacggattgaccgaaccatgatcggggaaccaatgaattttgttcacttgactcacattggctctggagagatgggggctggagacggacttgccatgacaggtgcagttcaggagcagatgagatccaagggaaaccgagacagaccatggagcaattctagggctttgtagttcccatgggactggttctgcagtcttgaagttctggttccatgtccagcccagaagaaatgccaccctcaccaggtcccttctacaaccagtgacccaacgagcccctctcctcctcctcgtcctaacaagtgcctcaaaaggcatgggggctggactccctctaccccctctggcctctgcccctcctggagatggggtcaaggcagcaggactgaccaagtgactactggtgggccagaggagctcagctgcagccctgggcaccctagatctgagctgggggttctctgggaacctggaatgagttccctgctcctgaatgaaggtcgggtgccacctgtaaaaaaaaaaaaaaaaaaaaaaaaaa

SEQ ID NO: 7041 - DNA, 871 bp, Cricetulus griseus
tacaagctggcagctctgcctgtggcaggtgcactcatcggaggaggggtggggggtcccattggcctcctcgcaggcttcaaagtggcaggaattgcagctgcacttggtggtggggtgttgggcttcacaggtggaaaattgatacaaagaaggaaacagaaaatgatggagaagctcacttccagctgtccagatctccctagccaaggtgacaaaaaatgcagttaaagcccaagcttccaactggtgctctaaaaccagcaaggtttgaggctgtcctggaactatctctgaagaccaaacaggccttgaactcagagatccacctgtgtgggaactgttgacatgctcatgaactgtcagtattgggtttttgactttacccatctaaatgcttaaggaagttagtgttctttaaaatttatgctttaaagttacttagaaagggtacctcatttccccacaatagaagcaaatagccaacttttgtggaaattgcttggaggtgtttaatcaactataaatgatataaagtacttaaaagtataaatttttagtcaatatgacacagaagtgatcttaaaattgaacttaatatgccccatagtgtcaagttaaatttatcttctctatgattcatgtattatttttatttcaaccagttaaaaaggaccactttaattaaggtcataaaatttgtagagattcatttcagtaatggcagaaccactctcagtctacaaatagattgccaccctcagttttcagaaaataccttttcctagagaagaactggtgcttcccaagcaattagctaggcatttatggagagggtaactgggcctcagaggaattaagtgatatgcag

SEQ ID NO: 7042 - DNA, 871 bp, Cricetulus griseus
  modified_base (227)..(227): a, c, t, g, unknown or other
ttgttaacaaggtaatccattttaaggtttttcaattagattgtttctattgagctggaatttgaatgcattgttctcagggctgttagtgctaagagctgcagtgttgttttttaaagctaactgcctacaaatagattgcaagtttttcccaagtcataatactgtaatacatagaagcaaagattcttagcataacatttaagctatatggtaatttttttttntttgtttgtttgtttgaaatattctgatgtttaggtataatatttcatagttctcaagcctttttttcttttggcattctgatgagtgatgggcaacaaagactttttttttttttaatctatggtagaaaagtcttaaaattgaatctattaacttaaatctataaaatgtgttctctgaattggacaagcagcattattatttgattatagagggaacattgggacttagctatggagcacaggtgttctgtggaaacacagtttggagtcactatgtaatttaatttgtccattaactaaacacctgaccaacataactacccagtgaggtcaagtgaccaaaaaaatctgtaaacatttgataaaatgtctcattcatgtggaaagcacgtcttagggtagtgaacacaaggccatcacttgctaaaaatatacttattgccaaacttttccatcagtactgttcacacttaaaacaggtctgaacctattttcagtaacaagggagattttgttattaatatgaagttcttggaaaccatttcttgatgttggtgggatttggttcatcttagtttgaaactatagttttaaaaacattggatactaaaccagtcagcataactaaagagcctattaga

SEQ ID NO: 7043 - DNA, 871 bp, Cricetulus griseus
gcgggagactgaggcctgtatggcgccggctcagcagtctcgggttctgcggtgctgcagctgccgcctctttcaggcgcatcaggtgaaaaagagtctcaaatggacatgcaaggcttgtggagagaagcagtcctttgtgcgggcttacggtgaaggttctggtgctgactgtagacgccatgtccaaaagctaaatctgctacagggacaagtgtcagagctgtcactcaggtctgtggacagagctgcaagtgaagaggaacatgccggccctcagcaggctgagaaccggagtcagcaggcgctgtctgagcccctggagtcccgttggctgaagtatatggacaagggctgtgaggaccaggagctggacagaggaagagcagctcctaagacacagccctcagccagtgctgagtggccaggtctgccctgcagtccagcccgaaccaggaagaggaaatggaatcagagtacagggcagccgccacgaagtctgcatatccaggacttggacagtgttgaggacaactttgaatgccaggactccactggcctgttagggacagagcgacaagttggcagctctgccctcggggctgcaacccacatcagggagcttggttttcctagatggaaactaccaagtcctgtcctgcaggtcaaggcccaatcttctaaatgggcacggtttctgctgtcacctggaaacagcccacatgtggatgagaacccatcaagatttctgcagggcaccaggctagctgacccaacacaaggcaagggacccttgatgccaagactccaggggaaggccacttcagcagggcccctgtgtctacagaaaaaaaaaaaaaaaaaaaaaaaa

SEQ ID NO: 7044 - DNA, 871 bp, Cricetulus griseus
  modified_base (842)..(842): a, c, t, g, unknown or other
  modified_base (847)..(847): a, c, t, g, unknown or other
ccttcccaacactggctgaagcagcagcatccaggcccttccctgaaccagatgcagagaataaacttctaagaaagcctctgtcgggcccctgtccgctctcacatggagtgagctgctccccaccctgtggagagtctgcagccacctgggggtcctgggaagtaagattagtgggagatgccagggctccagggcagatttcgaaagcaggaatggccaggacaaggccatccagatgaagctcaggatgtcacaaaccatggacactgagacagaaccccaggttggacctccctcgggccaatgagtgcctggctttgatgccagctgttggtgctccatgccctatatttattctttaaacagtaacagcggccatttatttattccatttagaaaggaaacctccctcggtgtgttctgttgctcccccacacacacctgccacctccctggaatatgtgtgccacacgtcccttttccttggacatgcctgtggcatatgaattggcatgcacagacacaagggtgccattgtgtagatccccttgacccagtttccaaagggctctgcatcagcaccagagcaggccccaaggagaaaagaaaagaaaccaactcccatcgagtctgagctctgctcatttctgcacaaaatgtttaatatatttacatatatatttgtaagcattgttttaagcagctgctgtagggtacctttttttttcagtcttccagtgaaatataatttctaaagcacaaaattggtgccaagactagataaagaatgtaaattattcccttcatattttgaagttgtttgttataataagtaaganaaaanaaaaaaaaaaaaaaaaaaaaaaaa

SEQ ID NO: 7045 - DNA, 871 bp, Cricetulus griseus
gaggaagggcctgaatgggaagccagaatggttccagagagggagttgggagagcctggcattccaaaggtagagaggagactgggggaggcactgagctggaagaggctgcagagaagcaatgtgggcagaaaattggctcagggggctcagcagaagagaaagtgactggctatgatgtccaagaaattgatgggactggagagggagagcaggaggagatgaagacatctgtaaaggcagaaggaatgaggggaatggatggtatgaatttagactcccagacagagagagctgaggggtctataaccatcatggagactgaggggcccctaggagatccaatgctgttggaaaaagaggctgagggagggctcaggccaggagaagcagcagatacaccaaatccccacactagctgtgcctggcttccctgaactgactgaggccacaccaagtgccccaggggaggtgtacagcagctggagtgaggccctgctccctgggtcccgcctggacgtctctgtccctcgaagtcgtgtgcttctctcacgaagttcctcaaagcggcgctcaaggccctctttgcgtcgaatctctgctcctgagccacagcagcaatgaccctcccagtccccaacccaggaggcgctgctccctgagcagccgccttttcagccagaggaaacttcagagctaagtgccacaaggcctgaagggactccagtgccagccaggagaaaagtcctgggacagtgggtttggctttgctcatcctggcatgatgcaggagctgcaagcccgactgagtcggccaaagccacagtgacaaaataaaccatttcttaaaaataaaaaaaaaaaaaaaaaa

SEQ ID NO: 7046 - DNA, 870 bp, Cricetulus griseus
gaagctgtttcgacagcacagatgtggattcgaggcaacgtgagtgcctgtgctcggtccatcttcatctttgacgagatggacaagatgcatgcaggcctcattgatgccatcaagcctttcctcgactactatgagcaggtggatgggatttcctaccgcaaagccatcttcatcttcctcagtaatgcaggtggggacctgataacgaagacgaccctggacttctggcgggcaggaaggaagagggaagagatccaactgaaggacctggagcccgtggctgtctgtgggtgtcttcaacaacaagcacagtggtctgtggcgcagtgggctgatagacagaaacctcatcgactactttatccccttcctgcccttggagtacagacacgtgaagatgtgtgtgcgggcagagatgcaggcccggggggttgctgtcgatgaagacatcgtcaccagggtggcagatgaaatgacatttttccccaaggatgagaagatctactcagacaagggctgcaagactgtgcagtcacggctggatttccatttgagtttcttcactggatgtaatctccgggtgatgccttgagtggcagtaatgggctgggctgttctgactgtaggagagcaagtctgtgattccagccttgtgaaccattctgtcccataattacaatgcagctgcagacatgagaagactgtgccataattttatagaatgtggtagaatgactattttataacatggagatgccttacagagaatcacattttctgtttacagtgatgcaatgtgtggacacgtgttggccacctttggactgctgttaccatctgtgacttggaaaggtgtgggttggcctg

SEQ ID NO: 7047 - DNA, 870 bp, Cricetulus griseus
gacgccggcttttggcggtctcggtgctccggagtctggctgtggtctgtcgctgtccgtctgtccttcagcttggggccgctgctcgtgcgcacaagccgccgcacgccacagactcatggcggagcgcggggaactggatctgaccggcgccaaacagaacaccggcgtgtggctggtcaaggttcctaaatatttgtcccagcaatgggctaaagcccctggaagaggtgaagttgggaaactgaggattgccaagaatcaaggaaggactgaggtatcgtttactttaaacgaggatcttgcaaatattcatgatattggtgggaaaccagcttcagtcagtgctcctagagagcatccatttgtcttgcaaagtgttggaggacagacgttaacagtatttaccgagagctcctcagataaactgtcattggaaggaatagtggtacagagagcggaatgccgacctgctgccagtgaaaactacatgagattaaagagattgcaaatagaagagtcttccaaacctgtaaggctatcacaacagctggacaaagttgtaacaaccaattacaagcctgttgctaaccatcaatacaatattgaatatgaaaggaagaagaaagaagatggaaagcgagcccgggcagacaaacaacacgtcctggacatgctgttttccgcctttgagaagcatcagtactataatctcaaggatttggtggatatcacaaagcagcccgtgggttacctgaaagaaatcttgaaagaaatcggcattcagaatgtaaaagggattcacaagaatacgtgggagctgaagccggaatacaggcattaccaagctgaagagaagagtgactgaga

SEQ ID NO: 7048 - DNA, 870 bp, Cricetulus griseus
acagaggggaggaggccgtcggccagcagcagcggcagcgacagcggcgtccggagcgctcccggctgccaccctccccgcccgccgcttgtttgggcggatttaaatagttgagtaagatcaagctgggtaaccatggctgaaggtggatttgatccctgtgaatgcatttgctctcatgaacatgcgatgagaagactgatcaatctgcttcggcagtcccagtcctactgcacagacacagaatgcctccgggagttgccaggaccctccagtgacagtggcgtcagcattactgtgatcctgatggcctggatggtgattgcagtgctcctgttcttactgaggcctcctaatctgagaggctccagcctccccgggaagccatcaagtcctcacagtggacaggacccacccgcccctcctgtggactaatgttgatgtgggaagcagagattgttaaatgctgtgcacgaccaaatgactgaagatgaccagagtactcttaactttttccttttccacctgcaatttgggatggtattgttttcatgagcttctagaaatttcacttgcaaactgacttttgcttcctgtgttgccacagtccttatttatggtatgcctgagtaaatgattctattggaaagtccacagggcttgttggttggcctaagcttaaaacattccactcgttgtccctggaaccgtgatcataatgttcgtggtggtttctgacccaagtgaaggaaaattgagatttctgcatttaagtgtttttagtagatttaatagattttaattttttcataaggtatttatttggggttatctggtatgaatgacagagccacactatatttactttac

SEQ ID NO: 7049 - DNA, 870 bp, Cricetulus griseus
cagccctcaccccgcgtccctgcccgcgcccccgccccgggccccaccatgggcctcacggtgtccgcgctcttttcgcggatcttcgggaagaagcagatgcggatcctcatggttggcttggatgcggctggcaagactaccatcctgtacaaactgaaattgggggagattgtcaccaccattcccaccataggcttcaatgtggaaacagtggaatataagaacatctgtttcacagtctgggatgttggaggccaggacaagattcgacctctgtggaggcactacttccagaacactcagggcctcatcttcgtggtagacagtaatgaccgagagcgggtccaggagtctgctgatgaactgcagaagatgctgcaggaggatgagcttcgggatgccgtgctgctggtgtttgccaacaagcaggacatgcccaatgccatgcctgtgagcgagctgactgacaagctggggcttcagcacttgcgtagccgcacgtggtatgtccaggccacatgtgctacccaaggcacaggcctgtatgatgggctggactggctgtcccatgagctgtcaaagcgttagccagccaggggcaggcccctgctgcccggaagctcccgcgtgcatcccgggatgaccagactcccggactcctcaggcagtgcccttccttcccactcctcctccccacagacaggcctctgctcctgctcctgcctgcatgttctcttgtcgtgggagcctggagcctcgctctctgggcacagagggctctgctctcctgcctgctgggacctgtggatgggcttcctggccaaggccccctcttccaggggaggagcagggatctggatttaattt

SEQ ID NO: 7050 - DNA, 869 bp, Cricetulus griseus
gactggctgaggtctgcgactatgaaggtcaaagtcatcccggtacttgaagacaactacatgtacctgatcattgaggagcacacacgggaggcagtggctgtggacgtggctgtgcccaagaggctgctggagattacagcccgcgaggaagtgtctctgaccacggtgctgaccacccatcaccactgggaccacacgcgtggaaatgcggagctggcgcacctgcggccaggactggaggtcatgggagctgatgagcgcatctgcgcactaacccgcaggctgtcacatggggaggagcttcggtttggggccatccacgtgcgatgcctcttgacgccgggccacaccactggccacatgagctacttcctgtgggaggatgaatgcccggacccaccagccctcttctctggggatgctctgtcagtggcaggctgtggctggcatctggaggacactgcccagcagatgtaccagagcttggccaagatcctgggtaccctgccaccccagacgaaggtgttctgtggtcacgagcatacactgagcaatcttgagtttgcacagaaagtggagccctgcaacaaccatgtgcaagctaagctgtcctgggcccagaagagggatgacgatgatatacctactgtgccctctacactgggcgaggagctgttgtacaaccctttcttgagggtgacagaggatccagttcgtgagttcacaggccaagtggcacctgcccaggtcctggaggtactctgcagggagcgagcacgcttccagcttgctttggagccactgcagccccaggtccgggcactcctggccttgcagtggggacttcgtgagtacgcccaggaaaa

SEQ ID NO: 7051 - DNA, 869 bp, Cricetulus griseus
cacccagccatgtcgtcctgcagccgcgtggcgctggtgaccggggctaacaagggcatcggcttcgccatcacgcgtgacctgtgtcgcaagttctctggggacgtggtgctcaccgcgcgggacgaggcgcggggcaaggcggctgtgcagcagctgcaggcagagggcctgagtccccgcttccaccagctggacatcgacgacctgcagagcatccgcgccctgcgcgactttctgctcaaggagtatggggggctcgacgtgctgatcaacaatgcgggcatcgccttcaagaatgctgacccaactcccttccacattcaagcagaagtgacaatgaaaacaaacttttttggtacccaagatgtctgcaccgagctactccctctaataaaaccccaaggcagagtggtgaatgtatcaagtatgctcagcctcagggccctgaaaaactgcagtccggagctgcagcagaaatttcgaagtgacaccatcacagaggaggagctggtggggctcatgaacaagtttgtggaagacacaaagagagggatgcatgagaaggaaggctggcctaatagtgcttatggggtgaccaagattggggtgacagtcctgtccagaatccatgcccgggaactgagccagcagaggagagcagacaagatcctcctcaatgcctgttgcccagggtgggtgagaacagacatggcaggaccaaaagccaccaagagtccagaagaaggagcagagacccccgtgtacttggcccttttgcccccagatgcagaggggcctcatgggcagtttgttcaggagaaaaaagtagaacaatggtgaactcaactctcccccctcccaccccc

SEQ ID NO: 7052 - DNA, 869 bp, Cricetulus griseus
gaaatcccgggcttcctgagtgacgaggagtgtcgcctcatcatccacctggcacagatgaaagggttacagcggagccagatcctgcccactgaagagtatgaggaggcaatgagcaccatgcagctcagccagctggaccttttccagctgttggaccagaaccatgatggtcgcctgcagctccgagaggtcaatgagtctgcgccctttgagacctcctgtcgttacatgacggtgctgttttatttgaacaacgtcaccggtgggggcgagactgtcttccctgtagcagacaacaggacctatgatgaaatgagtctaattcaggatgatgttgatctccgagacactcgaaggcactgtgacaaggggaaccttcgtgtcaagccccagcaaggaactgcagtcttttggtacaactacctgcctgatgggcaaggttgggtgggtgaagtggacgactactccttgcatggcggctgcctggtcacccgtggcaccaagtggatcgctaacaactggatcaatgtggaccccagccgggcacggcaagctttgttccagcaggagatggctcgtctggcgcgtgaaggcggctccgacccgcagcccgaatgggccttggacagggcctacagtgatgcccgcgtggagctctgacgcgaggccaagatgcaagtcactgcccatcgtcaaagaccctgcaggtcctctgttgtactgcagactaaagatctggccgatcttgccctgccccttcccgcctgcagccgcgatgaagggcgcagttgttcctacgttcacgttatttactggtgtacagcggcggccccatgctgctccatacaaataaacgacagggactt

SEQ ID NO: 7053 - DNA, 869 bp, Cricetulus griseus
  modified_base (462)..(462): a, c, t, g, unknown or other
gagacaaaatcactcttttatctgagcttttctgacctgctcctgggaatttgctggctcatacagggacttctctatggaacttcagcagcccacaaggacagcatatgctataacctacagacagtcggggagatactgtacattgcctcactcctctacaccgtcaattacatctggtatctgtactcagagctgagaatgaaacacagccaaagtggacagagcacagctgcacagttgatagatcatacttgccaaagtggtaacatagtgttcattttgtcaagcctgatacctctgctgttgatgacacctgtattttgcctgggcaatgtcaatggatgtttccacaactctagccagagccacaggtgtgtcctaatgcactctccaccctcagccatgattgaactcctgccttccaccaacacatctgtctgcagcacactgtatttttanggcgtcacttgttttcctgacctagtctttttggagagtgagcagttgggcagtgatttacattgtgggtcagcgagttcgcttcttcccggtggcctttgtatgctgttggggcccagctgtcacactgctaatcataaaactggtcaagccacaggatacctcattgcacatggctttctctgtgctccaggctctcacagcagcatcccagggtctgcccaactgtggcatatatggctggacacagtgcaagttccagcagctaaagcgtgagcttcgctgtgacgcagacacccagaccccattgctgtgttcacagaagagaatccaattgcagcagccgagccctaggcccaccggactcttctcttacttttgctcccagctcttccaccattctttga

SEQ ID NO: 7054 - DNA, 869 bp, Cricetulus griseus
tcttgctgggactgcttgtagcccaaggacagggaagacgtgtccgtcacaaaaagctgctactctcctgccatccttcacgatgacacctacagccacagaaagcacagcaagctctactaccagccacaggcccactaccaccagtatgccacagttacccaccacaacaacggcactgctcctagtccagggttctctaccatcggccctcaacctggaccaactccaccctctccaagtcctagtccaggctccaaggaggctcttggaaactacacatggactaatggctcccagccctgtgttcagctccaagcacaaattcaaattcgaatcctgtacccaactcagggtggaggaaaggggcctggggcattactacattgaatcccaaccaaaaccaaaggtccaggggggcctgtgaccatgcctatccccacctgtctctctcatttccttatgggcggctcacctttggattcaaacaggacatggagcagggtacagtctacctcaactacatggcagtggaatacaatgtgtccttcccacaggcagcacaatggacattctcagctcagaattcatctcttcgagagctccaagctcccctgggccaaagcttctgttgcagaaatacaagcatagttctttctccagctgttcaccttgacctactcttcctgagactacaggctgctcagcttcccaacactggacacttggggccatgtttctcttgcaccagtgaccaatccctcttgctgcctctcatcattggcctggtcctccttggcctcctcaccctggtacttattgccttctgcattacccgaagacggcaatcaacctaccagcccctctga

SEQ ID NO: 7055 - DNA, 869 bp, Cricetulus griseus
aagtcttacaaatctgacttctcttcctgaagcgggtttgcgaactttcctgttgggtaactttgaattcttgatctggttagccttaaccggggctaaccacagagtcctctcagccttgcgaccccggggtcgccactgtcccatggtggccacagaacacaaaggacactccccatgtatctgtgactgacttgaatttctgatcctcttgcccgcacctcccgagtgctgggatttcaggtctctggagcacccatccatctggagccatggtccatgccttcctcatccacaccttgagggccccgaatttggaagatacaggcctttgccgagtgctctactcctgtgtctttggtgctgagaagtcacccgatgatccacggccacatggtgcagaaagggacaggctcttccgcaaggaacagattttggcggtggccagacaggtggagtcactgtgcaggctgcagcagcaagcatctggatgtccctccacagacctgcagcctcagttctcagatgagactgtgtcccttcacgaggcccctcatggagccttcttcctgggagctggggaccctttccaggagccacagacggtggtgtggatgggtgtgctctccctaggctttgccctggtgctggacactcatgagaacttgctactggctgagagtacactccggctgttggtccgcctccttcttgaccacctccggctactgacaccagaaaaaaaaaaaaaaaaaaaaaaaaaaaaaaaaaaaaaaaaaaaaaaaaaaaaaaaaaaaaaaaaaaaaaaaaaaaaaaaaaaaaaaaaaaaaaaaaaaaaaaaaaaaaaaaaaaaaaaaaaaaaaaaaaaa

SEQ ID NO: 7056 - DNA, 869 bp, Cricetulus griseus
cacccggtcattttggctttccatcgtagacagctacgagagacgcaacgagggagctgcccgggttatcggaaccctgctgggaactgttgacaaacactcagtggaagtcaccaactgcttttcagtgccacacaatgagtcagaagatgaagtggctgttgacatggaatttgctaagaatatgtatgaattacacaaaaaagtctccccaaatgagctcatcctaggctggtatgcaacaggccatgacatcacagaacattcggtgctcatccatgaatactacagccgggaagccccaaaacccattcacctcactgtggacacaggtctccagaatgggcgcatgagcatcaaggcttatgtcagcactttaatgggtgtccctgggaggacgatgggagtgatgttcacacctctcacagtgaagtatgcgtattatgacactgaacgcattggagttgacctcatcatgaagacatgttttagccccaaccgggtgattggactctccagtgacctacagcaagtgggcggagcctctgctcgaatccaggatgctctaagcactgtattgcagtatgctgaggatgtgctgtctggaaaggtgtctgctgacaacactgtaggccgcttcttgatgagcctggttaatcaagtacccaagatagttcctgatgactttgaaactatgctcaacagcaacatcaatgacctgctgatggtgacctacctggccaatctcacccagtcacagattgccctcaatgagaaacttgtgaacctgtgaatgagccctaagaggcacttgtgctggtcttggttttcaccataggactcagactgaagtggaggcaaagggtttc

SEQ ID NO: 7057 - DNA, 869 bp, Cricetulus griseus
actggaacaagagacttcaaccatactttatccaacggacagcattccagagtattcttccatcttggttccaaacgttgacaacatcaggaccaattttttgatagacacaattgcaaaacaacataaagctgttttgctcacgggagagcaggggactgcgaaaactgtgatggtgaaggcctatctaaagaaatacgaccctgaagtacagctatccaagagtctaaatttttcctctgccacagaaccaatgatgtttcagcgaaccatcgaaagctacgtggataagaggatggggagcacctatgggcctccaggagggaggaagatgactgtgtttattgatgacatcaatatgccagtgatcaatgagtggggagatcagataactaatgagattgtgcggcagatgatggaaatggagggaatgtatagcttggacaaacctggagacttcactaccattttgagagcgccaaaaaagtctgtgggaatgtggctggcttgctgtcctggactcttgctatggcaatattttatggcatcaacagggaggtgttgcctctgaaggcaaacctggccaagcaggaaggccgcttggctgtggccaatgcagaattggggaaggcccaggccctgctggatgagaagcaggctgagctggacaaggtgcaggccaaatttgacgatgcgatgaatgagaaaatggatctgctcaatgatgcagacatgtgtaggaagaagatgcaggcggcctccacgctcattgatgggctgagtggaagaaaaagtccggtgaccagcaaaagtaaaagaagttacaaaagctcagattaatagactgtaggtgatgttctgctgtgcac

SEQ ID NO: 7058 - DNA, 869 bp, Cricetulus griseus
gaaactctgaaccaggagtcatggaaaccaaacccaagctctactactttcacggcagaggcaggatggagtcaatccgatggctgctggctgcagcaggagtggagttcgaagaagaatttcttgagacaagagaacaatatgagaagttgcaaaaggatgggcgcctgctttttgaccaagtacctttggttgagattgatggaatgccgctgacacagtcaagagccatcctcagctaccttgctgccaagtacaacttgtacgggaaggacctgaaggagagactcaggattgacatgtatgctgatggcaccctggacctgatgctaatgatcgcccaggctccatttaaaccccctaaggaaaaagaggagagctatgctttagtagtgaagagagctaagactcgttacttccctgtctttgaaaagattttgaaagaccacggagaggattttctcgttggcaaccagctcagttgggcagacatacagctgttagaagccattttgatggtggaagaactcagcgcccctgtgctgtccgacttccctctgcttcaggcattcaagacaagaatcagcaacattcctacaattaagaagttcctgcagcctgggagtcagaggaagccacctccagatgctcactatgttgaggtggtcaggaatgtccttaatttctagtgacagcaggtcttaagatggctacagcgagtatccaatggcagtgtcaccataggccagttacataacattccagaaacaaggtgtagatagatcccaggagtctttgaaaaaacaaaaccactctgctgtcagcaatatgtgccaattaaatacaatgaaaaactaaaaaaaaaaaaa

SEQ ID NO: 7059 - DNA, 868 bp, Cricetulus griseus
atgatggcaatgaacacttaggaagcatggagatgtttgatcctctcactaataagtggatgatgaaggcaatcaatgaacaccaagaggcgaggaattgctttggcctccttagggggcccaatatatgcaattggagggttagatgacaatacttgcttcagtgatgtggagagatatgacattgaatctgaccagtggagtacagtggcaccaatgaacactccccgtggaggcgttggctctgtggctttagtgaaccatgtttatgcagtgggcggcaatgacggagtggcctccttgtccagtgtagaaaggtatcatccccatctggataaagtggatagaagtcaaggaaatgggtcaacgaagagcaggcaatggcgttagtgaactccatggttgcttgtatgttgttggtggttttgatgataactcccctttgagctccgttgagcggtatgaccctcgaagcaacaagtgggattatgtggcagcacttaccactcccagaggtggagtagggatcgcaacagtgatgggcaaaatctttgccgttggtggtcataatggcaatgcatacctcaacacagtggaagcatttgatccagtgctgaataagtgggagctggttggacctgtgtctcactgcagagctggtgccggtgtagccgtgtgtgactgtttaaccagccagatccgagatgtaggtcatgggtccactaatgtggttgactgcatgtgatttaagtcccagcagcaacaatgcaaccacaggtgatggatgggaagacagccagcattttgattgtgactgtcaatactgtcctgttgaatgtcagctgttgtgtgctgaagaagtcatgtc

SEQ ID NO: 7060 - DNA, 868 bp, Cricetulus griseus
gctagatgatccgggagccaacgctgctgcagccaaaatccaggcgagtttccggggccacatggcgaggaagaagataaagagcggagagtgcggccgaaaaggggaccgggacccgggggacccggcggagctgggggcgcccggggaggcgcgggcggcggccccagcggagactaggccagaactgaacgtttcagaagttccagaggagagatgatgccgcgtccccttcgcagtgacaagactttcctactgtgtttgtgatcccctccttgccacaaccagccagcttcaggagccctcccccgccctggcttcgtcgcggcgtcgccaagtccgtacccttttagttagctctccagtctaacgtggtcccctttcgccttttctccccaccctcgtcccaaaccccatactcgcaaaattgtccttttgcttcacgcccacctgtccttgcgcccagcatgcagctctgcctccgcagcctcggtgcgcttcgctgcgcgtactgcagagggcgcccgatgcgtcgctcaagtactctttccaccccagcctagcctcaaccccttaaacctggggctaggaaagaggggaagaggggatttcatggtgtctgatgatgccccttgctctgatgggaaaggaagtcctgtcccacacctgcctgtcaccccttttccctccgagccgcacccctgagagcagcccctccgctctcctttgtttatgcaaaagcctccgtgcgcctggaggctcagtaggaggagtcatccgcagccctgcccccagactacgccccctcccccgcctcgggctcctggggttgtggctggaggttttatctctgcgtgtgcatgttacc

SEQ ID NO: 7061 - DNA, 868 bp, Cricetulus griseus
  modified_base (515)..(515): a, c, t, g, unknown or other
cagctctgcgcactttcagggttctgagggctttgaaaactatttcggtaatcccaggcctgaagacaattgtgggcgccctcattcagtctgtgaagaagctgtcagattgtgatgatcttgaccgtgttctgcttgagtgttttcgcccctgattggcctgcagctgttcatggggaaccttcgaaacaagtggtgtggtgtggcccataaacttcaatgagagctatcttggaaaatggcaccagaggctttgactgggaagagtatatcaacaataaaacaaacttttacatagttcctggcatgctagaacccttgctctgtgggaacagttctgatgctgggcaatgcccagagggaggaagcgcaggctgcagcaatggcccagcctgcggcgcagcgtcaagcgcaacagcaccgtggactgcaacggcgtggtgtcgctcatcgggcccggctcccacatcgggcggctcctgcctgaggcaacaactgaggtggaaatcaagaanaaggccctgggtctctcttagtctccatggaccagcttgcctcctacggacggaaggacaggatcaatagcatcatgagtgttgtcatttcaggttactcccccaccccctaaagaatcagctgccgccagtcagtggggggcgggaggggaggcgtcgggagaagaggaagtctgggtgtgaggccaagacttgcatcatggctagtgtagcctggacccacttctcaagacttcctccgttaaaacactcctgaggcgcccctgcccctgaccccactgctgtttgctgtacatagaggctaagtggggccaagtgggcaggtgtgcacatgtggtgtgtgtgtgtgtgtg

SEQ ID NO: 7062 - DNA, 868 bp, Cricetulus griseus
cccacaggtcgggactagaagctgagggctcagggaaggtgtgcaggcaggtaaagccatctctcccagatgccgagacttgacacccagcagtctcccatggctccttatcacatccaccagtaccaggacagcgaccaaaaaaggtactggatttgatcacaaggggcatggaggagcacatccccgccaccttcctccacgtgctgacgctgccccgaaccattctgcactttcttgggttgccacttgccatggtcctggtgtctggctcctggaggctagcgactgtgtgcatcttctctctgctcctagtgctgcggctccttgccaggcagccctggaaggagtatgtggccaagtgtttgcgcacagacatggctgacatcaccaagtcctacctgtgtgtgtgtgctcgtaggtttcgtgggtggctgagtcgtgggcaggtggtgggcatagtgggtggtctgccatcaaggatcccccgtagggaggaagcagctggagctcttacacctgtctttgtcctcacaacatcgaggacagggaatagcgaaagcactgatcagaactgtcctccagtttgctcgggaccagggctacagtgatgttgtccttgagaccagtttcaggaagacagaccctgagcccctctacctgagcatgggcttctggaggacaggccagtacttcatgagtgtgttctggaggttagtggataatgcctataattcaattagagtattccctcccttcggcctaggaagtggtgctggaacctatgctcctgtgcagctgttggcccctctccacacacaggaaccagtgaaccctgtcatgtcagtgtcatgagcaaataaaagtt

SEQ ID NO: 7063 - DNA, 868 bp, Cricetulus griseus
gaagtagctacaaaagtaaccacaggactcaccaccgcacttcacatcatcgttcacttgggaagagtcaccgaaggaaaagaaccaggagtgtagaggatgatgaggagggtcacctgatctgtcagagtggagacgtactaagtgcaagatatgaaattgttaatactttaggtgaaggtgcttttggaaaagtagtagagtgcatcgatcataaaatgggtggtagacatgtagcagtaaaaaatagttaaaaaatgtggatagatattgtgaagctgctcgatctgaaattcaagttctggagcacttgaatacaacggatccccacagtactttccgctgtgtccagatgttggagtggttttgaaacatcgtggtcacatttgcattgtgttttgagcttctgggtcttagtacttatgtacttcattaaggaaaatggttttctgccatttcgactggatcatattagaaagatggcatatcaaatctgcagatctgtaaattttttgcacagtaataaattgactcacactgacttaaagcctgaaaacatcttgtttgttcagtctgactacacagaggcttataatcccaagatgaaacgtgatgaacgtacagtaataaatccagatgttaaagttgttgactttggaagtgcaacatacgatgatgaacatcacagtacactggtatctacaagacattatagagcacctgaagttattttagccctggggtggtctcaaccatgtgatgtctggagtataggttgtattcttattgagtactaccttggatttacagtttttccgactcatgatagcagggaacatttggcaatgatggaaaggattcctggacc

SEQ ID NO: 7064 - DNA, 867 bp, Cricetulus griseus
ccaaaccacagccatgactacagacaggaccacagccaaaagcctggctgtcaatgctctcggcagccccctcgcaggtgccttccacatcctgcttgtttttctcatcagcaaactcctcttctagagcaaacgggagaagcaaatctccaacctacagagcaccctcccaaagctaattccaggccagtgcttaaacgtgtgaatgaaggtttttatgtcctcagcgtacaactccaccacctctgaccacaggtacctgtgacactctttgagggacacaaacgtttgcctggatctttcagggcacaaattcttctttttgtaaatacttaggccaagttctgactctcaattttacatgctgacagtcaatctgaacttctgtttattgccaaaggattcccatgagcctcttgggtttgtggtggggagagggatccttctttgctttcaagatgatttcagatttctggccaaatctactcaggttacaaagaacttctgtgacttctgtgactgaaggaaaaaaggaatgagtgatagatagtcccgtggctgttagtagattcccattgtgccgggaccagcaggttttgaagagcagaagtatatgaaatctgtctaaggagccaataacaggacacatggttttttccctaagtcaaataaacgattcattgaacaagaacaatgaatgtgttaaattgaatgataaggtttaaataagtgataaaatataaagtattactcaaatttgtttatgttttaaaaataggaatgaaaagtgtgtgtgtgtgtgtgtgtgtgtgtgtgtgtgtgtgtgtgtgtgtgtttacaacgtgaaaacaaaaaaaaaaagttatt

SEQ ID NO: 7065 - DNA, 866 bp, Cricetulus griseus
cgcccgcccgggatgaaggcggcccaggctgcgggagaggaggcgccgctaagcgggtgctcggtcaaagtggtcctggtgggcgacgggggctgcgggaagacatcgctgatgatggtcttcgccaacgggccttcccagagagctacagccccacagtgtttgagcgctataatgtcactctgcaaatgaagggtaaacctgtacacctccagatctgggacacagcagggcaagatgactatgaccgcctccgacccttgttctaccctgatgccaatgtcttgctcctctgcttcgatgtgaccagtccaaacagctttgacaatgtctccaacaggtggtacccagaggtgacacacttctgcaaaggagtgcccattatcgtcgtgggttgcaagacagatcttcgcaaggacaaggtgctggcgaacaagctccggaggaatgggttggagcccgtgacctatcacaggggccacgatatggcaaggtcagtgggcgcagtgacctaccttgagtgttctgctcgcctccatgacaacgtggaagccgtcttccgggaagctgctaaggtggctctcagcagtcgcagtcgtaacttctggcggcggattacccggagtttttgcctggtcacctgactggtttggaactcaccttgcctcccacttccctcagttggagaaagacccagaagctgatctgctctgttgactgggctggacctagtccccaggctgagccggtagaaccacacccccacagatgggctccactgaggcctggtccctggacccaggatttctagactgagacaggttctcagacccttagctctggaaccgttaatagactccctgtgc

SEQ ID NO: 7066 - DNA, 866 bp, Cricetulus griseus
ggagggtgagagtacgttgggggtgctgtccggcttcgtgctcggcgcgctcaccttccagcatctcaacaccgactcagacacggaagggttccttctgggtgaaataaaaggtgaagccaagaatagcattactgattcacaaatggataatgttaaagttgtttatacaattgacattcagaaatatattccatgttaccggctttttagcttttataattcttcaggtgaagtaaacgaacatgcactgaagaaaattctttcaaatgccaaaaagactgtggtgggttggtacaaattccgccgtcactcagatcagatcatgacatttagagagcagttgctgcacagaaacttacagactcagctttcaagcccagaacttgttttctgctgttaacaccaagtataacaacagaaagctgctccactcactgcctggaacatttttctacagggtgcctttggtggttgtccaatctgggaatgtctgatcaactgggctataaacagagtctgcctcctgtacatccactggcttcagcaaagccgtgagaacacacagttctcaattttttaatgaagatggatcattaaaggaggtgcataagataaaatgaaatgtacgctgctatacaagaagaattaaggagtctatgccaaaaagttgaacaaagtgaacgagaagtagagaaactaatgatggatataaaatcaatcaaaagaagttagaaaagaacagcatgcgaagattaaagcagcaggagagaagactgtccaaaacaacccccaggagaatatccttcttttgtcaagctttaagaaccttttttccagagtccgaagtccttcattcttgtgtt

SEQ ID NO: 7067 - DNA, 866 bp, Cricetulus griseus
gccgggaggggagactgcggggccgcatgtggagagatgcctggcctctcggcgctaggcgcggtgggagccgcgctggtggtctctatgttcctgcagcagcgtggggacgaggggcccggggctggccccagcatggcggacaaggaggctctgccgaagcttcgggaagacttcaggatgcagaataaatccgtctttattttgggcgccagcggggaaaccggcaaaatacttttgaaagaaatcctgggacagaacctgttttccaaagtcacgctcattggtcggaggaagctcacattcgaggaggaagcttataaaaatgtgaatcaagaagtggtggactttgagaagctggatgactacgcttctgcctttcaaggtcatgatgttggattctgttgcctgggcaccaccaggaggaaagctggagcggatggctttgtccgtgttgaccgagattatgtgctgaagtctgcagagctggcgaaagcgggagggtgcaaacatttcaacctgctgtcctcaaagggggctgataagtccagcagtttcttatacctacaagtaaagggagaggtggaagccaaggttgaagaactaaagtttgatcgcttctcagtgtttcggccgggagtcctactgtgtgacaggcaagagtctcgtccaggcgaatggctggttaggaaattcttcggctctctgccagtctcatgggccagtgggtactctgttcctgtggtgacagtagttagagccatgctgaacaacctggtgagtcccagcagcggacaaatggaacttctggaaaataaggccatcctccacctggggaaagacagtgatgtgcccaagctgtgacc

SEQ ID NO: 7068 - DNA, 866 bp, Cricetulus griseus
gcaccatggcggtcggcaagaataagcgcctgacgaaaggcggcaagaagggcgccaagaagaaagtggttgatccattttcgaagaaagactggtatgacgtgaaagcgcctgcgatgttcaatattagaaacattgggaaaacactagtcacgaggactcaaggaaccaaaattgcatctgatggcctcaagggtcgtgtgtttgaagtgagccttgctgatctgcagaatgacgaagttgcatttagaaaattcaagctaattactgaggatgttcagggcaaaaactgtctgactaacttccatggcatggatcttacccgggacaagatgtgctccatggtcaaaaagtggcagactatgattgaagcccatgtggatgtcaagacgactgatggttatttgctccgtctgttctgtgttggttttactaaaaaacgcaacaaccagatacgcaagacctcctatgcacagcaccagcaggtccgccagatccgcaagaagatgatggaaatcatgacccgagaagtacagacaaatgacttgaaggaagtggttaataagttgattccagacagcattgggaaagacatagaaaaggcttgccagtccatttatcctcttcatgatgtcttcgttagaaaagtaaaaatgctgaagaaacccaagtttgaattgggaaaactcatggagctccatggtgaaggaggtagttctggaaaaactactggtgatgagacaggtgctaaagttgaacgagctgatggatatgaaccaccagtccaagaatctgtttaaaatccagatttttaatagtgacaaataaaaagtcttaattgtgaaagaaaaaaaaaaaaaaaaaaa

SEQ ID NO: 7069 - DNA, 866 bp, Cricetulus griseus
ggatgctacggccgcaggcgcggcgcgcgtgctcggcggcgatggagatcgcgaagcgtgcggacgccgagctgggcgctggcaccgccgcggagcccggcccgcggagtcccggctgcagcctccggcatttcgcctgcgaacagaacctgctgtcccggccggatggatctgcttctttcctgcaaggtgatacctctgtcctggctggagtgtacgggccagccgaggtgaaggtcagcaaagaaatcttcaacaaggccacactcgaagtgatcctgaggccgaagatcgggctgcctggcgtggctgagaagagccgggagcggctgatcaggaacacgtgtgaagccgtggttctgggagccctgcacccccgaacctccatcacggtggtgctgcaggtggtgagcgacgcaggctccctcttggcctgttgcctgaacgctgcctgcatggcactggtggatgcaggtgtgcccatgcgggctctcttctgcggggtcagctgtgccctggactctgatggcaatctcgtgctagaccccacgaccaagcaagaaaaggaggcccgggctatcctgacctttgctctggacagcgtggagcagaagctgctgatgtctaacaccaaagggctctattcggatgccgagctccagcagtgcctggctgctgcccaggctgcctcagaacacatcttccgtttctaccgagaatcactgcagaggcgctactccaagagctgagacaagccagagcaagtccacccctcccgccaccacgcccaccgcctccagctgccacacgccagcacctccactctacctctctctgtgcccatgtggcttccagtcctatagcag

SEQ ID NO: 7070 - DNA, 865 bp, Cricetulus griseus
tcctcctcatacttcctccttctcatcctcatcttgctctagtgtcgtgatgcactgctgaagtttccaattcaggtacaagtgtgtttttaaagaagagataagtttcccaatcagccaatttatctggctacctgttacctcagctgagttagtttaggaagtttacattcgtttctaattctgtacttgttttcaggggtttttaaacacatcctatatataatgtcaatctggtgaggaacatgacttgtattttactgtgcttaactcagaaatcagtaaaaatgaagtcataaaataatcatgtgtcatatggctttggcaccctgtacacatacattaaaacttttaaaagtttggcctcctattacaaataattatgtctcagatgaataatgtcttgtttccagggttcagaaaggcaaactcatgaaatgccacagagaactttcaacacagcacccttcacataaaagaaagtgtttgtttgtaaatattagcattttcctggtgtctaaataaatcatggtaaagtttgcaaggtattaatttttggaggaataccccagttctctcctataggaaaactaccttgcagtatgttttaatagagctgttgtttgtcatggactaagtgattgtactggggttcccaagacctttaccagtaaattatgtttctgtctgtaaaaaacgtaacccattattagacaatgttatatgtatttaccaaattatatgagttccattgggattgtattattaatttttgtattttctcaaattagtactttgaattgatagttctttatgcaatgtcttagcaatagtcactgtaatgcccatcctggagcagtgggta

SEQ ID NO: 7071 - DNA, 865 bp, Cricetulus griseus
ccagttctgaagaagtaggtgggatataccaaaagccatgttgagacagcgcaagagtctgccgtgcattgccccattgttgaccactgtagaagagactctggacactgtgtctgctcgggtccgaggacacattcctgaatggctcaatggctaatctacttcgagttggacctgggaagtttgaatttggaaaggttgatcaggtctataattcagtggactaaattcctttccctacgaagtatttgttttgccattagatgtcagtgcagatcgacccccgaagggaaggaacctcagttcactcctcctattcttcagctagtgctgtgaaacagagtgatggggagatctggtgctctcctgaaaatctacaccacgaggacctggtagaagaaggagggattgaatttcctcagatcaactatggccgattcaatggcaaaaaatataatttcttctatggctgtggttttcggcattttggtgggggattctctgattaaggttgatgtggtgaacaagacactgacggtttggagagaagaaggcttttatccttcagagcccaattttgttccggcaccaggagccaatgaggaagatggaagggttattctttctgttgtgatcactcccaaccagagtgaaagtaacttcctccttgtcttggatgctaagaacttagtagaactgggacgagcggaggtacctgtgcagatgccttatgggttccacggcacatttgtacccatctgatggcacaactacgaggtctgagaatcaggttccaatgagtacattctgtacagaagagagaaaacagtgggtctcaccgaaaactattgcagtttggacctga

SEQ ID NO: 7072 - DNA, 865 bp, Cricetulus griseus
  modified_base (791)..(791): a, c, t, g, unknown or other
acggggtcccaggactctccagaagcccagcgacacgtgccccaggaaaccctgcagcagtgccttgcctggagaccggtggaggtgagaccgttcgcttcccaccgcacccggttcctcggggcacttctccagtagctcccagaaactcgtagcaggcgccggagggctggatgcggagcttgatggacggcggctcgctcgccccgactcatgcccgcctctcctggagtcgctgggacctgcgctgctcggcggagacccgcatccccggaactgctgcgctgcagccgcaggcggcgatctggcacaaccgaggctgggggcggctcggctgccgtggcacgccgcaacgagcgcgaacgcaaccgcgtgaagctggtaaacttgggcttccaggcgctgcggcagcatgtgccgcacggcggcgccagcaagaagctgagtaaggtggagacgctgcgctccgcggtagaatacattcgtgcgctgcagcggctgcttgcagagcacgacgcggtgcgcgccgcgcttgccggggggctgctaacatcggatactcggccctgacctctgctcagcctccaccccgcggaatgacaccttccatctcccagtctgtgtggcactcgggcttggagatttctcaggagaaaaggatttttaacaatgacaatctttttacgaattaacttgaactgctggagagactctactgaaaatatgaagacttaatttttgtacaaaggatccttaggcctggagcacaataaagattgtctctgcccctnacccccatgtctataactttcaacctggccaaagtttggaccagtcaggcctgaggcaagatgcctggctgcac

SEQ ID NO: 7073 - DNA, 865 bp, Cricetulus griseus
  modified_base (705)..(705): a, c, t, g, unknown or other
cttggcactccattagattaatacatgatgtatgccaacagttcatttgctctacaaatacctgtgcacttgaagcccagtgtcctgagcacatagcttttgatcctgtctccttgaaaataatggtaatttggtttgtcttttgttttggttggtactgggatcatacccagagccttgcatgtgctacacaaggcttaccactgagctacatgtctaaccccagttatcatttattttgaaagatttttacctgtgaaatacaattcttttttttaaaactgacatttagacatgcacatttctctggtcacctgtaagaaataacgataattgatacttggaaattttgagtatttgctaaaagaaaaatgcaatcaagaaattgtgcacagtgccttgcccataataggtactcaataaacagttattcctcatagtctgttgccatggtttctagtgttttatgaaatttgtcttaattgaaaaagaccaaatatttcaaataaagcttataggcagctgtgtccagtcactgtagggttgtacagttagttcctaggatgttatttgcactagttgtcacttagaaacatggggttctgtagattcttggtgctaagggatactttgtcattttgatgaagtaagtgttaagtgtcagataaatagcacagaatagttctttaaattagtcaaaaaaanaaaaaaaaagtaaagtgatttcaacaaaaaaaaaaaaaaaaaaaaaaaaaaaaaaaaaaaaaaaaaaaaaaaaaaaaaaaaaaaaaaaaaaaaaaaaaaaaaaaaaaaaaaaaaaaaaaaaaaaaaaaaaaaaaaaaaaaaaaaaaaaaaaaaaaaaaaa

SEQ ID NO: 7074 - DNA, 865 bp, Cricetulus griseus
ccagccgggttcctccaccgagttctccgatgccatggcctccccaccgcagctgcaggctcttctccaggctgtcaacacgctgctgcgaaagcgccgctaccacgctgtgttggccctgcttaagggcttccggaacggggctgtctatggagtcaaaatccgggcacctcatgcattggtcatgacctttctcttcaggagtggcagtctccaagagaagctacaggccatcctgaaagccacgtacacccactctcggaacctggcttgctttgtgttcatctataagagtctctgtgccctacagtcccatgtgcaaggggagacccaccagatgcactctttcctggcagccttcatcgggggcctcctggtgtttaggaagaacaataacatcaatagccagatcaacatgtacctgacatcacgcgtcctgtttgccttgtgccgcctgggtgtggagaagggctacatccctaagctcagctgggacccgttccccttgcacacagcagtgatttgggggcttgtgctatggctccttgagtatcaccggcccactctgcagccctcactgcagtcctccatgacctacctctacgaggacagcaacgtgtggcatgacatctcagacttcctcatcttcaacaagagccgcccctccaagtaacacagcccaaggtgcttaaggaactcctctgcccagacagcttccaggcagtgtggccgggtattggtggcacacgcctttaatcccagcactcgggaggcaggaggcaggcagatctctgaggtcaagaacaacctgattctacagagaaagttccaggacagctagggctgttacacagcgaagccctgt

SEQ ID NO: 7075 - DNA, 864 bp, Cricetulus griseus
agtcagaaagtataaataacactccaaacagggatccagaaatatctatactgcatctaaacaaagaagccagtcggtaccttctaaacattggaatcttgtcagttcgtcagtgccaccatccctaacagataactcacagatacataaatcagtgaaaagtggaaaaaagagacccatgtggagattaccccaatattttgtatgctacaacaaatttgtctgtgtgttctagaaattcaattgataatcaatatataccagtacaggtgaatggctcaaaatttatccttgaaggaagttcaagtttgaatgatagtttgggtcgaatgagcacagaaattgctactaatacaaagttcagtactcatcaactatcccacaaaaccttagcagatagaactcagaatgacaacaaaatactgagggtctcaaaatttacatttaagaccaaaaatcctcagaaaaaggaaactgtcaattcattgcttgaggataatcaccagcgatcttccataaaatattctgcgtctttgacaccatcttctaaagatgaagaagagaggaatagaaagtattctcctgaggaaattcaacgaaaaaggcaggaagcactggttcgaagaaaggccaaagcactggcattgcccactgtgcatccagctcccatttcactttgatgaaatttgagttagacggtttcaaactgttaataactatccgtgatagaacttttttttcttgatttctctgtgagaaatttaatgctgacttataaagcacgggcttctactttgttatttaataaatcagtgtttataatgggaaatgaaactttcttggagatgtatggaattatgtata

SEQ ID NO: 7076 - DNA, 864 bp, Cricetulus griseus
agtctcccatggctccttatcacatccgccagtaccaggacagcgaccacaaaaggtactggatttgatcacaaggggcatggaggagcacatccccgccaccttcggccacgtgctgacgctgccccgaaccattctgctctttcttgggtttccacttaccatactcctggcctcaggctcctggatgctagccactctgtccagccttactctctgctcctagccctgcggctccttgcaaaacacacctggaaaaagtataagacaaactgtttgcacacagacatagctgacatcaccaaaacctacctgagctctcgtgactcctgcttctgggtagctgattctaggggtgagattgtgggcatggtgtctgccctgccagtggaggatcccctcctacagaagaagcaactacggctacagcacctctctgtgtccttggcgcaccgaagagaggggatagggaaagccatggtcagaactgtcctccagtttgcacaggccaggggcttcagtgaagttgtcctttctaccagtattttgcagtatgcggccctggctctctaccagaacatgggcttccagaagactggcgagtccttctacaccattatctccagactaaggaaatctccactcataaacttcaagtattgcctcacatctgctcaggaagggggcctgtgatctatctcccatgtgtgtgtgtccgtcaggagctgaacaccactgtagaagtaacaagcaaacccagctacttcaggtgcaaaacactaaccctcacgttcaagcacaggtgaaccaatatgtttgtgggagaggttgaggcaatggccactctttgctatacacgctttc

SEQ ID NO: 7077 - DNA, 864 bp, Cricetulus griseus
cagagcttctgcgtcccagtgactccagcacacaccatggcggactctgagcgcctctcggcccctggctgctggttagcctgcactggcttcttacgcaccaaaaagggacttttcctgtgtgctgagattatactgtgcctggtggttttaatttgcttcagtgcttcgacatcagcatactcctccctgtcggtgatcgagatgatctttgctgctgtcttatttgtcttctacatgtgtgacctgcactccaagatatcattcatcaactggccatggactgacttcttcagagccttcatagcagccatcctctacctgataacctccattgttgtccttgtagatggaaaaggcagtttcaaaatcgctgctggggtactgggtatatttgctacattgctctttggctgtgatgcctacttcaccttccctttaaagcagcaaagacatacagcagcccctactgatcccacagatggcccttgatcctcattcatctatctctgctacctgcaaatagctcctccatcaaaaacttcctcttgcctggtgtggtggtgcatgcctttaatccaagcactcaggaggcagagacacgtggatctctgtgaggccagccagggctacacagtgagaccttgtttcaaaaaaatacctctttctatttccacaacactcccagccaattctctgaccccactgaaagtgcttatgtatggtacaggagattgaacctagaaccatctgcatactaggcaagcagtctcctcccagctacacctcctataaaagtgcctttgttgggagttttgtcttccagcctgccaatcaaccctcctgggtgtggtcacctttatg

SEQ ID NO: 7078 - DNA, 863 bp, Cricetulus griseus
tgaaaataaccgaggaagcatcccagcccttgaaaccagtggggaaaacagttcttcccacaaaacaggtggagcaaagccagggcctagtaagaaacctcttcatggaaggaggaagaggtatgtgctcagtgtcagcaatactatctacaacgtcgagcagagaattaaccacttcctgaagctccagcatgagcgaaggcaggagatgtataaggaatattctcatcagtttttgactttggttgtgatgtggaatatagatgtagaccaagtcaagaagcatgcagaaaaatctctctaatatacttgaggagcaacaaaagctttttcaacaatttcaagttattcataaggagaaaatagaagaatttaaagagctatgtaatcgacacttgaagagtctacaggctattaagagttgtcgccgaaaagctattatcgaggaagccagaaaacaaatggacgtcctggagaggaaacttactacagaaactgtaaagctgcaggaagaaaaggctagtgttagatcatctcttctatccctgctattctcataacaccttgaagaaagacgctcaaacaccctaatagcatttcatcatactattagctgtgtgagtctatgatgccatggagactgcaactgaagttattgtaacttccttgttcacatctgtgaggtgccagaaaacctttactgacaatgttttgtttttcaaatgtattgtgcatgttgtatgtgaacgtcaatgacatacaaggtcgtatgtacacttaaagctcttgccctgtgatttccttttgtatttaattaaaacaatgaaattagtttctagaaaaaaaaaaaaaaaaaaaaaaaa

SEQ ID NO: 7079 - DNA, 863 bp, Cricetulus griseus
ggaccttgagtcgtctgtgagctgtgtccgagaggcgggaggcgctggcgatggcggagaagtttgaccacctggaggagcacctggagaagttcgtggagaacatccggcagctcggcatcatcgtcagcgacttcccagcccagcagccaggcggggctcagccagaaactgaactttattgttacgggcttacaggacatagataagtgcaggcagcagctgcatgatatcacggtgcctctagaagtgtttgaatatattgatcaaggtcgaaatccccagctctacaccaaagagtgcctggagagggctctagctaaaaatgagcaagttaagggaagattgacacaatgaagaaatttaaaagcctgctgattcaggaactttctaaagtgtttccagaagatatggccaagtatcggagcatccggggggaagatcaccccccttcctaagtgtgtgaagacctccacatccctttaactactcggactgatccagtgagacgctgtgcctgccaatgctgccttccagccatggggactggcctcgcccctacctcctgctcccattgtttgatcttgtgggactctgggactagaggagtagagctgtgccccagcagctcgcagacccttgggtggtcccttctttctctagggaaagtgggcaggaagacagccttgctgaaatgtgacgtgagattgggattctacttgatattttctttttatgtactgttctgttacaggttagttctgttacagaactaggttttatattttacattttcagacatggtgcataagaatgcaactgttttcatgagtctcaactagacataataaagtcttaagttt

SEQ ID NO: 7080 - DNA, 863 bp, Cricetulus griseus
gccattgattttgtgctctccaatgcccgggctggtggctgggtgtgggtggagcagcgatgttgggcattgccaccctggcagttaagcggatgtatgatcgggcaatcagtgctcctaccagtcccacccgcctgagccattctgggaagaggagctgggaagagccaaactggatgggctcccctggactgttgaacaaggatatgaagacaggcctgagcaggtctttgcagactcttcccacagactcctctacctttgacacagatacattctgcccaccccggcccaaaccattggccaggaggggccaggtagacttgaagaagtcacgactccgcatgtccctgcaggagaaacttctttcttactaccggaaccgggcagccatccctgctggagagcaggctcgggccaagcaagctgcagtggacatctgtgcagagctccggagcttcctgcgggccaaactgcctgacagcacgcttacgggctttggaccaggctgactcgggctgccgatctctgtgcctcaaaatcctcaaggccaccaccttgctgctaagattgactttggactgtgctttgcaaaaccaaaatcttgacttggccatcttacaagcaagagcctcttagaagtccagcaaggagaagtgggaacagttctgtcctgtgggcttgttgattagctgggtaggccttcctctttgctgtcattttctttgtcataaagtatgggaggtggccaaatgctctgggatgcttggatggaagaaaatattctgttcctcctcccctctatcacatgtcaaagacccagtggctgccccgccactctgcctttctcgtaagtaactccc

SEQ ID NO: 7081 - DNA, 863 bp, Cricetulus griseus
agctgtgtcttattagaagttctgactcctagggagtccatcttggcctgtccggggtccaagatggacaaagtcggtgcggtttttggaggctcccgggggatcggcagggctgtagcccagctaatggcccagaagggctaccgtctggcgatcgtcgccagaaacctgcaagtggccaaagccgccgccggcgagctcggcggaaaccacttggcatttagctgtgatgttgctaaagaacaggatgttcaaaatacatttgaggagatggagaaacatttaggtccagtaaatttcttggtaaacgcagctggtattaacagagatggtcttttagtaagaacaaaaactgaagatatgatatctcagcttcacactaacctcttgggctccatgctgacatgcaaagctgccatgaggacaatgattcagcggggcggatccatcgtgaatgtagggagtattattggtttaaaaggcaacgtgggccagtctgtgtactgcgccagcaaaggagggctcattgggttttcacgatcgcttgctaaagaggttgcacgaaagaaaatcagagtaaatgtggtcgcaccaggatttattcacacggatatgacaaaacacttgaaagaagaacacttgaagaaaaatatccctctcgggaggtttggagaagctcttgaggtggcacatgcggttgtgtttcttttagagtcaccatacgtcacgggacatgttctggttgtagatggaggattacaactcaccatctaattagagatgatctgttgtgatgcttggtgaataaggtcaagtacacagttttctgttaattaggccatcatatctatgagtgacatttg

SEQ ID NO: 7082 - DNA, 863 bp, Cricetulus griseus
agcctagctagtgagaagatggtggaccacttggtaaacacagagatcaacagccagcggatcgcagcggtggagagctgttttggggcgtcggggcagccactggccctaccaggccgggtgctgctgggcgagggggtgctgaccaaggagtgccgcaagaaggccaagccgcgcgtcttcttcctcttcaacgacatcctagtgtatggcagcattgtgcttagcaagcgcaaataccgccgccaacatattattcccctggaagaagtaacgttggagccactgccagagaccctggaggccaagaaccgctggatgatcaagacagccaagaagtcctttgtggtgtcagcagcctccaccacggagcgccaggagtggatcagccacatcgaagagtgtgtgcggaggcagctgctggccacgggctgccagcccaccactgagcacgccgcaccctggatccctgacaaggccacggacatctgcatgcgttgcacacagacacgcttctcggcactcacccggcgtcaccactgccgcaaatgcggctttgtggtctgtgctgagtgttccagggagcgtttcctgctgccacgcctctcccccaagccccttcgagtctgcagcctttgctaccgggagctgtccgcccagaagcggagggaggaggccatggaggggtgcaggggctctccagggcagccagcccacctaggtggcggcactgtctacggtgcatccagtggcgatgatgacgactctgacgacgacagagaaggcagcggagatggcgactggcccagccaggtggaattctacacttctggtgtctcctggtcagccttccacagttgacc

SEQ ID NO: 7083 - DNA, 863 bp, Cricetulus griseus
cagggccaagctgtcccagatccgacagatttaccactctgagctagagaagtatgaacaggcctgccgtgagttcaccacacacgtcaccaacctcctccgggaacagagtagggtgaggcctgtgtcctccagggagatggagcacatggtgggcatgatccatggcaagttcactgctatccagaggcagctgaagcagagcacctgtgaggctgtcatgaccctgcgctcacggctcctggatgccaggcggaagcggcggaatttcagtaagcaggccactgaagtgctgaacgagtatttctattcccatttgagcaatccttaccccagtgaagagaccaaagaagagctggccaggaagggtggcatcactgtgtcccaggtctctaactggttcggcaacaagagaatccgatacaaaaagaacacggggaagttccaggaagaggccaccatgtacactgagaagacatctacggccaccaaagtccggggttcagggggccagagcagctgccagtccacacccagcccaggttcctgtggccccttccccctgaccagtggaggtgacatggttctcacccttcggaccctggccttcctccagcccccacctgggggagtctgcctccagcccccgacccacagcagctggcagagagccaccgccccacagccaccctcatcacctgctggagactctggaagcttcaactcagatgtgtctaattaagtttgggtacctggttgagtgccatggatgactggccctgtgtcctgccaattacctcagaaaccctggctgtggcaataccctttcctggccacttacgtacctaccttggagtgatttt

SEQ ID NO: 7084 - DNA, 863 bp, Cricetulus griseus
cggttgcgggagccgggcgagccgagcgatgcgcctgctgccgcttcctgattggctgcgtgtggctccctcttcgttctgattggccgcgagtgatctggacaatgctgagcaagggtctaaagcgaaaacgggaggaggaggagaagaaggaggaggaaggcctctcggtggactcctggtggttagatcaaggccacccagcagcggcacagaccccccgcccgtggcttccagttctctctttgacctctcggtgctcaagctccatcacagcctgcggcagggtgagccagacctccgccacctggtgctggtggtgaacacgctgcgccgtatccaggagtccatggaacctacaacctccctgccacccgtgtccatgccacccacagccccctctgtggcagacagcctcctggctagctcggacgctgccctctcagcctccatggccagcctcctggaagatctcaaccacattgaagacctgaaccaggtcccccaaccccaagccgatgaggggcctccaggccgctcagttggtggtgtcccgcccaacctgggtgccttggacctgctaggcccagccaccggctgtctgctggacgatgggctggagggcttgtttgaggacattgatacttccatgtatgacagtgaactttgggtaccagcctctgagggtctcaaacctggccctgagaatggaccagccaaggaggaaactccagagttggacgaggctgaattggactacctcatggacgtactagtaggcacacaggcactagaaaggccaccggggcctgggcgctgacaaccagacccaggaatggttggctgcgtctgagttgagcctg

SEQ ID NO: 7085 - DNA, 862 bp, Cricetulus griseus
ctccgctccagccgccgcccatgtgccatccgcggcccgcacggctacctcggcgccgggtccagggagagggtggtggaggagcagggatcctgtcggctcaaccccagagaaaaaaaaactcgaagaaggggaccgctgctccagggtctcctcgggaaaagtaggtgaggacggcggcttttcccgcagggactcgagaagaatcggtgaagacctaggcccgcaccgcagtgtctctcaggagagagttaggggacacgatggacatcggcagagcagcccacattttggtagcatacatgatgcagtacgggctggagatgtcaagcagctttcagaaatagtggaacgtggagtcagtcttaatgaagttgatgttctccatcagtttacccctttacattgggcagcacattctggaagtttggagtgtcttcactggctactctgggatgagattggaattgatgacagtcatataaagtttttatacagcatggtgttgagggaagcaccgatgccaaggatgacttatgtctgagtgatgcagacaaagcaaatgaccagaatgagagcccacaagaaaattgtggaattgaaacaatttctggaaatcgctgagagcaatttcaaatacttgggtgggataatagaagaggatctacagcagaagaaagaactgctcgaatctgagaagaccatcaaagagctgcaaggccagttggcttatgagcgactccgaagagaaaagttagagtgtcaactggatgaatatcgagcagatatggatcaactcaaggaaatgctagaaagaaaattcaggcccccagtgtcgtggctatggaagatgactcatgtg

SEQ ID NO: 7086 - DNA, 862 bp, Cricetulus griseus
  modified_base (52)..(52): a, c, t, g, unknown or other
ccagtcactgcccagcaggggacctgaactttctggaagacagccttccctnaaggacatcatgttagttaatccagccttcaccccgcatgacatctcctttcataagcctcagacctaccaacccagccatgcaggctctgagctcgcagaaacgtgaggtccacaatcggtcccctgtgagcttccgagaaggccgcagagcatcagacacttcccttacccaacggaaattgttagcatttagacaacatctttcagaatcttgctagaaccaaaggtattctggagttgaacaaagtgcaattgctctatgaacaaataggatcagaggcagactctaacttaacatcaactgctcctcagcttccaagacctctcgagcagctgccctcaggaggaagtctctcaacaacaggaaagtgtctccacactctctgctagcatgcatcctcaactttctccgcaacagagcttggaaacccagtgtccaatatattgtaaagaaccacctcggagcctggaacagcagctacaggaacataggctccagcagaagcgactcttcctccagaagcagtctcagctgcaagcttattttaatcagatgcagatagcagagagctcctaccctcgaccaagtcagcagctggctctaccccaccaggagactccaccgccatcccagcagtccccaccattcagcctgacccagcccctgagcccagtcctcgagccctcttctgagcagatgcaatttagccctttcctcagccaatacccggagatgcagttgcacgcccctgccctccaccacccacgcccccgggctccacactcccttaccctcacaattgcagca

SEQ ID NO: 7087 - DNA, 862 bp, Cricetulus griseus
cggaggctgcggcggcggcggcggccggggcggcggcggacgcggacgatggcagactttctgaaaggcttgcccgtctacaacaagagcaacttcagcaggttccactcggactccgtgtgcaaggcctcgaaccgccgtccctcagtgtacctgccgacccgagagtacccgtcagaacagatcattgtgacagaaaagacaaacatcctcctgcggtacctgcaccagcaatgggacaaaaagaatgccgccaagaagagagaccaagagcaggtggaggcagagggtgagagctcagcgccaccccgcaaggtggcccggactgacagccctgacatgcccgaggacacctaggccccgcgcacgcggtgcccgcgtctgtctgctctgtccgctcccacccggctcgcgtgtgtaagcgcagcccacctcctacacccagcccgccctccaacctcataggacccatgtatttattttccttgagtttttatttatgctgtaactcgtgtcaagcattggttaaagggacatcaggcccagccgtgaggtgttggtagacgcttttttaaagcgcagtggtgtcccccacccggccacccgccagcaagacgacaccagggtccagagcccagggcagcctggtctcccaacacaccgagcggccttttcgctcttcccacccacaggccggctggattgccccggtcttccggggtcacacctgtgcccaggcctcactctgagcccacgccagggcaggagagagccggcccttctggatctttctcttaagtcattttatcatggactagcccgtgctccgcatccaccccaataaaaggatctttcctactcc

SEQ ID NO: 7088 - DNA, 862 bp, Cricetulus griseus
gaaagatggcggagttggacatcgggcagcactgccaggtgcagcactgccggcagcgagattttcttccatttgtatgtgatggttgttcaggaatattttgccttgaacacagaagcaaggactctcatggttgccctgaggtgaatataatcaaggagagaccaaagacagatgaacacaaatcttactcgtgttcattcaaggactgtcctgaagtagagctggtggcagtgatatgtccttattgtgagaagaacttttgcctaagacaccgtcatcagtcagatcatgggtgtgaaaaactggagctcccaaagcctcgaatggctgccacacagaaacttgtcaaagacattatcgactccaagacaggaggggcagtaaataaaggaaggaagggtgcaaaaaccagcgggacagccgcaaaggtggctctgatgaagctaaagatgcatgctgacggcgataagtcactgccacagacagaaagaatttactttcaggtttacttaccaaaggggagcaaagagaagagcaaagccatgttcttctgcctccgatggagcattggaaaggtcgtggacttcgcagcttctctagccagtcttagaaatgaaaacaacaagttgacggcgaagaagctgaggctgtgtcacatcccttcaggagaagccctgcccttggaccacactttggaagcgtggatcaataaggaggaccaccctttgtataacggaggaaatgttattttggagtatcttaacgatgaagaacagtttttaaaaaatgttgactcttatttgcgagaaaaaaaaaaaaaaaaaaaaaaaaaaaaaaaaaaaaaaaaaaaaaaaaaaaa

SEQ ID NO: 7089 - DNA, 862 bp, Cricetulus griseus
atgttcctgcgaagacttggcagctggctacctcgaccttggggccgcaggaaatcaacaaaggctgaattgcctgccccagaaaccagatgggtggacagctcccccgagaattcgggcagcgactgggacagtgccccggagacaatgggagatgcggggcctcccaagaccaaggatgcagggaaaccgaggacccctggggctgccccggggacgaacagggaggaccaagtggaccatccaggaggcaaaagaaaggattccttcgagagggacaagactgtctctagcgctcaagagccttcaagactggagactggaggacccattcccaatggattcaggtggcgcgaagaaccatggcggcccccccacggggagctggcaccgccggaccagaagccgtattggagaaacctggtcgacgtcagaaattgctgcgctggcttcggggggccccggggagccctcaaattacctgcgggacccagaggagtatctgcacatctccaccaacctgaccctgcacctgctggagctgctggcctcggccctgctggctctgtgctccaggccccttcgagctgtcttggacgctttgggccttcgaggccctgtgggcctgtggctgcacgggctgctgtgtttcctggcggccctgcatgggctccacgctgtgctgagcctgctcaccgcacacaccctgcatttcgcctgcctctttggcctcctgcaggcgctggtgctggctgtcagcctccagggacccagtgaggatgaggagaccgctgactgggagagtgaggggcaggggcaggaggtcagggagcctagggaaggtccaggaagggtgctgtga

SEQ ID NO: 7090 - DNA, 862 bp, Cricetulus griseus
cagacgttctcgcccagagtcgccgcggtttcctgcttcaacagtgcttgaacggaacccggcgctcgacccctccgaccccagccggccgctccgggacagaaccctttgcaacctcgtcgctccgccgctccagcgtcgccaccgcgcccgccgccgccgccaccatgaccaccgcgtctccctcgcaggtgcgccagaactaccaccaggactcggaggctgccatcaaccgccagatcaacctggaactgtacgcctcctacgtctatctgtctatgtcttgctactttgaccgggatgatgtggctctgaagaactttgccaaatactttctccaccaatctcatgaggagagggaacacgctgagaaactgatgaagctgcagaaccaacgaggtggccgaatcttcctgcaggatatcaagaaaccagaccgtgatgactgggagagtgggctgaacgcaatggagtgtgcactgcacttggaaaagagtgtgaatcagtcactactggaactgcacaaactggctactgacaaaaatgacccccatttgtgtgacttcattgagacccattacctgaatgagcaggtgaaatccatcaaagagctgggtgaccacgtgaccaacttgcgcaagatgggagcccctgaagctggcatggcagaatatctctttgacaagcacaccctgggacatagtgagagctaagctgacttcccgaagccaccagtgatgtcatcagtcactgaggaagtgtatgcatgttggctgccgttaccttttctataagtcaccaaaacatctgcttaagttcttttaatttgtaccatttcttcaaataaaggattttggtaccc

SEQ ID NO: 7091 - DNA, 862 bp, Cricetulus griseus
ttcaagcgggacggagctggcttcaggctattccaaaggttttactcaaacatggatatcagaccaaatcacacgatttatatcaacaatatgaatgataaaattaaaaaagaagaattgaagagatccctgtatgccctgttttctcagtttggacacgtggtagatattgtggctttaaagaccatgaagatgagggggcaggctttcgttatatttaaggaactgggttcatccacaaatgctttgaggcagttacaaggatttccattttatggtaaaccaatgagaattcagtatgcaaaaacagattccgatataatatctaaaatgcgtggcacttttgctgacaaggaaaagaaaaaggaaaagaagaaagctaaaaccatggaacaggctgcagcagctgcaaacaagaagcctgggcagggaacaccaaattcggctaatactcaaggaaacgcagcaccaaatcctcaggtccctgattatcctccaaactacatcctattccttaataatttaccagaagagacgaatgagatgatgttatccatgctgttcaatcagttccctggtttcaaggaagttcgcttggtacctgggaggcatgacattgcatttgtagaatttgaaaatgatgggcaggccggagctgccagagatgctttacaagggtttaagatcacaccatcccatgctatgaagattacctatgccaagaaataacatttggattaaggcagtttgaaaggactttggtattatttatagtgtttgttttgataacatttggtcaagtcattttaaatggttggaaatgaaagtgaagtttgggagaaaaggcacctaattatttttt

SEQ ID NO: 7092 - DNA, 861 bp, Cricetulus griseus
agatcctcaagccatgtttgatattgagtattttagaaaagatccaagaccattcttcaagtttgcaaaggaaatatatcctggacagttccagccatctctgtgtcataaattcatagctttgtcagataaggaagggaaactacttcgaaactatacccaaaatatagataccttggagcaggttgcaggaatccaaaggatcattcaatgtcatggttcatttgcaacagcatcttgtttgatttgtaaatacaaagttgattgtgaaactgttcgaggagatatttttaaccaggtagttcctcggtgtcctagatgcccagctgatgagccacttgctatcatgaagccagagattgttttctttggtgaaaatttaccagaacagtttcatagagccatgaagtatgacaaagatgaagttgacctctcattgttattgggtcttctctgaagtaagaccagtagcactaattccaagttccataccccataaaatacccagctgggaccgttactgccagacggagaaaattaaagtggctcatttccctacctaaaaaaaaaatactcaatcttcatttggcttacactaaagaatttagtatattttagttttcctttttgcatgatgtgtttgtgctatagacaatattttaaattgaaaaatttgttttaaattatttttacagtgaagactgttttcagctctttttatattgtacatagacttttatgtaatctggcatatgttttgtagactgtttaatgactggattatcttcctctgacttttgaaatacaaaagcagtgttttatacttgtatcttgttttaaagtcttatattaaaactgtca

SEQ ID NO: 7093 - DNA, 861 bp, Cricetulus griseus
ctgctttgtggagattgacagccagcacttttgcgtcacctcactctaaccagcataatgaaatccaaaagaaaaactgatcacttggagagaactgcaagtgccctccgacgggaggtcgtggcttcggctaaggtgtgtgaaattgcccatgagtctccaacagtgaagagcctcgcctgcttgttgctgataaaagccttctcctttaaggctggccaatgggttgatttctttatcccaggaggtctcagtcgttggtggtttcaatttgctccagtccccaactgctagaacaagaaataagtgcacacttgactcggaagtggccctcagagtgggaggagagttcttctttgaccctcagcccacagaggcccctcgaaacctcgtgttgattgctggaggggtcgggattaaccccctgctttccatcctgcgccactcagcagatctccaccgagaccaagcaaacaaaggaagtagctatgagataggaaaaataaaactgttctacagtgcaaagaacaccagcgaactcctgtttaagaaaaatatcctcgatttagtaaatgaatttcctgagaagattacttgcagtttgcatgtcacaaaacagacagcacaaatcagtgaagaacttaagccatacatcacagaaggaagaataacagagaaggagataagcaaccacgtgtcagcagggactctgttctatatctgtggcccacctccaatgacggactttttctctaagcaactggaagacagccacgttcccaaggaacacatttgctttgagaagtggtggtagggagaaggcacagaagacctgagagccacccaggagagtgagactct

SEQ ID NO: 7094 - DNA, 861 bp, Cricetulus griseus
  modified_base (406)..(406): a, c, t, g, unknown or other
  modified_base (452)..(452): a, c, t, g, unknown or other
atgatttgaagaggaacacctagagtttgaagagcttagattcgtctagaggtacagataaacttgataaaaggaagatttggagatactttaaaaaggagtttgaagtgaaggcagaaattctgatcatgtttgtcaaccatgtgggactttgaacattgttctaaatattttcctccccaaatggaagaaaaaacaatttacaaaccctggtgcataagactctgagagaagtaataatgaagtttgctcactttgagaatggcaatactttatcatcttgttttggggaataaaacagaaacatacgtgtatgtatggtgagttaatcactaaggatggttccttgtgctaaattgctacaaatgactttatttaaattttgggtatttttggactggtgaanaggctggtgatgcagctgggaagtcattactgcttcacaacatggngaatgatgtttgtgagtggggaagcagtgtctgcttattcttcagcaatgagactaaaaagtgtctatcgtgctttactcctcttaaattctcaaactctgcttgttgttgaccatattgaaaggcaggaaacttccccaataaattctgtcagtgccttctttcataatttggatattgattttaaatacatcccatacaggtttatgaataggtataatggtgccatgatggatgtgtgggatgcacactataaaatgttttggtttgaccatcatggcaacactcctgtggctaatatacaggaagcagagcaagctgctgaatttaagaaaaggtggactcagtttgttaatgttacatttcatatggaatccacaatcacaagaattgcttatgtgttttatgg

SEQ ID NO: 7095 - DNA, 861 bp, Cricetulus griseus
ctatctccaggcttacatgaaatctttgcagtcagcgcagattttaagctttgtaaagaacagtgcttcagactcaaaaatgttgacagtttgtgtgaagagatgggatcggagcttgtgaatttaccacttagtgctgaactgcggtggctgtctagagggagaatcttaacaagattatttgaactgagacaggaaattgaaatacttttaaatcaaaagcattctgatttggccaggtatttccatgacaaggaatgggttgcaaagctagcctatttagcagatatgttttcacttataaataaattaaactctggtcttcaagggaccatggcaactcttttcaatttgtataataaagtcgacatatttaagagaaagctaaaaagcctggttgaagcgcacgcaagagaatgactatgacatgttccctctgttctctgagttcttagactcgtccggtgtgagtgtggaaagcatcaccagcatgattgttgagcacctacaaggacttttctcagattttccatgactgttacccaccagaagaggacttgcgtttgggaaatctgtggctcattgatcccctttgccaagtcaccagaataacaacctcactgactctgaagaagaaaaactagcagcgttatcttcggatacaagccttcggtcagcttataaatcaatgtctgtaactcagttttgggtaagggcaaagacaagtcacccggaactccatgaaaaggcagtgaaactcttactgcccttttccaccttctgtttgtgtgatgccaccttttcagccttgaccgcatcgaaacaaagaaacctgctgggttttggtcctgccctaagact

SEQ ID NO: 7096 - DNA, 860 bp, Cricetulus griseus
  modified_base (73)..(73): a, c, t, g, unknown or other
  modified_base (226)..(226): a, c, t, g, unknown or other
agcatctgtcaacttggactacctgcatcccacgtctgtggttcacctagaaggctgcacagagcagagcagnaccacggacagtgagccatcaacagagcaggttagctgggaagatggccagaaggggcttccttggcagtggaatggcacacaagttctctcagttaagtaatgaagacctgagtttaattaacaaacttggtgacaacggtggggtgttacngaaaaaactggacctatcacctgaagcctgtcgaattccacatagctctagtagtgaaaatataagaaatctcagccacaaccctggtgtggtgaaggaacgcgctaaagaaattgagtcccgagtgaccttccagtcagggatcaccaaaacatcacaaatgaggcgctcggcttctcttgccaagttgggttacctggacctttgtaaagactacttagcagagagagagtttgtctccccagaatcccctcatcttaaattgcttcagcccttcatcaaaacagactcaggcatgcatgccttgatgacccaggagccctctgcaagcccagatgcccaccagaacccacagcccaccaagtactttgtagagcaactcaaaacaacagagtgtattgtgcagagcaagccagtagagaggccccttgtgcagtatgccaaagaatttgggtacagccagcagtgtttgctccccaaggcaagagcagaattgactagttctgaagttggtcttcctttgcttacagactacagggcctgcagtgtacaggccccgctccgagggctggctgtggcacccgcagcaacatggcagaactcacccgcttaggacgactagaaaagagacaaa

SEQ ID NO: 7097 - DNA, 860 bp, Cricetulus griseus
tcccagcatcagttcggctactccccagggcagcagcagactacccccagggttctccaaggacatctacaccatttggatcagggcgtggtaagagaaaaaagaatgtctaatgagttggaaagttattttaagccttcaatgcttgaagacccttgggctggcctagaaccagtgtctgtagtggatataagccaacagtacagcaatacgcaaacattcacaggacaaaaaaggaagattacttttcttaacttttctgaaattcaactggaaacttcatgtgtcaggaacaccttggacagaacttgtacttgtgtaaatgagttgaacccaaagatgatgactttggaagtgattagcagacgctcgggatatctctaacttttgtcaagtgttgttgatgttagagaagatgataggatcatttgcagtattaaggtatctgggagtgtgtaccacattcagaaaaccacagtttctaaaataacagatatttggttttttcagtggtttaaaataaaacattttttgcctgtctctacctcccgaaagattttatgtaaataaaacatccattggaaccagaactttgaaatttttctgagtttttggctagatgctccagttttatcatgtaaaatgaggaaattcatagtacttatgttcacttatccctgtattctgagtttttagaacagtgcctgcaaaataataggtactacataaatgtttaatatatattttggttataactattttattgctgtgcttagtcccatgtgtataagggttaatacaataatgttatatggttatttgaaagaaaacatccattttcaacatcatgggtttttttc

SEQ ID NO: 7098 - DNA, 860 bp, Cricetulus griseus
ccacccagccagtacacccccacaagccattagtgtggagcagtgaactgtttgtggttccttttacttgagatcatgcagagagcttcacgcctgaagaaagaactgcacatgttagctatagaacctcccccaggcatcacgtgctggcaggaaaaggaccgagtggatgatttgcgagctcaaatattaggtggagccaacacaccttatgagaagggagttttcacactggaagttatcgttcctgagaggtacccatttgaaccaccacagatcagatttcttactccaatctatcatccaaacattgattctggtggaaggatttgtctagatgttctcaaattgccaccaaaaggtgcatggagaccatccctcaacatcgctactctgttgacctctattcagctgctcatggcagagcccaaccctgatgacccactaatggctgacatttcctcagaatttaaatataataagatagcttttctcaagaatgccaggcagtggacagagactcatgcaagacagaaacagaaggctgatgaagagttggtgactctgaggaatgcaactccacacagaagaggaaagccgggccactaggaggcatagaaaagaaattccaccccgatgttcagagagtttgtcctggtccctcttagttaatggagtctgtgacaaggtggtctcttttgcttgcttttcttggatgtttttctttgtgtttgatgacataatgtttgtatccttataaaagaccatgtatgtttatgaattctgctatgcagtgattctttaaggatactttgttttatttatcttgtacatatgtattttgaaaacttttaaacttg

SEQ ID NO: 7099 - DNA, 860 bp, Cricetulus griseus
gggttttcaagatggctgcagcccctcaagcacctaagaggggatctattaggaagactagacctctggttgtaaagacatcactgaacaacccgtatgtcatttcctggagcaccttggagagagaggacatacactttatattacagacacttgaagacaaatttaaatcaattggactaaagaaaattgaagataaaaagaaaaaaaaaaacaccttttagtaaaaaagacaaagaaagcagcccagatgttgagattagtgagggtctgaaagaggagcacgatgggaatgtgcaggtctcagggtggacacccgcacatgtcagaaaacagctggtcattggcgttaatgaagtcaccagagccctggagaggaatgaactgctcctagttctagtttgtaagtcggtcaagcctgctgtcatcacctcacacatgattcagctgagtataagcagaactgtgcccgcttgccaggttcctcagctcagccagagaattgctcctgtcattggcttaaaatgtatgctagccttgggctttagaaagaactccatggacttcgctgaggaagtaagagctatcattcccagggtgcccagcttacatgtgccatggcttcaagacagaacccaagatcctaaagacagtttagagacagaatctttggaaagccgggacaaagagattttggacacttcatttgatgaccttacaaaagttagtaagagaaagcctgccgaaggtgggcaggcttccactacaatactacaaccccttaaaataaagaaactcattccccaaccctcataagataaggaaaccaacccaaaagtaaaaaatccatttcaaaagta

SEQ ID NO: 7100 - DNA, 860 bp, Cricetulus griseus
tagagattgaggggaccactcaccaggtgtatgtgctcaagaggccttacgttgatgagttcctgagacggatgggggcccattgcagacttactcttcaggagtcttgaattagaccacctggcctggtgtccacacccactcaagccacaccaggaatctgcccagctgtcaggttcagctctttaaggtgcctcttcagggacacagtgtgtctctctgattgggcttctaaatcaaaagcctgatgttcgtgtccctcttatagggggagctttggacacaggaccagtttgataaagggccaggtaagggtttccactctgcacattgtagaggggacactgtaggcccataggtccctaattaaagaggttgagtgaatttgccttcatttaaccagggacctgtttcactccctcctgcctcctgcctccaaagattctctgtgtaaatgtgtaatcccctctgttaacagtggctcagaaagcttcacactaaaagcatggggctttcaaggcagccgttccccaggaaatggatcctcaggtgattccatgccctgccctgttccagaggcagtgcagcccgatcatggctgttctgcatccagcgtgtcagcctggctaagtgtatgagaacggttagcctgttttcccctttgggctacttaaccatggctactctgcttcccactgtgactgggctatgggatccttgaccaccttgcttcatgatttgatacatttgttgtattcaaaaacttgaaatgtaggatgccattaaaagtctgtttatatttttggaatatttgtattacttacaattagttaataaaggctggttttaaaacctttgca

SEQ ID NO: 7101 - DNA, 860 bp, Cricetulus griseus
tcgcggtacgacggaggagtgggcgccgggatctcgctgtgcgtccgcctggcctcgtctcttgctcgcttgtgcgatcttcagcacggtccgagatggctggcggtaaggctggaaaggactccggaaaggccaagacaaaggcggtttcccgctcgcagagagccggcttgcagttccctgtgggccgtattcatcgacacctgaaatctaggacaaccagccacggccgtgtgggcgcgaccgccgctgtgtatagcgcagccatcctggagtacctcaccgcagaggtactagaattggcaggaaatgcatcaaaagacttaaaggtaaagcgtattacccctcgtcacttgcaacttgctattcgcggggatgaagaattggactctctgatcaaggctacaattgctggtggtggtgtcatcccacacatccacaaatctctgattggaaagaaaggacaacagaagactgtctaaggatgcctggattccttattatctcaggactctaaatattcttaacagctgtccagtgtcggtgattccagtggactgtatctctgtgaaaaacacaattttgcctttttgtaattctatttgagcaagttggaggcttaattagccttccagccaaccaaatttctgcattcgagtcttaaccatatttaagtgttactgtggcttcaaagaagctattgattctgaagtagtgggttttgattgagttgactgtttttaaaaaactgtttggattttaattgtgatgcagaagttatagtaacaaacatttggttttgtacagacattatttccactctggtggataagctcaataaaggtcatatcccaaactag

SEQ ID NO: 7102 - DNA, 860 bp, Cricetulus griseus
aaaggaaaagcaggacagaaagagttctgcagaactgtcagacttgcttctggatggcttgagggaaggctcctcaatgggaaaaacagcttcctctgaagacactgacagcccactcagtgcagctgaccgttcaggtgacccagaaacatgtgagaaacagcccttcttgagagctgctaaagaacatgctatgcccaaagatttaaatcaagtcttagcaaataaggttatggaaatgttgccaggtccccagcatgttaacgtagcagtagtgaaaaccatcttgttgaaagagcaattccctggagaaaacatagtttacaaaaagttttcttactcattctgacttgattccaggtgtttacgaaggaggcttaaaaatctgggagtgtacctttgatctcttgacttatttcacaaaggcccaagtgaaatttgctggggcaaaaagtgttggatcttggctgtggatcagggttgcttggaataactgcagccaaaggaggagccagagaagttcatttccaagattataacagtttggtgatcgatgaagtgaccttacctaatgtggttgctaatttccctttgaaggatgagggcaatgatgtaaatgagccagatgggaaaagacaaaggaagtcaaaagtagcccaagaagaatgtaaatgtcggtttttctctggggagtggtctgagttttgtaaatttgtattaaatgaaaaactgtttgtgaaatatgacctcattctcacctcagaaaccatttataatccagattattacaacactttgcatgaaacagtcctcagactgttgagtaggaatggccggtgcttctggccagcaaagcacat

SEQ ID NO: 7103 - DNA, 860 bp, Cricetulus griseus
ccccagcaaggaatctggctcaggccttagagcttgggctagtcctgagcgtgtgtccctctgtgtatattgagggaggtgagagttggggccggaagctcatcacccagggtagatccgccctcctattcttggaaaaggtcacctggaggcttctctgccccaccctcaccctctggccaggatcatacaaggctatatcccctgctgcttggttcgaccccaccatactcagggtcactcactgttcagctctaattatagctatcctgcctcttaggtattctgtttgccccatttcttgaggtcagatggatgtctgctgtcttcttgtgttttcctcctgtctccccagcctcctgctctcacgctcacatctcacctcgtcgtcttccaggctgcctttcttccaagtctcacctttttcccagcagaagctctgcttgatttttggtgcactgctcactcccagctccactggcccaagtctgagcctgggccccttggtttttagagagagagagagagagagagagagagagagagagagagagagagagagagagagagagagagagtatgggttgggacagttcaattgtcacttccttattatctaggatctctcagagtctatctccccaagacaggcagggaaattctgatttctctattaagaaagtaaatctccaattcaccagcaataacaatcagaggagacttggccctcagtccttgtatttctctttttcactccctcttccagccccaagatggaattttggggctggatggagagggttggtaactactgtgagcaagtccccaaccctgaccagcctctccatgactggtgactg

SEQ ID NO: 7104 - DNA, 859 bp, Cricetulus griseus
gaggaggaggaggaggagctgctgagcgccgagccgctgctgcccaccgcctcccagcgcgtgtgcgtcttgcatcctgacgtcaagggccgggccggaaggtacgccgcggaacacagagttgcaggtggcggaggccgccgcgctggtgcacgcgctgcatggctggtcggtggtgcagactctggtggtgcccaccaaaagtccccgacagcaggctcgtcttcggcaagggcaacttccaagacctgacagagaagatcagggggtgtccagacatcacttctgtcttctgtacatggacaccattggcttcctgtctcagctgccacacagcctgatacagtccttctccgccacgctggaggacgtggcgcattcggatgtcatcatgcacgtgagggatgtgagtcaccccagcacagagcagcagaaggccagcgtcctgtctacactgcagggtctgcagctgccctccgctctcctggattccatgttggaagttcacaacaaggtggacctggttcctgggtatagccccccgggcccaggtgtcctggctgtatcagccctcctggggcatgggctggacgagcttaaggcagcactggaggagtccgtgctgcgggccacaggcaggcaggtcctcaccctctgcgtgcgacttgggggaccccagctcagctggctatacaaggaggccactgtgcagcaggtgcaggagctgccagaaaccggtgctgcccacgtgactgtcatcatcagccgagccgcctatggcaggttccggaagctgttccctgggtgacaaccgatagtccctcccagattgactgacagctcattaaacaggatttgt

SEQ ID NO: 7105 - DNA, 859 bp, Cricetulus griseus
actagctgtgccaccgtgttatgatgccatctcgtaccaatctggcggctgggatccccagtagtaaagtaaaatattcaaggctttccagcacagatgatggctacattgaccttcagtttaagaaaagccctcctaagatcccttataaggccattgcacttgccactgtgctgtttttgattggcacctttctcataatcataggctctctcctgctatcgggctacatcagcaaagggggggcagaccgagctgttcctgtcctcatcattggcattttggtgttcctgccaggattttaccatttgcgcatcgcctactatgcatccaaaggctaccggggttactcctatgatgacattccagactttgatgactagcagtcacctcagccttgagaagagacacagtgcaccaactttaagacatcaagcaggaactatggctaagtctgaggaaatctacagtttgcagatgtttagcaaaacaatggccggattgtatgaatgcttttccaaaatgctcatgctttataattagctaattaggacatgttatgttttcgtctgctggccctggcaaagcttgacaagtttttccacatgcgtatgcatcatgtaagagctgtgaggctaattgtctgggaaagcaggctattctatagtggaaagtgttaccctctttcagggtgagctttccttttgccttcatcgtctgcttgtttttgtagcatatgaaaaatgtattatgtctagtttcttattactaagtaatttatttttaaaatatctatcttatccctcacactctcctctaccttcacatcctggtaaaattaaagtgtctgtcttatcct

SEQ ID NO: 7106 - DNA, 859 bp, Cricetulus griseus
caagagagtgcctaagactgaaaaagactggatggtactccagtaattaaggaagatgatgaagatgaaggctaaggccatactttactactttgttaatttatttaaatgttatgagaacaatagataatgtttgtataattgtctattttaaagattttgtgagggtacagttcttaagataaaacacatctctcacttccatcctttaaaaaccataatcagtgtgtatcccacaaaccagcagcactgactctgtgcagtccacctttggaaactatcaatttcctggttttatccagtcatggaccacatcacttgtctcctaaaatttacacaccagtcatttctaacagcagaaggacctgttatctgtactcagttgttttagtattttttctgtctgtctatctctgtgtgtctttctaactctccctctcctctcctactccctccctctctctctctctcaaaaaaggaaggaaggaagggagggaggggaggaaggaaggaaggaaggaagggaaggaaggaaaaaaaaaaaggaaggaaagggagtgagggagggaggaatgaaggaaggaaggaaggaaggaaggtggccaggggcatcatccccaaagccttggcttctagaaccacatccattctgaaggcattttaacatcagttaaagctttggtaacagtcttttatacacaggacttttgtagcatgactttatgataaaacttattgtgtgttaaattatttagtaatattgagtttctgaatgttattttgtgaaacttgttttaaaatagtaataaatcatgttattttataaaaaaaaaaaaaaaaaaaaaaaaaaaaaaaaaaa

SEQ ID NO: 7107 - DNA, 859 bp, Cricetulus griseus
agcggagcagcgggcggagcactgaccaaggaaaatggcagacggtttttcgcttaatgatgccttagctggttctggaaacccaaaccctcaaggatggcctggtgcataccaacctggggcagggggctacccaggggcttcctatcctggggcctaccctgggcaggctcctccaggggcttatcctgggcaggctcctcctagtgcctacccaggcccaactgcccctggagcttaccctggctcaactgcccctggagcttaccctggcccaactgcacccggagcttaccctggatctgcacctggagccttcccagggcaacctggagcacctggggcctaccccagtgctcctggggcctatcctgctgctggcccctatggcgcccccactggagcattgacagtgccctataagctgcccttggctggaggagtcatgcctcgaatgctgattacaatcatgggcacagtgaagcccaatgcaaacaggattattctaaatttcatgagagggaatgacattgccttccactttaaccctcgcttcaatgaaaacaacaggaaagtcattgtgtgcaacaccaaacaggataacaactggggaagggaagaaagacagtcagctttcccatttgaaagtggcagaccattcaaaatacaagtcctggttgaacctgaccatttcaaggttgcagtcaacgatgttcacttgctgcagtacaaccatcggatgaagaacctcagggaaatcaaccagatggaaatttctggtgacataaccctcaccagtgctgcacccaccatgatctaatccagaagggtccttcttgtaaggcatccatttaataaa

SEQ ID NO: 7108 - DNA, 859 bp, Cricetulus griseus
tccctcatccaaaactcccaactggtcaactgcaggtcacctgggaggaccatgcctctgtcaaggaggacacaggcacctttgatactgtcctgtgggccatagggcgagttccagaaaccagaaatctaaatctggagaaggctggtgtgaatgtcaaccctgagaaccagaaaattgtcgtggatgcccaggaggccacctctgtcccccacatctttgccattggagatgttgctgaggggcggcctgagctgacacccacagctatcaaggcaggaaagcgtactgggctcagaggctctttgggaaatcctcagccttaatgaattacagcaatgttcccagactgtcttcacaccactggagtatggctgtgtgggactgtctgaggaggaggctgtggctctccatggccaggagcatgtggaggtttaccatgcatactataagccactggaattcacagtgacggatcgggatggtgtgcttgagggagcccccacagctggtgctgggcctgcacttccttggccccaatgctggagaagtcactcaaggatttgctctggggatcaaatgtggggcgtcatatgcacaggtgatgcagacagtagggatccatcccacctgctccgaagaggtggtgaaactgcacatctccaagcgctccggcctggagcccactgtgactggatgctgaggttaagtcaccatccctgccaagctgagggcacacgctatgccatgtgaccagtacaaggctcctcagacacctgggtccaggactggaaggctttgctgcctcctcagagaccccagatgtggatggagcaccgtgtgtcctgcagggatgact

SEQ ID NO: 7109 - DNA, 858 bp, Cricetulus griseus
actggagcagtgtggcccccctgaccttccgggaggtgaaggctggttgggctgacatccgcctctccttccatggccgccaaagcccatactgctccaactcctttgatgggccagggaaggtcctggcccatgctgacatcccagagcttggcagtgtacacttcgatagtgatgaattctggactgaggggacctacaaaggagtgaacctgcgaatcattgcagcccatgaagtgggccatgccttgggacttggccactcccgatatactcaggcactcatggcccctgtctaatgctggctcagattcagggccaggtcccttgttccgagtgtctgctctttgggagggactccatggaaacttagatgctgctgtctactctcctagaacaggatggattcatttcttcaagggaaacaaggtttggcgatatgtgggtttcaagatgtctcctggctttcccatgaaactcaacagggtagaacccaacctggatgcagcgctctattggcctgttaatcaaaaggtgttcctttttaagggctcagggtactggcaatgggatgagctggccagaacggacttcagccgctaccccaaaccgatcaagaaattgtttactggcgtgccagaccgaccctcggcagcgatgagctggcaagatggccaagtctacttcttcaagggcaatgagtattggcgtcttaaccatcagcttcgagtggcaaagggctatcccagaaatgtcacacactggatgcactgtcatcctcagactccagacactaactccttacctggcgacattactccctcaagcacagtcacactcttggataccactccctca

SEQ ID NO: 7110 - DNA, 858 bp, Cricetulus griseus
cagcagcagcaccagcagcagcaggagcagcaccagcagcagcgaggagcagccaccagcagcagcaggagcagcagaaaaagaagatcaaatcctggtttccttggcagggttaaaacagatcaaagacattctgaaaggttccctgcgcttcaaccagagccagctggaggctgaggagaacgagcagattaccatcgccgacgaccactactgctccagtggccaggaccagagaaagccaagctcctcgggcctccaagcaggcctcttcaacgatgccagggtgcacaggtggagggacctcagatgacttcatcctggtttccaaagaagatgagggtcgcagtgctaaaggggccttctcaggccagtcacacgccccttctccaccctcagaagcacagcggggaaaagcagagtgccaacctgctccccgctgctgttctcagacccgttgatgggcccagcctcagcttcctcccagcaacccaagctccagccctgatgatgacagcagcaaggattctggcttcaccatcgtgagccccttggacatctgaacacagggactccactagtagagacccctgctgaaccagtgtttctttcccggcatgcatttggcattggcacaacccattggaaccctttttcttccttgttgaccattgcttccctttctgttgcctccattgatggtgcggagtgcattccttccctgttactgtatcaggtatttctgtctaattcacattgtaaaatccttgatatatacaacctttttctttaaccacagagtaatcatcaattttaatcactcacattttgatcatagcagctaaatacagttttata

SEQ ID NO: 7111 - DNA, 858 bp, Cricetulus griseus
gtctatgtgctttccagccatctcgggcccccaccacgttggctgcacagatgtgatggtgggtcagagtctggaggggagcctcttccgactcttctacccctgccaagcatcagagacaaagtgtgagcagcccctgtggattccccgctatgagtactgcttgggcctggctgactacctgcagtataacaagcgctgggttgggtcgctgttcaacctgggtatcggatcttgtcgcttgcctgttagctggaatggcccctttaagacaaaggaatctggataccccttgatcatcttgtcccatggcctaggaggcttcagggcattgtactcagccttcagcatggagctggcctcccgtggctttgtggttgctgtcctggagcacagggaccagtcagcttcgaccacctacttctgcaagcagaccccacaagagagccagcacactgaatccctggaggaggaatggatccccttccgtcgaatcaaggagggggagaaggaattccacgttaggaatccccaggtgcaccagcgggttggagagtgtgtgcgggcactgcggatcctgcaggacgcctctgaggggaagcccgtcctcaatgtctttcctggtggattggacctggtaaccttgaaggacggcatcgacatgagccgggtggctgtgatgggacactcgtttggaggcgctacagccgttcttgctttggcccaggaggtccagtttcggtgtgctgtggccctggatgcttggatgttccctctggagcatgacttctaccccaaggccaggggccctgtgttctttgtcaatgctgagaaattccagactgtggagaccatcaa

SEQ ID NO: 7112 - DNA, 858 bp, Cricetulus griseus
gcaaactcaagccctgttggagcagtactcagagctattacttcgagctgtggagcggcgtatggagcgcagactttgatttccagaagcctgtccaaaatgaatgctccccactgaacctgtaacccttcttccactcatcagaacctgtgagaatgtctggagtggacagcaggggtcagtgctcagaggcaaagcagctttcccagctgctgctcaggggcccctgtatttattaatttatttccatgactgttgcctcacttccttgggactcctgcctcaaaagaccctccagtggctcatagcagggcaggtcttgagtctatgtcttcttggtgctgtgaggggtaggagggcagcctgcctcatctgggggcgactgggaagggctggccttctcttcttagaagccatttgaatttacttcagggatcagctccctggggtggagcatacacagggtactccacattccactccaattctccctgcaagagagccccagtatttctaccgaatccttttttttttcccttgtggtagccagttgtgggattttgctgcaggacagtgaagccctctgctgagcaaacacaaagcctgcctacttttctcagccctttgggcttcctcattctctaaccctggtccctagaggactactgaagccccagggaccgctttctccctatatcctgggcaatgcgcaatcagaaaactgtattgggagttccctcatggtttacagggcactagcccaccttcctaggactttggccacacacacacacacacacacacacacacacacacacacacacacacacacacacacacacacacacacacacaaat

SEQ ID NO: 7113 - DNA, 858 bp, Cricetulus griseus
aggtcaggtatctagagaagaatgtgaaatacaagtcaaagtacctggatatgcgcaagcaaatgactgtgaagaacaagcacatcctgttcacggaagagtcgggaaagccccttctcaagaagagtaaagtgcggagtaaggtggaaaaattccttaaatgggttaatgaaccagcagatgaaacctcacaggagtcgctttctcacaacaaaatgcaagactcttgcacaagcagtgactctgaggagcaagacatgccttttggagaaagctgatgacccgatggagaccagagatccagagcctgacagaggtcagaccatctcttcagccagtgaacttgaagcagaaaagagtgaagtcttctctcgttttgtatgatgggatcaagttagataaagagggctggttttcagttactcctgagaagattgctgagcatattgctggccgtgtcagtcagctttcaaatgtgacattgtagtggatgctttctgtggagttggaggaaacaccattcagtttgccttaacggggaaaagagtgattgccattgatatcgaccctgttaagattgatcttgctcgtaataatgctgaagtttatgggatagcagataagatagagtttatctgtggagatttcctactcttggctccctgtttaaaggctgatgttgtgttcctaagcccgccttgggggggaccagattatgctactgcagagacctttgacattcgaacaatgatgtttcctgatggctttgaagttttcaggctttcccagaagacttatctcaaaaaaaaaaaaaaaaaaaaaaaaaaaaaaaaaaaaaaaaaaaaaaaaaaaaaaaaa

SEQ ID NO: 7114 - DNA, 858 bp, Cricetulus griseus
  modified_base (827)..(827): a, c, t, g, unknown or other
ggatcgcaactttgctgagtttaacttcatcaatgagcagaactccgagctacaccaccttcacgaagagattaaagagatgcaggaagccttagtcagtgagcatgccagtcaggatagccagcacctgcagcaagagcagcagtgcagagtgttgcagcaggatgtggacaaggtgcgctctgagtctcagcagctggaggtgcgcttgctggctctccgagctcaggtggaaaagctcaaggctgatactccagcttctcttcgacaaggctcagtgtgacagcagtgccatcaaggatctccttggggtccaggcctacatgagggatagggacgtgggcctcttcctgagtaccattgagaagcggctggtgcaactcctcacagtgcaggctttccttgtggtccagaaccatgcccctttggctgatgctgcccttctggcactgggacagagccaagatgaccctccaaagaagaccactccactccagcctcctgacacactggaggactccccaggttttgtggtcaaagaggactaccctatgagcaaggaggagctgctgagtcaagtgatgaaggcgatggaggtcaagaacctggaggagaccccaaggaagttggacagcagcccgagcttggctttctccagggccgtgggagcttcaaacataccagctccagcagctacctggggtccactggctatgtggagaccagccgaggccatgcgagcacaggaggtggcgtacagagccaaagcattggatcagagttgagtagaggccttggctccagcagtggccaggcatccagtttcnccctgcctccaggcccacttcctccactagc

SEQ ID NO: 7115 - DNA, 858 bp, Cricetulus griseus
caatttcgtggcgggaataaatgctcggctgttccggtagaaatcaaatctatggcgtctgcaatggagcagccgggggagaagcttgcggccggggctgagggctgcggagaggtgcggggtgagccgcaggctgcgggggaaagcatcgaggatcgcatccgcctgctgctcaggctgagagcacagacaaaacagcaactcttagaatacaagtccatgattgatgcaaatgaagaaaaaactcctgaacagatcatgcaagaaaaacaaattgaagttaaaattgaagacctggaaaatgaaattgaagatgtaaaaagtgattttgaaatgaaaactcttgcactaaacaggatgaaactttcggctgcacttacaaataacatggaaaagatggatgctgagagtagtgtactcactgatgacatgaaacacatattagagctacataagttgataatgaagtcacaggaggagtcttcggaattaagaggaaaaactgcttgacattagaaagaagagaacttcaaataaaacaaacgtcaagaagtatgcttttagaaatacaaactgagaagagcaagcagaaaaggatttggacaatatggaaaattccgacgtgataaagaccatgaaaaaaaactacagatggagataaagattactacagttattcagcatgtgttccagggccttattttgggaagtaaaaccaactgggcagaggattctgccctcaaggaaattgtgctacagctggagaaggatctcaacacaatctaataagaatcctgctctggcattggaacgagtttgtgcccactctgccatttaaatagcagagtttgtgggaaa

SEQ ID NO: 7116 - DNA, 858 bp, Cricetulus griseus
tcactccaaaagccactgaactgacaggagttgctctctgcaggtacctgacctgagttcagggtagcagcctagacagtttacatgactgcccacgcttgccttactcatgggtggtgaaggtcagcacccatgggctttcttgtgtacaggcccaaggaacttgtcctgcccacacatgcaggtgtgtgttctcagaaagccttactttaaaaaatttttttttaatagtcaggagagttttctaaatttgtatgcagaaagaaaagttaaataaaagaaagatccatattaaacaggaccgcccccctccccaatttccagataggtttcctgtgcagacagatggcatactttttctcgggctcattcaaggttcacagcagtcagaactcacccctggatcctgcaccccatttccactgatgtggttaaaattacttgaatgatggccacttaaaatgtaagccacgtgccagggctcagggaccctctgcccatgcagcccacgatgctgccccttgccacatccgtgctgctggtcagacccctccccttggtgccgggccccttaaggaggaagagaaagatatttttaaattgcagactgatggagctcctgtagcctaggtaggatagcctgacctcctagcatagtctcattggcaaatgaattgcattgtcagtgcccaggcgggatgcccagaggtcagagacagatggccccgcaggctgtgctaggaccatgtgtgctgtcccagccaggcggcagctccaacaaaaaaaaaaaaaaaaaaaaaaaaaaaaaaaaaaaaaaaaaaaaaaaaaaaaaaaaaaaaaaaaaaaaaaaaaaaaaaa

SEQ ID NO: 7117 - DNA, 857 bp, Cricetulus griseus
ggaccaggcttcaggtatgcaaggtgcagatgcttccacccaatatcgcagacatttggcccttcctttctcccacaggagttcatgttctttcagactcaggtgacttccagcaccccaccccacccctctctgccctctcctgcagctcagctgatctgggtatccatggatgccagtgggtgtgggcagtcagggaggagtgtcccctctctttctcagggcagtccttgtcttctgtgttccctcccacccacctgaatgacacagctaaggcacacacacacactaaccccctacaaggccagtactagagtgaggagtggtggccacctgcctatctttccccttgggccctttcccatttgaatgtagaggttgactagtacttttctctcactgtgggctgggataaagatgtgcctcagcctctggtgtggacactcgaagtgccacagttgagcccgtttgggctgtgtggttatcatctggtaagatggtgatctcattgccaagttcctcccacctcctgcccactggggaagctcagtgtcagtgaggtggtataggtttttgctttaagtggcgagccagacctggccgccaggtctcagcacaagaccgctcgctcctttgcacagaatgagcttcgagccttgttcagactacatgaatgtatcgggaggggttgggaggggctcaggccttcccctgggacatgtgctggggagaggcagcaggtgcagagtgtggttttatttttgtactgatgggtaagagattgtatagcatctatttatttgatttatctggtagattaggcaaaaattattaaaactacattaaaatggttttta

SEQ ID NO: 7118 - DNA, 856 bp, Cricetulus griseus
ccgtgtatttcctctttcggccgtgcttgccggcagactcgccgccatgggccgtgtgatccgagggcagaggaaaggcgccggatctgtgttccgcgctcacgtgaaacaccgtaagggcgccgcgcgcctgcgtgctgtggacttcgctgagcggcacggctacattaagggtatcgtaaaggatatcattcatgaccccggccgcggcgcccccctcgcgaaagtggtctttcgggatccctaccgatttaagaagcgcacggagctgttcatcgccgcagagggaatccacacagggcagtttgtgtactgcggcaagaaggcccagctaaatatcggcaatgttttgcccgtgggcaccatgcctgagggtactatcgtgtgctgtctggaggagaagcctggagacaggggcaagctggcccgagcatccgggaactatgccacagtcatctcccacaacccggagaccaagaagactcgagtgaagctgccttcggggtccaagaaggttatttcctccgccaacagagctgttgttggtgttgtggccggtgggggtagaattgacaaacctatcttaaaggctggtcgtgcctaccacaagtacaaggcaaagaggaactgctggccacgtgtacggggtgtggccatgaatcccgtagagcatccctttggaggtggtaaccaccagcacattggcaaaccatccactatccgaagagatgcccctgctggtcgcaaagtgggtctcattgctgcccgccggactgggcgactacgtggaaccaaaactgtacaggagaaggagaattagatctcaggagctaataaagtatgtgctttggctaat

SEQ ID NO: 7119 - DNA, 856 bp, Cricetulus griseus
ctgcagggccacgccgccgcggggtcggtgttgctaccgccgctgccaggcgctccggagctgtccgcttcagcaccacggcggcggcggtagtggtggtgcggaccagcccggagcccgccgacgcactcatgcactttagaacctcgggccgcagctccaccccgcacaccggaaccgacacagagacccacggcccccagcccgccccctcccgcacggctcccctgccccgcccctcctccgatcaatctggtctgcagcccgggcagctgcggcgtcggactgcgcggccagggaggtttggctgcatatttgcatgagcttcctacccacctcagcctagccctccgggcctttcctcaactgtacccctgtctggcgtgaccctagcctctttctaagggacttcctcagcacatttgtatttttatatccgattctttgtttactggctcctctcatggcttgtgcccttcccccacagcctccgccatgctcttctgcgcctggcagataggacaggtgttgagactgggatgggacaagcccccaacatggtaactaaccacatggccagtctgtccaaacctgacccgaggaggctcattgggagactcctccctcccaaggtaccttttaagggcccagatctgattttaccttggaccccttcatgctatccctgggaacccaaatggggactgctcggtacctttggatgacacctgtggacctgaagatgttcttaacccagggttgtcctttgtaaaaatgtttctccatcctcaatgtaacaggagtgtgtgaataaacacagacctccgtgtgtgagtaaaaaaaaaaaaaaaaaaaa

SEQ ID NO: 7120 - DNA, 855 bp, Cricetulus griseus
cagaaacagatggcttctacaaaagcagggaagtgtttgatccagcagaacagtacaagatggaccacaagaggagaggaatcgccctcatcttcaatcatgagaggttcttctggcacttgacactcccagagaggcggggcaccaatgcagacagggacaacctgattcgaaggttttcagatctaggatttgaagtgaaatgctttaacgatctcaaagcacaagaactcctgctcaaaattcatgaggtgtcgacctcaagccatatagatgctgattgcttcctgtgtgtcttcctgagccacggcgaaggcaaccacatttatgcatatgacgccaaaattgaaattcagacattgactggcttgttcaaaggagacaagtgtcagagcctggttggaaaacccaagatatttatcattcaggcctgtcggggcaaccagcacgacgttccagtggttcctctagacgtggtggatcatcacacagacttgcagaacaatgtaacacaggtagacgctgcctccgtgtacacgctgcccgcgggggcggatttcctcatgtgttactccgtcgccgaagggtattactctcaccgggagactgtgaatggctcatggtacatccaggatttgtgtgagatgctggccaggtatggcagctccttggagttcactgagctgctcacactggtgaacagaaaggtctctcagcgccgcgtggacttctgcaaagacccaggtgcaataggcaagaagcaggttccctgctttgcctcaatgctgactaaaaagttgcgtttcggtcccaaatctagtaagtagggtcgttggtcctgtctacacacatttc

SEQ ID NO: 7121 - DNA, 855 bp, Cricetulus griseus
ggaggcggcggcggcggcggcaatttcaggggcggcggccgaggaggatttggacgagggggcggacgtggaggttttaataaattccaagatcaagggcctccggaacgtgtcgtcttattaggagagttcatgcatccctgtgaagatgacatcgtttgtaaatgtaccacagaggagaataaggtgccttacttcaacgctcctgtttatttagaaaacaaagaacagatcgggaaagtagatgagatatttggacaactgagagatttttatttttcagttaagttgtcagaaaacatgaaggcatcttcctttaaaaagcttcaaaagttttatatagatccatttaagctgctaccactgcagaggtttctgcctcgtcctcccggtgagaaaggacctcccagaggcggtggtggcggtggcaggggaggtcgaggaggaggaagaggaggtggtggccgaggtggtggaagaggtggtggctttagaggtggaagaggtggagggtgggggcttcagaggaggaagaggaggtggtggattccgaggaagaggacattagatgtggcagttccaagacctcaccacttgtgtttttgcttcgtgatctgcttctgctgggattgaagtctgtgtctggagcaacctggaggatgctgctgtgtcagtggagctgaatcgtcagcattgggtagaaacaagtggggcagaacaggcaatgttgctcagaaagagcatgaagaaccctgctttgtacagtacctggcactctgtgggtgcttaaagaacaacaggacttttcatttgaagcacacttggcactttttttaaaataaaattttttatttc

SEQ ID NO: 7122 - DNA, 855 bp, Cricetulus griseus
  modified_base (10)..(10): a, c, t, g, unknown or other
cttttttttntttttttctttttctttttctttttccttttcctttcctttcctttcctttccttttttttttttgtgtgtgtgttggtttgttcaggggctacccacagccactaccaggaaatcaggagctgaagtcctagacctaggagtggactaggcatgctcctggtgacctgtacacaaagtcactcaacaaacatttgctgagtgctctcaggatatgaactgctatgaggagggaacagagagggtgtacccagctctgatgccagagtggtgtcatcagcagggtaagacagggcagaccacgtgggctttcttgaccattctgttgccttgggtccatttagttaaatgcccacaaagcttcccactcccacattagagatgtggggtcctttgtggtaagtgagctcttgccgaatggccaggaccgcatcaggtaatgaccatgtgtgtgtgcactttttatcctttaaaatgcaacccttcaaagtggacaagaaactagcagaggtggtagggtccaaatgccggcagggagtccctgagaccctcctgcagtttgctgttggacttacaatgttcatccccaccctactcccactacctgtgtacagaccctttgaaccatgtctgtcctttctgattcaatactgtgactctccagtcctgtctagtatttggggaactgtactaaaagccctagagcttggggagtgagcggggaagggtttgcgctgatctttgtgtgttgtgtgttctgatattttgtctgtttttatctgttttatattaacataactttcctgtttgaaaaacaaatacaaccttggcttgatttaaaaaaaa

SEQ ID NO: 7123 - DNA, 853 bp, Cricetulus griseus
cctacttcaacaacttctgctcaatagccaggcttttggggacaaagacatgcaaacaggtcttccagtttgcagtcaaggagtcacttatcctgaagctgccaacagatgagctcatgaacccttcacagaagaagaaaagaaaacacaggttgtgggccgcacactgcaggaaaattcagctgaagaaagataactcttctacacaggtgtataactaccaaccctgtgaccacccagaccgtcctattgtggtgagctcatctctcaggatgaggtcggcgagggaaagtctatgataaatatatgtccagcttcctcttcaacctcaacaacgatttttgtagtggatgctacccggaaaggaaacaaaattcgctttgcaaatcattcagtgaaccccaactgttatgccaaagtggtcatggtgaatggagaccaccgcattgggatctttgccaagagagcgattcaggctggcgaagagctcttctttgactataggtacagccaagctgatgccctcaagtatgtgggcatcgagagggagaccgatgtcttctagccctctgggccctgtgacagtgctgtggagctctgtcattgctgcagccacctccagccgccattcccggtccccgctgccctctattttttaatgacgggtcccaaccctcctctccacttctgctccacctcgtgtaagatgatggacacagagaggtggtgtggactggtgaggagctggtgtacatgtggctttatcgccagtgaatttcttgcactttaaagtcctgtggcttgtgacctcttacctaataaagtgttagaataccaaaaaaaaaaaaaaaaa

SEQ ID NO: 7124 - DNA, 853 bp, Cricetulus griseus
  modified_base (822)..(822): a, c, t, g, unknown or other
  modified_base (827)..(827): a, c, t, g, unknown or other
caccatcactcgtacccccctcgaagacccaggccagcgaagtgttggtagaatgtgacagcctagggccagccgttagtaccagtcaccattcatcctccttcaagtccaagtcctccagcaccgtgacctccaccagtggccactcttcagggagctcatcaggagccatcgcctatcggcagcaacgcccaggcccccattccagcagcagcagcccctcaatctcagccaggctcagcagcacatggctacagaccggactgggaatcaccgtcgacagcaggcctacatcactcctaccatggcccaggctccatacaccttcccgcacaacagccccagccatggcactgtgcatccccacctggctgctgctgcccaccttcctacccagcctcacctctacacctatacagcacctacagccctaggctccaccggcaccgtagcccacctggtggcatcccaaggctcagcacgccacactgtgcagcacactgcctatccggccagcatcgtccaccaagtccctgtgagcatggggccccgggtcctaccctcacccaccatccaccccagtccagtatccggcccagtttcgcccaccagacgtacatcagcgcctcaccagcctccaccgtctacactggatatccactgagtcctgccaaggtcaaccagtacccttacatataaacacaggaggggcccgcagggagcggggtggaggagctcccaacagacccagggagctggatttttatactgcaggtgccgcacaccaacaatgcaaatggggcaggacggggggttttattntaaanaaaaaaaaaaaaaaaaaaaaaaaaaa

SEQ ID NO: 7125 - DNA, 853 bp, Cricetulus griseus
tgcgagggctgctgcacagctaacagagccgcgttccggacggcagcgcgtgccccgagctctctgcctcccccgcccgccagcccgagcccagcccgcggccccagcagcagcccgcagagcagccccagcagcagcgccatggccgggtggaacgcctacatcgacagcctcatggcggacgggacctgtcaggacgcggccatcgtaggctacaaggactcgccctccgtctgggccgccgtccccgggaagaccttcgttagcattacgccagctgaggttggtgtcctggtaggcaaagaccggtcaagttttttcgtgaatgggctgacactcgggggccagaaatgttctgtgatccgggactcactgctgcaggatggggaatttacaatggatcttcgtaccaagagcaccggaggagcccccaccttcaatgttactgtcaccatgactgccaaaacgctagtcctgctgatgggcaaagaaggtgtccacggtggtttgatcaacaagaaatgttatgaaatggcctcccacctgcggcgttcccagtactgacctcatctgtcccctccccccaccaccccttcagcttttgcaccccttctttccatacacacacacaccattattttttgggccattaccccatttcccttattgctgccaaaaccacatgggctgggggctggggctggacagacagatacctccccttacccataccccctcctgtgtgtgtttaggaaaaaaaatttgtttttgggtttttttttttcttttttggcgtttttttttttctttttttctaaaaaaaaaaagattctactaacaaaaaaaaaaaaaa

SEQ ID NO: 7126 - DNA, 852 bp, Cricetulus griseus
  modified_base (54)..(54): a, c, t, g, unknown or other
cccacctggccatccctccaggttgatgcgctgattctttcttaccaaatagtnttttattgtacaggagccacgccccgcctcctgatatatcctcccaccctcatcgaggatttagggatgccagggggaaagaaggtggtcccgagtggcagcagcggtgcctccccgaactcagctgccgccgccaccgctgctgcagcggctgccgccgcccactctggcattaaacatttggagaccagcgaaggggcctcagcacagagagacgaggaaccagaggaggaaggagaagaggacctacgagatggaggtgtccctttcttcatcaaccgaggtggactgccagtggacgaggccacctgggaaaggatgtggaagcatgtggccaagattcacccggatggagagaagttggcttcaagacctatttctcagggaactacttccgccacattgtgctggggtggaactttggggccggctacggagccctgggcatgagccggagggaggacctgatgtataaacctccagccttccgcacactcagcgagctcgtgctggactacgaggcggcctacggccgctgctggcatgtgctgaagaaggtgaagctgggccagtgtgtgtcccatgacccccacagtgtggagcagatcgaatggaagcactccgtgctggacgtcgagaggctgggccgggaagacttccgcaaggagctggaacgtcatgcccgagacatgcgtctcaagattggcaaggggacaggccctccctctcccaccaaggaccggaagaaggatgtttcctccccacagagggcccagtccagcccccaccgcaggaaca

SEQ ID NO: 7127 - DNA, 852 bp, Cricetulus griseus
gagactccccagagagcccctgtatccacgaggcctcctcacaccagcttgacttcccacaactgcatctgccccgcaagtccaagagccttttgaggatgggtgctagagggcccgtgagcctaaaacagcaggcagcgtcccatccaccctggtgttcagaccaggggcatttgtacagaatactgggtctcttcagtcttgaagaaaggcaatgccaatgtcacagagcccagcaggtaatagcatcagctggagctggttgagacttcagtttccactgtgtggggagtaagacaataatagatacaggtactttgaaaccactaatgcttctttacatagggtggataggccagtccgagttcttaagcagatgactggcatggcctggccagcagtctgagcggtggagctgcaccaaagacacaagtgaatgggtcattcccaaagagcttagggagcccactcttcatggggtaccccaacagcctctcactgtcccctcgctccaggggtcttggtcgttcagtgctcaaggcatgacatggcagtagctgcttcccttaccactagctggcccctcatggtagtttgcgggccagaggtggtctgtgtttacaagggcagtcagaccactcacctatattattcctcaatatgagatgaagccttgggtgggaaggaggtgctgatggcttggcagccactctgggtttcagagactagcactggttttggtctggtctggtctcgtttccattgccttaatgctgagtagcccagggccccaaggaactctggctccaagctcaggagtaccacatagcagctatgggtatgggtgtcctc

SEQ ID NO: 7128 - DNA, 852 bp, Cricetulus griseus
gggtacctagcaggctacctcgttcgaacacttgcagaaaaacagccagagctaaagatcagtgagcgagatatgctctgtgttcagattgccggactctgccatgaccttggtcatgggccattttctcatatgtttgatggaagatttatcccatctgctcgccgaggtgaaacgtggaagcatgaacagggatcagctaagatgtttgaacatctggttaattctaatgaactcggacctatcatgaaaaactatgggctcaaccctgaagaagatattatgttccacacacgcaactgcttacaccgcagagcttaccaacataaaatcagcaacctcatcgatataatgatcacagaggccttctgcaaagcagacccctacatggagattctgggggccaaggggaagaagttcagtatttctacagccattgatgacatggaagccttcaccaagctgacggataacattttcctggaaattttatactctactgatccaaatttgtctgaggcaagaaatattttaaggaacatcgaatgccgtaatctatacaagtatttgggtgagacccagccaaacggtcaagacaagattacagggaagaatatgatcagcttcccgagacattgttaacaccaaacctgatgtgcccctgtatgcccaactgaaggctgaagatttcatagtggatgttatcaagggtaaagagtacttggtgtgtctgcctctatgggttcataaacgcacaagggaggtgctagcttgcccctgcaagccacgtgcctctttcattgtgagtacctgtattgtttacaaaactgcataaaatggagattttaacag

SEQ ID NO: 7129 - DNA, 852 bp, Cricetulus griseus
ctgtgtcgtgggtacttctttgtatctgggtcattgttatttaccacatgagaaggaagaaatgaagactacagtatcacaaatacagaggaacttaatttgcctgcagacattcccagctatttgtctttcccaaggaacactgtctgaaccacaggaaggctacagtaactctgaggcaggcagtcatcagcaacttatgcctcctgccaacggatacatacacaaaggcaccgaaggtggcactggtacccgggtgatctgttcagattgttatgacaatgccaacatctactcaaggacccgagaatactgtccatacacctatattgctgaggaggatgttttagaccagaccctcgtccagccgtcatggttcagatgcccaaagagacattttgtcacatcctccccaagatgctgctactctggaaagtctgataccatcaacagagagagagctgtctgcctttcccacaaaccatgagaggatgcatgagaagcttcccttctcacagatgagcaatgaaatatttcagccggcctctggtggaacatgaacagagaagtaggcctacttcccttttcccagcagcctgtccttgagtcaccacagctggcagagagagatccagactgctcttcacctgtgtcctgccacaggttacatgaccacacttttgattttagtaggactcggaacattcaagatggtagtgagggcacatgaagctggcccaggaagaaatctgagcagagactcaagttagttaatttgctacctcagagttgagaagaacccccaaagtcagcatttgcattactctttgcttcaaattatatctgaccaca

SEQ ID NO: 7130 - DNA, 852 bp, Cricetulus griseus
ctccaaaggttggaaactattccgttagtaatggcaatgctacctgtctgctggctaccatgggactgcagctgaatgtcactgaggagaaggtgcctttcatttttaacatcaaccccagtacaactaacttcaccggcagctgtcatcctcaaactgctcaacttaggctgaacaacagccaaattaagtatcttgactttatctttgctgtgaaaagtgaaagccatttctatctgaaggaagttaacgtcagcatgtatatggctaatggctcagttttcagtgttgcaaataacaaccttagcttctgggatgcccctcttggaagttcttatatgtgcaacaaagagcaggttgtttcagtgtctagaacgtttcagataaacacctttaacctaaaggtgcaaccttttaatgtgacgaaaggaaagtatgccacagctcaagactgcagtgcagatgaagacaacttccttgtgcccatagcggtgggagcagctctggcaggagtacttgctctagtgttgctggcttattttattggcctcaagcgccatcatactggatatgagcagttttaggacctgcaatccaattgattatattataaaatacattcaaagaacgaggttttcttgcctgtcagtgttctttgatcagcttaaaatgcatactggactttaaaaaaaaaaaaaaaacacagtatgtgcagtgtattaaggtctgtcttaagaagctttggccaaattgggatcctaacctgagatgccttaaacttattaatatgaccattataaaaagatatatggagttgtatcttcctggaattaataaatactgcttcaccac

SEQ ID NO: 7131 - DNA, 851 bp, Cricetulus griseus
  modified_base (518)..(518): a, c, t, g, unknown or other
gggaaatggaatacccctacataaccaagatgctgagttcgtccctgagctcgcagaacggcacctggtcagacaccgtctctctgctcttggctcttggcgttgctctctacttgggctactactgggcatgtgtgccccagaggcctcgtctggtggctgggccccagtttctggccttcctggagcaacactgtccagtcactgtggagactttctaccccacactgtggtgttttgagggacggctacaaaccatctttcgagtcctcctgcagtctcagcctgaagtctcttaccggagtgaagtcctccagaccccagatggaggccagttccttctagactgggctgagcagtctaagagcagtcactacctggacccctaccacccagcccatagtactgttgcttccaggcatcagcggcagtagccaggagccatacatcttacacctagttaaccaagccgcacatccgccagctggatgagcgctacacatctgtggctttgggtntaaagactgtgctgcctattaccaggcctcaagcccaagaccaaggtagatgccatccataccccagtcctttgcctcaatgcagcagatgatcccttctccccaggccatgccttccctctgcaggccgctcaacagtctccctatgttgcactgctcatcacagctcgggggggccacattggcttcctggaaggactgctgccccggaagcactgctatatgaaccgtgtcctccatcagtacgcccaagccatcttccagcactacatggagctgcctgaccttggggcactcacttctgaagatggaaagagctgacaagagaactgc

SEQ ID NO: 7132 - DNA, 851 bp, Cricetulus griseus
caggctcatccatctcctgcttccctctcctcacccaacccacccccttcagtccctctcttgagcaaggtggttgggctgttgtggggacaggtgacccaagcaggctcctagttctggagagttgggcgagtgttataaccttttggcctctccatcagttcagctttcccccaaagcatggtttggtaccagtcttctcatttccttctagagcctgagaccaatgcttaagtttgggggacacagtcaccatccccctggtactgatgcttgctggattttcgggaaggcattttgctacccagtctcttttcactgcctggggatcagttcttttgtttttcatttgtttgatgttcccattgttcccactgcatgctatgacttccctactcctcaaagaagagactcctttgcatgtctggagactggacaaaacagctcattaacggggtcttgcaaggggctctgtatgtacccagggtactggcccaaccccccaattctagccatagacaaactccaggccagacccctccaccctggttcagcctgggcagcttgggctgagccaccaggaccaatagatttaagctggcatttcagtccaagaaggcttctaagtggatttaggacctgagaggaagaggggcctctgtgggtgctgggtactccagaggtgcccctggtggaagggtgggtcagtggtcctagcaggaagggagacccagcaaggccattcttgctgggttgagtcaaggagctagaacaagggaccaagtggctgtaaagtctcaagccaatgatggggcttctccactgggctcctgtagtcctcaagtccctgg

SEQ ID NO: 7133 - DNA, 851 bp, Cricetulus griseus
cccggtgtatggccacggagttacagcgtcaggactccatgccctgtcacaaccggcaagtaaactctacttctacccctagtcccgagcgtctgcgagcagacgaccagatcctggatcatgccgaagaaaataacgctgctatggctaagctgactctcctccccgggcacgcccattctagcgtgctctcagatcgggactctcaggcctgctgtggcactaatcttcactctgagaaccacagtgatagtagtgatagtagcaactacgaggcacctgtcggcgactccctcctaggggactgtgaactctcccgacagatcggggcacagcttaagctgctgcctatgaacgatcaaatccgggagctgcagactatcatccgggacaagacagccagtagaggggacttcatgttttctgcggatcgtttgatcagacttgttgtagaagagggactgaatcagctgccatataaagaatgcatggtgaccacgccgacaggacacaaatatgaaggagtgaaatttgagaaaggaaattgtggggtcagcataatgagaagcggtgaggcaatggagcaaggtttacgagactgctgtcgatccatacgaattgggaagatcctgattcagagcgatgaagagacacaaagggccaaagtgtattatgccaagttcccccagacatctatcgcagaaaagtccttctgatgtatccaattctcagcactggaaatactgtaattgaagctgtaaaggttctgatagaacatggagttacaacccagtgttattatcctactcagtctcttctccacccccatgtgccaaatcaatcattacaag

SEQ ID NO: 7134 - DNA, 851 bp, Cricetulus griseus
cgcttcgcacaggcctccgggaagagcacctggcctgcttcggccacctgcgaggggaccaccgagctgacttctactgtgccgaggtggcccgacaaggcactgcccgaccccgaaccctgcgcacccgcctgcgtaaccggcgttatgctgccctgcgtgagctcatccaaggaggtgagtacttcagcgatgagcagatgcggttccgggccccgctgctgtacgagcagtacatagggcagtacctcacacaggaagagctcagtgcccgcacaccggctccccaagccccccaggcccggctcccccagctcgcctgcctacccactctccgacctgctcttccagtcctaccaggaacgggagctgcagcaaaagctgctccggcagcaagaagaggaagaggcctgcttggaggaggaagaggacagtgacgaggaagaccagaggtcagacaaagactcggagtcctggatgcccgactcggaggagaggctgatcctgcgggaggagttcaccagccgcatgcaccaacggtttctggatggcaaagatgggggctttgactacagctcccttccctctccctctctctctcacacacacacaccccagcctgccccagtgtccctgcccccagcaggccacaggtcccgccccacagagccccctgctgccctgggctaatgagagccagatggctgcctgtgactcagcctgtgggaacccagacgtcttaccttcccatgcctcacacccgtcccctgctggcccagcagacagaagggacctgctactgtgaagatggggcctagcatgtcagagcccgaggatccaagctgctctgg

SEQ ID NO: 7135 - DNA, 850 bp, Cricetulus griseus
  modified_base (842)..(842): a, c, t, g, unknown or other
gcagcttgaaggttttcctgtactgttctccagttaccaaggagctgttgttaaccagcccgaaatacagattttgggaaaaacgagttaaagcaattgaaattgaaactcctacccagatagctttagttgatgaggcatcgggtgagaaggaagaggttgttgtgactctctcaccagctggtcactgcccaggatcagttatgtttttattcagggcagtaatggaaccgtcttatacacaggagacttcagactggcaaaaggagaagcttcccgaatggagctgctgcactctgggggcagagtaaaagacatccaaagtgtatatttagacaccacgttctgtgacccaaggttttatacaaattccaagtcgtgaggagtgcgctgtagaaggggaattttggtagctggttcggaggctggatcactaggagtccacaccacgtcgtgtggctgaactgtaaagcagcttatggctatgagtatttgttcaccaacctgagtgaggagctaggagtccaggttcatgtggacaagatggatatgtttagaaacatgcctgatatcctccaccatctcaccacagaccgaaacacccaagtccatgcctgccgccacccaaaggcagaagagtattttcaatggaataaattaccctgtgggattacttccaaaaataaagccatgcttcacacaatcagcatcaagccatccactatgtggtttggagagagaaccagaaaaacaaatgtgatagcgaggacgggagagagttcataccgagcttgtttttcttttcactcctcctacagtgagattccactgtgtcaaaaaanaaaaaaaa

SEQ ID NO: 7136 - DNA, 850 bp, Cricetulus griseus
ccatggccgaatactcctttgtaaagtccaccaaactcgtgctcaagggttcgaaggccaagagtaagaagaagaaaagcaaagataagaagagaaaacgtgaagaagatgaggaaacccaacttgatattgtgggaatctggtggactgtttccaactttggggagatttcgggaaccattgccattgaaatggataaaggagcctatatccatgcactggacaatggcctttttacactgggagctccacatagagaagttgatgagggccccagtcccccagagcagtttactgctgtgaaactgtccgattccagaattgccctgaaatcaggctatggaaaataccttggtataaattcagatggactggttgttgggcgttcagatgcaattgggccaagagaacaatgggaaccggtgtttcaagatgggaaaatggctttattggcttcaaatagctgttttattagaatgtaatgaagcaaggtgatatagaagcaaagaataaaacagcaggagaagaagaaatgataaagattagatcctgtgctgaaagagaaaccaagaagaaagatgacatcccagaagaagacaaaagaaaatgtgaaagcagtgtgaaatcaactatgtaaagaaatttcagaagcttccaagaccacaaactcaaaaataagcaaagaagatagtaaaattcttaaaaaagctcggaaagatggatttttgcatgagacacttctggacaggagagccaaattgaaagctgaccgatactgcaagtgatggagactagttttgtgttgttttggtttttctcctccctccctctctctctctctctctctctc

SEQ ID NO: 7137 - DNA, 850 bp, Cricetulus griseus
gcgtctcccgggccgaaggaggaagatggcggttggaatcgcgcgttacccaggaggagattaagaaggagcccgagaagccgatcgaccgcgagaagacctgcccgctcctgctgcgggtcttcaccaccaacaacggccgccaccacaggatggacgagttctcccgcgggaacgtgccctcgagcgagctgcagatctacacctggatggatgcaaccttgaaagaactgactagtttagtaaaggaagtctacccagaagccagaaagaagggcacacacttcaaattttgcaattgtttttatggatcttaaacgacctggatatcgagttaaggagattggcagcaccatgtctggcaggaagggcactgatgactccatgaccctgcagtcacagaagttccaaataggggattatctggacatagccatcactcctccaaatcgagcacctccttcaggacggatgagaccgtactaaattctattgactttcttcaagttatttttcagccagtttgtaaaataaacttaatcttttcctcccttgaaccttgccattaagcctttaaattttaagcaaattgtaacacatttatttaggaattagagttggatgtactttggtatattaaagtctgtatgttttaagtcctcctgtaaaatacgagaaaagtgctcttagcattctgtgtaaaactgttgtgaaatacatgtgtgcaattagcccaggtgtgaagttaatggagtttcctagggttggcaatgaaataagctaaaagtattttttaggattaatcttgaccaggtaaccattctctgaagacaaatcactggattctttt

SEQ ID NO: 7138 - DNA, 850 bp, Cricetulus griseus
  modified_base (810)..(810): a, c, t, g, unknown or other
  modified_base (816)..(816): a, c, t, g, unknown or other
cgggatgtgggctgcgggggcccgcggcgtcgggcggtgcggatgtcgtcgggctgggcggacgagcgcggcggcgagggcgacgggcgcatctacgtggggaaccttccgaccgacgtgcgcgagaaggacctggagggacctgttttacaagtacggccgcatccgcgagatcgagctcaagaaccggcacggcctcgtgcccttcgccttcgtacgcttcgaggaccccgcgagatgctgaggatgcaatctatggaagaaatggttatgattatggccagtgtcgacttcgtgtggaattccccaggacttacggaggtcgggctggctggccccgtggtgcaaggaatgggcctcctacaagacggtctgatttccgagtccttgtttcaggacttcctccgtccggcagctggcaggacctgaaagatcacatgcgagaagctggggatgtctgttatgcagatgtacaaaaggatggaatggggatggttgaatatctgagaaaagaagacatggagtatgctctgcgtaaactggatgacacaaagttccgctctcacgagggtgaaacttcatacatccgagtttatcctgagaggagcactagctatggctactcacggtcccggtctgggtccaggggccgtgattctccataccaaagcaggggctctccacactacttctctcctttccggccttactgaggaagaccgtgggaagtttctctctctctctcttttttagatgtgctgagctgctttgtgctcagaatctacattccagattgattttttttttttntttttntttttatttttatttttattttattttatttatt

SEQ ID NO: 7139 - DNA, 849 bp, Cricetulus griseus
cacagtggagagaaaccccatgtatgtttgcagtgtggaaaaggtttcaattcttccagtacccttcgaatacatgaaagaactcacactggagagaaaccctataaatgtaggcaatgtgggaaagtctttagtgttgacagttcccttcgataccatgaaaggattcacagtggggagaaaccctatgtgtgtcagcagtgtgggaaggccttcactcgccacacctcccttcgatgccatgaaaggattcactgtggggagaaaccgtatgtttgtaagcaatgtggcaaaggttttatttcttgcagtaaacttccgaaaacatgaatcaactcattctggagagaaactctgtgtatgtaaactatgtggtaaagcctttactgatgaaaggattcacagtggtgaaaagcccctatgtatgtgagcagtgtgggaagggtttcatttctttagtaagtttagaatacatgaacggattcacactggagagaaaccatataagtgtaaacaatgtatgaaagcctttactggtcacagttcccttcgacgtcacgaaaggattcacagtggagagaaaccatttgtatgtaaacagtgtgggaaatccttttatactttaagtgactgtcagagacatgaacaaattcacactggtgagaagccttatatttgcaagcaatgtgggaaagcctttactcgttccagttcccttaaaatacatgagaagactcacactagaaggaattcctcagtgtagaacatgaaaaagtattcttaacatggcaatacatagagcagagaaccagtgtcatgttgtctgtaggaatgcctttagtcatcttg

SEQ ID NO: 7140 - DNA, 849 bp, Cricetulus griseus
ccaggcatctatgcagcaggtgcaccaatgcatcgagcgctgccatgcgcctttagctcaagcccaggccttggtgaccagtgaactggaaaggttccaggaccgcctggcccggtgcaccatgcattgcaatgacaaagccaaagactcgatagatgcaggaaataaggagctgcaggtgaagcgacaactggacagctgtgtggctaagtgtgtggatgaccacatgaatctcatcccaacaatgaccaaaaaaatgaaggagtctctgtcatccatcgggaaataaaattgtttgccagtgaccatggggctgagggcacgatatttaaaaggaagaaagaaaagtttagtctgttaagcaatgtttatgaatgaggaaaactcaggacacagcaagttccagacaaatgccactcacctctggacaccagttcctttgcatctggatcttagacagtgaagtggaaagaagctggtgctaaaatatggatcacagatagcacaggggagaattctagattctaaattttcatgtgcaagtgcttgttctgtcagtagagattgcccttaaacaagggttccgattcttactgcacagacatcaagctggcagctttcttcaacctgctggtaaagtttgaggactttgcagtgcagtgttgctgccccaacataacaccttatcttttggataagtactatgttgtattcataccaattaattacttgaaatagtgataacacttgtcagtttgctatcaaaactgcaatatattttccaagtggtttggtttttaaataaagtttcattgtctccaaaaaaaaaaaaaaaaaaaaaaaaaaaaa

SEQ ID NO: 7141 - DNA, 849 bp, Cricetulus griseus
gtgtctgccagtgatgacaagactgtcaagctgtgggacaagaccagtcgggagtgtatccactcatactgcgagcatggcggttttgtcacctatgtggatttccaccccagtggcacctgcattgccgcagctggcatggacaacacggtgaagttgtgggatgtgcggactcaccggctgttgcagcattatcagctacacagtgcagctgtgaatgccctgtctttccacccgtcgggaaactacctcatcacagcctccagcgactcaaccctgaagatcctggacctgatggagggccggctgctctacacgctccatgggcaccagggacctgccaccactgttgccttttcaagaactggggagtattttgcttctggaggcgctgatgagcaggtgatggtttggaagagtaactttgatgttgttgactgtggagacgtgaaggtgcagaggcctccaccccaggccagctctgctagaaatctgccagaaatgaatttgcctgtcccaccaggcaaagacaagagcctggagtcggtgcaagagcagtctcaagagcgcgtcagtatgccccagacactgaccagcacactggagcacatcgtgggccagctggacgtcctcacacagacagtgtccatcctggaacagcggttgacactggcagaagacaagctgaagcagtgcctggaaaaccagcagctaatcatgcagcgaacgccatcatgacccaggagcaagaatcaggagctcagttgattaggaggacagcaggctagggatttgtatggtgacttgagtaaataaataaagggattcacccctgagggagccacatct

SEQ ID NO: 7142 - DNA, 849 bp, Cricetulus griseus
cgtcggagcggctgcccaacaggcctgcctgtctcctggtggccagcggcgcttccgaaggtgtgtcagcccagtccttcttccactgcttcacactggccagtgctgccttcaacctacaggtggccacccctgggggaaaggccatggactttgtggacgtgactgagaacaatgcacgttgggtacaagacttccgcctcaaggcttatgccagccctgctaagcttgagtccatagatggtgcccggtaccatgctctcctgattcccagctgtcctggtgccctgactgaccttgccagcagtgggtccctggctcggatactgcagcacttccgctcagagagcaaacccatttgtgccattggccatggtgttgctgccctgtgctgtgctaccaatgaagacaggtcctgggtgttccaaggctacagtctgacagggccttctgtgtacgagctcatcagggcacctgactttgcctgcctgccgctggttgttgaggactttgtgaaggactctggtgctggcttcagtgccagtgagccggatgctgtgcatgtggtgctggaccgccacctggtcactggccagaatacaaactctactgttcctgctgtccagaacctgctcttcctctgtggcagccggaagtaacttggatgctgtccctgatcctggtggcctagagacaacagctgaactcactatgtctgtgtgagggtgttagattccctggaactggagttacagacaattgtgagctgccatatgggttctgggaattgaactcaggtcctctggaagagcagtcagtgctcttaaccactgagccatctctccagcc

SEQ ID NO: 7143 - DNA, 849 bp, Cricetulus griseus
  modified_base (806)..(806): a, c, t, g, unknown or other
ctttgccctggacagggggcttctgcagccaagacctggaaaacccaaagggcagaaaaagctttcttctgttcgtcaaaatttgatcatagattccagcctcagaaccccctctctggcgctcagcagtttgtggcaaaggatccccaggatgatgatgatttgaaactctgttcccacactatgatgctccccacaagaggtcagcttgaagggagaatgatcgtgactgcctacgagcatgggctggacaacgtcaccgaggaagctgtttctgctgttgtctatgctgtggagaatcacctcaaagatatactaacttcagttgtgtcgagaaggaaagcctaccgggtccgagatggcctattttaaatatgcttttggtagtaatgtgaccccacaaccatacctgaagaatagtgtggtggcttacaacaacttggttgaaggccctccagccttttctgctccctgtgccagtcagagacgatgctgaacagcaggccgcattcctgttggcatgttctggggacactctacctgcatccttgccccccggtgaacatgtatgacctgtttgaagctctgcaggtacacaggggaagttcattcctacacatactgtgtatgctcttaacattgaaaggatcatcatgaaactttggcaccccaatcatgaagagctacaacaagacaaagtccaccgccagcgcttggcagcaaagaaggactttgctctgctaaatagatttgaaaaatttggggaccatcactaattaattgttgatgaaaattgaatgcttttnagtccacatttacaaaattgaagtgtataatgtatgtataacc

SEQ ID NO: 7144 - DNA, 849 bp, Cricetulus griseus
caccggagtaccttgcacctgaagtgatcaggaaacagccctatgacaacactgtggactggtggtgcctgggcgccgttctctatgagatgctgtatgggctgcctcctttttactgccgagatgttgctgaaatgtatgataatattcttcataagcccctaaacttgaggccaggagtgagcctcacggcgtggtccattctggaagaactcctagaaaaaaacaggcagaatcgacttggtgccaaagaagactttcttgaaatccagaatcatcctttttttgaatcactcagctggactgacctcgtacaaaaaaagatcccgccaccatttaatcctaatgtggcgggaccggatgatatcaggaactttgacacagtcttcacggaagaagcagttccctattctgtgtgcgtgtcttctgactattccatagtgaatgccagtgttctggaggcagatgatgcatttgttggcttttcttacgcccctccttcagaagacttatttttgtgaacagtttgatgttcagaaaccattgggcaaattcaagcttgcagaggagatggaaacgccgatttgtgtgaatatattcaactatgtataccagtgcctcattttttacatgtaatgttgaaaactatgaaatacgtattttctgctgtaagcaagaaatagggcatttcaaaagagctgagttttgaactgaaatttgtattcgtttattaagcttatttttaaacaaaaattttaagctattattattagcattaacctatttttaaagataactttttgctattgactgttttttccctgttaagtttacactaacacatccaag

SEQ ID NO: 7145 - DNA, 848 bp, Cricetulus griseus
ggtccccatggcgctgcagtagcggagctggtgcgtgggagccaggatgagcgctgccgaggcggaccgcggggcgtggctgctggtgctgagcttcgtgttcgggtgtaacgtgctgcggatcctcctgccgtccctgtcctcttcgtttccagggtgctgcagaaggatgcagagcaggagtcgcagatgagggcagagatccaggacatgaagcaggagctgtccactgtcagtatgatggacgagttcgccagatatgctaggctggaaaggaagatcaacaaagtgactgacaagctcaagactcacgtgaaagcgcggacagcacagttggccaagatcaaatggtttataagcgtcgctttctacattctgcaagcagcactgatgatctcgctcatttggaaatattactccgtccctgtggctgtggtgcccagcaagtggatcaccccgctagaccgcctggtagcctttcctactcgagtagcaggtggaattggaatcacctgttggattttagtctgtaataaagttgtggctattgtactccaccctttcagctgaggagaaagaaacgcagctacaagactttgcagaatggatttcacagggtaaagagctgattaacaactccaatagtgctgttttaattttagaaaaattttttttttttttttttgttttgcagacagtctctgcacactctggctgtcctggaactcactatgtagaccaggctggactggaacttacagagatcctgtctgcttccccagctgctgggatcaaagcatagcactgggttttgaaggatcatatttatattctatgtctccttatga

SEQ ID NO: 7146 - DNA, 848 bp, Cricetulus griseus
ccctcctaaaatgtttaatagcccaaacaaccaagcacttgtttcagcattaaaaactccttaccaggaaaagatccaatcgcctggaactggagcggactcaggctgaagacaacctgaactctctgtccagagaggcggcacagtacaaaaaggccctggagagtgagacaaacgagcgggacctggcccaccgggagctgattaagcaagaaaaaaaatataagcatccagttaagctcagcccagtcccgttgtactcttctagagaagcaactagaatatacaaagagaatggttctcaatgtggaacgagaaaaggccatgatcctagaacaacaggcccagcttcaaagggaaaagaacaagatcaaatgaagctgcatgctaaactggaaaagctggatgtcttagaaaaagaatgttttagattgacaacgactcagcagactgctgaggataagataaaatatctggaggaaaaactgaaggaagaggagcatcatcgcaagctgtttcaagacaaagcgtgtgaggaacaacttcccagggcaaagctggacctcctaactcggaagagcccatttccatttgtgacaatttgtctgaacttttgatggcaatgcaagaggagctggaccaaatgactgtggagcacaaagaactactgaaagaaatgatgcaacctggaaggtactctgatgacatagagcatgaactggagcaattagctaagaagatagaaagcaaaggagaccagatttccaaactcaaaaagcatcaagacagtgtccgtaagctgcagcaaaaagttcagaactcaaggataaatgaatcttcatgtgtcc

SEQ ID NO: 7147 - DNA, 848 bp, Cricetulus griseus
tcatggcccagcaaccgcccgacgttgaggaggacgattgtctttctgaataccaccacctcttctgtccggaccttctccaggacaaggtggcctttatcacaggtggtggttctgggattggcttccggattgctgagattttcatgaggcatggctgccacactgtcatcgccagcaggagtctaccaagagtgtccacggccgctgagaagttggttgctgccactgggaagcggtgcctccctctgtctatggatgtccgagctcccccagctgtcatggctgctgtggaccaggcactgaaagagtttggcaaagttgacatccttattaactgtgcagctggaaacttcctatgccctgccagcgctttgtctttcaacgcctttaagactgtggttgacattgacaccatcggcaccttcaatgtgtctcgtgtgctttatgagaagttcttccgggaccatggaggagtgattgtgaacattaccgccactctcagtatgcgggggcaggtgctgcagctccatgcaggcgctgctaaggcagccgtggatgctatgacacgacacttggctgtggagtggggtccccataatatccgtgtcaacagcctggctcctggtcccatcagtggtacagaggggatgcggcgattggggggaccccaggacactttgcaattaaagagtttttcaagccctgtgcaaagacttggaaacaagacggagattgcccacagtgtgctctacctggccagcccactggcttcctatgtctcagggattgtgctgatagttgatggtggcagctggatgacattcccaaatgacctcaagcaactg

SEQ ID NO: 7148 - DNA, 848 bp, Cricetulus griseus
cgcgggccggcatggcgggccagtttcgcagctacgtgtgggatccactgctgatcctgtcgcagatcgtgctcatgcagacggtgtactatggctcgctgggcctgtggctggcgctggtggacgcgctagtgcgcagcagcccttccctggaccagatgttcgacgcggagatcctgggcttttccacccctccaggccggctctcaatgatgtccttcgtcctcaacgccctcacctgtgccctgggcttgctgtacttcatccgtcgagggaagcagtgtctggatttcactgtcactgtccacttctttcacctcctggggtgttggctctacagctcccgtttcccctcggcgctgacctggtggctggtccaagctgtgtgtattgcactcatggccgtcattggggaatacctgtgtatgcggacggagctcaaggagatccccctcagctcagcccctaaatccaatgtctagtgttgggccctttggacactctgcgggcatttggcccccctgtcaccttgggctgctcagacctccacatgggtctggctcgagtctgagaggaaccctgaaatgtgaagtctgttggtggaaagagagtgaggtcctgtaacagaggccgggagcagtcaggggcacagctgcaagaatggcctctgcctgctggagccttgatttctggaggccaggaaggggaccttattgagggtaataacagatttggaaccatgtcactcttgagccatcatactgtcaccagcctgttgtttaaaaaaaaaaaaaaaaaaatcaaggatatctgattggcgcaaaccacttttctggtcgcctgtctta

SEQ ID NO: 7149 - DNA, 848 bp, Cricetulus griseus
ccaagatggcggccctcagggctctggtgtcaggctgcgggcggcagcttcaggggttcctcgcaggccccgccgcgaccggctggttaaggcttccagctcgtgggttgagagaagtggtggagatccaagaagggaagacaactgtaattgaaggtcgaatcacagaaactcccaaggcaactccaaatccccctaacccctcaggccagtgccccatctgccgttggaacctgaagcacaaatataactatgaggatgtgctgctgctcagtcagttcatccggcctcatggaggcgtgctgccccgcaatgtcacaggcttgtgcctggaagaacaccgaaagatcgaggagtgtgtaaagatggctcatcgagcaggtctattcccaaatcacaggccacggcttccagaagggtccttacctaggaataaacccaaactcaaccgctacctgactcgctgggctcccagctctgtcaagcccatctacaaaaaaggtcaccgttggaacaaagtgggtatggccgtggggtcaccactcctcaaggacaatgtctgctactccaggagacctttgaagctcattcattaatgggagccctgcagctgaagactctgactggaaccttccacgtgacgcactggctcctcccgccagaaccattgccctccacacactgcatggggactcatttctgttccccgatcagcccagccagtgttgggagccgcggcaggcaggagctggatctcctggcctgtggtcttctgactggctggggctgagcttggtgcaaggacaggagtctaactcaaagaatgaaataagcaggctctcagcttc

SEQ ID NO: 7150 - DNA, 848 bp, Cricetulus griseus
tttgggcatggaccttgtcagacttggcctttgaaagagctgatacagctgaaaaagctctcgatgtcattgttgacttattagaaaaatatggccaaggtcggaaattgtggcaggagggtgaagaatttagctattataacagtttcctgatagccgataggaatgaagcctggattctggagacttcggggaagtactgggcagcagaaaaagtccaaggagttcggaatatttccaatcagctctccataacaaccaagatcgaccgggaacatcccaacatgagaaactatgctaagcacaaaggctggtgggatggcaaagaggactttgattttactgcagcatattcttatatgaacacggcttcaatgatgacttcatacaagcagatactgcaggcttcctttcatgcacttctcatgcctggtgccctcagagggtatgagatcctctgaaactagagtttcagatggctgtgagccaccctgtgggtgctggggaccaaacccagatcctcagcaagaacaagtaactcttaaccatgagccatctctccagcccctcccacccaagtctaaaactcttaaagctcattgttcttaagataaagaaagtatttatacagacctttcttaagaatgtaagttaatgaattagctagataatttatctgtataacttggtagcctcataagcatgaactctagaaaatttaagatttataaggatatgtgagttaatttgtagagattttcactatggatatacaacaggatatttgagacctgaatactcaggttggtaattaatgccttgggatgtgttttagaaattttaatgtt

SEQ ID NO: 7151 - DNA, 847 bp, Cricetulus griseus
tcaatgggtcccatcaaaaaacctttgaggagatcctaccagagatcatcatctccaaagagctgagcctcttgtctgatgaggtgtacaaccgcacggaaggcttcattgggctgaactcagtacactgtgtccaagggccttaccctcccttgctgctcagagcctgggatcactataatgcgaccaaaaaatactgcaaatgaccggcctgacttcttcgaggaagaccagctcttcattatcctggaatttgagtttggtgggattgacttagagcgaatgagaggaaagctgtcctccatagcgactgcaaagagcatcctgcaccagatcaccgcatccctcgcggtggcagaagcctcgctgcactttgagcaccgtgacttacactgggggaatgtgctcttaaagaaaaccaacctcaaagagctccactacaccctcaatgggaagaccagcgccattcccacccgggggctacaagtcaacattatcgactacaccctgtcccgcttggagcgggatgggattgtggttttctgtgatatctcttctgaagaggacctattttcaggtcaaggtgactaccagtttgagatctacaggctcatgaggaaggagaacaaaaactgctggagtgagtatcacccttacaataatgtgctgtggctacattacctcgcagacaagattttgaatcgtatgaactttaagactaagtgtcacactacagccatgaaacaggtaaaggagaaactgcagcatttccacagaactgtactgacgttcagttctgccactgacctgctctgccatcacagtctgtttaagtaagccaggtact

SEQ ID NO: 7152 - DNA, 846 bp, Cricetulus griseus
ggggagccccggtacatctctgtcggctacgtggacgacacggagttcgtgcgcttcgacagcgacgccgagaatccgagatacgagccgcgggcgccgtgggtgcagcgggaggggccggagtattgggagaggaacacgcggatcgccaagggcaacgcgcagattgaccgagggaacctgaggaccctgctcggctactacaaccagagcgagggcggctctcacaccatccagaggatgttcggctgtcacgtggggtcggacgggcgcctcctccgcgggtatgaacagttcgcctacgacggcgacgattacatcgccctgaacgaggacctgaggacgtggactgcggcggacacggcggcgcagatcacccggcgcaagttggagcaggctggtgctgcagacagacagagggcctacctggagggcacgtgcgtggagtggctcggcagatacctggagcacgggaaggaccagctgctgcgcacagatcccccaaaggcacatgtgacccatcatcctggacctaaaggtgatgtcaccctgaggtgccctgacctggcagagggaggaggaagaacagactcaggacatggagctggtggagaccagaccttctggggatggaaccttccagaagtgggcagctgtggtggtgccttctggggaggagcagaaatacacatgccatgtgcaccatgagcggctgcctgagcccctcaccctgagatgggagcctcctcctcagtccactgtccccatcatggcagtcattgctgctctggttctccttggagctgtgaccatcattggagctgtggtgttctttgtgaggaagag

SEQ ID NO: 7153 - DNA, 846 bp, Cricetulus griseus
gcaagctggagttccagagcatgtgggatgatacgaaaaacaagactttagaagagaagcactttcttcgcctacaactggagaacatagtagaggacctatggagaagattccaggatgcactcaagaactacactgatgccacagaggaccggaagattgcctttgagactctgaggatgaaggatgagaaaagctccaaagagatcgagatacagatgaaaaaaatccagaagctgcaggaggccataagttccctgaaagggaagatcgtatcccacagccgtgaaagtgaatggcagaaccactgtgtccgcaacgacaaggagctggtgcatatacagctccgaaagcttaaggcccaaaggacgcaggttcggggagtgtcccaggagaacttagtcaaactcaccctggaaagtaacaccaccctcaaggaactgaaaaaggtcgtggagaagggtgaacagatccttaagcttgctgaaatatgtaggaaatttgaaacagaggaagagaaaagtactgcctttctactcctcagcactgactccagtgaacaggaagacagaacccggaagacctcacagaggagctggccagggctatggtggactattcagggatggagaacttctggaagagatacaacaaggtgaagctggaggtgctgagtctccagcacagacgcacgcagctgttagacatcagcgggaagctgagggagctgctcaaacagtacctggacgggatctcagtgagcgatgaggtgctgagccaactcaacccgctctttatagtaaaccacagaagcaacctgccccagctgtccacccctgcccagcc

SEQ ID NO: 7154 - DNA, 846 bp, Cricetulus griseus
gaaacctagtgtgaaggtatacgctgcagaacccctgaatgcagatgactgctaccagtctaaaatgaaaggagaactgactcccaatcttcaccctccagaaaccatagcagatggtgtcaaatcaagcattggctcaaatacctggcctattataagggaccttgtggatgatgttttcactgtcacagaagacgaaatcaagtatgcaacccagctggtgtgggagagaatgaaactgctcattgagcctactgctggtgttggattggctgcagtgctatctcagcatttccaaacagtctctccagaagtaaagaacatctgtattgtactcagtggtgggaatgtagacttaacctccctaaactgggtgaagcaggctgaaaggccagcttcttaccagactatttctgtttaaattcatgagaagattgtctctagatgaaaattgtttttcatcttcccttttcaaattgttttcaaaatcctaatgagaacaactctcttgatgaccatcctgtctggatccactgacaacagatggcctgtagcaatgaggctgtgctctgcttgaaaagtaagcacagatgcaggaggaaaagtgatggtgcaaacacagtcaccaccaaagccgcatcagcagttaggaatctctgaaatttgtgtttatcagcttccatagtaagggtccaaaataaatgaaaaaaaaaaagtgaaaagacttttgagaaaccataagcaatccaagagctgtcaaaagctatgctgctgccacacagccccaccctttaaaattatggtaatggaggtcaagcacaggactgtgtactcacttattgctct

SEQ ID NO: 7155 - DNA, 846 bp, Cricetulus griseus
ccctatggatgtcatatgtgtgggaaatcattttaccggaagtcacacctcaacaggcaccagagaattcacacaggtgagaaaccctatggatgtaaagaatgtaagaaaactttctaccataagtcatccctcactatccatcagagaactcacacaggtgagaagccctatgaatgtaaaaaatgtaggaaaactttctactgtaagtcagacctcaatgtacatcacagaactcacacaggtgagaaaccgtatgagtgtgacgaatgtagaaaaactttctactctaagtcacacctcattatacatcagaaaattcacacaggtgacaaaccatatgaatgtgaagcatgccaggaaacattcaatcggaagtcaaacctcactgtacatcagaaaacacacacgggtgagaaaccgtatgaatgtaacatatgtggaaagacttttcaccggaatgcaggaaaacattcctgcattaagtcatctctcactgtccatcaaagaagccacacaggttataaaccatactcatgcgaagaatgtaggaaacattctacagtaagtcacacctcactgtacaccagagaacacacacaggtgagaagccctacgaatgtccggtatgtgcaaaggcttttcaccagaaatcctacctgaacaggcatcaggtaactcatgaaagtgagaaacgatttgagtgtgaggaatgtaggaaaacattctatcataagtcatccctcactgtgcatcagaaaattcacctgagggatcatgtaacacacacacacacacacacacacacacacacacacacacacacacacacacacacacactgct

SEQ ID NO: 7156 - DNA, 846 bp, Cricetulus griseus
ccgcacctcagcgcgggctttgtgccatggagtctgtcctgttcccgtcgcttttgctggtagccgcctatccgaggagtgggagcccccagcatgagtggatgcaaagccctcccatgccttccgggacctcaacgcctttctcagtgcgtttaagcccagagctggaggctgtgcctcccgggggctccgtgtggcttaactgcagccacagctgccccctgccggtgcgttccagcctgcgcactcagctgaggcagggaaagacactccatggctcgggttgggtatcttaccagctactggatgtgagggcctggaattccaaggtgcgctgcgtcgtcacttgcgcaggagaaacgcgcgaagccaccgccaggatcaccgcttacaaacggccgagaagcgtgatcatggagcctcctgtcctagtgggccacaagtacactctacgctgctatgtgacacacgtgttccccgtggggttcttggtggtgagcctaaggagaggtggccgggtgatttattttgaaagtctggagcgcttcactggttcagatctggctaatgtcactttgacctacgtgatgcgggcaggacccaacgacctctggcaaccaatcacctgtcatgctcgtctcaatctcgacgggctagtagtgcgcagcagttctgcacctgttatgttgacggtcctcgctttgagcccagcctccaaagccttggcttctgcctccatcgcagccatggttgggatcctcctggctgtgggggttgtctacgtgcgcaagtaccaggccgtgcagactcagttataaacgggtgttgatgcctgacaagagggag

SEQ ID NO: 7157 - DNA, 845 bp, Cricetulus griseus
gcttcgcccttcacctgacttagaattaacaatatatttaagtagattatgctgtgatgaggacagattcatcggagatgactgatgtggagtctgtgatcagcacctttgcaacctcagcgagggcaggccgccgcaatgctttagctgacatccagactttagatgttacaggtggaacctctgatctcccgctgaagctggaggcattgaccgtgaaggaagatgttaaaaagaagaatgaagagaaagcacaagaccagccggaaaaaaccctaaatgaagaaaaatgaaggcttacaatttgtccatggtgttgattttgtgcacgttaggagacatagtggctctgcattcctgaagtgtttgatctggtagtaaccgtggtaagtgtgtgtgtgtgtgtgtgtgtgtgtgtgtgtgtgtgtgtgtgtgtgtgtgtgtgcaagcgtgtgtgtttaggcaattttgttgtgatgccctgtacttagaccacaaccatgatacccaataggttattaaaaggtattactttcaaattgcacacaaggaagaacacactgtttatacgaccaataaaatccactgtcaatcttgggatttacttagaaagatacatgtttaattatgttcttattgtagttagaaaattttcttgatatgcataaacagaaacctattaatttaacactttatagaatttgtaggaaattatatttttttggtgagatggaattagtaataaaaatcacatacataaaatgtgtttatatttaatcaaaattatactgtatttcctttaatatgagtgggggaataaaatcatattgtatgtatatatctat

SEQ ID NO: 7158 - DNA, 845 bp, Cricetulus griseus
catcagtgcctgagttagttcctgttaaaattgccaaccatacaggctgtaagtgcttcgcctacctcgccccccgccatcctactcaattatcagaagatcctattcagataccagaaggagatcaatgttctcattccaagaaactctgtcctattgacatgctgtgggataacaccaaatgtacttgtgttttacaagatgagaatccactccctggaacagaagaccattcttaccttcaggaaccagctctctgtggaccacacatgaagtttgatgaagagcgttgtgagtgtgtctgcaaaacatcatgtcctggagatctcattcagcacccagaaaactgcagttgctttgaatgcaaagaaagtctggagagctgctgccagaagcataagatttttcacccagacacctgcagccagctgttagaaaaattgattttacctagtgccatggtgaattcacatttccattcaatagcggctgggtgattccctggtccgctgacaattacctctagcttcagatgcctctgcacaccagtgctcagagaggaaggggtctggggagcccattgtggtgatgaatgagaaaaggttgcttgccaccgagtagcaggtgccatatgattgagtattcagactggcaaagttggagtgcaatgcttatgaattattctggctctttcttatgcagaacttcatttgtatgatcagcactgatgtaattcctgttcagcttgtacttttcaagtttactgaaccactgcctgatgtttcgtatttaaatgtatttaaaggaaataaacgtcattattcaagccacaaaaaaaaaaaaaa

SEQ ID NO: 7159 - DNA, 845 bp, Cricetulus griseus
agggcgcggtgtgcggtgaggctgacagcggtctccgttagatcgagtgatggcgcagcagctcgcccgagagcaaggcatcaccctgcgcgggagcgcggagatcgtggccgagttttttcgtttggcgtcaacagcattttgtatcagcgtggcatatacccgtcggaaacctttactcgagtgcagaaatacggactcaccttgcttgtaactactgaccccgagctcataaagtatctcaataatgtggtcgaacagctgaaagagtggctctacaagtgctctgttcagaagctggtggtggtcatctcaaatattgaaagtggtgaggtccttgaaagatggcagtttgatattgagtgtgacaagactgcaaaagaagatggtgtttgtagagaaaagtcacacaaagccattcaagatgaaatccgttcagtgatcaggcaaatcacagctaccgtgacctttctgccactgctggaagtttcttgttcatttgatctgctgatttacactgacaaagatttggttgtccctgaaaagtgggaagaatcaggaccccagttcattaccaattctgaagaagtccgtctgcgctcatttactaccacaatccacaaagtgaatagtatggtggcctacaaaatccctgtcaatgactgaagagaaggtgaagaaaaggctgatttacactgacaaaggatttggttgtccctgaaatctttttgtatagactcacattgaaatacatgctaattgaattttcagtgtatataccttgaactcacaaagcagttgatactgtttaatttctgtaataaagaactcttgttttaatgttt

SEQ ID NO: 7160 - DNA, 845 bp, Cricetulus griseus
gcctcctcgtctcttccggccgttgcccgcgcgcagagtcctttagctgacctcagcgtccagctactgcgcaacgacgagcgggcagcttcggccagaacaccgtcctaaggcagcgtgaccccacgaggccgccgtagtcccgggagtgtgcgatcacgtgacacaggttgtaccatggcttcccccaagtcactgtctcgcttctgggaatggggcaagaatatcgtgtgcgtggggaggaactacgcagaccacgtcaaggagatgcgcagcgcggtgctaagcgaacctgtgctcttcttgaagccgtccaccgcgtacgctcccgagggctcaccggtgttaatgcccgcttattgccggaacctgcaccacgaggtagagttgggagtgcttttgggcaagcgtggtcaagccatccccgaggccgccgccatggactacgtggccggctacgccctgtgcctggacatgactgccagagatgtgcaggaagagtgcaagaagaagggcctgccctggaccctggccaagggcttcacggcctcctgccctgtcagcgccttcgtgcccaaggagaagatccctgaccctcaccgccctaagactgtggctcaaggtcaacggtgagctcaggcaggagggcaacacctcgtcgatgatcttttccatcccctacatcatcagctacgtttccaagataataaccttggaagaaggagaccttatcttgactgggactccaaagggagttgggccagttaaagaaaatgatgagatcgaggctggaatagacggggtggttagtatgaggttcaaggtgaaaaggtcagaaaactgag

SEQ ID NO: 7161 - DNA, 845 bp, Cricetulus griseus
aggtgacagtgttcgatcacaggttttgagagagaaagttgttgagttggaatcagaaatagaaaaatttaaagctgagaacacatctttagctaaacttcgaactgaacgagaaagtgccttagaaaaactgaggaaagaaattgctgactttgagcaacaaaaggcaagagaactggctcgaatagaagagtataaaaaggaggagatgacggaaactaaattacagggaaaaagtacagtcatcctgatggaaaggtagaaaaggtttataaaaatgggtgccgggttgtactgtttcccaatggaactcagaaagaagtgagtgcagatgggaagagcatcactgttacattttttaatggtgacgtgaagcaggtcatgccagatgacagagtggtctactactacgccgctgctcagaccactcacaccacatacccggaaggccttgaagtcttacatttctcaagtggttcctgaccaaaccgttaagaatttatttgccgatggtcaagaagagagcatctttccagatggtacaattgtccgagtgcaacgtaatggcaacaaaatcatagagtttaataatggccaaagagagctccatactgcccagttcaagagacgagaatatccagatgggactgttaaaactgtctatgcaaatggtcatcaagagacaaagtcacatctggccgagttagagtgaaggacaaagatggtaatgttactaataggacacagaattgtaaagatcttcgtgggattaatcatgaactaacacttttaaaatttaaaattaaagttttaccatacaacaaaaaaaaaaaaaaaaaaaaaaa

SEQ ID NO: 7162 - DNA, 844 bp, Cricetulus griseus
ctgaaaacaagatagaaacttgcagtgcccaaaaaagaacctgggtacaagaagatgataatgttacaaatgagaaaaaaatcagaacatatgatagcatacaagatcaggagagttttgagcatcataccgaaggggatatcaaaaatgtcaacaatgtattgataaaaagcctgagcaggaccccatctagttgcagcagcgatcaggattcaatcaaggctgatggaatctctctggacgtcagcacacaacgcaatagccaaatggaatcgcagtttctcagtgacagtatctgtgaagagagtttgagggagaaactcaaggatggacaacttacaataaaggagttcttcaatacttcttcaggtccacatcttaatacagaacccagacagagcaatcttccagccaaatttactataaactcatcacctacccagagatctgatgttgagactcaccaaggaaaagtaggctctgtataacaaattggtgcattcagctgagaatgaggagaagaaacttcagataaaaataaatgagatggacaacatacttaagaagatcagtaattgtctcactgaagtggaaatagaaactaggaatttggagaatgaagagaaagatgaccctatggaagaatgggactctgaaatgaaagatgcagagaaagaactggaacagctaaaagctgaagaggaggaactccaaaggaagttcttagaagtggaggcacagaaaacacagacccttgctcagatagagttttataaaagaacaaacaaataaaactgaagaattactggatcaagcaagttttgtctgagtgggatgtcattga

SEQ ID NO: 7163 - DNA, 843 bp, Cricetulus griseus
atggtgagcaaggggctgctgcgcctggtctcttccgtcaaccgcaggaggatgaagctgctgcgtgggcatcgcgctgctcgcctacgccgcctcggaccggaaaggattttgatcactggaggtgcgggctttgtggggtcccatctgactgacaaactcatgatggatggccatgaggtgaccgtggtggacaacttcttcacaggcaggaagagaaatgtggaacactggattggccatgagaacttcgagcttattaaccatgacgtggtggagcccctctacattgaagttgatcagatttaccatctggcgtctccagcctctccccccaaaactacatgtacaaccccatcaagactctgaagactaatacaattggaacattgaatatgttgggactggcaaagcgcgtgggtcaagcactacagggggagccgctcacggtatatggatctgggtctcagacaagggcgttccagtatgtcagtgatctggtgaatggcctggtagcactcatgaacagcaatgtcagcagccctgtgaacttggggaacccagaagaacacacgatcctggaatttgctcagttaattaaaaaccttgttggtagtggaagtgaaattcagtttctctctgaagcccaggatgacccacaaaaaagaaaccagacatcaaaaaagcaaaagctgatgctgggctgggagcccgtggtcccattggaggaagggttgaacaaagccattcactacttccggaaggagctagagtaccaggccaataaccagtacatccccaagcctaagcccgccagagtaaagaagggccggacgcgccaca

SEQ ID NO: 7164 - DNA, 843 bp, Cricetulus griseus
cccgctatggagcatgcgtttaccccgctggagcccctgctacccacgggaaatttgaaatattgcctcatggttcttaatcagcctttggacacacgctttcgtcatctttggaaaaaagctcttttcagagcctgtgcggacggtggtgccaactgcttgtatgacctcaccgaaggagagagagaaagattcttgcctgaattcatcagtggggactttgattctattaggcctgaagtcagagagtactacactgaaaagggctgtgatcttatttcaactcctgaccaagaccacactgattttaccaagtgccttaaagtgctccaaaggaagatagaagagaaagagctgcaggtggacgtgattgtgaccctgggaggacttggtgggcgttttgaccagatcatggcatcggtgaacacccttttccaagcccctcacatcactcctgtgccaattataataatccaaggggaatctctcatctacctcctccaaccgggaaagcacaggctccatgtggacactggaatggaaggcagctggtgtggtcttatccctgttggacagcgttgcagccaggtgacaacaacgggcctgaaatggaacctgacaaatgatgtgcttgcctttggaacactggtcagtacttctaacacctacgatgggtctggggtggtgactgtggagactgaccacccgcttctctggaccatggccgtcaaaagctaacctatgtggcacccgtcatgttcctctgccttccctcatccgcccagcagttcattgtgcaccaggagcaatcacctcggtgtgcagaaatctaaacttctccat

SEQ ID NO: 7165 - DNA, 843 bp, Cricetulus griseus
ggaattactaagctttgtgattttgggtttgcaaggacactagcggctcctggggatgtctacacagattacgtggccactcgctggtacagagctccggaactggtgttaaaagacacctcttatggaaaaccagtggatatctgggctttgggctgtatgatcattgagatggccactggcaatccctaccttcctagcacttcagatttggatttgctccacaagattgttttaaaagtaggcaacctgaccccgcacctgcacaatatcttttccaagagtcccatctttgccggggtggttcttcctcaagttcaacacccaaaaaaatgcaagaaagaaatacccaaagctcaacggattgctggcagatatagttcatgcttgtttacaaattgaccctgcagagaggatatcatctactgaccttttgcgaaacccggtcaatcccagcacgaactctgatggtgccagcgaagacctgcatgctggaggttgtatgataatgccgcctatcaacctgacaagcagtaatctgatggctgcaaatctcaattcaaacctctcccaccccaattcacggttaactgaaagagcaaaaaaagagacgtactacttcacaaactattggacaaactttgtctaatagcagacaagaggacacaggtcccacgcaaagccaaacagagaaaagcgtatttaatgatcgaacaggccagagtgatcaaatggcgagtggaaacaaaagaaagctgaatttttccagatgcgacaggaaagaattccatttccctgaactgccattcacaatacaggcgaaggaaatgaaaggaatggaag

SEQ ID NO: 7166 - DNA, 843 bp, Cricetulus griseus
ctttccgaaggaccttgctcagctggtatgaccaagagaagcgggaccttccttggagaagatgggtagaggaggaggccgacttggacaggcgggcctatgctgtatgggtgtcagaggttatgctgcagcagacccaagttgccacagtgatcgactattataaccgatggatgcagaagtggccaacgctccaggacctggccagtgcttccctggaggaagtgaaccaactctggtctggcctcggctactattctcgaggccgtcggctgcaagagggagctaggaaggtggtagaggagctaggaggtcatgtgccacgtacagcagacaccctacagcagctcctgcctggcgtggggcggtacacagctggagccattgcttccattgcctttggccaggtaactggtgtggtggatgggaatgttttacgggtgctgtgccgtgtccgcgccattggtgccgatcccagcagcacctttgtctctcatcacctctggagcctagcccatcagctagtggatccagcccggcctggggacttcaatcaagcagccatggagctgggggccacagtgtgtactccacagcaccctctctgcagccagtgccctgtgcagagccagccgcaggcctcccagagaggtagcactctgccacttgtgttctggagcagcccagagccactgggggtcccctcatcctgctggtgcagaggtctaactcaggtctgctggcaggactgtgggagtttccatctgttgccttggagccctcagaagagcagcagcacaaagccctcctgcaggaactgcagagctggtctggactcctccc

SEQ ID NO: 7167 - DNA, 843 bp, Cricetulus griseus
gggtgtataccggccgggcgggagacgactctgtgttcacccatgatttgctgccctcaggtccacccactaatgggggacctcggacgtgagggccaacaatcctacagaccaagccctagccaatgtttacgcggaacctagcccgctctgctattgctggtgtgcagtggactccagccagcccagtgtgatggaccaacaatagacaggacttcctgtgtgtgtgtgtccttggctcctgggtgcagaggccccttgggaacatgcactgctgtacagtggtcttctgactggccagggtcaggagcaccaaatgtagaatgtaaagagggcccaccctcgtgcaaccctggggttctggctccctccatttcccactgccacctcccagggaccattgtagagaaggctatactcccatgtccagggtggaccttggcctttttggtgcctaaagctgagcctgcagggaagctctgccctatgtggcgagcctctcttctacatggcaccttgtgtttggtggtgagtcacagctctccacctccaggccttctatttctcaccccgaccctcagactgaaattacgggtacctgaaggtgggagctataacttctatcagaaaggtttattccagaaacaaatgtacatttatataaatagatgtcctgtatgatatatacatacatatatataaaagaatatctatatggaggcaggcaaaactgaggtccagaggagcaagataccccatagggctcactggtaaaatgccaagaacaagccaagaagcaaggagcttttctggcaccacagttttgtttgtacatggacctgt

SEQ ID NO: 7168 - DNA, 842 bp, Cricetulus griseus
gcttctggccgggcgggcttcgcgggacaccacggctctctgcgcgggcggcatggaggagcacggcgaatccgagccaaccccgggatgtagcggccttggcccgggtcccgttcgcgctggcggcgccaccccccacacgtgggctcccgaggacgcctggatgggcacacaccctaagtacttagaaatgatggaattagatataggagatgccacccaagtttacatagcattcttggtgtacttggatctcatggagagtaaaagttggcatgaagtaaactgtgtaggaataccagaactacagcttatctgcctccttggcactgagatagaaggggaggggctacagactgtggtgcctacacccatttctgcttccctcagccatagcaggataagggaaatcttgaaggcatctagaaaattgcaaggtgacccagaactgccgatgtcttttactttggccatagtggagtcggattccacaatagtctattataaacttacagatggatttatgctgccagacccgcagaatatttctcttagaagatgacatctgtcctgatgctgatttcattcgtgaaagattggatttgagggccatcagtctgcttcatcttttgtctcagaggtagtcaggcttgacttagctagtcccaacccataagctttctttcagcataaaaccttctcaagtggaagaatctatattgcttgcaaatatagggtagttagcctagaactttcttatcagagacactacagttatatgcaggtttataccaaggatatgttcagagtgggggaacctgtatatgcctatgccatcccac

SEQ ID NO: 7169 - DNA, 842 bp, Cricetulus griseus
gaggccatacaaggtatagagagccctgagggctctgaggagtgtcttcgtgggtgccctggtcccctttccctaccaggttccccccctaaccagcctcattcccaggccctggtgggctgaggccccttggttgggagagggccaacctggcctgtggagcatcttcctgtggccgcccagatatggcattccctcctcccttagcacccccgtcactgcagcctggcaggtctggcctcaagaccagaggatcccactgaccttgagccactccaaaggtctctggagtcagaatcagctggcctcctctagctccactcaaggcaggcacactggcaacctgtgtgggtcaaagaatgcacactgagctgtccatctcaccaacactctgctttaccccttcctgctcgctccggccctattcttgctctgtctgtggaaagaggttttcactcaagcaccagatggagacgcattaccgagtccacacaggagagaagcccttctcctgtagcctctgccctcagcgctcccgggatttctctgccatgaccaagcacctgcggacacacggggccgctccctatcgctgccctctgtgcagggctggctgccccagcctggcttccatgcaagctcacatgcgtggccattcgcccagccagctgccgcctggatggaccatacgctccacctttctctactcttcctcgaggccgacacgggcctccgtccctcccgggagtcctgcctcctcctctgccacctgaccgggtgttggcagcttctctggctttgacaagcgtccacccaaagaatgaaaggcatgcgggctcagc

SEQ ID NO: 7170 - DNA, 841 bp, Cricetulus griseus
ggggcagccgggtaacaattccaagatgccagggcgttccggttcaaattcaggttccactcgctacatatccttcagtggagtggagtccgctctctcctccttaaaaaacttccaagcctgcatcagctcgggaatggacacagtttctagtgttgccttggaccttgtggagactcagactgaagtgagtagtgactacagtatggacagggccatggttgaatttgcaaaaatggagcgagaactgagccattacgttaaggccgtccagtccaccataagtcatgtaaaagaagaacgcccagaaaaggtgccggacttaaaactactagtggagaagaaatttttggctttacaggataagaattctgatgccgactttagagacaatgaaaaatttgtgcagtataagcagcagctgagggagctgaagaagcaatatggtatgcctgcagacagagagtatgactggacggaagggattgatgaagatatgattgtgacccaaagccagaccaatttcatctgccccataacccagctggaaatgaagaaaccagtgaaaaataaagtgtgtggccacacgtacgaagaggacgccattgtccgcatgatagaatccaagcataagaggaagaagaaagcctgttgccccaaaattggctgtagtcacacagacatgagaatgtccgacctcattccagacgaagccctgaggagggcaatcgagagccacaacaagaagaaaaagcgccactctgagtaggaacaagccacctgcctgcccacagggttgtcagcctccctacctccaccccccagccacccaagagtgagg

SEQ ID NO: 7171 - DNA, 841 bp, Cricetulus griseus
ttgccactatggtcaacattaacgagctcccggagaacattctgctggagctgttcacccacgtccccgcccgccagctactgcgtaactgccggctggtctgcagcctctggcgagacctcattgatgtggtgactctgtggaagcgcaaaagcctgcaagagggcttcatcaccaaagactgggaccagcccgtggaggactggaagatcttctacttcctgcgcagcctgcagaggaatctccttaggaacccgtgtgccgaagaggacatgaactcatggcagatagactccaacgagggggatgagtggaaggtggagagtctccctggggagcatggcaagaactttcctgactccagggtcaagaagtattttgtcacctctttcggcatgtgcctcaagtcccagatgatagaccttaaggctgagggctattgggaggagctgatggacaccttccggcctgagattgtggttaaggactggttcgcccccagagcggactgtggctgcacctatcacctccgggtacacctgacctcagccaactacattgtcttggcctcctttgatcctccacctgtgaccatcgaacagtggaatgatgccacatggaaggaggtctcccacaccttctctgattaccctccaggcgtccgccatatctttttccagcatgggggccaggacacccagttctggaaaggctggtatggcccccgtgtcaccaacagcagcatcattatcagccacagaccagccaagaaccccgcccctgccagacctctgccggaagacactgtagtaatagaaggaaacatccagctttggatcca

SEQ ID NO: 7172 - DNA, 841 bp, Cricetulus griseus
ccagccagctgtaaagccctgggctcccttgcatgattcagaagtgtatttagcatctctagagaagaaactaagaagaatcaaaggtttaaatgaggaagtaacctccaaggacatgcttcgaactctggcccaagctaagaaggaatgctgggatcggttcctccaagagaagttagcgtccgagttttttgtggatggacttgattctgatgagagcaccttggaacatttcaaaagatggcttcagccagataaagttgccatcagcacagaggaggtccagtttctcatccctccagagtcgcaggcagagaagacagaggctgaggccggggacaagccagcggcaggagaacaataaatgacacacacataagccaagcagctgtctggggcccgggggaacggtggagagcttgacagccccgcagcaaagagaaatccagggagagaaaatgcccagacttccaatccacaaagcaaacagctgctggcccctgagggcttgcttggagctggcatgtgtgactgtcttggaagtagtgatataatgtatcggttaagcaagccatatttttttctctcttccgggtcttcatatgtgtgtgtgtgtcacgcattccatagctaagtagtcaggagcaggtgtagccaaggagagtgaggtcagcctcctggagtccaagcccttgtggggctttctcacatactcatcgtaaacagagggactcaaggggaaagggcttttccttttgatttgttccttgtgtcaaaataggggaaaaaaagaaatatggtttagtgtttgacacaactcttgattagttccaaacttgct

SEQ ID NO: 7173 - DNA, 841 bp, Cricetulus griseus
ccccaaacacaaacaacacacacacacacacacacacacacacacacacacacacacacacacacacacatcccaaaaaaaagttttacagctggttctcacctccctcactctaatccggtctttttgtacccactgctccattgagctggggaatatggtgtggccaagggtcttgggacatagtgaccaaggagtcctcctgaaccattctgttacatgtgttgaatggctggctaaaaagcccaggggagatgaaagaccacatccatacatattctcagggcgctggcatgtccagcagggccaggaagcaaggtttaggaagacatatatggactaatttattgacaagggttacctttgtgttccttgccaagctttttgtagtttgggacttattttcccatttgagaagttataatatatttctactgaacatggagccattgttaaaagaattgtgtggtttttttttcattatgtaaattgtatatatctttttgcttgtttgaggttctatttttctaatagtcttcttgcagtttcttataatggtgacattagattaactctgatgctaactgtaaatcaagctggtctctgctggattcccgtggtttaattatagtttattttaaggccaagcgcaggttcatccatcacctttttaaaaaatgtgaaccttatgtttcccctcgttgctgaatacattgtacactggcaaccccctctgatatgcctgtgtcgtaaacccaaagctattttgtggtacattatctcatgcttctgcagatgctaataaatcctgtctgactttaacaaaaaaaaaaaaaaaaaa

SEQ ID NO: 7174 - DNA, 841 bp, Cricetulus griseus
cgccgccgccgcgtcctccgcgtcttcctgcgccttcaccgggcttccgccgcctcattgatttccgtttctcgccgctgcagcctcctgacacggtgatccgggcgggccccgcaggaattttatcccctcaccggcctcacactagtgtcgcatgtccactatccagaacctccaatctttcgacccctttgctgatgcaactaagggtgacgacttactcccggcagggactgaggactacattcatataagaatccagcagcgcaacggcaggaagacgctgaccactgtgcagggcattgcggacgattatgacaagaagaaacttgtgaaagccttcaaaaagaagtttgcctgcaatggtactgtgatcgaacatcccgagtacggagaggttattcagctccaaggtgaccaaaggaagaacatttgtcagtttctcttggaggttggcatcgtcaaggaggagcagctgaaggttcacggattctaagatgaacccaaacgtgtggcaagtttcttaaatggttttgttctctcaacccagtttggctgcctcgggagatgattctctacagtaaacgacggactttatgtttatttaatcattcagacttccactcacacctgcatggctacagaaaacacagggtatgtaggctcctgagtcataagaaaatcgcggtgagatgggaacgaagcccgagttcgtcctaacatgtttccaatggaaaaggttttgttttgagtgtttattggttagtttattttcacttggttattacatgttgttcttgttgtattaaaacgtgtatgttgcagcttaacaataaagaga

SEQ ID NO: 7175 - DNA, 841 bp, Cricetulus griseus
catgggggctccggctctgcccccgacctggcagctgtatctcatggagcaccgcatctccaccttcaagaactggcccttcctggagggctgctcctgcacccccgagcggatggcggaagccggcttccgccatccgctgccctaccgagaacgagcctgacttggcccagtgttttttctgctttaaggagctggaaggctgggagccagatgacaaccccaggaacataaaaagcattcgcctaaagtgtgccttcctgactgtcaagaagcagtttgaagaactgaccctcagtgaattcttgaaactggacaaagaaagagccaagaacaaaattgttttttgtttttgttttttttttttgtttttttgtttttggttttttgagacagggtttctctgtgtagctttggaacctatcctggaactcactctgtagaccaggctggcctcaaactcacagagatccacctgcctctgcctcccgagtgctgggattaaaggcgtgagccaccacgcccagctggaaataaactgttccctctaggccacaccccagccccaatgtatcctttcattattccaggcaaaggagaccaacagcaagcagaaagaatttgaagaaactgcaaagaccgttcgctgctccattgagcagctggttgcctcgaagtgagcctttgctgggggtgacctggacctgagtgacatgccacatttaagccacgtgtcccagctttcccagcctgggccgcttagcagtgtcttaaagaaagaaataatgatattttgaaactggatgtcaaatattatttttgtcttcgcttggaagtggct

SEQ ID NO: 7176 - DNA, 841 bp, Cricetulus griseus
cttggatctgtgaattggagcagcagaaaaggtcaccatggccatgccagaaaagtcaagttgtgtcaaaccatctgaggattgcagcaattttcctgagattattgaactcaatgtaggtggccaggtatatataactcgctatcctactctgatcagtattcctggttcccggctctgggaaatgttcagtgtaaagaacccttgctcactgatccaggacaacaaagggagattcttcatagatcgagatggttttctctttcgttatgtcctagactacatgagagacctgcaagtagtgcttcctgaccactttccagagtgtggccggctccatagagaagcagaatactttaagttgccagaactggccaagatgttggctgttaaaatgaacaagctcaactcagttggcaatgactcatgtcaaattgatctagaagacctgataattctgtagttctgacagctgccactggttctgagctcaagaaggctggcttcatcaccattggctatcgaggctcctacactctgggcagggatagccaaacagatgctaaattccgccgtgtggccagaatcatggtgtgtggtaagatctcattagccaaagaagtgttcggagacactctgaatgagagcagagacccagaccgccctcctgagcgatatacttctcgatactaccctcaaattcaattttctggaacaagcctttgacaactagctgatgctggcttccacatggtagcatgcaactccactggcacctgcactgtcacacatctctctctctctctctctctctctctctctctctctctctcctctctct

SEQ ID NO: 7177 - DNA, 841 bp, Cricetulus griseus
atggaggcgtacgagcaggtccagaaggggcccctgaagctgaaaggcgtcgcggagctcggcgtgaccaagcggaagaagaagaagaaggacaaggacaaggccaagctgctggaggccatggggacgagcaagaagagcgaggaggagaagcggcgctgcctggacaagcgcacgccggcgcaggcggccttcgagaagatgcaggagaaacggcaaaatggaaagaatcctgaagaaggcatccaaaacccataagcagagagtggaggacttcaacagacacctggacacactcacagagcactatgacattcctaaagtcagctggaccaagtaacctgcccctggtgcaaaatgtattgctccctcagtgttttctagaatgttctacatctgcctggtgcatctgctgagcccaggctttctgaaacttgaattaaagtcaggctgtcctttcactgagttttggtttctgggtagtaccatttcctatttggacgagatgttgtgaattgacaggctgggatcatttctgggtgagagccatggaaggagggtaccttcccaaccccgtttcagcatctgtcttcatctgtaccacaatgccaggacaggaagctcctgcctgtggaccaccacagaagttcccacagtgctgctccttttgggcaacctggacatcagattacatcaagcaacagccacctgaagcaaggatgagacacgggcctccggcatatggccagttcctcagtccaccctgtgggggccattgcagacatttctaatcaattcagttctcaatgatggcacctgggactctaagcatatggtatgt

SEQ ID NO: 7178 - DNA, 841 bp, Cricetulus griseus
gagcctgctggctcagagacactcctggatgccgtgctgaggaccctctacgacctgggagagacagaaggtgaaacagagcctaaaaggatcagaaagaagagagaaaaaagagaggcgaggagacaatagcagatgagacagcagagccccttcccctgcctgaatgtcctgcaagaagccaaaagaagaatgcttccagctttttcaaggaactcaaagcagagctgcactctgctcctgctgtcccttcagaagtccctgctactactgcagtatcgctctctcccctgaagaacagcggcaagctagtagaagtggtcgcgtttcaaagcagaagtaaaaaagaaaaccaaagtcagatcaagatgagcacacaaagaataaaacaaaggcctttgaaaaagatgtgggtattcaagaatttaacctagaaaaggctcgtctggaagtacatcgctttgggatcacaggctacggcaaaggaaaagagagagtcctggaacgggagcgggctatcatgctgggggctaagcctcccaaaaatagttacgtgaattataaggttttacaggaacaaatcaaagagaaaaaggcagcactggaagaagaaaagagagtggctcgggacacagacattttcaagaaaaagaagaggaaaggacaggaagacaggagatccaagaagttggctcccagcattttgtcaaatggacgagttggacaagttggaaaattcagaaatgggacattgattctaagccccacagatatcaagaaaataaattcttccagggtagctaaatgatgcactttgtcagcaccagagaggagtgggaac

SEQ ID NO: 7179 - DNA, 840 bp, Cricetulus griseus
  modified_base (797)..(797): a, c, t, g, unknown or other
ggatgattgcttggtatcacctttggccacttcaactcctgcagacatccaggaagctggacattctctctccatctccccagatttctagctgccacagtttggaaacaacaccgtctttgactacgatgtctttgccccaacctgacatcttgatgggcgctggatcaaatgaagcctccctggcttcctcctttacccagtacttggaaagttcttgtttggaccaaagagaggccaggaggaaaagggagtggcttcatggatctaagacaaactgtccaggcatgggaagtcacgtcagaccatctagtggtaaatgctgtcagaccttggacaaagctgaactggagggaaaggggcctgccaaggaaaacaggaaggctcctgtgcatcttcaaacctacaagttcgagtcctggagtaggaaaaaacccatgttggtgacaaaaagcccttgtcctctctctgtgttttcctgggacaatgaaaggaatgacagggactcttggagtcagcttttcacagaggattcccaaggccagaaggtcattgcccacaacactaaaatgccctttcaagatgtaaccaatgttagtaatcaaggcttggggcagtttcctgacagccctcaagctcagtgccaagatgggcccactctgttagatctgcagtcaaacctgctcttttacccaggactctgaaggtaatcaggttatcagacactagttctaaaaggtttgtctcgtgtttcttgaagcggcagagatggaggaaagtagggttgggctgggtanagaggagggtttaagtgagaggccacatggcatgaagcagttg

SEQ ID NO: 7180 - DNA, 840 bp, Cricetulus griseus
gatagaaaagctggagaaacaaagacatcgaagcattggaaagcctttactaggaggaccattttccctcacaactcatgatggagagtccaaaactgacaaggactacctgggccaatgggtattgatttattttggcttcactcattgccctgatatctgtccagaagaagaactagaaaaaatgattcaagttgtggatgaaatagacagtattccgtccctgccaaatttaactccacttttcatcaccattgacccagaaagggacacaaaagaagccatctcgacttatgtgaaagaattttctcccaaactcgttggtttgactggcacaaaagaagagattgatggagtggccagagcatacagagtctattatagccctggccctaaggatgaagatgaggactacatagttgatcatacaataataatgtacttgattggaccagatggagggtttctggattactttggccaaaacaagaaggcagcagaaatagctggttcaattgctgcacacatgaggtcacacatgaagaagaggtagccagagtggtgtcaccagacacagaactgtcttgttgaagaggaaggagaaggctttgtctcccagaggagcctctatatactttaacgtacagcatggcctccataccgatcatcattccacatgagatgttgaccttgggctcagccaaacccagtctgccactggagctagctcttgtagaccaggctgacctcgaactcaagagaatctgcctgcctctgcctccccagtgctaggattaaaggcatgcaccaccaccacccagctttgttttggttttttaa

SEQ ID NO: 7181 - DNA, 840 bp, Cricetulus griseus
tatagattgtgactcaacgttcaatcaaacctcaaaccttactacacataaaactcagtatgcccagaaatcctacaaatgtaaagaatgtggcaaagcctttaagtattgctcaagttacactaaacacagcatagttcacacgggagagaaaccctacaaatgtaaattatgtggaaaatcctttacccagtgtacaagccttaaaaaacatcagagaatccacacgggagagaaaccctacaaatgtgaagagtgtggcagaagctttaaccactgctcaattcttagtcagcaccagagaattcatacaggagagaagccctacaagtgcaaacagtgtgggaaatccttcactcagtgtgcaagccttagaaaacacgaggtaatccacactggagagaagccctacaggtgtgcagaatgtggcaaagcctttacccaaagctcaacacttagtgaacaccagaggatccataccggagagaaaccttacaaatgtgaacagtgtgggaagtccttcacccagtgctcaagcctcagaaaacaccagagaattcacactggagagaagccctacaaatgtgaaaactgcggcaaggcctttaactagaccgttcgtcttttactaaacacctgaggatccacaccggagagaaaccttacaagtgtaaagagtgtggcaaagctttcatccattgcacaaaccttacgcaacaccagagaatccatacgggagagaaaccctacaaatgtgacgagtgtgggaaatgctttagtcagtgttcaaacctcagaaacaccagagacttcacacataagtaaaaccagacaaaatgt

SEQ ID NO: 7182 - DNA, 840 bp, Cricetulus griseus
gtggggctgaagggctgtcatggaggacccggcgactcccggcccgttggaaaaaggcacggcaagtccgggggtgcagcaggcggcgggtcctggaggagccctggtggagctcaccccgacccccggaggcctggctctggtgagcccctaccacaccaacagggtcggggaccctttagacctcgtggcgctcgccgagcaggtgcaaaaggctgatgaattcatccgagcaaatgctactaacaagctgacagtcattgccgagcaaatccagcatttgcaagagcaagctaggaaggtactggaagatgctcgaagagatgctgacttgcaccatgtggcttgcaatatggtgaaaaaacctggcaacatttactatctttaccagagggaaagtggccagcagtacttttccattatttctccagaggaatggggagcaggctgcccccatgacttccttggtgcctacaagctgcaacatgacttgtcatggactccatatgaagacattgagaagcaagatgctaaaattggcatgatggacaagctgctgaaccagcccatggccttgcccccatgcaccgaacctgccttccagggactgactcactgagtatggctctgactagaagtcctcatgacaaaggcctgaccactacctccttgtccacattctcttccttgatggggtagggtgggggttcacgaggactgtgcgttattgggtgaacttcttggaaggagaccatggtgggtgtagatgctgtgtttgctgtcagttgggatggcgaggaatcacagaactcctgtgggatcttcctgggcccactgatg

SEQ ID NO: 7183 - DNA, 839 bp, Cricetulus griseus
  modified_base (803)..(803): a, c, t, g, unknown or other
agccggggcactttccaggagaacgctggggctcgcgggtgtctaagcagcccttttctcctcccgttgctagggaaatggtccaggactgctgggtgtgagcctcacctctcctccagccgagactgcggttgtcagtgatccattgaagaaacgggacctgaaataagagatttttagcgatgatgtgtgaagtgatgcccacgattaatgaggacaccccaatgagccaacgggggtcccaaagcagtggctccgactcagactcctcattttgagcaactgatggtcaatatgctggatgaaagggatcgtctattagatacactacgagagacccaggaaaagcctctctcttgcccagcaaagactccaggatgtcatctatgacagagattcactccagcgacagctcaattcagccctacctcaggacatcgaatccctaacaggagggctgactggttctaagggggctgatccaccggaatttgctgcactgactaaagaactgaatgcttgcagggaacaacttctagaaaaggaagaagagatctcagagctgaaagctgaaagaaacaacacaagactgttactggagcacttggagtgccttgtgtcacgtcatgaaaggtcactaagaatgacagtggtgaagcggcaagcccagtctccctcaggagtgtccagtgaagtggaggtcctcaaggcattgaatccttgtttgaacaccacaaggccttggatgaaaaggtagggagcgactgagggtttctttagagaggagtctctgcactggaagnggaactaacaacaacaacaacaacaaaaaaaaaaaa

SEQ ID NO: 7184 - DNA, 839 bp, Cricetulus griseus
ccatggatcccctggctgatacctcttgtgctcctcaggcccccaactgccgcccctggtttctcttggaaggcagtaagagcgagccctgggctgctctgctgcggagcagtgtgagctggaacgtggatttgaccccgaacagtcagccattgccaccactgcctgcttttcccagccaggagtcactgcctgacccagagcccactgtggctcctgaggtcttctttactgtgggatccaagaccttttcctggacgccttttccacctgcccttggtgtctctggaaactcttaccggttgttccacgggactggaggctccctggagtcacctactccacccctgagagcatgtcctgcaccagattctactcagactcctggcacccaagagtgtgtgtctgtgcatagtccacctgcgttgctgagctgcccattgtgccagaaggcatttgatcccacgctggcccagatggatgtggatagtcaccttgctcagtgcttggctgaaagcacggaagacgtcgtgtggtgagctgcaggatgcctctcctgtctcctccttccagcgtacatgctgacagggatgtgactgctgagacgtgtcttcgtgtggacacctgagcacaggttccttctggttttgttcatgggcattgggcataatgctgatcactgtggtgcagacagcagtaggtcctctatgatggtttgtttcattgtcagcttaactgggtatggaatcacctaggagacagaccgcagggtgtgtctgtgaaactgtttccagagattaactgagaaaggaagaaccaccttgaatgtggatggtacc

SEQ ID NO: 7185 - DNA, 839 bp, Cricetulus griseus
acagagttaatgtcacctcaagctttcctacgacagagacagtccatcattcccctgcatattcttttcctgctgccacccagagaaatgagccccagcgccctgacagcttccttttccgagctgctgttagggcagagactactaaagcttgtgcctcacccctgctgtcttctgcacctgcaactggacctgcagatcctgtaacaagacagagagaagaggagctgaaattaatagaatcaactacgcaaacatattgagtaccggttaaaagtatctctgccctgtgatcttggagcagctctaactgatggtgttgtactttgccacttggccaatcatgttcggcctcgatctgtcccaagcattcatgtcccatctccagccgtgcctaaattaacaatggcaaaatgcaggcgaaatgtggagaacttcctggatgcttgcagaaaaattggtgtacctcaggagcaattatgtttgcctctgcacattttagaagagaaggggttgagccaggttgcggtgactgtccaggccctctggaacttcgccccaccaagcagcagcagcagcagcagcagcagcagcagcagccattgcagtgaggtggttacagcagatttgacttctgaaatgttacatgtaattagcaaaaggttttgtaaacattgtcctatatttgtatgtctgtaaatatattgtataagttctgagtataaatatgtcgatactgtgtatgttatttttaagttgcctgtatgccatcttatatgtgaacattaaaataaaagccaatacttcagtagcatgtaataaacaacttgcaaatgttc

SEQ ID NO: 7186 - DNA, 839 bp, Cricetulus griseus
  modified_base (181)..(181): a, c, t, g, unknown or other
gtattctgccccatcccaacctcactgcgtgttcagccatggccagacctcccgtgcacggttcggtgattgtcccagactggcatgagacggtcgagggcaaggagtacttagcctgcatcctgcgcaagagtcgccggcgggagtttgggttgctggaacggccggtactgcccccttnagtggccattgatacagccaactacaagatcttcgtgtccgggaagagtgggtgtggggcaagacggcattggtggcaaagctggcaggcctggaagttcctgtagtgcaccatgagacgactggtattcagaccactgtggtgttttggccagccaagctaagggccagcgaccgtgtggtcatgttccgctttgagttctgggactgtggcgaggccgccctcaagaagtttgatcacatgctgccggcttgcaaagagaatgcagatgccttcctgttcctcttctcttttactgaccgcgcctccttcgaagaccttcctggacagttgacccgagtagccagtgaggctcctggggtcgtcaaaatggtcattggctccaagtttgaccagtacatgcacacagacgtgccagagcgagacctcacagccttccggcaggcctgggaactgcccttgctgcgggtgaagagtgtaccagggcggcggctggcagatgggcgtacactggacgggcgagctgggctggctgacattgcccatgtgctcaatggccttgcagaacaattgtggcaccaggaccaggtggtggccggcctgctccccagttccccagagaatacccctggctgaagggtgacggcatcccgagtag

SEQ ID NO: 7187 - DNA, 839 bp, Cricetulus griseus
aggcagctggccctggatctggacaacaacaacctcaatgactatggagtgcaggagcttcagccttgtttcagccgcctcacagttatcagactcagcgtcaatcagatcactgacacaggggtgaaggtgctgtgtgaggagctgaccaagtacaaaattgtgacattcctgggtttatacaacaaccagatcactgatattggagccaagtatgtggcccaaatcctggatgaatgcagaggcctcacgcaccttaaactgggaaaaaacagaataacaggtgagggggaaagtgtgtggctctggctgtgaagaacagcacctccatcgttgatgttgggatgtggggcaatcagatcggggatgaaggggcaaaggccttcgccgaggcattgagggaccaccccagcctgtccaacctcagtcttgcattcaatggcatctccccagagggagggaagagccttgcgcaggccctgaagcagaacaccactctgacaatattctggctgacaaaaaatgaacttaatgatgaggccgcagagtgcttcgctgagatgctgaaagtcaaccagacgctgaggcatttatggcttattcagaatcatatcacagtcaaggggacagcccagctggctgaggcactgcagaagaactccaccataacagagatttgtctcaatggaaacttaatcaatcaggaggaggccaaggtctttgaaaacgagaagcgtatcatctgtttctgatggccattcctgggctgagtctttgctccttaaaaaatatttaaaaaattaaaaaaaaaaaaaaaaaaaaaaaaaaaaaaaaaaaaa

SEQ ID NO: 7188 - DNA, 839 bp, Cricetulus griseus
atcccgagcctttgtgacttatgggcagagtggccacacgttcctgctccctacaggtcttggccatgaacgcccctggaggaaggaggcaggaaggtagaagggcccatagaccccgggaacaggaccgagatgtgcagctgtctaaggctctgtcctatgccctacgccacggagccttgaagttgggacttcccatgcgagctgatggctttgtgcccctgaaagccctgctgcagctacctcagttccacagcttctcagtggaggacgtagagcacgtggtggataccaatggaaagcagcggctcgccctacagccaggcgagcccagcactggccctcttatcagggccaatcagggccactccctacaagtacctgagttggagctgatgcccctggagacaccacaagccctgcctttgatgctagtccatggtacattctggaagcattggccatctattctactgaagggcttgtcatgccaaggaagggcacacatccacttggcctcagggttacctggggaccctggtgtcatcagtggcatgcgtccaaattgtgaagtggtggtgttcattgatggacccctagccctggcagatggaatccccttcttccgctccgccaacggggtgatcctgactccagggaatgctgaaggcgtcctacttcccaagtacttcaaggaggccctgcaactacgaccgacccgaaagccctctctccttggctggtgatcaagagacggagtatcagagtggccccaagcacagctccagaggagggagaagaaagatccaacaataaaatacttaatttaatttaaaaaa

SEQ ID NO: 7189 - DNA, 839 bp, Cricetulus griseus
tttgttaggggcagcgggccggtctccgcgatgccgaagtcgtgtgcggcccggcaatgctgcaaccgctacagcagccgcaggaagcagctcaccttccaccggtttccattcagccgcccagaactgctgaaggagtgggtgctcaacatcggccgggccaacttcaagcccaagcagcacacagtcatctgctctgagcacttcagacccgagtgcttcagcgccttcgggaaccgcaagaacctcaagcacaatgccgtgcccactgtgttcgcttttcagaaccccacgcaggtctgtcctgaggtgggggctggtggggacagcggacagcacactggaagagtctgagtctccagacactgaaggccctgtgaaacaggccctaccagagagaacagaagcaatggaggcccctggcccgccagccagccccacggtgttgaaaaggccccttctgggacagccgtctgatcacagttatgcccttttggacttggataccctgaaaaagaaactcttcttcacactgaaggaaaacaagaggctccgcaagcgcctgagggcccagaggctgctgcttagaaggacatgtagcctcctgcgagcctacagagagggacagcggggaccacgggccagacggccagcacagcgcagctgagcctgagcaagttctgggatgtggggatggtggcaacaccctggcaggaagtggttttcggctctgctgtgcacattccccactaatactaatgctgcagggggccttgggactggcaggatgggatgccatgacaggcagtcgtcaggggagggacccaagttctggggag

SEQ ID NO: 7190 - DNA, 839 bp, Cricetulus griseus
ggcggcgcgcgtgacggggtcgtccgggcgctctgagggctgtggtagggcaggaaatgtcaggccgtctccgccctgtgccctgtgcccggtgtcccgggccggatgcccgactggccagctgttgggtgggcgcccggagccgctcagaactggaacggcgatggcacctgccgcgtcaaggctgcgggcggaatgcgagctcccttcgcttccgcggcgagcgctcgcccagtacttgctgctcctgaagctctatcccgtgttcaccaaagcggtcagcagtggcattttgtcagccgttggcaaccttctggcccaaatgattgagaagaaacagaaaaacgactctcaaagtctagatgtcagtgggcttctcaggtattttaatttatggttctttgtcacaggcccactgagtcactatggatcgcctgctctttgcaccaacctttttgctgctgttctttctcatcatgaacttgttggaggggaaagatgtcagtgccttcgcttccaagatgaggagtggcttctggcctgcactgcaaatgaactggaggatgtggacaccttttgcagttcattaacatcaactatgtgcccctgcagttccgggtgctctttgccaacatggcagctctgttctggtatgcctacctggcctctctgaggaagtgatgtcagatacactgtggatgaggtcttggggaatctacccaccagcaggagagatcagaatcccatcattcaggacatcatctgactaaattatgtgattcaagatgccttaaaatataggaggaaatgtgttagtgtcagaatgtgtgtttagagag

SEQ ID NO: 7191 - DNA, 839 bp, Cricetulus griseus
agttgctggctgacccggcttggaggagcccgcctcgccaccggaggccggcagcagcggaggtggcggcgcccaggcccagctaggagtcgctgccggtcccggcccgagtccgaggataggcgagggcgcggcggcggtccatcatgggtggctttttctcaagtattttttccagtctctttggaaccagggaaatgaggatcttaattttgggattagatggtgctgggaaaacaacaattttgtacagattacaggttggagaggttgttactactattcccactattggatttaatgtagagaccgtgacatacaaaaaccttaaattccaagtttgggacttgggaggacagacaagtatcaggccatactggagatgttactattcaaacacagacgcagtcatctatgtagttgacagttgtgaccgagaccgaattggcatttccaagtcagagttagttgcaatgttggaggaagaagagctgagaaaggccattttagtggtgtttgcaaataagcaggacatggagcaggccatgacaccctcagaaatggcaaatgcacttgggttacctgctctgaaggaccgaaagtggcaaatatttaaaacatcagcaaccaaaggcactggtcttgatgaagccatggaatggttagttgaaacgctgaaaagcagacagtaagcccattcacatcaggtcctgtgaagcaaatgctacgccacacactcactgcaaccagccagatgtgcttctgtgactgttagaactgtgtgattgctggcatgtacagaactgactccaatgtttgtaataaatataaaaaacaag

SEQ ID NO: 7192 - DNA, 839 bp, Cricetulus griseus
acctgccagccgacgacgtggtcagcatcatcgaagaggtggaggagaaaccgggaaagccggaagaacgaacgcccctcccggagcccagtgccgcccccccgggccgccccagcccccactcacgtccgctccccgcagccccacccccgcgcggcccgggatgagttgccggactggaacgaagtgctcccaccctgggatcgggaggaggaggaggtgtttcccccagggccctatcacccctttcccaactacattcggccgcgaacactgcagccacccgcatcctcgcgccgccgtcacttccaccacgcgttgccacctgcgcgccaccatcccgacctggaggcccaggccaggcgcgcgcaggaggaggcggacgcggaggagcgccggatgcaggagcaggaggagctggagaattacatcgagcacgtgctgctgcgccgcccgtgaccggccccggccccgcccccgcgcgcccgccccaagccgggcgcgccaccacgcccccctccgtgtcgctcctcctccctcagtgtttgcatgcgccccggctccgcccctcggctgccgcccggccccacccctcgtgaccccgccccgagccatgtggggcccgggcctgtcgtcagacttgtcccgggtctgcagtccagaactccccaagctcacgggccatcccggggccatcccaggcgggtgggtgttttgtgcgagtccccttacacccccacttcctccaggggcctcgaccccatttagtttctcttgagacttccgggtctcaacgggaaatctgttctaattaatcttgtgaagtgtctgtctcccag

SEQ ID NO: 7193 - DNA, 839 bp, Cricetulus griseus
gctctggcattttctgcgcagaccatgtggcctacgcccagcatcactgtggatcagcttaccaaaaggatatccaggtacctgtgtgccccctctgtaatgtgcctgtgccggtggccagaggggagcctcctgaccgggctgtgggagagcacattgacagagactgtcgctctgatcccgcgcagcaaaaacgcaagattttcaccaataagtgtgaacgttctggctgccggcagagggagatgatgaaactgacctgtgaccaatgtgcccgaaacttctgcatcaagcaccggcaccctctggaccatgattgcactggggagggtcatgtgaccagccgggcagggctagctgctatctccagagcacacggtcttggcttctacgagcactgtccccagtccaagtcggaccttgccttctgcttcctctcccagcagagccacatcccattttccgacccggacatcccctccagtgatcgctttgcagaatggcttgagtgaagatgaagctttgcaacgcgccctagaactatcccttgcagaagctaaaccccaggtcccaagttctcaggaggaagaagacttggcgttggcacaggcactgtcagccagcgaggcagagtaccaacagcagcaggcgcagagccgtagcttgaagccgtccaactgcagcctgtgctagggtcctgggcttggggagggaggctcacctgaggactgtggccctcacatctccagggtacccagggaaaggaaacacagagaagcctggattgcagagacaaacaggagtgaagtggaggagactccatggagcctggagaggaa

SEQ ID NO: 7194 - DNA, 838 bp, Cricetulus griseus
  modified_base (822)..(822): a, c, t, g, unknown or other
cgggaggccatcgagcactgccgcagctacaacgcgcgcctgtgcgccgagcgcagcctgcgcctgccctttctcgactcgcagaccggcgtggcccagaacaactgctacatctggatggagaagacccaccgcgggcctggtctggccccaggacagatctacacttaccccgcccgctgttggaggaagaaacggagactcaacatcctggaggaccccaggctgcggccctgcgagtacaagatcgattgtgaggtacccctgaagaaggagggtggccttccagaagggccagtcctcgaggctctgctgtgtgccgagacaggagagaagaaagtagagctgaaggaagaggagaccatcatggactgtcagcagttgctggagtttccgcatgatctcgaggtagaagacttggaggaagacattcccaggaggaagaacaggggaccagttgctgttctgtgatgactgcgatcggggttaccatatgtactgcttgaaccctcccatggcggagcccccggaagggagctggagttgccacctctgtcttcggcacttgaaagagaaggcctctgcctacatcaccctcacttaggcctggctctgcttctccaggacctttgggtggtgctaactttcctgcctcgaggagctcctggctcttcccacccggtgtcccccagggggagggaggccggtggagcacagcggaggggaccaaggcgttcttctgcaagtggaatgttaccctgtgggtgggtgggtcctggtaaggctcctcctgcccccctccactcccttgttttttttttnttttttttcctctctc

SEQ ID NO: 7195 - DNA, 838 bp, Cricetulus griseus
ttgattgaaatgaaaaccaagatgtgaagttcaccaaagacacctacatccttgcttttgcagtttgctacagactgaatagtccggaatcttttaaaatttgtacaactttaagagaagaagccctaattaagggagacatcctccccaggagagcatcatgttttgcggtagcattggctctgaatcagaaccaggtggaaaaagccatgtccattttttctcaaatcatgaatccagagagtgtaacctgtgctaacttaaatattttaatccatgtccggtcaaatatgttggaaaacctgataaagatcttacaagacaatattgacagaaatgtatccctatttgtgaaaagacacatgttctcagaggaagtgctggccaaagtgagggaaaaactgaaggacagccccaccctcagagccaaatttgatgaggtctatgggaagctgcacatcaacggccaagtcaccatttgccctttggatgctatgctctgccacgtgcccagggacaagaaacccaacacattgctgctaaagaagaggacggtcagccaacggaccttacaacctctcagccagtccctgctgactgagtaactgtgttttcagactcccaggtctggaggcgctgctttggtgaatcattggcttctccaagatgccaggcatctcacctcagtggcactgtgctaaatgcctggtctccgtaagccccaagttccccgagtggtgacttgctgatcagagagatgtgaagagctagctcaagcaagggaagcaccgttaccacagaaaggcagcttcccctctgtcagccgctccagagtaag

SEQ ID NO: 7196 - DNA, 838 bp, Cricetulus griseus
  modified_base (834)..(834): a, c, t, g, unknown or other
gcatccagtgtgtttaccattgcttactatgaggtaaagtctgtatatatatgtactacagttttctctgtcagtgtattttatgttactggtgttcattccagttaggcttgttcactctgtgactattacaagcagaatttcatgttcactttgtcacacactataggaaaggacaacctctcttgattttgtttgagaatgaggaatgcagttaagctgtgtcttggccaggtcaggtaagacaaatggcttcctgggtgttgtgagtatttgggctgatttagcaacctgttaaggtggctctggggactctgaggcatttcagcactatgtaggtggcactagggactcagaaatttctgtactgtatccgacgattttggcattagccattagtcatagataggcacagttcctctcctcacaccagtgttaaagtgtgtgagcagccagggctgcggggaagagcatggacaacaggcatctggccctcctctcactggagaacgggatttctttgcttggcgatgaagtaagcaggatagaaagcaagatgctctttattaatccatttagcttttgttttcttgataaactaagcaaatgtcaaatgttttattattactttattaatttttttctcaaaaggtactttcttattagacatcatacttttttttacagctttcagttgcttgtcttttggtattttttgtgttacaggctatggtgagccagaggcaaatctataagccatttttgtttgccaggacatgcaataaaatttaaaaataaatgaaaatacattaagaaaaaaaaaaaaaaaaaaanaaaa

SEQ ID NO: 7197 - DNA, 838 bp, Cricetulus griseus
catggtgcaagcctggtacatggacgagtccgcggccgacccgcggatgccccaccgcgcgcagcccgaccgcccggtgggcctggagcagctgcgcacgctcggagtgctgtattggaagctggatgctgacaagtatgagaatgatccagaactggaaaagatccggaaagagagaaactactcctggatggacatcattaccatatgcaaagatagacttcccaattatgaggagaagatcaagatgttcttcgaggagcatctgcacctggatgaggagatccgctacatcctggagggcagtgggtacttcgatgtcagggacaaggaggacaagtggatccggatttccatggagaagggggacatgatcacgcttcctgctggcatctatcaccgtttcacgctggacgagaagaattacgtgaaggccatgcggctgtttgtgggagagcctgtgtggacaccgtacaaccgtccagctgaccattttgatgcccgggttcagtacatgaagtttttggaaggaagagcatagcggtgcactttgaagagtactgcactgtgtgaggctctcgctgcagttactggtgggaaggttgctcacctctctgcttttgtatgtggacttgacgctagaccagctcttcttggcaagactggaaaatcagaatctttttaatcaaaagcatctataaaagtgattcttacttggaagccacaaaaatgtgaataagtgatcttaattttcctgaactctgtcaagacatagagaggtatggaagccctggtttgggtgtgtgcattggtgcataacagatcttcatgtcccaga

SEQ ID NO: 7198 - DNA, 838 bp, Cricetulus griseus
  modified_base (830)..(830): a, c, t, g, unknown or other
agaagctgttggagtcctacaaggcagtccccgataccctcccctcaagtccttggggccatttgggtccccagaactggggagatggtttgcggcggatttgcctgttccaagaatgcgctgtgcgctctcaacgtggtttatatgcttgtgggcttattgctcattggcgtggctgcctggggcaagggcctgggtctggtgtccagtattcacatcattggaggagtcattgctgtgggagtcttccttctcctcattgcagtggctgggctcgtgggggctgttaaccaccaccaagtgctgctcttcttttacatgatcatccttggcttggtcttcatcttccagtttgcaatctcttgctcttgtctggctatcaacagaaacaagcagatggatgtcatcaacgcgtcctggtgggtcatgagcaacagtacccggcatgaattggagagaagttttgactgctgtggtttgttcaaccttacaatgccgtacttacaagatgatacttcctgtggtgcaatgtgcaagaccagaagttctgcatgccagatgtgtggggagaagttcctcaaacattcggatgaagccctgaaaatcctaggtggtgttggcctcttctttagcttcacagagattcttggtgtttggctggcaatgagattccggaaccaaaaagacccccgagccaaccccagtgcctttctatgagacttcttatctttcagataggatctttgaagcctaggctggtctccaacttgctatgtagccaaggatgaccttgagttctggatccccctgccacagccgttttttttttntttgtttg

SEQ ID NO: 7199 - DNA, 838 bp, Cricetulus griseus
aagaagcgggccctggataccaattactgcttccgcaacttggaggagaactgctgtgtccgccccctctacattgacttccggcaggatctgggctggaaatgggtccacgaacctaagggttactatgcaacttctgctcaggcccttgcccgtacctccgcagtgcagacacaacccataggcacggtgctgggactgtacaataccctgaacccggaggcatcggcttctccgtgctgtgtgccgcaggacctggagcccctgaccatcctgtactatgttggcaggacccccaaggtggagcagctgtccaacatggtggtgaagtcgtgcaagtgcagctgaggccagcctgcgacagaggaaggaagactgccaccactggctgcggctccttgggaaaccaaagtgacagacctcagtctagaggcctggagcccacgagccctggctcctggcaaacggccgagagggaggcttccttctggaacatttctttctgctagctctgagaatcactgtggtaaagaaagtgtgggttggttaggggaaggcaaactcttgagaacatggaatttctgtggtgcagacagaggtggtggggtagagaagggatggtgagcccacagggtgtggggtaatgggactcgttagggctaccctagggaggacatggggtcgagtggcggctaggtgagggccagactggaaggcacttgagatctgaggtcagctttgcccattcaagtaccacatctgctctaggggatcgggatgtcgttagaggtggcaagcatttttcttcaggtcaccaagacgaagtccccagaatcat

SEQ ID NO: 7200 - DNA, 838 bp, Cricetulus griseus
tgagagaactcacactggcgtgaaaccgtatgcttgtaaacaatgtgggaaagcctttcttcgttcctgccaacttctcatccatgaaagaattcacactggagagagaccttttgtatgtaaacattgtgggaaagccttcacctactccagtgcttgttattatcatgaaagaattcacactggagagaaaccctgtgtttgtaagcaatgtgggaaagcatttaaatgttctgcctaccttcacatacatgaaagatctcacagtggagaaaaaccatatgtatgtaagcattgtggaaaggcctttgcttatgccactggatgtcacaagcatgaaagaatccactctgggagagaaaccatatatgtgtgtgcagtgtgggaagctattcagtttccccagatcccttcacatacatgaaaagatctcacagtggagaaaaagcccctatgtatgtaagcagtgtgggaagtctttcagtcagggaacttctttgaaaagacacgaacgaattcacactggagaaaaaccgtatgtatgtaggcagtgtgggaaagccttcatccaacgtgatgattgttacagtcatgaacgaactcacactggagagaaaccatatatgtgtgttcaatgtgggaaaacgttcaccttttccaaatcccttcaaatacatagaaaaaaatcacacgggagaaaaccctatatatgtaagcagtgtgggaaagcatttacctgttccacataccttctcagacatgaaagaactcacagtgaaaaactcagtggataatattctaccaatgtaaatcatgggaatgtctggtgtcaactttt

SEQ ID NO: 7201 - DNA, 838 bp, Cricetulus griseus
gagcacgatggcggcggcaggatctgaacagctgcgtgtgggcttcgtgggcgcaggtcgcatggcggaggccatcgcccaaggcctcattcgagcaggcaaagtggaagctaagcaagtgctggccagtgcaccaacagacaggaatctctgtcacttcagggctctgggttgtcagactactcactccaaccaggaagtgctgcagaactgctcacttatcatctttgccaccaagcctcaagttctgccagatgttctggcagaagtggctcctgtagttaccactgagcacatcgtggtgtctgtggctgctggggtgtctctgagttcgctggaggagctgctgcccccgaaaacaagagtgttgcgagtctctcccaatctaccttgcatagttcaggagggggccatggtgatggcacggggccaccatgctgggaatgacgacgctgagctcctacagaacttgctggaggcctgtggacagtgcatagaggttcctgagtcctatgtagatatccatactggcctcagtggcagtggtgtggcctttgtgtgcacattctcagaggccctggctgaaggtgccatcaagatgggcatgcccagtggcctggcccaccgcattgctgcccagactctgctgggaactgccaagatgctgcagcaggaagggaagcacccagcccagcttcggactgatgtgctcacaccagctggaaccaccatccatggacttcacgccctagagcaggggggtcttcgagcagctgccatgagtgcagtggaagcggctacctgccgggctaaggaactcagcaagaagtaagccagg

SEQ ID NO: 7202 - DNA, 837 bp, Cricetulus griseus
tgcgctccctccaacatgcagggcagcacaaggaaagtgggtgccatgacggatgtccatcggcgcttcctccagctgttgatgactcacggtgtgctggaggagtgggaggttaggcgcctgcagaaccactgctacaaggtccatgaccgaaatgctactgtagataagctggaggacttcatcaacaatatcaacagtgtcttggagtccttgtatattgagataaagaaaggaatcacggaagatgatgggagacccatttatgctctggtgaatctttctacaacttcagtttccaaaatggccacggattttgccgagaacgagctggacctgtttagaaaggctttggaactgattgttgactcagaaactggctttgcttcttctacaaacattttgaacctggttgatcaactcaaaggcaaaaagatgaggaagaaggaagcggagcaggtgctgcagaaattcgtgcagagcaagtggctgattgagaaggagggggagttcaccttgcatggccgggccatcttggagatggagcagttcatccgagagacctacccggatgctgtgaagatatgcaacatctgccacggcctcctcatccagggtcaaagctgtgagacatgtggtattaggatgcatttgccttgcgtggccaagtacttccagtccacctctgaaccacgctgtcctcactgtaatgatttctggccccacgacattccagaagtcttcgaccctgagaaggagagggaggctggcatctccaagtcgagcagaaagtccttgcggacccgtcagcattagctgtgtcctgcatggctctgg

SEQ ID NO: 7203 - DNA, 837 bp, Cricetulus griseus
cttctgagtggccgctgagcgtgcacgttcataacccacgaggacctgcgagctccgccgccgtgatgaatatccgcaatgctaggcccgaggacctgatgaacatgcagcactgcaacctcctctgcctgcccgagaactaccagatgaagtactatttctatcatggcctctcttggccccagctctcttacattgctgaggatgagaatgggaagattgtggggtacgtcttggccaaaatggaagaggacccagatgacgtgccccatggacatatcacctcactggctgtgaagcgttcccaccggcgccttgggctggctcagaagctgatggatcaggcctctcgagccatgatagagaatttcaatgccaaatatgtctccctacatgtcagaaagagtaaccgggctgccctgcatctctattccaacaccctcaactttcagatcagtgaagtggagcccaaatactatgcagatggcgaagatgcgtatgccatgaagagggaccttacacagatggctgatgagctgaggcggcacctggagctgaaagaaagggcagacacatggtgctggcagccacggagaacaaggcggagggcaaaggcaacatgcttctgagctcgggagaggcctgtcgtgagaagagtctggctgctgaggacagtgctggggacagcaaggacctcagcgaggtcagcgagaccacagagagcacagatgtcaaagacagctcagaggcctctgactctgcctcctagagcctgccccacctggttcaagcctccccccatgtgcttttacaataaatgtggtcctgtggccttgg

SEQ ID NO: 7204 - DNA, 836 bp, Cricetulus griseus
cttcctttcctctggtggcagccatcaggtgagccaagatgggtgcatacaagtacatccaggagctatggaggaagaagcagtccgacgtgatgcgctttttgctgagggtccgttgctggcaataccgccagctttctgcgctgcacagggctccacgccccacccggcctgataaagcgcgaaggctggggtacaaggccaaacaaggttatgtcatatacaggattcgtgtccgccgtggtggccgcaaacgcccagttcctaagggtgcaacttacggcaagcctgtccatcatggtgttaaccagctaaagtttgccagaagccttcagtctgttgctgaggagagagctggacgtcattgtggggctttgagagtcctgaattcttactgggttggtgaagattccacatacaagttttttgaggttatcctcattgatccattccataaagctatcagaaggaaccctgacacacagtggatcaccaaaccagtccacaagcacagagagatgcgtgggctgacatctgctggccgaaagagccgtggccttggaaagggccacaagttccaccacactattggtggctctcgccgtgcagcctggagaaggcgcaatactctgcagctccaccgttaccgctaatatgtgtgatgtttgtaaaaattcatacccaataaacaatttaggaccgtcttgtctgcttaaaggtgttatttgtcaaaactagtctgcagattgtcatgaatgctttgtggaattggtagcagttaaagtgcaatgatgtttgactactggtgatggtctatcttgtttccgataaacttt

SEQ ID NO: 7205 - DNA, 836 bp, Cricetulus griseus
  modified_base (104)..(104): a, c, t, g, unknown or other
  modified_base (140)..(140): a, c, t, g, unknown or other
gactgtgtattgtgtacaagccagagttctcttgtttgccacgtggaacagaagcagcagcttcactgatgtgctgtgtgagaaacaaggccaggacattcttnttccatgatctggatcataactggatttggcactcngtttttttctgtcttcatcctttatgccggaaagaacttcctgaaatacctcaattatgtgttcttttcatcgccccaagcctccgccagtattgacgagtttttctctgagccgccttcaaagaaccttctgtttttgactcctgaggaacacactgagagatgcttcatcattgaaaacacagacactgttgctgtaacagaagaaaatcacactcccgaggaagaacacagaaagtacacttcgcagaccagccaggactcggggaactattctaatgaagaggatcccaccagcagtggagaagtcgttccctttctccacatcctctccagcataaactgtcattggtgtttttgattttagccattctgaaaggagtaagatggtatctcagagttgttttgatttgcatttccctgatgactaaggatgttgaacactttctcaaggagtctttcagccattttagattcctctattgagaattgtctatttagttctgtaccccactttttaattggattgtttggtattttcgagaatagcttcttgagttctttgtatattttggaaatcagccctctgtcagatgtggggttggtgaatatcttttcacagtctatgggctgccgttttgtcttgctgactgtgtcctttgccttacagaagcttctcagtttcaggaggttcca

SEQ ID NO: 7206 - DNA, 836 bp, Cricetulus griseus
actttatgcactttggaaccggactgctggagattgtttacttgactcagtactacaagctacctggggcatttatgacaaagactcggtgcttcggaaagccctgcatgacagcctgcatgactgttcacattggttttacacacgatggaaagactgggaatcgtggtattcccagagctttggttttacatttttcactgagggaagaacaatggcaagaagactgggcatttatactctcactagctagccagcctggagcaagtttggaacagacacacatttttgtactcgcacatattcttagacgaccaattatagtttatggagtaaaatattataagagtttccggggagaaacattaggatatactcggtttcaaggagtttatctgcctttgttgtgggaacagagtttttgttggaaaagtccaattgctctgggatatacaaggggccacttctctgctttggttgccatggagaatgatgggtatggcaaccgaggtgctggtgctaatctgaacactgatgatgatgtcaccatcacatttttgcctctggttgacagtgaaaggaagctcctccacgtgcacttcctttctgctcaggagctaggtaatgaggagcagcaagagaaactgctcagagagtggctggactgctgtgtgactgaagggggagttctagtggcaatgcagaaaagctcgcgtcggagaaatcaccccttggtcacacaaatggtagaaaaatggcttgaccgctacagacagatccggccttgtacatccctgtctgatggagaggaagatgaggatgaggaagatgaatga

SEQ ID NO: 7207 - DNA, 836 bp, Cricetulus griseus
  modified_base (824)..(824): a, c, t, g, unknown or other
cgcaatgcctctgcataagtatcctgtacacctgtggcagaagctgcggctgcggcaaggcatctacgcgcgtttgcccgctcacttcttgcgctcgctggaggaagaacgaacgccgactccagtgcactacaagcctcacggggccaagttcaagatcaaccccaagaacgggcagcgcgaacgcgttgaggacgtacccattccaatttactaccctccagagtcccagcaggggctttggggcggagagggcgtgattttgggctacagatatgccaacaacgacaagctttcaacgagggtaaagaaggtgtggaagcctcagctgttcactcgggaactttacagtgagatcctggacaagaagttcaccgtgactgtgaccatgaggaccctagatctcattgatgaggcctatgggttcgacttctatattctcaagaccccaaaggaggacctgtgttccaagtttggcatggacctgaagcgagggatgctgctgaggcttgctcgccaggacccccagctacaccctgatgaccctgaacggagacaagccatctatgacaaatacaagggttttgtcatcccagaggcagaggcagagtgggttggcctgactctggaggaagctgtagagaaacagaggctcctggaggaaaaggatcctgtacccctgttcaaggtctacgtagaggagctggtccagcggcttcaggagcaggttctgtccaggccagcagtggtgcagaagagagctggtgaccacgcctgaccactgagctcagccttccctgtgggttgcttggaaaaaaaaaaanaaaaaaaaaaaa

SEQ ID NO: 7208 - DNA, 836 bp, Cricetulus griseus
  modified_base (805)..(805): a, c, t, g, unknown or other
gtcgccggtaccatggaggcggcggtggatgtcgaagtcgaaccagaggatggcgacagcagctgcggggacgtgtgcttaatggacaaaggcctgcagagtatatcagagttatctttagattcaacccttcatgccatcaatctgcattgtaataacatctccaagatcacagccattgatcacatttggaacctacgacatttagatctgtcatccaatcaaataagtcaaattgaagggctaaacacattgacaaaactatgcactttaaacttgtcctgcaatttgatcacaagagtagaaggacttgaagcactggttaacctgactagactgaatttgtcttataataacataaatgatcttagtgggttgatgtctcttcatggactgaagtataaacttagatacattgacctacatagtaactgtatagatagtatccatcacttacttcagtgtacagattctccagactttgccgcaactgagaatcttagattgtaagaacatatttggtgagccaataaatctggaagaaataaaactcatcacgcctacagtgcttagaaggacttttggataacttagtttcttctgattcccccctcgaatataagtgaagatgaggtcatagataatctaccaatggcaacaccatccacggatatattgcccacattggaggagtttatcagtacaccggaagataatgttttgacctctcttttatctgtgtgtccatcttctgaaccagaaaaaattaatcatgaaaacgattatcagaatgagatgaaacttnagaaattagataatcaaatcttacagcttct

SEQ ID NO: 7209 - DNA, 836 bp, Cricetulus griseus
tgccgcggcagccagagagccccgagagaacgcaccaccgcggagtaccggtgcagctagcgatcctagcccgcagcgcgccgccgggggagagcggagagtggcaagcagggagcgggacggcggcgaggcgctcgcgggcccctcctgctgcccgcgcccggtgagctcattggcggccatccgcaagaagctggtggtggtgggcgacggcgcgtgcggcaagacgtgcctgctgatcgtattcagtaaggacgagttccccgaggtgtacgtgcccaccgtgttcgagaactatgtggcggacatcgaggtggacggcaagcaggtggagctggcgctgtgggacacggcgggccaggaggactatggatcgtttacggccgctctcttacccggacaccgacgtcatccttatgtgcttctcggtggacagcccggactctctggagaacaccagcaagccactagtgtcccaccgtgtctgtaacatagacccctggaaccacgggaggggagggttggggaagatgatgggggtgttacataaatacagattttattttcggaggcggaatggtgttgtttagtggtggtgagtggtgtgacccagggcgcaagagcaactcctttcccaggctggatcaggtgccctcccatccgagcatgaactggacttggccatcttttcacatcctgggaaagacatttgcaactgacttggggttgagaggaagcggcttccagatagtctcctgggccaaccccagcgaacctccttaattaaactgactgatgacaaaaaaaaaaaaaaaaaaaaaaaaaaaaaaaaaaaa

SEQ ID NO: 7210 - DNA, 835 bp, Cricetulus griseus
tccacctcagctccatctactgtcccagtgtgggtcagaccaccggcccctgggcaagccccagcctctgtggggtcccctagctcagtcctgtcagctcccacccaggacctgaactggagatggccagagttcttgccccagagcagcgagagaagcctgaactatgccaagacacggcaggagtcagaagagcatggcctcttcaaactgtatcagaactgggaggagcggtctgaggagtgctcggagcctcaagaacatcatgctcctaatcggcttcaaccttactcccagccaggtagaagaagccctgatgagtgccgacgtcaacggagatggtcatgtggatttcaaagacttcttggcagtgatgacagacaccaagcgcttcttctgctctgtggaacagaatgtcctgatggatatgtcgcccccgaacccctacacactgttctttgagatcctctctctgctggtggaaatgctggccctgccggaggtggccctagaagagatcacaaactactaccagaagaagctaaaggaaggcacctccaagacccgagacacggagtcaacggcgggcgggctgcgatcgaggaagaagctttcttacaattctcaccaagtagagaccatagaggtcccagaacgaagggtcctcaggatcctgagccggctgaagcagcagaactatgctgccaacctacagagtccttatgcccaggtgccctgcatcccactctgcccgaggctggagaagaaggtggtccgtcgaaagcagggtacgccataaccatcctgtgctggatcagtgtgtctctacaagcct

SEQ ID NO: 7211 - DNA, 835 bp, Cricetulus griseus
gacgtgggtgcattctacccccacccgcagtatttcggcccagcttcctgaggacacactctgggacattgtgaatgtgaacattgcggctgcaagcttgatggtccacatagtgcttccgggaatggtggagagaaagaagggtgccatcatcacagtgtcttccggctcctgctgcaagcccacaccacacctggctgccttttctgcatccaaggcctacctggaccacttcagccgagccctgcagtatgaatatgcctctaaaggaatcttcgtgcagagtctgatccctttctatgtggccaccagtgtgactgcacctggcagcttcctgcacagatgcccatggctggcaccttcaccgagagtctatgcacagcatgccgtgtcgaccctgggcatttcgaaaaggaccacaggctactggtcccactctattcagtttcttttcgcacagtatatgcccgagtggctctgggtttggggagcaaaccttctcaaccgctctctacggtatgaggacttatcctgccaagcctgaatccggaagctcgggagacgcttggcccagccacagtatcctgcagtattccggcatttggaaaacacatttagttcacctgcgtattgtctcttactgagtacctagtgtgttgccatctttcacgaggccgactttcagtctgtgagaaaacctcagggaccacatgggtggcccagggcacacagccacgaagcctgagaacagaaaaacctgtctcaaataataattaatgttcatcgggaagacaaatagaaaagtgttatttcctaactgtgaactgtgagtgca

SEQ ID NO: 7212 - DNA, 835 bp, Cricetulus griseus
  modified_base (608)..(608): a, c, t, g, unknown or other
caaagtaaagcaggtggggtcaatcccaccagcattgactcagtcgtcattgggaaggaccaagagatgaagctgcagcctggccaggttctccacatggtgaatgaactgtatccatacattgtagagtttgaggaagtagcaaagagtcctgacctagaaacacaaaggaagagaaagaggtcagactatgatggtgaggagatggaggcttgaagatttctatgaaagaccccaaaatgcaggtttacaaagatgatgtggtggtagtgattaaggataagtaccccaaggcccgtcaccattggctggtcttaccctgggcctccatttccagtctgaaggctgtgaccagtgaacaccttgaacttctcaaacatatgcacactgtaggggaaaaggtgattgcagatttcgctggatccagcaaactgagcttccggctgggttaccgatgccattcccacgcatgagccatgtacaccttcatgtgatcagccaggattttgattctcctttgccttaaaaaacaaaaaacaattggaattctttcaatacagaataactttctggaatcacaagctgtgatcaagagagtgactgttcanaagggacttctgaactcttgaagctgcctcttcgttgccacaagtgtcagcagttgctgccttccatcccgcagctgaaagaagcacctcaggaagcactggggcgggtgacactctccccggagacggagtacagtgccagggctgtctgcatttgtctgtgccccacgcagtcctgaactaaacacacacacacacacacacacacacacacacacacacccacc

SEQ ID NO: 7213 - DNA, 835 bp, Cricetulus griseus
tttgagctcaccagcttctgcatcatgtgtgcagcccggctctccgcggcggtgcagtccaccgtgtatgccttctccgcgcgcccgctgacgggcggggagcccgtgagcctgggctccctgcggggcaaggtgcctgcggtcagttgagaatgtcgcgtccctctgaggaacaacgactcgggactacaccgagatgaacgatctgcagaaacgcctcgggccccgtggcttggtggtgctcggtttcccgtgcaatcagttcggacatcaggagaatgccaagaacgaagagattctgaattccctcaagtatatccgacccggtggggggttcgaacccaactttacattgttcgaaaagtgcgaggtcaatggtgagaaggctcacccgctctttaccttcctgcgggagtctctgccagcgcccagtgacgatcccactgcgctcatgacagaccccaagtacatcatttggtctccggtgtgccgcaacgacattgcctggaactttgagaagttcctagtgggccccgacggtgttccagtgcgcaggtacagccgccgctttcgcaccatcgacattgaacctgacatagaagccctgctgtcccagcagcctagaggctcctaaggcattcctggcatccgggtttggtgagctccggctgcactctgggggaagttcttccatgatggcgttatctctaaatttgcatggagaaacacctgatttccagggaaattccctcagatggcgctggtcttgtccatccccgctgcctttctgcctaaacaaaggtgattttcaccactaataaagtgctgaatgtca

SEQ ID NO: 7214 - DNA, 834 bp, Cricetulus griseus
ccctgatgttgattggctgattggtaatcactctgatgagctcactcccctcggatcccctgtcattgcagccaggtcctcctacacctgccggttcttcatccttccctgctgcttctttgactttgtggggcgatactgcaggcggcagagcaggaagacacaataccgggaggtacctgggacttcgtgctgggaggttgggggcgtttcctgtggcttccacatgcaggaggactgcctcaggattccttctaccaagcgggtctgcctcattgggaaatccagaacatatctgccttctgcagaggtctggatggatgagcagaggacacggtacctccacagcagacagagccaccccgagagcccacctggtgaggggacatgcaccttctgcaacccaggctgctgcccacgatgctgcaggagtctgaagacctggaatgaaggagggagcctttctctggcagaagtggctgcagaactgaacccagagaccctgcagcagctggaagcggggagtgtggaggcctacagaccctactcaggaataaccatcaggtgtttgaagttctgaatgggcgagttcacatccgtgactggcggcaagaactgcagaaggaaaagccaccagaagtcaagcggagcctgtctgcagacgtgttcaagacgcgaatctgctggttcttcactcaccatcctgatggctgtgcgctgcctgctgcctgttgcccctttgcccatgggcctgaggagctacgcttgacccagacctcaaagaagcagagacaggctccctgagtcacttcctcagtgatctctagctggtgg

SEQ ID NO: 7215 - DNA, 834 bp, Cricetulus griseus
caggcacacccccatcgagcatggccagtgtggatcagcatgagggcaccatccaggtgcagggccagggactcttcttcagagaggctcggcctggcaatgggcaggctgctcggttttctgtgctgctgttgcatggtatccgctactcctctgagacctggcagaacctgggtactctgcataggctggccgaggctggctacagggctgtggccattgacctaccaggtcttgggcattccaaggaagcagcagctcctgctcctattggggaattggcccctagcagcttcctagcagcctgtcgtggatgccttggagctgggacccccagttgtgatcagtccatcactaagtggcatgtatgcactgcccttcctggtggctcctgggtcccaactccggggctatgtaccagtggctcccatctgcacagacaaaatcaaggctgctgactatgccagtgttaagaccccagctctgattgtatatggagaccaggaccccatgggttcctccagctttcaacatctgaagcagctacccaaccacagagtgctggtcatggaaaaggcggggcatccttgctacctggacaagcctgatgagtggcactgcctgctctgggatctcccactgtcttttggttctctggcttgaacctcgcctgcaacaggtctgtctatacatctgcctgggttcctgtcatttctgcttttctcttgcagtgacagatcagatcaaggaggtacaatcaagtggaaccagattcaaggggagaaatctgatttcgggtaatctctgagcttctcctacaggctccttgcttgg

SEQ ID NO: 7216 - DNA, 834 bp, Cricetulus griseus
gcctggtgtgtgccttgcctagtttcacttgatactcttcaggaattatgtagaaagaaagctcacatgtaaatcgattggaatcaccaaaggaatctaaacaattatgaggtggagtacttgtgtgactacaaggggtaatcacaagtgaagaagctgaaaggcgtggacaattatatgacaaccaaggaatcacatatctttttgatctggactatgaatctgatgaattcacagtggatgcagctcgatatggaaatgtgtctcactttgtgaatcatagttgtgacccaaatcttcaggtctttaatgttttcatcgataaccttgatactcggcttcccaggatagcactgttttccacaagaaccataaaagctggagaagagctgactttcgattatcaaatgaaaggttctggagaattatcttcagattctattgaccatagccctgccaaaaaaagggtcagaactgaatgtaaatgtggggctgagacttgccgaggttacctcaactgaaacttaaagaaatggagcctcatgactgaatatttttactatattttctacttttgcattaaaacattggcatcttaatgatatatttcaggtataaaagtaaatgtgaaagcttctttcagcttgatctcattttgaagtaatagataccattacaaagactgtatgtatgaacctgaaattcttaagagtttttaaccctgttaaaggaaaatctctgatcaccttctctagaagtccatagtggctggccattatgcttctttgataggacataacaatatgactaagaggaccattggagtgccaggca

SEQ ID NO: 7217 - DNA, 834 bp, Cricetulus griseus
gagcagttatcctataccagtcatgatgaatgtatccgagactttaatgagagggaggtacaagaaactgaatgagctgcaggagagactgaatatcatcattgacctggacaagaaaggcacctctgattacagttgaaggaattagcagagatgtggtacgagctagagatgagattgaagaactgatcaagagcattcgattggctaaagaaaaggaaagccatgcagactatgtctccacattcgtggaatggcaatacattgacaacaacgtcacatacagttttgacaaaatggctaacatggagttggaggaagcacggaaggcaaagagcaagaacactgtggtcaaaattaataatcacaacttcatagtgaacttgagcacaaacatggccataggccctggaagacagagtctcactgttcagcgcctcatggaagaaatgagaatcagctcttccacgggacggaggctagctgtattctacacgtcaacagccatgggtttaaccgcagctatgctgggaagaatgctacgtgttatgggcagggaacctattttgctgtcaatgcttcctattctgccagtgacacatactccaaaccagatgccagtgggaaaaagcacatgtactatgcacgggttctcactgggaactacacagttggacactcatcactgattgtgcctccttcaagggaccctctaaaccctactgacttgtacgacactgtcgtagataatgatcaaaatccaagtatatttgtagtgttttatgacaatcaaacataccagagtatcttatcacgtttaggcggtgatacttc

SEQ ID NO: 7218 - DNA, 834 bp, Cricetulus griseus
cttccgccctctcctaagatggcgcgaggcggaaggggccggtcaccgcccgctggcgacgtcgcgactggagttgaacctggtgcggttgttgtgtcgctgcgaatcgatggcggcagaaaagcgggaaccgaacgagtggcgtctggagaagtatgtgggtgccctggaagacatgctgcaggccctgaaggtccaagcgagcaaacctgcctccgaagtcatcagcgagtactcgcggaaggtggactttctgaagggcatgctgcaggctgagaaattgacctcctcctctgagaaggctctagctaaccagttcctggcccctggtcgcgtgcccaccacagctagggagcgggtgcccgccaccaagaccgtccatttgcaatcccgggcacgttacaccagtgagatgcggagtgagctgctgggcatggactcatctggagagcgtgagatggacatgaggcagcgcatagcaaatgggtccagacctgtggatgagaagcattcggtgtccgagctcgaccttgtcctccagaggcaccagggcctccaggaaaagctggcggaggagatgctaggcctggcaagaagcctcaagaccaacacactggccgcccagagtgtcatcaagaaggacaaccagaccctgtcacactctctcaagatggctgaccagaacctggagaagctgaagatggaatctgagcggctggagcagcacacgcggaagtctgtggactggctgctctgggccatgctcatcgtcgtgtgctttgtgttcatcagcatgatcttgtttatcagagtcatgccccggctgaagtaaaa

SEQ ID NO: 7219 - DNA, 834 bp, Cricetulus griseus
  modified_base (224)..(224): a, c, t, g, unknown or other
  modified_base (488)..(488): a, c, t, g, unknown or other
ccatgtccctcggccgccacgtctaagtacgtgaacgacttgtggcccggctctccgcaggagaaagccctcgccatccgcgtcgggctcgggccgctccagccgcctgtcgtcgcgctcccgcagccgctcttcgtcccgcagctccggtccggactcgcgcagcgccagccgctcgtcgtcgcgcagccatagccgggcgcggcggagccgccgctccccgntcccggtcccgcaggcgccaccagcgcaagtacaggcgctactcgcggtcgtactcccgcagccgctccccgctcccgcggagggaaaggtccagaaccaggtcgcgcagcaggagcagaactccctttcgcttaagtgagaaagatcgaatggagctgctagaaatagcaaaagccaatgcagcaaaagctctaggaacagccaactttgacttgccagcgagtctccggactgcagccaggaaacaaagccagagagcagcngttttgagcagtggcgcaaagatggagcactcagaaaatcaagctgaagatgaaactaaaaatcacagtgagaaatcttccacacaaagaaacatagccttcagctctaataattccatagcaaagccgatacagaaaacagctaaagctgctgctgaagagacatcatcagggtcaccaaaatagataagaaaaaaagtccttatggactgtggatacctgtgtaaagaaaaaccaagggctggggttccctaaaactgcactttactgagagttcctgtcctccagcattcgcctacctgcctgagtatcatggcagtaaatgttgtgattaaactccattaca

SEQ ID NO: 7220 - DNA, 833 bp, Cricetulus griseus
agataaaaggttgtcctcaacacctctggaagtcctgttctttctgaatgggtggtactatgccacctatttcctgctggagctcctcatcttcctgtataaaggtctcttgctgccatacccaacggccaacctagtcctggatgtggtgatgctgcttctttatcttggcattgaagtaatacgactgtttttgggtacaagggaaacctctgccagcgaaagatgcctcttagcattagtgtggccttgaccttcccatctgccatgatggcttcctattacctcctgctgcagacctatgtactccgtctagaagctatcatgaacagcattttgctcttcttttgtggttcagagctgctgcttgagatgctcacgttggcgaccttctccagtatggacaggatctgaagtataagaattccagctggtgacagcccacatcctctggtacgtcagccacacttgtgaaaagtggtaggtcaagttggcctgggaaaggttgtgtggtttttccttagcacagacatctgggcattgagcacctacctgaggtcagtggcgtcatcttaaaccaggatcatcagcaggagacacggacattttatggtagggagaggcaaagctgttgacatcttgggcttcctaacagcttcctactgacctcaagttctcttccttggtcatcatggccagagctccttgtgtggattatatggcttgttgggcttccagtaggacggaagccacagcactctgtacatgtaccacatctgtcctgcatgagcatgaagagcctcatgatggtggcctcctaggctgattcaaat

SEQ ID NO: 7221 - DNA, 833 bp, Cricetulus griseus
gggaaggccggggaaggctccgtgggcggcagcttggcggtgagccccaaccccggcgacaagcccatgacccagcgggccctgaccgtgctggtggtggtgagcggcgccgtgctggtgtacttcgtggtcaggaccgtcaggatgagaagaaggaatcgcaaaacttaggagatacggagttttggacactaacatagaaaacatggagttgacacctctagaacaagatgatgaggatgatgacaacacattgtttgatgccaatcatcctagaaggtgagactgtgcctttcatgagaagacttcatatttctactgagaacagatttctatgtctaaggaataagaagccactcaatcgaggggaggggaatttaagttgcacacattatgacaacctttaatttgttgttgctgcaataaatattgtatcattttgttatatctttgtatatttggaacagctctgttattggactccatgctgttagggacagcctggactggactggcttttccattggagattattttaagatgctgttttctgaagagcttgtccttcctccaaccacattagtgtaacttgttttctttaagtactgatcagttgttaattattttttgtcagtgtcataatttaaagaactataagccacaactaactggtatgaaataataattcaaattctactttactaaaaatttcccatttttgtgggggaaaaagccaaatttgttacgttgtttttgagtttttaaatagtagaaattgtctgtgctattgtatgcaaaagataaatgtaatttaaattattaagtggtacaga

SEQ ID NO: 7222 - DNA, 833 bp, Cricetulus griseus
ccggcgtcggagccggaggcggaggacccgctgtggagcttcgtgcgggttctggagaagcgggatgggacagcccttcggctacagcagtacggctccggaggcgtgggttgcgtggtgtgggacgccgccatcgtcctttccaagtacctggagacgccggcgttttccggcgacggggcccacgcgctgagtcgccgctcggtgctggagctgggctcgggcaccggggctgtgggactcatggccgcgaccctcggggcagatgttgtagtcaccgatctcgaggagctgcaagacttgctgaaaatgaacattaatatgaacaagcatcttgtgactggttctgttcaagccaaggtactgaaatggggggaagaactagaagacttgacttcaccagactacattttgatggctgactgcatatactatgaggagtcattggaaccattgctaaaaacattaaaagagctcagtggatctgaaacatgtattatatgttgctatgaacaacgtacaatggggaaaaatccagaaattgagaagaaatattttgagctcctccaactagactttgactttgaggaaatccctttggacaaacatgatgaggaataccgaagtgaagacattcgtattatatacatcaaaaagaaaaaatcaaaactaccatcgtgaaactcttttccatcttactcacgcccctaacacccggcataaggtaaagatgtgaacagagcatgtgcatacggcatggcaagattgcctttacagtttctccagcatgaccttagagacctggcacatggatgaccaccaccacggactgc

SEQ ID NO: 7223 - DNA, 833 bp, Cricetulus griseus
gctgctgctgctggccaccagccgcttggctacaggggctcctgttgccaacgagctgcgctgtcagtgcctgcagaccatgacaggggttcacctcaagaacatccagagcttgaaggtgacacccccaggaccccactgcacccaaaccgaagtcatagccactctcaagaatggtcaggaagcttgccttaaccctgaaggcccccatggttcagaagattgtccaaaagatgctaaagagcggaatccgtaagtaacagagaaagaagtaagattgctttggtggcgcatctgtgatcgctgacttctgacaacactcctatttatttatgtatttatttatttcacaaagcttgtgtattttatttttacattaatatttaacattgtggatgtgttttatcaatggtagttcagttctgattgttcagtttgaagatggtaggcttaaaatatctcagtaaactaatatttattgggagaccattaagtgtcaaccactgtaagagaagcatgtggggttgggaaaaaaagcagagagatgagagcatatgatcatgtttgtattagggtgagggaatgtgtgggaatctatgtttgaatgttttggaaagaatgtcagttatttattgaatgtcattttttatattaatggtcaacattgacatgttgaagtttcccttggacattttatgtctactttgtagggcatagtgccctgttatattctttaaccaatgtttctctttgtctgtcttgtgacagagaagttcaaaaggactgttacaaatgagaataaaaattaaaagttttagaaaaaaaaaaaaaaa

SEQ ID NO: 7224 - DNA, 833 bp, Cricetulus griseus
  modified_base (333)..(333): a, c, t, g, unknown or other
  modified_base (540)..(540): a, c, t, g, unknown or other
  modified_base (639)..(639): a, c, t, g, unknown or other
gccactaatgaattagacagtcaatatggtatctctcaagacaagaaggagaggctacagggtgatggcaagtccagtgatcagcctgaaaatctgcttcccagctggtcctctgattatggtgatggagaagggaatgagccagtgaagccattgcagcccccaaataaagaccaaaagcccaaacaggatcaagttaccagtggatgtaggatagaaaaacaggacagcatccagccaagattccagccacacagctctgtgtctgaaccttctgtgtctcggcagcgaaggcagaaaaggaagaacagactgaccgtggtcaggcaaagngtcagtttcaagaatcacccgtcggctttgccttctcaccctgatgttggaaagtggatatcatatcaacacaacaaaatgaatagaaaaccaaggtagacctgtggctgggtctgtaaacagttcaaggatcagttcaacgtcatcatccaaggatcgaccattatcagcgagagagagacgacgattaaagcagtcacaggaagngacgctcccctcaggcctttcagttcggagaactccaagtgcagtagagctgatgtaatccagggcctgggggttcagcttctagagcaggtgtatgancttttgggggaggaggagatgaattggagagagaggcacgttacgggagcacatgggggacaagtacgcaacttacagtgtgaaagctcgccagttgaagttttttgaagaaaatgtgaattttttgagatttgttctaacttgctgccagaattagagactgttttcagaggtttctcacccgaaaaacaaca

SEQ ID NO: 7225 - DNA, 832 bp, Cricetulus griseus
gagccagcaggccagcgtgaccatccacgacgtggacgccgagtccttcgaggtcttggtggactactgctacaccggccgccgtgtccctgagcgaggccaacgtgcagcgcctgtacgcggcctcggatatgctgcagctggagtacgtgcgcgaagcctgtgcttccttcctggctcgcaggcttgacctgacaaactgcactgccatcctcaagtttgccgacgcctttgaccaccacaagctgcgctcccaggcccagtccttcatagctcacaacttcaagcagctcagcaggatgggttccattcgggaggagacgctggcagacctgaccctggcgcagctgctggccgtgctgcgtctcgacagtctggacgtagacagtgagaagacagtgtgtcatgtggccgtgcagtggtgtgcatctcttaaacgaagtgactttccaagaagcctgtgtcttcaaagacgaaatctattgtatttgtgatatcccagtcatgaaggtctataatccagccagaggagagtggaggcggattagtaatattccactggactcagaaacccacaactaccagatcgtcaatcatgaccaaaagttgctgctcatcacttctaccaccccacaatggaagaagaaccgtgtgacagtatatgaatatgatactagggaagaccaaatggattaatataggtaccatgttggccttttgcagtttgactctggctttattgcttgtgtgctcgagtttatccttcctgtcttgaacctggtcagagtttcatcaccgaggaagatgatgcaaggagtgagtctagcactga

SEQ ID NO: 7226 - DNA, 832 bp, Cricetulus griseus
gtagtcggcggcgtcggctgccgtgtcggaggcgtccgctggaaaatggcggaatacttggcctccatcttcggcaccgagaaagacaaagtcaactgttcgttttatttcaaaattggagcatgtcgtcatggagatagatgttctcggttgcacaataaaccgacctttagccagaccatctgcactctaaaacatctaccgtaacccccaaaaacactgcacagacggctgacggctcacactgtgctgtgagcgacgtggagatgcaggagcactatgacgagttctttgaggaagtcttcactgagatggaagaaaagtacggcgaggttgaggagatgaatgtctgtgacaacctaggagaccatctggtggggaacgtgtatgtcaagttccgacgtgaggaggatgcagagaaagctgtgattgacttgaataaccgttggtttaatgggcagccaatccatgcagagctgtccccagtgactgacttcagggaagcctgttgccgccagtatgaaatgggagagtgcacaagagggggcttttgcaacttcatgcacctgaagcctatctcaagagagctgcgacgggagctgtatgggcgtcggcgtaagaagcatagatccaggtcccgatcccgggaacggcgttctcgatccagagaccgtggtcgtggtggcggcggaggaggtggaggtggtggaggacgagagcgtgacaggaggcgggtcaaggagaccgtgagagatctgggcgattctgagccgagccgttttaccgtgtgtctgctagacagtgttgtagttggtgacaagccagttcataa

SEQ ID NO: 7227 - DNA, 832 bp, Cricetulus griseus
tgcagaccgtcccctgctgcagctgctcctgtacaccagcttcctgtcgcccctgtgcaccctgtggctctggacaaagcctgttgcccgtgacttactgtaccaggcacccatgaagaacatgacctcttctctgccatcggaaggggcctttgactccctgcgcctctgggtgctggtagtgctgtgcctgctgcggctagcggtgacccggccacacctgcaggcctacctgtgcctggctaaggctcgagtggaacagcttcgcaaggaggctggccgcatcgaggcccgcgagattcagcagcgggtggtccgggtctactgctatgtgacggtggtgagccttcagtacctgacgccactcatcctcactctgcactgcacactgctgctcaagacgctgggtggctactcttggaccctgggtcctgctcaaaccccactggacccaccccagtcctcagacactttgatctctgtggaccctgcagaggatgaagcccagcagactgcagcccaggtcgcaggggtcctgggtggccttgcttacaacccctcttcctccgtggcgtgctggcctacctcatttggtggacggctgcctgccagctgctctccagcctctttggcctctatttccaccagcacctggcagcttcctaatgtgatgccactaggtgctggcatctgattcctgtccaccagggctgggactgtcccctgtgtatgtacttcagaccctagatgacctagggataagggtggggactccccaccctctctcacctcagtgcctagatcatggacccgttgaatcaggttcccctgg

SEQ ID NO: 7228 - DNA, 832 bp, Cricetulus griseus
gaaatgaggtatctgggcagtcccattactacagttccaaaactgagtaagaatctaaagctagaagaccaagaagggctttcagaggattcagtggagttttccctggaagaccaagataccaagggcttaagtctaaagaagatggtctctctctgtgatatgaatgccattcagatggaggaagagcctgaccaagggcaccttattggtgatttctccaagttgtgtgcgctgccaacggtgtcagggaaacaccaagatttgaagtacgtcaccccagacacagtggctgctttactgtctggaaagttccaggatctgattgagaagttttacatcattgattgccgctatccatatgagtacctgggcggacacatcctgggagccttaaacctgtatagccagaaggaactgcatgagttctttctgaagaagcctattgtctctctggacatccagaaaagaatcatcattgtgttcctctgtgaattctcctcagagagaggcccccgaatgtgccgttctctgagagaaaaagacagagctctgaaccagtatccagcattgtactacccagagctgtatatcctcaaagggggctacagagacttctttccagaatatacggagctgtgtgaaccacagagctactgtcctatgcaccaccaggaccaccaggctgagctgctgagatggcgaagccagaacaaagcccaggaaggggagcggcagcttttggagcagattgccctcctggtgaagaaggatgtgaacccacaatagtggccatgacagtggcagtgaagtcactggaagacactggaca

SEQ ID NO: 7229 - DNA, 831 bp, Cricetulus griseus
gaaggcgataacctactcttcctacggtggcccgaaggagaggcaaagtaggcgtaggagaatttattatttctaagactcacagtcgtgatgtctttcaagagggaaggtgacgactggagtcagctcaatgtgctcaaaaaacgaagagttggagacttgctggccagttacatcccagaggatgaggcgctaatgctgcgggatggacgctttgcttgcgctatctgcccccatcgaccagtcctggacacgctggccatgctgactgcccaccgtgcaggcaagaagcacctatccagtttgaagctcttctatggcaaaaagcaatcaggcaagaaaacagagcaaaaaccaagacagcaaaatgaattgaagacagaaagcaaagccgaggcacctttgctaacccagactcgattaatcacccagagtgctctgcacagagctcctcactatagcagttgctgccggaggaagcacagaccagaggctcctgctccctctgtctccagttctcctttgcctgccccagaggttggactccagagtgcaaagatcagtagggaacctgagactaaggcaggatcacatgccaaagagtcatcagatctcctggcctctgcacccataagccccacaaaacgacgagtcctgaaccattaccttaccctccgaagctctggatggatcccagatggacaaggtcgatggataaaagatgaaaatgttgaatttgactccgatgaggaagagccccctgacctccccttggactaataaccgtctccccatttgttccacaaataaactacagtgggtcctgggagc

SEQ ID NO: 7230 - DNA, 831 bp, Cricetulus griseus
gggatgtcttacgggtctttactgagtggctgagggatggccatgctgatgtgattcgagacacagagtggtttgtggccactgtgctccaggcagtgagccgggatctggactgggaggtccgaatgcagggtttggagctggcacaggtgttcctcatccaggcaatggggcagcccagcctccactgtccctatacagtgggccttcctgaggccacctctcccagacccacacccagaattcttgcaaactctctgccgtctgccactgtttgagtttgccttttgtgccttgcttgactgtgaccgaccagtggcccagaaggcctgtgacttgctcctcttcctgagggacaagacaactcactgcagtcgcccccaggaggctggggacagccccaactctgcctctgtggaggctgtcctgcagaggtggcgggagggtgagcaagaatgtagagttcctggccagattggtctagatagcaatcctatctcaaaaaaagaagaaatcaagtcaaaacaaaaactcttttgtgtacgtgtgcatgcagacgagaggtcagtctcaggtgtcattccttaggtgctgtccaccttggtttttgagaacaagtctttcactgggacttggttctcactgatgaagcttgccagtgagctccagggatcctgatacccaccccaaccccccagcactgggattataatactgcatcaccatacctgggtttttacatgggtgctggcatttgaactcaggtcctcacgcttgcacaccaagcactttgtccactgagccatgtccccaggtcccacggaatcttac

SEQ ID NO: 7231 - DNA, 831 bp, Cricetulus griseus
gaggagaagctagagttctggatggagaaatttagataaagacacagaagcaaaacagaatgagctaaattctctcaaggctgtcaaggcctctgacctagcacaccttcaagaccttgcaaagacgatccgagagtacgagcaggtcattattgaggaccggctggaaaaggagaagatgagaaagaagaagcaacaggatgacctggagctgaagagcatcgtgaagcttcaggcctggtggcgaggtacagtggtccggagggaaattggaagtttcaaaatgcccaggaaagagaaagaagacatcaaagattccaaaggcaaggagaaggaaaacggagaggcaagaagtgacaagtgaacatttgcaagtgtttattacatgctactgaagtattggcttttattttaatgttcacatataagatggcatacaggcaacttaaaataacatacacagtatcgacatatttatactcagaacttatacaatatatttacagacatacaaatataggacaatgtttacaaaaccttttgctaattacatgtaacatttcagaagtcaaatctgctgtaaccacctcactgcaatgtgtatataaaaaggcttctaaacaaccaagttttccttcatttctacaaccatctaaatacttagttcttcaaactcatcagcatagcacattattaggcactgctgactagaggaagccagattacaggcttcacgattagctgcaagggggtatttacatggtagctggattggaaaccacccactgctctgcctttttcgtctgttctagccacatacgatggttcctc

SEQ ID NO: 7232 - DNA, 831 bp, Cricetulus griseus
cggattgaggaggcagcgcgggggaagaggcggcggtactgaggaggctactgagggcgaaggggcgaacggcgaggcagtcccaggcagaagtttgaaattgagacaatggaagaagctggaatttgtgggttagaagtgaaagaagacatgttttgtaaactctcaagcaaatgatattcttcaacatcaagactccagttgtggtggcacaactaagacgcattcattggaaggggatgaaggcagtgactttataacaaagaacatgaatttggtgagctcagcattccgtgcacaggaatcaagagaagaaattcctggacgagaagctcgaacaggtcctcctgatggccagcaggactcagagtgcagcaggaacaaagagaagaccttaggaaaagaagttttattgctgatgcaagcgctaaacaccctttcaaccccagaggagaagctggcagctctctgtaagaaatatgctgatcttctggaggagagcagaaatgttcagaaacaaatgaagattctgcagaagaagcaagcccagatcgtgaaagagaaagttcacctgcagagtgaacacagcaaggccatcttggcaagaagcaaactggaatctctttgattgagagatatattttgtgtataacttcctctgttagtagtaactattggttttgtggtgaaaattttcttactttttctaccatatcttgtattttcttagaactactggacgttatgtggtacaggaggctgctcagcagtttgaaatagttttaatcttatcaacgtatgttgcacatctgcctcatttccccccctttg

SEQ ID NO: 7233 - DNA, 831 bp, Cricetulus griseus
gcgggagcggcgggacaggcgggacaagcggggtgaaagtgaagccatgcagaaatcggagtaccctggagatgtgcacttgagaaacagaagcaacaggtaattatgatcaaaggacatcctcaagtgcacaaataaaacacagcactacagttcagcggagcaaatcttcctcattaaccagttctccagaggctgcaagaagggttcatcctcggccaagtgataaactcaacccaaaaacaattaacccctttggtgagcagtcaagagctccctcggcatttgcagctatctactctaaaggcggcattccttgcagattggtacatggctcagtaaaacacagattacagcgggaatgtcctcctgaaattcttccatttgacccgcttctaattactttagctgagggtctaagggagacaaagcacccttatacctttgtgtccaaagaaggctttagggaattacttctggtcaagggtgctcctgaaaaagctgtaccattgctacccagactcatccctgtgctgaaggcagctctggtccattctgatgatgaagtctttgaaagaggactaagtgcactggtacaattaagtgtgggtcgttggcccatctctgaacggccatctgaaacttctgcttacaagtctttccaagaggctaatggacaaaaaattcaaagaacccatcaccagtgccttgcaaaagttggagcagcatggcgggagtgcaagtcttattgtcatcaaatccaaaatcccaacatattgctctatctgctgttgaataagggagccagcaaaagccatgctgctttctcag

SEQ ID NO: 7234 - DNA, 830 bp, Cricetulus griseus
gtagtttgggctggaggctttcttgctgggagggagctgagaggctcctgccggcttgtccttaactcttggcactggaggtggcttggcgtcacacgctgtcagacgccttcttggtggcctcagcggcctcaccttcaggtttgaagctggctccacaagggacacggtgacatgagggacaccccactgacccatcttctggccatctccttcctttgtctactctcaatggtgtgtgcccagctgtgtccaacatcctgtacttgtccctggacaccaccccagtgcccagtaggggtgcccctggtgttggatggctgtggctgctgaggatgtacggctgcccagctgggactgcccacgccctaggagagtagaggtgcctggtaggtgctgtcctgagtcgggtgtgtgaccagggagtgacgccgaggatccagcctcacacagcccaaggacaccagctttctggccttgtcactcctgcatctgctgatgtcccctgtccaaaaattagcacagcctggggccccctgctcaaccacctgtgggctgggtatagccacccgagtttccaaccagaaccgattctgtcaactggagatccagcgccgcctgtgtctgcccagaccctgcctggcagccaggagtcgcagctcatggaacggtgccttctagagccaactggggatggagatacagagcctgccattctcagtgggtgtccctgggactcggccctggactgatggcacatgtccctttccatgctcttggctgcagttaactgtcctggttgggttcactgtccagtgctactgagggat

SEQ ID NO: 7235 - DNA, 830 bp, Cricetulus griseus
  modified_base (497)..(497): a, c, t, g, unknown or other
aggaacctgtgcatactgcctcccctctcattcctacaccacctcctgatgaggcccggctactccagccactgcctgcggaaaggaggggccaggaggagttggatgtgccagtggatcccctaccgtctagccctgcccaggaggccttggatcttctcttcagctgtgacagcactgaggaagcatccagctccccagccccgaggtccccctctctgaggctgaacttgccctttttcgacccttactccaaagaggaaagtacaggtcccagccccacccacactggtgagctggcagccatggaggtacagtccaaaagactggaccagggaaccttggggagccaggaggacaggagaaggaagagtctgaggatgggagaacctgccccagcttacctgagccaggccacagagctcatcactcaagcccttcggaatgaaaaggcaggggcttatgctgctgccctccaaggctaccgagatggggtncacatcctgcttcagggatctcgggtgacccatcccctgcccgacgggaaggtgtgaaaaagaaggcagctgagtacctgaggcgggcagagaccctccatgggcaattgccttgaggagtggacccttcctgggacatcagctccagcactgccagcctcctccactcagtctttccttgggacctggccttgtttcctgctcttggaaccccaggggccatatctgttttaactggaccaagtatgagaaaagcaaagacttctcagctccaacctgcctgcctctttggaatcagacttgaacttctggtcctgcctgtctgttttatgt

SEQ ID NO: 7236 - DNA, 829 bp, Cricetulus griseus
acccagggaggtgggagggaagaccccagcgcgaggcagcatgccaagccccgccagacgcccgccccgcccgccccagatcctcccgggcaaagcagccgcgccgtatctcgcggccagttcttgcagacaccggctcgccccgccggctgcaggccagccccgagaagtgccttctgtttgccggagccgagcgacactgccctcctggtcggccgaagcacatgccgcgttgctcaggacaacacgacctcgtcccctctccagggcaatctgccaccgaggcactcttgccccggtccctcctaccctaggcgctctagagagctgtgctggccaccgctagggcgcagtcccgtcggcctaactcctaataggtctttgtgcaagaggaggccccacaccaaagccttctggggtggggccagggctaagcaggcgttcttggggcgggtggggagggcaagaagtttttttgttttggtgtgagtccagaatccaacccgcaccaagcctacttgtgtataaagatataaatagaacgacagatgtcagaactaagtttgctaaggacatagttttaaccagatgctatttatctcttgaactgccattgcggtccacgcgctgagcaagttagcaccaccctttgacctcgcggcctctgaccaaactctacacccgggcggcgtgcggatgggacctggactcgtccgcgttttccattctggaatctgagttccaacagttgtcaaacttcgtttcccccgtttatatatatataaataaagttacactgcacccacatcaaaaaaaaaaaaaaaaaaaa

SEQ ID NO: 7237 - DNA, 829 bp, Cricetulus griseus
cactcctttcctcagccagtggagtcctgtcaccccaagtactctgctgtctgtgtactcagagaatcctaactcctaggaccaaggtgtcttgtacccctggtcagtctgaggtctcttccactcacagaatttactcctagaagcctggcaaagaaaggggttttcaatcgcaagggaaaaaagacaccagacctcatgtccttaagaaacccttagttttccgtaggtacagcacgttcccatgtccctagaggagctgctccgctgtgttcctgagagacccaagtaccaggtagaacaaaaccatgcggtgggtgtgaggcaaaagtagcaggtgcgcacacttccacagctacctctctgcatacacagtcaccaccaacagacaggccccctcccctccccaccccccccccccccacttagaatcacttcttgcagagggtcataattgtttccaaatattactggtctcctgacttcctcctcccagtgcaatttttcacttcctcttccaacctctggttcctgggctgagccataccctggaactggcctggtctgtatgtcttcccaggtaaggaagacttcacaggtggcatccaagtgggtaggcaagtcacagttgccgtagcaagtgactcctatttattttgcattaagattttaatttgtattatttttgtgtatttattttggcattgttatgagtttgactctcggggagttttgttgttatgactcttgtgtcttttgtcacaaaacaatgataatatttgctaaacaatatatggaatttatttttgattggtaataaaaaatgaaa

SEQ ID NO: 7238 - DNA, 829 bp, Cricetulus griseus
gagccatggctactttccgattggccctcatccagcttcacgtttcttccattaaatcagataacattacccgggcttgtagcctaatccgggaggcagcaaagcaaggggccaaagtagtctccctgccggaatgctttaattctccatatgggacaaactactttccggaatatgcagagaagattcctggcgagtccacccagaagctggccgaagtagcaaaggaaagtagcatctgtgtttgggcctgatgaagtttattggtaaagcacagaaagatccatctgtttgacattgatgttcctgggaaaattacatttcaagagtctaaaacattgagtcctggtgataatctctccacatttgatactccttactgccgagtgggcctgggcatctgctatgatatgcgcttcgcagagcttgcacaaatttatgcacaaagaggctgccagctcttggtgtatcccggagctttcaatctgaccactggaccagcccactgggagttgctccagcgagcccgggctgttgataatcaggtgtacgtggctacagcctctcctgcccgggatgaaaaggcctcgtatgtggtctggggacacagcactgttgtggatccttggggacaggtcctaactaaagctggcactgaggaaacgatcctgtactcagacatagacctgaagaagctggctgaagttcggcagcaaatccccattttaaaacagaaaagagcagacctttatgcagtggagacaaagaagccatgaagttagtttctgacatatcacaagcaggatgacactctggaagatgatccact

SEQ ID NO: 7239 - DNA, 829 bp, Cricetulus griseus
caggctgtacagctatcagctgggctgaccatggccctttctgtggagacggagtcgcacatctaccgagctctgcgcactgcttctggggctgcagcccaccttgtggccttgggctttaccatctttgtggctgttctcgccagacctggctccagtctattctcctggcaccctgttcttatgtctctggctttttccttcctgatgactgaggcactcctcatgttctctccggagagttcactgctgcgttccctctcacggaaggttcgagcacgctgccactgggtgctccagctgctggccctactgtgtgctctgctgggtctaggtcttgtcatccttcacaaagagcagcttggcaaagcacacttggccactcgccatgggcaggcagggctgttggcggtgctgtgggcaggtctgcagtgctctgggggcttggggctgctctaccccaagctgttgccccgatggcccctggcaaagctgaaactctaccatgccacttctgggttggtgggctacctgctgggtagtgccagcctcctgttgggcatgtgctcactctggtttactgccgctgtcactggtggtgcctggtacctggctgtgctgtgccctgtcctcaccagtttggtaatcatgaaccaagtgagcaatgcctacttataccgcaagaggatccaaccatgagcacttcccagccaccaggagcctggattttccacctcagcataggacctggggctggaaacctgctggccccgcttagctgatggggccagggaacacttcaggtactagggcactcaggggtagatct

SEQ ID NO: 7240 - DNA, 829 bp, Cricetulus griseus
gagcctggcgggcgctggagaagccggggcagcctcgctcctcccagacagctgctagggtcgggagtcacagaaaacaaagtgagagtccggcggcttcccagtgcctgggccacggcggccgtgggagcagaggtggagcgaccccggtacgctaaagatgaaaggctggggttggctggccctacttctgggggtcctgctgggaactgcttgggctcgaaggagccaggatctacactgtggagcttgcagggctctggtggatgaattagaatgggaaatttcccgagtggaccccaagaagaccattcagatgggatccttccggatcaatccagacggcagccagtcagttgtggaggtcccttacgcccgctcagaagcccacctcacagagctgctcgaggaggtttgtgaccgcatgaaggagtatggggaacagattgacccttctacacaccgcaagaactatgtacgcgttgtgggccggaatggagaatccagtgaactagacttacagggcatccgaatcgattcagatatcagtggcaccctcaagtttgcgtgtgagagcattgtggaggaatatgaagatgaacttattgaattcttttcccgagagtctgacaatgttaaagacaaactttgcagtaaacgaacagatctctgtgaccatgccctgcacagatctcatgatgagctatgaatcactgcagcagcttagaccaacttgatggaacaccccaggaggggaagatggtggcattgccttttatattatgtttttatggaaatgaactgaaaaaaaagtctgaaaccaaaagta

SEQ ID NO: 7241 - DNA, 828 bp, Cricetulus griseus
tcgcgggactccgagccgcttcctgacgttagcgtcctccacaacgggctgggccgcacgtgcagcagctgcagcgcctcagcctcagcctcagccgggatgcgccctcgtcccgcggagccagggagttcgtggagcgcgaggtgaccgacttcgcccgacggaacccaggggtcgtcgtctacgtgaacccgcggccgtgcgccgtgcccagagtggtggcggagtaccttaacgggacggtgcgcgaggaaaatgtcaacagcaagtcggtggcggagatcgcgtcgctggtgcagaagctggcagaccagtccggtttggatgtgatccgcatccgcaagcccttccacacggacagcccgagcatccagggccagtggcaccccttcaccaacagaccggcggcccgccgcggcctgcggccccgagaacgcgaggaccccgctccagctttggtacaggcacagtaaagaaccagccttgggtcgcgaacgcgatgaaattggtccctcctttgggatgccaacctcaggcaaacagttggagcccaccatcgggggcgtagcccgggataaagaagagctggctgcggttgccccgctgctaggtactgtgtgaccttgtgaataccctcgttccgatccacttggcctctttgcaggctgagatgcgagaagcctccaggtgctgtacagggtccttgtttctggaatccaaataatactgatttcaaaacacagtgaagcgtctgcacgccgcctttgaagaactcgtgctgtctcgttgcccttgctgtgcctggcattgggctaaggcaccttgtat

SEQ ID NO: 7242 - DNA, 828 bp, Cricetulus griseus
  modified_base (753)..(753): a, c, t, g, unknown or other
acaaacagccctcagcctcactcaccacacagatccagaacaccaaagcctcctcaaagaccgcaaggcctccaaggcaggctttcccgacaaagattccttcggctgccgctaatctttttcgcaaaacttccgattccaattgtgtggcttcttcttccatggaattccatcccctgtccccacctcccaggacacccaggattgtaaagaaaccagagccacaccagtcagggccgggaagtgccagcatcctccccaaggaagagcccctgctgctggatatggtccgctccttcgagtcagtggatcgcgaggaccacatagaactgctgtccccctcccatcactataggatcctgagctcacctgtgagcttggctcgcaggaactctagtgagaggacgctctctccggggttgctctctggaagtacatcgcctctgcaaactccactgcattccacgctcgtctcttttgggcacgaagataagaacagctccccaaaaagaggagggtgtgtgttcccctcctccggctcccagcaatggcctcacgcagcccctggggagcccccaactgtgtgaaaagcagaggaaggttccccatgatgggtattggacagatgctgaggaagcggcaccagagcctgcagccttccttggagaggtccctggaggccagcatgtcaccactgccaacccacacgccccctccacgcctctcctttgaccatggctgacggtgtcaagngccagtgttaacctggggtggaagattctgggtctcattaattaactttttttttttttttaaagacagtggtct

SEQ ID NO: 7243 - DNA, 828 bp, Cricetulus griseus
catggaggcccctccagtcaccatgatgccagtcactgggggcaccattaacatgatggagtacctcctgcaggggagtgttttagaccacagtttggaaagtctcatccatcgccttcgtggtttgtgtgacaacatggagcctgagactttccttgatcacgagatggtattccttcttaagggccagcaggccagtccatttgttctaagggcccgacgctccatggacagggcaggggcaccctggcacctgcgctacctgggacagccagaaatgggagacaagaaccgtcacgccttggttcgcaactgtgtggacattgccacatctgagaacctcacagacttcttgatggaaatgggcttccgcatggaccatgagtttgtagccaaaggacacttgttccggaagggcatcatgaagattgtggtgtacaagattttccgaatcctggtcccagggaacacagacagcacagaggccctgtctctctcctatcttgtggaattgagtgttgttgcaccagctgggcaggacatggtctctgatgacatgaggaattttgcggagcagctcaaacctctggttcacctggaaaaaatagaccccaaaaggcttatgtgattaagaaggtctgtccatctttgaggtctgtcctcacctgataggcagaaagatctcccaagtgccctggttcactgctgccagtcaggccgactcccttccggaattttttttttttgttttttgtttgtgtgtgtgttgtttgtttgttttgtttttttttttttttttgttttttttttgctaattttaaagtaaca

SEQ ID NO: 7244 - DNA, 828 bp, Cricetulus griseus
ctcgctggtggctcgtagcccctcagactcagctgccctctgtaaaccagaggtgggaaaaacacccactcttgacaaactattgcctgatgactgtaaccctaaggagcctgagagtgaagacttccacccctcttggtctccctcaagcctacccttccgaacggacaatgaagaaggctgtggagtgcagaacttcccagcagagtgaggagcggacccctgaagactctgccctagagctccctctggcagtgtgacctaagacaggcactgcccattctctatttattatctaatgccacttcaaaatgagactgctgctcccaggttattttattgaaaatcttaggaaaaaatgggtaggaaagggttgttagtacctgtatttgtaaaaagggaaagagaccaaccccagctcagtttccattactgagctctgtgggccaccagaacaaagatgtcaattgcacagaatgagctgggtagctttgacgaatgtcaagcaaaggaccttttctacaacttaatccgtctcatttctggtgctacctgagttggacagaatttatagttcctgttgctaggaaggctaggcctctgatcacagaagcagagccagtccccctcagtcaaggcctaggtgaactgtggctcattaccgcagctcgttaagctgcctcctcgaatactgtgcacaggtcgtattctcaatgtgaatccaaagcttgtctggctccttgaaaacaaccccgccccttaggttctttacattgtaataatgctgtatttaaagagaatatttaaatgtaatattaaagaaatatt

SEQ ID NO: 7245 - DNA, 827 bp, Cricetulus griseus
caggcaccacacgctattcacttcttcctgagcctgcatccagctgtgacaagcagctttcctagccccagcacctttgaggaaattcagttcttcagtggccctaattaccacaagggtattgactggtacatggacttcttccctgttccttccaatgccagcactgacttcctctttgaaaaaaagtgccacctactttgactcagaggttgtaccacggcggggggctgcccttctgccaagagccaagatcatcactgtgctcaccaaccctgctgacagggcctactcctggtaccagcaccagcgagcaacacggagacccagttgctttgaactataccttctaccaagtgatttcagcttcctctcaggcccctccagtacttcgctccttgcagaaccgttgtcttgtacctggctactattctacccatctgcagcgctggctgacttactatccctctggacagttgctgattgtggatgggcaggagcttcgtatcaacccagcagcctcaatggagaccatccagaagttcctgggcatcaccccctttctgaactacacaaggaccctcaggtttgatgaagataaaggattttggtgccagggacttgaaggtggtaagactcgctgtctagggaaaagcaaaggccggagatacccagacatggacatggagtctcgacttttccttacggatttttccggaaccataatttggaactatcaaagctgctgagccggcttggacagccagcccccttgtggcttcgggaagaattgcaacattccagtgtgggctgatgccccagctttc

SEQ ID NO: 7246 - DNA, 827 bp, Cricetulus griseus
agccaaaaagggtgaccctaaggttaaaaaacccaagaaggggaagccccattgcagccggaaccctgtcctggtgagaggaattggcaggtactcccgatctgctatgtattccagaaaggccctatacaagagaaaatactcagctgcaaaaaccaaggttgaaaagaagaagaaaaaggaaaaggtccttgctactgtcactaaaccagttggcggtgacaagaatggtggtactcgggtggttaagcttcgaaaaatgcccaggtattaccctactgaagatgttcctcggaagctgctgagccatggcaagaagcccttcagtcagcatgtaaggaagctgcgtgccagcatcactccagggactgtcctgatcatcctcaccgggcgccacaggggcaagagggtggtcttcctgaagcagctgggcagcggcttgctacttgtgacaggacctcttgccctcaacagagttcctcttcgaagagcacaccagaaatttgtcattgccacctctacaaaagttgatatcagcgaagttaaaatccccaaacacctgactgatgcttactttaagaagaagcaactgcgcaagcccaggcaccaggagggtgagatcttcgacacagagaaggagaaatacgagattacagagcagcgcaaggccgatcagaaaactgtggactcacagcttttgccaaagatcaaagctgttcctcagctccagggctacctgaggtctcagttctctctgacaaacgggatgtatcctcacaaactggtttttaaattgctatcgacctaattaaacagcttcatatgtt

SEQ ID NO: 7247 - DNA, 827 bp, Cricetulus griseus
agcggctgtgggtgctggttatcggcgttctcggagcagcctcttcccagtcatggggctgctggagctatgcgagcaggtgttcggcaccgccgacctctaccaggtgctgggcgtgcggcgcgaggcttccgagggtgaggtccgacgcggctaccacaaggtgtctctgcaagtgcaccccgaccgtgtagacgaggaccagaaagaggacgccacccgccgcttccagatcttggggagagtctatgcggttctgagtgacaaggagcagagagcagtgtacgatgaacagggaacagtggacgaggaatctgctggcctcgaccaagaccgggactgggacgcgtattggaggttactctttaaaaagatatcgctagaggacattcaagcttttgaaaatacatacaaaggctctgaagaagagctagctgatgttaagcaggcctacctagacttcaagggcgacatggatcagattatggagtctgtgctttgcgtgcaatacacagacgaacccaggataagaaacatcattcaacaagccattgatgccaaagaggtcccatcctacaatgccttcgtcaaagagtccaaacaaaagatgaatgcaaggaaaaggagggctcagaaagaggctaaagaggccgagttgagcagaaaggagctggggctgcaggaaggagtgaataacctgaaagcactcatccagagcagacaaaaggatcggcaaaaggaaatggacaattttctggctcagatggaagcaaaatactgcaaaccttccaaagggaaaagaacggctcccaagaaggaaaagaaat

SEQ ID NO: 7248 - DNA, 827 bp, Cricetulus griseus
agaagaactttcggtttaaattagagacggcagaaaaggaaaatcagatattgggaataacactacgccagcgtgatgctgaggttgctcgacttagagaactaaccagaactttactagagtagtatggcaaagctgctctcagatctcagtatggacgcttcccgcagcaagctggggagtaacctaaccaagtctcttctgaatatttatgatcagcagcttcatcaggacccaacccctcttcacacatccataatgagctacttaaataaactggagacaaatcacagctttgcgcattcagagctccttacaaatgaggaagccacagagccacccagactgtgtgaaaaggtgctaccctcacagggccctccacatagtgacactagggcagtgggtggggcgctccgcacctggaatggcttctgctgctttagagaggattcagatacagaatgtagaaaccatcatgggccatcagcttgtcaaagctctggtgttccagtgacgggcaacatcgtcagtgatgtcagcttttctgaattcggacttgatgtcagactggagcatctccttcttttttcgacgttttacctctcatgatgaacaagacttcagaaatggcctggcagcattggatgccaacattgctcgactccagaagtccttaaggctggccttcttttgattttttagtaagaattatttggatttttcttactgtcattgagaaatgatagagtttgcaaatctcagcactagtgatgattctgcctttgtggcccaattttccccatcatttagctgagaacattgttcta

SEQ ID NO: 7249 - DNA, 826 bp, Cricetulus griseus
ttctctggaaccctagatgccaaactgtaccacccacacaccttcactgattcccatgtttcagaggttttacaagaaaactacagattgagaaaagaactagagggattgattctagagaggaataagctgaagatggactctgaagcagcagtataccaatttgaaaactccatgaaaagggtcaaggacgacactgcagcacacatcgcgtccctcaaagcatctcatcagagggaaatggagaaaatcctttgccagaatgcactagaaaattcctcttccaaagtagctgaactgaatcgcaaaataatcactcaagaggtacttataaaacatttccaaggtcaagttaatgagctgcagggtaaacaagaatcccttgcagtttctcaagttcgagaagaaatcctacagaaacagattacaaagctcttggaagaattgaaagaagccaaagaaaaccacacaccagagatgaaacatttcatgggcttagaaaggaagatcaagcagatggaaatgaggcacaagcagagagagcaggaactccagcagataatacagcaaacacgccaagtagtagaaactgagcaaaacaaggaagttgagaagtggaagagacttgcacagctgaagaatcgggagctggacaagttccgcacagaactggactccatcctggacgtcctgcgggagctgcaccgacagggggtggttgttccagttgctcttgcagatgaagtgaatacagcagagttttagtcagaacttggatctgagcgacctcgtcggaaaacatgaaaatgtgccactgtcgggacag

SEQ ID NO: 7250 - DNA, 825 bp, Cricetulus griseus
gagctccaggcatggaggaaggcggactgggatgcactgtgtgtgtgctgaccggggcctcccgaggctttggccgcgcccttgccccactgctggcccggttgctgtcgcccggttccgtgctgcttctgagcgcacgcagtgacttggcgctgctgcagctggaggaggagctgtgcacacagcatcctggcctgcgagtgttgcgggcagcagctgacctgggcaccgaggccggagtgcagcagctgttgtgcactgtgcgcaagctccccaggcccgaggggcttcagcgactgctgctcatcaacaatgcaggtactcttggggatatttccaaagccatcctgaatgtgaatgacccagcagaagtgaacaactactgggctctaaacctgacctccatgctctgcttgatctacagcaccctgaatgccttcccagaaaaccctcgcttcagcaagactgtgattaacatctcatctctgtgtgccttggagcccttcaagggttgggggctgtactgtgctgggaaggctgccagagacatgttgtaccaggtcctagctgctgaggaacccagtgtgagggtgctgagctatgctccaggtcccctggacacagatatgcagcagctggctagagaaacctccaaggacccagagttaaggaccagactgcaggagctgaagtcaaaggggaagctggtggattgtgggtcctcagcccagaaactactgaccttgctgcaaaagaacaccttccagtctggagcccacattgacttctatgacagttaagaccatgtcctgccccagagtcccc

SEQ ID NO: 7251 - DNA, 825 bp, Cricetulus griseus
tgatgaagggggacacagcagcatctttgcccatcattagctactctcttacctcatactccccttatgtatcagaacttctgatggaatccaatatagaagctcttagcaaagaatgatgtgcgcttcacagataccgtctataagcttcttcgtgatcaatttgattataaaccagttttgacaaaaaagcaatttatgcagtctggatttgctgaatggaaaattcaaattgtctgtgatatattaaattgtgtgatgaaaaagcacaaggaattgattggctcggacaagacttcatcttgccaaagaaagaagaacatctctgaaaaaccagagccttgttcaagcagtgagaacccccctgcagaggccattggcattgacaatacactggcaggtttctgacttcaaggaaagaagaaagctgtggtgatccgtcacctgtatactgaagataacattgacattcctgaagggacagtatctggctatagtacaatatcatcggactcaatgcccaggggctccattgttcattactgtggcttgaaagatttttcagaggaaacaacaatccagaaaatggaaaggatgaaaaaatgtttgaagagactgcagagctactgaaatgctcaaatccctaactgtagagtttttgctatgaacatctctaggactttggctactacatatgctatatttaagaactccttgtatatttaatatactataatatttattaaatgtgagtttctttcattcctaaataaataactttctaatattgtaaaaaaaaaaaaaaaaaaaaaaaaaaaaaaaaaa

SEQ ID NO: 7252 - DNA, 825 bp, Cricetulus griseus
tcggcctgttcctggtattcggcggctgcaccttcgcgctgtacctgctgtccactcacctgcccgtggggccgaggctggcatcggccgaggagccccaaggccggtcactgtggttcccctcagatctagccgagctgcgggagctcttccgtaggtccttcgagagtaccggaaggagcatcaggcctatgtgttcctgctcttctgcagtgcctacctctacaaacagggttttgccatcccctggttccagtttcctgaatgttttcgctggtgccttgtttgggccatggctgggacttttgctgtgctgtgtgctgacgtcagtgggtgccacatgctgctacctgctttccagtgtttttggcaaacagctggtgatctcctactttcctgataaagtggccctgctgcagaggaaggtggaggagaacagaagcagcctgttctttttcctgctgtttctcagactcttccccatgacaccaaactggttcttgaacctctcagccccgattctgaacatccccattgtgcagtttttcttctctgtgcttatcggtttgatcccatacaatttcatctgtgtgcagacaggctccatcctgtccacgctcacttctctggatgcactcttctcctgggaaactgtcttgaagctgctggccattgccctggttgctttggttcctggaaccctcataaagaaatttagccggaagcacctggcactgagtggcacaagcaacactgctcgtctagatggcaggaaggatgcgtgatacaggttccatgtttacacagccctggactctgctgctg

SEQ ID NO: 7253 - DNA, 825 bp, Cricetulus griseus
  modified_base (259)..(259): a, c, t, g, unknown or other
gggaggaaccggccgggcctcgccgcgcggccctgccagctccggagtattcgctgttctctgctgagctctgcacccgaggctacccctcgcgccttaggctgacgccatgaagatcaaggatgccaaaaaaccctctttcccatggtttggaatggacattgggggaactctagtaaagctctcatattttgaacctatcgatatcacagcagaggaagaacaagaggaagttgagagcttaaaaagcattcggaanatttgacttctaatgtagcatatggatctactggcattcgggatggtacaccttgaactgaaggactaaccctttttggacgaagagggaacttgcactttatcagatttccaacccaggattttttaattagaaataagatcatttatttggaccaatttatttacacagacaagctgttactgactattgcaaaaatactgtatgttggcatcatgtcatctcttgtagtgtatgggatttttctaatatctgatactgataaaactgcctgtgataatcctagtagttagcaatctccaaactaatgaatttccttcatgggaataaaattaattccagaaacttagtttctaaagtttctgagttttgtgcagtcaaatttgaaagattaccaagaaacactttttaactcattattatcttttatatatacagagaatctttataaaaattctgataactttaaaatgctaagagcattgttagccatggttttggtggtgaaacgcacacaacagagatctaaagcaccaccattcccccaaatgttgccttttaactag

SEQ ID NO: 7254 - DNA, 825 bp, Cricetulus griseus
tctctatgatgggctacaggcgggggttgctgaacatgtacgcctgctagcacccctggagttagagccagatctgtggagcctagtacctggcatggacactgtggccaaggaacctcgatgctgggctgtgcgcaggacccagcttgagttccatccccgtgggcgcagcccatgggaccgcttcctagttggggggtatctttcctctcgtgtcttgttggagctcatacggaaggccctggcagcctccgtcaactggccagccattggtagtctacttggatgtctgatccggcccaatgtggcttcggaggagctgctgctggaagtgcaacacgagagtctggagttcacattagctgtgctcatggtggtccctggggccagcactgatgaccgccttctgctagcatggcccctggaggggctggctgccaatctctggctgcaggatctaacttttttttttgtttttttgttttttttgtttttttcactggagggtaacttcttagctgttgaaggatggtgttttcttgatggtcatgcatttgtttttctggttgagtcctcaggccttgaagtggaagttgtctcccttgctgcctgcctgctttatatcccagggaaggaaggtcatttcttcctgattggtgggttttctcggtaggtcacaaattacctctgggagagccccttcctcattgaggagctgagctctatgctgtctatgcaagactaccccatattggctgctcctggacctcactgtaggacagaggacatgcctctcccagaggcctgtgtgcagtcctggcctct

SEQ ID NO: 7255 - DNA, 824 bp, Cricetulus griseus
gagcgacatgaacgcggatgctgacggccacagcggcgctgcggtacctgtgcaatctcgagagggcagtcccgtggcggctgacttcgtcccgtcggcgctggggacacgagagcattgggatgctgtttatgagagagaactgagaacattccaagaatatggagatacaggagaaatctggtttggggaagagagtatgaaccgactaataaggtggctgcaaaaacacaagatcccatcagatgcctcagtgcttgatattggaactggaaatggtgttttcctggttgaacttgtgaaacatggtttctctaatataactgggatcgattattctccttctgcaattaagctttctgcaagtattttagagaaagaagggctatcgaacattaacttaaaggtagaagactttttgagtctttccacaaagctgtctggatttcatgtttgtgttgacaaagggactttcgatgccataagtcttaatcctgacaatgcagttgagaagaggaagcaatatgtgaagtctctctccagggtgttggaagtaaaaggcttttttctaataacctcatgtaattggaccaaggcagagttgctggatgtgttcagtgaaggatttgaactttttgaagagctgccaacacccaagttcagctttggaggtagatctggaaatactgtagcagctttggtttttcaaaaaagtgaaactttcttggacaaagtcagttagctttctagaagaaactgtaacagcaaagtaaacctgatacagaagaagcaaagtgcaaatagtgcttagaagtacccaggct

SEQ ID NO: 7256 - DNA, 824 bp, Cricetulus griseus
gccctgactactgagaacgctgtcttcaagaaaatttatggaaaatacttaagagctgaaagtttccgaaaagctcttatatttcagaagaaatacctgctgctgctcctgggaagattccaggagtgcgaagatgccactatggggctgcttgcccgcatggaaggatacccaggcttgagagaccatgagatggtccccggccgcacagaaggactcaccaggtttcgaaccgccattagagtgtctatcgcaattactagaatgaaatatttggttcggcggtggcatcgtgtcaaaagttctggtcccatcaatattaacagggatgattttggattgagtccaggtgttgaaaagactgatccactttatcactctaccagtggactggaactgtgtgaagatccaagacacatgacatgccgctcaagatctgacctagatttccctaggtctcccttatcattcaataggtacccagggactcttgctgatttcaatcctgtgtccttgacctcccctcaacctccagcattacaatcctgctcaatttcattctggcatgaggagataatcttctgaaaaagtattaattgaatttcaaatagattcccttttgtaagtcaatggctcttttgtgcttttttattgtgaatattcaatgggaccaatacaaacacagcttatgattgtatacaaatccttgccagcacataaagacaaactggagtttgtgtatatgagcattgtgtgtccatgcacaataatcattaagttacatgtatatttgtggaatgctaatttaaatgattaaattataa

SEQ ID NO: 7257 - DNA, 824 bp, Cricetulus griseus
gggcggcgggatggacaggttcctggtgaagccagacccgggcgacctcggagcgggaggggaggagtcagccccgtcgggaggagcctcgggcggccagccgagccccaactggaggcacctccgtgcgcaaggtctgaattgtgattacaccgtcctgtttggcaaagccgaggcagacgagatcttccgagagttggagcaagaagtggagtattttaccggtgcactggccaaggtccaggtgtttggaaagtggcacagcgttcccaggaagcaggcgacctacggagatgctggactgacatacaccttttctggtcttacactgacgccaaagccctggattccagttctggagcgtgttcgagatcgagtctgcagggtgacagggcagagcttcaactttgtgctcattaacaggtacaaagatggttgcgaccacatcggggagcacagagatgatgaaagagaactggcccccgggagtcccatcgcatctgtctcctttggggcctgcagagacttcctcttccggcacaaagactctcgagggaagaggcccaggcagacagtggaggtagtcaggctgcagctggcccacggaagcctactgatgatgaaccaccccaccaacgcccattggtaccacagtctccccatccgcaagaaggtcctggctcctcgggtcaacttgacttttcggaaaatttcatactaagaaataaaatgtctttatttaaaaaaaaaaaaaaaaaaaaaaaaaaaaaaaaaaaaaaaaaaaaaaaaaaaaaaaaaaaaaaaaaaaaaaaaaaaaaaaaaaa

SEQ ID NO: 7258 - DNA, 824 bp, Cricetulus griseus
caaagatggcgtcggcagtactttcgctgaggccgggggcagcagccctgttgagccccacggcagctacagctcttgcagtcagatatgcatccaagaagacaggtggtagctccaagaatcttggtgggaaatcacgaggcaaacactatggcatcaagaaaatggaaggtcactatgtttatgctggtaacatactcggcactcagcgtcagtttcgatggcacccaggcgcccatgtgggactcgggaagaacaagtgcctctatgccctggaggaggggacagtccgctacacaaaagaggtctacgtgcccaatccccaaaacaaggaggctgtggacctggtcaccagcctgcccaagggcgctgtgctctacaagacatttgtccacgtggttcctgccaaacctgagggaaccttcagactggtggccatgctttgatcctgttgaaaccatcggatggagacccggagcccaggccacaggggcatgtaatagtggaagtcaagagcccgggtgaggaccaggtccccacagaagagctggaaagatggctcagaggttaagagcactgactgctcttccagaggtcatgagttaaagtcccagcaaccacatggtagctcacaaccacctataatactgatctggtgcccccttctggcaggcaggcaggcacaacatacatgataaacaaaataaataaatattttaaaaaagaaaaaaaaaaaaaaaaaaaaaaaaaaaaaaaaaaaaaaaaaaaaaaaaaaaaaaaaaaaaaaaaaaaaaaaaaaaaaaaaaaaaaaaaaaaaaaaaaaa

SEQ ID NO: 7259 - DNA, 824 bp, Cricetulus griseus
gtgctgggcccacgcctcttcatattggctgcccgcctgtggggaggctcgcacctgtggtctcgggccagtcccgatctgcgtctggccccaacgcaggtcctagcccctcagcgactgctgcgacccaatgacgctgagctcctgtggttggatgggcagccctgcttcgtggtggccgatgcctccaaagccggcagcaccactctgctgtgtcgcgacgggcacggcttctatccatgtcagagcctgcacgcctggcaccgcgacaccgacgctgaggccctggagctggacggccgcccgcatctgctgctggcttcggcctcccagaggccggtgctcttccattggtttggtggccgctttgagaggcgcacagacatcccagaggccgaggacgtctatgccaccaaacactttcaggccggtggagacgtgttcctgtgcctgactcgatacattggggactccatggtcatgcgctgggatggttccatgttccgcctgctccagcaacttccgtctcgaggggcccacgtcttccagccgctgctgatcgccagagaccagttggccatcctcggcagcgactttgccttcagccaggtcttccgccttgagccagataaagggatcctggagccactgcaggagctgggacccccggccttggtggcccccagagcctttgcccaagtcaccgtggcgggaaggcgctttctcttcgctgcgtgcttcaagggccccacgcagatctaccagcaccacgagttggatctcagtgcctgaggctcggcaggaccctggaagtggctggtggg

SEQ ID NO: 7260 - DNA, 823 bp, Cricetulus griseus
  modified_base (71)..(71): a, c, t, g, unknown or other
  modified_base (92)..(92): a, c, t, g, unknown or other
cttggaaaatccctacagcgctcacttctagtggctttgggggatccagggcgatcatcgctcgggggganacacagaatgacagctgaacngaggcagaatctgcaagcgttcagagactatgtcaggaagactctggaccccactacatcctcagctacatgagtccctggctccaggatgatgaagtccagtatatccaggctgagaaaaacaacaagggtcccatggaggctgcctcactgttcctccagtacctgctgcagctacagacagatggctggttccaggcctttttggatgccctgtaccatgcaggttactgtggacttcatgaggccattgaaaattgggatttccaaaaaattcaagaggagtaccacttaaagccggagaccaaaaccattctcttcgtgaaaaccagagcacttgtggatgctttaaagaaatggattgaagaaaatcctgcactgagctttctaaagcctggcatattgactggacgtggcaaaacaaatcaggcaacaggaatgacactcccagcacagaagtacgcgctggaagcattcagagccagtggtgataacaacattctgattgctacttcggtcgctgatgaaggcattgacattgctcagtgcaacctggtcatcctgtatgagtatgtgggcaatgtcatcaaaatgattcaaaccagaggcagaggaagagcaagagatagcaagtgcttcctcctgactagcaatgctgatgtaattgaaaaaagaaaaggacgaacatgttacaaggaaaaaataaatagaaatgaatccatttcaagact

SEQ ID NO: 7261 - DNA, 823 bp, Cricetulus griseus
tgcatgggtttgtatttcttcagaaaaagagaatagctggtgtgcggcccccagcctttctgcagttggatttatcagaagccaccatgggccccgtgaattcgagaggtcacaaggcagaagcccaggtggtaatgatgggcctggactctgccggcaagaccacaatcctgtacaagctgaaagggaatccgctggtggagaccttacccaccgttggtttcaatgtagagcctcttgaagctcctggacatgtgtcactgattctctgggacattgggggacagactcagctcagggctacctggaaggactacctggaaggcactaacatccttgtgtatgtgctggacagcacagatgaagcccgcttgcctgaggcagtggctgagctcaacgaagtcctggaagaccccaacatggccggcgtccctttcttggtactggccaacaagcaggaggcacctgatgctctcccattgcttgaaatcagagacaggctgggcctggagaggttccaagacaattgctgggagcttcgggcctgcagtgccctcacaggccaggggctacaggaagccctgcagagcctgctccatctgctgagatcctgctgaaatgtggtagcctcggactccaggctggagcaggactgggatcagggccagccagaccccctgagcaggcacaacagcttatccttgctcctatgaacagaaagggtcagctgatccttcagaaactacaacccagttcaacacacaagaaatccttctacttttggacaggatattttcataatctcaaaaaaaaaaaaaaaaaa

SEQ ID NO: 7262 - DNA, 822 bp, Cricetulus griseus
  modified_base (800)..(800): a, c, t, g, unknown or other
agagatagaaagacacccaggcaaagaaatgctggtatgtggcatagaaggaatagaagggttcataaaccttggtatgcccgtccgttgttttccagatggcagccatgtgctcattacattttccaaaactgaaagtgaggagaaagaagataatgaagtgtgtggtcgctttgaccagtcacctgctgagtgtgttgtattttacatacatgcagttgggaataggcaacaaagaattctgaggtgcaggaaacttcacaaggaggggaccaaactctgtgtctatggcttcaaaggagagaccatcaagaccactctgaggaaggatggcaggtttaattcctttgtagagagtgcccattggcgactcattaacaatgacaccaccatagcaaacacccagccagttgatgtgttacagggcaagctgtttcagattgtcaagtaagtgggcaagcataattagtcaatgtgtacaggtgatctttgattttgaagagttcccaccaagaaaagacaatgcttttagtgttaaaccttggtttgagatatccagtaaagactttgactatgctgtccttgaactggaggaaaatggacaggaagtacctactggactgtataatggaataggccctgcaccacttactgggttgatttatatcattggccatccagatggagaaaagaagtctattgatggttgtacagtggtccctcaagataaccgaggaagaaattgtgaggagaatgttcaggcaagacaggcagcaggctaccagttttctatgccatanatccacatgtacacccaaagaa

SEQ ID NO: 7263 - DNA, 822 bp, Cricetulus griseus
gcagccgagcaagatgcccaagggaaagaaggccaaggggaagaaggtggccccggcccccgccgtcgtgaagaaacaggaggccaagaaggtggtgaaccctttgtttgagaagaggcctaagaacttcggcattgggcaggacatccagcccaaacgagacctcacacgcttcgtcaaatggccccgatacattcggctgcagcggcaaagggccatcctctataagcggcttaaagttcctcctgccattaaccagttcacccaggccctggaccggcaaacagctacccagctgctcaagcttgcccacaagtacaggccagagacaaagcaggagaagaagcaaagactgttggcccgtgctgagaagaaggctgctggcaaaggggatgtcccaactaagaggccacctgttcttcgagcaggagtcaacacagtcaccaccttggtggagaacaagaaggctcagctggtggtaatcgcccacgatgtagaccccattgagctggtagtcttcctgcctgccctgtgtcggaagatgggggtcccctactgcatcatcaagggaaagccaggctgggacgactggtccacaggaaaacatgtaccaccgttgccttcacacaggttaactcggaagacaagggtgctttggctaagctggtggaagctattaggaccaattacaacgacagatatgatgagatccgacgccactggggaggcaatgtcctgggtcctaaatctgtggctcgaattgccaagctggaaaaggcaaaggctaaagaactcgctactaaactgggttaaatgtacact

SEQ ID NO: 7264 - DNA, 822 bp, Cricetulus griseus
gagaagggctgggccgaggtgccgcggggctgctggagggtcgtgggcggcacgtaggagacatgtctgggggtagcagctgcagccagactcccagccgggccatccccactcgccgggtagccctcggcgacggcgtgcagctcccgcccggggactatagcaccaccccgggcggcacactcttcagcaccaccccaggaggaaccaggatcatctatgaccggaaattcctgatggagtgtcggaactcacctgtggccaaaacacccccgaaggacctgccagctattcctggggtcactagcccgaccagtgatgagcctcctatgcaaaccagtcagagccatctgcatagcagcccggaagataagcgggcaggcggtgaagagtcacagtttgagatggacatttaagggaccagccataggacggagtgatgcttctggggccctgaggcccttgggaggagagccacagtggtcaggccttgcaccaggcagacatcaggtgtgggccacccagtcctgctccattttgtgaataccagcacatacctcctcgtgcctctgttgacattgagctgctactccaggggaatgactcttgcccacaccctgcatcgaatgcccggaagtgggcacagaggagcctgtcagaatggtcatctggcaactctagccccaacctctggagcacacctaccctttcctgaggttggggtacctgggaaagctacccttcacttctttccctgagaggaaataaagtccacctttcccctaggcccaaggttaggccctgtctcaactgttttcaact

SEQ ID NO: 7265 - DNA, 821 bp, Cricetulus griseus
tcatgtggacttctgtaccctgtttcactacccatcagctcctggccagggctgcaggccttgtatgaccccatcaaccctgacagggaggaccctagcagctgcttccagagctgaaggtgcgcacacccatgctgcagcgtgccctgctcaacctgatgctggtggtctctggagttgtgttcttcgtcaatgttggcatggtgatactgtctgacctcaagatggccacctccctgctgctgctgctctttgctgccttcatgggcctgagggcctccaaggtgtttgggcagcgtagaagtgcccaggcgctagaactggcacacatgttgtactatcgcagcacatcccaacaactcagaactgtggacctcgggccctggctcacctgcaagccctgactcccagcttcgggttgttcccaccagctgagttgccacaacttgacccactggtcctaggcactccagaggcctggcaggctactgtgccaggtggtagctacccatcaccctgaccatttactaccaggtctgacattggcagggtgccaagctccacctcctctatggcaaggtgtcaatcgtggcaactgaatctcctacctggactcttggttgttgataggctattatttctgctaggccattagttttgctatgctatagacttaagagcagccaatcaggatcgctggcagttgctaagcagcctcctgaggccagccaatcaaagctatttatttcagcttgtaatttatttctcagccccgcccctgacagaaacctcaccctggcctggtgtagggggcggggctt

SEQ ID NO: 7266 - DNA, 821 bp, Cricetulus griseus
tctctccctcgtcatgccttctcagggccagatggtcaatggttcccaccagtgcctccaccctggacgaagccactcctactctcactaaccagagccccactctgaccctccagtccaccaacacacacacgcagagcagcagctccagctctgatgggggcctcttccgctccagacctgctcactcacttccacccggtgaggatggccgtgttgagccctatgtggacttcgctgaattttaccgtctttggagcctgaatgcagactgcattgctggtctacacaggaggctggaggccaaaccacaggcatccttagacagggccaagcgtgggaagctgcaggtggttggcaaaccatcaagagtgcctcctgacatgttcaaagaatagcaggaagctggcctatggaccccaactaccacaggtctgtcagacactgctccctcaaggctgccctccctgcttcaacctccccaggaatagcctgtgacctctgctattgccctttgcctctggatggctgtccccttttccatctttcagctaaactcctagatccagagtagagaacacggggtgtgtacctgtccctagttctcactggaaaagccagagaaacagtggggcctatagcagccataggggaacaggacagggaaggaccagagagagctggccgaaggaatggtacagtcccaggctgcaggacagccagctggcagctgagttcatgcaaaaaaaaaaaaaaaaaaaaaaaaaaaaaaaaaaaaaaaaaaaaaaaaaaaaaaaaaaaaaaaaaaaaaaaaaaaaaaa

SEQ ID NO: 7267 - DNA, 820 bp, Cricetulus griseus
  modified_base (814)..(814): a, c, t, g, unknown or other
atcgtccagatccctcggcgacaccatgttgggaatgatcagaaactcgctgttcggcagcgtagagacgtggccttggcaggttctgagtaccgggggcaaggaagaagtctcctatgaggaaagagcctgtgaaggggggaagtttgccactgtggaagtgacagacaagcctgtggacgaggctctccgggaagcaatgcccaagatcatgaagtatgtgggcggtaccaatgacaaaggaattggcatggggatgacagtgcccatttcttttgccgtgtttcccaatgaagatggctccctacagaagaaactgaaagtctggttccggattccgaaccaatttcaaagcagcccaccggttcctggtgatgaaagtgtgaagatcgaagagcgggagggcataactgtctattccacgcaattcagtggttatgccaaggaagcagactacatcgctcacgccacccagctacgtactgccctggagggcacaacagccacctaccagggtgacctctactactgtaccggctatgaccctcccatgaagccctatggacgtcgcaatgaggtctggctcgtgaagacatgagtcattcactgaactgagaacgccctggaagtgtgccactgtgtcccctgtcttggggtcaaaactgattttaaaaatgatctagtttgtatttttgttagtgagggaacatgtgatttatgcatgagcttttcatctgtaattcttctaagaactttgtctagggagaaaccaaaaatacaaatctttgacataagaaacaaaaaaaaaaaaaanaaaaaa

SEQ ID NO: 7268 - DNA, 819 bp, Cricetulus griseus
tgctgcagggcgtaagctggtgctctgtggtcgaaatgtgacagcccttgaagcactcgtcagtgaacttgctggttctcatacctcccagggacagacacacaaaccttacatggtgaccttcgacctcacagatcctggtgctattgctgcagcagcagttgagatcctacagtgctttggctatgtggacatcctcatcaataatgctggggtcagctaccgtggtgccatccgtgataccatagtggacgtggacaggagggtgatggagataaactattttggccctgttgctctgacaaaagctctactgccctccatgatcaagaggaagcgaggccacattgtcgccatcagcagtatccagggcaagatcagcattccttttcgatcagcatatgcagcctccaagcatgcaacccaggcattttttgactgtctgcgtgctgagatggagcaggataacattgaggtgactgtgataagccctggctacatctataccaatctatctgtaaatgctgtcactgctgatggctccagatatggagcgctagacaagaacacagcccagggcagaagccctgcagaggtggcccaggatgtccttgctgccgtggggaaaaagaaaaaggacgtgctcttaactgacttactgccatccctggccgtctatctcaggattctggctcctgggattttcttcagaattatggcctctagggccaaaagagagcagaaatccaagaactcctgatactgctcagagctgctagcgtagatcagagtgatcagacagtaccacaccttcctggg

SEQ ID NO: 7269 - DNA, 819 bp, Cricetulus griseus
gagctgtacccaaacttggcagaactggagagttacatggggctgtccctctctagccaagaagtccagaagagcctgcctcagattccagatggtgacaatatggtggtcactagccctgggcctggccacgtggtagcaccagtctctgggaacaacctgggtgtgttgcgtgcagagatcaagcctggggtgcgtgagatccatctgtgcaaggatgagcgtggcaagactggactgcgcctgcaggctgtcgataaggggctctttgtgcagcttgtccaggccaacactcctgcatccctcgtggggttgcgctttggggatcagatcctgcagattgatgggtgtgactgtgctgggtggagcacatacaaagctcacaaagcattgaagaaggcgtcagcagaaaagatcaccatgattgttcgtgacaggccgttccagcggactgtcactatgcacaaggacagctcaggccaagttggctttttcatcaagaaggggaagattgtatctgtggtaaagggaagctctgcagcccgtaacgggcttctcactaaccactacgtgtgtgaggtgaacggacagaacgtcattgggctaaaggacaaaaagattacagagatcctgaccaccgctggaaacgtcatcacactgaccctcatccccactgtgatctatgagcatatggtcaaaaagttgtccccgctgctgcttcaccacaccatggaccactccatcccagacatctgaagtcacagggcagcccaggcctcctgccatcctgcagcgaactcggcaatcctcagatgacag

SEQ ID NO: 7270 - DNA, 819 bp, Cricetulus griseus
gtgcaagatgagaaaggtggctttgatcaccggggcgagcagtggcattgggctggccctttgcaatcggctgctggaagaagatgacgagcttcacctgtgtttggcgtgtaggaacctgagcaaagcagaagctgttcgtgatgccctgctggcctctcacccctctgccgaagtcaccattgtgcagatggatgtcagcagcctgcggtccgtggtccagggtgcaaaggaagtcaaacaaaagtttcaaagattagactacttatatctgaatgctgggatcatgcctaatccccagctaaatatcaaagcattttcttggcatcttttcaagaaatgtgattcatatgttctccacagcggaaggactgttgacccagaatgacaaggtcactgctgatgggttccaggaggtgtttgaaaccaatctctttggccactttatcctgatccgggaattggaacctcttctctgccacagtgacaacccctctcagctcatctgtggaattctgcctccctttgtgtggaccttgctcctgccggtgatgtggctgcttcgcttctttgcaaacgctttcaccatgaccccgtacaatggagcagaagcactggtgtggcttttccaccagaaacccgagtctctcaatcctctgaccaaatacctgagctctaccacaggctttgggacgaattatgtcaggagccaaaagatggacatagatgaagacactgctgagaaattttatcaaaccttactggatctggaaaagcgtgttaggatcaccattgaaaatcagatcacccgagctgatg

SEQ ID NO: 7271 - DNA, 819 bp, Cricetulus griseus
tccgccatggctgtcgcccacagcgcgggtcacctgcggcagtgtgtggtgtccccggccgggagacacagcgcctcgctgatcttcctgcacggctcaggtgattctggccaaggactgagacactggatcaagaacatgctaaaccaagacttggcattccagcacataaagattatttatccaacggctccctccaggccatatactcctatgaagggagggctctccaatgtgtggtttgacagatttaaaatatctaatgactgcccagaacaccttgagtcaattgatgggatgtgccaagtgcttactgagctgattgatgatgaagtaaaaaatggcatccagaagaacaggatattaatagggggattttctatgggaggctgcatggcgatacatttagcatatagaaaacaccgagatgtggcaggagtatttgctctttctagttttctgaataaagagtctgctgtttacaaggatcttcagcaagctgagcgcaccctccctgagctatttcagtgtcacggcaccgtagatgagctggttcttcatgcctggggcgaagagacaaactcaaagctgaaatctctaggagtgagcacagtgtttcacagtcttccaaatctttaccatgaaatgaacaaaactgagctggagagcttgaagtcgtggattctaacaaagcttccaggagagactgtagggcagaatgaatgaatgaatcctcaccaccatattgattagtatcttacatttaacaaatttttttctcatttaatcctcacagaaattaggcttggtgaaacagcc

SEQ ID NO: 7272 - DNA, 818 bp, Cricetulus griseus
cactcgctgcggtatttctccaccatcgtctcccggcccggcctcggggagccccggttcatctatgtcggctacgtggacgacaggcagatcgtgcgctacgacagcgacgccgagaatccgaggatcgagccgcgggcgccgtggatggagcgggaggggccggagtattgggagagggagacgcggaacgccaagggcaacgcgcagaatgaccgagggagcctcaggaacctgctcggctactacaaccagagcgagggcggctctcacaccatccagaggatgtacggctgtcacgtggggtcggacgggcgcctcctccgcgggtacagtcagttcgcctacgacggcgacgattacatcgccctgaacgaggacctgaggacgtggacggcggcggacacggcggcgcagatcacccggcgcaagtgggagcaggctggttttgcagacagactcagggcctacctggagggcacgtgcgtggagtggctcggcagatacctggagcacgggaaggaccagctgctgcgcacagatcccccaaaggcacatgtgacccatcatcctggacctaaaggtgatgtcaccctgaggtgctgggccatgggcttctaccctgctgtcatcgccctgacctggcagagggaggaggaagaacagactcaggacatggagctggtggagaccagaccttctggggatggaaccttccagaagtgggcatctctggtggtgccttctggggaggagcagaaatacacatgccatgtgtaccatgaggggctgcctgagcccctcaccctgagatggga

SEQ ID NO: 7273 - DNA, 818 bp, Cricetulus griseus
agctgcacgcccaccactttcctcatggtgtcggtgaccagaaccgtgtttggagagctgccctcggggggagggacagtggagaagttccagcttcggtcagaccggctgaccgtggacatcatctcctggggctgcacgatcactgctctgcatgtcccagacaggcaggggagagcctcagacgtggtgctcggctttgccgagttggaaggttaccttcagaagcaaccctactttggagcagtggttgggagggtagccaatcgaattgccaaaggagattcacagtggatgggaagagtaccatctgcccatcaacaaagagcccaacagtctccatggaggattcagagggtttgataaggtcctctggacccctcaggtgttgtccaacggtgtccagttctctcgagtcagtccagacggagaggaaggctacccagtggagcttggaaacacctgcaggatcatcacatccatggtttcgaccacaatttctgtctgaagggatcgaaagaaaagcatttttgtgcaagggtgcgccatgctggaagtgggagggtcctggaagtatacaccacccaacctggcgtccagttttacacaggcaacttcctggatggcactctgaggggcaagagtggagaagtctaccccaagcactctggtttctgcctcgagactcaaaactggcctgatgcggtcaatcagccccagttccctcctgtgctgctggggcctggggaggagtacaaccacaccacctggttcaagttctctgttgcttaaagaagactgaagatgtgacctggtcc

SEQ ID NO: 7274 - DNA, 818 bp, Cricetulus griseus
agtggcgttctgtctcacactgagcatcgacctcaagtggcgagtgatctgtggttctgggttaggaggtctgactgctaaattaactcaaggcccagatctttgagtacagtgacatacccaactttccccaaagcacagtgcaaggccatgctggtaaactggtgtttggattcctgaatggcagagcctgtgtgatgatgcagggcaggttccacacatatgaaggatactcactatcaaaggtgacattcccagtgagggttttccgtcttctgggtgtggacactttggtagtcaccaatgcagctggagggctcaaccccaactttgaagttggagacatcatgctgatccgtgatcacatcaacctacctggtttctctggtcaaaaccctctccgaggccccaacgaggaaaggtttggagttcgcttccctgccatgtctgatgcttatgaccggaatatgagacagaaggctttgactgcctggaaacaaatgggggagcaacgggaattacaggaaggcacctatgtgatgctggcaggacccaactttgagactgtggcagagagccgcctgctaaggatgctgggagcagatgctgttggcatgagcacggtcccagaagttatcgttgcacgacactgtgggcttcgagtctttggtttctcactcattactaacaaggttgtcatggattatgcaaacctggagaaggccaatcaccaggaagtcttagaagccggaaaagcagctgcacagaaactggaacagtttgtttccattctcatggagagcattccactctcggag

SEQ ID NO: 7275 - DNA, 818 bp, Cricetulus griseus
gaagcgagaagagcgcgagtcccagaaaccaaaggccgtcactcctgcgcgccccaggtcgcgccatgctcgcattcggaagctgcctgaggaaggcgctggtcccccgtgtgctggcgcctcaggtatgttcaccttttgctacaggccccaggcaaagtgatgggacattttatgaattccgcacctattttctcaagccctcaaagacaaatgagttcctggaaaatttcaagaaaaatgttaacctccggacagctcactctgaattggttggatattggagtgtagaatttggaggcagaacaaacaaagtattccatatttggaagtatgataattttgctcatcgaacagcagttcgtaaagccttggccaatgataaggcatggcaagaagaattcctcattccaaatttggctttcattgataaacaagaggttgagatcacctacctggtaccatggtgcaaaataggaaagcctcccaaagaaggagtctatgaattggctacttttcagatgaagcccggaggcccagctctgtggggtaacgcattcaaaagggctgtaaatgcccatgtcgatcttggctactctacactagttggtgttttccacactgaatatggagccctcaacagagttcatgttctgtggtggaacgagagtgcagacagtcgcgcggctgggagacactggtctcatgaggaccccagagtcgtggctgctgttcgggaaagcgtcaactacctcgagtctcagcagaatatgttcctgatcccagcatccttttcaccactgaagtagtttccaacc

SEQ ID NO: 7276 - DNA, 818 bp, Cricetulus griseus
gaaggacaaggagttggcctcgagtgaagaggaagccacgccgacagaaaccggatcccggtgttaagatctatggctgtgcgttgccgcctggaggttctgaagggtctgaggatgaagacgatgactacctgcccaacaatgtgacttttgcacctaaagacgtcatgcccgtggattttacacctaaagataatgtacacggcctggcctacaaaggcctggaccccgccaagcactgttcggaaggccaggcgaacatctgaatctttttggtggcgcccctgaggggaccagccatcttcttgaagacgttggactgagtaaaggaagaaaattgggaatttctggccaggctttcggtgtagaggcgatatgaagagttcttagttctcatgaagaagggtcaaaagatgctctggaacggatgcctggaccccggcatgaccgagtgggagcgaagccgagacgggaggagtttgctcgggcggcccagctctacgtggcgtcccactccaccctgtcctccaggttcactcacgccaaggaggaagaggactccgatcaggttgaagttcctcgagaccaagagaacgacgtcagtgacaagcagtcagctgtgaagatgaagatgtttgggaagctcacccgagacacatttgagtggcaccctgacaaacttctgtgtaagaggtttaatgtccctgacccttatccggggtcaacagtagtcggcctacccagagtaaagcgggataaatactcagtcttcaactttctgacgatcccagagccagcccctccgcccacagccccag

SEQ ID NO: 7277 - DNA, 817 bp, Cricetulus griseus
agcaatcctgacaagagactgcgctatgatgagtatggagatgagcagatgaccttcactgcaccccgagccagtatcttaccattattacagggattttgaagcatctctccagaagaactattcaatgtcttctttggaggacattttccttcaggaaatattcatatgttctcaaatgtgacagatgacagtcactattatcacagacggcaccgacatgagaggacacagacacacaaaagagaggaagaggacaaacctcagactccatattccgcatttgtccagttgcttccagttctggtgattgtggttatttctgtcattactcagctgctggctgctaatcccccatatagtctattctataaatcaaccctgggctacaccatttctagagaaacgcagaacctgcaggtgccttactttgtggataaaaactttgacaaggcctacagaggagcttctcttcgtgacctcgagaaaacaatagagaaagattacattgattacatacaaacaagctgttggaaggagaaacagcaaaagtcagagctgaccaatttggcggggttatatagagatgagcgactacggcagaaagcagagtcactgaaactgaaaactgtgaaaaactttccaagaagagcactgactactcttccagaggacctgggttcaattccctgcacccacctggcagcacccaactgtctgttaactccagttccaggggacctgaccttttttttttttcttttttttttttattttaggtagggtgctctgtgtgttgtgtgtgtgtgtgtgtgtg

SEQ ID NO: 7278 - DNA, 817 bp, Cricetulus griseus
ctgtcgccgcgctacctgagccggaagcgcacgggcatccgcgagcagctggacgccgagctcctgcgctactcggagagccttttgggtgtcccagttgcatatgataacatcagagttgtgggcgaactaggagatatttatgatgatcaaggcatgggtgttttaatgcctctatccctaaacctgagcagatgtcttatgaggaatggcagaacttggagataaatgtaggtgatgaactggaatttgatgtatttcgcttagattcagattctgctggagtattctgcattcgaggaaaactaaataccacaagtttgcagtttaagaactctgtagtttctgaagatgtagcagaaactggcattgaagaggttgctgaaaaaatttcaaagaagaagaagaagaagaagaaagagacaggaacatgtgcagcagtcgatggtgtcacagagctaacaaattgtgcagatgccactccaaaggaagaaacagacctactatatggtggttctatggatgacctctgtgaagacgagccaaagaagaagaaaaagaagaagaaaaggcaccaggaagatcaggaccctgttttccaagccagtgactccagtggctaccaaagtgaccataagaagaaaaaaaagaaaaggaaacacagagaagagattgactctgcatcacctaagaagagacagtgactgtcttttgtgtttttgacatccttacatacaggatagatgaatagatgttgtgtaaggtagggaatgcttaggatcatgagcaagatgaaggtagaataaatgtgattctt

SEQ ID NO: 7279 - DNA, 817 bp, Cricetulus griseus
  modified_base (12)..(12): a, c, t, g, unknown or other
atgcggatggancttgagacggaggtagactgtaaccgctgtgtctgttcctgtggacactgggtctgcactgcaatgacctgcgatggaaagactcagaagggggcccagacccagacacagggaggagatgacgatatgcccaggaactccagaagcaccaggagacagctgaaaagaccaagaaggtaaacaccaaagagatctgacaagaagcacctagcaccatgtctgcagcccagcgcctcctcctcttcagcgctgagttcagtatactcgagtgtctgctgtgatcaccaaaccaccagtatttgcttgtcaggcaatgaatattattttgtttgttttgcaatgaaggaaatgagggtggctggctagcagggagaggccacaaccttcatttccaggagtgctttaagagaaactaaagggcgctttggggctggaggcaagtaaggaaactgcttcatgctggcagaggagcagacccgggtccaaacgaatcctttcaggggtcacagcagccgctggaggctacagggacagcatgtgatgttgggggagggctgagctggctctgctggaggaagggtggggagctctgtggagaggaatcctgctgcctttgacccttgtcaccaatgtcagcattagagacctgcagcatatctgcttcccctcggtcccaacaatcacccgaatatacagccatcccactagtgtcctgcgtctgccttggagaactcacagcagcatgccttaatcaaaagttttgctgctgggaagaaaaaaaaaaaaaaaaaagaaaaaaaaagtt

SEQ ID NO: 7280 - DNA, 817 bp, Cricetulus griseus
ccaccaggccctgcccaggcttcagccaagcagcaagtaggtagagactctgtgctgcccccacctgacacagaccttgtgtttttacgagaaggtgccagcagtcctttgcaggtgcctggccctgctgcagcttcctcagaagccccattacaggaggcccagtgctctgcccagagttgggctgtgaccttgcctcaggtgaaacaagagaaggccgatgctccagaggagtggacagcaggcacagcctttctgacttcatccacgttgcagcctggctgccctagcaaccaaggctacataaactgttagcagtaaatgaaaatgagtattttactgaactgcagttgaaagaagaagtactgtaggagagaaaaactattattattaagagaagaaagacattcttttgtggctgaaaagctgaactcggaattcaggaaatggaatccaaatctagagatgtaccatatagaacatctgaagtggttgggttccaaataattaagcatgcaaatttgaagaaaatcgatcttaagagggtatacacatgagttattagtgtctgtcagtgactgaccttgttactgcccctccccaatccgcttttctgttcttctccccaccacctaagaaccggtaccaaagtagcattcataattggctcttcaacattgttatctctatcttactactaatgggaactacagctctgatccccaggtgtgctgaggactgtccagttccccggattatgttgcctagttttgcctgggatctgacgcccaagaattgagtagctgaccttgtgatc

SEQ ID NO: 7281 - DNA, 817 bp, Cricetulus griseus
gcgctgcgagcggggagcgccgtggaccccgccgcctcccaccctgccgcctccgtcgccgccgcctccttggggccctccgtgtctgcgcagcgcggcccgcggctcccggaggagcagccgagcgcggggcccggcgcgggcgcgaggcgcggccatggcggacggtgcaggagcaggcggggcgggccaggcctccggaccggcgtcgggctcgagtggggctgggggcccggtcaaccccgcttcgctgcctcccggagacccgcagctcatcgccctcatagtggagcagctcaagagccgtggcctgttcgatagcttccgccgggactgtctggccgacgtggacaccaagccagcttaccagaacctgaggcaaaaagtggataattttgtgtcaacacatctggacaaacaggaatggaatcctacaatgaacaagaaccagttgcgaaatgggctgaggcagagcgtggtccagtcaggcatgttggaagcaggagtagacaggatcatttctcaggtggtggaccccaaactaaatcacatcttcaggccacagatagagcgagcaatccacgagttcctggcagcccagaaaaaagaagctatgccagctccccctccagaacctgaaagccaggatcctccagcgccatcccaagacacttcttaagaatatgcctgatacctttggaaaactccatttaatgaagaaacgaaatggattcctgattcatatgaatataacttgagtcgaccatgtcactatactgatgtcaagattttggccttgactggggtgtgtacacat

SEQ ID NO: 7282 - DNA, 816 bp, Cricetulus griseus
tttcaccctccttttattgtagaaaactacagacgtttgaatcagctccggaagcagctagtccttgactgcagcgctgaatggcttgattttctggtagaattttggtgaacattaccacactttgtgtaaggctgtgaatcacctagcaactgttgactgcattttctccctggccaaggtcgctaagcaaggaaattactgcaggccaactctacaagaagaaaagaaaaatacgtcataaaaaaatggaaggcatcctatgattgacgtgctgctgggtgaacaggatcagtttgtgcccaacagtacgagtttgtcacaagactctgagagagtgatgataatcactggaccaaacatgggtgggaagagctcctacataaaacaggttgcactgattgctatcatggctcagatcggttcctatgttcctgcagaggaagcaacaattgggattgtggatgccattttcacacggatgggtgctgcagacaatatatacaaaggtcggagtactttcatggaagaactgacagacacagcagaaataatcaggaaagcaacaccccagtccttggtcatcctggacgagctgggaagagggacaagcactcatgatggaatcgccatcgcctatgctacactggagtattttatcagagatgtgaaatccttaaccctgtttgtcacccactatccaccagtttgtgaactagaaaaatgttacccagagcaggtggggaattaccacatgggattcttggtcgatgaggatgaaagcaagcaagagtcaggtaacatggagcaggtgcc

SEQ ID NO: 7283 - DNA, 816 bp, Cricetulus griseus
gacgcctcctgcgcggtcggctgcgtcaagatgaagctgaatatctccttcccggccaccggctgccaaaaactaattgaggtagacgacgaaagaaagcttcgtactttctatgaaaaacgcatggccacagaggtggctgctgatgctctgggtgaagagtggaagggttatgtggtccgaatcagtggcgggaatgacaaacaaggttttcccatgaagcaaggcgttttgacccatggcagagtgcgcctgctgttgagtaaggggcattcttgctacagaccaaggagaactggagagaggaagcgcaagtctgttcgaggatgcatcgtggatgccaatctgagtgttctcaacttggttattgtaaaaaaggagagaaggacattcctggactgacagatactactgttcctcgtcgtttgggacctaaaagagctagcagaattcgaaagctttttaatctctctaaagaagatgatgtccgccaatatgttgtgagaaagcctttaaacaaagagggtaagaagcccaggaccaaagcacccaagatccaacgacttgttacgccacgtgtcctacaacacaaacgtcgtcgtattgctctgaagaaacaacgaacaaagaaaaacaaggaggaggcagcagaatacgctaaacttttggccaagagaatgaaggaagccaaagaaaagcgccaggaacagatcgccaagagacgtaggctgtcttcactgagagcttctacttctaagtcagagtccagtcaaaaataagtctttaaggataacaaataaataatcacacattgaa

SEQ ID NO: 7284 - DNA, 816 bp, Cricetulus griseus
gagaacatgagtgactggatgcccattgccaaggaatatgacccgcttaaggccggcagcattgatgggacagatgaggatccacatgaccgggctgtgtggagggccatgttggcccgctacgtacccaacaaaggcgttactggagaccccctccttaccctgtttgtggcacgactgaacttgcagaccaaagaggaaaagttaaaggaggtcttctcccgctatggtgacatccggaggctacggctggttcgggacctggtgactggcttctccaagggctacgccttcattgagtacaaggaagagcgggccctgctgaaggcctaccgtgatgctgatggactggtcattgacctagcatgagatattcgtggactatgagctggagcgcaccctacgtggctggatccctcggcggctaggtggtgggctgggtgggaaaaaggaatctggacaactgaggttcgggggccgggatcggcctttccgaaagcccatcaatttgccagttgtcaagaatgagccgcacagagaagggaaaagagagaggagggagcgctctcgatcccgggacagacactgggaccccaggcccagggagcggaaccatgacaggggcctagagaaacgctggcaagagagggagatggccagggtgtggcctgagaacgatcgggaaagagagagggagttcagggaggacagggccaaaggcagggacaagagggacagaagtaagtaaagccaaaaggcagccagccctttctcaaaaaaaaaaaaaaaaaaaaaaaaaaaaaaaaaaaaaaaaaa

SEQ ID NO: 7285 - DNA, 814 bp, Cricetulus griseus
atatgacgtgctcactgttgccctctgaacagtcttctggtacctcttttttgcctaaagacaatgcctcattttcttggggttcctcagatgaagatgaattggatgactccttgttggagttttctgatggagaagaagatgatggccatttcagtttcacagaggaagagattgagatgctcttgaaggatgatgatggtgggcatgagtatggagagagaaagtgtcaaattctacctggtactcgtcgcgaaaattctttgtacagcttggggccagcagctgagacccctggcttcttcaaactacctcaactaagtacatcagttggtcatggaccaactcctggaaaaatagtggatcacataaatcaggttgtgaagtgagaattccagttgtgtccagttcatcaaacagacatacttttgacaaggattctggtgaggtgaaaagtgagagaagactaggcaaagtcattcctgttctacaaaccagaaccaggatgttttcacaatcagatctagaaaaacagaaggatatttatctcagcaaagtcattgctcatatagaagacccaggggactctaaccaaggtaccttgggagagctagatgccctgatggatcaagttcatatgcagaacccagactggcagcatccttcagatcttactacacgaaattatgcgcggttccgacagaaacctctacaaagatacagtctgagtcagtgggtcgacagaaacaagcggagccaccatcgtttccagcgtctcccagacttctcctacagtccatatgtttcatctcat

SEQ ID NO: 7286 - DNA, 814 bp, Cricetulus griseus
gaaactttgggaacatattagcagcagtatatgccaagatgatgggaatccctattcggaaatttatttgtgcctctaatcagaaccatgttttgactgatttcataaaaactggacattatgatctgaggaataggaaattagcacagaccttttcaccatcaatagatattctcaaatcttcaaacctggagcgacatttatacttgatggctaacaaagatggacagttaatgtcaaatttatttaatcagttagagagtcagcttcacttccaaatagagaagatactcgtagagaagctgcagcaagattttgtggctgactggtgttctgagggagaatgtcttgaagccattagcactacctacaacacatcggggtatattttggatccgcataccgctgtcgcaaaggtggttgcagacaggatgcaagacaaaacctgcccagtgatcatctcatcgaccgctcactactccaagtttgcacctgctgtcatgcaggcactgaagattaaagaactcaaccagacatcgtcaagtcagctttacttactgggctcgtacaatgcattaccacctcctcatgaggccttattagagagaatgaagcagcaagggaagatggattaccaggtttgtgcagctgatgtcagtgtcctgaagggtcatgtggaaaaactgatccaaaattggttcataaagaagtctgagtagagtatttttcttggtaagaagcaaaaataaatctcaagagtcgatttggactgcaatagcattttgttttgtataaatgtttatgtgtgcatctg

SEQ ID NO: 7287 - DNA, 814 bp, Cricetulus griseus
gtccggagcccggaaatcatttcagaaatttcccccagtcagattctgagggatggaaatcctggagagacctgaaaagtcagcttgcacatttaaaatctgaagtttcatttctaagtaaacttactggcatcaatataagaaattattccaaaactgaggacattacaaacaatgaagtgacagaaaaggatacaaagaaaattctacagagacacagattatcaggaaattgcagcatggttacatttcaactggaatttcaggttctggaaattgagactaaagagaaatcatcatctgttataactgacctcagcataataatggaacccacagaatattcagaattaagtgaatttgcatctagagcagaagaaaaagagatttgctcatgtttttccgaagtctacatttttttgtggagtggtatgaatatcgtaagaacacatttaagcattttaaggagaagtacccagatagcgtgcacctttcagagggcacctgctcccactgcatggagatccacagtgccaggcagccagggtttgaactagtgattgtttggaggatacaaatagatgaggaagggaaggttttcccaaagctggatcttctcaccaaagtcccagagcgagccctggagctggacaagaacagggtcatagaaactgctcctctgagtttccgaagactgctaggagtacttggaattgaagctgctcttgacagcctgataaaattgctttgtgtggaaaatgactagttccgtgctggcaagcatataggaataagattctgggctggggaacat

SEQ ID NO: 7288 - DNA, 814 bp, Cricetulus griseus
ctggtgatgaaaggccactcaggtaagaacactcagtccagttttcaagcacaaaaactgtagttgctttcacttttcctctttaaaaaggctgctaattggattttacaattcttaccttaagaaaacttgaattattaggagaaagtaggttcaaaagatgattatgtgtctttcacattcacagcacccagcaacgtggaatccagttttcagtattgtaactacctcagtaatgctatgaatgtaagctattgggatagaaatcctaacttgaaacaacagccagtgcctgtggtaatttaatgtcttgtcaaatgcttttattgattggttctgtgtcattcttgttgtcgaagaatatttgcctttttaaaaagcttattaacactttttccagtttatatttaaaaagctaaagaacacactggattgatccttttgggggtggggtagagtccaatagttgaatattgctgcatacccaggtgggaggctggggaatcatgactattttaacaacattggaattcagtatagatgtaactcaacatcagttagcttggggttgggggtacggactgggttgggttttgtgtgtttaatttattaattagtcttaaaaggtttgttttgttttgagattactggaccatcattaaatgtgtactgtgaaaaggttaataatgtgtaaaaaggacttaaccagagtcccttaaataaacactattcaagtacaaaactacaaaccaaaataatactgtgctatgactaactacacacagcgagtatggtgctaagtctacacagcagg

SEQ ID NO: 7289 - DNA, 813 bp, Cricetulus griseus
tggagaagtacaaagagcagaccgagtttgggatcacatcagaaaagctgctgctggcctggaaggaatggagcaggctgtggagcagtgtgggcgggaggatgacgtgaagcgtctggtggagaagatgatggccctgcagactgatattgtggacttacagaggagcccgatgggtcggaagcaggggggcactctggatgacctagaggaacaagcgagggaactctatagaagactgagggagaggcctagagaccagaggacagatggtgacagtcaggaaatggttcggctgctacttcaggcaatccaaagctttgagaagaaagtgcgcgtaatttatacacagctcagtaaaaccgtggtctgtaagcagaaggcactggagttgctgccccaggtagaagacgtggtgagccgtatgaatgaggatgagaagactgtggtccgccttcaggagaagcggcagaaggagctctggaacctcctgaagattgcctgtagcaaagtcagaggtccagtcagtggaagcccagatagcatgaatgtgtctcggcttagtcaccctggtcagctaatgtcccagccgtccagtgcctgtgacagcttacctgactcagccaagaaaagtgaagagctggtggctgaagcacacgccctctgcacccggctagaaagtatgctgcaagacactgtgaaaacgcaagaccacagcttcacgggctgcctcttacattagctagaagcattatgaaactggcttattttatacatagtttctatattttgtaacattactcagatatgtat

SEQ ID NO: 7290 - DNA, 813 bp, Cricetulus griseus
  modified_base (144)..(144): a, c, t, g, unknown or other
tcagcatgggctcacaggctctgcccctcggtcccatgcagaccctcatcttcttggacttggaagccactggcctgcctttttctcagcccaagatcacagagctgtgtctgctggctgtccatagatgtgccctggaaaacncctccatctctgcgggacagccacctccagtgcccaaaccaccccgtgtggtggacaagctctctctatgcattgctccagggaaagcctgtagccctgcagccagtgagatcacaggtctgaacacagctgaactggaagcaaatggacggcaaccctttgatgacagcttggccaacctgctccaagccttcctgcagcgccagccacagccctgctgccttgtggcacacaatggtgaccgttacgactttcccctgctccaggcagagcttgctatgctgaccattagaagtcctctagatggtaccttctgtgtagatagcattgctgccctaaaggccttggaacaagctagcagctcctcagagcgtggtccaaggaagagctacagcctgggcagcatctatacccgcctgtatgggcaagcaccaacagactcacacactgctgaaggtgatgttctagccctgctcagcatctgtcagtggaagccacgggccctcttgcagtgggtggataaacatgcccggccctttagcaccatcaaacccatgtatgaatattgcagctactgctaggaacaaaccaaagccaaggccatatgctgccacaaccactacatccctgaccacaaccaacacaagtcccagccatgcaggagcaggc

SEQ ID NO: 7291 - DNA, 813 bp, Cricetulus griseus
agaggtgtgtgggagccatggctgccccgaacccgtgggacccggcgtccgcgccgagtgcagctgggctactgctgaaccactgggtggcttcggggatagtcactgaggagatgttagatatatctaagaaaacagctccttgctttgtgaacttctccagattacagcagatctcagatattcaagctgaaatcaaccagaacaacctagaaattgaacttctaaaactagaaaaggatacagcagatcttattcatccttcctgtttggttaagaagtgtgactctctgcaaatcatgaataatcatctggaaatggtgctcaaggagaagcgggccatcaggcaaagactgctgagacccatgtgccaggagaacctgccaattgaagctgtgtatcacagatatatggtacatttgttggaattggctgtgactttcatcgagaagttggaaaccaatcttgaaacaattagaaatatccctcatttagatacaaacctaaagaaaatgagcaaggcattagccaagatggatattttggtgaacaagacagaagaattggcagagaatatactcaagtggcgagaacaacaaaaggaaatttccttgtgtatccccaaagtactaactgaagaaaattatcttctcaaatttgatatagttcctcctttaccttttgtttctaaagttcatgcccaaaccattaatgccaagtgattgccgtctttccttttgtttaattatgtgtagtcaaagaagtccatttttaggtgattgtgacagggatattgataggttttgttgctag

SEQ ID NO: 7292 - DNA, 813 bp, Cricetulus griseus
cggtgcttcccgcgactccgagctttcttccggggccacccagactgcatacggcgtggactgcgcccagcgctaagttttcttgacccaaagccagtggacgtgtaggtgacagcagtcccggaggtcgccaaagtcgggggcaccatggaggaggcccctgtgcgggaggaggaggacggggaggacgacgaaggcgccctggccaagagtcccctgcagctgaccaccgacgacgtgtacgacatctcctacgaggtgggccgcgagctgatggccctgggcagcgacccccgcgtcacccggctgcaattcaagatcgtacgtgtgatggagatgctggaggcgctggtgaacgagggcagcctggtggccgaggagctgaggatggagagggacaacctcaggcaggaggtggaggggctgcggagagccggtgtatccggaggccaggtgaaccttggaccggacaaaatggtagtggatctgaccgaccccaacaggccccgcttcactctgcaggagctgagggacgtgctgcaggagcgcaataaactcaagtcgcagctgttgctggtgcaggaagaactgcagtgctacaggagtggcctgcttccatccagagaagctccaggaggaagaagaagagagaaggatgctgtggttaccatgggcaccagagagaaggaagaaaggaccatcatgaagaagctgtttttttccggtcagggaagcacacctagattgaaggtcatgaccaaggtggtgacaccctctgacttgagaagacaattgccaagatgtcttctggaa

SEQ ID NO: 7293 - DNA, 813 bp, Cricetulus griseus
agaatttgtttaatatggttgtggaaatacctcggtggacaaatgccaaaatggagattgccactgaggaaccactgaatcccattaagcaagacgcaaagaatggaaagctgcgctatgtaccaaatgtcttccctcacaagggctatatatggaattacggggccttccctcagacctgggaagacccttttcagaaagataagaacacaagctgctgtggagacaatgaccccattgatgtttgtgaaataggctcaaaggtttgttcccgtggagatgtgatccatgtgaaggtccttgggattctggcacttattgatgagggtgccacagattggaaagtaattgctatcaatgtcaatgatcctgaggctgaaaaatttcatgatattgatgatgttaagaagctcaaaccaggttacctggaagccactgttagttggttgagactttataaggtaccagacggaaaaccagaaaacaagtttgcttttaatggagaattcaaagacaaggctttcgctcttgaagttgttaaccacacacatgaatgttggaaaacaatgatcatgaagaaatgtgaccacggagctatcaattgcacaaatgtacaaatgtgtgatagccctttccactgcactccagaggaagcaagatcactagttgaatcggtcccaacatcttcagtgattaaagaaagcaatatagaagaagaaaggtggcacttcctcaactgacggggacactggaggttctccatcaagactgcaacctctgaggactaaataaatactaaaaaaaaaaaaaaaa

SEQ ID NO: 7294 - DNA, 812 bp, Cricetulus griseus
agcaacccgcaggatgtcggaggtccggctgccaccgctgcgcgccctagacgactttgtcttggggtctgcgcgtctggcggctcctgatccaggcgatccacagcgatggtgtcaccgcgtcatcaacaatctcctctactaccaaactaattaccttctgtgcttcggcatcagtctcgctctggccgggtacattcgtccactgcacaccctcctgagtgcactggtagtggtggtggccctcggggtgctggtgtgggctgctgaaacccgtgcagctatgcgccgctgccgtcgcagccaccctgctgcctgcctggctgcggtgcttgccattagcctcctcattctctgggccgtgggcggcgctttcaccttcctgctctgcatcacagcgccggtgcttttgatcctgctgcatgcttcactacgcctgagaaaccttaaaacaagattgagaacaagatcgagagcattggtctaaagcggactccaatgggactgctcctagaggcactgggacaggagcaggaagctggatcctaggactgtggcatctacaccctgtatctagaccaccctcaaccccacagccttgaaactgggtttttaaaccagagcatatccattgtcaatctcaaaactggacccagagatactcccctaacccaaatctgagactcactggtcttccctacttcgaagctaggacttggggcaggacactctcaaatcatgagctctaaggatttttcaaaccctatccggcttggaacccaggttaagacatggccaaatcttgagcttaa

SEQ ID NO: 7295 - DNA, 812 bp, Cricetulus griseus
  modified_base (349)..(349): a, c, t, g, unknown or other
atggaaaacttcctcctgatccagcagtggtgccactgcttctgtatttgtaagtgctgctttattcttcattctgaaaagaagagatgatagtaaacaagtctttctccacatgatagtgttaccagtactgtaaacgcatggaagatgcagctaagaacattaggatgaatggctggctgctgctaggaatctaagctgcctcaagcttttgttatttatgatttgaatactgtagcttgttttttttgttgttgcttggctttgaatgagtgtaaatttgttttcttttgtgttatttatacttgtatgtatggtttgcatgtctcaatgataaagggataaaacngtatactgacaactgtttacaagaagtggaagaaaaatgtctggaagccgctgagggacacttcactactacatggggatgcggtgccgcggggggtccttaacactgggaagcgctcagtttgccttcagagagtctgaccagattggctacagaatcagccctgatttctgaaggcttgaagaggaaaagaaaagacaaaagtttacatacacttgatgtgaagtgcatttaaatgtttgttggcttgttgcagtgctgtagaagaacagttaataatgggtatgagggtgactgtggcttaactcacaggagctccagtgaagagtttgtccatttcttcaagaactttgacactatagattttaacagtgaacaggggtctacttttcctttacatttgcagtgacaccgtagtctttcatacactcttcccacggggagagagagtgagtgagtatgt

SEQ ID NO: 7296 - DNA, 812 bp, Cricetulus griseus
catccccggcccgctcgcccccggcggtcgccgacatggagcccgtggccagcaacatccaggtcctgctgcaggcggcggagttcctggagcggcgcgagagagaggcggagcacggctatgcatccttgtgtccgcaccacggccccggggctgtctacaggaggaggaagcggcccctgcaagctccgggcgcgctcaacagtgggcggtccgcacacaacgaactggagaaacgcaggagggcccagctgaagcggtgcctggagcagctgaggcagcagatgcccctgggcgttgactgtccccgatataccacactgagcttgctgcgccgcgccagggtgcacatccagaagctggaggagcaggagcagcaggcccagcggctcaaggagaagcttcgcagtgaacagcaaagcctgcagcagcaattggagcagctccaggggctgcccggagctggagagcgggaccgaccccgagctgacagcctggactcttctgttctgtcctctgagcgctcagactcagaccaagaggatgtagaggtggatgtggagagcctggtgtttgggactgagactgaactgcttccgagactcagcactagccaggggcttggctactcacacagcaccagtacctggctatgacactcactgcccatagcatccttttctctttggactgagcctactaggcaggagccccacacaagtaatcaaatcaagtgtttattgagtgcctgttatgtgctgaatattgttcagggtactcgggacacatcagagaataaacaagagccctgc

SEQ ID NO: 7297 - DNA, 811 bp, Cricetulus griseus
ggatcattcgtacccttgaggacaaagttgctgaaatggaagcacagcagtgtaatgggatttatatttggaagattggcaactttgggatgcacttgaaatcccaagaagaggagaaacctgttgtcattcatagccctggattctacacaggcagacctgggtacaagctgtgcatgcgcctgcaccttcagttaccaacggctcagcgctgtgcaaactatatatccctatttgtccacacaatgcaaggagagtatgacagccatctcccctggcccttccagggtacaatacgcctcacaattcttgatcagtctgaagcagtaataaggcaaaaaccatgaagaagtcatggatgccaaaccagagctgcttgcctttcagcgtcccacaatcccacggaaccccaaaggttttggctatgtaacatttatgcacctggaagccttaagacagggaaccttcgttaaggatgacacgttattagtacgctgtgaagtctctactcgatttgatatgggtggcctttcgggaaaggagggttttccagccacgaagtactgatgcaggagtgtaacatccatatactcatgttaaagaactacaaaccacacgaatgaacaacagtgccttccttacctggtctcaaaaaagatattcaaacaagcagtgggagaggtgtaacacctagcagcaaatattatcagcgaggtccccaataaataaataaataaataagaaaagaaaaaaaaaaaaaaaaaaaaaaaaaaaaaaaaaaaaaaaaaaaaaaaaaaaaaaaaaaaaaaaa

SEQ ID NO: 7298 - DNA, 811 bp, Cricetulus griseus
gagggcagccgcctccagctcccggctgggggccttggaaaggaccgctctgaactgtctctcaaccatggatcacgacgaccctgccgaggctttgactgcgctgcgcgagaggcggcccgggcttggtggagatattgcaagcggcggcaggctccgggttggccgcctacgctgtgtgggcgctgcttctgcaacccgggttccgccgcgtgcctctgaggctgcaggtaccctacgttggcgcgagtgcccggcaggttgagcacgtgctatcgttgttgcgaggccgccctggaaaaatggtggatctaggctctggtgatggcaggatcgtgctggcggcccaccaatgtggtctccgtccagctgtgggttatgagctgaacccgtggcttgtgggacttgcacgactgcatgcctggagggctggttgttctgggagtgtctgctaccatcgaaaggatctctggaaggtgaacctcagagactgtcacaatgtgtctgtgttcctggcccccagtgtgctcccactactggaggacaagctgcaagtagaactacctgcaggggcccgtgtggtgtctggacgtttcccccttcccacctggcagcctgtagcagtggtgggtgaaggcctggacagagtctgggcctatgatgtccatggtactgggccagccgtgccttcttgtggggtgcccatcaaggccatcccaaagtccacttctacctccatccctaggactgttgtttgacaggctggctgactgatataataaagactctgtgggttacaaaaaaaaaaaaa

SEQ ID NO: 7299 - DNA, 811 bp, Cricetulus griseus
ttaagattggcttgggcaaaagcatccagaggccctaggatttcagaaggtcaacagtctccactagagaaaaggctcctgagtcttggtggtgtacatactacagcagcaagacacttggtaactcaaaaatagccaagcggagagcaaagcactctgcagggagcaagctcattctcttgactactggcttgcaaaagcagagtcttattatcataaaaaaataagtggaaatgattaaaaaagacaccggcggtgaaatgaagatgaaagtgggagaggaaacacgagagagagaagagacaaatagaaaggcacattcttagaacaggccaggccagagagtttaagagcaaaacctggaggcagacacaacgcctcagtgagacaatactacccaggatttcgccagaaacgcagagcatcccactagcacagagaagaaggcaggtcaaggagagagaattgcaccaaattaaagatcatcaagaacgcatgattcgagggagggaacttctagagcaaagactcaaagacaggatcttgagaatgagccagagccagattccaccacctgagaggcgcagtcaagtgaagaagagagagaaaggagtttggaaagggttgtcgcatacccactctaccagccgtccagtacaagtcggattaaagtggatattcttatggaaaaaatctctgcatgaaaaggaagtgaacgtaattataaaaccttatagaaggaaattcttggctgtgcctaccttttttgagaactcaaataaggaaaaataaaagaatccctgaagtttca

SEQ ID NO: 7300 - DNA, 811 bp, Cricetulus griseus
cggcggccctagctcgcgcgtccgccgggatgagctacgaccgcgccatcaccgtcttctcgcccgacggccacctcttccaagtggagtacgcgcaggaggcggtcaagaagggctccactgcggttggtgttcgaggaaaggacattgttgttcttggtgtggaaaaaaaatcggtggccaagctacaagatgaaagaacagtacggaagatctgtgctttggacgataatgtctgcatggcctttgcaggcctcactgccgatgcaaggatagtcatcaacagagcccgggtggagtgccagagccaccggctcaccgtggaggaccccgtcactgtggagtacatcacccgatacattgccagtctgaagcagcgctatacacagagcaatgggcgcaggccatttggcatctctgccctcattgtgggatttgactttgatggcacccccagactctatcagactgacccctcaggcacataccatgcctggaaggccaatgccataggccggggcgccaagtcggtgcgtgaattcctggagaagaactacactgatgacgccatcgagacagatgatctgaccatcaaactagtgatcaaggcacttctggaagtggtccagtcaggtggcaaaaacatcgaacttgctgtcatgaggcgggatcagcccctcaagattctaaaccctgaagaaatcgagaagtatgttgcggaaattgaaaaagaaaaagaagaaaatgaaaagaagaaacaaaagaaagcatcctgatgaagtgagcattgggtagagcagcttccagcctc

SEQ ID NO: 7301 - DNA, 811 bp, Cricetulus griseus
aaaacatgaagcttttcatacagagagcataactgaatctagaaagtgcctgaaaagcccggaaaagcagtctggattgtctgtggtacaaggatcaatttatgaaaccacgtacagtcctcctgaatgtccattttgtgggaaaatagaagagcgaagtcaagatatggagatgcacgtaaaaacagagcacgccagtctcttagaaactccaccagaagactgtcatcaaccactctatgactgtcccatgtgtgggctcatctgtacaaattaccatattctccaggaacacgtggacttgcatttagatgaaagcagctttcagcaaggcatggacgagagtccagtgctctggtgatagagaattagctgagcagcttcagcaagaagaagacaggaagaggtggaatcaatagctattggtattgatgatggaaaaacaaaaacttctggaattattgaagctctccatagatattaccagaacattgccacagatgtgaggtgcgtgtggctctctacaatggttgatcactttcattcatcttttggggacaaaggttggggttgtggttacagaaatttccagatgctactttcatcattgctacaaaatgatgtgtatggtgactgcttgaaaggtatgtcaattccttgtattccaaaaattcagtccatgattgaagatgcatggaaggaaggttttgatcctcagggagcctgtcaacttaataacaagttacagggaacaaaggcctggattggagcatgtgagtatttatacacttctgacctcactgagagtaaa

SEQ ID NO: 7302 - DNA, 810 bp, Cricetulus griseus
gctgctgacgcttggccagtggcgcgctcttcttcccggggctcttcgcgctcagcacctgggcgctgcgccgctcgcggccggaatggaccgacgacgactgcctgacggtcggcaccaggctggtgtcctcggtgcaggcagtgctggctaccggggcggggctcaccatcatctgctcctgcagcaacgtggtctcagacaggcattggcttgccagagagtatgtctggtttttgattccatacatgatctatgactgctatgccatgtacctctgtgaatggtgccgaaccagggaccagaaactcagacgtgccaccattttccgaaacttcctgattgaaaaccgcctaatggtcacgcatcatgcagtcatcctgtttgtccttgtacctgtttcacagaagctccggggagaacttggcgacttctttgttggctgcatcttcacagcagaactgagtactccgtttgtgtcactgggcagagttctgattcagctaaagcagcagcataccctcctttataaggtcaatggaatcctcacactgtccacctttctgttttgccggatccttctttttcccttcatgtactggtcctatggtcaacacaaaggactaagcctgctccgagtgccatttaatatccctttacactgcaatgtggccaatgccatcctcatctctccccagctctactggttctcattgctgtgcaagaaggcagcccggctctttgacactgccaaagccaaaaaggatggttaattactctcaggagtcaggcactcacactagctgcctc

SEQ ID NO: 7303 - DNA, 810 bp, Cricetulus griseus
agaggatggccaccgccgctctcaagaggctcgggtccgctgggcgcagtgaagcgcgaggagaggcgaatgctgccgcgacggtggcggcgaagccagggctgtgggcgcgactgggcacttggacccgcgcgctgcttcgcgattacgccgaggcctgcagagacgcggcggcggcggctcgggcccggccaggccgcgcggcagtctacgtggggctgttgggcggcgccgcggcgtgctgcgccctggcccctggcgaggccaccttcgaagaggccttgctcgacgcgtcggggtccctcctgctgctggcgccggccacgcgtaaccgtcactcggaagcgttcttgcagcgcctgctgtggctgagaggccgcgggcggctgcgccacgtgaacctggggctctgctcgctggtgtacgaggcgcccttcgatgcccaggccagcctctaccaggcccgctgccgctacctgcagccgcgttggatcgacttccccggtcgggtcctcgacgtggggttcctgggccgttggtggatcctggagaaccgcatgcaggattgcgacattaacgacgacgagtttcttcacctgcctgcgcacctccgtgtcgtcgggccccaccagctgcattccgaaggccaacgagaggctgttcgaggagaagtacaagccgattgtgctcactgatgaccaggtggaccaggcgctgtgggaagagcaggtcttgcaaaaggaaaaaggatagactggcgctgagcgaggccaattcactggtgcaggccgaggtttccagatgaaaccc

SEQ ID NO: 7304 - DNA, 810 bp, Cricetulus griseus
gggcggggcactgggctgtgcggcgccgctcgggaaggaacgcggtctgcaacccggattcgaccggctttagaggaggcctttcccaggggcccacgactgctccagaggacaatggattctggagctcgcccagttggtagcagctgtagcagccctgcagcgctatcaagagaatacaaactagtgatgctgggtgctggtggcgttgggaagagtgccatgacaatgcagttcatcagccaccgattcccagaagaccatgaccccaccattgaagacgcttataagatccggattcgcatcgatgatgagcctgccaatctggacattctggatacagctggacaggccgagttcacagccatgcgggatcagtacatgagagcaggagaagggtttatcatctgttactccatcacggatcgtcgaagtttccacgaagttcgggagtttaaacaacttatttaccgcgtccgacgcacggatgacacaccagtggttcttgtgggaaacaagtctgacttgaagcagctgagacaggtctccaaggaagagggattgtctctggctcgagaattcagctgtcccttttttgagacctccgctgcataccgttactacattgacgatgttttccatgctcttgtacgggaaatacgtaagaaagaaaaggaactagttttggccatggagaaaaaatctaaacccaaaagcagtgtatggaagaggctgaagtcaccattcaggaagaagaaggactctgtaacttgaggggagtgtaaaggatctgctgtgaactgcggtgct

SEQ ID NO: 7305 - DNA, 810 bp, Cricetulus griseus
caatgaaaccgaagcatacattttgcgcaatgaaggtagatgatggaccgtgcaaagccatgataaggagttattttttcaatatttttacttaccaatgtgaagaatttatatatgggggatgcagaggaaacgaaaatcgatttgaaaccctggaagaatgtaaggagacatgcatcagaggttataaaaagaagactgtaaagacaccatctggagcagaaaagccagatttctgcttcttggaagaggaccctgggatctgccgaggcctcattactagatatttttataataaccagtcaaagcagtgtgagcaattcaagtatggtgggtgcctaggcaaccgcaacaactttgagactttggatgaatgcaagagcatctgtgagctgatctcaatactgcaaataacactttgatcccccagtctaccaaaacacccagccgttgggaatatcatggcccttcatggtgtcttagtccagcagacagtggaatgtgtcaagccaatgagaaaagattctactacaattcaaccattgggaaatgccgccaatttaagtacactggatgtgggggaaatcataataattttactaccaaaaaagactgtgttagggcgtgtaaaagaggtttcctcaaaagaatatcaaaagaaagaacaattaaaacccaaagaagaaaggagccttctgtgaaagtagtctatgaagcatttaattagtgttaagatataaacacattattgttacattaatttcactaaatatttcataaggtagttttactatgatgtctattcttcta

SEQ ID NO: 7306 - DNA, 809 bp, Cricetulus griseus
tcttttaaccccatcaccaacatgcacctcaggctgtttgagctgggcaaggactacatgaatgcaacaggaaaatacagggttatcaaaggcataatttctcctgttggcgatgcgtacaagaagaaagggctcatcccctgcccaccaccgaatcatcatggcagaacttgccaccaagaactcgcactggctggaagtggacacatgggaaagtctccagaaggagtgggtggagactgttgaaggtgctcagacaccatcaggagaagctggcaactgacagttgtgatcacccacaacgctcactcttgatggacaggcccgggcggaagaggaagtgggatgaacaaaagcaggactccagcccaaaagaaaccccaagagcccaagtcaacaggtgtgcccagggtgaaattgctgtgtggagcagatttactggagtccttcaatgtgcccaacctgtggaagactgaggacatcacccaaatcgtggccaactacgggctcatatgtatcactcgagctggcagtgatgctcagaaatttatctacgagtctgacgtgctatggaggcatcagagcaacatccacctggtggatgaatggatcaccaatgacatctcctccaccaagatccggagagctctcagaaggggccagagcatccgctacttggtccccgaccttgtccaagagtacattgaaaagcatgatctgtacaactccgagagtgaagacaggaatgttggagtcattctggcgcctctacagaggaacatctctgaggccaagcacagcaatcccac

SEQ ID NO: 7307 - DNA, 809 bp, Cricetulus griseus
cagctggaggagctgcagagagagcgaggggctctggattctgagctgaagacctaccaggatcagcagatttcccagcttcggcagaccatacagaagctgcagagtcagatttccagcctcaagatgcagaatggtactctgcagtctgccattgccgatgctgagcaacacggggagatggctctgagggatgctcaggccaagttggatgagctggagactgctctgagaacagccaagcaagacatggcccaaatgttgcgagaatatcaggaactgatgggcacgaagttgtccctggacgtggagattgccatgtatcgaaggctgctggagagcgaggaatgcaggatatctaaggagtacaccagccaggtcactgtctccacggcagaaggcagagttgttgtccctggaggagttggtggaggccaagtggtcatacctggaagaattggaggaggccaacctggaagagttgatggaggccaaaatggttatacctggaagagttgatggaggccaaaaggtcatacctggaattgtgatggaggccaaatggtcatgcctggaggcacttgtggactcagaggctggaaaggcagctttggatctagaggctgctctagcattgtaactggtggctttgatgtcccccagggatctgggtgcagtcccagcatgagttcctgctccgtgtctggctctggcttcagttctggctctggctcctgctgccgcaccatcctggaagaagacagtggaatcaagtcggaagacatctgtcattactgagtgaccaggca

SEQ ID NO: 7308 - DNA, 809 bp, Cricetulus griseus
  modified_base (755)..(755): a, c, t, g, unknown or other
tctgcttccccgatagaatgcagaagaagcaggaaaaaaagccttttaaaaatactgagaacattaaaagcaaccatttgaagaaatccacatttctgacagaagtgagaccaaaaggaaattatgcgggagcaaagtttagcgacccgccttcccctagtgttcttccaaagcctccaagtcactggatgggaagcactgctgaaaatcccagccatagcagggagctgatggcagtgcacttgaaaacactcctcaaagttcagacttagattttagttttcaatgtgtatgttaaatatagattttccccaactccttggactctaaaaggaaatggatacaacagtggaaacatgccatgttgcagcatatgacaggagattaagtcacatacaagcagcttgtattatattttatattttgtaaatactgtataccatgtattatgtgtatattgttcatacatgagaggtacattatagttttgttatgaaagtatgtattttgccctgcagatgtggtgggtgttttgtatatatatagtggagctattttaagtgggtgcttaaggcacatggaagactgtttgcacaggtactgtaaatttttttaaggacagctgtcaaatctcaagttcaaaatctcaatgtagaaacagtttacttatatactactgtaaggttaaatttggcacaatcactagtaaacataggaacttgtctgtgtttctctaaattgatctgccttttaanctgtaataactagaaaatttcctaattttttaccaaaactttgattctggatat

SEQ ID NO: 7309 - DNA, 809 bp, Cricetulus griseus
tctcttgggcacagcggatttgtccagcggaaatttcaaccagaaagagtcccggtggccgaaagctgctgaagagagctaataaagggaagcagtgagcgaggcccgaaggagacttcaccagagctcgcgggaagccgccgacaatgaaggctgtgatttaccatgccctttctcataaagaagccaaagagcacgatgtacaggagctgggaacccagcgggctgaggcctttgtgagggccttcctgaagaggagcataccgcacttgagccagcaggattgcgagagccatctacagcgcaaggctgtggtcttggaatacttcactcgccagaagccaaagcagcagaagaaatccaaaggcctctctgccaaacagaggagagacatgaggctctttgacattaacccagagcaacagagatacaacctcttccttcctctgcatgaactctggaagcagtatatccgagacctgtgccacggtcttaaaccagacacgcagccacaaatgattcaggctaagctcctaaaggcagatcttcatggtgctattatttcagtcacgaagtccaagtgcccctcctatgtgggggttacaggaatccttctgcaggagaccaagcatgtcttcaagatcatcaccaaagaagaccatctgaaagttatccccaagctaaattgcgtgttcaccatcgaaattgatgacttcatttcctacatttatggaagcaaattccagcttcgggcaagtgagaggtctgccaagaagttcaaagtaaagggaacaattgacctgtgaact

SEQ ID NO: 7310 - DNA, 809 bp, Cricetulus griseus
cagactagagaaagtaaaggggaaaacgtctaaacatgaagccgtttctgaccatctgcaggctgcttagaagtttaaacagattttccacaaaaccaagccctcttgcgagtttctccacttccccttgtttgtgtggccagaagaaaaaaaactcttacgaagcaatagaccaaaaaaagtaatgctcgtttagtacggtctgtgttgtccagaggcccggtccagaccccagagtcattgttccaggaagataatatactctatggccctgtgagcaagcatagggccccgagcaacagcagcagggaagagtcccacagaactggtttcctatcttcaatgaggagagaaatgtgaaaccacacacaagaagagcacctccaatgtggctatatcaaaagtgtccagcatattttgaagaaatcagtggtgtgcaagctctggaaagtgctgtccagcacgaggccttgaagtacgtaggactgctggactgtgtggctgaataccaaggcaagctgtgtgtgattgattggaagacatcagaaaaccaaagccttttattggagatacatatgacaacccactacaggttgtggcgtacatgggtgctgtaaaccacgatgcccactacagttttcaggttcagtgtggcttaattgtggtggcctataaagatgggtcccctgcccaccctcatttcatggacgaagaactctgttccaagtattgggccaagtggcttcttcgactagaagaatatacagaaaaacaaaaaaatcagagtgttccaaagccggactagaggc

SEQ ID NO: 7311 - DNA, 809 bp, Cricetulus griseus
ttctcctaatattttccttccccaaggaacaaaggtaacagtgccaagtttttgcaagaatacctcaggataaaacaaacatctgaaacatctgatacatttgaaaaaaaaacagtgttttttaaagaaaatcaattttcctacttagtgttatttaactggtatttgtatgaagttgtattggattacactgaattgttgtgtccagttcaaattgattaaagaacccatttcctatgggatgagatccagggtgtagacatcagtatgctaatggcatgaggaatgggttggtctctgcaacaagagctggcaggagcccatggtttaagaatcccatgattcttttgctccctggagagcagcttcagcctggtcattcactggtcttgttctcagcaggggtctgacccagttctctacctcaaagtgagttcaacaaccagcccaggcaacttggtgagaccttgtcacaaaatttacaaagtagacagagtggtagtatgcatcagaccctggatttagtcctcaacacacaaaaaacagccatgacaactccatttctttcttaaatggtctaaaccaatcttgctttacctcagtcaattagttgtcactgttatactgaaaatttgtaaatattcttatagattttataaatattgccacactaggtattgttttttatttgtaatttatagaaaaattttcatcaattttaaatcttacaagatcccaatatgtattagtataaagatgacatagaaattgtattccatttttaaaataaaagtgcaattgccaagttc

SEQ ID NO: 7312 - DNA, 808 bp, Cricetulus griseus
gaagaacggtgcaccacgaataagctgtctgaaaaatatgaaggttccttcttgcagggatcagagaaagccatatccctggtccagggtgggagaagccaccaagcagcagccttggcatgggagaaggggacctctggcccagaggagaaagtcttttctgagtgggtagaatcagtgaaggaaaaccctgctgtgattgattttgagcttgccccaatcacagacttggtcagaaacatcccgtgtgcagtgacaaaacggacaacctcaggaaagcatttcaagatatgcagccaagtttcgacccttgtcagtgtgctccatgtgaactcgggagtgtaataaccctgctccccagcgaggagggcgacgctgtgagggccagcagcggcaagaggaagactgtacattctcaataatggaaaatgttggacaaccatgtatcagtgacaatgaagacatgaaagaggtagacattgttgagagagaagcagattcagggtgtcctcaacctgctctcccagaaaatggatttatctggaatgaaaagaaactgtactccgttgggaagaagttaaaatttcgtgtcttactggatttaaagctgttggataccagtacttcagttgccagacagaacctggaggcaaggagatgtcgtatgcccaacggaccgagtgcctcaagccggttgtcaggatgtcctgacaatctccccatttcagagagtgtataagattggcgaatccaattgagctgacatcgcccaaaggctctgttgttgctgggccatcaaggtacacat

SEQ ID NO: 7313 - DNA, 808 bp, Cricetulus griseus
ggagtacctcatccaggagcagcccggccacgggcagctcccaggggcagagctgtccggggaaggctcccctcaggggtcaggcggtgtctgttccaccccggaggaagcagaaccttatgagagttgctgccccaccagcagggaggcggccgtggaggctttggagctgctgggagccacctacgtggataagaaaagggatctgcttggcgccctgaagcactggagaagggcaatggaactccgacaccagggtggggactacctccccaagccccagccccaacagctggttctggcctacgactattccagggaggtgaccacgcccccaagagctggaggccctcatcacagatcccgatgagatgcggatgcaggccctactgatacgggagagggatcctgggtccctcggcactctgacacatcctactacataaggtaccggggtgctgtctatgcggactctggaaatttcgagcgctgtatccgtctgtgaccccgacagccgggacttcgacaacaacactccgctgcacatcgctgcccaaaacaactgcccggccatcatggatgcgctaatcgaagcaggggcccacatggatgccaccaatgccttcaagaagacagcctatgagctgctggacacaaagctactggccaagagcaccgtgcagcccttcaactatgtgacgctgcagtgcctggccgcccgcgccctggacaggaacaaggtcccttataagggattcatcccagaggagctggaggccttcatccagctgcactgagcccggcccag

SEQ ID NO: 7314 - DNA, 808 bp, Cricetulus griseus
  modified_base (68)..(68): a, c, t, g, unknown or other
gtgcactattcgaatgagtttcgtgaagggttgggggagccgagtaccacaggcaggatgttactagnaccccctgctggattgagatacatctgcatggccctctccagtggctggataaagttcttacccagatgggttcgccccacaatcctatttcctcagtgtcttaaagggcctcggcttctgtctcttgcaaactgttgagccttgcatgtacttgaaggatggatatgtcaagacgggtgaagacctgacaagggagccgcaaacgtagactatgccataacattgagtttgttgtcttaaatgagcaagctggtgtctgaatttgctgtgtttcagttttttagagttttatctgacttttttcctttcttttcttctatctcatctgctctacacggaagttaagcagctggttaattcctgtaactgtgagagcaaatgaataattccttttatttgcaaatcaactggctttgtgtttcagtgcccggtatatgaaaggcttgaatttaatgagcagtttttacagagtttacaatacaggcataggctttaatttccaaatgaattgtttgccaaacctagtaaccgtgttcattagtcacaggtttaaagaagatccttattggaatccatttcaaacatttttattttgttttggtttttgatacttgtttgattttgatttctttttattgcttactttattaaaaaaaaaaaaaaaaaaaaaaaaaaaaaaaaaaaaaaaaaaaaaaaaaaaaaaaaaaaaaaaaaaaaaaaaaaaaaaaaaaaaaaaaaa

SEQ ID NO: 7315 - DNA, 808 bp, Cricetulus griseus
tggaggactgtgtggaccgccattctgaagttccaccatgggccgactggaaggaagttattgtcctgacagctgctgctcaaggaatcggcagggcctctgcgttagcttttgcaaaagaaggagccaaagtcatagccacggacatcaatgagtccaaactccaggagctggaaaattacccaggtattcaaactcgagtcctcgatgtcacaaagaagaagcaaattgatcagtttgcctcagaagttgaaagaattgatgttctctttaatgttgctggttttgtccaccacgggaccatcctggattgcgaagaaaaagactgggacttttcgatgaatctcaatgtccgcagcatgttcctgatgatcaaagcattccttcctaaaatgcttgctcagaaatctggcaacattatcaacatgtcttctgtggcctcgagcatcaaaggagtggaaaacagatgcgtgtacagtgcaaccaaggcagctgtgattggtctcacaaagtctgtggctgcagacttcatccagcagggcatcagatgcaactgtgtatgcccaggaacagttgataccccgtctctgcaagaaagaattcaagccagagatgatcccaaagaggctctgcaagctttcctaaacagacagaagacgggaaggtttgcatctgcagaagaggtggccctgctctgtgtgtacttggcctcggatgaatctgcctatgtgacgggcaaccctgtcatcattgatggaggctggagcctgtgactgcaggaactccttgcagagaaggcaggctcttc

SEQ ID NO: 7316 - DNA, 808 bp, Cricetulus griseus
ccttcgccatggcggccgtcagggctctggtggcgccgagactggtttctgcgctcgcaccgctctcggggcgtcaccatgctccctcccagcgcgcagcccttcacggctccgcaccgcggcctggggccagggtggcgttggtgctgtcaggctgcggtgtctatgacggaaccgagatccacgaggcctctgcggtcttggtgcacctgagccgaggcggggctgaggtccagatctttgctcctgatgtccctcagatgcatgtgattgaccacaccaagggacagccttccgagagcgaaagcaggaatgttttggcagaatcagcaaggattgcccgaggcaagatcaccaacctggcccagctcaatgttgcgaatcatgatgctgccattttccctggaggctttggagctgccaagaacctgagcacgttcgccgtggatgggaaggactgcaaggtgaacaaggaagtagagcgtgtcctaaaggagttccatggggccaagaagcccatcggcttatgctgcattgcgcctgtcctcgcagccaaagtgatcaaaggcgtcgaggtcacagtgggccacgagcaagaggagggtggcaagtggccttacgccggaactgcagaagccatcaaagccctgggtgccaagcactgtgtgaagggtgtgaccgaagctcatgtagaccagaagaacaaagtggtcacgaccccggccttcatgtgtgagaccgcactccatcacatccacgatgggattggggcaatggtgaagaaggtgctggaactcgcgggaaagta

SEQ ID NO: 7317 - DNA, 807 bp, Cricetulus griseus
ggatcttaacagaacatcagttgcagtagctatggctccatcctgggtgcccgctgtgggcctcactctggcacccagcctggggggcttcatgggcgcctactttgtgcgcggtgagggcctccgctggtatgctagcctgcagaaaccctcctggcatccacctcgctggacactggctcctatctggggcacgctttattcagccatgggttatggctcctacatggtctggaaagagctgggaggcttcacagaagaggctgtggtccctttgggtctctacactggtcagctggctctgaactgggcatggccccccatcttctttggtgcccggcagatgggctgggccttggcagaccttctgctcgtcagtggggtagcaacagccacaaccctagcctggcaccgagtgagtccaccagctgcccgcctgctctacccttacctggcctggctggcctttgcgaccatgctaaactactatgtatggcgtgataaccctggccatcgaggtggctcacggttcccagagtgagcgcaccctgtccatcaggaccacagcactgccagccaagcaccatggatggtgggcatcatgctttcatgaccactgggcccgctggtctacctgggtcttgaaggcccagggagccaccagacaggtcaaggtggtcagtgccaagtcccatccagggacacttgtacctgcctttctgcactgctccaggcatgccctaagaacatggggcttttaaagctaaataaagtctttaacttcaaaaaaaaaaaaaaaaaaaaaaa

SEQ ID NO: 7318 - DNA, 807 bp, Cricetulus griseus
aagaaaatagagaaaagacagaggcgttgtgaggaagaagcagcaggaggcccagggtgagcaggccagcagatatatacagaatgttttaaaacctacaaacaggaaaatagaaattagaaaaaactaagaagaacgcttttatcaaatgacaggtgaaacctggaaattaactactggccacaaactggagggggatgaagatttggtgcttgacagttcgagtcaggtgtctttggaaacagcaaacagagaagcagcgaggagacggaacttgcccaagcttttaactgaaatctcaccacctgctccacagcccaccaagaaggaggttcccaatttacctgaagagccaccggaaacagctgaagaggtggttacagttgcccttcgatgcccaagtgggagtgttttgaggaggagatttttcaagtcttggaattcacaggtcttacttgactggatgatgaagattgggtaccacaaatccatatacagtctttccacttcctttcccaggaggcctctggagacagagggaggcttgtcactggaggacataggaataactgtggatacggtacttaacgtggaagagaaagaacagagtggccagtatttttgtttaaattggaaagtttatttgttcagtacaccaaataggatgcaagcactgtcatgacaaatatacagaaataatgcagatcaacatcaaacagtaatttagtttaaatgaaaggaaatctctttaatgttatgacaacatactcccaagaatctcttcttcagttagttacacatttcaat

SEQ ID NO: 7319 - DNA, 807 bp, Cricetulus griseus
ggagcatcacaaaagaatcaattccaagggatacttggaaccttctcctagattttggaaacatgattgcagatgatttgtctaactacgatgaagaaggagcctggcctgtccttattgatgactttgtagaatatgcacgaccagtggtcacaggtgggaagcgtggccctttctaaatggaaacgacagatagatggagggtgaatgagatggatcctgaaaggagacaactgggttggttgctgtgtgcatttgttgctgacttcagaagtcttcctcgtccattcatgaaacaaatccttactccgcttaaaggctgccatgtaggaacggagaagctcctcaggacgttagggacggccggtcgtcagagctagtgctttagggagatgcctgcatgacttgtctttacagaaagcactttgaacatcactgtgctgagcctacctcacaccagtctccacaaagccaaccctcactgtgagatgacatcactaaggacctgtcaacgctaagtcagtgaaagggaaaactggaacatctttgggagtgtacgtaaccaaactgactgaatgaagacctggaaaacaaagcgtccttccaggctttgtgggtccctgacatgcagttaacctctgttcagagaaatttttatagatagagataactaaattttgaaggcttacaatatgcttttattttaagtatttaaaattcttcagaaaagatcagtgatatgattgagcaggttaaggcatttgctgcccagcctgattgtcctctgacctccacacgtgtgccatg

SEQ ID NO: 7320 - DNA, 807 bp, Cricetulus griseus
tggagcaagcaaaggtggattagtttctgcatacacattgaattcaatgttttgggtttattttggcaactcaaggagttaatcctaaggagcatccagtgaagcaagaattggaaagaatcagagtctacatgaacagagtcaaagaaataacagacaagaaaaaggctgccaagctggacagaggcgctgcctcaagatttgtcaaaaatgcgctctgggaacccaaacagaaaacacaccaaatgttgctaataaaggaaaaagtaaacattaatcttctggttctgatgtacatgttttcaaaaagtacatcgtttttatcattttacaaaataggtagttgtgtggcaatgcaagtttttaatggattcctttttgaattcatgtataaatttacacattaaatttgtgatactgaatcttttttcttgctgagaaagaattaaagttgttcttcattgatttttctatataaagcatcatgatgttttaaatattgtaaggtattctataagcaattgtgaaatccaaatgttctttgtaaacatttgtagtactttaaatgaataatgatattatgaagtgtgttggtctgtagactggagttataaggacatctgtttttactaatgacgataaatgtgttgacttaaatacccactttgtttttctgtttagttagttcaacatgtttctgtgatttttggagtaattgctatcttgatattcaaagtgcaaaattgaaaaccttaaggctgtactttaattcttcatgttccatttaaaataaaatattctcattaa

SEQ ID NO: 7321 - DNA, 807 bp, Cricetulus griseus
gtccaggctttcgagggcggcagcgatgccttcctcgcaactggtcggtcaactcgtggaactatgtcttcggtgcctaataatcaatatttccagatatatctcagatattaaatatttgcctcccaacatcaaagatagactgattaaaataatgagcacccggggccggataacagattccaatataaatgaggtgttacatcccgaagtccaaagactagatctgaggagctgtgatatctcagacttggctctccagcacctgtgtaaatgcagaaaactgaaggcactaaatctaaaatcctccagagaacatagaaatagcataacatcagaaggaataaaagctgtagcttcatcctgctccgacctacatgaaatttctttgaaaggatgctgcaatgtcactgatgaaggagtccttgctcttgcactcaattgccagctgctaaagatcattgacctgggtggctgcttaagtattactgataagtccttacaggcattaggaaaaaactgcccgtttttgcagtgtgttgatttttcaactactcagtgtctgacagtggtgtggttgcacttgttagtggaccatgtgccaaacaattagaggagattaacatgggatattgtataaatcttctgactgtcctgtcctcagatatgtatacttctttttcacggctgtccccctaataacagatcattctcgagaagtcttggagcaattagtaggatcaagaaaacttaaacaagtgacttggtctgtttattgatctttactgaggctgatctcaagaacct

SEQ ID NO: 7322 - DNA, 806 bp, Cricetulus griseus
gtgccctctgtgatcctggatgaggatggcaacatgattgacagccgcctgccctcaggagaacccctccagtttgtgtttgaggagatcaaatggcaccaggagctgagctgggaggaagctgccaggcgcctagaggtggccatgtaccctttcaagaaggtcagctacctgccattcacggaagcctttgacagggccaaggcggagaacaaacttgtgcattccatcttgctgtggggggccctggatgaccagtcctgctgaggttcggggcggactctccgggagaccgtcctggaaagcccgcccatcctcacgctcctcaatgagagcttcatcagtacctggtccctggtaaaggaactggaagacctacagagccagcaggagaacgcgctccacagacagctggcaggcttgcatctggagaagtacagcttccctgtggaaatgatggtctgtctgcccaacggcactgtggtccaccacatcaacgccaactacttcctggacatcacctccatgaagcctgaagacctggacaacaaagtattcagcttctcctcgacctttgaggacccgtccacagccacctacatgcagttcctgagggagggactccggcgtggcctgcccctcctggagccctagtgtgcttagtcctagagaaactggacctggtgagacaggcagacaggttccacacgtcctggagccatagtgccctctgtccatttcgctctggaaatggtccccacctcattcccaggcttcctagagagctccaaggccaactgaggctg

SEQ ID NO: 7323 - DNA, 806 bp, Cricetulus griseus
ggggctccttagatgcgccacggcttcggtagcgaccggctcttctctgctgcctgagcggcgccagcaccttcctcgggagctcgcagcagccggctggctcctgctccacggcaaccatgtgcgaccggaaggcggtgatcaaaaatgcagacatgtcggaagagatgcaacaggactcggtggagtgcgctactcaggcgttggagaagtacaacatagaaaaggatattgcggcccacatcaagaaggagtttgacaagaagtacaaccccacctggcactgcattgtggggcggaacttcggtagttatgtgacacatgagaccaaacacttcatctacttctacctgggtcaggtggccattcttctgttcaaatctggttaaaagcatggactgtgccaaacacccagtgatccatccaaaaacaaggactgcatcctaaattccaaataccagagactgactcttcagccttgctaagggaacacctcgtttgaatctgttgtgttttgtacagggcatcatcctctgtacaagtttgtggttataaaataattagtaaaacagcttacatttgtatttattttctagtccatacttctgtacccccgtttttttctcccttaggccattcctttaaaataaatctgttggagatgtagttttgaggcagggtttctctgtgtagccctggctcttcttgaactcactctgtagactagtctagccctggaactcaggatctacctgcttctgcctcccaagtgctaggattaaaggtatgaaccaccactgcctggc

SEQ ID NO: 7324 - DNA, 806 bp, Cricetulus griseus
acttctgtagccagagagaattaaaaatcttttaatataaagagagcatatttatatcattcctcaatagttaattatagggttttggtacctttgtgcctcagggaagccacgtgatgtaactggttatagactttcagggttaggatgtagagaaaggagaaagccattggaaactgtgatgggctccattgagacaattaacctagtacagaagtatgccaggacccgcggtaatgtgattgtagtagaatttgtttcccaggattagtagggaaatcatcttaagttattacatatgctgtgttaggagagttaagaactctccatcaagcatcaaccaaggccaatgagataacttgagaaatatttttaagaagaacgctaaacattactgaagaggtaaaacaaagttctgtcttgtctttatagtaatatgtcctcacaagtgtctgccctccgactccctagtgaacaatagagaaaaacaaatatattttccagttcagcttaattttctaaacaaaaatcaacacactgaaagggatgttctatcttttaagctgagatcacagattgcttctctgtattaaataatctagaagttagggggctggtcatatttaccatgtatagtgttataagcagttaatttttttggctatatttgtaaaatttgttcttttatatttcatgtcaaattgaaaaatttatttcttcactgttgtacctgtggaaatacaagccattttacagggggaaaaaaatcttgaaaagctattaaacaaatctcaccatgtttgtaa

SEQ ID NO: 7325 - DNA, 806 bp, Cricetulus griseus
cttgcatcagagccagggaaacagctctgatttggaaaactagacatctctccccaagtacccagtagagaaccagaagttatcttctacagaactgtggaatgtgcacttgggagtcccgaaaagcagccagaagatgctccaaactagcaactacagtctggtgctctcccttcagttcttgctgctgtcctatgacctgtttgtcaattccttctcggagctactccgaatggctcctgtcatccagctggtgctcttcatcatccaggatattgcaatcctcttcaacatcatcataattttcctcatgttcttcaacaccttcgtcttccaggctggcctggtcagcctcctgttccataagttcaaagggaccatcattctaactgctgtgtaccttgccctcagcatctccctccatgtctgggtcatgaacttgcggtggaaaaactccagcagcttcatttggacagatggacttcaaacactatttgtattccagagactagcggcggtgctgtacttctacttttacaaacggacggctgtgagactgggagacccccgctttttaccaggactcactatggctgcgaaaggagttcatgcaagtccgaaggtgaccacttcatgtcccgttgatgaatgcctttccttcctggtagaaacctcctgggctgctctccagggaaggacagcccttggcaccaggaaacatggacttcctaggaacatgctcaagccagctgtgctcagcattcaagaaggaagactctccagacatggttggaaactgaggcagg

SEQ ID NO: 7326 - DNA, 804 bp, Cricetulus griseus
  modified_base (796)..(796): a, c, t, g, unknown or other
ctccaggtaaaggaaaaaggaaacagtacctgaatcgagttgcattcaaatgcacagaacaggaaagcatttgtctcaccaaattggacagtgcatccaagaagcttagtaaagagaaagaaaagagtacagcatgtgcacccatgacaaaagactacacacacaagcccatgttggagtttaaattatgtccagatgtgctattgaagaatacaagctccattgacaaaggggatgatccaaggcctgggcctgagaaggagcgagcacctgtgcaagtttcaggaataaaactacaaaagaacaaggacaaagatgcccgaatcaagtgaacaaacagatcgggctgactcaagactctctaagagaagcttcagtgcagatgaatttgaaactctacaaaacccagtaaaagactcaaatgtcatgttccggactttcaaaaagatgtacctggagaagagaagcaggagcctggggagcagtccagtgaagtagcttcgggatagagtggttttgcttttaccaccaggaagtcatctttcttttcaggctcccttgctggaaataactcaggactttcacatttggaattctcagccaaggagttcagttacagcttatgtttctcattgatactgttgtgactgaaatgttggattagctgctggtgagcaggcactttttttttttttttttttgagacgagggtttctctgtagctcttgccttgaattcagagatccacctgcctctgcctctgagtgctggaattaaaggaaataactacaaaaanaaaaaaaa

SEQ ID NO: 7327 - DNA, 804 bp, Cricetulus griseus
gaggtggagtacctgcagtttgcctttcggtggatgaacaacctcctgatgcgggagctccctctgcgctgcaccatccgtctgtgggacacgtaccagtctgagccagaagggttctcacacttccatctctacgtgtgtgcggccttcttgatcaagtggaggaaggagattttggatgaggaagactttcagggcctcctcatgctgctgcagaacctgcctacaatccactggggcaatgaggagatcgggctgctgctggccgaggcatacagactcaagtacatgtttgcacgacgccccaaccactaccgccgataggtgctgtctcccccggggaccagactgcccccatctctgatggctttcatcactgtggccactgtgcaagccgtggaccccggccaggaaccactcctgctgtcaaagctcactcccaccgcgtgtgtgtgtttgagtgcgtgtgcgtgtgtatacaggcctatcagcattttgtcacatgtctacatttgtgtctagaataacccatcagaaccagttgggaaggaccctagggaccaagcagctgatggtcccttgagagggaccagggcaggggagggagaaagagggtttctttttaaccacctcttcaaactctttttccagggtgaaccactccaagatattatgtataaattgtgttattatgtatatggtaaaggtgtacaaattttatgtcctctttgtagcagatatgattttatatttatagtgtgcattgacatgtgaaaagcaatctaggtcattagcacagacgaa

SEQ ID NO: 7328 - DNA, 804 bp, Cricetulus griseus
ttgcccaggaggctggagaaggtctcttcacttacgtgttccggcccatcccaacacatgcgcaggcaccaggtgacttcagcccagttgtggttccacacagggctagacaggaagaacaccgaggcctccaatagttctgggaccctgctagacctgctggtgctgtcatctggggggcccatggctgtgcctgtgtccttgggacagggccctcctcgctgggctgtactgcacctagcggcctctactctccccctgctgacccaccctgtcctagctttgctgctgcgatgccctctctgttcctgctcagctcgaccagagaccacgcctttcctggtagcccatacccgggctagaccacccagtgcaagcgagagggcccgacgttcaactcccctcgatgccttggccttggtctcctgcagctttgcgtctactgcagaggcctccggaagaaccttctgcccacgcctactgtcatcgaggctgctctaccagggagcatgaggtccctacgtgtccgaaccacctcagatggaggttactctttcaagtatgagatggtacccaaccttattacacaacactgtgcttgtatctaaaagcaccttgtttcctcatcccacagccaatagccaccattatccctcccccatcccccatcatcagctaggacgaaagcagaatgtggaaaacagacggtttccatgtcctcttccctacactttcatgtctgagggcccagaccctattccaccccgatcccatcccgtggataacagtaaagaaggaagtgtg

SEQ ID NO: 7329 - DNA, 804 bp, Cricetulus griseus
tgcactgatggtctttggggggagacggagcctccagctgcccctgctgccctcctcaaagtgcctggagcaggaacaactcccaagcctgtgtctgtggcctgtactcagctggtattttctggcccaaagctggctgcccggctcggcccccgcccggttccccctccaaggcctgaaagtactgggcctgtgtgtccaggccgggcccaacagagactggagcaaaccagctcatccttggcggctgcactgagagcagctgagaagagcattggcacggaggagcaggagggtcccacagcggcctccaccaagcacattctggacgacatcagcaccatgtttgatgctctggctgaccagctggacgccatgctggactgagcaaggctggcttgtcgaccctccctccctcctgtggtaccaccagtggcccaacatggaagactaccctgccaccccaggaacaggaagagggttggttgggctggagtacctatccttccacagcagagaccttcctagactttaagcagtagctgtcagacccccaagggggctgagaagacttgtcagaacctgactgaggggcctcagctgtgtgggagcaaagcccctcccgtgtacagctgactgctcagctttggcccctgaacagggaccctggtaagagcattctcctctgggaggaggtggcagcagggctttgtggatccatctccctacctgtgtctgacttctcagtgcttaagggaattcttctggccacccactgagctgctctagggctctgtgaggctg

SEQ ID NO: 7330 - DNA, 803 bp, Cricetulus griseus
atttggattggtacgagaagccggaagaaactcatgctccccagatagaccccgagaccgccatcacgccaccccaggaaccttccaatcctccggagcccttttgcccgagagacttggtgccggtggttttcccagggcccgtgagccaggaaggctgctgtcagtttacttgtgaacttctaaagcatatcatgtaccaacgccaacagctccctctgccctatgaacagcttaagaacttctaccgaaaatctccccaggcagaggccactgtaaggaagaaacctaggatcaccactgaggtgagcagcaagaagtgtcagcagactctggcagaactggagagtgtcctcagtcacctagaagacttctttacccgaacactggtcccacgggtgttgatccttcttggaggcaatgccctcagccccaaggaattttatgaacttgacttgtccaggctggcccccttcagtgtggacgagagcctgaacacagcagcttgtttgcgccgtctcttccgagccatcttcatggccgatgcctttagtgagctgcaggctcctccactcatgggtaccattgtcatggtacaggggcaccgtgactgtggagaagattggtttcgacctaagctcaactaccgagtgcccagccggggccacaaactcacggtgacgctgtcctgtggcagaccttccatcccagccatggcttcagaggattacatttggttccaggcaccagtgacacttaaaggtttccatgagtgactgaatgaggacaatggctgaattctc

SEQ ID NO: 7331 - DNA, 803 bp, Cricetulus griseus
catggagggcgacggccccgtcgcctcggtcccgcagtaccagccggcctgccctgcgcgggacgcgtgtgtctacagcagctgctactgcgaggagaacatttggaagctctgtgaatacatcaaaacccatgaccagtatcccttggaagagtgttccgctgtcttcatatcaaatgagaagaagatggtacctatttggaaacagcaggcaagacctgggaatggacctgtgatctgggattatcatgtcattctgctccatgtgccaagggaaggacagagcttcatttatgaccttgactcgattttgccatttccctgccctttcaacatttacgtacaagatgcccttaagtctgacgatgacattcatccacagttcaggaggaaatttagagtggttcgtgctgattcctacttgaagaactttgcttctgaccgctctcacatgaaagattccagtgggaactggagagagcctcctccagccctacccctgcattggactccaaaatgaacctgcatgatttcatcagcatggaccctgaagtaggatggggagctgtctatacactgtctgagtttgtacagcggttcagcagtaaaaactgctcagcctgatgctagaatgtggaactgaagaggtcccaggatctgaataagccatccttccatttaagggagcaccatggtgcaggtgctttggaggtctgtttttcccattaaacttgagcggaaacattaatgaacacattaaataaaattaacttaaaattaaaaaaaaaaaaaaaaaaaaaaaa

SEQ ID NO: 7332 - DNA, 803 bp, Cricetulus griseus
cttatagctgcatacatcatacgattcaagccagaatacaagattgctgatcccatctgtacatatgtattttcattactggtggctttcacaacatttcgcatcatatgggacaccgtggtgataatactggaaggtgtaccaagccacttgaatgtagattatatcaaagaatcattgatgaaaatagaagatgtatattctgtggaagatttgaatatctggtctctcacttcaggaaaatccactgccatagttcacatgcagctaatttactttgttgaattttattgagtccatttaaaattataaattgtttgaatttcaaaaacttttagaatgtaaactaaataaaacaatgataagcatatgagtaagtggtgggcattgaagtggctgcctgggcatttgtggcctttaggtgtctaggaagaaagggaatattacctttatacttaatattttgtcttcagcccaggtggcccacctgtcagtatttgtctttaggcaatccttccccagagtggacatagtcaagatcagatagatgcgtagcgtgtctctcatttttcagagagaactttcaggcagtacttagaaagatctttccaggcgagaaagggttttaaaaccacagatcatcccctgcccagatttctgtatgttgtacttagtagagcatatgagacagaaatagactgagtagccactgtgaagggctttgggtttctcaaaagctagttagcactcttagagattttgatcctgcagcacatccttcagctacatttggctttatgtat

SEQ ID NO: 7333 - DNA, 803 bp, Cricetulus griseus
gagcgaccttgagccctcgtaagcgacatggcggttctcttaaagctgggagtcctctgcagtggccaaggaggccgagctctgttgctccgaagccgggtggtcaaacctgcttatgtctcagcgtttctccaggaccagcctaccccaggatggcatggcacacagcacattcacctgtcaccaagctaccattctggttccaaggctgcatctctccattggactagtgagagggctgtcagtgttttgctcttgggcctgcttccagctgggtacctgaatccctgctctgtggtggactactccctggctgctgccctcaccctgcacggtcactggggccttggacaagtggtgactgactacattcatggggatatatcgaagaaggctgtcaaggcaggcctcttggcggtctcagctctgacctttgctgggctttgctatttcaactaccacgatgtgggcatctgcagagcagttgccatgctgtggaagctctgacctctgcagtgcaacaccttggattgtatgccactttgcctctgctctgtctatgccgttcagctcccagtgagcagggcgtggagaagtccattggtgtcagaatttcttctaattacatggttattttgagaattcatttgttgatggaaaggtttaagaggagttaggctcaactagtgctgagtctgggttccatattcctgagtatggtggttgcctgtgccaagactcacagtgtgagtgcacatttcatgagctcatgttgcctttaactaccatttcctgagcagagc

SEQ ID NO: 7334 - DNA, 803 bp, Cricetulus griseus
cgatgccgaaatccaagcgggacaagaaagtttccttgacaaaaactgccaagaaaggcttggaactgaaacagaacctgatagaagagcttcggaaatgtgtggacacctacaagtacctctttatcttctctgtggccaacatgaggaacagcaagctaaaggacatccggaatgcctggaagcacagccggatgttctttggcaaaaacaaggtgatgatggtggccttaggtcgaagcccatctgacgaatacaaagacaacttgcatcaggtcagcaagaagttgagaggtgaagttgggctcctttttaccaaccgcacgaaggaggaggtgaacgagtggttcacaaagtatacagaaatggattttgctcgagctgggaacaaagcaactttaactgtgagcctggatccaggccccctggagcagttccctcattccatggagccacagctgaggcagctaggcttgcccactgcccttaagaaaggtgtggtgaccctgctatctgactacgaagtgtgcaaggagggggatgtgctgaccccagagcaggcccgtgtcttgaagctttttgggtatgagatggctgaattcaaagtgaccatcaaatacatgtgggatgcccagtcgggaaggttccagcagatggacgatgacctacctgagagcgcacctgagtctgagggagattctgaggaagaggatgacagctgactctaagatatgggactaagaccttccagcaagttctggaggatgctggggcaggactttgtttctacaaagaataaaatt

SEQ ID NO: 7335 - DNA, 803 bp, Cricetulus griseus
agcaaaagcccccggggaggtgtcgcagggagtggagaaacctcgctgcctcatgaggggaaccctcagatgtcactgcagagcccctcctccatggccagctacagccagggcccagggtctgtggatggtggagcagtggcagcaggggctcccggccgagaaagcacaggagggtcgccccctcccctctacaacaccaaccatgacttcaaattctcctacagccacagcagcagccaccaccacaactgcagccactatattattattattattattttttctgaaatagaaaaaatgtttagtgggcagccagagctgctgaagtgtggggctggggtctggccttaggccccctgatgatccaacccttctccaccaggcttaggcttgcaaaatggcacaggacaaacttgattccctttgggcctcagtttcccatcccctccatgaagtggaaagaaaactactttattttgttggtccagtgttgctggacatgaagttttgtcattgttgttgtcttgggtgatgtgtgcaaaattgtaggagtcactgcctatcagaggaaataagggaaaaagcagaggaggagggcaaaaaggagaggtcatttggtattgatccacctatcctaggcttcctctcctcaactcccatgtttctggtttggtgagttctttataccacccttaatgctttgctattggtgcaggctgggaagagggtgtataggctttaataaaaaaaaagaaaagaaaaaaaaaaaaaaaaaaaaaaaaaaaaaaaaaaaaaaaaaa

SEQ ID NO: 7336 - DNA, 803 bp, Cricetulus griseus
gagtcctggttgcagagcttatcaagttttacttccccaagatggtggagatgcacaattatgtccctgccaactctctccagcagaagctcagcaactggggtcacctgaacagaaaggtgctgaacaagctaaacttctccgtccccgatgacgtgatgcggaagattgcgcagtgttctcccggtgtagtggagctggtgctcattccgctgaggcagcgcctggaggagcggcagaggcgccagaagctgggtgctggctccttacaggagctggcttctcaggatggcagtggctacatggatattggtttgtaccagaaggctcgaggagatggtgccccagctctggggggagaacagctcagagggggccggccgcaggcgcctcgaccccctgggtataaccaggcgctgccgggcgatccgagcttcgtccttcagattgctgaaaaggagcaggagctgttggcctctcaagagacggtgcaggtcctgcagatgaaggtgaagcgtctggaacacctgctccaactcaagaacgtgcgcatcgaagacctgtcccggagactccagcaggcggagcgcaagcagcggtgagcggtgcctgggctgcggggcttcccagtacccgccggagcctcgacgccgcgacttacccactcacctgcggaggcaggattgggagggcggagcgagctgctcactcgcgccctctgcagctgcggcgcccggctgcggagggttcgggcaaacgtgggggtgctcaaagccgaggcctgggtttgatcctcctcctta

SEQ ID NO: 7337 - DNA, 802 bp, Cricetulus griseus
ctctgcctgttgtggctcaacccgcagggggtgctactgccgttggccatccagcccagactccagggcctgagagccccatcttcctgcccactgactgcgagttggactggctgctggccaagacgtgggtgcgcaactctgaattcttggtgcacgagaacaacacgcactttctgtgcacgcatttgctatgcgaggccttctccatggccaccctgcgtcagctgcccctctgtcatccagtctacaagctactgcttccccacactcgctacacgctgcaggtgaacaccatcgcaagggccacgctgctcaacccagaaggcctcgtggacaaggtcacatccatcggtaggcgcggcctcatctacctcatgagcacagggctggccccacttcacctacacggatttttgccttccggatagcctacgggctcgcggtgtcctgaacatccccaactaccactaccgggacggatggcctgaagaatttgggacggctattgagaggtttgtctcagagatcgtgagctactactatcccagcgatgcgtcggtgcagcaggactctgagctgcaggcctgggtgggtgagatttttgctcaggcgttcctcagccgggagaattcaggcttcccaagccggctgtgcactccaggagagctcgtgaagtatctcactgcaatcatctttaattgctccgcccagcacgcagcagtcaatagtgggcagcacgactttggggcctggatgcctaatgccccatcatctatgagacagccccacctcagaccaa

SEQ ID NO: 7338 - DNA, 802 bp, Cricetulus griseus
  modified_base (144)..(144): a, c, t, g, unknown or other
gaagatgtgacaatccaggacattgtggacttttctgatgtttaccactctaatgaagagtatttcaggaaactaagagagctaaaggccgccatgcagaaaccatggcaaaattagagaaaatgtaccaggacaagctaaatntaaaagacgtctggccagtgatcaccagggaagattattctagtgtctcctctagttctgtatcggaacagaactgccctccccctggcttagtgacatcgtattcagagcctgacataggccagtcgccctccctgtccactacttctgacgaggagctgcccagcctggagagagaggccccggggaaagcaggtcttcatgaatactcttgtgactctgctaaaagacagaaggtcttggcagaccttagagcagatgaagaaaatctaaaagaaatactctggcctcatccatctccaaggcttaagtcaccagtaagaagtgcatgcacaaagcccaggccttgccggtgcagccctccgatgcctaccctgtcttcccgagggcgggaacaagccatcagacagagtgaaaaggcaaggatgaaagaatatcggcgagaactgcaagagcgaaatgaaaaactgcagcagaggccaatgctgttcgaaagagtcgcccaggttgtgtttgttggaatgtagagccatccccagctttctgtttctcagggtctctagtttccaagcttgagcctcatctttctcctgtgccctagtattgctgagacgctgtttctggggcagcttcattcaatccactaaggaagtaattt

SEQ ID NO: 7339 - DNA, 802 bp, Cricetulus griseus
  modified_base (789)..(789): a, c, t, g, unknown or other
gcagcatggctgtaactggtggcagactgctcgctggtgctctgaggaagccagactcctggatccgactctggggtgtgcttcaagggacatcttcacacaaactctgtgcttcctggaatcgatacttatatttttctagtaccaagttaaacgcatcaaattataagacacttttccgtaacattttccctctgcaactcccagggcttttagtatctccaaaatgtattttccattttccatgcgactcaaaagcaatattaactccagaaaatccactaaaaagactctgcaaaaagatgcagatgaagaggactctgatgaggagacccatctccctgagaggagcgagccggaagaagagcttgaggatgacccaggtgtggtcaaggactacaaagacctggaaaaagtggtacagtccttccgatacgacgttatcctgaagacgggccttgatattgggagaaacaaagtagaagatgcattctacaaaggtgaactcaggctgaacggagaaaaattatggaagaagagcagaacggtgaaggtgggagatacgttggatctgcttgtcggggagaacaaagagacggggacagaggtcgtgatgcggatcctcctgaaaaccatctatgatgagaagactgagagtgacaagcaccgtgtggtgctgcgacggtggaagagcttaaagctgccaaagaagtctaaataagcatgcttctccccacggctgcttcctcgtggtcaggggagaggccggcatgaaaaggcgcttttacngaaataaagttct

SEQ ID NO: 7340 - DNA, 802 bp, Cricetulus griseus
gtcccggtgtggccagcggcggccgtgcggacggtcggtgtcggcggcgggatgtgctcggccggggagctgctgcggggcggcgccggcggcggcggggagtgcgacgaggaccgggcggcgccggcagagcaggcggaggagcgggagcccccgggcgagcccgtggcgcaggcggcggcaggacgagggcgagcaggatgttgaagatcacaaaaccacactggcaatcccattggagatgactcatggagttgcagggaagtgatggagatcttgtaaagttccaataaaacattttggaagacaaaggaaaaagcagctaagaataagttttcattggaaaactgttccacccccctttccattgaacagtcccattgggggaagatgtttgtttctctgtcatctctgcatcgtccaaaacaaagtaaatggtagctgccacataccgccgtagtgccgtgctgtttccagaagactgaaaataatatatttattattggcggtgaagttttggggttaaatgtaagtttttatgtgttatacttaggccgtcatggcatggagtttgtccccaagagaatgatttctatcttataaaagaaaaaaaaagatcatttttctttgatacctgtattgaagaatacaagagtacagaataaaaccacatgcttaaattaagaactcggtagccacttgtaatattctaggattaaagccattggctagccaggtttttaatgtgtactatggggttttatattgaaacaagcatttctttgtatatactttgaaaatg

SEQ ID NO: 7341 - DNA, 801 bp, Cricetulus griseus
ccgggatctgaagctggtaggcgttccccttaaggttcagcgattccacacgactgcgtgtggctgcaaaggccggacgggcgccgagcacctgtggctgaagcgccatctaaaggacccgtttgtgaaggccgcaaaggtggagagttaccgctgccgcagcgccttcaaactcatggcgataaatgaaaagcatcacatcctgcggcccggcctccgggtgctggactgcggggcggctccgggagcctggagtcaggtggcagtgcagagagtcaacgccacaggcacagactgcagctctcctgtgggctatgtgcttggggtcgatcttcttcacatattccctctggaaggagcaacttttctgtgtcctgctgatgtgactgatcctggaactcgccagagaatcttagacctgcttcccagaaggaaagcggatgtgattctgagtgacatggcgcccaacgccactgggatccgagacctcgatcacgacaggcttatcagcttgtgccttacccttgtggacatggctgtggacatcctgcatcctggggggacactgctgtgtaaaacctgggccggaagaaaaagccacctgctacagaagagactgacccaggaattccagaacactagggtcgtgaaaccggaagccagcaggaaggagtcttcagaggtatacctcttagccacacagtaccggggagggaagggcagtgagcagtgagtctgccctgcctttctgggagtactttcctgagagtggctggcatctaagatgcattgtggatatga

SEQ ID NO: 7342 - DNA, 801 bp, Cricetulus griseus
catggcgcggaaaaagtgaggccccggctgatcgccgagctggcccgccgcgtgcgcgccttgcgcgagcagcggaaccagccgcgagattcgcagctctacgccctagactacgagactctgacccggccgcactcgggtcgccggctgccggtgcgcgcctgggccgacgtgcgccgtgagagccgcctcttccagctgctcgcccgcctcccagtgttcggcttgggccgtctggtcacccgcaagtcctggctgtggcagcacgacgagccgtgctactggcgcctcacgcgcgtgagacccgactacacggcacagaacctggaccacgggagggcctggggcatcctgaccttcaaagggaagactgaggataaagctcgggaaatcgagcaagtcatgtaccacgactggcggctggtacccaagcacgaagaggaggccttcacagccttcactgccaaaccagaggacggattgaaccctgtcccctacccacctttgctgcgggccatgatcctcgctgaacgacagaaaaacggggataccagcgtccaggaaccgctcctgaacctagaggggactcgggtgcatccttgggactaccctgcaaaacaggagaccaaagggagggccaagggcaccccagtctaactgccatccatgatgggcagagtggccatgtttgttatttgatgaacaagtatcttagactgtgacaaacatcccctttggtggagagttagaccctacagccctgacacacctgccaatgaatgatgggcagttgacaggctg

SEQ ID NO: 7343 - DNA, 801 bp, Cricetulus griseus
gtcatggccgcctccatggctacccgggccaggagtctgctgtgggctggcgccgcttggctgcgtccaggaggcatcagagagctactccggccgcgaattgaagggggcgccccggggcgtgacttcagtctctctcattaccggagcacggtcatcgtggagcgctggtggaaggtgccgctcgccaaggagggccggaagccgcgcctgcaccggcgacaccgcgtttataaactggtggaggacacgaaacaccggcccaaagatgacctggagctcatcctcacgcagtctgtggacgaaattggagttcggggcgatctggtctcagtgaagaagtctgtgggtcgaaataaactccttcctcaggggctggctgtgtatgcatcccctgaaaataagaagctgtttgaagaggagagattgctgagacaagaaggaacactggagaagatccagacgaaggcaggagaggcgacagtgaaatttctgagaagctgtcatctagaggtgggaatgaagaacaacatcaaatggaagctaaatcctgaaatagttgcccgccacttcttcaagaatcttggtgttgtggttgccccacatgctctgaagttaccagaggaccctatcacgcggtggggcgagtactggtgtgatgtgactgtaaatggactcgacactgtaagggttcctatgtccgtagtgctctttcagaagcccaagaccaaaagatacaagcactggttagctcaacaagctgccaagagcacagcccccaccagctcccagtcagtctga

SEQ ID NO: 7344 - DNA, 801 bp, Cricetulus griseus
tgccagccgccgcaagctactatcggaccgcttcttccaggcagctgtggttaggaccttctcttcggactgagcaggaaaggggaagcaagaatgtctgctttgggggctgcagccccgtacctgcaccatccagccgacagtcacagtggccgggtcagttttctgggggcccagccctctccacaagtggcggcagtggctcagctcatgagggacttggacaggagcaccttcagaaagttgctgaagcttgttgtgggggccctgcatggaaaagactgcagggaagccgtgcagcacctcggtgccagtgccaacctgtcagaggagcgtctggccgtcctgttggcaggcacacacacactgctccagcaagctctccggcggccccctgccagtctgaagccagaagccttccaggatgagctccaggaacttggcatccctcaagatctgattggagatttagccagtttggtatttgggagtcagcgccctgttctcgactcagtggcccaacaacaggcgtcctggctgccccacatgtcttacttccggtggcgggtagatgtggccatctccacaagtactcagtcccgctccctgcaaccgagtgttctcatgcagctgaagctcaccgatgggtctgcacaccgcttcgaggttcccatcgccaaattccaggagctgcggtacagtgtagccttggtccttaaggagatggctgaactggagaaaaagtgcgagcgcaaactgcaggactgaaccttggtattgtgggtgctgaaactggtacca

SEQ ID NO: 7345 - DNA, 800 bp, Cricetulus griseus
gtgccgcacccaagaagaaggtcagcaaccacatcccggaaagatggaaagactatcttccagttggacagcggatgcctgggactcgtttcattgctttcaaagttcctttgcaaaagaaatacgaagcaaagcttatgccagaagaatgtttttctcctttggatctttttaataaaattcaagaacaaaatgaagagcttggattgataattgatttaacatatacgcagcgctattataaagcagaggatttgccagaaactatttcttacataaaaattcttacagttggccatcaggtacccaacagcaacactatttttaaattcaaaagtgcagttaaagagtttttaaagaaaaataaagacaatgacaaacttattggtgtccactgcacccatggcttaaacaggactggctcatgaggccagatgatgcaattgaattattcaacaggtgccgggggcactgcatagaaagacagaactacattgaaagcctgcagaatcgtcatgtcagaaagtaccggaatgttagtacatctaggtcaggtggtcttgaagactcagcacatcttatggaccaagtcaacagcactaacaagcctgtgagccaaggacctcggaacaaccagcctgcgggtcgtccaccaccttcccggcattttcatacccagacccagaatgcacagcagtcgttcagaaaattttcacaaaacaagagtgtttaccagagaggcctcatccctcctcctggtccagctggagaggactattcacaaagaaaattcttctgga

SEQ ID NO: 7346 - DNA, 800 bp, Cricetulus griseus
  modified_base (788)..(788): a, c, t, g, unknown or other
ttccaatcacacacacacacacacacacacacacacacacacacacacacacacagaggccatggtaagatgtgttcctgccagtggagaggaatcacaggcgagaccaagtgctgataatccattcatttcttttgtttttgaaaacaagctcagagtccacttgaccatggagattctttgctaattgggattgtttattgcccatttggctgggaactgcaagttcaggatgctctgggagaatgcaatttgttaccctgaggagaattcatgatccccacccactcagcctaaagttgcccagctgtgcccaaagccctttctttcttgggaagtgatcacccttgttgccgagctggccctgtcagtctcctgcagagcccagcagcagcagccaatgccctaggacgtctccctgacattctcacacactttaggggtactaagagaagcacgcccatttatttttgtttctattagaaagaaaggcaatgccaggtgtggtggcttacgtccacctgtaattccagcactgagaggtggaggctggaggatcaggagttcaagtccagcctctgtgcacgtaagaccttgtatcaaaacaaaatcagcaatgcaaaaacagcatatgaaaagctcaggttctctcccaaggctacagcaggaggggcagaaggatggagacaggctgattctgtaactaatgtaattaagacgcctagagatagcctgtggtaaggagggtgtggtctgccatgctgatcgacaatgactaaaaaaaaaanaaaaaaaaaaaa

SEQ ID NO: 7347 - DNA, 800 bp, Cricetulus griseus
ctgcatgtcacatttaagtctcatcgtgttcctgcttctggagaccttagggactgtcgtcaaccaggggcttctggggagatctggaccattttctatgaaccttccactacaatctccatctttaagaagaagctcaagggccagagccaacaagatgaccggaatcccctcgtgagtgactaaaacctcacgtgcctttgtttactgtcctcaccctacctccaggccactttcagcctagctgctctggtatgagtgtggggagacttgtcagacctgccagccacaccccaccctgtctgccaacagaacctgggggcttcacacaggctcttgtcttgccatgttggagctgagcacactggctgaggctgggggagggtgaggggggcaggagacagtgggaggtgtcagagggacatatgcaaggaatcctttcctgcctgcacagggagctgccatccctgccgccctcgtggcaccaagaccttccatttccaaactcaccctccagcagggatctgactttggacaacaacgctttatttgtaaatatgctcttaatatgcaactttgagaataaaatagaaacatcgtgtaatttaaaatataaaatgaagtgtagacacactgtatacaatttaatatatatttttaggattttgttatttaagaaaatggaatgtgatggtacttaacttttactaaaaagagaaaatgttattttactgttgaagaaataatattctcattgttgtagaaaaaaaaaaaaaaaaaaaaaaaaaaaaaaaaaaaaa

SEQ ID NO: 7348 - DNA, 800 bp, Cricetulus griseus
gtcatcatgccgtccctgttgctcctgctgcccccgcgcctatgccggctgtggccctacagccctcccacccggcttctctcagccgccacagagcagcggtcttctccgtctaactactacgaactgttgggggtgcatcctgatgccagtgctgaagaggttaaacgtgctttctttaccaagtccaaagagctgcaccctgaccgagatcctgggaacccagccctgcatagccgctttgtggagctgaatgaggcataccgagtgctcagccgtgaggagagtcgtcgcaaatatgaccaccagctgcattcagccagtcccccagaatcttcaggaaccagagcccagcctaagtatacccaagagacacacagttcctgggaaccccccaatgcaaaatactgggcccagtttcacagagtgaggccacaggggcccgagtcaaggcagcagcagcataaacacaaccagcgggtactggggtactgcctcctgctcatggtggcaggcatgagcctgcactatgtcgctttcaggaagctggagcaggtgcaccggagcttcatggatgaaaaggatcggatcatcacagccatctacaatgacacgagggccagagccagggccaacagagccaggattcagcaggagcggcagcagagaccgcagcctcagaaaggaccctccccgtctccagaaggccctgggatcgtaccccaggatagcagcccttgagggggtcacttaggtggacctgcattggtcatctcctagctgcctgcccaggactacac

SEQ ID NO: 7349 - DNA, 800 bp, Cricetulus griseus
gtcatctgccccggtgaggctcaactccgttgtggggctgtccgaaacgctccggaccacaagccggactccacccagcagggagagaaaggaaacagattgggcagagtaccgagcctcacccccagcagcggagctcgaagcccaaacatgggcaacgtacaggagcggccatcggagaccattgaccgggaacggaaacggctggtagatacattacaggctgactctgggctgctgctggatgcgctggtggcccggggtgtgctcactgggcctgagtatgaagccttggatgcactgcctgatgcagagcgcagggtgcgccgtctgctgttgttggtgcaaagcaagggcgaggcagcctgccaggagctactgcgctgtgcccagcataccgtgcgtgtgccagacccttcctgggattggcaccacgtggggcctggctaccgggaccgcagctatgaccctccatgtccaggccactggacgcctgaggtacctagttcagggaccacatgtcctggtctgcccagagcttcagagcaagaggaggtcggaggtcctgagggctctgaggcagtgcaatctgggaccccagaggagccagaactagaagctgaagcctctgaaggggataaaccagaactggaacaacaaatggaaccggaaccagaaccagaggcagaaccagagcctgaactagaaccggagctggagccagagccggaactagagccggagccagagccagagccggaactagagccggagccactactactactactactactact

SEQ ID NO: 7350 - DNA, 799 bp, Cricetulus griseus
cttctccagggactcagtcatttaaagattgagaccaagactgaaagaatggctgacctccatcagctcaaggacaatgaggtattgatggcctttgcctcctatgcaactattgttcttaccaagatgatgttcatgagctcggcgactgcattccagaggctaaccaacaagatttttgccaacccagaagactgcgctggatttggcaagggagagaatgccaagaaatttcttcggactgatgagaaggtggaacgggtgcgaagagcccacctaaacgatattgaaaacatcgttcccttccttggtatcggcctcctctactccttgagtggtccagacctctcaacggccctcatgcacttcaggatctttgttggtgctcggatctaccacacaatcgcctacttgactccccttcctcagccaaacagggccttggcattttttgctggctatggagttactttgtcaatggcttacaggctgctcaagagtagattgtacctgtgaaggggattgtagttcttaacatctgaatgcttttatttaaaaaaaagaattctgtatttccagtgtagtcaaacaatttctaaggttttgtgtgggagaggagcagagaaattaggaaccagggagactggcatccatagcctctattcttattttgtaatagggatagaattttaatataatcaaacttaaccatgctgcctaactcctacatagctttgttgtaagtcttgattatatcataatttgtaacatttatctacctttcatattgtgcatctat

SEQ ID NO: 7351 - DNA, 799 bp, Cricetulus griseus
gggtaacaatgatgacctgatcctctcctgctgcctgcactactgcaaagacaaggctaaggattacatgcccaccagcaaagaggagcccatccgcctgctacgggaggtggtgctgctgactgatgaccggaacctgcgtgtgaaggcactgacaaggaatgtgcctgtgagggacatcccagccttcctacgtgggcccaggtgggctggaggggggccacacgtcggggccccacccccgatcggaaccattccctgagaggccactaggcgcccagtgtagcacggaagatgtccacgtgcctgagccaccaatccacccagacaataaaccatcctcttccaacctcacgccgtggccgtgcgtgtgggggagtcgctcctcacacgagcccctcccaagggtcaggcggaagctgctgggaccctcctaggctgccaggtttagcagggaggtgactggctacagtgacaacaggtggacaagccagataggccaccaagctctcagcctttctccctcctgtctagtttcagggctggagggaggcctactcaccccggggacccagccactctgtagtggcactggggcagaggttccagagtttccatcgtatgcaagcaaaatgatagagccctcagtctgcagaacctctgtcctgaatgtctgagaggtcttttgctgtcaggaagagagtgcccaggggggtcaccatctctctgaggcctaaatcccctacggacccacactgggttctgtccataacagcataacagcagccctagcccttca

SEQ ID NO: 7352 - DNA, 799 bp, Cricetulus griseus
acgcacgcgcgctgcgcccaacatgagggtcgcgggcctgatcagtggtgggaaggacagctgttacaacatgatgcagtgcaatgctgcagggcatcacattgttgctttagcgaatctaagaccagatgaaaaccaagtggagtcagatgagctggatagctacatgtatcagacagtgggtcaccatgccattgacctgtatgcagaagccatggctcttcccctgtaccgcagaaccataagaggaaggagcttggagacaggaagaatgtataacacatgcgaaggtgatgaggttgaagatctctatgaactaaaagaagaaatagagggggtatcagtaggtgccatactttctgattatcaacgtgtgcgagtagaaaatgtatgtaaacggcttaatctccagcctttaacttacctttggcagagaaaccaggaagacttactccgagagatgatagcatccaacattgaagccattatcatcaaagtagcagctttgggtttagaccctgataagcatcttgggaaaaccctgggtgaaatggagccttatcttttggagctttctaagaagtatggtgtccatgtatgtggggaaggtggcgagtatgaaaccttcactttggtattgccctctatttaagaagaaaatcattctggactcctcagaagtagtcatacactctgctgatgcatttgcacctgtggtgagttcggggccagcctgggctacagcgtgcgttccacgacagccagggctgttatacagacaaacactgtctcaaaaaac

SEQ ID NO: 7353 - DNA, 798 bp, Cricetulus griseus
ctgtgtcctcaggagtgtcctcacattgtcttccaagccatctctgggcccctggctgcagccactgcctccatcctcaccaatcccatggacgtcatccgaacccgtgtgcaggttgaaggcaagagctccatcatcctgaccttcagacagctgatggcagaagaggggccttggggcctcatgaagggcctctcggcccgaatcatctcggctacaccctccaccatcgtcattgtggtgggttatgagagcctcaagaaactcagcctccgacctgagctggtggactcaagacactggtagacagtggtggacaaagaggctgtggtttcacacattattctgggccagggtagagcagggaggttagtacccttgtgaatgccaccattcttgtacggtgttaaagtctccctcctcctgcccttcccccccattcctctgttccctctagtttgaaaggacaatgctcgtaaaggtaaagggacccctctcctgacccctactttcccaaggtcaggggctaggattggccttggtgacgatgggcaagtgggcgcccgttttccaaaactggagagcaagacagccagaaattttaacctgttggtccgtaacctaattatgaaactttagaaaagataggaaaactggagggacatgggaaagaaaatgcacttaagcatttggtaagaatggacttttgaggatattagctgcgaatattcactgttgcactgtatgaaatcttgaaatgtaattaaaagttttattgaacccctaaaaaaaaaaaaa

SEQ ID NO: 7354 - DNA, 798 bp, Cricetulus griseus
gatggcgctgccctttgcacgctgctggaactcgtaccgctggggagccaagcgctggggggtccctgccggggacgcccggagaggcatcagtttcaaactggaagaaaaaactgcccacagcagcctggcactctttaaaggtgacacaggtgtcaaatacggcctggtgggactggaacccaccaaggtggccctgaacttggagcgcttccgggagtgggcagtggtgctcgcagacaccccggtcaccagtggccgacactactgggaggtcacagtgaagcgctcccagcagttccggataggagtggcagatgtggacatgtcccgggacagctgcgtcggtgctgacgatcgctcctgggtgttctcctatgcccagcgcaagtggcacagcatgttggccaacgagaaagccccgattgagggtattgggcaaccagagaaagtggggctgctgctggactatgaggcaaagaagctgagcctggtggatgtgagtcagatcgccgtggtccacacactacaaacggatttccgcggcccagtgacgcctgcgtttgctctttgggatggagagctgctaacccactcaggactagaagtgcccaaggggctctaatgcggcctaagtcccttaatcatgctcatgctttctgttcaaggggtctaacgctgtttttacatttgtctcaagcaagtggtagctctcacaattcagttgggagcccttgtgcaatattttagtcatcttcctctggtccctactctgtgaaagctaggtatacagccaaa

SEQ ID NO: 7355 - DNA, 798 bp, Cricetulus griseus
ggagtcagatctggacattgaagaagccaaaagtggtttctaagaaactgaaggtggtattccaagctcctgatctgagcgacatgctccaaaagtttagagagctaacagccgtccggggctactgggtggacttcacatttaaacccagaaaaacctcaatttgaatctgattcttcagaagaccacagacaagtggcatctgtgcccatttggccatttaagtgttataataatagtatcttgggctccaaatgtttctcctcaggaaaacattactgggaagtggatgtgtctaagaagagtgcctggatcctgggagtttacgctagaagacgtactttaaagtttgatgttagacgaggcaaaaatcagccaaatgttcaccacagatacaaacctcagaatggctactgggttatagggttgcagggtggatcaaagtatagtatttttgaggattcttccaactgtgatcctactgttctgaccccctttgtggctgtccctctccatcgggttggggttttccttgactgtgaagaaggcatggtgtccttcttcaatgtcacgaaccatgggtcactgatttacacattctctcagtgctgcttttcccagcctgcttatccatacttcaatccttgggactgcccagcccccatgaccctgtgtcttcagaactcctgagctttctcattctcattcatttctggtattacttcttgccttgaggctcccctccatctagacatacctgtgccattcagacatcttttcctgtggcctcgcttctgt

SEQ ID NO: 7356 - DNA, 797 bp, Cricetulus griseus
gaaaagaccattcaggcatgaagaatatcattgctgagatggaacaggcatcaagacagtctactgaagctctaattatgtgcgaacaagacatttccagaatgcgccggcaattggatgaaacaaatgatgaactggctcagattgccagggaaagagacatcttggctcatgaaaatgacgcccttcaagaacagtttaataaagccaaacaagaaaaccaggcactgtccaaaaaattgaatgatactcataatgaactcaatgatataaaacagaaggtccaggatacgaatttggaggttaacaagctgaagaatatattaaagtcagaggaatctgagaaccggcaaataatggaacaactccgaaaagccaacgaagatgctgaaaactgggaaaataaagcccgccaagcagaggcagaaaacaataacctcagaaatgtcgtaacacagttggaagcagatttggacattactaaaagacagctagggacagaacgatttgaaagggaaagggctgtccaagaacttcgccgccagaattattcgagtaatgtttatcatttgagttcagtgaagccaaattcaaagtgtcactcaccagaccgtgctcaccatcgatctcctgacagaggcctcgaccgatcattagaagagaatctttgctatagagatttctgacatgtgaaaagattctccacagctttggaaaggtcacagatacaaacggatttttttaaccaacctgacataaccttccatggcccacaagtctaccttcaaacgtaggag

SEQ ID NO: 7357 - DNA, 797 bp, Cricetulus griseus
gatggcggccttgacagcggagaattttgaggcgctccagagcctgctgaaggcctcctcgaaagatgtcgtcagacaactgtgccaagaaagcttttccagttcagcccttgactcaaagaaactcctggatgttacatgttccagcttgtctgtgacccaggaggaggcagagcaactgctccaggctctgcaccgcttcactaggttggtggcattccgtgatctgtcctctgccgaatcaattctggctctctttccggaaaatttccaccaaaacctcaaaaacctgttgacaaaaatcatcctggagcacatatctacttggagaactgaagcccaagcaaaccagatctctctgccacgcctggtggacctggactggagagtggatatcaaaacctcctcagacagcatcagccgcatggccgtccccacctgcctgctccagatgaagatccaagaagatcctagtctgtgtggagacaaaccctccatctcggctgtgaccatggaactgagcaaggaaacgctggacaccatgttagatggtctgggccgaatccgggaccagctttctgctgtagccaataaataggccaacgagctacagagctgtgctggttcagttctcagcacaagggctgacagtgggcacatggcaggatggtggggctgctgcttttcggaagcccagtgaagggaaggaagcagccaagcccattgccattctttctcttcctcattttgtttcttttcctggtgatgagcagaagcccccacctctgggaaggccc

SEQ ID NO: 7358 - DNA, 797 bp, Cricetulus griseus
gtggtgcagagtgagaagtcagacacccacactctggtgacgagcggggtgtatgcctggttccggcatccctcctacgtgggctggttttactggagtatcgggacccaggtgatgctgtgtaaccccatctgtggtgttgtctacgccctgacggtgtggcggttcttccgtgaccgcacagaagaggaggagatctcgctcattcacttttttggggaggaatacttggagtacaagaagagggtacccacgggcctacccttcattaaaggagtcaaggtggagctatgagggcagaggcctgtgggaccaggcagtctctggccctgcacagcctaagacaaaactacatccaattggccactgcagaatgagtttcttaatcattttatatgtccctaattactcctcagaatgtcacccgagacctaacggtcagaaggccttagcaccaaaggatcatacccggctctctctcagcgcatctaagctgggctggctccagcctccatcccccttgagggccatgaagttgtctttttgatggatggagaacagctaatgacagcccttggctttgtgggttgtaaagctgaatgccggcatttgatgtcaccctcctgagtggaggcagcttgtcggacccattgccaggagggggaataacggagtaattactgtactcttctttttacacacagaaatgtttatttaaatatattaaatgggattttctttcacagataccaattattctttctaattcttaaaataaaactgtacttgatttcact

SEQ ID NO: 7359 - DNA, 797 bp, Cricetulus griseus
agggtgggtggccagtgctccaggcatgtgcagagagcagggacctaactcccaggacgtaccctcaacagacaggtgtcccaggtgtgccgggagcggggagcgctcgacaaatcctccccacccccaggagcgccccacccacgccgcagcgccagccggtgcccccggcagcagtgcccagccctcggcccagcccgggtcccggctccagcagccacgtgttccggagttacgacgagcagctgcggctggcaatggagctgtctgcgcaggagcaggaggagaggcggcggcgagcacgccaagaggaggaagagctggagcgtatcctgcggctctcgctgaccgaacagtagcgccctctgctcggaccctcacccactccgcgcaggacccgggtctgcgcacctgccgtgctgctgctggagtctgcgcaccaggcttgagatgcccggggtttgatacaggcgtggagtaacttcccaagccagagccctagaggcatggccgctctccctgcttttgctgtacggtgaccccagttcgtttccctgggctcagatctgtccaagggcggagacaggtggtattgaaaaggaaatgaatccttgagaggagcatcgtccctgtcccttgctccttctggccggtcctcctccttgctcactgacccctctcccggacactgcccctaaagccttcgcatctcagctcttcaccctgggaggcagctgatcgcccttcgtgctgtgtcgctgctttgtcccagacacaaaccagcacatcaacgggcc

SEQ ID NO: 7360 - DNA, 796 bp, Cricetulus griseus
agaattccttcttggacgccttcttgcctcccgtgagttgttacccaacccgctgcaagaatgaaactcctcaagttcctaggagggatcgtcttcttcaccttcatgttttccggctactcggagcaaaatcaagtgaatgtgctgtgctcaaccgattggttcatggtcaccgttcaccccttcttgctgaataatgatgtgtatgtccacttttatgaagtgcatttgggcctgggttgtcctcccaaccacgttctcccacaattctaccagtttacctaccgcgttacagaatgtggcatccgcatcaaggctatctctccagatgtagttatctacagctctgagattcactatgcttccaaaggctcctcatctagatatgtgatcccggtgtcatgcgctgcccctcgacggtccccttggctcactaagccccactccgtgcaatctcccagcaataacatggcttcggccccgaggaatgatacgagctaccaagtgttcagcttgccggagccaagccaaggatccaactgcagttgtccaccttatgtcttcaagcaagagagcatctaagcccatcaccaggcagagtctttggaggcccatcttgtgtagtcatctgactccactgatatttctggggactagtgtgttcactcagatgatatgaggaaacccatgtagtgcccagatttggggacttctgaaaactctgtttctgaaattagaatgtagttattttctactgtcagtacaaatataactttttttttttactagtattgta

SEQ ID NO: 7361 - DNA, 796 bp, Cricetulus griseus
aagactgtgaagctacagatctgggacactgctggcaggagcggtttcggtcggtgacgcggagttattaccgaggggcagctggagccctgctggtgtacgacatcaccagccgagagacatataactcgctagcggcgtggctgactgatgcccgaacgctggccagccccaacatcgtggtcatcctctgtggtaacaagaaggacctggaccctgagcgtgaagttactttcctagaggcctcccgctttgcccaggagaatgagctgatgttcctggagaccagcgctctcacgggtgagaacgtggaagaagccttcctgaagtgcgcgcgcaccatcctcaataagatcgactcaggtgaactagaccccgagaggatgggctcaggaattcagtatggtgatgtatccctccgccagctgcggcagcctcgcagcgcccaggccgtggcccctcagccctgtggctgctgagacctgcaggagccagctcatctgttctcctggaccagccctgcccgaaggctgggacccagaaccacggccccaagaggctacggccccaatctcttccctggcctggtggggcctggcgttggggtcaagattgagccacaggggaagggggaacccatacctgctgctgtctcctctgacttggctaactattcctcctgagcccctaaccgtacctgaagaactcccagagcttgagaccagggccgtttggccccaccttcctgcctggccctgctgttgcaagtctgtgttatttattaccgggaggcctg

SEQ ID NO: 7362 - DNA, 796 bp, Cricetulus griseus
  modified_base (772)..(772): a, c, t, g, unknown or other
atggccgcgctctgtctcttcgacgtggatgggaccctgactgccccgcggcagaaaattacaaaagaaatggatgactttctacaaaaattgaggcagaagaccaaaattggagtggtaggtgggtcagattttgagaaagtgcaagagcaactgggaaatgatgtggttgagaaatacgattatgtatttccagagaatggcttggtggcatacaaagatgggaagcttttgtgtaagcagagtattcaaggtcatctgggggagcaagtgatccaagacctgatcaactactgtctgagctacattgcaaaaattaaactccctaagaaaaggggaactttcattgaattccgaaatggcatgttgaatgtgtcccctattggaagaagctgcagccaagaagaacgaattgagttctatgaacttgataaaaaagaaaatatacgacaaaaattcgtggcagacctgaagaaggagtttgcagggaaaggcctcacattctccataggcggccaaatcagctttgacgtctttcctgatggatgggacaagcggtattgcctgaaacacctagagcatgatggttacaaaaccatctatttctttggagacaagactatgccgggtggcaatgaccatgagatcttcacagaccccagaactgtgggctacacggtgacagcacccgaggacacacgcaggatctgtgaggagctcttccattaacaccagaggaatgggcctggccaacaagactgaaagggagggnggggatagaggacccagcaaagca

SEQ ID NO: 7363 - DNA, 796 bp, Cricetulus griseus
gtggcgagactgaagcagtccccattgaaggtgagattctgtaccaatgagtcccagaagacccgaagagagctggtggggttgcttcagcgactgggatttgacatctcagaagaagaggtgactgctcctgctccagccacctgccagatcctgaaggagcgaggtcttcggccacacctgccagatccatgaaggggtccgctcagaatttgatgacattgacatgtccaacccaaactgtgttgtgattgcggatgccggtgaaggcttttcctataagaacatgaacagagccttccaagtgctcatggagctggaaaaccctgtgctcatatcactgggaaagggacgctactacaaggagacctctggcctgatgctggatgttggaggctacatgaaggcacttgagtatgcctgtggtattgaggctgaagtggtggggaaaccttcccctgagttcttcaagtctgcactgcgggccataggggtggaagctcaccaggccatcatgatcggcgatgacatcgtgggtgacgttggcggtgcccagcagtgtggaatgagagcactgcaggtgcggaccggaaagttcaggcctagtgatgagcatcatccagaagtgaaggctgacgggtatgtggacaaccttgcggaggctgtggacctgctgctgcagcacatggacaagtgacagcccttcagagacaatggacaagtgcaccaccccgtgcccatgcttctttccaccactgtgccctctccccatactgccaggccccaggctacccaa

SEQ ID NO: 7364 - DNA, 796 bp, Cricetulus griseus
cccgggtcctccctgagaaaggccgtcgctatggagacgcggcgcgtgccggcggccgttaaaaagagagggccagcccgcaagtgatttccactgcagtcgcggcaccgggcagccagtagcacagaccggcgcacgatgctctggccaagtcgcggcctcagtcctcgagagcagtgcgctaaaagttctaggaacctttagggacgtacctccttttgcgatggcgcggggcggggccagagggtgtctgtgcccgtcggagacatccgcttccggggccacggccgtcggactgaggggctcggctggtcggccaggctacgttcggtgtcgctccccgaaaaccatattccttaagaatcgactatccccgctttattgtcgatcttctccgccaatcatgctggaacatctgagttcgctgcccacccagatggattacaaggggcagaagctagctgaacagatgtttcagggaattattctattttctgcaatagttacagtttgggtggactgtctacatagttatggccggatttgctttctcgtgtttgctgacacttcctccgtggcctatctaccgccgacatcccctgaagtggttacctgttcaagacttaggcacagaagacaagaaatcaggggacagaaaaattaagagacatgctaaaaataactgatcggagctttcacggttcagcacctgcttttgttcctctgtgatgaactgaattgtttcaaaaccaaaacatgagtttaaaccacctatattcttaacagcacagctgtg

SEQ ID NO: 7365 - DNA, 796 bp, Cricetulus griseus
gttcaaatgaagaaaattttcagctcttagatatacaaacaccatctatttgtgataatgaagaaatccttggggagagacgactggagatggctaggctgcagactgcatacatctgtgcccaacaacagatcatatactttaaagcaagtaattcaagcatgaagtcaagtgtaaaatgggcagaagagaatcttcatagcctaaccatcgaggcagttggtgaagaaaatttggatgctaaaatttctagcttgaacagtgagattcagaaggcatcatttgagcttgtgcagttatcatatgaaattgaattgagaagacattgggatacatattggcaacttgaaaatttggttcaacaacttagtcaaggaaatgtgatgctctgtcagcgattagaaacattagccgatccatcggcacccgagcagttaaactccaggacacccatcaacactaaagattattctactcataggctttatcaacttttagaaggagacagtaagaaaaaagaattgtttataacccatgaacacctggaggaagtggctgagaaattgaaacaagatgtttctctaatacacaatcagttggcagtatctactcaagagcagtttttctttctgtccaaactgaataatgatgtggacatgctttgtgatgctttgtatcacggagggaaccagctattgctttgtgatcaggagttaatggagcattttcatcaagttgaatctaagttgaataaactaaatcatcttcttactgatattcttgctgatgtgaagac

SEQ ID NO: 7366 - DNA, 795 bp, Cricetulus griseus
gggctccgggcgctgcggaccatgtctccgccgctggcgcccagccgggaccgtgcaggccaagaggacgaggaccgctgggaaggacggagggaccgcaaggcccggaagcccctagtggagaagaagcggcgcgcgcggatcaacgagagtctccaggagctgcggctgctgctggccggcaccgaggtgcagaccaagctagagaacgccgaggtactggaattgacggttcggcgcgtacagggcgcgctgcggggacgggcacgcgagcgggagcagctgcaggccgaagcgagcgagcgcttcgctgctggctacatccattgcatgcatgaggtacacacgttcgtgtccacgtgtcaagccatcgacgccaccgtttcagctgaactcctgaaccacctgctagagtccatgccgctgcgcgagggtagcagcttccgggatctgctgggggactccctagctgggctgcctggaggccctgggaggaacaactggtctcccggagggattccagggtccccattgtccagccccccaggccccggggacgacctgtgttctgacctagaagaggtcccggaggctgaactaaatcgggtgtctgctgaggggccggatttggtacctacatccttaggcagcctgaccggagctcgcctggcccagtgtgtgtggaggccttggtgaccaacaacactaaccagggacctgtggagggtgggctgccattcctaagtctaccactccctccccaagtgtcagatgatgtgcagacagcccaggatg

SEQ ID NO: 7367 - DNA, 795 bp, Cricetulus griseus
caagaagagtgatggctcagacttcctggctacctcacttcatgccattcgccgtggcctggaccgcatcctgaagaatgcaggtgtgggcttttccatcaccagcagcaccttcagctcctccaccaagaaactcaaggagaagctgtgggttctgagtaaggcagggatgtcgggggcccgttctcgcaatattgtctacttctccctttctgatgaggaggagatgtggcaggcggggtgtctaggggacgacagccctattactctcctgtccacagtggtcaagtacaacagccaatatctgaatatgaggacgctgcaggagcatgcagatctgatgtatggtgacatcgagttgctcaaagacccacagaaccagccctactttgcccggacagacagtgtcaagcgagagagccgcagtggttctactagagtgtgtcatgggaaaatctaccatgagcattccaggggacacaaacagtgcccttactgcctcctctacaagtacatgtacatccaccggccacctacccaaatggatgccaagtctcccttctaccttacagccaggaaggaggccacagacatggggcaatgtgtggtatgaagagcagaggatggggctgcggtccctccggggaattgtccccaatttagccagaaaggtcaagctggacaactgtgagaacttcactttcgtctcattcactcaggtctccaggcggcttagctcccatagctgctgccagtgaaccctccaaggccagcagcacccttttgtcttgttgg

SEQ ID NO: 7368 - DNA, 795 bp, Cricetulus griseus
ggatccggtgcagcgggagatccaccaggactgggcgaatcgagagtacattgagatcatcaccagcagcatcaagaaaatctcggactttctcaactctttcgatatgtcttgtcgatcaagactcgcaacactaaatgagaaattgacagctcttgaacggagaatagagtacattgaagcaagggtgacaaagggtgagactctcacctagagctgtgccacgctgctgctgggaagtcgctgtacagaacactggccatgtgggaaaggcccagcagccttctgcgcctccccctctccttccagagcaacagggctttttcttgtttttcttttttcaaaagtggcctttgggctctgccgtgtgcacctgggatgtgatgtggcatgaggaagaagtccagggcacctcttggaaacagcattaggcaattccccttttcagtaacattgtttggaactatgtgtcaatgtgtttgaggtgttcagaggcaaaggccgggactctgttaagtcctccccacctcactctctttctcagactttccctacagctcccatggcctctgcactgattgtgtcaacagtctgtcttctctgcgcctatgacaggaggtgggggcagtcctggctgagactctcgtgctctgcagtgtggttgccagaaaatgttgctaactcgccaatttcttgttctgggaggtcaaagccaggcccccagttggcttgaagggatattttctagttttttttaattaaagattcagtatttaattaggttaaaaaaaaaaa

SEQ ID NO: 7369 - DNA, 795 bp, Cricetulus griseus
tctctgttggctagttgaacaaaaaataaatatgaccttctacagttataattcattcttagctattttgtggacaagattgcctagccattttgtctatccttcctgctctcactccccatcacttgcatttctccacttgccagattctcatttacgaacgacctatatgaaaagctatggaagcaggaagtactcctatcccagtctaccaggcaataaagtccatcctttacgaactagactcacacaaaaactacacacaacttgttggctacaaaatcaccccagtaaacctcagccagagcaaatcccagaaaagcctaagccaacgagccctctgcctcccaaaggagctgagacggagacaagagacaatgacagaatggcgagagaacctagccaagctgggagacgcctcctcacagctctcctcctatgtgaaacaggtccaaacaggccacaggcccagcactaaggagatagttggcttctccaaactcttcgaggatcagttagccctggaacacttagatcggccccaactggttgccctgtgcaagctgctggaattgcagaccttcggaacaaacaatttgctccgcttccagctcctgatgacactgaagtctataaaagcagatgacgaaataattgccaaaggaggggtgaaggctatgagtgtgccagagctacaggctgcctgccgggcacgagggatgagatcattgggcctcactgaggaacaactgtcgcagcaactctcagagtggctggacctccacctgaaggaga

SEQ ID NO: 7370 - DNA, 795 bp, Cricetulus griseus
gctgccgctgcgcgccgaggtcgccgccgcccagccagagctcgccgagtgcttggagttcaccgccgaaccggcagctatgcaggagatcggtggtggccatgacggcggtgggcggctccatctgtgtcatgttggtggtcatctgcctgctggtggcctacatcaccgagaacctctgccttccagactcaggcctcagactggccatgggctccaggctagagtgttagccagggttcttccctgtctctagaggccttgtagggacggccagaatttacagtccctctgtcaagagccactggcacccaggatcatcaacctgaactttcgtcttgtgctaggttgtcagagcttgggcgtgattgttgttgctcggtcactttgcgatttgcagatagggacgagtgacctctggatcctgtacccacctcaccttacccagtgggcttaggttagctttgtgccttagtttctctggcccaatgcaggagccacccatcatccctcagctgtccatggggatttgtggccctgcgactggctggtttatgcatgcttttgcccagagtcccattgaggacacaaccatcttcgagattttcaggcaggggttcacaggccctgtttgtcttcctatgtgggtgtccaagaagccaagagccatgatgtagctcagcaggctggacccaatgtccagctgctgcatccaggggtgaagggtcctccaaccttaggaggctggggattcgacccttttcctttcgcttgtactgccttgattaggacttt

SEQ ID NO: 7371 - DNA, 795 bp, Cricetulus griseus
cagcggtgcagaaggaggaacaggaattgttggatcgggctttcttctcttgggctgagtccgattcttcgacaaatggtgccagcagcgactggtggtcttctcagtgaagagctccacccatgtggcccggagcccctgggctagcacgcccccgctctacaggctcatccacgtgctcaagtacagctacgtactgctggtgtgcaaggatgtgcgcgtgcccaaccagtccccagcgtggcctccccagcccagctgcccagccttcatcactgtcaagctgagccctttgcgggatcgactcgtggtgtctgagtgccagctgacccactcgcaccccgcctgcccacgcgagttcgcctatcacttccgcccgggccacttgctggccaatgcctgcctgccagtccgcatcaccaacaagatgagccactagccaagttccgagcagcctgtgggccagagctggcagacctagtggccgaggagctggcctttgccaggcagcacgggacccgaggtttccactggaccggagcgggctttgcgcttaaggatggcacctcagacttcttcttggatggggccctgacacactgcagctgctcaatccatgctgccagacgcctgccctggcaggacacctctttgctgcgcgtctcctcacaggggcagccttgttccacatggacctgctcagagattgctgggggagatcccaggaaccctgaccctgtgcacttctgcctgctaccctccacatggaggcagaacatattctttgatcccaaa

SEQ ID NO: 7372 - DNA, 795 bp, Cricetulus griseus
agaggacaaagcagaaacagcagaagcagcggaagaaaggcttgactgttgtagtgatggctgctcagattccttggtagggcataatgaagaggcttctggccacaacggtgaggccaggaccaccaggcctagtggcccccgggccagctgtggaggcagaagcactggaggcagcagcagcagcagcagtgagctttccactccagagaaacccccaagccagaggttcaacagccggtgggaaaccactgtgggtgagccctccggcagcatccccacgactgttggctcacttcctagttccaaaagcttcttgggcatgaaggccagggagctgttccgtaataagagtgagagccagtgtgatgaggactgtgtgaccggcagtagcctttctgagaccctaagacagagttgggcagagactcaggcattatttatttggtatttgcttgaatgctggcaccatgctgcctgtgggtgggtgtgtaggtggttgtcctgcaatccgcagactgagaagagtggtcactaggaggggcacccagaatgcttgtgcacatgtggaaatgtgctgttggctggaggcagacaggcgtttttgcactaggaagattcagtggtcacccttcatgagactggaccacaaaacacattatggaggagcaggctttgctaagacataatttagttttatagtcaatcatggatgaactatatatggataacttggagttggggtggggggggttcccatcagtgaaaacaaatcagaataaaaaaaaaaaaaaa

SEQ ID NO: 7373 - DNA, 794 bp, Cricetulus griseus
ataatggagtttcctgacttggggaagcactgctcagaaccgacttgcaagcagctggattttctgccagtaacatgtgacgcatgtaaacaagatttctgtaaagaccatttttcctatgccggtcataagtgtccctttgcattcaagaaggatgtgcaggttcccgtgtgtcccctctgtaatgtccccatccctatgaaaagaggcgagatcccagatgtggtggttggagagcacatggacagagattgcacctttcaccctgggaggaacaaaaagaaggttttcacacatcgatgctcaaaagagggatgcaggaagaaggagatgctgcagctggcttgtgcacaatgccatggcaacttctgcattcagcaccggcatcctctggaccacaactgccaagctgggagcagctcggccagcaaagagagaccttcagcatccagagctcctgagcagaagccgtcaggaatcagttggctggcccagcaactcaggcgaaccgtgaagtgacagcgtggctcctgtctggacctcgcaccaactcctttctgttgggttttaaccttggtgatgtggcctccggcactttcctgattctgctgttacatggagtctttatggaaaagtctcccattgactgttaaagttagtgtatacacacacacacacacacacacacacacacacacacacacacacacactttatttcacccaaaaaaaaaaaaaaaaaaaaaaaaaaaaaaaaaaaaaaaaaaaaaaaaaaaaaaaaaaaaaaaaaaaaaa

SEQ ID NO: 7374 - DNA, 794 bp, Cricetulus griseus
acactgactggcaagaattacacaatggaatggtatgagctttttcagcttggcaactgtacatttcctcaccttcgacctgaaatggatgctccgttctggtgtaaccaaggagcggcctgcttttttgaaggaattgatgataaacactggagggaaaacgggacattagctccagttgcaaccatgtcaggaaacacatttaacaaaatggcagagtgggtgaaacaggacaatgaaacaggtatctattatgagacatggacggtccaggccagcccaggaaaagggaatggagacatggtttgaatcctacgactgttcaaaatttgtgttaaggacatatgagaaactggctgaatttggagcagaattcaagaagatagaaacaaactatacaagaatatttctttacagtggagaacctacttacttgggaaatgaaacatctatttttgggccaaaaggaaacaagactcttgcttcagccataaaggaattttatgccctcttcaaaccacatctgtcaactaaagaatttctgttgagtctcttgaaaatttttgattcagtgattatgcacagagagttctacctgttttataactttgagtattggtttctacctatgaaattcccctttgtcaaaataacatatgagggactccctttacctaccagacgcaccgcacttcctgacctgtgacactttgctttccctgctctccccacctgcctgcagccattctcttccagggctgtttttacatcgtgcctttcttcactttccctcc

SEQ ID NO: 7375 - DNA, 794 bp, Cricetulus griseus
ttttttttggttgggctttgatttgtttttttgtttgttttgttttgttttgtttgagacatgatttctctgtgtagccctggctggcctagaactcaatctgtacatcaggctggtcttgaactcagagagatccacctgcctgtgcatcctgattgctgggattaaaggtgtcatctacctcctttcccatgttcctacagaatgcctgctctttacctcccacctttgggggggggcgcttttgaggtccaacctgggtcaggggttcaatattttagtacaaaagtttcagcaagtccagctttgtctaagagatgcccaggtccccagcttgccttcagcagtccttccgggcttctggttcctgtctgacaccctttccaagaccccagaaatcaaaggagccatagaatccagtgggaggcggtgactgcctctgctggcagcccaatgggaaccctcatgccttacccccttcttatgggtaaaggggctttcttatcaagcatgtctgacatccctggagaagcaaccttgctccaggtgacactgtgacgccagagggcatctgggtctttctgctcgtgcaacttggaacctttcgtcctttggggctgggcacctccgggccctctgaatctctctgtcatctagggtaaaggaggctgctcaaccctgttcactcccagttctgtagcagccgaccagtgtcacctttgaagtatacatgagagaaatatatttacaaatgctttattctcttctttaataaaaaatgcaccagtattcta

SEQ ID NO: 7376 - DNA, 794 bp, Cricetulus griseus
gtggacagccccgacactgtaaacggctctgcaactgaagatatggtcgtcctcatttgcttatgcgtcttgctgtgggaagaggttcatggatggggattcaagaatggaatctttcataactccatatggcttgaacaagcagcgggtgtgtaccaccgagaagctcgggctggcaaatacaagctcacctatgcagaagccaagactgtatgtgaatttgaaggtggccgcctcgccacctacaagcagctagaagcagccagaaagattggatttcatgtctgtgctgctggatggatggccaagggaagagttggataccccatagtgaaacccgggcccaactgtggatttgggaaaactggtattatcgattacggaatccggctcaacaggagtgagcgatgggatgcctattgctacaacccacatgcaaaggagtgtggtggtgtctttacagatccaaagcgaatttttaagtctccaggcttcccaaatgagtatgacgataaccaggtctgctactggcacattcggctcaagtacggtcagcgaattcatctgagctttttggactttgaccttgaacacgacccaggctgcctggccgactatgtagaaatatatgacagctatgatgacgtccatggctttgtaggaagattactgtggtgatgaacttccagaagacatcattagcaacaggaaatgtcatgaccttgaagtttctgagtgatgcatccgtcacagctggaggtttccagtattaaatacgtcacagtggatcctgc

SEQ ID NO: 7377 - DNA, 794 bp, Cricetulus griseus
ctctaccatgactttgttagtgatgcagaagctcagaagattagagagcttgcagaaccgtggctccagagatccgtggtggcttcaggggaaaaggacagttaccagtggagtaccgaatcagcaaaagtgcctggctgaaggacacggttgatcccatgctggggactcttgaccaccgcattgctgccctcacaggccttgacatccagcctccctatgcagagtatctccaggtggtgaactatggaattggagggcactatgagcctcactttgaccacgctacgtcaccaagcagccccctgtacaggatgaagtctggaaaccgagtcgcaacatttatgatctatctgagcgcagtagaagctggaggagccacggccttcatctatgccaacttcagtgtgcctgtggttaagaatgctgcactgttttggtggaacctacacaggagtggagagggagatggagacacacttcatgctggctgtcccgtcctggtgggagataagtgggtggctaacaagtggatacatgagtatggacaggaattccgaagaccgtgcagcaccaaccctgaagattgaagcattggcagatggcagcttgtcagagaagccaggagccaaagccacgggcagagaggggtgaaatctcccgaaggaagaaggcctcacagcagggccttgtgagtgggagtcaaggaatggtctttaccaggaaacacacacacacacacacacacacacacacacacacacacacacatcacccccacacccattccacat

SEQ ID NO: 7378 - DNA, 793 bp, Cricetulus griseus
gcggagccggtgtgaggcggcgtgagccggaccgcgggccgctgcagggcgcggcgagatggaggtgtcggggtcgtcggcgcccacggtgacggttttcatcagcagctctctcaacagcttccgctcggagaagcggtacagccgtaatctcactatcgccgagttcaagtgtaagctggaactggtggtgggcagtcctgcttcgtgcatggagctggagctgtatggtgctgacgacaagttctacaccaagctggatcaagaggatgcgctgctgggctcctatcctgtagatgacggctgccgcatccatgtcattgatcacagtggcgtccggcttggagaatatgaagacgtgtccaaggtggagaaatacgagctctcaccggaagcttatgaccggaggcaaaatacagttcggtcgttcatgaaacgcagcaaggtaggcccatacaacgaagaactccgggcgcagcagaaggctgaggccgcccagcgcctcagtgaagaggaggcccaagccagtgccatctctgtgggtagccgttgtgaggtgcagtcacctggccagtcccttcgccggggcactgtcatgtatgtaggactcacagatttcaagccaggctactgggttggtgtccggtatgacgagcccttagggaaaaacgatggcagtgtgaacggaaaacgctactttgagtgcgaggccaagtacggtgcctttgtcaagccatcggctgtcaccgtgggagatttcccagaggaggactacgggttggatgagatgtga

SEQ ID NO: 7379 - DNA, 793 bp, Cricetulus griseus
  modified_base (781)..(781): a, c, t, g, unknown or other
cttatttaaagctgagtgcaatatccatacatctccttctcctgggattcaagtaaggcatgtctacaccccctctacaacaaacatttctccccataaaacagtcaactactttaaccaacaagcacaggggaaatgaggtctctaccacacctctgttagcaaattctttgtctgttcaccagttggcagctcaaggagaaatgctctacctggctactcgtattgaacaagaaaatgttatcaatcacacggatgaagaaggatttactcccctgatgtgggctgcggcacatgggcaaatagctgtggtagagttcctacttcagaatggtgcagatccccagcttttaggaaaaggtcgagaaagtgcgctgtcattagcctgtagtaaaggctacacggatattgtcaaaatgctgcttgactgtggagttgatgtaaatgagtatgactggaacggagggacacctttgctttatgccgtccatgggaaaaatgtgtttactatatattaagttataaattaatgttttatggcatgtaaattttatggtacaggtggttatgtgtctttgtattaagtaccaaaatttgacactttgagaaattccaccctgtttatcttcactcttgtattaactctctgactttgcacagggcttactgtaagtctatgggagaaaaaaataatgttcttgttgaattaaaaagtatacagtatgatggtttacaaaatcatgtttaaataaaatactttgtctgtttgtcataaaaaaanaaaaaaaaaaaa

SEQ ID NO: 7380 - DNA, 793 bp, Cricetulus griseus
  modified_base (785)..(785): a, c, t, g, unknown or other
gccaaattttcttggatgattaggggctgtcgaatccaggatggctgtcttatcgcttctgttgttgggtggtttatggagcgctgtgggagcgtccgatatggctgtcgttacttgcggctctgtggtgaagctactcaatacgcgccacaatgtccgactgcactctcatgacgtgcgctatgggtcaggtagtgggcagcagtcagtgacaggtgtaacctctgtggatgacagcaacagttattggagaatacgggggaagactgccacagtgtgtgaaaggggaacccccatcaagtgtggccagcccatccgactgacacacatcaatactggtcgaaacctccacagccaccatttcacttcacctctttctggaaaccaggaggtgagtgcctttggggaggaaggtgaaggcgactatttggatgactggacagtgctctgtaatggcccttactgggtgagagatggtgaagtgagattcaaacattcttccactgaagtactcctgtctgtcacaggagaacaatatggtcgacctataagtggacaaaaagaggtacatggtatggcccagccaagtcagaacaactattggaaggccatggaaggcatctttatgaagcccagtgagttgttgaaggcagaagtccatcatgcagagctatgactgtaaatcctctgagccactgtcaccacacagtgtttgtagacatctgttgctgctttaccgtgggatccctgctccaggttctgagcagtgttttattcaaaaaaanaaaaaaaa

SEQ ID NO: 7381 - DNA, 793 bp, Cricetulus griseus
tgtggctgtttctgaggcttctcttacatcatggccttgggagtaaggtgcttccgcctgctgcatcccgtcttttgcagttaccatgctactttgaccagacctatttcagaaatttccatgaagcctgttcatgtacaacaacatgaccacaggcaatacttagcctacccagccgtgccagttcgccagtttgcaaccaagaaagccaaagctaaagggcttggttgaggatataatcagcttggaagaggtgggtgaagaaatgagatctgtgatggaagcactcaaggataatttcaataagactctcaacataaggactgcaccaggatcccttgatcatattactgtggtaactgctgatgggaaacttgctttaaatcacattggccagatctccatgaagtcaccacagttgattttggtgaatatggccaatttcccagagtgtacagctgcagctatcaaggctataagagaaagtggaatgaatctgaacccagaagtggaagggacactaattcgggtacctattcctaaagtaaccagggaacacagagaaatgctggtaaaactggccaaacagaacaccaacaaggccaaagaaaattttacggaaggttcgaactaatgcaatgaataagctgaagaaatcaaaggacaaaacatcggaggacaccatcaggctcatagagaaacagatcagccaaatggccgacgacacagttgcagagctggacaggcatctggcagcaaagaccaaagaactccttggatgaaaggcaacagt

SEQ ID NO: 7382 - DNA, 793 bp, Cricetulus griseus
ctggcaccagcaccatgcccatgacactgggttactgggatatacgtgggctgtctcatgccatctgcctgctcttggagtacacagatacaagctatgaggaaaagagatacaccatgggggacgctcctgactttgacagaagccagtggctgaatgagaagttcaagctgggcctggactttcccaatctgccctacttaattgatgggtcccacaagatcacccagagcaacgccatcctgcgctacattgcccgcaagcacaacctgtgtggggagacagaggaggagaggattcgggtggacattttggagaaccaggctatggacacccgcatgcagctggccatggtttgctacagccctgactttgagaaacgaaagccagagtacttagagggtctccccgagaagatgaagctctactctgagttcctgggcaagagaccatggtttgcaggggacaaggtcacctatgcggatttcctcgtttatgatatccttgaccagcaccgtatatttgcacccaagtgcctggattcgtttccaaacctgaaggacttcttggcacgctttgagggcctgaagaagatatctgactacatgaaaagtagccgctttacctccaaaccaatctttgcaaagatggccttttggaactcaaaataggactacaaagcccagccctgacagaatactcatgattgcctgctggccacaaaaaaaaaaaaaaaaaaaaaaaaaaaaaaaaaaaaaaaaaaaaaaaaaaaaaaaaaaaaaaaaaaaaaaaa

SEQ ID NO: 7383 - DNA, 793 bp, Cricetulus griseus
gggatgagggtcccaggacctgggcatggactaggagctcaaggggatccggcctctcagatgaggagacctccaagtcttccgtggaggacaacttggcctccaaggagcagcctcaacagaggactgtggctgaggtgcccttgagcacaggtgaattcccttcatcagatgagtccaccttcaccagcaccgagtcagagctctctgttccttatgagcagctgatgaatgagtacaacaaggcactgcttttcttttctgtcttctccagctggttgcttccatgggatgtgaagtctgcccaggacaggcctccatgctatggcccccatggggaggctgctgtcctgggcctgcctggcaggtcttatttactgactcgaggcaatgtaggctgcagcactcaccctggagggcctatgtctgctgcttaagtcttcccccattgttcggttgacacggtttttctgaggccaggagcttcagctgagttcaccagtattaatgggcaactcctgtgtgcctggcactgagctaggagccatgtcccacctcagattccctctgcacacattatgacagtgagaggtgtgtttccatacctccaccattctctaagcggttgtagggccacgctggcctcagggtgggaggaacagcctggctcctgtgaaaagtgtcctaagctgaatgtcctggagccacactaaccacactgtatgcatgtactggtggtgaaggcagatgtaatttattttaacattttacaataaaatacatgaacaagccc

SEQ ID NO: 7384 - DNA, 792 bp, Cricetulus griseus
gagaatccgggagctctgaaacccggggctgccccgttcggaaatttccctcattattctcgcttccaccctcccgagcaaaggctctgccttttacccccggagcttctgctacagctcttccctcccgagggtcgcgagaagaggccgatcctggggctcgacgtggggtgtaactccggggacctgagtgtggctctatacaaacatttcctttgcctgcgtgatggggagccctgctcaggtgcctccagagacctccgcctcctctgctgtgatatagacccagtccttgtggagagagctgaaaaagaatgtccctttcccgatgctttcacctttatcaccctggacatcatggatcaaagggacaggaaggttcccttgagttctttcctgaaccagtttgggcgttctgtttttgacattgtcttctgcatgtcagtgaccatgtggattcatctgaaccatggggaccatggtctgtgggagttcctggcccatctctcctctgtctgccagtacctacttgtggagccacagccctggaagtgctaccgggccgctgcaaggcgcctccggaagctgggactccatagttttgatcacttcagctctctcaccatccgaggcgatatgaccagccagatcgtgcggatcctgacgcaggaccatgcgatggaattagtgcgctgctttggcaacaccagctgggaccgaagccttctgctcttcagagcaaagcgcaccacagagacacacccaatccctgaatgactgacaaaagagaca

SEQ ID NO: 7385 - DNA, 792 bp, Cricetulus griseus
gaagaaacaacataaagaattcttcatttcaagaggatgagaaatactacttacggtctcttggagaagacccaaggaaggatgttgcagatatcagacagcagtttccatcattaggaggagatattaaatttccaatattctttgaagaggggcagttcttttccagtgtttttcgaattagttcacctggattgcaactctggactcactatgatgtaatggataacttttttaatacaagtgacaggaaagaagcgagttatactgttcagtcctcgagatgcacactattttgtatttatcaggttctaaatctgaagtgctggatattgacagccctgacctggataaatacccactcttccctaaggcgaggaggtatgagtgttcccttgaagctgtttatggttccataatgtaatttctgaagagtttggagtaggagtgaatgtcttttggaagcaccttccatcggaatgctatgacaaaacagatacctatggtaacaaagaccctgtagcagcatccagagctgtgcaaatcttggacagagctttgaaaacactggctgaactaccagaggaatacagggacttctatgcacgccaaatggtcttgcgcattcaagacaaagcctacagcaaaaactttaagtaaaaaatgaactaaatgtaagtaaaaatttaaaaataaatggaaatcaagtttgtgtttgaaaattatacaagatataaatatttaaagattcacactacaaaaaaaaaaaaaaaaaaaaaaaaaaaaaaaaaa

SEQ ID NO: 7386 - DNA, 792 bp, Cricetulus griseus
gagacttgtgactcggccctgctgatagcaagatgtcttcaggaaatgcaaaaattgggtatcctgcccccaacttcaaagccacagctgttatgccagatggacaattcagagacatctgcctaagtgaatacagagggaaatatgtcgtattcttcttttaccctcttgattttacttttgtgtgccccactgagatcattgctttcagtgatagggcagaagaatttaagaaactcaactgccaagtgattggagcttctgtggattctgggacccatgaacattcctttggtatcagatcccaagcgcaccattgctcaagattatggagtcttaaaggctgatgaaggtatctctttcaggggcctctttattatcgatgataaaggtatccttcgacagatcactataaatgatcttcctgttggaagatctgtggatgagattctgagactagtccaggccttccagttcactgacaaacatggtgaagtgtgcccagctggctggaaacctggcagtgataccatcaagcctgatgtccaaaagagcaaagaatatttctctaagcagaagtgagcactggggccatttttctgccaggctgcatgcaccagaagaaaatctcttacactctttgtgctaaatacacaaaacaaaatgtgtgatccaaaacatgccctttcctacagtgctggggtggttagccttttcttccactatcaggaatggtctgagctgtgttgtaggtagacagacagggtttctctgtgtaacagccctggctgt

SEQ ID NO: 7387 - DNA, 792 bp, Cricetulus griseus
  modified_base (765)..(765): a, c, t, g, unknown or other
cgcgggtgaaccgaggcggcgggcctctgaggaaccggcccgccatctctcgcggcgccgccgccggcggcaggaaccggccggctccttacagcaggccgaaacaacttccagacaaatggcagcacgatctgttcgacagcggcttcgggggtggagccggcgtggagaccggcggaaaactgttggtgtcaaaccttgactttggagtgtcagacgcagatattcaggaactcttcgcagagtttggaacgttgaagaaagcagccgtgcactacgatcgctctggccgaagtttagggacagcagatgtgcactttgaacggaaggcagatgccctgaaggctatgaaacagtacaatggtgtccctttagatggccgtcccatgaacattcaactcgtcacatcacaaattgatacacagagaagacctgcacaaagcataaacagaggtggcatgacaagaaaccgtggctctggaacttttggtggtggcggcacccggagaggcacccgtggtggcagccgtggaagaggtagaggtgccagcagaaactcaaagcagcagctttctgcggaggaattggatgcacagctggatgcgtacaatgcaaggatggacaccagttaaacagccgagcaaatccacacaagtaacaggacccagaagcctcttccgtgatcgctatagagggagggttggcaactggactgcagacaatggtggatttgttttccgtttctcttttatttctttttttttnttttttttggtttttgttttgtttttt

SEQ ID NO: 7388 - DNA, 792 bp, Cricetulus griseus
acttttttttttctttaagatgtggccgcaagtttgccaggagtgatgaaaggaagcgccacaccaagatccaccttcgacagaaggagcggaagagcagtgcgccccagaacagtgaattgatgtgtatctagccgtctcaacccttaagcaattatgtactaaaaactcagagaacagaagtgcaatgggggggggggggcaaacaaatatgcaagatccgctcctttttgttgagaaacaaagattattttttcagtgtatatccattcagattttgtgtatttttgatgtgcactgttctccgagttctgaaccttcgggaaaaaaatgtaaagcatttatgatctcttgaaatgagtcagtggttaacttatttaaaggggggtgtacataggatgcatgcagttgtgttggaagtgtcctctgtgccttttgtgatgtgggcagtgttacagggtctgcatgtatacaagatgccttacaatggaaaaaaaaatcattccctgggtttaagtatggctgtatatttctgcctattaatattttggaatttttttagaaagtatatttttgtatgctctgtttttgtgtacttaaaagtgttacctttgtagtcaaatttcagatgagaatgtgcataatgtcactgcagctgatttgctcattagctcttaatagttgtggaaaaataaacaatctattctaacataaaaccactaactggagttcagataatggattgtttatgactatggtgtaaataaatactttcaacaataaaaaaaaaaa

SEQ ID NO: 7389 - DNA, 792 bp, Cricetulus griseus
ggggtattacaagcaacaagggtctttcacacaggacaaccacgtcttgcccctgtaccacctcttcctgaatatggaggaaaagtacgtctagggctcatccctgaagaatttttccagttcctttaccctaaaactggtgtaacaggaccctatgtgcttggaacggggcttagcttatattttctatccaaagaaatatatgtgattaccccagagaccttctctaccatatcagtagtagggttgatggtctatgtgattaagaaatatggtgcttctattggagaatttcttgataaacttaatgaggaaaaaattgctcaactagaagaagtaaagcaagcgtccatcaaacaaatccaggatgcaattgacatggagaaggcccatcaggcactggttcagaagcgccactacctctttgacgttcagaggaataatattgccttggccttggaagtcacctaccgggatcggctatacagagcatataaggaggtgaagaatcgcctagactaccacatttctgtgcagaacatgctgcgtcgaaaggaagaagagcacatgatggactgggtggagaagcatgtggtacggagcatttctgcacagcaggaaaaggagaccattaacaagtgcattgcagatctaaaactgcttgcaaagaaggctcaagctcagtcagttatgtgaatgtatctatctcagttgagatggccagagagagttaaacaggcactagtccgtgtgaagaactcttctgtattgctgtctattgaaattataatg

SEQ ID NO: 7390 - DNA, 791 bp, Cricetulus griseus
gctgtgggaggcttcgtcttctggagaagaaaaggaaagatgccaaaataatgaagtgtcgttttctcaaattaaacctaaaaataccaagttaattcgagtggagaattttgaggcctactttaagaagcagcaagctgactccaactgtgggtttgcagaggaatatgaggatctgaagctgattgggataagtctacctaagtatacagctgacatcaatgccaactatatgcctggctaccattccaagaaagatttcattgccacacaaggacctttacccaacactttgaaagatttttggcgtatggtttgggagaaaaatgtatatgccattgttatgttgaccaaatgtgtagaacagggaaggaccaaatgtgaggagtactggccttccaagcaggctcatgactacggggacataactgtggcaatgacctcagaagttgttcttccggaatggaccatcagagatttcgtggtgaaaaatatgcagacaagtgagagtcatcctctgcggcagttccatttcacctcctggcctgaccacggtgttcccgacaccactgacctgctcatcaactttcgttacctggtccgagactacatgaagcagattccccctgaatcaccaatcctggtgcattgcagtgctggggtcggaaggacaggcactttcattgccatcgatcgtctgatctaccagatagagaatgagaacaccgtggatgtgtatggtattgtctatgatcttcggatgcacaggcctctgatggtgcagacagagg

SEQ ID NO: 7391 - DNA, 791 bp, Cricetulus griseus
tgactggaaaggactccaaaagtacgaagtgactagatgggcgcccaggtgacggacagctagggaacgaagagtggtcgtgtgaataggaatgcctgcccaaatcctgagaccagagataatggatgaagatcagttaatgaaagaagtcttggataagtttattaattgtcatgagcaaacatatgaagaatttctgagcacttttactcacctttcaaaagaggatattgtggccaaagggggatcacatggaagtgattcatcagaaaatatatttactgctgaaaaattgatccgtaaaaatgaatccaatggtcatcattttaggaatacggccatctttcctcatacttcgtcggaatgctcagaagaggaccagatagtgattgatgaaggccaacaagttggcagctttcttcaaggtgatatgacacgggctggaaaggtgaaggtagacaacttcttagacttagaagatttggacatggaggaagatagtaagccccagatgaacaaggattggatgctacttccaggtgaagtggaacagggtataatcaccagcgttcctgcttatgttccttctgtggacctgcctctctcttctgaggtgaagccaaagcctgctgagggaagaactctgaagccaacggaagagatatttggagatgaagtgcagcccttctttctcgatgaagaatttgattacgacaatgtgactctcactcccaagttcactgctggagagatagcgactatccaagaactggccaagcaaaagagaatgg

SEQ ID NO: 7392 - DNA, 791 bp, Cricetulus griseus
cgttcaggactcacgtgtgcgcgcggggaaaagctgaagcgttccctgaagaggaagaaaaagatgaaactggtagccaaggccgaaatgtcgaacccggaagacgagctcaagcactcttccgacggagaaggttcagaaggaagcggtgaatcagaaatggaccagttgtcggaggatggcgcagtagaagctgacagtgaggacaatgttgactcctgtgaagaagaaaaggaagatgcagagccaagtgctgggactaattctggctgggcagacgccatggctaaaatcctgaacaaaaagactcctagcagtaaacccaccatcctcaccaaaaacaaggagctggagaaggagaaggagaagctaaagcaggagaggctggagaaaaggaagcagcttgataagaagagggagtgggaaatgatgtgcagagtgaagccagatgttgtcaaagacaaagaggcagagaggaaccttcagaggattgcgacgaggggtgtggtgcagttattcaatgctgtccagaaacaccaaaggaatgttggtgagaaggttaaggaagcaggaggttccatcaggaagcgagctaagttgatgtcaactgtttccaagaaggatttcatcagtgttctccgaggaatggatagtacaaatgagaacagttctgctgctacgaaccccaaagccagacagactgaaatgaagtcagaagagggccccgggtggaagattctgcaagacgatttcatgatgggagccagtatgaaggactgggacaaggagag

SEQ ID NO: 7393 - DNA, 791 bp, Cricetulus griseus
aaagaaaggaaaagactctcaaccttcatggagaactaaccaaaaggaaatcactaattggtgacaaaattagagatataatttttaaggtttgccgctgacaaagtaaaatacataaaatatgcaactcttacttaaaggccttatcagtagtctaagctatacaaataacaaatttatatcattgtgttagtcacagctgtgtgtgcataatttaaaatacttatgtggagttaggactgaagggagtaggctacacattaaaagcgaacaatcattagcaggttatctaatatctcagggtttatgaaatatagttaaatttattaagaaaatcggtgataaaaaagtagggtacacagctggccaccaaatgcgaagccaatctgccatttaaccttgaaaatgaaatgaattttacatgtcaccactggcacccaatccatgtaaggactagaaccacgatttattgaatttttaggggaaagaaaagcttactattaatggtgacaatattaagatgggatccttgtatgagtactacttgcatggttgacattttgttgaataactgcaatggcaagaatgcaaagatagagtttaatgcagtgatctgtgatttttggcacatcagaaattccttgccattacctttatgttactttatgctttctggctcttgtacctctggagattataatagtgaccaaactatctgtgcagttaaggcttctttctgattattgttgttgaatcctcattttcaaataatcatacctcgtgagcttgct

SEQ ID NO: 7394 - DNA, 790 bp, Cricetulus griseus
  modified_base (779)..(779): a, c, t, g, unknown or other
ctgcattggaccagacatcctgacctgcccccggcccacttcaggaaaatgtgggctcttgccacaggcctacgttcagaaggcatccgccaggaatgtcgctgggcctggtgaacagtgccaggacacctggctagctctggatcagaagcttgaggctgcactgaaaccaccaacaaacagtacagctaccttgtgtgtcagacgggcccctgccacacccaccattcctccactgagaaaggcctacagctttgatcggaatctggggcagcgtcttagtgatgctgcccatcatggccattttgcagcagctgttactgactcttacagacctgagggaggtgtccgtcccaggtcatccccttctgtgcccctatcaggcagctctgacttcaggaaccccaacaggctgcagctagtattggcggagatggtggccacagagcatgagtatgtccgggcccttgactataccatgcagaactacttccctgagctagatcgacctgatgtgccccagggcctccgtggccagcgtgcccacctctttggcaaccttgaaaaacttcgggatttccactatcatttctccctgcgtgagctagaggcttgcacccgacacccacctcgagtggcttatgccttcctgcgccatagggtgcagtttgggatgtatgcactctacagcaagaataaacctcgttctgatgccctgatgagcagctatggtcacaccttctcaaggagaagcagcaagcacattaactttttttttntttataataaa

SEQ ID NO: 7395 - DNA, 790 bp, Cricetulus griseus
gccatggcgtctcagctccggctccgctccgcgctggccctggtcacaggtgccggtagcggcatcggccgtgcgatcagcgtgcgcctggcgcaagagggcgccgccgtggccgcctgcgacctggacggggcagcggcacaggacaccgtgcgtctgctgggcggccccgggagcgagggcggggcgccgcgcgggaagcacgctgccttccaggcggacgtgtcgcaggccgccgcagccaggcgcctgctggagcaagtgcaggcctgcttttctcgcccgccatctgtcgttgtgtcctgtgcgggcatcacacgcgatgagtttctgctccacatgtcagaagaagactgggacagagtcatagctgtcaacctcaagggcaccttcctagtcacccaggctgcagcccaggctctggtgtccagtggctgtcgcggctccatcatcaatatcagtagcatcattggaaaggtggggaatattggacaaacaaattatgcgtcctccaaagcgggagtgattgggctcacccagactgcagcgcgcgagcttggacgccatgggatccgatgtaactcagtcctcccagggttcattgcaacacccatgacccagaaaatgccagagaaagtgaaggacaaggtgactgcaatgattccgttgggacacatgggggaccctgaggatgtggcagatgcggtcgcattcttggcatctgaagacagtggatacatcacaggggccacagtggaagtcactggaggtcttttcatgtaactgcctg

SEQ ID NO: 7396 - DNA, 790 bp, Cricetulus griseus
gaaataaagtctttactatcactgtttggaggccagttcactaacaatcatgaaacttatgaaaagtctccattttggattcttagcattccctctgaagatattgcaaggaacttaatgaaacggacagtgtgtgccaagtctatatttgaactatggggtcatggaaaatctcccgaggagctgtatacttctcttaaaaattaccctgtggagaagatggttccttttctacattcagagtctacatataaaataaagattcacacgtttaataaaacattgactcaagaagaaaaagtcaaacgaatagatgcccttgaatttctgccatttgaaggaaaagtgaacttaaagaaaccacagcatgtattctccagaagctttccagtcacacagcaaggcgcttgatcacaatggaaaaggtgaaagaatttgagaacagagaccagtattcacacctgctgagtgatcattttctgccataccaacgtcataattcctttcgtgagaaatattttagtggtgtaacaaaaagaattgccaaggaagaaaaatccagccaagaatgaaaattatgttgacaatcgagaaagaataagcattttatggaaaggacttttggatgtgaatttgtgtgtttgatctagaaaacctgtgctgttttaaaatttttatataaataaataattgctatcaatcgaaattgaataatttcaaatggtctttgttttagagactattttgatgtgtcttttgaaccttgttaaatttcagggactgatacata

SEQ ID NO: 7397 - DNA, 790 bp, Cricetulus griseus
gggaggctggcggctgggccaagtggggagtggcagcgccggggttcgaactcgcccgagcgctaggcgaggcgtcgcaggcccgagatgagccagtctttggtttgccccgaaaccgtgagcagggtgagttctgtgcttaatcgaaacagccggcaatttgggaagaaacatctttttgaccaggatgaggagacatgctggaactctgaccagggcccctcccagtgggtgacactcgagtttccccagcgtgttcacgtcacgcagctgcaggtgcagttccagggcggcttctccagtcgccacagctacctggaaggttcacagtctggggacacactcagcaagattgtggacttctaccctgaggacacaaacgcccttcaaccttctccatccccactgtggaggtggacagactgaagttgacctttgaggacaccaccgacttttttggccgtgtggtcatctaccacctgcgggtgctgggtgagaaagcagtgtaagagctaccggcggccacttcctccaggaagcccccctgaacacccagaagcccttcaagttcacagatttattggttcctgttggggagggccctctgccaccactgtccaggagctgcctcaagccagttgtgggagactggtttgttccctgagtgcctgggttcccaacaggctgtcttcactcggggtctgcaggccccagagtactctggaacagtttcaggatatgggtctccatcacctgttgcactgtgggaggaggtgggaggtggggtgag

SEQ ID NO: 7398 - DNA, 790 bp, Cricetulus griseus
aaggttcctgctgtgccagaaacccttaagaaaaagcgaaggaatttcgcagagttgaaggtgaagcgctttcggaagaactttgctttgaagacactgcggaaggcgcggaggaagctcatttatgaaaaggcaaagcattaccacaaggaatacaggcagatgtaccggacagagattcgcatggctaggatggcaaggaaagctggaaacttctatgtgcctgcagaacccaaactggcatttgtcatccgaatccgaggtatcaatggtgtaagcccaaaggtccgcaaggtgttgcagctgctccgtcttcgtcagatcttcaatggcacctttgttaagctcaacaaggcttcaattaacatgctgaggattgtggaaccatacattgcatgggggtaccccaacctgaagtcagtaaatgagctcatctacaagcgcggctatggcaaaatcaataagaagagaattgccttgacagacaattccttgattgctcgatctcttggtaaatacggaatcatctgcatggaggatctaattcatgagatctatacagttggaaaacgcttcaaggaagtaaataacttcctgtggcccttcaaattatcttctccacgaggtggaatgaagaaaaagacaactcattttgtggaaggtggtgatgctggcaacagggaagaccagataaacaggcttattagacggatgaactaaggtgttgcctgtggtatttttgtaatctggtcagttaataaacagtcacagcttggcaaactagaaaaaa

SEQ ID NO: 7399 - DNA, 789 bp, Cricetulus griseus
gggagtgaccatggccaagagcaagtttgagtacgtgcgggattttgaggctgacgatacctgcttgccgcactgctgggttgtggtgagactggacggccggaatttccaccggtttgccgagaagcacagctttgcaaaacctaatgacagtcgagctctccagctgatgaccaaatgtgcccagacagtaatggaggagctggaggacattgtcattgcatatggacagagcgatgagtacagctttgtgttcaggcggaaaagcaattggtttaaaagaagagccagtaagttcatgactctcgtggcctcccagttcgcctccagttatgtgttttattggcgggattactttgcggaccagcctcttctgtatcccccaggatttgatggaagagttgtgttgtatcctagcaaccagaccttgaaggactacctcagttggcgacaggcagactgtcatatcaataatctttataacacagttttctgggcccttatccagcaatctgggctaacaccagtccaagcccaggagcgattaaagggaactctggcaggagacaagaatgaaattctgttctctcagttccacatcaactacaatgacgagccacagatgtacagaaaagggacagtgttagtgtggcagaaggtggatgaagtcaggacacaagaagttaggctgcctgcagaaatggaaggggaaaggatgactgtgacccggaccagagccaggcctgtgcccttgtactgcgatctcattggggatgcattctggaagga

SEQ ID NO: 7400 - DNA, 789 bp, Cricetulus griseus
aggttcctggttcagaaacgatgacagaggtgctggatctccatgaacaggactctgatgggggtagtgaggaggtggtcctgacgcctgcagagctcattgaaaggctggagcaggcatggatgaatgaaaagtttgcccctgagctactagaaagcaagcctgaaattgtcgagtgtgttatggaacagctagaacatatggaaggaaatctcagaagagccaaaagtggggatctgaaggtcagtatccatcgaatggagatggagaggatccgctatatccttagcagctacttgcggtgtcgactcatgaagatagagaagtttttccctcacatcctagaaaaggagaaaatgcgccctgcgggggagccttccgtcctttctccagaggagtttgtctttgtcaaagagtatatggatcacacagagacccatcttaaaaatgttgccttaaagcacatgcctcccaacctgcagaaagtggacctcttgagggcagttcccaaaccagacctagattcatacgtgtttctgagagtgaaagaacgacaagaaaacatcctagtagaaccagaagcagatgagcagagagactatgttattgacttggaggagggctcacagcacttgatccggtacaaaaccattgcacctcttgttgcttctggagcagttcagttaatataaaacagcacaaacaagcctgaggacatggaatcatggacaacattagaaaccccatttcctttgtgtctaagaataatgaagtcatgctccatacagt

SEQ ID NO: 7401 - DNA, 789 bp, Cricetulus griseus
gccacgacccccaccagtgccccggggtccgtgggtggccgcagcgggccggactcagtcaccctgcagccctcgggtgcctggctctgacccggggtcccggaggaggaagaggacgcggctacgccggcccaagagtgtccggccgggacagtacggagctaaagccgtgtccatcccgcgcgggctgcagccccaaagttaccgtccgcgcgcgggctgttagagaaaacggactcgactgagcagcaccggcagccgaggatctgggatttactgggagaactgtggcagctacttgatggacttgaacctgacagcccttggggagacattcgtttatattggattgtggctcgcgaggggcggaatcgggaggctttctaacaatacttagaaaacgatagtagtgtggtgtgtgtggggttggatgaaagccttggacacacttttctgccctggtttgaactctctgctgaatccgaggggctctctcctgcttcctcacctgctagttctttgtgaatgagtgaaaccgtttttaaaatgtgacttcaggaggagaaattgcaggcttttccccttgtgaaacttgagggtgccctttgaggtgccacccccaaactttaaggtagctaaactttttttttaaaaagattcaatggcttgttcgatcctccagatgcagctattgacgtacacttcgcaacggagtgtctgaaattgtggtggtcctgatttataggattttcaattaaaatgtctgctgaataaatttggtttttgttt

SEQ ID NO: 7402 - DNA, 789 bp, Cricetulus griseus
tcaagcgcgacgtgcagacgcccttcgtggtggagctggaggtgctggacggccacgagcccgacggcgggcggctgctgacgcgcgcggtgcacgagcgtcacttcatgggctccccggggtgcggcgcgtgcccgtgcgcgagggccgtgtgcgcgccacgctcttcctgcctccagaacctgggtgctatcctgggatcctggacctttttggagttggaggtggccttctggagtaccgagctagtctgctggctgggaagggctttgctgtcatggctctggcttattataactacgatgacctccccaagtgcatggacaccatgcgcatggagtactttgaagaagccgtgaactacctgctcagccaccctgaggtaaaaggtccaggaattgggctgcttgggatttccaaagaactaggaagagcgagttctatgccaatgagatctccaaacgcttagaggcccatgggaaggagaagccccagatcatctgctacccagaagcagggcactatattgagcccccttacttcccactgtgcaaggctggcatgcacctcctggtgggtgctaatatcaccttttggaggggagcctaagcctcacgctgtggcccaggtggatgcatggcagcagctccagactttcttccacaaacacttgggtagtaagaattagggggcaacttctaaaatattacccattatctaatggttttgggggaaaaggttcaaatacattgtaagaatatcagttaagattaacttcagctgaacata

SEQ ID NO: 7403 - DNA, 789 bp, Cricetulus griseus
gtcaagatggctgcctcctgggctcacacgctgctgaggctgctccccggcctctggcgaagttccccgggagcccaggttcccctccgggctctttgcaccaaaggccctgaagaaggttccctgtcctccctccccatttctccctatgagaatgaaccttggaaatatctggattcagaagaataccagaaccgctatggctctcgccctgtttgggctgactaccgccgcaaccacaaaggtggtataccaccgcagcggacccggaagacgtgtattcgtaaaaataaagtggctgggaacccttgccccatctgccgggatcacaagttgcatgttgactttaggaatgtgaaactcttggaacagtttgtttgcgcccacacgggtatcatcttccacgccccctacacaggagtctgtatgaagcagcacaagaagctgacccaggccatccagaaagccagggagtatggtctcctcaggtactacgttccccagttcgagccccgagacactgacctcagtactgcccatggagctgtcagtgtcactccgccggcccccacgttgttgtcaggagaaccttggtacccatggtacagctggcagcaaccaccagagagagaactgtcccgccttcgccggctctatcaaggaaatctcctagaagaaagcggccccccaccgagtcgatgatgcccgagatgcccaccgctccaccagcagaaaccgccactgagcagatgggctcccagagtgcttaggacctgtgaactggggaag

SEQ ID NO: 7404 - DNA, 788 bp, Cricetulus griseus
acaaaattcacactgggaagaaaccttcgaatgtaaggagtgtggaaagacgtttatctgtggctccgacctgacgcgacatcacagaattcacactggtgagaagccttatgagtgtaaggactgtggaaaagcctttagtagtggttccaattttactcgccatcagagaattcacaccggggagaagccttatgagtgtaaggagtgtgggaaggcctttagtagtggttccaattttactcaacatcagagaatccatactggagagaagccctatgaatgtaaggagtgtggcaatgcctttagtcagagctcacagcttattaaacatcaaaggatacacactggggagaaaccctatgaatgtaaggagtgtgaaaaggctttccggtctggttctgacctcacgagacatcagagaatccatactggagagaaaccctacgaatgtaagatttgtgggaaagcctattctcagagctcacaactcatcagtcatcatagaatccatgccggtaagaaagcctataaatacgaggactgcggaaagaactttaactacgactcacagcttattcagcatcaaaacatatattggtgataaacaaaaacacacaagctgtacgtgaagactcaaagctatccgatagtctacctttgaaatccctctagactgaagaatgtagaaacagtttacttgttgacctcagcttgttcatctgaagaaaattcatattggagagttgccctatgaatataatatattctggaggccttttagtaac

SEQ ID NO: 7405 - DNA, 788 bp, Cricetulus griseus
cagaggtcgagctggggcccgccgggcttcgtccccacccctagtggagatgggttctactcagagcatctcaggcactccagcgcggcctctgccacacaacaagcatctggcccgagtggcagaccctcgttcacctagtgcgggcatccagcgcactcctattcaggtggagagctctccacagccaagcctgtcaacagaagagctgagttgtcctaaacaagctcaagacccagatcctcgctctcctacccttggcattgctcggacacccatgaagatcagtggtacagaccctccgagttcactggtgaaagaactgagtgaagaatttgaaaccgaagcctccaagtccatttaccccacagagcttgctctgccccagcaaacacttttatcttctgaactggacctgcctttggattctcagttatcccttgaggaccagttgctgccatggagccagattgaactcccctccaaacaggtgtttaccaaggaggaggctaagcaatccacagaactcataattgccagccagaactcagacaagccctcaagagatcccgagactccccagtcttcaggttctaagctcaatagacggaaagcaaatagcaaggtactaggaagatctcctctcaccatcctgcaggacgacaactcccctggggccttgacattgcgacagggtaagcggccttctccgcttagtgaaaatggtaaggacctaaaggaaggagtcattcttggaactggaagacttctgaaaactggaggaggag

SEQ ID NO: 7406 - DNA, 788 bp, Cricetulus griseus
tccagccagctatcctgcagcgcggtcgcgggacgtgcccatgcgtccgccaaccatgtctgggcactttctgctggctcccattcccgagtcctcctccgactacctcctgcccaaggacatcaaactggcggtgctaggcgcgggtcgtgtgggcaaaagcgcaatgattgtgcgcttcttaacaaagagatttatcggcgactacgaacccaacacaggcaaactgtattcgagactcgtctatgtggagggggaccagctatcactgcagatccaggacactccgggaggcatccaggcccaagataacctcagccaaacggtggactctctgtccaagtgcgtgcagtgggccgagggctttctgctggtctattccatcacagactatgagagctaccagtccgttcggccactttaccagcagatccggaaggtccaccctgatggaaaagcccctgtcatcatcgtgggcaacaaaggagacctcttgcatgcccggcaggtgcagacacatgaaggtcttcagctagccaatgagctgggcagtgtcttccttgaaatttccactagtgaaaactacgaagacgtctgtgatgtgtttcaacatctctgtaaagaagtgagcaagctgcacagcctcagtggggagcggaggagggcctccatcatcccccggcctcgctccccgaacatgcaggacctgaagaggcgcttcaggcaggctctgtcctccaaagtaaaagccccctctgccctggggtgacccatctcagacagactgg

SEQ ID NO: 7407 - DNA, 788 bp, Cricetulus griseus
  modified_base (688)..(688): a, c, t, g, unknown or other
ctggcccagcgctgtggtttccgtggctgaggaggtggtcgcggcgggcaccctgcccggctctgctagcgccgcggcggaagcgccttccctcaggacatcaatgcaagcctgaagaaaaagtaattgctccattttaagccatggcatatcagttatacagaaatacgactttgggaaacagtcttcaagaaagccttgatgagctcatacagtcccaacagatcaccccccagcttgcccttcaagttctacttcagtttgataaagcaataaattcagcattggctcagagagtcaggaacagagtcaatttcaggggctctctaaatacatacagattctgcgataatgtttggacttttgtattgaatgatgttgaattcagagaggtgacagaacttattaaagtggataaagtgaaaattgtagcctgtgatggtaaaaatactggctccaatactacggaatgagtagagaaattcggcttttttatgccaccttctgttattttcatcgctttttgaagaaaaacatagaagagactttttttaatttattctcacggtgcagaaatgacaacactgtgctatactgtaacccaagggtttcacagagagaagcatgtgactctgttctcttacatgacctttagtacacagcataaagaaatgtaactttttttaangacaaatcaaaagtggttgccttcatacgaatattcttcaataaactaattttgtttaccttaaaaaaaaaaaaaaaaaaaaaaaaaaaaaaaaaaaaaa

SEQ ID NO: 7408 - DNA, 788 bp, Cricetulus griseus
  modified_base (62)..(62): a, c, t, g, unknown or other
  modified_base (90)..(90): a, c, t, g, unknown or other
  modified_base (596)..(596): a, c, t, g, unknown or other
gggaaggtgaagagctgccatgatggtctcaagttcttcatgaagctttgacagtaactacncaaactgacccttttggagacaaggacnaaaaaaaaaaattgtcattgaggtggtcagtgctaagagcagaaatgcgattctttgttatgaacattacaaaaaccaccttcctatgtttgtaaaatatttaagaaaaacattggcaaacattcatgcttaatattttggatactatttgtttttctttgtaggaaaaaaaagttgaaagtttctattttctatgaatcctttcagataccaatttagtttaatgcagaaaaaaaattgaacaaaacagggtaccagcatgggagactttcttaaaaaatgaaaacaccgaaccgaatgagaaaatgttgtatgtgtgtttgcttatactttaagctcttaaaaaaaaaagatttaggcatggggacaggaagctccacaagaactttgcagaaagtggttggggagagtagctgtgctccttggatgcttaagactcagtcttcgactgttccctttctatgcagagttttccttttatgttattaaactcccttggaaaaacntgtatcttacctgaccctgcagtagttgctaacagtggtagactcttgaaaatgtgcgtggtcctggagatgcaattagacttgcctggcttgacaataggatgtcattgttttccaggtcaggtgtcttctctttgattccacagacttagctcggggttcttggttaggcttctagcattggaaattgat

SEQ ID NO: 7409 - DNA, 787 bp, Cricetulus griseus
caggaagatgctaccaagtacttcagtgagttcttcaatgcaggggaatggagtcttgaattccagggatgcagcgagacacacagccggagcaaaacgctacaagtacctcagaaggctttttcgatttcggcagatggactttgagtttgctgcatggcagatgctctacctgttcacttccccacagagggtttatagaaactttcattaccggaagcaaacaaaggatcagtgggccagagatgaccctgctttcttggtcctcttaagtgtctggctctgtgtgtccaccataggatttggctttgtgctggacatgggattttttgagacaataaagctgctcctgtgggttgtattcatagattgtgtaggtgttggccttctgatttcaacattaatgtggttcatctccaacaagtatctagtgaaacgccagagtagagactatgatgtggagtgggggtacgcttttgatgtgcatctgaatgcattttatccactcctagtcattttgcattttatccagctctttttcatcaaccatgttatcctcacagacacatttattggatatttagttggaaataccttatggttgattgctgttggctattatatctatgtaaccttcctgggatacagtgcactgccatttttgaaaaatacagtaatcctgctctatccatttgcacctctcgctgtgctgtatggactgtcgctggcactgggatggaactttacccacatgctgtgttccttctacaagtacagggtgaagtga

SEQ ID NO: 7410 - DNA, 787 bp, Cricetulus griseus
cgccgcccccacgccgccaccatggtgcacccgcgcacgggctcatctccgtcttctccagcccgcaggagctgggcgcgtcgctggcgcagctggtggcgcagcgggccgcgagctgcctggaaggtgcccgaggccgcttcgcgctgggcctatcgggcggcagcctggtccccatgctggcccgagacctgcccgccgccgccgctcccgccgggcccgacagcttggcgcgctggacgctcggcttctgcgacgagcgcctcgtgcccttcgagcacgccgagagcacgtacggcctctaccggacgcacctgctctcaaagctacccattccagacagccaggtcctcactgtcaatcctgccctgcctgtagaggatgctgcggaggactacgccaggaaactgaggcaggccttccatgaagacactgttcctgtgtttgacctcctgatcctgggaataggcccggatggccacacctgttctctcttccctggtcatcccctcctacaggagcaagagaagatcgtggctcccatcagtgactccccaaagccaccaccgcagagggtaaccctgacactccctgtgctgaatgcagcccagagtgtggttttcgtggccacaggggaaggcaaggcagctgtgctcaagcgcatcctgcaggacaaggatggagcactgcccgccaccatggtgcagccgcgcacgggctccctctgctggttcctggacgaggcagccgcgcggctgctgtctgtgcccttcgagaagcattccac

SEQ ID NO: 7411 - DNA, 787 bp, Cricetulus griseus
aagataccatctgagaactagaaatggtataaagcctaccatctctgagtcaaggttcaagctcacagtctacatgatctgaaagactggaagccaaagaattaacacaaagttgatccagacaacttgcttgaaatgtggtggttccagcaaggcctctgtttcctgccatcagcacttgtaatttggacatttgctaccttcatattctcatacatcactgcaataacactccaccatgttgatcctgcattgccttatatcagtgacactggtacagtacctccagaaagatgcctatttggagtaatgctaaatattgctgcagttttaggtattgctaccatgtatgttcgttacaaacaagttcatgcactgaatcctgaagagaacctaatcatcaaattcaacaaagctggccttgtacttgggatactgagttgttaggacttctcttgtggcatatgtgcttcacatggtcactactgcagcagaatggtctatgtcattttccttctttggatttttcctgacttacattcgtgattttcagaaaattactttacgggtggaagccaatttacatggattaaccctttatgacactgcaccttgccctgtaaccaatgaaagaacaccgctgctttccagagacttttaatgaggggaaaaatacttctgtgataattatgattctcagggatttgagaaagatgcacaaaaacttgctcattatactctgacgatttgaatcagttaatcaaggctgacattgacattaatgaaa

SEQ ID NO: 7412 - DNA, 787 bp, Cricetulus griseus
  modified_base (65)..(65): a, c, t, g, unknown or other
gcagccgaccctcgctgcccatcccgcacctcctggagaagtatgcgcgtaagcgtggccagggngatcgcaggggctgacatggacccaaatccacgagcagccctggaacgccaacagctgcgtctcagggagcggcagaaattcttcgaggacattttacagccagagacagaatttgttttccccctatcccatctgcatctggagtcgcaaagaccccccataggtagcatctcgtccatggaagtgaatgtggacacgttggagcaggtggagtttattgaccttgcagatcaggatggagcagatgtgttcttgccttgtgaggactctccgccaactccccagatgtctggagtggacaaccatccagaggaattgagcctgccggtacccacgccagacaggaccacatcccgaacttcctccttgtcctctgactcgtccaacctgcgcagtccaaatccaagtgatgggggagcagacacacccttggcgcagtctgatgaggaggatggggatgatggaggggcagagcctggacactgcagctagcactgggcctcttgtggactggccaatctggctgttctccttagagaggggatcccaggcccagcagagcactctggagaagacctgacactttacttgccatcagccccagagtgagaaaggatggtggatgttgtacctgagaactagccttccccgctttctgctaactttctcccgctgcaaccttcccagtgcttttcttctgaggtaggacttccaaatgaga

SEQ ID NO: 7413 - DNA, 787 bp, Cricetulus griseus
gaaacaaatggtagctgacctttgaaagaagagcgtgtaaactgtatggtccagaaacaaacatactcgggaattaatgcttcatgaaattcaccatacctaacaggaaaatatgaactgccaccacctacttttgactagtttattcacttttagaagtcctctcacctccactcagaagtcaggaagcatttgttaagcctgccttgattctaagctcacttgctccattgaaaatgtgtgcattgaatatggaccctcttgtacatagaattatttcttcttcaatcaagtgcaactcaaactaaaaagtacatgtgtacattggcaggggctgcctttgtaataatggctgtcatcactgttgctaagatactgcattcctcatttgagttccgaagtggaactaacacgtcttttaattaaccccttacgtgaaaggttagctgtgtgttatattaaccgtatcatgtttaagttattaggttcagggtatttgtaacttattgttattgggcctgtcatacgtcttagggtatttgagtaatcaaatatttaacgttgagactttgatttgaagtactactaatgaagtcttagcactttgacaatttttagttgtaacttatggtagcagtagataattcagtgtagttgggaagttgctcccagatgtactgagtaggtttttgatttgttttttgttttttttgttttgtttttggtgagtggtccagagctccaagctacttttctaaacattagaaacctcccctcaggtgctttg

SEQ ID NO: 7414 - DNA, 786 bp, Cricetulus griseus
agcggcgatggcttcgggcggctggcgctgggctcggaaggcgctggctgcggggcgaccgctgttccggggccgcgcgctgctcgtcaccaacaccctgggctgcggcacgctcatggctgcgggcgacggcgcgcgtcaggcctgggaggtgcgcgcgcgaccgggacagagcttcagcgcgcggcgctcagcctgcatgtttgcggtgggctgcagcatgggccccttcctgcacttctggtacctgtggttggaccgcctcctccctgcctcgggcctccgaagccttccgagcgtgatcaagaaggttctggtggatcagatggtggcctcgcccatcctgggcgtctggtacttcctgggccttggcagcctggaaggccagacgctggaggagagctgccaggagctgcgggccaaattctgggacttctacaaggctgactggtgcgtttggccagccgctcagctggtgaacttcctcttcatcccttcccatttccgagtcacttatatcaacgggctgacactgggctgggacacgtatctgtcctacctgaagtactgggcccctgaaccccttccaactccgggctgcgtggactgaacttgaatgctgcggaggagtaggccaatggacacactcccataggaggttctggaacaggtcagagctctgagccacatccaaaacccaggctgactaagtctggaccagctatcccttcggagtctgccatggagacagtttgcccatgtgaaacagccccagcaccagctgtc

SEQ ID NO: 7415 - DNA, 786 bp, Cricetulus griseus
taatcaagtatgggacagcataattcagcaggcaaccaaaaatagtggatatcctgaaaagatcctgaaacagtcaagcagctgggtagcatattaaaaacaaatgtgagagcctgcaaagctgttggacatccctttgtaattcagctcgggagaatttatttagacatgctcaacgtatataagtgcctcagtgaaaatatttctgcagctattcaagctaatggagaaatggttacaaagcaaccattgattagaagtatgcggacggtaaaaagggaaactttaaagttaatatctggttgggtgagccgttccaatgatcctcagatggtagctgaaaactttgttcctcctctgttggatgcagttctcattgattaccagagaaatgtcccagctgctagagaaccagaagtgcttagtactatggccattattgtcaacaaattaggtggacatataacagctgaaatacctcaaatattcgatgcagtttttgagtgtacattgaatatgataaataaggattttgaagaatatccagaacacagaacaaacttcttcttgttacttcaggctgtcaattctcattgcttcccagcattcctagctattccacctgcacagtttaagcttgttttggattctattatttgggcttttaaacatacaatgaggaatgttgcagatacaggcttacagatactttttacgcttttacaaaatgttgcgcaagaggaagctgcagcccagagttttatcaaacttattttgtgatattct

SEQ ID NO: 7416 - DNA, 786 bp, Cricetulus griseus
ctcttttagtcattttgctccacagatggctcctgctagaagtggggaatgcctgaggtggtgattctccagctgcaagtcacagaggaatgaaagctctaattaatttgggagcatctcctcaagtccaggatgtacttccttctcaaagggcatttccattgagaaaaacaaagtggaaagaaagatctcagggagagagcagaaatgtccttggtctccttgccatcaataggagccaaatgtattctccttgatgcacaaaaccagaactcactcatatcttcatatttccactgaagacagaagcaaatgaaagaatgctagcaaagcaatagcatttgcccaaatctgcctcctgcggctgggagaaagtactctgccatttgtagaaataggcttggtaaatttgaacctcaatttgaataacctgtcaatattttcttttctaacaaatgacaggtgattttacttgctaatgttatcttggcattttgagaattaggttcagcatagagggtattgtctcttggtatatataggtcacataatagattgtaccatctgtcagccgttcatttggtaagcttcatggagatctggaaacatgaagagaacaaacagaaagtatttgaaacctgaagaactcccagatttcaagcttatcttgtatttgttaactttgggatgaaagaaagaaagaaagaaagaaagaaagaaagaaagaaagaaagaaagaaagaaagaaagaaagaaagaaagaaagaaaaaaaaaaaaaaaaaaaa

SEQ ID NO: 7417 - DNA, 785 bp, Cricetulus griseus
  modified_base (698)..(698): a, c, t, g, unknown or other
tcagtactggaaattctggacaccgcaggaaccgagcagtttgcctccatgagagatctgtacatcaaaaacggccaagggttcatcctggtgtatagtttggtgaatcaacagtcttttcaggatatcaagccaatgagagatcagattgtgagagtgaagagatatgaaaaagttccactaatcctagtaggaaacaaagtggatctggaaccagaaagagaggttatgtcttcagaaggcagagctctggctcaagaatggggctgtcctttcatggaaacatcagcaaaaaagtaaatcaatggtggatgaactttttgctgagatcgtcaggcaaatgaactattcatccctgcccgagaagcaagatcagtgttgcacaacttgtgttgtccaaagtaaaaaaaaaaaacctcaatcctggccataccgagcagataaaactcagaggaaatttgcacagatgctgctttggagaactttacaacctgggttgcagaactgagccttggtaaacctgtctctatcacagcatgttgccatacatctaatgaagtgcataaggtctttggccctcaagatccaaggaccttaacagtaatgcttagcacgtttaccatacatttaaaatctgttctttgccaatctgtccttttctagcttttaagttcttattgatggctaatatgaaaggnttaatttttaatattgttagttgattttctttaatctagtttctcaacttgtatttattactcaaactcagtattacctactcaatg

SEQ ID NO: 7418 - DNA, 785 bp, Cricetulus griseus
gcccactccttccacctcctgtctccactgatgggcttcctcagtcgggcttggagccgcctgagggtcccggaagccccagagcccctggccggcagaaacagtaactggagcagatcagatagaagctgatgctcatccggcacctccccttgttcctgagaaccaccccccctcagggggaggctgaagaaagtggaactcctgaagagggtaaagcagcccagggaccctgcctggatgtgcaagccaacagttcccctcctgaaactttgggactttcagatgatgatagaagatgacgactgtgaggttgtggtcccagaagattcagaagcagctgacccagacaagagtcccagccatgaggctcagggttgtctgcctggagagcagacagagggacttgtggaagcagagcactctctcttccaggtggccttctatttacctggagagaagccagcaccaccttggactgcccctaagctgccccttcggctgcaaaggaggcttacgttgttgagaacccccacccaggatcaggaccctgagactcctttacgggccagaaaggtgcatttctctgagaatgtcacagtccatttccttgctgtctgggcaggaccagcccaggctgcccgacgtggtccctgggagcagcttgcacgagataggagccgttttgctcgaagaattgcccaggcggaggagaagctgggtccttacctcacccctgccttccgagccagagcatgggcacgccttggaaacccatcgcttcc

SEQ ID NO: 7419 - DNA, 784 bp, Cricetulus griseus
  modified_base (776)..(776): a, c, t, g, unknown or other
gagttcggtggcgggaaaggccatgagtaaaagccgagccgaggccgcggccggagcccccgggatcatcctgaggtacctgcaggagcaaaaccggccctacagcgcccaggacgtgttcggaaacctgcagaaggaacatggactgggcaaggcggcggtggtgaaggctctggatcagctggcccagcaaggcaagatcaaggagaagacgtacggcaagcagaaaatttattttgcagaccaggaccagtttgacatagtgagtgatgctgacctccacagcctggatgccaacattgtggccctcactgccaaggtgcagagcttacagcaaagctgccgccacatggaggctgagctgaaggaattaacaagtgcgctgaccactcctgagatgcagaaagagatccaggagttaaagaaggaatgtgctcactacatagagagactgaagaacatcaaagcagccaccaaccatgtcactccagaagagagagagcaggtgtacaaagaaaagcagaagtattgtaaagagtggaggaagcgcaagagaatgaccacagacctgtgtgatgcaatccttgaaggataccccaagagcaagaaacagttctttgaagaagttggcatagagacagatgaagatcacaatgttaggctcccagacccctgaggggtccttggagacagggagcagaagtcctgggctggctaccttggttaggtggccttcttgttcttaaaataatttgattaataaaaataaaaaaaanaaaaaaaa

SEQ ID NO: 7420 - DNA, 784 bp, Cricetulus griseus
ggcgggttctgctcgcaggttgtgacccccgtggagtggcagtctctgtccagtgtccccgcgacgtcgcgcgttttctccggcgtgcccagggtgcgcggcccgcgcggtgtcagaatcatggtgtcatggaaggggctttattttatactcttcctgtttgcaggaagctttttttggaagttatttttatgctgggtcccattattcctttgatgtttatcaacctgtcgtggtatcgctggatcagcagccgttttgtagcttcgtggctcacgcttcctgtggcattgttggagaccatgtttggtgtaaaagttggttttaacaggtgatgcatttgtacctggagaaaggagtgtcatcatcatgaaccatcggactagggtagactggatgttcctgtggaattgtctaatgagatatagctacctcagattggagaaaatttgcctgaaatccagtctcaaaagtgttcctgggtttggctgggccatgcaagctgctgcctttatctttattcataggaagtggaaggatgatgcccaacagagatgctctggcacagtcacagtaaagactaatggaggggatccccgttggtgttaacttgtttacatttctttatataaaataatgtgctttcagtgccttagttacgggtccctttcttttcctgttccaagaattctataacgtgttcttaaataaagtctctccttgtcactcactaggaggaaaaatggtgtctaaacactggtcactggtggacagatacaaaaca

SEQ ID NO: 7421 - DNA, 784 bp, Cricetulus griseus
actcggaagaacacaacacagggcttggaaagacagagcactttcctggtagcaatgccactttccgaatactggaggttggctgcggtgctggaaatagtgtttttccaatcctgaacaccttgcagaacattccaggatcctttctttattgctgtgattttgcccctgaagctgtggagcttgtaaagtcacatgcgtcctacagtgaggcccactgttctgcctttgttcacgatgtgtgcgatgacggcttagcctacccttttccagatgggatcctagatgtcattctccttgtctttgtgctctcttctattcaccctgacaggatgcaagctgttgtccaccgactgtccaggttgctgaagcctggaggaatgttattatttcgggatcatggaagatatgataatgctcagcttcgctttaagaaagggcgttgtttatctgaaaatttttatgtccgaggagatggtaccagagcctatttctttacaaaaggggaaatccaccatatgttctgtgaggccggattacatgaaaagcaaaatctggttgatcatcgcttgcaagttaacaggaaaaaacaagtggcaatgcaccgagtgtgggttcaaggaaaattccagaaaccattgcactggactcaaaggagctgaaattagcaatctcctttctcacaacagagctatgtatcatgttaaggtatgaaaccacacccaccaccaccaccaccaccaccacacacatgtaagccaaagtaaaccttttctctccaaaa

SEQ ID NO: 7422 - DNA, 783 bp, Cricetulus griseus
caggcccaaggaaccagcccaatacagctctgctgtccctcatcctcatgctggggactttcctcattgccttcttcctgcgcaagttcaggaacagccgcttcctggggggcaaggctcgacgcatcattggggattttggcattcccatttccatcttggtgatggtcctggtggactactctatcacagacacctacacacagaagctgacggtgcctacagggctctcacacagctgccactgtccgctctgttacccatgtcaatgcattgaccgtcatgcgcactgccatcgcacctggtgacaagccccagatccaggaggttcgggagcagcgggtcaccggagtgctcattgccagccttgtgggcctgtctatcgtcatgggggctgtgctgcgccggatcccattggctgtgctcttcgggatttttctgtacatgggggtcacatcactgtctggtatccagttgtcccaacgtctgctgctcattttcatgccagcaaagcaccatcctgagcagccctacgtgaccaaggtgaagacatggcggatgcacctgttcacctgcatccagctgggctgcattgctcttctctgggtggtcaagtcaacggcggcctcactggcctttccttcctgctcttgctcacggtgcctctgaggcgttgccttctgccccggctcttccaggaccaggggacgctgcaggcgctggactctgaagatgcggagccaaactttgatgaggatggccaggacgagtacaagtgagctg

SEQ ID NO: 7423 - DNA, 782 bp, Cricetulus griseus
gagatgcttggggcagagaaacaaggaacattttgtgtggactgtgagacttaccacacagctgcctccaccctgggcagccaaggccaggctgggaagctgatgtacgtgatgcataactccgagtaccccctgagctgttttgccctttttgagaatgggccttgccttattgctgacaccaacttcgatgtgctcatggtgaagctcaagggctttttccagagtgccaaagccagcaagattgagacccggggtacccgctaccagtattgtgacttcctggtgaaggtgggcacagtcacaatggggcccagtgcccgtggcatctctgtggaggtggagtatggcccttgtgtggtggctagtgactgctggagcctcctgcttgagttcctacagtagttttctaggtagccacaccaccacgggccccccacacgtatttggaaatagacatgatgctgtgtacgggccagcagataccatgatacagtacatggaactcttcaacaagatccgaaaacagcagcaagtgccagtggctggaattcgctagtgactggcagctgcccccatctaagctgtcaccagggtattgcccaggaggaacaggtgctgtacgcagggtccttgtccctggccccagctggttcccagctgtagcatgtgttctggggctctggactcccctcctgaccccatcacagctgttttttactcatgccttaactggatttggcttgtcttcaagaatggtaattgtgaagaatggagaagct

SEQ ID NO: 7424 - DNA, 782 bp, Cricetulus griseus
tcgggccgggcggcggacagccgaggaccgcggggcggcgccgtgtcctccgccatgacagatcagacctactgtgaccggctggtacaggacacacctttccgtgacaggacagggtcgcctgagcgagcagcaagtggacaggatcatcctgcagctgaaccgatactacccccaaatccttactaacaaggaggccgaaaagttccggaaccccaaggcatccctgggcgttggtgcggctctgtgacctcctaagccacctgcagcagtgtggggagaggcactgtcaggaattttaccgagcgctgtatatccatgcccagcccctgcacagccacctgcccagccgctacactctccaaaactcagattgcagagagctggactggggcagcgagagccgcgagctgagtgacaggggacccatgagcttcctggcaggcctaggcctagcagcgggcctggccctcatcctctactgctgccctccagaccccaaagtgctgcctgggacccgacgcatccttgccttctcacctgtcatcatcgacaggcatgttagccgctacctgttggccttcctggcagatgacctcagagggttctgacggacccagaccctgggccttacctgctacttaaccaaagagtcccctggctgcccactgtggggtccatgtctttttttttctaaatacttatttttcattatttataatttctattgagaacacatcaccttcactcttcaaggtgcttaatattaaatgttccaactg

SEQ ID NO: 7425 - DNA, 782 bp, Cricetulus griseus
aaagtttctgagtctttcactggtgagatttctcacatctaaccatgcgactttcggccctgttggccttggcatccaaagctacgctccctccccactaccgctatgggatgagccgtccaggctccctatcagacaagaggaagaatcctccatggagcaggcggcgcccagtggtggtagagcccatctctgatgaagactggcacctattctgtggagacatggtggagatcttagaaggcaaggatgctggaaagcaaggcaaagtggtccaagttattcggcagcggaactgggttgtcttggaggggttgaacacgcatttccgctatattggcagaaccaaggatcaccgagggaccatgatccctagtgaagccccattacttcatcatcaggtcaagctagtggaccctgtggacaggaaacccactgaggtccagtggagatttactgagtcaggagagcgggttcgcgtctctacaagatctgggagaattatccccaaacctgaatttcctagagcagatggcattgtccctgaaatatggactgatggccccaaggacacatcagtggaagatgctctaaaaaaaacttaatgtgccccggctaaagacattagaagaagatgtgatggaggcaatggggatccaggagcctcgaaaacacaagaaggtttattggtattgagcctgagagtgctggttctgcctgctcagtctttaccttgagggtgggaggctgctcttcccccaacaccaataaagagccctgag

SEQ ID NO: 7426 - DNA, 782 bp, Cricetulus griseus
tttgatcttggaagaatggctttcacttcaacaaggtaatgcaggtggtgaaggagcaggttatgagagcgcttacaaccaagcctagctccctggaccagttcaagagcaaactgcagaatctgagctacactgaaatcctgaaaatccgccagtctgagaggatgaaccaggaagatttccagtctcgcccgattttggaactgaaggagaagatccagccagaaatcttagagctgatcaaacagcagcccctgaaccgcctcgtggaagggacctgctttaggaactcaacgctcgtcggagacaagataaatttggtattgtcggctttcccaaatcacaaggtcttacattatggagacttggaagagagtcccccaaggagaagtgccccatgattccctgcaggacaaattgccggtggcagatatcaaaagcagtggtgacggggaaaggactgccctcatatgaaagagaaaggtgcccttaaacaaaacaaggaggtgcttgaacttgctttctccatcttgtatgactcaaattgccaactgaattttattgctcctgacaagcatgagtattgcatctggacagatgggctgaatgcactgcttgggaaggacatgttaagtgacctgacaaggaatgacctggacaccctcctgagcatggagatcaagctccgcctgttggacctggaaaacatccagattccagatgcacctccgcccatccccaaggagcccagtaactatgacttcgtctatgactgtaactga

SEQ ID NO: 7427 - DNA, 781 bp, Cricetulus griseus
gctatggaggttttgatgactatggtggctataataattatggctatggaaatgatggctttgatgacaggatgagagatggaagaggcatgggaggacatggctatggtggagctggtgatgcaagttcaggtttccatggtggtcattttgtgcacatgagagggctgccttttcgtgcaacagaaaatgatattgctaatttcttctcaccactcaatccaatacgagttcatattgacattggagccgatggcagagcaacaggagaggcagatgtagagtttgtgacacatgaagatgcagtggctgccatgtctaaagataaaaacaacatgcaacatcgatatattgaactcttcttgaattccacccctggaggtggctctggaatgggaggtctggaatgggaggctatggcagagatggaatggataatcaaggaggatatggatctgttgggagaatgggaatggggaacaactacagtggaggatatggcactcctgatggcttgggaggttatggtcgtggtggtggaggtggtggttactatggacaaggtggaatgagtggaggtggatggcgtgggatgtactgagaccacttcctccaacgtacaagtcctaacaacatctgctgactttcttacagattgaatttcttttgtatttcaagaactttataatgactgaaggaatgtgttttcaaaatatttggttaaagcaacagattgtgatgggaaaatctgttttctgtaggttttatttgttgcatactt

SEQ ID NO: 7428 - DNA, 780 bp, Cricetulus griseus
ctgatgcagcacctggaagactgaggattgtccatgggatgtgctgacctacaagatagaaaaggcttttccaaaccatgttagacgacagtgggaagacgatcctccaaatgtacatattattggaaatctacctttttagtgtttcaacaccactgattatcaagtggcttgaaaatgtctctcttaaaaaatggacctttcacttatggcagaactaagatgacactaacatttcaaaaggaagtagctgagagacttgtagccaccacaggaagcaaacagcgcagtcgtctttccattatggcccagtacctctgcaatgttgaacacctctttacaattccaggaaaagcttttgttcccaaaccagaggttgatgtaggagtggtacactttacacctttgatacagcccaagatcgagcagccgttcaagctggtagaaaaagttgttcagtacgcgtttcagttccgaaggaagtattgccaccaaggacttggaatgttattccccaaagctcaacgcctagaaaacacaggaaagctgttacagttggcagacatcgacccgactctccggcccatccacctctcgctcatgcattttaagagcctatgtgatgtgtacagaaaaatgtgtgatgaagacccacaactctttacttacaacttcagagaggagctgaagcaaaagagaagaaaaggccaagagaaaggcgatgacacagaaaaataaaagtactttaaataaaaaaaaaaaaaaaaaaaaaaaaaaaaa

SEQ ID NO: 7429 - DNA, 780 bp, Cricetulus griseus
gatgacttgagagaaggtgcacagtatttgatgcaggctgctggtcttggtcgtatgaaaccaaacacgcttgtccttggattttaagaaagactggttacaagcagatatgagggatgtggatatgtatataaacttatttcatgatgcttttgatatacagtatggagttgtggtcatccgcctaaaggaggactggacatatcacacctccaaggacaagaagaattattatcttcacaagaaaaatcacctggtaccaaggatgtggtggtaaatgtggactacagtaaaaagtcagatcaagatacttgcaaatcatctggtgaaaaatctattacacataaagatgaggaagaggatggcaagactccaaactcagccactgttagaaaaaaagaatacccaaagggcctagttgcacctttaaatgtagctagaccggtcagacattttcaaggttacagcagtactctaaaatgaaaattttcaacaattaattcttagacatgctagctagtgttaaagctatttttattttatgctgaattctgattactttgatgccaaattatttttagtcctaatcattgataataacttgaaaataattatgcagtggcaatttgaactcattgttatgataggtaaaaaattcagtgggttcaagagaatattggtgttggttattaacagttactaaatcaaatatttatttgttgcaatgtttcctttgtgctttaggttttcctttacacccttttcatattgctttctgac

SEQ ID NO: 7430 - DNA, 780 bp, Cricetulus griseus
aggacccagcagacagattttacaaggtgtatttttacacattctagcagatacacttgggagtattggtgtaattgcctctgccatcatgatgcaaaattttgggttgatgatagcagatcctatctgttcgattcttatagccattcttatagttgtaagtgttattcctcttttaagagagtctgttggaatattaatgcaaagaactcctccctcattggaaaatacacttccccagtgctatcagagggtgcaacagttacaaggagtttacagcttacaagaacagcacttctggacgctctgttctgatgtttatgttgggaccttgaagctcctagttgcccctgatgctgacgccaggtggatcttaagccaacacataatattttacacaggctggagtgaggcagttatcatcacaccaagccagtgagagattcagactgtgggctgccactcttcctaatgtcttcactaaagctgctggaaaccactgcttttatccctacaaaaccagtgttgtttttacaagccgaagtctgttttctatgaaatgtcacagttgttgacgttcttcagtgtaatcatacgtttgtaaaattgtttgtaccttgcaaacttatgaaccaaaccatattgggttttcaaagtgcctttgtatccgaaatatatttgccagcacagtaatgtaccatcaaaggtcatatgtatgttttttaatggatattctgtaatttgtacaaaataagacttgctagtaacatatataattgt

SEQ ID NO: 7431 - DNA, 780 bp, Cricetulus griseus
aggttggagccttgagcgctgaggtgctgggccgtcggcacagagcagctctggctgggcgaagtctctcatctccctcagaccggacaaacccagtccctggtagaccccggcatccctctctagatgcaataccagatggagcaggctctgagccaggacaacagctgggtcagggcctagatgattcaggtgggtgttgggctggaagggccgagtcagaaggtcctggctacgggccgtgcagacgagcaaggccagctctgccccatcccacttcacctgccctgttgctgtagatgcttctaccagggaggtctttgcctggaggcctacaggtgtggagttcagcctcaggtgcgactgcaagaggcaccaggctccttccgcctggatgaacctttctgtgccgctgtgtgcattcctcaagagcgtctgtgccgagcctcaccctttgctgcacaccgtgccagcctcagccccacctcagcctcatctccttgggcacttctgggccctggtattggccaaggcgacagtgccacggcctcctgcagccagtcccccagctcaggctctgagggtccaggccaagtggacagtggacggggctcagatactgaagtctcagaaggaatggaaaggcagggcagctctgatctgcggggccgcagttgggccacagcagtggctctggcatggctggagcaccgctgtgcagctgcctttggtgagtgggaactacagcatccaaagctgattgctggctgagggcccaac

SEQ ID NO: 7432 - DNA, 780 bp, Cricetulus griseus
ttctttgtttttttttttcccgtagatgggatttatctgtgtagccttggctgtcctggaactcactctgtagccccaggctgacctcaaactcgcaaaagatctgacctggctctgccagctttgggacagttgagaaggccacatacttactttttaggtccaaacccctggctgataattaaggtattgtcacatggtttgagtgaatgtaagcttaaataagtgccacgtgtaacatcttttgggaggtaactaaaatgctagttaaggaatctctaccatgtggcattttgtaagatggggaacagtacagtccaaagggaagtttttaaagtattgaaaagggtgaatgatatttctgcataaaaccctaagacctgaagtgagagaaagaggattgtagtttgtctgacagcagccaaagtggagtctgatggaacctgctaggtcagtctttgagcaactgcccaaagcaggaggttcaactgagaaacccctggacagcttcatcctagcacatgaacctcagaggcatattctttaaagtgtgtagactgtgatgctgttcacatgtggctctgacttgtttctaatgtgattgaatttcatttgtttctagacagctttatagaaatgcaatttttatacttaaaaactgttcatttgtaagtcaatgcattataaaatggttgtgtttattctttgtattagttttgattaatttatcgcagtgtatttattttatatataattctgttaaaaaaaaaaaaaaaaaaa

SEQ ID NO: 7433 - DNA, 780 bp, Cricetulus griseus
acatggcgctggctagcgtgttgcagcggccgatgccggtgaaccagcatgggttttttggattcggaggtcgtgcagatctgctggacctgggtccggggagtcctggtgatgggctgagcctggccgcgcccagctggggtgtcccagaggagccgagaatcgaaatgcttcatggaaccaccacactggccttcaagtttcgtcatggagtcattgttgcagctgattcccgggccacagcgggagcttatattgcctcccagacggtgaagaaagtaatagaaatcaacccttaccttctgggcaccatggctgggggtgcagcggattgcagcttctgggagcggttgctggctcgacaatgtcgaatctatgagcttcgaaataaggagcgcatctctgtcgcagcggcctccaagcttcttgctaacatggtgtatcagtacaaaggcatggggctgtccatgggcaccatgatctgtggctgggataagagaggccctggcctctactatgtagacagtgaggggaaccgcatctctggaacagccttctcggtgggttctggctccgtgtatgcttatggagtcatggaccgaggctactcctatgacctagaagtccaggaggcttacgatctggcccgccgagccatctaccaagccacctacagagatgcctactctggaggttcagtcaatctctaccacgttcgggaggatggctggatccgtgtctccagtgacaatgtagccgatttacacgacaaatatagta

SEQ ID NO: 7434 - DNA, 780 bp, Cricetulus griseus
ttcccaggatggtcctcccactcagagctgagggaactcctctgttcagccgatgcagtgtgctttgatgtcgatagcacagtcatccaagaagaaggaattgatgagctggccaaattctgtggtgtggaggctgctgtgtctgaaatgactcggagagccatgggaggggcattgcctttcagagatgcgctcactgaacgcctggcactgatccagccctccagggagcaggtgcaaaggcttctagcggagcaccccccacacctgacccccggcataagggagcttgtaagtcgcctacaggagcgaaatgttcaggtgttccttatatctggtggctttaggagtattgtggagcatgtggctgctaagctcaatatcccaacgaccaacgtatttgccaataggctgaaattctactttaatggtgaatatgcaggttttgatgagatgcagccaacagccgagtcaggtgggaaaggaaaagttattcgaaattttaaaggaaaagtttcactttaagaaaataatcatgattggagatggagctacagacatggaagcctgccctcctgctgatgctttcattggatttggaggaaatgtgatcaggcaacaagtaaagagcaatgccaagtggtacatcactgactttgttgagctgctaggagaactggaagaatgatgtcaacttcttgtttactcagaacaactccaatttctggaagttacacagttaggctcctgggagagcccaggagatagcttagttttttt

SEQ ID NO: 7435 - DNA, 779 bp, Cricetulus griseus
gttgaatctggaaattggaggagacgttgtggacggacagcgcacaaggagttggtatccatggaggagcaggacgccagggtcccagcactggagccattcagggtggagaaggccccacctctaatctactacgtccctgacttcatctccaaggaagaggaggactatttgcttcgacaggtttttaatgccccaaagccaaagtggacccagctgtctgggaggaagctacagaactggggtgggctcccccatccccggggcatggttcccgagcgacttccgccatggcttcagcgctacgtggacaaagtgtcagacctcagcctttttggtggtctcccagctaaccatgtccttgtgaaccagtatctgcctggggagggcatcatgcctcatgaagatggaccactgtactacccaactgtcagcaccatcagcctgggctcccacacggtccttgatttctatgagcctcgacagccagaggacgatgcccctatagaacagccccggccgcctccacaacccatcacctcgctgctggtggagccgcgcagcctgctggtgctccgcggtacagcttacacgcacctgctccacggcatcgcagccacccttgtggatgagctggacgccacctcgctgccacccaatgcagctgcgtgccagtcggcgctgcccggagcccacctggtgcgcggcacccgagtctccctgaccattcgccgggtgccccgcgtgctgcgcgccagcctcctgctgagcaagtgacc

SEQ ID NO: 7436 - DNA, 778 bp, Cricetulus griseus
ccatgggtgaggactgggccctgggccccgcgctgggctcctctttgcttctgtgctccgcgctgctggccgcggggtgcgcgctgggcctgcgtctgggccgcgggcggagcgtggtggagcgtggtgtgctcgcctggctgtgctatgatgccctggtgcacttcgtgctggaaggcgcttttgtctacttgtctctagtaggaaatgttgcagattcccaaggcttgattgcatctttatggaaagaatatggcaaggctgatgcaagatggctatattttgattcaaccattgtgtcagtggaaattctgactgttgtcttggatgggtttctggcattggttctcatttatgccatagtcaaggagaaatattacaggcatttcatacagatcaccttgtgcgtgtgtgaactctatggtggctggatgaccttctcccctgagtggcttcttggaagccccaacctcaacaccaagagctacctctacttttgggtgtatttggtgttttttaatggtttatgggttctgatcccaggactgctgctgtggcagtcatggagggcactgaaggagacatattaccaaggggccaatttagagaaaaaacacttgtaaattctcaaaatgttgtatcctgatgttctgctttatgagtcagaattgaccagacattccaatcaatacttcatttttacagtgttgtttccaaatagccattacagatgggttggaaggtggcaaactttgttgtttgtttttgtcctttatta

SEQ ID NO: 7437 - DNA, 778 bp, Cricetulus griseus
gatccaaccagatgaacaacatcctccggatcattgccgatttgcaagtttcctgcagctatgatcacctcactaccctgccacatgtgcagaagtacctgaagtctgtacgctacattgaggaactccagaagttcgtggaagatgacaactacaaactgtcactcagaatcgaaccaggaagcagctctccaagactagtctcttccaaggaagatcttgcaggcccctctgctggctccagctcagccaggttccgccggaggcccacctgtcctgatgcatctgtggctggcagccttcccacgccaccagtcccccagaccataggaagagccacagcctgggcaacaacgtggaccaggtactgggtcgtactctcaggatccaccctcctatactatggagccaagtccttgcggggcacagacagaaaacattataaatctacacctggcaagaaggtctccatcttgggctggatggtgcagctgccggatgaccctgagcacccagatatcttccagctgaataaccctgacaaaggcaatgtttacaagttccagacgggctcccggtttcacgcaatactgtggcacaagcacttggatgatgcgtgtaaaagcaacaggcctcaggtaccggcaaaccttatgtcaattgaataagtatctgcaggacttggcgtgacctcaaaggcttctgggagcctggactaggtctggtggaggagagcagctctgggcataagctgttggccaaggcactggagccccat

SEQ ID NO: 7438 - DNA, 778 bp, Cricetulus griseus
gtggggtgtgctggcggctggcggagtgagactttggcagacatggctcccagctcgctggctcccgaacccgagagtcggaagggtatccgggcggtgctgctggggccgcccggggctggcaaggggacccaggcacccagattggctgaaaacttctgtgtctgccatttggccactggggacatgctgagagccatggtagcttcaggttctgagctggggaaaaagctgaaggccacgatggatgctgggaaactggtgagtgatgaaatggtcgtggagctcattgagaagaatttggagagtccttcatgcagaaacggctttcttctagatggcttccctcggactgtgaggcaggctgaaatgcttgatgacctcatggagaagaggaaagagaagcttgattcggtgattgaattcagcattccagactccctgctgatccggaggatcactggaaggttgattcaccccaatagtggccggtcgtaccatgaggagttcaaccctccaaaggagcccatgaaggatgacatcactggagagcccctgatccgaagatcagatgacaatgagaaggccttgaagatccgcctggaggcctaccacacgcagaccaccccacttgtggagtactacaggaaacggggaattcactctgccatcgatgcatgccagacccctgatgttgtgtttgcgagcatcctagcagccttctccaaagccacatgtaaagacttggttatgtttatctaatgttgggttctaaagg

SEQ ID NO: 7439 - DNA, 778 bp, Cricetulus griseus
ttgtgaacttgttttttaagcacacacacacacacacacacacacacacacacacacacacacacacacacacacagggttagaagctggcaatggcggtggggccttcagagaggtgctttgtgtgacctgttccaacacagatgcatcaggagtccttccagcccttccccttggcctgtctccctgaaatacagaggtaccttgcttcactgagagggcagggaagtcagacctctccagtaggtctcggagaacaggagggccagaacttttcaagttatcttaatttttatgcaaaatattatcctatgaaaggtttacattctccacatgatgaatatggattaagaaacctgtgctgctatcctgccaagatcattacaatggagtcagtttgcagtacataccgagtgtcaggctccttcaagctgctttagaactaacgatgaagaacatggacatttatattggggttattcttaagtaaactaagtgtgtacaaattacgtgttttgtattggaagctttgttattaagattttcatacttttatccacgggctgcttttaaggttaatactttttggcatggttaatgcctacagcactgtacatacaagaaaatatataagtgtactttgcatagttaaggtaaagtaagtctccagttggctaccattaaatataatggcactttgttttgtgttattggaaaatgttacattgccattaactccccttgtctgtctgaagaaaaataaagtacagtgtgcagc

SEQ ID NO: 7440 - DNA, 778 bp, Cricetulus griseus
  modified_base (659)..(659): a, c, t, g, unknown or other
tgcatggccagcaagcactaccttagtgccactgacatgctggtatcagcagtagagtctttggagggcccactgctccaggtggaaggactcagtgacctcaggctggaacttcacagcaagaagatgaacctgcacttggtcctcatagaggaattgcaccgacacctgtacatcaaatccactagccgagttgtgcagcgtaacaaagaaaaagggaagatgagttctcatggcaaagatgcctctcccggtcctctgattgatgttactaacatccctactccacgaaaattccttgatgccagtcagtattctgctgccggcaactcaagtgtgagggaggtgaacctgcaagacatcaaggaggacttggagtgtgatccagaggagagcagcactcttttcatggaattcttattcagggttgccagactgaaggagatcctgaacctggtggtggaccagggcgtgaagtacacagagctggagtatatccatgccctgaccctgctgcaccgcagccagaccggcgtgggggaccagaccatccagaacaccaggctgcagaggctcaaaggagatcatctgtgagcaggctgccatcaagcaagccaccaaggacaagaaaataacgaccgtctgatggtgtgccccgnagtgggtgagggtggggttcattcttagtgcagcctcgggttctagctactcagcatagcgtgagctgacctgcttttgcctacactgatgcttagtggatagaaagtggattattttc

SEQ ID NO: 7441 - DNA, 777 bp, Cricetulus griseus
gaggcacacgacaactgagaccatggcatttgatggcagttggaaagtagaccggaatgagaactatgataacttcatggagaaaatgggcattaacttggtgaaaaggaagcttgcagctcatgacaatttgaaactgaccatcaaacaagaaggaaataaattcactattaaagaatcatgcaggtttcgaaacattgacgttgtgtttgaacttggtgtcaactttgactatactctagcagatggaactgaactcaatgggacctggagccttgagggaaataaacttattgcaaaattcaaacgtgtagacaatggaaaggagctgattgatatctgcgaaatttctggtggtgaactaatccagacctacatatatgaaggagtcgaagccaagcggatctttaagaaggaatgagcaagcttcttggagcccagagcaaaaccctgaagagctgagctgatgtcagagtcatctctccaattgtgttaatgccaggcaggttcatcctttcatgaacactggcatattcccagtcttgtcaaagcccaaaatgtaaaagcttgttaggacttcatttgctttatgttccttaagatttgcatgaactggtttttaaaaggaaaataaatattgttcacacacaaaaaaaaaaaaaaaaaaaaaaaaaaaaaaaaaaaaaaaaaaaaaaaaaaaaaaaaaaaaaaaaaaaaaaaaaaaaaaaaaaaaaaaaaaaaaaaaaaaaaaaaaaaaaaaaaaaaaaaaaaaaaaaa

SEQ ID NO: 7442 - DNA, 777 bp, Cricetulus griseus
tgggccggccaggcgcgggctactgcgatggccaccaccggggccctgggcaactactatgtggactccttcctgctgggcaccgatgctgctgacgagctgggcgctggacgctatgcgccaggggccctgggccaaccccaaggcaggcaagcagcgctggccgaacaccccgactttagcccttgcagcttccagtccaagacggcggtgttcggtgcctcgtggaacccggtgcacgcggcgggcgccaatgcggtgccggcggccgtgtatcaccaccaccaccacccctacgtgcacccccaggcgcccgtggcggcggcagcgccggacggcagcaataatccggctgccaactggcttcatgctcgctccacgcggaagaagcgctgcccctatacaaaacatcagacgctggaactggagaaagagtttctgttcaacatgtacctcacacgggaccgcaggtacgaggtggcccggctgctcaacctcaccgagaggcaggtcaagatctggttccagaaccgcaggatgaaaatgaagaagatcaacaaggaccgagcaaaagacgagtgagccgccgccggtcagggctcatttagaaaagagcaagctaaaagaaaaagaaaggactgtctgtccccttctccctcctctcccccaaccccagcctccactccccgcccaaagaggctctaaaccccgggcctcatctccgcctggcattccctgctcaggctggctcctaggcctgcggctttattggaggag

SEQ ID NO: 7443 - DNA, 777 bp, Cricetulus griseus
cgccttggacctgtggggtccatacagagatccttgctgagaggacattcaggctcctggatgacaacatggaccagctcatggagttcaaagcttttgtaagctgtctagacattatgtacaatggagaaatgaatgagaagattaagctgctatacaggcttcatatcccaccagcactcactgaaaatgacagagacagccagtcaccattgaagaatcctctgttgtcaacatcaagacccctggtattgggtaagcccaatggtgacacaattgattaccagaaacaactgaaacagatgattaaggatttagccaaagaaaaggataaaattgaaggggattggactgtctccctggaacatatcttggcctcgcttctcactgagcagtcactggtaaacttttttgaaaagccactcaacattaaatccaaacttgaaaatgccaagctcaaccagtacagtctcaaaactttggacatgagccaccagccacagcatgaactgaagctgaataacctgtagctagaagtttgctgggaacacactggagcccaccacaccaaagcaagatcccagaaccactgtctgcacaacttgtatttggctttttttggcacttaattttgtttcaatgctggtaattgaaaccatttaaatatatttcgttgtattcactttgtatgtccttccaaaaacaatgtacaaaccaatgctttcaatgttggcccccaaggtttttcaataaaatctttctttttgtactgacttt

SEQ ID NO: 7444 - DNA, 776 bp, Cricetulus griseus
  modified_base (226)..(226): a, c, t, g, unknown or other
  modified_base (751)..(751): a, c, t, g, unknown or other
ggatgtggtgtgtccaggcgtgcggcggcctgcaggaggcccacccgggtcatttcttgagcctgtctctggtgctttctgaagtgaatcctgcgtgacgcttgtcgtcgtcgtctgtgggaacctgcgggcctcgggcgggagagatggatgcaagttcacacgacaagcagccctctgaagccagggagtgtgtcgttaataattctggaaatgcctcttttancttgggaaccggaaagtctgtgacgcctcagaagcgtgtagaagacgcgactcctaatctttgcacccccgttacggttaagtcacctttgaacttctccacgataaccgtagagcagtttgatgaatctttaccagccaatactccgttgtgtaaaggaggaacacctgtgcgtcaaagaaacttaaatgctgccagtcccctgcagtcaccagttcatgagcagttacttcagccaaattttgatgacagtgaggagaatcttgaaaacatagaaccaactcagataccaattgcaattctgagtcctagtaaatcttcattctctgagactcttccaggcattgacacttgcagttctttaggtaatcttgagcaaataagctataatgtcggtagaccaacacggatttctcacagaagaaagcaggtgatgagttctgcaggagggttgtgtgcaactcatacactacagaagctgagccctgtaaagagaagaggttttaaaaggttacagtaaaaaanaaaaagagaccatctcctcagaaca

SEQ ID NO: 7445 - DNA, 776 bp, Cricetulus griseus
actacgggaacggcctggagtctgaggagctggagcctggagagctgctgccggagcccgagcccgaagaggagccgcccggccccgtgccccccccgaagctccggggtcctgggcccggctcgggagcccccggcagccaggaggaggaggaagagccgggactggtcgaggccgaccccggggacggcgccattgaggacccggagctagaagcgatcaaagcccgagtcagggagatggaggaagaggctgagaagctaaaggagctacaaaacgaggtagagaagcagatgaatatgagtccacccccaggcaatgctggcccagtgatcatgtctcttgaggagaagatggaggctgatgcccgttctatctacgttggcaatgtggactatggtgcaacagcagaagagctggaagctcactttcatggttgtggttcagtcaaccgtgtcactatactctgtgacaaatttagtggccatcctaaagggtttgcgtatatagagttctcagacaaagagtcagtgaggacttccctggccttagatgagtccctgtttagaggaagacaaatcaaggtgattcccaaacgaaccaacagaccaggcatcagtacaacagaccggggtttcccgcgtgcccgataccgtgcccggactaccaattacaacagctcccgatcgagattctacagcggttttaacagcaggccccggggtcgagtctacaggggccgggctagagcgacatcatggtattccccttactaa

SEQ ID NO: 7446 - DNA, 776 bp, Cricetulus griseus
ttggctccatagcaagaatgtgtgcccttaatgaaaacattaaccaggttgtatttgtcggcaatttcctgagagtcaacacaatcgccaatgcgacttctggcatatgctctggattactggtccaaggggcagctaaaaggcacgtgttttcagagcacgagggttattttggagccgtgggtgcactccttgagctgttgaagataccctgactgttacccagaggacttcctgaaacctccacaggggcatctgtggactttgttttttttaatacaaagtattttcaaaatctgccctttatttacatgtgttttgggtcaattacatgcatgtttcattttttaaacaagtgattagcaaaaaatgcattaaagttttaaaatagcaattaaatatacaaaaatatagcttacaaaaaccaatgtttaaaaatattctgctgcagaattcttagtgtacaaacagtctatgaaacctgaggttcagcatttcataaacctttttttgagggagttatatctagtaaataagccccaaaaggctaaactacaagactaaagtgccactcccccactttcctggccatgtcaaccgcacaagttccttaacactggtagggccatgttcttagctacatcatgtctttgaaacagcaggggtgttctccctgaccctgtgaacaaaggaactaagaatgtggatacttgcttggtctaactagaataaaagcatcttgcagcaacttgggttctaaagctgaacatgaaaac

SEQ ID NO: 7447 - DNA, 776 bp, Cricetulus griseus
gaacaagctactggtggtagcttgttgactaaaaactcgaatctggagtcatgttaggaagtacatgctgaaggaaggctgcctcggagagattgtagttcatctcactgaagacctgctttccagggcatccatgaccgtagtcaatggatgcccaactctaaccatcaatatttctactgctcgagagcactggctggagggaatgctgaggcatgagataggcacgcattactttcgggctgttaacaaccttcagcaaccgtggaacagttggcctggccgcaaaaaacatgagctaaagcctaaaacaacccctggccagcattcatagtgttctgttttagaaaagaccccttcctgtggagggctgccctcctctactacacagtctatcaagccagccagatgtccttttgtgaactcttcaaagatattggcaagtttgtccaggaccctaatacaagatccagctgaaattttaggttatatgtaaacctgaaactattttcctaaaatatttctgtagactgcaggtggaagtcgcttttctcttcatccaaatctcaccagagacaaatgaagatcactgctgatgaagactccaggatgaattgtaaccttgagtacccaggccagctctggcttggaggtggccagattctaagctgtactgtataaactccaggtttctattttctctgctaaccagtggtgattgttcttcttcaaaattctctattttgtagcaggccaaaaggctagcaatatctaag

SEQ ID NO: 7448 - DNA, 776 bp, Cricetulus griseus
gcatcatgctgcagctctatgcccagatctgccgcattgtctgccgccatgcccagcagattgccctccaacgacacctgctgcctgcctctcactacgtggccacccgcaagggcatcgccacattggccgtggtgcttggcgcctttgctgcctgctggttgcccttcactgtctactgcctcctggggagatgccaactctccatatctctacacctatctcaccctgctccctgccacctacaactccatgatcaacccagtcatctacgccttccgcaaccaagacgtgtccccagcccccttgtccccatttctgacctcagttcccggagtggggatggagaaagaaaaacaatgtattttgttatttttgcttattttttatcagagagatcatagaaaccagagcctcctccccaggcccgcattgctcgggtttgcaggaggaacacaccagcctctggttttttaattttttaagaagccatcacctgaataaccgagaattcctctgcgctgaggcccggcttcccctctggtggccatttgggggaattgcaaccggcgaggtagtcgggactgtaaaatgcacccccccccctcttctccagcctggatttcagcgccacagccatggcctgggggccaggccttaccctgaggtgccctagaggaggcgggacaagagccaaataccccacccctctgccaataggggtacggtccctagtgcattcctgtccagtccccaaaaacctactcaataaaaaa

SEQ ID NO: 7449 - DNA, 776 bp, Cricetulus griseus
gtgtcctacagccatggccgctgccgtcgctgcagccggcgctggggagcccctgtccccggacgaattgctcccgaaagccgaggtggagaaggccgaagaggagctggaagaggacgaggacgacgagctagatgagaccctgtcggagagactgtggggtctgacggagatgtttccggagagggtccggtctgccgccggagccacctttgatctctcgctcttcgtggctcagaagatgtacagattttccagggcagctttgtggattgggaccacttcctttatgatcctggtacttccagttgtctttgagacggaaaagttgcaaatggagcaacaacagcaactgcagcagcggcagatactgttggggcctaacacagggctgtcaggaggaatgccaggggctctacctccacttcctggaaagatctagattgtttcttgggtatttgtcctggtaggagaacttcgaaattcagttgaactgctgattgtttggacttttattctttttttttaaactttggcacatccatctatttaaatctggtgggaactttctctgtttctcatggagagactccagttaacacctgtgccctccataatgagttctcacttatttcctgttctcaatctgatgctagagtacagccatgtggaaggctattccacgctatccctttagtaaattgttcctataaagttctcacatgccccttgtgggaagaagtaagcgtcccctgactattgaagtactttttttt

SEQ ID NO: 7450 - DNA, 775 bp, Cricetulus griseus
cctgccacaggcatgaggggtccccggccgagatgacagtgctggtgccagcctggaacccaaattcctctctgctgctgctgttgctgctgctgagtccttgcctgcggggcacgcctgactgttacttcagccacagtcctatctcctccaacttccacgtgaggatcagcgagttgactgactacctgcttaaagattacccagtcactgtggccatcaatcttcaggacgagaaacactgcaaggctttatggagcctcttcctggcccagcgctggatggagcgactgaagactgtggcagggtctgaaatgcaaaagctcctggaggttgtcaacacggagatacatttcgtcacctcgtgtgccttccggcctctcccagagtgccttcgcttcgtccagaccaacatctcccacctcctgcaggacacctgcacacagctgttggctctgaagccgtgtatggggaaggcctgccagaatttctctcggtgcctggaggtgcagtgccagccggactcctctaccctgctgcccccaaggagtcctgtagccctagaagccacagcacttccagagcctcagcccagccagctgttgctcctgctgctgctgcctctcacacttgtgctgctggcagctgcctggggccttcgctggcaaagggcaagaaggagggcagtgctccgacctggggtgcccctcacctcccatccctaggatatgacacttgggcagcagcgttgactcagccagggtcttatctcgag

SEQ ID NO: 7451 - DNA, 775 bp, Cricetulus griseus
gtggaagtagatactggatagcatttcatggacatcttggcctctttgtttagattagacttgaccatttcaaaatggattttgtaaaagtttagaatatgtatgtgctgacgtctggaacatgatggaaagcagtacatgtttcatgttaagaggaacgatgtttgaagttatgagtccacagtgcaatcttttttaaagtcagttttcctgagacggtgtctgactgtgactggtaaccagtgtaactgcagatcttgactggtaaagtgcttttatatttgaaattgacttcataaagccaatgggcagtcctctgagctcggaaaagctcaggcaactgtcgaatggcgttgggttatagaatctagaatcaaagtaccttgtattgtctgctgttcaagtgtccctgagttagaaacttctaacatattacgtttttaccctgtattagtagaagctgcatctccatttgtcggagcacatgctgcctgctgaggacggtctagcattaacctccatgccagttctatgcataaccattcaccaaacactgctgctgtggtttctaacaggagcccctctgtcctgtgctatgatgcattgtcaccttgttgcttggcaaatacattgtaaggaattagagctgtgtgtgttaatagtacctttatataaataacaagatagtaaaatacagatgagggatatgcaaatgagtgatgttcctgtcttagagaataaataaaaatgaaaacaaataaaaaaaaaaaaaaaa

SEQ ID NO: 7452 - DNA, 775 bp, Cricetulus griseus
  modified_base (163)..(163): a, c, t, g, unknown or other
caagtacaaggagctgcggacaccacccaatgcggtgatgtgaacctggctctcaccgacatagggtcagtagcattggctatcccatgtctgcggcttcagatctgcatggaagttggaaatttggatattcaggctgccagatttatgctggattgaatancttttttggaatggtgagcattggcttactcacagttgtggctatggaccggtacctgaccatctgctgtcctgatataggaagaagaatgaccaccagcacttacgtcagatcctgggcgcctggaccaatggcctgttttgggctttgatgcccatcattgggtgggctagttatgccccagatcctactggggccacctgtaccataaactggcggaaaaatgatatatcttttgtgtcttacaccatgatggttattgtggtgaatttccattgttgcctttgacagtaatgttttactgttattaccatgtcactcagtctatgagacttcatgctgccaggaactgcactgcatatcttaacagagactgggccgaccaggcagatgtaacaaagatgtctgtgataatgatattgatgtttctgctggcatggtccccttattccattgtgtgcttatgggcttgttttggagaccccaaaaagattcctccttcaatggccatcatagctccactgtttgccaaatcctctacattctacaacccctgtatttatgttgctgctaataagaggtttcggaaggccatgtttgccatgtttaaat

SEQ ID NO: 7453 - DNA, 775 bp, Cricetulus griseus
ctccaggacctgtggtttccggagctcttcggggtcgcttcgcccggaggcttctttggcttgtgcgccctcagcagatgtctgccactttcaacatgagggtcttcttgcctgtactgctggcagcccttttgggtgtggagcaagcccattccctgatatgcttctcctgcaccgatcagaagagcaatatgaaatgcctgtggccaaccgtatgcccaagctcagacaattactgtgttacagtatctgctgctgctggctttggaaatgtcaaccttggctacaccctgaataagggctgttccgaaatctgccctcgtgagaacatcaatgtcaacttaggtgtggcatccatcaatagctactgctgccaacattccttctgcaatatcagcacagctggcctcggacttcgtgctagcatcccactcctgggccttggactcctgctcagcttgctggctctgctgcaactggacccctgaccatctccgtgtgttccccatatctcccccccagctcaggaaaagcggggaccctaggagccttcagctcctcctgggtgtatctagtccccctccacactctgtcagcatcagggctaagcactaaattcacccacatctgctctgttgaagtgggactagctactcttgtgtctagagccaatcctgtggcctcccttggggaaccaggaaagggttaaaaacccttccttggagtctcagagtacctaggtcagtctgcgcacactggcttcctgctgccattc

SEQ ID NO: 7454 - DNA, 774 bp, Cricetulus griseus
ggaagccgagataccccgagagctgatcgagcggctggctcgaagtcagatccacagcatccgggacctccagcgactcttggagatagactccgtagggactgaggatgccttggagacaagcctgagagcccacaggtcccacgccattaagcatgtgcccgagaagcggcctgtgcctattcgcaggaagagaagtattgaggaagccattcctgcagtttgcaagaccaggacggtcatttacgagatacctcggagccaggttgaccccacatcggccaacttcctgatttggcctccatgtgtggaggtgaagcgctgcaccggctgctgcaataccagcagcgtcaagtgccagccctcaagggttcaccaccgcagtgtcaaggtggccaaagtggagtatgtcaggaagaagccaaaattgaaagaggtccaggtgaggttagaggaacacctggagtgtgcatgtgcgacctccaacctgaacccagaccatcgggaggaggagactgatgtgaggtgagatgagccggccgccctctcccgggacacggatgtacgtggcgtgtgacattcctgaacatactatgtatggtgcttcattgccaatgtgcgtgcggtctttgttctcctccgtgaaaactgtgtctgaggacaaagagacagtgtccgtttgttcagtgtgacatcaaagcaagtactgtagcactcggagagacagtgagaaagcttccttgtcacagagagcgaaaacaaaaccaacaaaaa

SEQ ID NO: 7455 - DNA, 774 bp, Cricetulus griseus
gagctgctgtcgccatctccgggcctccaaacgcccctaggtctctgtgctgtagctgccagggcctgcaggatgtttcacgggatcccggctacacctggcattggagcccctgggaacaagccggagctttatgaggaagtaaagttgtacaagaatgctcgggagcgggagaagtatgacaacatggcagagctgtttgcggtggtgaagacaatgcaggcactggagaaagcatacatcaaggactgtgtcacccctaatgagtacactgcagcatgctccaggctcctggtccaatacaaagctgcctttcgacaggttcaaggctcagagatcagctccattgatgaattttgccgcaagttcagactggactgcccacttgccatggagaggatcaaggaagaccgacccatcactatcaaggatgacaagggcaatctcaaccgctgtattgcagatgtagtttcgctcttcattacaataatggataagctgcgtctggagatccgcgccatggacgagattcagccggacctacgggagctaatggagaccatgcaccggatgagccacctgcccccggactttgagggccgccaaacagtcagccaatggctgcagactctgagtggaatgtcggcctctgatgagctggacgactcccaggttcgccagatgctctttgatctggagtcagcttacaatgcctttaaccgcttcctgcatgcgtgagcctcaccgaggcgggagtgagactgatggagatgt

SEQ ID NO: 7456 - DNA, 773 bp, Cricetulus griseus
ggggaccgcggcgggccggcggcgaacaggccccgagccggtaggctgcgggcggcggcgctgggcccggcgcggcgagagaggccccgagatgccaagcaagaagaagaagtacaacgcgcggtttccgccggcgcggatcaagaagatcatgcagacggacgaagagattgggaaggtggcggctgcagtgcctgtcatcatctcgcgggcgctcgaactcttcctggagtccctgttgaagaaggcttgccaggtgacccagtctcgaaatgccaaaaccatgaccacgtcccacctgaagcagtgcattgagctggagcagcagtttgacttcttgaaagacttggtggcatccgtgcctgacatgcaaggggatggcgaagacaaccacatggatggggacaagggtcctcgaaggggccggaaaccaggcagcagtggcaggaagaatggaggcaccggaagtaaagccaaagacaagaagctgtctgggacagactcagaacaggaggaagagtccgaggacactgatactgatggagaagaagagacaccacagcctccaccccaagccagtcacccccctgccccctttcagagccctccagcccccttcatgcccttcacctctcctctgcctttgcccccagccgccccctggcccctcagcacctgatgcagaggatgaagaggactatgactcctagcattcactgcccctgaccccaggccacactcccttttagttagtattagttgctctggggaga

SEQ ID NO: 7457 - DNA, 773 bp, Cricetulus griseus
ataggacgtggaaggggaagatggcggcgccgggcctccccacgccgctgtatgggcacgtgggtcgcggagccttcagcgacgtgtacgagccttcggaggacacgttcctgctcctggacgcgctcgaggcggcggcggccgagctagccggagtggagatatgccttgaagtaggagcagggtctggtgtggtgtctgcattcctggcctccatcataggtcctcaggccttgttcatgtgcactgacatcaacccccaggcagctgcctgtaccctggagacagcgcgctgtaacagagtccacattcagccagtaattacagatttggtccaaggcttgctgcccagattgaaggggaaagttgatctgctggtgtttaaccccccctatgtagtgactcctcctgaagaggtaggaagtcacggaatagaagcagcttgggctggtggaagaaatggtcgggaagtcatggacagattcttccctctggcgtcagaacttctttccccaagaggactgttctacttggttaccataaaagaaaacaataaagaagaaatttttaaaatactgaagacaaaaggtctgcaaggaaccacagcactttgcaggcaagcgggccaagaactcctatcagtcctcaggttcagcaagtcctagtgtccccagagccaccaaagtacccgagaactgcctgaagctgaatgcgctcagtaggtttgagactgatgccattcttggccaataaattttatcagaaatttgtca

SEQ ID NO: 7458 - DNA, 773 bp, Cricetulus griseus
gtattatgtgaacgcgcttttagcaaatatacggcggggcctctctcttccaaaatgccgagccgacttcttgctcctttgcacccaactcacagagaagcggctacggtccaggcgctggcgccttcgcctccaccgtgccgggcttatacaatgtcaacagccccctctatcagagccccttcgcgtcgggctatggcctgggcgccgacgcctacaacctgccctgcgcctcctacgaccaaaacatccccgggctctgcagtgacctcgccaaaggcgcctgcgacaaggcggacgagggcgtgctacacggcccggccgaggccagtttccgcatctacccctggatgcgcagttcaggacccgataggaagcggggacgccagacctacacgcgctaccagacgctggagctggagaaggaattccactttaaccgctacctgactcggcgccgccgcatcgagatcgctcacgcgctctgcctcaccgagcgccagatcaagatctggttccagaaccggcgcatgaaatggaagaaagagcataaagatgagagccaggctcccacggcggcccccgaagacgcggtgccctccgtctccacggtagctgctgacaaggccggtgaggaggaggaagaggaagaggaggaggaagaggaagaagaggaataaaggcccaggcataagccctggctgcacaggacagtcgaaaaagcgtctttaagagactcactgattttagttacaaaaatggggtggaataaa

SEQ ID NO: 7459 - DNA, 773 bp, Cricetulus griseus
tccgagaatatgaggagccgctggatttggcggctccttcgccctgacggcggtgggtcccgctggacttcagctcctcacgggtgtctgtcacccgtcctgcggagaggtttcttgaccaccacaacaaagacgagttatgatagaaggccagtggacgtaactcctttagaacaaagaaaattaacttttgatacccatgcactggtgaaggacttggaaaatcatggatttgacaagacacaagcacagactgttgtgtcagtactaagtaaattatcaaatgtcagcctggatactatctataaggaaatggtgactaaagctcaacaggaaataacagtccaacagctaatggctcatttggattccatcaggaaagacatggtcatcctagagaaaagtgaatttgcaaatctgagagcagagaatgagaaaatgaaaattgaattagatcaagttaaacagcagctgactcatgaaagcagtcgaatcagagcagataataagttggacatcaacctggaaaggagcagagtaacagacatgttcacagatcaagaaaagcaacttatggaagcaaccaatgaatttaccaaaaaggatacccaaaccaaaagtattatttcagagaccagtaataaaattgacactgaaattgcttccttaaaaacactgatggagtcgaacaaacttgagacaattcgatatcttgcagcctcggtgttcacttgcttggcaatagcattggggttttatcggttttggaagga

SEQ ID NO: 7460 - DNA, 773 bp, Cricetulus griseus
aggtgggtcccacgcggagtcaacatgaggatcgagaaatgttatttctgttccgggccgatctaccctggccacggcatgatgttcgtccgcaacgattgcaaggtgttccgattctgcaaatccaagtgtcataaaaactttaagaagaagaggaacccacgcaaggtcaggtggactaaagccttccggaaggcagctggcaaggagctcacggtggacaactcgtttgaatttgaaaaacgtagaaatgaacctgtgaaataccagcgagagctatggagtaaaactattgatgcaatgaagagagttgaagagattaaacagaagcgccaggctaagtttataatgaacaggttgaagaaaaacaaagagctgcagaaagttcaggacatcaaagaagtcaagcagaacatccaccttatccgggctcctcttgcaggcaaaggaaagcagctggaggaaaaaatggtgcagcagttacaggaggatgtggacatggaggatacttcctaatggagccgcctgaaaccagccctgggcacactggaaatcagtgtagactgttgatccctaagttattgattggtttcataaggtccctcagacaaaggggatgtacatgtttccgtctcacattgcagcctttaaaagcatccatcatgggagttagagctcagctcaatgttctgcttcactgtgttatgctcagaaaacatgaaagtttgtgtgtagatgaaggcatgaactctgggcataacatggttgagcca

SEQ ID NO: 7461 - DNA, 772 bp, Cricetulus griseus
acacaggatgcccctgaagaggttgtaaccgtgactttaggagagagttggaagagagagagagagctgctgcaagggaaaaaatagggaccgtccaacccgagaacatacaacttcctcttcagtgtcaaagaagccccgcctagaccagattccagctgccaaccttgatgccgatgatcctctcacagatgaggaagatgaggattttgaagaggagagcgatgatgatgatacggcagctcttcttgcagagctggaaaaaataaagaaggaaagagctgaagagcaggccagaaaggaacaagaacaaaaagcagaggaagagagaattcgaatggaaaatattctgagtggaaaccccctcctcaatctcactggcccatcccagcctcaggccaacttcaaggttaaaagaaggtgggacgatgatgtcgttttaagaactgtgcaaagggtatagatgatcagaagaaagacaaaagatttgtaaatgatacacttcgatctgaatttcacaaaaagttcatggagaaatatattaagtagtacagttttatgtgcttaattaaagtctaataaaatgttaaggatcaatttgacttttggggggtttgttctttccctgtttgaactttctcaatctctttcccgtagtgtggtattttatctataatggatttagaggtgagtctgaccagtttccagtcttacttcctttttaatatggagaaaagggaatctgcttggaataatattttaactaaaaaaa

SEQ ID NO: 7462 - DNA, 772 bp, Cricetulus griseus
ggcgatggcatcgcgtcgcggggcgctcatcgtgctggagggcgtggaccgcgccggcaagaccacgcagggccgcaggctggtgacggcgctgtgcgccgcgggccacagagccgagctgctgcgtttccccgaaagatcaacagaaatcggcaagctcctgagttcctacctagaaaagaaaacagacctggaggaccactccgtgcacctgctcttctctgcaaatcgctgggaacaagtgccattgattaaggcaaagttgaaccagggtgtgacccttgttttggatagatacgccttttctggggttgccttcactagcgccaaggagaatttttccctggattggtgcaaacaaccagacgtgggccttcccaagcctgacctgatcctgtttctgcagttacaattgctggacgccgctgcacggggagagttcggtctcgagcgctatgagactgggactttccaggagcaggttctgctgtgtttccagcagctcatgaaagataaaaacctgaactggaaggtggttgatgcttccaaaagcattgaggatgtccatgaagaaatccgggtgctctctgaggacgccatccgcagtgctgcacagagtccactggaggagctttggaaataaactgcagcttccactgcagataccgttcttggggccttaggaggcagggagaagactcacaccactgttcaacaggagctagtacttagtagaagagacctacaagcctccactcacaacctgagattt

SEQ ID NO: 7463 - DNA, 772 bp, Cricetulus griseus
tgaatccccagacagagggaagccaggacggggtgcctttcttggaacgactagtccggcctcgaagaagtgctcctaagggccggaaagtgcgagctcgaagagctatcgcagcccattatgaagttcatccacggccaggacaggagggagcacaggcaggtgtggatgggacagtgagtggctggggaagaggccaaaataaacagctccagccctctgcgctatgaccgccagattgggggaatttacagtcgtcagggctgggctctactacctttactgtcaggtgcactttgatgagggaaggccggtctacctgaaactggacttgctggtggatggtgtgctggccttgcgctgcttggaggagttctcggctacagcagcaagctgactctgatgtgacagaggtgatgtggcaaccagctctcaggcgtgggagaggcctggaggcccaaggatacgttgtccgagtctgggacactggaatttatctgctatatagccaggtcctgtttcatgatgtgactttcaccatggggtggtttctcgggaaagccaagggagccaggagactctattccgatgtatccgaagtatgccctcggatcctgaccgtgcctacaatagctgctacagtgcaggtgtctttcatttacatcaaggggatattctcactgtcaaaattccacgggcaaatgcaaaacttagcctttctccgcacggaaccttcctgggtttgtcaaactatgactgtgctataaagggg

SEQ ID NO: 7464 - DNA, 772 bp, Cricetulus griseus
aggggcgcggaccacgtgtccacagcgggccaaacggtgacccaggccggaacccgagagagtccggtggcgaaagtgcgcagaaggcacctggtggaggggccggctggactcgaacctggtgcctcccggaaatggcagcagccagggctagcctgggccggatcctcccggagtcttccatcctgttcctatgcgacatgcaggagaagttccgccccagcatcgcctatttcccacagatcgtatcagtggccgctcggatgcttaaggtggcccggctgctggatgtccctgtcttgctgactgagcagtacccacaaggcctgggccccacagttcccgagctgggcgctcagggcatccggccagtgagtaagacgtgcttcagcatggtgcccaccttgcagaaggagctggatggccggcccaagctgcgttccgtgctgctctgtggcctcgagacccaagtctgcatcttgaacacagccctggacctcctggagcggggcttgcaggtccacgtggtggtggacgcctgctcctctcgaagccaggtggaccggctggtggcactggcccgcatgaggcagagcggggctttcctctccaccagcgaagcgctcattctgcagcttgtgcgggacgctgcccaccccaagttcaaggagatccagaatatcattaaggagccagtcccggacagcgggctgctgggcctcttccaaggtcagaacccccctcttgctgaactccagaccctgacttgaga

SEQ ID NO: 7465 - DNA, 772 bp, Cricetulus griseus
cagcatcgccgacagcggccaagacatggcattcctgggtggtaaatatggaggaaacacagtctgggctagtaagtctacccatagtgacccaaatggctccagtcaaattatgaacaaaactcctgatgtctctaaaagtagtgccactggctttggtgtaaaagcagcagtcactggaagaaaagaagctatgagctttggaggtcagagtctgagaagccaggtcctggctatgcccgaggagatcactgccgctgtaccagccagcaggctgcctcagacacctccaccttcctcaagccacagagttgcagcctctgagatccttggcaagaactccacacatgccactgtgagcccagtttgtaagccctcaaggactgtataagggttgtcatctagagcaactgcaacaagagccacttccacctgccctaccggtggcagctgttcatagataattcttgggttgacttccaggacatggaggatatcgagcgggcctattgtgatccccaaactgaaagcgttatgataggagagtatcagatcaatttccagaaaatgacttgcgactatttccccatccgacgcctctccacgccttcatttgacgcacagtcagttaattccgtcttcagcaccacgtggctttggtactggaaggatgagtttaacaaatacgtgcagtatggtgatgagaataaaagccaatctcagttccaacatcagctcttcatacctggagtccttcttccagtcctgtccc

SEQ ID NO: 7466 - DNA, 771 bp, Cricetulus griseus
cgccccgcagacgggagccgggggtgaggccaccgcaggctcgcagcctccgctcacggccgttgcgctgaagaaatgagtggtggcttggctccaagtaagagcacggtttatgtctccaatttgcccttctccctgacaaacaatgatttataccggatattttccaagtatggcaaagttgtgaaggttactataatgaaagacaaagacacaaggaggagtaaaggtgttgcatttatttgttttggataaagactctgccttaaactgcaccagagcaataaataacaaacagttatttggtagagtgataaaggcaagcattgctattgacaatggaagagcagctgagttcatccgacggcgaaactactttgattaaatctaaatgttatgagtgcggggaaagcggacacttaagttatgcctgtcctaaaaacatgcttggagaacgtgagcctccaaagaagaaagaaaagaagaagaagaagaaagttcctgaaccagaagaagaagtcgaggaagtagaagtgagtgaagaagaaggggaggatccggctctggacagtctcagtcaggccatagcattccagcaagccaaaattgaagaagaacaaaacaaatggagacccagcccaggtggtccctcaacctcagatgattctagacgaccaaggataaagaaaagtgcttatttcagtgatgaagaagaacttagtgattaaaatatttattttgtaaatattattcaaataaaatcttactgta

SEQ ID NO: 7467 - DNA, 771 bp, Cricetulus griseus
gatgagctttcactctattcagttcctgagggtcagtctaaatttgtggaggagccaaggactcaacttgaagaaaacatctcccaactccgacataagtgtgagccatatacaagttggtgtcaggaaaagtattcccaaactaaacccccggtggagcgcttcgtccagtggggattagacaactatgactatttccaaaatgcgcctcctggatttttcccaagacttggtgttattggttttgctggttttcttggactcatttttgctcgaggttcaaaaataaagaagctggtgtatcctccttttttcatgggattaggtgcctctgtctattacccacaacaagccattgcctttgcccaggtcagcggggagaagttatatgactggggattacgaggttacatagttgtagaagatttgtggaagcaacattttcagaagccaggaaatgtgaagaattcacctggaaataagtagaaaactccatgctctgcccattttaatcagttataggtaaacattggaaactccagacggtaaatcagtatttctacaaacaaaatggcagagagtcagtattggatatagtaaactggctttcttcaggaaaaacaacactgagcctctttgctatcatcttgggtgatgccatattctagaccaactaatctacaacttttcatttggaaatatgtataagccttagaactcctcattcttatatcactatttatgtacataaattaaaatccagattcaaac

SEQ ID NO: 7468 - DNA, 770 bp, Cricetulus griseus
ttcagatctaccactgttagatacttcctgccacccatcctagtagtagctcttgggaaggagttacagccaacaacagccaaaccgtctcccaccccaactcctgtggttgccctttccatcatgccgaagaataaaggtaaaggaggcaaaaacaggcgcagaggcaaaaatgaaaatgaatctgaaaaaagagagttggtgtttaaagaagatggccaagagtatgcgcaggtgatcaaaatgctgggaaatggacggttggaagcaatgtgtttcgatggtgtgagaaggctatgtcacatcagaggaaagttgagaaaaaaggtttggataaatacatcagacattatattgattggtctgcgagactatcaagataacaaagctgatgtaatcttgaagtataatgcagatgaagcgagaagtctgaaggcatatggagaacttccagaacatggatgatgatgaaatccagtttgtattgatattggagatgatgatgaagacattgatgatatctaagctgaactaagcatgttacattccaagttttctgaagatagttctacatacttgggatcttgaccttcggctgttaagtaaaacttcttttagcatgagtatgacttgttaaagcagattgatgtatttttaatttttaaggtattatatttctttgaaaaccaaagatgttgagttatctcttaaatagttaacactttgttcttctagatgtaattgaactttagggtacagcagtatacact

SEQ ID NO: 7469 - DNA, 770 bp, Cricetulus griseus
caaacagtagcagctttcgcacagatggcttggcctggctggggatgtgcaaacgcacagttggagaaatgcctctaccgttagcttcctgaagccttggtcccacggcaagctcagtgaccaacagtggcagacgttggagcatatattacaagtttatcgaaccagcttgaccagagacatacaggaattagtcaaaatgttgcctaccatgcactatcccattgagatgcaggtgtctgctgggtgtgaattgcactctggaaacacttcagaaaactttgccaatgtagcatttcaaggacaacatgtcatgagttttcagggaacttcctttcacgaaggccccagatgccccaccttggacagagttggccattaaagtgctcaacactgatcaagggaccagggaaacgatccagcagcttctgaatgacacctgcccccaggttctctatggcctcctagaagctgggaaagcagaactggacaagcaagagaaacctgtggcctggttgtcaagtgtcctcagccctagacatggccatttgcagttggtgtgccatgtctccggcttctacccacagcctgtgtgggtgatgtggactcagggtgagcaggagcaaaacagtactcagagaggtgacatccttcccaatgctgatgggacatggtatctccgagctaccctggatgtggaggctggagaggaggctggcctcgcctgccgggtgaaacacagcagtctaggagggcaggacatcatcctc

SEQ ID NO: 7470 - DNA, 770 bp, Cricetulus griseus
gaagacaagagttgcttcttgcttgtccggttatcttcagcctcctgcagagagaacatgccgagaccccggaagaggctgactggggctgctggcccagacaagaaggagctatcagaaaaacgtactaaaaccgaaaactcagaaaatacaccagctaagctagagagccccagccctcagaagacttcaacctccaaaaaactgtggcaagaatgtaagcaactactggctgatgaagtcagaaccagaaagccggctagagaaaggtgtagacatgaagttcagcatcgaggatctcaaaagcacagcccaagcagacagcatgctgggatggagttcgcaactatcaggctcggaacttcctcagggccatgaagttggaggaggaagccttcttctaccatagcaactgcaaacagccaggcatcgtgggacttatgaagatcgtaaaggaggcttacccagaccacacacagtttgagaaaaataatccccattacgacccatccagcaaagaggacaaccctaaatggtcgatggtggatgtacagtttgttcgaatgatgaagcgcttcatctccctggatgagcttaaagcctatcaccaagcccacaaagctactggtggccccttaaaaagcatgactctcttcactcgccagagactttcagttcagcctttgactcgagaggagtttgatttttattttgagcctggaggaaacagaaccacgttaatgaaggctctactgatggagtgaacaagc

SEQ ID NO: 7471 - DNA, 769 bp, Cricetulus griseus
gccaagaagcttgtgcgctcgcccagcggcctgcgcatggtgccggagcaccgcgccttcggaagcccgttcggcttggaggagccgcagtgggtcccggacaaagagtgtccaagatgtatgcagtgtgatgccaaatttgactttatcaccagaaagcaccactgccgccgctgtgggaagtgcttctgtgacaggtgctgcagccagaaggtgccacttcggcgcatgtgctttgtggacccagtgcgccagtgtgccgagtgtgccctggtgtctcaccgcgaggctgagttttacgacaagcagctcaaggtgctcctgagtggagctaccttccttgttacttttggggactcagagaagcctgaaaccatggtttgtcgtctctccaacaaccagagatgcttgattctggacggggacagccatcatgaaattgagattgcgcatgtctgtactgtgcagattctcacagaaggcttcactcctggagcaggcagcactcgagccacaggcatgttcctgcagtacacagtgccaggggcagaggctgcaacacagctgcggctgatggctggagaggatgcaaatggcagcaagagacaggcagcagcgtggctggcagccatgcacaaggcaaccaagctcctctatgaatcacgagaccagtgactgcgagggagctgagctcagcacatcaggttaccgagtccaagctgcttgcccctgcctgatgaggcactcagggctctgctctgtgtgtgct

SEQ ID NO: 7472 - DNA, 769 bp, Cricetulus griseus
accattcagagagaccttgatgggacctgctccctgcataccatggcctctaccctagatgatgacgggaactacacaatcatggctgccaaccctcagggtcgtgtcagttgtacaggacggctaatggtacaggctgtcaaccaaagaggtcgcagtccccgctctccctcgggccatccccatgccagaaggcctcgctctcgatcaagggacagtggagatgaaaacgagcccattcaggagcgattcttccggcctcacttcctgcaggctccgggagatcttactgttcaggaaggcaaaactctgcaggatggactgcaaaagtcagtgggttaccaaccccagaatggagtacactccctcattatagagccagtcacgtcccgggatgccggcatctacacatgtattgccaccaacagagcagggcagaactcttttaacctggagcttgtggttgctgctaaagaagcacacaaggcccccgtgtttgttgagaaactgcaaaacacaggggtagccgatgggtacccagtgaggctggagtgccgagtttcgggagtgccaccgcctcagatattttggaagaaagaaaatgaatcgctcactcacagcactgagcgagtaagcatgcaccaggataaccatggctacatctgcctgctcattcagggagccaacaaaagaagacgctgggtggtatactgtatccgccaagaacgaagctggcattgtgtcctgcactgcccggctggatgtctac

SEQ ID NO: 7473 - DNA, 769 bp, Cricetulus griseus
ttctagcagtgaaaggtacggtgtggtcttcagttcgctatgtccaccaacaatatgtccgacccacggagacccaacaaagtgctgaggtataagcctccgccgagcgagtgcaacccagctttggacgacccgacgccagactacatgaatctgctaggcatgatcttcagcatgtgtggcctcatgcttaagctgaagtggtgtgcttgggttgctgtctactgttcctttatcagctttgccaactcccggagctcggaggacacgaagcagatgatgagtagtttcatgctctcaatctctgccgtggtgatgtcctatctgcagaaccctcagcccatgacgcccccttggtgatgtcacctagagggcttggatccaggactcctacccaccttctctctggtctagcctttggctgcctccaacctgcccttagctgctgtccttaacttgcctgagtgttgtctctggtctcccagttgaatggagggaagttgggccctttcttttggggtcctgcttctgttttgacaaaggggtaaaaccacagacttccccactgttatgggaaacactgttcatgttcctaagtattcacttagttttcttgttgaaatcagttgataattaaaattttccactcttgcaaaaaaaaaaaaaaaaaaaaaaaaaaaaaaaaaaaaaaaaaaaaaaaaaaaaaaaaaaaaaaaaaaaaaaaaaaaaaaaaaaaaaaaaaaaaaaaaaaaaaaaaaaaaaaaaaaaa

SEQ ID NO: 7474 - DNA, 769 bp, Cricetulus griseus
ctatggaagccaacaccaaactggtcatcggcattgtttgtagccgctttgttatctttcagattcttttccattttgtaagttactggttttcagcaaaagtttctccaggttacaatagccttagcatcgagaagaagattgaatggaactcaagggtagtatctacctgccactctttgctggttgggacttatggcttatacctcttcttatttgatgagcctactatagctgatccactctggggtgatccagcgtgcgtgaaattgaatattgcaactgcttcaggctacctcgtttctgatttattgaattaataacttttgaattggaaagcttgcatacattgccaatttccgcctgcttgccgagctttccagcccctttgtgaaccagaggtggttctttgaaaccctgaagtaccccaagttttccacagccaatgtcatcaatggaatcctcatgacagtagtctttttcgtagtgcggatcattgcaatacctcctttgtatttcttcatatattccgtgtacggaacagaagcctttataaggcttggatttacgattcagtttacctggatcactacctgtcttattttggatgtgatgaatgtcatgtggatgatcaaaattacaaaaggatgcatcaaggtcatctctctcatcagacaagagaaagctaagaatagccttcagaacggaaaactcgattaaaggtgtgcttcatcaaacgcctctgttccataagccatcttcattcctc

SEQ ID NO: 7475 - DNA, 769 bp, Cricetulus griseus
cgcagatcgggcttctagagagacaccagagcagataccactatggccccctttgcatctctggcctcaggcatcctcttgttgctatcactgataacctccagcaaggcctgtagctgtgccccaccccacccacagacagccttctgcaactccgacctggtcataagggctaaattcatggggcccccagaaatcattttcaacttataccaacgttatgagatcaagatgactaagatgctcaaaggattcgacgctgtgggaaatgccgcagatttccggttcgcctacaccccagcccttgagagcctctgcggatatgtccacaagtcccagaaccgcagcgaggagtttctcatcgcgggacgcctaaggaatggaagtttgcacatcagtgcctgcagcttcttggttccctggtatagcctgacccctgctcagcaaaaagccttctcaaagacgtatagtgctggctgtggggtgtgcacagtgtttccctgttcaaccatgccttgcaaactggagagtgatactcattgcttgtggacagatcagatcctcacgggctctgagaagggctaccagagccgtaactttgcctgcttgcctcggaatccacagttgtgtgcctggcaatccctgagggcctagatgacccaaagcctaccccagtggaagctgaagcctgcacactgcctccctcccctccatctttctttcttttagacagtgaaataaagaactaccacacagacaaaaaaaaaaa

SEQ ID NO: 7476 - DNA, 769 bp, Cricetulus griseus
tcgcgagctccctgggattgttcagcacggctggagttgaggattactgtgccagtaaatttggagttgtgggttttcacgaatctctgagccatgagctaaaggctgctgaaaaggatggaattaaaacaactttggtttgcccttaccttgtagacacgggcatgttcagaggctgccgaatcagaaaagaaattgagcccttcttgcccccctctgaagcctgactactgtgtgaagcaggccatgaaggccaatcctcactgaccagcccatgatctgcaccccccgctcatgtacatcgtgaccttcatgaagaagcatcttccctttttgaagcagttgtgtgcatgtaccgaaatgggaatttctgcattaaaaagtccccatgtttgtgccaactctgaattagtgtggggagcaaatcttgtgtgaagtattgtggaagggtgtaaagatttctttgaaaaggtttattcacattgtagaacagcaaatgacatttttacagtatttttttgtaaagcaaactattttgtgccttgaatttggtatatgtgtattagtgaaacattgtaaaagtgaatctctacctctgtatctacatgtgtaccatcctcttgtaaatgactatgaactattatgtgattgctttttgtttgttttaggatgtctcatttaaaccgtgaccaatgtttgaggttgttaaaatagcctacttttactaatcaggaggtttttctagaggactaattaaatacttatataa

SEQ ID NO: 7477 - DNA, 769 bp, Cricetulus griseus
ggctgcggtgttgaggatgagcggagaagagaacccggccagcaagcccacgcctgtgcaggacgcgcagggcgacgggcgctggatgtctctgcaccatcgattcgtggcggacagcaaagacaaggaaccagaagttgtcttcatcggggactccttggtccagctaatgcaccagtgtgagatctggcgggagctcttctctcctctgcacgcgcttaactttggcattggtggggacagcacacagcatgtactctggcggctggagaatggggagctggagcacatccggcccaagattgtagtggtctgggtgggcaccaacaaccacagccacacagccgagcaggtgacaggtggcatcaaagccattgtacaacttgtgaacaagctgcagccccaggcacgggtggttgtgctgggcctgcttccaaggggccagcaccccaacccacttcgggagaaaaaccgacaggtaaacgagctggtccgggcagcgttagctggccacccccgagcccacttcttagatgcagaccctggctttgtgcactctgacggcaccattagccaccatgacatgtacgattacctacatctgagccgcttggggtacacacctgtttgccgggccctgcactccttgcttcttcgactcctggcccaagaccagggccaaggcacccctctgtcagagaccacaccctaagtgtctttccttcccatgacattaaattcttttcctcctacaaaaaaaaaaaaaaaa

SEQ ID NO: 7478 - DNA, 768 bp, Cricetulus griseus
gcgccatgtccgtgaacatggacgagctcaagcaccaggtgatgatcaaccagttcgtgctgacggctggctgtgcggccgaccaggcgaagcagctgctgcaggcggcccactggcagttcgagacagccctcagcgcctttttccaggagaccaacatcccctacagccaccaccaccagatgatgtgcactcccgccaacacccctgccaccgccccccaacttccctgatgcactagccatgttctccaagcttcgagcctctgagggcctgcagaacagcaacagccccatgacggctgtggcctgctcccccctgcaaacttcagccccttctgggccgcatccccacccagccaccagacgccctggatcccaccctcttcccccaactccttccatcgcctccaccgcccacagcccacgtggccccctggagcaccacaggggggcacccagcagaaagccatggcagcagtggatggccagagatgagactggatggcactgggctggagtgggtgcagtccagggttgtggggacacagagcagggctggggaggggggaaacaccagagggtgggggggttcgatatcgcactggaagattttataagagaatttttgtgggggcgcagtaaacgtcctgagccacttgggttcttcaggagtttctctttgggaaagtttttcctctttttaatatataactataatatatatgaatataaatttataatgtatgcgcgagtggggcctgcacac

SEQ ID NO: 7479 - DNA, 768 bp, Cricetulus griseus
cgctatttactctaggtcatgccaggggtgaggaggaagctaagaatgctgcccagagtacacaggaaggggaggtccccatcactgaagccctgatcaccaagaggaacttgaccttctctgaggatgaagacctgtcagaaagatgtttcatactcttgaagaactggagactgtccgcctggatcgggaagggattacttctatcaggaatttagagggcctccggaatattcacagcctctacctgcagttgaataagatccagagaattgagaacttgtcatgcatcacctccctgcgcttcctgtctctggcaggaaaccagatcaggcaggtggaaaatctccttgacctccagtacctccagtttctggacctctacaggaagatggtgattaggagcctgccactgctcttggacctggacaagcagcctatattggagcgctggacctcagatgatgaggataaatcctcagatgaggaggaggaatttccggagctgaatggcccattctgcgcagagcgaggattcttcaaggacctggagcaggaactacagcaacaccaggagcgaaggcagcaggtggtcctggcagagcacttggcaaggatggagacacagcctgtcctcactgacctgcctctcctgcctgctgtgcccatcggcccgggactgcagccctgctgtcactgcagagcctgagaaggagtcagcccctaaggccacctcctcaacccggaccacctcttctaccaagaaac

SEQ ID NO: 7480 - DNA, 768 bp, Cricetulus griseus
ctgccgccgtttccctctccccactgctgtctattctcctgggcctgctgctcctctctgctccgcctggcggcagcggcctgcacacgaagggcgcccttcccttggacacaatcactttctataaggtcatccccaaaagcaagttcgtcttggtgaagttcgacacccagtatccctatggtgagaagcaggacgagttcaagcggctggctgaaaattcggcctccagcgatgatctcttggtggcagaggtggggatctcagactacggtgacaagctgaacatggagctaagtgaaaaatataagctggacaaagagaactacccagtattctacctcttccgggatggggactttgagaaccctatcccatacagtggggcgattaaggtcggagccatccagcgctggctaaaggggcagggggtctacctgggcatgcctggttgcctgcctgcgtatgatgccctggcaggtgagttcatcaaagcctccagcatagaggcccgccaggccatcttgaaacaggggcaggatggcctctcaggtgtgaaggagacagagaagaagtgggccagccagtacctcaagatcatggggaagatcttggaccacggtgaggacttcccagcctcagaaacgaatcggattggcaagctgattgagaacaagatgagtgacagcaagaaggaagaactgcagaagagcttaaacatcctgactgccttccggaagaagggggctgagaaggaggagctgtgac

SEQ ID NO: 7481 - DNA, 768 bp, Cricetulus griseus
cgccatgggtttcggagacctgaaaacccccgcgggcctccaggtgctcaatgattacctggcggacaagagctacatcgaggggtacgtgccatcgcaagcagatgtggccgtctttgaagccgtctctggtcctccgcccgctgacctgtgtcatgctctgcgctggtataaccacatcaagtcttacgagaaagagaaagccagcctgccaggagtgaagaaatctctgggcaagtatggccctgccagtgtggaagacaccacaggaagtggaactgcggatgctaaagatgatgatgacattgatctcttcggatcagatgatgaggaggaaagcgaagaagcaaagaggctccgagaagagcgccttgcacagtatgaatcaaagaaagctaaaaagcctgcggttgttgccaagtcttccatcttactagatgtgaagccttgggatgatgagacagacatgacaaaattagaggagtgtgtcagaagcattcaagcagatggcttggtgtggggctcttccaagttggttccggtgggatatggaattaaaaagcttcagatccagtgtgtagttgaagatgacaaagttggaacagatatgctagaggagcagattactgcctttgaggactacgtgcagtccatggatgtggctgcttttaacaaaatttaaaaccatccttggtcagtgcacttgaataaaaggtacaaagataaaaaaaaaaaaaaaaaaaaaaaaaaaaaaaaaaaaaaaaaaaa

SEQ ID NO: 7482 - DNA, 767 bp, Cricetulus griseus
ctccacctgtgggcgacaggccctgaaactcatcttgctggaatcagcaattttctgtctgaggcagcagcccaagtggatgagccagtgcctgggtacctctctgccccccagagtataatggacacctgcctgtacatcttcacctctggcaccactggcctgcccaaggccgctcgcatcagtcacctgaaggtcctgcaatgccaggggttctaccagctgagtggagtccacaaggaggatgtgatctacctcgcgctcccactgtaccacatgtctggctccttgctgggcatcgtgggctgcttgggcatcggtgccacggtggtgctaaagcccaaattctcagctagccagttctgggaagattgccagaagcacggagtgacagtgttccagtacattggggagttgtgccgataccttgtcaaccagcccccgagccaggcagattcaggtggaagggggagaatgtagccacaactgaggtggcagaggtcctcgaggccctggacttccttcaggaggtgaacgtctacggagtcactgtgccagggcatgaaggcagggctggcatggcagccttggccctgaggcccccacaggctttggaccttgtgcagctctacgtccatgtttctgacaacttgccgccttatgcccgacctcgattcctcagactccaggaaactttggccactaccgagaccttcaaacagcagaaggtcaggatggcagctgagggctttgaccccagtgtgctg

SEQ ID NO: 7483 - DNA, 767 bp, Cricetulus griseus
  modified_base (124)..(124): a, c, t, g, unknown or other
agagcgagtctctaaggagctgcaggccagcctccagactctatatcgaaaggtttaatattagctctgggacagtatatgggagcattgcagagcattgtgcctctttttcatatatatgaanaagtttttacatagaaacaaaagctttaacagagcttaaaagatgatcttattaaaagctgttttacggaacacgttgcagacaagcacattttacagcctaatgcctttactttttagaagcccagtcaacaccatttcaggtcacaccttcaactatggcaaatattgtgaaaggcctgtacactctcagaccagaatgggttcagatggctccaactttgttttctaagtttattccaaacattctgcctccagctgtggaatctgaactttctgaatacgccgctcaagatcagaagcttcaaagagaccttatacagaatggtttcaccagaggtgaccagtcccggaagagagctggggatgagttggcttataacagtccgtccgcttgtgcaagttccaggggatatagatagtgactgttgaagtactttcttccggagagaagacacactggagctgcagaaactgttccaaggcacagcggggcctgcaccactcaggagctctgtcaaaaagctgttctcagagaggatgccgcacttctttgtaatttttttttgggtttcaaaaacaagaactaacaaaaacaattgctgctagacttgggggtgattttgaaataggacaatctttta

SEQ ID NO: 7484 - DNA, 767 bp, Cricetulus griseus
  modified_base (753)..(753): a, c, t, g, unknown or other
gacattttaacagaatagttcataagggaatgtctatatcacgcccaaatgctgtagttggaagatgtcgcatgatacgacactcaagagacaagaaaaatgagcccaatcctcagaggtttgaccggattgctcacacaaaggaaactatgcgctttgatggtttgaactcacttacctaccaggtgttgaacgtagagagatacccattatataccaaaatcacagtggacatcgggacaccaagatagcattgtggaacaaataagagacctgaaaatggccaggggcctcagatatgtgtctctgccaatcgactgggctggtccctcttatttgtacaatctgaatgatagtttcccttgctgtcattcagacaccttcccagatgcccatggtgaatgcaacattctccccaacctggcttggcactggatgaaattctccaaggtgttgtccagtgtaaaaatggtcagcctttggaggcttcttggacatgtccttcgtgttacctccaaagaagcagaactgtacacaagtcaaaacttagagactgtggatcacattcccactattgaaactgctaaattgtgaaatgggtaagaactttgctttaatccgtgatgttcagacttcacgacaaattgaagactgctgctggattcagattaatatgatactcttgaatttttttatacaaaaatcaaaaatttcagtcagtctcatgttctgttcctcttttttttttttttnttttttttctgtcc

SEQ ID NO: 7485 - DNA, 767 bp, Cricetulus griseus
gagcggggctcggcgcacgccgttgtgatctccctgagaaacgcttccggtattaggacttgacccagctcagtctttcccatccctttgctgccgcaaaaccccagaagttccagcaagttcaccacttccggtccggcggagtgtccaacggcttcaacagcggaagtggtatgagaagtgtgcgctccttccggttccggcctcgcgagctcccgagtggcaacatgaaactgctcacccacaatctcctgagctcgcacgtgcggggcgtgggcacgcgtggcttcccgctgcggctgcaggccaccgaggtccgcatcaacccggtggagttcaaccctgatttcgtggcgcggatgatccccaaagtggagtgggcggcgcttgtgcaggcggcggacactttaaacctggccgaggttcccaaagagccgaccgaaggctatgagcacgacgagacgtttttgaggaagatgcaccacgtgttgcttgaggttgatgtgctggagggcaccctgcaatgcccggagtcgggccgtcttttccccatcagccgcgggatccccaatatgttgctgaatgacgaagaaactgaaacataaacttgctaaccaccatttggtaccgtgtgtatcagccgtgtgtattagtctgttaattaaatatgtcatgtgtgaacccgatctcgcccccagtgactcaccaaccaccatgtacttgagctccatagtatattttttttctcattaaaggttacaaaaaaa

SEQ ID NO: 7486 - DNA, 767 bp, Cricetulus griseus
ccttacagccataccctgggcctgtcctctgtccctgagtctacacacagcctgcagtccctctcaggcaagccctgctctgaggataccgcctgcctggagccccgagggcctggaggatactgatgcaagggctttggggtgtcactccagtccagaagagcagccatatagcctcttgccctccagagaggatgctcacactgagctggacccacccggagcatcctgcaagagggccctagggaccatagctatgcctgggacagatggtgtacaaaagcaaacagcctcccctcacagtacctggctgatgtggacacctctgatgaagacagtctccaggatcccagagcagccttccagcattccaagagaagggcccgggctgtgccagacactcagatcttagagttgaacaagcgcatgtcagctgtggagaacctgctggtccacctggagaacgtggtactgccaccctcagcccaggaaccagttgtggaatcacagcccagtgcagacacggaggaggaggacgctcaggaggaggctgggaggagctgaccagcaaacatcagtgaccctggcacctcatcagaagatgagaccaagccaggtggcaccctccatgcggtgtccccagaggtgtgcacagacacagggcacatggagacacagggaaggagcccgtcgggggcctggggaacccctacgatggactacaatgagcacagatgaggcactgtcagagagtggaggacaggagt

SEQ ID NO: 7487 - DNA, 767 bp, Cricetulus griseus
  modified_base (78)..(78): a, c, t, g, unknown or other
ggccaggcgcaagtccgatggagccttctatgcagtgaaggtgcttcagaagaagtccatcataaagagcaaagagcngaaccacatcatggcagaacgcaatgtcctactgaagaatgtgcagcaccccttcctcgtgggcctgcgctactccttccagaccccagagaagctctactttgtgcttgactatgtcaacggaggagagctcttcttccacctgcagcgggaacgtaggttcctggagccccgggcccggttctacactgcagaggtggccagtgccattggctacttacactctctcaacatcatttacagagacttgaagccagaaaacattctcttggactgccagggacacgtggtactgacagattttggcctttgcaaggaatgtgtagagcccgaggagaccacatccaccttcagccactacagatccctggaggccggacagtggctgcctgtgaacctcctgcaaggccttctccacaaggaccagaggcagaggctgggtccaaggcagactttctcgacataaaggaccatgtgttctttagtcccataaactgggatgacctgtaccacaagaggctaactccacccttcaaccccaaatgtggaaggacccgctgacttgaaacactttgacccagagttcacccaggaagcggtatccaagtccattggctgcacccctgacaccatggccagcagttctgggacctcaagtgcattcctcggattttcctatgcacaggatg

SEQ ID NO: 7488 - DNA, 766 bp, Cricetulus griseus
  modified_base (734)..(734): a, c, t, g, unknown or other
gccaagatgagaagtgactctctcaagggtcacacagatagtgatagagcaagagcccaggcttcctgtttccaagtcacctgtgtttcctgggaccaaataatgagcacctgctggagtctgggcaaagcagccctggctctgttctaccccagacctcccgaatgcaggggtctcatttggagggcagcctgtcttgtaaccgtttatttcccctttctatctccagccagtcgtgtggcatgggagctgtgctggggaaccagagtagagaggaggactgaggcagccagccttggcaggtgcagttttcagttcactgcagctccctcccccttttgttccccccagtttaagcataggttctgccagctgtagaaacttcagtccctcaggctggcagccgcagcaggtacctgcctgggggggcctggcagccatgaagaaggctgaaaggcaggagaacatggggtcttcagactgggggcggggaggagatggggaggggccctgtctgtggaaggtaggattagatcattagctcagtgacctcctagggtttcggtgtgctgtgttctcatcctacagctggtttggtaatgatctgcaagtcccggagagcaacagcacagctctgcctgacgctctcattaaaatccatgcagccaagctctgcactgctttgtagcagccggccttgtggagcctcctcagcttggggggctggggacccngttagctgagaggtcctctatgctctatttag

SEQ ID NO: 7489 - DNA, 766 bp, Cricetulus griseus
tcagtagaagaagagatgcagagtactattcgagaacacagagatggtgggaatgctggtggcatcttcaacagatacaatgtcattcggattcagaaagttagtgaacaagaagctgagggagcggttctgtcacagacaaaaggaagtgtctgaagagaatcacaaccatcacaatgaacgcatgctgttccacggttctcctttcattaatgcaattattcataaagggtttgatgaacgacatgcatatattggagggatgtttggagctggaatttactttgctgaaaactcttcaaaaagcaaccagtatgtttatgggattggaggaggaacaggctgtcccacacacaaagaccgatcatgttatatatgtcacagacaaatgcttttctgtagagtgacacttgggaagtcctttctgcaattcagcaccatgaaaatggcccacgctcctccaggacatcattcagtcattggtagaccaagtgtcaatgggctggcatatgctgagtatgtcatctacagaggagaacaggcatatccagaatatctcatcacctaccagatcatgaagccagaagccccttcacagacagcaacagccgcagagcagaagacctagtgactgccctggtgaaggccagagtgagtcaaacctgcaactggattacagtggattgcttccaacaaaaaacatattctctgaacccaacagccaagaactaagctgtttgtctcttataaagcatcactagagtga

SEQ ID NO: 7490 - DNA, 766 bp, Cricetulus griseus
atgcccggcgtgaagctgaccacccaggcctactgcaagatggtgctacacggcgccaagtacccgcactgcgcggtcaacgggcttctggtggccgagaggcagaggccgcgcaaggagcatccgccgggcgcgggcagccatactctcttcgtggactgcatcccgcttttccacggcacgctggccctggcgcccatgctggaggtggcgctcaccctgattgactcatggtgcaaagagaacaactatgtaatcgccggctattatcaagctaatgagcgtgtgaaggatgccagcccaaaccaggtagcagagaaggtggcctccaggattgctgagggcttcagtgacactgcactcataatggtggacaatgccaagttcacgatggactgcgcagcacctacgatccatgtatatgagcaccatgagaacaggtggcgatgcagagacccacactacgactactgtgaagattggccagaggcacagaggatctcagcatcactcctggacagccgctcctatgaaacgctcgttgattttgataaccacctggatgacattcggaatgactggacaaaccccgagatcaacaaagcagttctgcacctgtgctagactaggggtcccagcatgaaggaaaataagaggtggtagtggcatatgcctttaatcctagcacttgggaggcagagcagtctggtctctatagtgaattccaggacagccagaactgtagagagaccctgactcaaaaaaa

SEQ ID NO: 7491 - DNA, 766 bp, Cricetulus griseus
  modified_base (213)..(213): a, c, t, g, unknown or other
gagcagagcagtggtgtggaaggcatagggaaggtaacgccagagttcccactcactaaaggtgatagagggctgagagccgcagagcagcccctgaaccatgtggcgagagtgttgagcagtgacccaatagacaatgcgattcttaaccaccgagagtcgagctctcacaagaatagacctcctgtccgcctacttctctgtgctgcaccngtgtctctacacaattctctggtgggggcaggcaggcttcgaccctctggaattgggttgtctacaaacttccagcactttcaggatgaaaaatattagggaaaaagttctccccagtcagaacctacagaattttttttatctgctcgtggtattggagtgagtgggaataatgcagcagcagggaaaagagtaggagaaagcacccgccaccttccaccggtgaaagcccctcttcaagcaaagaagaaaataacaaaacattgttttctttgtggaaagaaaacaggactggccagtagcttcgaatgcagatgtggaaacaacttctgtgcatctcaccgctatgcagagacccatggctgcacctatgattacaagggcgccgggaggagatacttgcaggaggcgaaccctgtggtcaatgcgccaaagcttcccaaaatctaactcttctctgcgctttactgctctgcctgaggaaccctattatattgacagaagaaatattgtttagactgcattattttgttcgtactccacaagatttgcc

SEQ ID NO: 7492 - DNA, 766 bp, Cricetulus griseus
  modified_base (486)..(486): a, c, t, g, unknown or other
  modified_base (494)..(494): a, c, t, g, unknown or other
  modified_base (602)..(602): a, c, t, g, unknown or other
cggaggctgcgggacgccgggcgggctcgggacgcgccggtgggggccgagggcccggggctccgagatggaaccactggcgcccatgcggctctacacactctctaagcgtcactttgtcctcgtgtttgtcgttttcttcatctgttttggactgaccgtcttcgttgggattgagggacccaaagtgatccagacttctgctgctaattttcactgaataatagcaaaaaagctaaaagccaaattcaaatacattcaaaacccactgtctacatataaccaacaactatggctgacgtgtgtggttgagctggagccctcagaagaaacatctattaaaaaccagcttctccatgactgtgaaagtcaaatggtgtggctcaaagatggaaaccacgatctaacattcataacaaggttcatgaacacctgaaccagcccatcaaggagatgaacttcacttggaagtttgcacattccctncgcaagtntccatgagagactggggcatcgagcagaaatggatgtctgtcctcctgccgctgctgctgctctacaacgacccgttcttcccgctctcttcctggtgaacagctggntcccagggatgctggatgacttcttccagtctctgttcctttgtgccctgctgctcttctggctgtgcgtgtatcatggggatacgggtccagggagaaaagaaaatgcttaaactttctatttgcctaaaattcttcatcgttggactgttgtggctggcttc

SEQ ID NO: 7493 - DNA, 766 bp, Cricetulus griseus
tctcggcctgcaccagctcaaccatgtcccggagcatcctccaggagccgtggggaaaggaagctcgcctccgggtccggttccagagggcctgatccgcgtctacagcatgaggttctgccccttcgctcagagggcactgatggtcctgaaaggccaagggaatccgacatgaaatcgtcaatatcaacctgaaaaacaagcccgagtggttcctcaagaagaatcccactgggctggtaccagttctggaggacagtaagggtcgcttgatctccgaatctgtcatcatttgtgagtacctggatgaggcctaccctgacaagaagctgttcccagatgacccttatgagaaagctcggcagaagatgaccttagagtcattctccaaggtgccccctttggttacaaggtttattagggggaacaaggaagaccgctctgccctaaaggaagaattgaggaaagaattctacaagctggaggaggctttgactgattgtcagagcgaattccgtattggggatgctgtctctatgactgattatcttatgtggccttggtttcaacgactggaagccctggaactcaatgagtgtgtggcccacactccaaaactgaagggctggatggctgccatgcagaaagaccccacagtatcatcgcacttaattgatgccaagacctatcgtggtttcgtaaatctctacctacaggacaaccctgaggcctgtgactatgggctctgaagggcaagattcctcag

SEQ ID NO: 7494 - DNA, 765 bp, Cricetulus griseus
ctgggaccatgggcctcaggccctgaggacaggaggctccctgtggccatgacgacaggtgactgctgccacctccctggctccctatgcgactgctctggcagccctgccttctccaaggttgtggaggccacaggccttgggccaccccaatatgtggcacaggtgacttcaagggatggccggctgctctcaactgtcatccgggctttggacacaccaagtgactgtcccttctgccgaatctgccatgagggagcaaatggagagaacttgctgtccccatgtggctgtaccggcacgctgggagctgtgcacaagagctgcctggagaagtggctgtcttcctccaataccagctactgcgagctgtgccacactgagtttgcagttgaaaagcggccccgacctctcacagagtggttgaaggacccagggcctcgcactgagaagcggacattgtgctgtgacatggtgtgctttgtgttcatcacaccactggccgccatctcaggctggctatgcctgcgaggggcccaggaccacctccgtctgcacagccggctggaggctgtggggctcattgccctcaccatcgccctttttaccatctatgtgctctggacactggtctctttccgataccactgccagctgtactcagaatggaggaagaccaatcagaaagtccgcctgaagattcgggaagcagatggctccgaggacccccaccactccttgctggctgctggactcttaaaaaag

SEQ ID NO: 7495 - DNA, 765 bp, Cricetulus griseus
caccgacccgcgctatccccgcttccttccatcgaggatgacttcaactacggcagctgcgtggcctcggccagtgtgcacatccgcatggccttttctcaggaaggtctacagcatcctttccctgcaagttctcctaactacagtgacctctgccgtgttccttcattttgagtctgtgcggacatttgtccatgaaagccctgctttaattttggtgtttgctctcggatctctgggcttgatttttgcgttaactttacacagacacaagcatcctctgaacctctacctgctttttgcgtttacacttctggaagctctgactgtggcagttgttgttactttctatgatgtgtacctggttctgcaagctttcatactgagtactgcagtctttcttggcttgactgcctatactctacagtcgaagagagacttcagcaaatttggagcagggctgtttgctgtcttgtggattttgtgcttggcaggattcttgaaggttttttttcatagtgaaacgctggaattggtcttggcttctgtaggcgcccttctcttctgtggattcatcatctatgacacacactcgctgatgcacaggctgtctcctgaagagtatgtattagctgccatcaatctttacttggacattatcaatctgttcctgcatctgttgaggtttctggaagcagtcaataaaaagtattgaacagtatacaaagaccatttatatgtaaaaagtttgaattacacttaaat

SEQ ID NO: 7496 - DNA, 765 bp, Cricetulus griseus
  modified_base (758)..(758): a, c, t, g, unknown or other
cgagcgggccgccagcgggagctctctgctgtggcctcgggtggtgctttttggggactccatcacgcagttttctttccagccaggtggatggggcgcattgctggctgaccgacttgtcagaaaatgtgacgttctgaatcgtggattttcaggttacaataccagatgggccaagattatcctcccaagattaattagtaaagggagcggcatggaaaacccagtagcagttacagttttcttcggtgccaatgacgccacactcaaagatgagaaccccaagcagcatgtccccttggatgagtacagtgcaaatctgagggccatggtgcagtacctgaggtctgtggacatcctggaggagcgagtcattctcatcaccccacccccgctgggcgaagcagcctgggagaaagaatgtatcctgaaaggctgcaaattaaatcgcctgaactccatcgtcggtgaatatgctaatgcgtgtctgcaagtagccagagactgtgggactaatgtccttgacctgtggaccctgatgcagaaggacaaccaggacttctcatcctacttatcagatggcctgcatttatcaccaaagggaaacgagtttctgttctccaacctctggccactgctggacaagaaggtctcctctctgccatggctgcttccttactggaacgatgtggaagaagcaaagcctgagcggagtctgctgggagacggagaccattagttttcctagcttaaaaaanaaaaaaa

SEQ ID NO: 7497 - DNA, 765 bp, Cricetulus griseus
acaggaggagaaagtcatgaatctcaaaggtgtagatgggaatgagccaacagaagacagcaacctgctgaacagtggtgaaaaaaagccacaggaattggcaacagaatccagtcacttgcagagtgtgaggcgaattctggcttgccctccacatggctcgctggggaaagtggtaacaaatggtaccatggttgttcttctgtgggctgtggtttggtcagttacaggccccgagtgtcttcctggaggaaatctgtttggaatcataatcctgttctattgtgctgtcgccggaggcaaactttttggactcattaagttgccagcattgcctccactgcctcctcttcttggcatgctgctcgctggatttctcttgaggtgttgcaaccctcggcattgctgtactgatacgaattttgactactttcctgatggtgtgctttgctggttttaacataaaagaaaagatctttatttcttttgcctggcttccaaaggccacagtccaggctgccatcgggtctgtggctctggacacggcccgatcccatggagagaagcagctagaaaaatatgggatggatgtgttgacggtggcatttttggccatcctcatcacagcaccaattggaagcctactgattggtttgctgggtcccagacttcttcagaaatttgaacatgaaatgaagggagttcaaggagagacttctgcacacgttcagaggaagccgtggggattccattacagaagcatga

SEQ ID NO: 7498 - DNA, 765 bp, Cricetulus griseus
  modified_base (36)..(36): a, c, t, g, unknown or other
  modified_base (44)..(44): a, c, t, g, unknown or other
aagtaaaaagtaaaaaaaaaaaaaaataataaaaanaaaaaaanaaaaaaaagagatctattttcaatgaaggcatgctgcagttctcattcacatgtgaaaatatcccatcacacaaggaaagagtttactcctcatttcaggatgtttttagatttttgaggtgcttaaatagttatccatatttttaaggtgttccatccagaagaattttaatgtgcctgtaaatgttccatagaatcacaaccatcaaagagttgttttatttttacataattcattatatgtacatgtatatatgtatatatgtatatgacggtgtatatacatatatatgtatacacacatgcatacacatgcacacacagaccatcacatgctcagagtcctggcagcatgactataacattttttgataagtgtcctttggcaaaaaaaaaaaaaaagtaaaaaaaaagtctgctttgtaaatagtaattttatccagtggtgcatgtttgagcaaacaaaaaatgatttaagcacagtatttactgcatcaaatatgtaccacagttaagtatagtttgcaagctttcaacaggtgacatggtgtcattggttcccttagaatttgaagctgtcactgctgcatgtctcttttgctgatgctgctgtatcttaacccttccgctgtagatagatggctagatagaatcttactgatccacactctctctctctctctctctctctctctctctctctctctctctctttctctca

SEQ ID NO: 7499 - DNA, 764 bp, Cricetulus griseus
ctggagctgagggaacacgtcctggtcgcctgcacccgaacagcctgtcctgcctggcacccctgacctggtcccgtcatgtccctgcgccccttgctctggccgctccggctgctgctgctgcttctgttcagtggggtggtgtgctgggctgaggtcgggccagaaaccgaaagtcctgtccggaccctccaagtggagaccctggtacagccccccgaatcgtgtacggaatccgccgcctttggagacacgctccacatacactacacgggaagcttggtagatggacgcattattgacacatctctgaccagagatcctctggttatagaacttggccaaaagcaggtgattccaggtctggaacagagcctgctggacatgtgtgtgggagagaagcgaagagcagtcattccttctcacttggcctatggaaagcgagggtacccaccgtctatcccagcggatgcagtggtacagtatgatgtggagctgattgcattgattcgagccaactattggcaaaagctgctgaagggcattttgcctctggtgggcatggctatggtgccggcactcctgggtctgatcgggtatcacctatataaaaagtccagcagaaccaaagtctaccaaaaagaagctgaaagaagagaaacgaaacaagaagtaaaaagaaataaatagtggtttttaacaaaaaaaaaaaaaaaaaaaaaaaaaaaaaaaaaaaaaaaaaaaaaaaaaaaaaaaaaaaaaaa

SEQ ID NO: 7500 - DNA, 764 bp, Cricetulus griseus
gatttcctgtgtcagcttttgatgagtgctcggtgggctctgtctggccttggttttcgtgcccagcaagggcagaagaaatgtctgtctccaggctgtgtcggagccactgcctgcccttggtgggcatcatggtccttgtggctgtggtcctgtcgctgatgtcctacgctctcctctggaaggctggcaacctcgctgacctgcctaacctgagaatcggcttctacaacttctgtctgtggaaggaggacactggctccctacagtgttacaactttcctgagctggaggccctgggggttcctcgggttggcctagccctggccaggcttggtgtgtatggggccctggtcctcaccatctttgcccctctgcctctcctcctcgcccagtgcaacggtgatgaaggagagtggcggctggcggtgggcttcctggcggcatcctccgtgctgctggccagcggactgggcctcttcctttccttcgtgtggaagtgggtcaggctcaccttcctggggcctggctttctggctctgggcctagcccaggcattgctcattttcttgcttatgaccacggttatgctccctccacggggaaagaagggcgagagcaagtgggaggactgttagccggtctaaaggcttatgggattccaggggttcggttccagctgtgctccaaggaggtgccagcgaacctgtgattgggtgggtcctctctgcctcctcgtttcatagctaatgcggatctcaagc

SEQ ID NO: 7501 - DNA, 764 bp, Cricetulus griseus
  modified_base (245)..(245): a, c, t, g, unknown or other
ccagagagtaaacaagccagggccaactcatttgtaggaacagcacagtatgtttctccagagctgctcacagagaagtcggcgtgtaagagttcagacctttgggctcttggatgtataatctatcagcttgtggcaggactcccaccgttcagagccggaaatgaatatcttatatttcagaagatcattaaactggaatatgatttcccagagaaattctttcctaaggcaagagatcttgnggaaaaactcttggttttagatgccacaaagcgtttaggctgtgaagagatggaagggtacgagcctctcaaagctcatccactcgctgtctgccggtggataccagcctgccccaggaggtcggggcagcaacatagagcagtacatccatgatttggacactaactcatttgaactagtacttacagttttcagaagatgagaaaagattgttattggaaaacaagccggcaccagtttgtagaaaataacctaatattaaaaatgggcccagtggataagcgaaagggtttatttgcaagacgacggcagttattactcacagaagggccacatttatattatgttgatcctgtcaacaaagtcttgaaaggtgaaattccatggtcacaagaactccgaccagaggccaagaatttaaactttctttgatgtaattaccggatgatggattttcctcgtatgctcggtagtcttgtaaataaaagcatgtagagtaaaaaaaaaaaaaaaaaaaa

SEQ ID NO: 7502 - DNA, 763 bp, Cricetulus griseus
ccatttccctgacaatcctctcccatgtttgggagcctgtgtccccttcctgagaagcaatatccctgtgccatttgtgtggtgggaccgtttggcagcccacctggcagagggtcctaattcctcccccatcctcaggagataatcccaattctgagcccctttctagatgccttctccctgtcccccgtcccaggtagctatcttaaaactaccttgtcagattgctggccaagatcaggattcctgtcctggattatcaccttggggccatgacaatctggtcagagtctgtgatgccaaaaagtgggtgtggtatgaaacccttgtttctacttctgccattgactggttagctggcaggatgggctctttattcccgttgcctttttgtgccagacactgccttacaggcacctccatgtctttgggggtcccatgagctattggagacctgaccatgtttggggagctaggttggactgttccctgctgccaggtctccaaaccccaatttggtgccttttatttttaccagttatttcagtcccaaagttgaaatctacaagtaccttcctcccagccactttgccttgtgtgtttttcctggtgctgtgaccccagtggtctgtgtaacaaagcgtatgtgtgtagcgtgcccacatgagaacccactggagaagcacaccacatgttctgagttggagttctcatgtttaaccaataaaataaaagtagttgactttaaaaaaaaaaagaaaaa

SEQ ID NO: 7503 - DNA, 763 bp, Cricetulus griseus
caatggaggcaatgttctggccatgtttgtccacatgcttgttcagtggatggcggatctaggcctggaggttgaagaatccactgtctattcacgcatgatccaggcggctgcacagcagaaagacacacacctcaccatcaccccaacagtgctgggtgagaggcacctgcctgaccagctggcctctgtgacgagaatctcctcctctgacctttccctgggtcatgtgacccgggccctgtgcagaggcattgttcagaacttgcactccatgcttccttttcaacagctcaaagagtggggtgtggaccgggtgatggggagtggaagtgcgctgtcccggaatgaggtgctgaagcaggaggtccagagggccttccctttgccgctgtgctttgggcaggatgtggatgcagcctttggagcagctctggtcatgctccggaaagacctcggcccaaaggagccttagttcagcaagctaattggttaaaggaatctgggaattctatctaattgacattgccaacatgatcaatggattgtccttttcctggaccattctgtgggtagactgtaaattataatttatcttgaggtaccaatctaaattggccaagatctttccttcagggcactcgataaccatgcagccaggagtcactagtcagatcccaaactagtgccttccaagaacaggatcttctgaagagctgattgcaaatgcaaaatgtgagaggtggggagaatgggaggtgag

SEQ ID NO: 7504 - DNA, 763 bp, Cricetulus griseus
taccaaaggagccttctaaggaacaaggacatcagcatggacccaaagaagtgatggttttgaaagtaacagaaccatttacttatgatttgattgacaacaaaatgatgttccatgccaccgtggctactgagactgaattcttcagagtgaaggtttttaacacagccctaaaggacaagttttttccaaaaaatatcattgcaatatctgattattttggcaccaatggatttctggagatacacagcactacctctgtgtctgatgtgaatgttaaccaaatgatggttatctcaaatgcactgaagcaaagagccagtgcaacccctaaaatcaaggatcttttctcactaccaaaagggacatatatgaacggagagtttgtggtaattaagaaaactgagaggaataacttcatttactatggtatagaagatgataccgggaaaatggaagtggtggtctatggacgactgaccagtgtcaggtgtgagccaggcaataaacttcgacttgtctgctttgaattgtcctcaagtgaagacacatggcagctgaagtctgtaaggcacagttacatgcaggtcatcaatgtcagaaggaaagtctgtcaacactgatgcagttatgaaaagctccctagaaccatactcctgaaaacctggatgcgaaggataatgttagcagatgtaagattcaagtccaaaatgtaaatgtacatattacctttgaaatacatacctattaaagaccagctctt

SEQ ID NO: 7505 - DNA, 763 bp, Cricetulus griseus
ggcctatgtgtctcagtggccctggacactgctgctcttagcggtcagcggattctgcaactttgcacagaatgtcatcgcctttagcatccttaatctcatcagtccacctactcagtggctaatgccaccaagaggatcatggtcatcactgtgtccctcatcatgctgcgtaatccagtgaccagcaccaatgtgctgggcatgatgactgccatccttggcgtctttctgtacaacaagaccaagtacgatgcaaaccagcaggctcggcgccacctactcccagtgtctacatcagacctgagcagcagagagcacctgcggagcccagtggagaagccccacaatggtgcactgtttccccagcaaggtgacttccagtaccgcaacattctcctcacagaccatttccagtatggccgccagagccatctgaactcctatgccctcagtcgccatgatgtgtaggtcatttcaaaatatgggtacattttgttgctagagcaagtcctttttgtttgttttgtttttcgagacagggtttctctgtgtagctattggagcctatcctggcactcgctctgtagaccaggctggcctcgaactcacagagatccgcctgcctctgcctcccgagtgctgggattaaaggcgtgcgccaccaacgcccggatgaattatgtctttttggatttctatgatgttgctataatatgtatattaatgcatttttccttttcctaactccagttgtggcaga

SEQ ID NO: 7506 - DNA, 762 bp, Cricetulus griseus
cagcagaagacagcgttccaaagccacgcctggcggtggtggcccatgcagcaaaaggcctgtcaccagagaagcccaaaggcctgggcccagcaaatgtgtagccattgactgtgagatggtgggtacaggtcctcgtgggcgggtgagcgagctggcccgctgctctgtagtaagttacaatggcgatgttctctacgacaagtacatccggcctgagatgcccattgtggactaccgcacccgctggagtggcattacccgccaacacatgctcaaggccatcccccttccaggtggcccagaaagagatcctaaagctcttgaagggcaaggtggtggtggggcatgcactgcacaatgacttccaggccctcaagtatgttcatccccggagccagacccgggataccacttacgtcccaaacctgctcagccagcccagcttccacacccgagctcgggtctctctgaaggacctggccctgcacctgctgcacaagaaaattcaggtgggtcatcagggacactcatctgtggaagatgccatgacagccatggagctctaccagctggtggaagtgcagtgggaacaacaagaggccaacaatgccaaggcccttcctgaggacaggggctccgacagcagcaccgacatggagcagtacatggaggaccagtactggcctgatgagctggcccagagcaccagtggagaaataagggaggcccaggaaggaagggagtgagaggaaggtgcag

SEQ ID NO: 7507 - DNA, 762 bp, Cricetulus griseus
cacgaagttgagccgtccttgccagacccagaagccccagaagccgtggtgggaggatgaatgggaggttcccagggagacactgaagttggttgagcgcctgggagctggccagtttggggaagtgtggatggggtactacaacgggcacacgaaggtggcagtgaagagcctgaagcaagggagcatgtcccccgatgccttcctggcggaagctaacctcatgaaacagctgcagcaccagcggctggtccggctttacgcagtggtcacccaggagcccatctacatcatcacagaatacatggagaacgggagcctagtagattttctcaagactccctcaggcatcaaactgaacatcaacaagctgttggacatggcagcacagattgcagagggcatggcattcattgaagagcaaaattacatccatcgcgaccttcgggctgccaacatcctggtgtccgacacattgagctgcaagattgcggactttggcctggcacgtctcattgaggacaatgagtacacagccagggagggggccaaatttcccattaaatggacagcaccagaagccattaactatgggaccttcaccatcaagtccgatgtgtggtctttcgggatcttgctgacagagatcgtcacccatggcagaatcccttacccagggatgactaaccctgaagtgattcagaatctggagcgaggctaccgcatggttcgacctgacaactgtccagaggagctgtacca

SEQ ID NO: 7508 - DNA, 762 bp, Cricetulus griseus
atggtcttggagctctacctggacctgctgtcgcagccctgtcgcgccatctacatcttcgccaagaagaacggcattccgttccagatgcacaccgtagaaataatcaaagggcaacacttgagcaagcaattctccgagatgaactgtctgcggacagttcctgtcctcaaagacggaaacttcgtgttgaccgaaagttcagccatcctgatttacctgagctccaagtaccaggtggcagatcactggtacccagctgacctgcaggcccgtgcccgagtccacgagtacctaggctggcatgctgatagaatccgtggtaccttcggagtgctcctgtgggccaaggtgttagggccactcattggaacccagattccagaggagaaggtggatcggaacagaaggagtatggataactctctgtgtcgcctggaggaaaagttccttggggacagggccttccttgctggtcagcaggtgacactggctgatctcatgtgtctggaggagttgatacagccggtggctattggctacaatctgtttgagggaaggccacaactgacagcatggcgagagcgggtggaggcattcttgggtactgatctgtgtgagcaggctcatggtgccatcatgagcatcctggaacaggcagccaagaaaacaattccagagccacccccagaagcccatcatatcatgctgcttcgaattgctaggattccctgagtggtctgattagcaataaatactcat

SEQ ID NO: 7509 - DNA, 762 bp, Cricetulus griseus
tttttgcatcgtttgacattagggttgacgtaacctcggcacctcctcgaagaaggacctgtttgttttggttactagggttttttgtttgtttgtttgttttccttccaacatggcagcctccagccgcgcacaagtgttagatctgtaccgggcgatgctgagagagagcaagcatttcagcgcctacaattacagaatgtatgctgtcaggaggataagagatgccttccgagaaaataagagtgtaaaggatcctgtagaaattcaagccctggtaaataaagccaaaagagaccttgaaataatccgcagacaggttcatattggccaactgtattcaactgacaagcttatcattgagaatcaagagacgcccaggacataggagcccagcactaggaaacagcctccagcagcagaaccgaccaccttcagcatccattctctatgctgtggaacctcccagtgctggctgaacagagcctcttgctcttcctgccttgtaggagctgataaactgggtcacatttgcattctgtcacagccataatgtgaagaaatggctgtgcatcctcaatccaagtgttagaatgaagagctggaggtcactaagaataatgccatgtgttattgtgtctcctctccatccctcccatcttacagatcacccatgtatagagcttttgcagactttgtgtcttagtaccttaaaaataacagaattatctccctatcctttataccaataaccattacaat

SEQ ID NO: 7510 - DNA, 762 bp, Cricetulus griseus
  modified_base (13)..(13): a, c, t, g, unknown or other
  modified_base (17)..(17): a, c, t, g, unknown or other
taattaacttttntttnttgtgtatgaagagatgccacttcacctgaacctatgcagcaagcagcttttagaccgtgtctcctctgtccttttgctgtttctgatctttactctctaggagtagcatggtcaaggccaacttacgaagtggttgaaaaattagctaatgcttttctttctcaatgcaaaagcaatgaccacagcagtagaaggctggcttcacaatgttaaacacagactctgatagatttgactttatttgacacttcttgccttaacagtttcaagaaccacatacataaaactccataatacagtggccaagtttctccctattgtgatgtttacccatatgagctctgtaactagttctgtcatttaaaatacaccacttaaatcttaacttctacatttcaagaaccatctttaggagtgactaagtatattttctgtggagttatttctgacaatatttttcagaatatggtaatatatatgtatatttatactcttgtgagttcaaagtctgtttctgtaaactttctgtatatacctgttaaaatttttaaactgtctttttcatagtcaaaacaaacaaacaaaaaaatgttgaaaccacttaataagattacaaacttgaaaaattagacacttcagttaggcaataaaattcatattatgaaagcaatatattctaaatttcaaagacgtgacaagttctgtagaatctctctcatcagaagatggaagcgttcaaactgc

SEQ ID NO: 7511 - DNA, 762 bp, Cricetulus griseus
cagcagagccttctacgcccgctcttcagagacacagcagccatggccctggcctcacccaggtgtccacccccattccacgccccagagtgcatggaccctccagtacccctgtttcccctgggcctgggctgagcaccccccttttagttctgaagaggaaccagaagaagaccttgtgcaacgtgtgtctctccagccccctaaagttcttcccaggtctgcaccccagacggagaacagctggggctggtctgattctgagacctcagaggagagtgtccagccccctggcaagggctcaggtgggctggcttcctcaggaacactggtgcagtcgatggtcaaaaacctcgagaagcagcttgaaacgccagtaaagaagccctctggaggggtcagtgtgttcttaagggcccaacgctgcccttcagaagtcttccacacctgcaaggaagtctcagctttctgaggatgagagtgacttggagatctcgtcagctttttttatacagttcaggaccgcctgcctagggatggaactgctcacagtgggccgggttcccctacatccatgacagtcgggacagttcctcacagacattgccctcaaagcatttactccaccgaagctctgctcttggacagttctcagttgtgacacattgatatttagaactaaccaggataccattcaaccaagaccaggatgaccttggagaattttttttttttttttttttttatttttttatttttttt

SEQ ID NO: 7512 - DNA, 762 bp, Cricetulus griseus
ttttcctccgcggccatgccccggtctctgttcctgccattgctgccccttctgctgctgcttctacccgaggcccccagagcagccagagtgtctccgctgcaagcgtcctccgaggctgcggccacctgcaaggcccacgatctgtgcctgctcgggccgcgcccgttgccccctgcaccgccggtcaatgtcagcctctattatgaatccctttgcggagcttgtcgatacttcctggtccgagatctgttcccgacctggttgatggttatggaaattatcaacgtcacgctggtaccctacgggaacgcgcaggaaagaaatgtcagtggcacctgggagttcacgtgtcagcatggggagctggagtgcaggctgaacaaggtggaggcctgtctgctggataagctggaaaaggaggcggccttgctgaccatcgtctgtgtggaagagatgcaggacatggagaagaaactagggccgtgcctgcaggtatatgctccagaggtgtccccagacagcatcatggagtgtgccacgggggagcgtggcacgcagctcatgcacgccaacgcccagctcaccgaggccctgcagccgccccatgagtatgtgccctgggtcctggtcaatgagaaacctctgaaggaccccagccagctcctgagcactgtctgtcagctgtaccagggagtggagaaaccagacatctgttcctccatggcagacccccccaggaaggtttgctataagtgaagg

SEQ ID NO: 7513 - DNA, 761 bp, Cricetulus griseus
gaccttcggagctgtttgccccaagaggctgtgctttgctcggaacagctagcccttcaaaaatacgacagcagccagaacccacagttcacgttgatgcattcctttatgatgaagacgttattgattcattgtgtgaggagggaaaaatgagcagaaactactgcactgcgtgtggctcacaccaaacagcacctttgggatttatttctcattccttctcactcgaggagttgaagttcatttatcagcatgtactccccgatctgtcgggaaaggtcttggttgacattggctccagacttggcacagtcctttatgcgggttacctttacagctcggcagtgcagctctatggagtagagcttaatggagaattttgccaattgcaggaaatggtcataaaaaataccagttcggtgacagaataaaggtgcttcatgcagacatctgtacccaaggttcacttctgcaaagtgctgatgtcattgtaatgaataatgtcttcgaatatttccttactgagcctcaacaggcaagtgcctgggactacatcatccataatgtaagaaaacaaggatcactattactcacagttccaagtctccaagattctctcttaggtcttgagactaatatgcagctgtcctcctgggtggaagagataccattgaactttgatgtgtatccacagagggacatggacagagaaactcttgaacaaattcatttatataaggttctctagcactgaagtaacc

SEQ ID NO: 7514 - DNA, 761 bp, Cricetulus griseus
atgggatgctggtgggactgctgatggccgtgttctcggagaagttagactactactggtggcttctatttcctgtgaccttcacctccatggcctgcccaattatttctagtgccttgagtagcatcttcaccaagtgggatgtgccagtcttcacattgcccttcaatattgccttaacactgtacctggcagctacaggccactacaacctcttcttccccacgacacttgtggagcctgtgtcttcagctcccaacatcacatggacagagattgagatgcctttgctgttacaaaccatccctgttggggtcggccaggtctatggctgtgacaacccctggacaggtggtgtgatcctggtggccctattcatctcctcaccactcatctgcttgcatgcagccatagggtcaatcgtggggctgctggcagcactgactgtggccacaccctttgagacgatctacatgggcctttggagctacaactgtgtcctttcctgtatcgccatcggaggcatgttctacgccctcacctggcagacacacctgctggcactagtctgtgccctgttctgtgcatacatgggagcagccctctccaacatgatggcagtggttggcgtgccaccaggtacctgggccttctgtctctccaccctcaccttcctcctcctgacgagcaacaaccctggcatctacaagctcccactcagcaaagtcacctacccagaggccaaccgcatctacttcctg

SEQ ID NO: 7515 - DNA, 761 bp, Cricetulus griseus
caggacttctccgatgagatccctgtggagcaccagatgctggtgaagaggatctaccagctgtggatgttttactgtgccactctgggtgtgaacctggtggcctgcctggcctgatggattgcaggtggaacacaggccaacttcggcctggctatgctctggctgcttctcttcactccctgcagttatgtgtgctggttcctgccttcgtataaggccttccgggctgacagctcctttaacttcatgacattcttcttcatcttcggggcacagttcgtcgtgacggtcatccagtccatcagtttctcaggctggggagtatgtggctggatggcagctgttggattctttggggtcaatgttggggctgctgtggtcatgctgatcccagccatcatgttttccttgtctgctgtcatgctggccatcacacttgtgaaggtgcataggatttaccttggggctgggggaagcttccagaaggcacagacagaatggaacactggtacctggaagaatcccccatcaagggaagtccagtttaacagcttctctgggaataacctacccgagtaccccactgtccccagctatcccagtggaggccagtggccttaggcatctggctggcctcaataacatggctctgtctcctgccaccacccttggtcctgaagcccatgcttctccctgaggtcctaggaggtcctcggcctgtgttcatctcctgcctgagccctcagcaagcactgccc

SEQ ID NO: 7516 - DNA, 760 bp, Cricetulus griseus
cctgcaaggaagaatcaactccgtgcagaagaggagaaaaaaatgtaattatggagctatcagaaatgaggaagcagctgcgcagtgaagagaggcgtttgcagggacagctgctgcacttggacagtgatgaggagatcccactcaggaagagagaaaggaatcccatggacatatttgacatggctagacatcgggtacaagctcctgtcagaagaccgtcaccaaagggcttggatgctactgcttttcagaatattcatgacttcaatgagctcaaagagagagattcagaaacacgagtggatctgaagttattgtacccagatcctccgagaaatgaagacagactgaggagactgaatgggcatcagaagaaacccactaacacagatgacgagagttctttggtttgatcctgatgacatcatgaaacaattgggtgaggatggatccaactctgtagcaactgagccctggctccgcccgggcacctctgaaactctgaaacagttcatggcagagcagcttaatgaggaacagcaggtccctggaaagccaggcactttccactttggcagagcttgtctgctgcacatgcttaatttaaaataaaccctccctggaccagcagtgccttttacagtggaaggaatgttcaatcggtatcttgaatgtcttgcttatggccctacctaaatattatttatttaaacaaaatagtctatttttattaaaaaaaaaaaaaaaaaaaaaaaaa

SEQ ID NO: 7517 - DNA, 760 bp, Cricetulus griseus
  modified_base (708)..(708): a, c, t, g, unknown or other
atgtagtcgcttcagccatgttttcccttccatctgcttaccagcacatcaagatgcataaagaattctgggacacttatcttctgtctactgtgtagcatttgatcgaactgggagggcggaattttctacaggttcagatgactgtttggtgaaatctgggctacagatgatggacgcctcctggctacactgcgagggcactctgctgaaatttctgacatggctgttaactatgaaaacactctcattgctgcaggcagctgtgataaagttgtgagagtatggtgtcttcgaacttgtgcaccagttgctgtccttcagggacattcagcttctattacttccatacagttttgtccatcaactaaaggcacaactagatacctcacttctactggtgctgatggaacaatttgttctggcaatggcatgtaaaaacaatgaagtttagagatcgcccagtaaaatttactgagagatccagacctggagttcagatatcttgttcatctttcagttctggtggtatgttcattacaacaggtagcactgaccatgttattagaatatactacttacaaatggtgatggcagagagcccccgaacaggagccaaaagaaagctactcagtgcgtcagaagaggacgaaagcatgggaggagaagaaaaggagctgaaagaaacaaaagaaaaagcacatttanccctcctcagagagtggagagttaggatccagtctaagttcagaaagtacct

SEQ ID NO: 7518 - DNA, 760 bp, Cricetulus griseus
agttcggagcccaggagtccccgcgaccgtcgtgcaggtgccctccgccggggtcgggatggagctgcccgccgtgaacttgaaggttattctcctggttcactggctgctgacaacctggggctgcttgttgaactcaggctcctatgcctggagcaacttcactatcctagccctgggtgtgtgggctgtggcccagcgggactctgttgatgccataggcatgtttcttggtggcctggtggccaccatcttcctagacataatctacatcagcatcttctaccagagtcttgcctccagcgacactggccgcttcagtgtcggcatggccatcctcagcttgctgctcaagcccttctcttgctgcctcgtctaccacatgcaccgtgagcgaggaggggagctcccactccgcccagatttcttcggaccgtctcaggagcatagcgcctaccagacaattgactcatcagattcgcctgcagccccctatgccgttgtggaggacaagggccaggctgccacccgggggtactgaagatgcccccccagtcttcctggtgcccagcaggatgcttgtcacctcctttctggacctgcagtggagtgtcctccattccctgccacagaggtagcctgagtcaagtaccttggaggtcacaatcctctggcttcccagctaagaagagccaagcccctaactctccagggaaccaacccctccaacacacctgctagcccctgggctaaaactgtg

SEQ ID NO: 7519 - DNA, 758 bp, Cricetulus griseus
gtgcggtattcactggagctgactgcggcccggcctttggtctggatgtggaggctgtgagcacattgctcaacactgggctggagaagctcttccaggcccggaacatcgcccaaaagcacacctggacagcaagatgctggctgcctggaacggcctgatggtgtctggctttgctgtgaccggggctgtcctgggcatggataagttggtcaccccaggccaccaatggcgccaaattcctcaagcggcacatgtttgatgtggccagtggccgcctgaagcggacatgctatgccggcaccgggggatcagtggagcacagtaacccaccctgctggggcttcctggaggactatgccttcgtggttcgaggcctgctggatctgtatgaggcctcacaggagagctcctggctggagtgcgtgccctctcagctcaacaggagactctcaagcagatcgtgatctgtggagacccccagggcaaggacaccaaggccctgctgcagtgcgtccactccatctacctccctaacaaggtgctgattctggctgatggagacccatcgagcttcctgtcccggcagctacctttcctgagcaaccttcgacgagtagaagaccgggccacagcctacatatttgagaaccaagcctgctccctatcactgagccctgtgaactacgaaagctgctacaccagtgactgcccagaactatttgagctgggccagaaggcagaacttaacagctgac

SEQ ID NO: 7520 - DNA, 758 bp, Cricetulus griseus
agctgcaatgaggctgaatcagaacaccgtgctgctgggcaagaaggtggccctagtaccctacacctccgagcatgtgcctaggtaccatgagtggatgaaatcagaggaacttcggcacctgacagcctcagagctgctgaccctagagcaggaatatgagatgcagtgcagctggtgtgaagatgaagacaagtgcaccttcattgtgctggatgccgagaagtggcaggcccagcctcgcccccctgaggagagctgcatggtgggagatgtgaacctcttcctcacagatctggaagaccccaccttgggggagatcgaggtcatgattgcagagcccagctgcaggggccagggccttggcaccgaggcgtctctcctgatgatgtcctatggagtgacgaagctaggtctgaccaagtttgaggccaaaattgggcaagaaaatgagcctagcatccggatgttccagaaactacattttaagcaggtggcagtgagcaacgtcttccaggaggtgacactcagactggcagtgactgaggcagagcggcagtggcttctggagcagaccagccacgtggaggagaagccctatagagtcgagttggcagagcctgtggcagccaccctgtgtgagcagacctggagccacccactcccgaggccagacagctgcatgggagagtcatgtacagtgtcttcaggctgctccagaccctcctaagcccacctgggcctcctctggctggcag

SEQ ID NO: 7521 - DNA, 758 bp, Cricetulus griseus
cgagcggccggccgcccggctctccgtggtttccagctcgcgtggtggtagcggcggagcgtctccgtgaggaggtgcgcggggccatgacgtcagcgtccaccaaggttggagagatcttctctgcggccggcgccgccttcacgaagctcggggagctgactatgcagctgcatccagtatcggactcttcccctgccggggctcagataaagaccactgtaaagcgaaaagtatatgaagactctggcgtccctcttccaactgagtcacctaagaaagggcccaagaagatgacatctggggtcctctcccctccaactgcccctccacccagcagctccagtgtccctgaagctgggggtcctcccctaaagaaacagaaggctgatgtgacactcagtgctctgaacgactccgacgccaacagtgacctggtggatgttgaagggctaggagaaactcctccagccaagaaactcaactttgaccaggacagcctgaccctggactctggccttctctcgacctctgctgatgctcctctactctcctgctgacgtcccttccacctctcgaccctcactgttccaccgtggacctgtggatcacctgggactctaagcaaggactgcatgagagagggtcagaaagccactggagctgtccatcttgttcccgataaacatgtgcccgcaccctctgacctccgtctgatggacatttttatacagaaaattataataaagaaattctct

SEQ ID NO: 7522 - DNA, 758 bp, Cricetulus griseus
atgtagggcgctcggacggcgcgcagccgtgggcctgctaccccggacggcgtcgcgggcctcgacctcggtcgggatcccgcgcgggagggagccgatcggagcgtgcggccaccgaggcctgcacgtcacaaccaacgcggcctccgccggccgccagtcgagtttgaatctccactacctcgatcagattctgaacatcaaaaagcagagtgtctgcatggtacatttgaggaactcgggaacttttggactacccaagctctctagatgagacagcttatgaaagacttgcagaggagacgctggacgccctggcagagttctttgaagaccttgcagacaagccctataccctggaggactacgatgtctcctttggggcggcgtgctaaccattaaactgggaggggatctagggacctacgtgatcaataaacagaccccgaacaagcaaatctggttatcttctccctgcagtggccccaagcgctatgactggaccgggaagaactgggtgtactcccacgatggcgtgtccctgcatgagctgctggccagggagctgactgcagccttaaagaccaaaatgctgggcattggtggcacacgcctttaatcccagcactcgggaggaagaggcagacagatctctgtgagttcaagaccagcctggtctacagagcgagttccaggacagccacgactacacagagaaaccctgtctcaaacaaaaaaaaaaaagaaaaaaaaaaaag

SEQ ID NO: 7523 - DNA, 758 bp, Cricetulus griseus
ggcagggacagaagagaggtgtgaactgagccctcgtttaagggaagcctgcattgctctgaatcggcagctgatcaggcctcgtggagtcaccagagatggcagcgcagcacgccttgtagcccaggagtggtttcgagtgtccagtcaaaagcgctctcaggctgagcctgtggcaggggtgcttcgaggagtgaagagcctggggcctgagctgctggctcatgtggtgaacctggctgatggcaatggaaacacggccctgcattacagcgtgtctcatgggaatctggccatttccagcctactactggatacaggggtctgtgatgtcaatcatcagaactagagccggctattctgcactcatgttggctgcactcacttctgtagggcaggaggaggaagacatggctgtggtcaagagacttttcagcatgggtgatgtcaatgccaaggctagccagactggacagacagccctcatgctggccatcagtcatggccatcaggacatggtggctgccttgctggaacgtggggctgatgtcaatgtacaggatgcagatggggctacagcactgatgtgtgccagcgaatatggacgccttgatacagttcagttgctgttggcccagccaggctgtgaccttaccatccctagacaatgagggaacaagtgccctggccattgcgctggaggctcaacaggatgaggttgcggcactgctccatgcccacctgacttcagaccacca

SEQ ID NO: 7524 - DNA, 757 bp, Cricetulus griseus
ggcggcggcctgccaggggtgggcgtgcgggcggcgagctcgggcggccaggcggagcagctggacgcgctggtgaagaaggacaaggtggtggtgttcctcaaggggacgcccgagcagccccagtgcggcttcagcaacgccgtggtgcagatcctgcgactgcacggcgtccgcgactacgcggcctacaacgtgctggacgacccggagctgcggcaaggtattaaagactattccaactggcctaccatcccgcaagtgtacctcaatggcgagtttgtggggggctgtgacatccttctgcagatgcaccagaatggggacctggtggaggaactgaaaaagctgggaatccgctctgccctgatagatgagaagaaccaagactcaaagtgagggctccaggtcctcgctgagcagagtgccctcttcatcacattcgctgccagaaaagccttaccgagtcatgtcctgtgctgtgggtgcttgcactgggcctccagccttgcaagcaggcagtggttttacttggcctttggctcagaatcccctatggtgaacttccttgtaaccactgccctgtaaattggcattgtaatccggtgttgctgtaacccaaatttgttcttatattgtcttttattctctgcctggttcaggagtcattcctgactcttgtggttgggttgtaagatggcaaaacccctgatgtttttgtaacttcttctataaggaatgatgaacagagaagaaa

SEQ ID NO: 7525 - DNA, 757 bp, Cricetulus griseus
cgctgccgccccctgctggcccctccctctacggcctcaatcacctttctcaccacccctcggggaacctggactacaacggggcgccccctatggcccccagccagcatcacggaccctgtgagcctcaccccacctacacagacctctcctctcaccacgcaccgcctcagggtagaatccaagaagcacccaaattgacacacctgtgaggggaggggagggttgagggtgggggtgtggagatcaagggccaaggaggtggtggagctggtggtgggggcaagtttggaggcctggaagaggtgtgtgttagggttgttgcaggcttccgggaaacaagggcaggcctggggcgccttcccaagtccagcttcgctcaaaaagtgtgtgttctagtgaacattttcatatatatttattggttatagcctgttaaaatattttctttttgtattatttatcccccttacattatgtatttatatgatgaacaaaaaggaaaaaatagtacttttttagtatttacttgttataaaggatgttgtttcctgtcatgtaaaaccagctattttagttttgttgtattctagacaagagctgtagatttatgttaaactcgtacttatgagcaattgtaattagttctaaaaggcatgaactcagctcctaatggtcactgtatagtcctgaatttgtagagttagagttaattctctcttggaactttctttgttcttctgtagtttactttttt

SEQ ID NO: 7526 - DNA, 757 bp, Cricetulus griseus
tctgactttgacattgatgaaggagatgaaccatccagtgatggagaagcagaagagccaagaaggaagcgcagagtcgtcaccaaagcctataaggagcctctaaagagcttgaggcctcgaaaagtcagcaccccagcaagtagctctcagaaggccagagaggagaaggcactgctgccactggagctgcaggatgatggctctgacagtcggaagtctatgcgtcaatctacagctgagcatactcgacaaacattccttcgcgttcaggaacggcaaggacagtcccggaggcgaaagggtccccactgtgagcgaccactaacccaggaagagctgctcagggaggccaagatcacagaagagctcaacttacgttcactggagacctatgaaaggctggaggctgacaaaaagaagcaggttcacaagaagcgcaaatgccctgggccagtaatcacctccctcctgctcactgctcacgtaccttcatcacattcacgtgatgatgcaacatttgaagagtggtttccccaagggcgacccccaaaggtccctgttccgggaggtctgcccagtgaccccatcgtccagcattgtaccgggaccctggttaccagacatacccctatgccactgctcgagccttcaagatcattcgtgaggcctacaagaagtacatcactgcccatggactaccccctgctgcctcagcctaggcccttggccccccaccccctcgacgccactccct

SEQ ID NO: 7527 - DNA, 757 bp, Cricetulus griseus
gggggctgtgacggaggctgtggagaagtggggagggggcaagaggtggaagaacaggaagaagttacctctgtgtttttgttttttaattgttttggttggcaacaatttccctgtccctatcactgttagaggcctaattttatatctataatatattaaaaaagcaagttaaacttggatgtatcaagttaaaattattgtcgaaagtttaaatacctatatattctctatgaatacaatgcaataaagggacttaaaggaagaatgagcgagactgatgatgcagaggtgacatgtggggtcagcttgccatttatatatggctgtcagagcctggggcctacctttaggttttataaggtcaaaaacggaaggatatttggctgtgcccttctttctctgccttggtgcagaggtttggaaaaacagaaaattcctttcaactttgcctcaggtcttctaattcccttaagtcttatggaggatcccaagattgctcctcttattggaggctggcctgtctttaaaacatgactggcctgtgacttcaggaagggcaccatcgctgcagaccttaccctggttctgctatgacagaaagcacactcaacccctggcctttagctgcttgattctttaagccattcaactccataccagctcctttcctactggaaggatgaagggaaaacttcctgggaattgagggacaagccagtaattggaagatttattctggtgactggggcttaga

SEQ ID NO: 7528 - DNA, 756 bp, Cricetulus griseus
tttagccagcggctgctgtcatgacgacccaggggggcctggtggccaaccgaggccggcggttcaagtgggccattgagctgagcgggccgggaggaggcagcaggggccgaagtgaccggggcagtggacagggagactcactctatccagtcggttacttggacaagcaagtgcctgataccagcgtgcaagagacagaccggatccttgtggagaagcgctgctgggacatcgccctgggtcccctcaagcagattcctatgaacctcttcatcatgtacatggcaggcaataccatctccatcttccctactatgatggtgtgtatgatggcctggcgacccattcaagcacttatggctatttcagccactttcaagatgttggagagttcaagtcagaagtttcttcagggtttagtctatctcattgggaacctcatgggtttggcactggctgtttacaagtgccagtccatgggactattgcctacacatgcatcagattggctggcctttattgagccccccgagagaatggagttcagtggtggaggattacttttgtgagtgcagcatgttacagcagaaaagaaactacagtacaacttctgactgaaaataatgtagaaaactttatttatgttcccagcacagagcaaaacaaacaaagccagactctatgtaaaacaaaagaatagcagccgctgagtagcagcatctccttccaataaattaaatggtcgaagaacaa

SEQ ID NO: 7529 - DNA, 756 bp, Cricetulus griseus
ggctttctgccctaggtggccatggcggggagccggctggagacgattgggagcgtgtttacccggacgaggaatctgatgcgtgctggagtgttgaaggagaagccgctgtggtttgacgtatatgaggcctttccgccgctgagagagcctgtcttccgaaggccccgtttgcgatatggcaaagccaaagccgacatccaggacatcttttaccgggaagatcagattcgagcgaaattcttttctgcctatggatctggtcagaaagcttttgatctgttcaacccaaacttcaagtctacctgtcagcggtttgtggagaagtacatggagctgcaggatctgggagagacagatgaggaagagttatttgtgaagacagggaaggctttgctggcagaaggtgtcattttaagacgagtaaaagaagcaaggactgtcaatgtcagaccccaagttccgttggaaggaaaccagcctcaggaagagatgcccagaagcagcctgcacaggagcagcaggagccagggatggccgtaccctcttccagagacccttctgtgccctgagcatgctcaccacctgggacactgctgaactgcttggactctgttggtttccatctcaggcatgtctgccttctcgaagttgctgtttctgggttgtcataaatctcagtaccgtgatttgaaagcaccagttctgtggtacttttattcatgacacggttaaataaagggttctctgatgctt

SEQ ID NO: 7530 - DNA, 756 bp, Cricetulus griseus
cgggattcatgactaagtcatatgacccaatagctcccatagccgaggagatcagccaagaagcttctctcctgtgttttgacgaatttcaggtcactgacatcgctgatgccatgattctgaaacagctttttgaaaatctgttcaaaaatggggtcgtcgttgtggcaacatccaacagaccaccggaagatctctataaaaatggactccagagggctaactttgtaccatttatagctgtcctgaaggaatattgcaatacggtccagttagattctgggatagattatcggaaaagggaactcactcctgcaggaaaactctactacctcacaagtgaggctgatgtggaggctgtcatggattttcacttgcaaagcggacttcaagctcggcgattcataactctcattgataacttctatgactacaaggtgcgcataatttgctgtgcatcaactcctatctcaagcttattcttgcatcagcaccatgacagtgagttggagcaaagcaggatactgatggacgacttggggctgagccaggactctgcagggctctccatgttcactggagaggaggaaatcttcgcatttcaacgcacaatttcccgcctcacagagatgcaaactgagcagtactggatcgaaggggacagaagccagaagtaaggtcactttcacaagaataaaaaccagctaactggtgtaaggctgcgagactttcttcttcaaaaaaaaaaaaaaaaaa

SEQ ID NO: 7531 - DNA, 756 bp, Cricetulus griseus
  modified_base (663)..(663): a, c, t, g, unknown or other
tgtttccggtgctcctgcacatcccagggctggctgataaggtcttcccacaccagaaggtgttttctgccatgttgaagaagctgttggctgagcacaagatgacttgggatcctgcccagccaccccgagacctgactgatgccttcctggatgaggtggaaaaagccaaagggaatcctgagagcagcttcaatgatgggaacctgctcatggtggtggctgacctgttcatggcggggatggtgacctcttcaaccacactgtcctgggccctgctcctcatgatcctgcacccggatgtgcagagccacgtccaacaggagattgatgatgtcatagggcaggagcggcatccagagatggcagaccaggcccacatgccctacaccaatgctgtcattcatgaggtgcagcgctttagtgacatcctcccactgggtgtgcctcacaagacatctcgagacattgaagtacagggttttgttatccctaaggggacgaccctcatcaccaacctgtcctcggtgctgaaggatgagactgtctgggagaagcccctcctcttccatcctgaacacttcctggatgcccagggccgctttgtgaagcgtgaggcctttatgccattctcagcaggccgcagagcatgcctgggggacnccccgtggcccgcatggagctctcctcttttcacctgcctcctgcagcgctttatattctcagtgcctgatggacagccgcggcccagcgacc

SEQ ID NO: 7532 - DNA, 756 bp, Cricetulus griseus
ctgggcattcagtgtggtgactgcaatagaatcggcttgtgcgatccaaggaaaacctctggactacctcagcgtgcagcaggtcatcgactgctcctttaataattatggctgcagcggtggctctcctctcagtgccttgagctggctaaacaagacacaggtgaagttgatggaagattcagagtacccattcaaggcagaaaatggcctgtgtcgctactttccccaatcacaatccggagtttcaatcaaagatttttctgcatatgacttcagtggccaggaggatgaaatggcaaaagcacttctgaacttcggccctttggtagtgatagttgatgcagtgagctggcaggattacctaggggtataattcagcatcactgctccagtggggaggcaaaccatgcggttctcatcacgggatttgataaaacaggaaatactccatattggatggtgcacaactcctggggaaactcctggggaatagatggctatgcacatgtgaaaatgggaggtaatgtttgtggcattgcagactctgtctctgttgtctttgtgtgatcacgtgatggagtcatcatgagacaactataaaaacgaagctcttcatagtaagatctaatataatacttaagtctgagcattattcactgtcaagtttcaacaactgcctacaggaggttctaagagcaagctagcattttttaaacaatggtaggtcatctcattcttgcagaaagatggaca

SEQ ID NO: 7533 - DNA, 755 bp, Cricetulus griseus
  modified_base (597)..(597): a, c, t, g, unknown or other
atcaccactgtgacagtgccaacttccgattttaccagacaagcagtgggcagtatattgccattacccagggaggagctatacagctggctaacaatggtaccgatggggtacagggccttcagacattaaccatgaccaatgcagctgccactcagccgggtaccactattctacagtacagaccactgatggacagcagattctagtgcccagcaaccaagttgttgttcaagctgcctctggcgatgtacaaacataccaaattcgtacagcacccactagcatagaataaacttgttcacagagttgtacaaagcacaactagaattttctgttgggtggctcatgtgtgtcttgattactttcaatgttaataatgttgacttttaagttaaccgtcactgttatgtcctaggaactggtttccttgactttctagaatcaatggccaagagaggcatataatccttgaggggttgaacatatcatgaagttgagtcagtatggaagaatttcaaacaaatcaaacagggtgctgcggttccggctgactacatctgctcatggtatgacatactggctgctttgtgttcngaatggtagcagttgctttgtatattaaagtgatccttgtgaatttgtgaaatattgtcataaagtgcttttcttactgtaatctttgtggtatcaactgtcataatgccctttttacacagacatttatgtgcagacacataaacatgcttttaaaa

SEQ ID NO: 7534 - DNA, 755 bp, Cricetulus griseus
gtctgtgccagggcggcgcgtggtccacgccgagcggccgacgagtcccgtctgcgccgtcagaatgactgagtgggagacagccacacctgcggtggcagagaccccagacatcaagctctttgggaaatggagcaccgacgatgtacagatcaatgatatttctctgcaggattacattgctgtgaaggagaagtatgccaagtacctgccccacagtgcggggcggtatgccgccaagcgcttccgcaaagcccagtgccccatcgtggagcgcctcaccaactccatgatgatgcacggccgcaacaacggcaagaagctcatgacggtgcggatcgtcaagcatgcctttgagatcatccatctgctcactggcgagaaccctctgcaggttctggtcaatgccatcatcaacagtggcccccgggaagactcaacgcgcattgggcgagccggcacagtgaggaggcaggctgtggatgtgtccccactgcgccgagtgaatcaggccatctggctgctgtgcacaggagctcgtgaggctgctttccggaatatcaagaccattgctgagtgccttgcagatgagctcatcaatgctgccaagggttcctccaactcctacgccatcaagaagaaggatgaactggagcgtgtggccaagtctaaccgctgatttcccaaaagctgcctaataaactgtgtgccctttgggacagttccaaaaaaaaaaaaaaaaaaaaaaaaaaaaa

SEQ ID NO: 7535 - DNA, 754 bp, Cricetulus griseus
tgcccagcggcctcccggttctcacctgggttgacagggctggagccccgggatcgatcggaggcagaagccaccgggagcagcggcggcggcagcagcagcagcagcagcaggaaaagccggggctccgggcctgacgcagccatggctagaggcacgctcaggcggcacctgggcccgcagcggggctgactagcgcccggcttccgttcgttcccaggaccctggacagcggcgggtgctggaccgggcagcccggcagcgacggatcaatcgacagctcgaggctttagaaaatgacaatttccaggatgacccccacgcaggcctcccccagctgggcaagaggctaccgcagtttgatgatgatgcagacacaggaaaaaaaagaagaaaactcgaggtgaccatttcaaacttcgcttccggaaaaacttccaggctttgctagaggagcagaacctgagtgcatccgagggccccaactacttgacagcctgtgctgggcccccatcccgaccccagcgtcccttctgtgctgtgtgtggctttccatccccatatacctgtgtaagctgcggtgccaggtactgcacagtgcgctgcctgggcacccaccaggagaccaggtgtctgaagtggactgtgtaaacctggcatcagagagaggaagtccctgcaaccattaattaccccagaccatccccaaaggacagagagaggagctgtccactcacccagcaaagttgtcccc

SEQ ID NO: 7536 - DNA, 754 bp, Cricetulus griseus
cagagctgcactgtgatgagaagaccatcatcataggccacagctccggggccattgcggctatgaggtatgcagagacacatcaggtttatggtcttgtattggtgtctgcatacacatcagacttgggagatgaaaacgagcgtgcaagtgggtactttagccgcccctggcagtgggagaagatcaaggccaactgccctcacattgtacagtttggctccactgatgaccccttccttccctggaaggaacaagcagaagtggcagataggctgaacgccaaattgtacaaattcgacaaccgtggtcactttcagaacacagagtttcatgaactgattagtgtggtgaagtctatgctaaaagtgccagaatagtcaggatgactcctgctttgtagcatgccagaatggggtagaataagctgcaggggacagataatctgcatagcctgccacctgtataccaacttcagtaagcctagcaggattaggtcatatgggagtgttgctttatagaaatgtgacaagtatgtttgtctttttttaagctggggaatatatatatgtatgtatatacaatccctaccatgaattatggtagctggcaacactataattgaaagattttgtcaaaagctaacaagacaaagaccaggtcatccatttgtgagctcagtcataaacatttttagattctctatgaaaattaaaattttttactttctttagtaaaaaaaaaaaaaaaaaaa

SEQ ID NO: 7537 - DNA, 754 bp, Cricetulus griseus
ctgacagtcatcagtatgatcgaatttactgtggagctggagtccagaaagaatcacgaaaactaacatgaagatcttgctcaaagttgggggaagtactggtcatgcctatagaggatcagttaacacagattatgcggactggacaaaacacttgggaaagcaaaaatatccttgctgtttcctttgctccactagtacagcctagtaagaatgataatggcacaccggattctgtggggctccccccatgtgctgtcaggaatcttcaagacttggcccgtatttatattcgacgcacacttagaaacttcatcaatgatgagatgcaagccaagggaattccgcaaagggctccacctaagaggaaaagaaagagagttaagcagagaatttaattatatagtattagatttgaaaagacattcattgtcccatttgcttctgagtgcagatagtgagtaagccgtggtaggtgaccctcacctattaggaaccttcagtagcagggaagatgatgtggccagctgagacacttcttgggacttttaattatgtggatatttgtctttgaaaatgtaggccacactcacctcatctattttgaacctttctagtagaaactgtcatggaagctgtatgtagatgcctttgtgttaaaatttggttcagcatcatcgtgggatctctgggacccacaccaagctcatttcctcatgctaggcaagcactctacacagtagattgtcttgat

SEQ ID NO: 7538 - DNA, 753 bp, Cricetulus griseus
ccggcccaagaagaagaccaacctcgtgtgggacgaggtgagtggccagtggcggcgccgctggggctacaagcgcgcccgggacgacaccaaggaatggctcatcgaggtgcctgggggcgccgaccccatggaagaccagttcgccaagcggcttcaggccaagagggaacgcgtggccaagaacgagctgaaccggctgcggaacctggcccgagcgcacaaggtacagatgcccagctcagccggcctgcaccctacgggacaccagagtaaggaggagctgggccgcgccatgcacgtagccaaggtctccaccgcttcggtggggcgcttccaggagagcctgcccaaggagaaggcgccccggggcaccggcaagaagaggaaattccagcccctctttggggactttgcagctgagaaaagaaccagttggacctacttcgagtcatgaacagtaagaagcctcagctggacgtgacgagggccacgaacaagcagatgagggaggaggaccaagaagaagctgccaagaggaggaaaatgggccagaagggcaggaggaaggggggccggcaaggacctgggagcaagagaaaaggcggaccgccgggccagggagagaagaggaaaggcggctttggaggccagaagcattccaggccttctggtttaagtgggaagaagaaaggagtgtcacaccaaggtgggaagaggaggaagtagttttcttcccactggacctgttct

SEQ ID NO: 7539 - DNA, 753 bp, Cricetulus griseus
gcatccctctctacttgccaacatcctgtgttagaagagcttgtggccagaggtgtgaccgtgggagagctggccggggagggaccttgcccagtcactgctctgctcctgtctcttgtcccctcccctggccatgacagagacccgtgagcccgctgagaccggaggctatggcagcttggaggaagatgaaaacctttccccagagcccgactctgaggaggaagaggaagaagaggaggaagaggagaccactgacgaccccgaatatgaccctggctataaggtgaaacagcgcataggtgggggcaggggaggcccatctcgccgggcccccgagcggctcagcctgctggcccacctgcacagccctgccagctctgtggccgatcaccgctggtggacgctgcaccaggtaccccaccttgccgactctgctgccctgcgacagcaacccaagaagccccagcccctgaaggcagggctcttggcgaggaagaggaggagccatctggcactggggagatccggccagcaaggcgggatggagatgaagatgaggaggaggggggtacctaccactgtacggagtgtgaggactcctttgacaaccttggggagctgcatggccacttcatgctgcatgcccggggtgaggtgtaggcggggccactagggagctggtggaggggtgggttgggagcaagggctgaggaagctggagtgtgggccgggggtcccacccatgtgtgt

SEQ ID NO: 7540 - DNA, 753 bp, Cricetulus griseus
agtgcaagcatgaattctgtacttcttgtatcaccaaagccatgtcattgaagcctgtgtgtcctgtgtgtcagacttcctatggtatccagagagggaaccagccagatggaggaaccatgacttctgacacttttaagacggtcacttcctggttatggagactgtggcacaattgtgattcactatgaaataaaaaatggcatccaaacaaatgagcacccaaacccaggaaaagccctatcctggaacacatagatctgcatacttgcctgataataaggaaggaagagaggttttgggtctgctccaagaagcctttcgaaagaagctgattttcacaataggaaattctcgagcaacaggagcctcagatgtcattacatggaatgatatccatcacaaaacatccatgtttggaggaccagaaaattttggctaccctgatcctgattacctgaaacgtgtcaaggaagagctgaaagcaaaaggaattgagtaaggagagtgccgggaagatgtctatccactttcaaaatttgctttattatttgagacaggatctcactgcagcctggtagtggtggcacacacctttaaccctgcacttgggaggcaggggcaggtggatctctgagtttatggccagcctggtctacagagtgagttctacgacagctagggctatacaaagaaaccctgtctaagaaaacaaaacaaaacttgaacttctggccctcctgcctcacctcc

SEQ ID NO: 7541 - DNA, 753 bp, Cricetulus griseus
ggtgacagatggctgctcttgcccacaaagctttctccccagagcactatacccatctcatccccgaggggctgcatctgacctttgtcaactacctggcttgtaaccttcccaggaggtaccacagcaggaggggcaggtacagaccccactggaaatgcccatgtgggtctccctcacctgggatgtcttccaaagcatgtcacccaggccacaatgtcggcccaaaggctcttgtttgcacagcacccttggagatagggcataaattactgaaactgccctttttttttctctctctctctctctctctctctctctctctctctctctctctctctctctctctctctctctctctctctctctctctctctctctctctctctctctctctctctctctctctctctctctctctctctctctctctctctctctctctctctttcttttcgttttttcgagacagggtttctctgcgtagctttggagcctatcctggccctcactctagagaccaggctgaccttgaactcacagagatccgcctgcctctgcctccagagtgctgggattaaaggcgtggccaccaacgccccactctgtggctgccctttcccatggtcactgtctggtctggagttctattttgatgccatgaaaacacttcgtttatatataatgtttatatattttaaagattcgtgccaagagagtatatttaataaaaatttaaataacaaaaaaaaa

SEQ ID NO: 7542 - DNA, 753 bp, Cricetulus griseus
gacaacagcagcttcttctcaaccaaggtctcactgcttatgtagggactttgatccaggtgagctgtgtgtctgtgcagcaatccagtggctgcaggacaacagcgcatcatacttcctcaacagaaagctgtcggatgagccatccacacaagcaaagccagtcaagaacacattcctccgaatgtggatctacagccaccacatataccagcaggacctaaggaaaaagattttggaagtgggaaaaaggttagatgtgactggattttgcatgacaggaaagcctggtataatctgtgttgagggcttcaaggatcactgtgaggaattctggcacacaattagataccccaactggaagcacatctcctgcaagcacgccgagagcgtggagacagaggggaacggtgaagacctgcgtctcttccagtcttttgaagaattactccttgaggcccatggtgactatgggttgaggaatgattatcacatgaacctgggccagttcctagagtttctcagaaaacacaaaagtgagcatgtctttcagatactatttggtattgaaagcaaaagttcagagtcctaggactctagtaaatgcctgtgcttgtaactgtcccaagtatttatgttaataagacctgaagcaaacaggcctttttaacttttatcagtgtaactgtggtgttgtttctaggtggccatgtaaagtcacacttgaatactatttcattataaattaataaa

SEQ ID NO: 7543 - DNA, 752 bp, Cricetulus griseus
agtaatggctcaatcagaagtgacttctgttgactgcatgacacctgatagagctgcagacattggacatcaaagcgatgactcatctgatagcttatttaaaacacagtacgttctttcacctacacgaaagcaaagaaaccctacgacaaaacgtgtcactttacctgcaaatgttgacactgacacatcaagtgactcctctatagaaccaaggcttttgactttaaaggctatttttgaaagatttaagaaaaagaaacggaaaaaaggaaaaaaaggaaatacaagccaaaattaagaccaagaggaagaccacctggaataaaaaatgctagaaaccctagaaggtcacagataggtgtgaagcaaattaaaaacaaaggagctgtgtttccattcttagaatctgaaaatggaagaaaacccttaccttggaagaaaattttaacatatgagcaagctgttgcaagaggatttttccaccacattgaaaaactcaaatatgagcaccatcttaaggaatgcttgaagcaaatgcacgctggggaagatttagaaaaggaagactttgagagcaggagacacaagtacattgatgatgaaggtggtcctctttctcctattgaagagccactaacagaagatgaggcaacaaatcctgagtctgaatgtgatatcaaattggttgaagacacttgcttcataataagctcagaaataaaactactatagaacccaaaaaaaaaaaa

SEQ ID NO: 7544 - DNA, 752 bp, Cricetulus griseus
gaggctgcgggcgccgcgacgtggccatgtcggcgtcgttggtccgcgccacggtgcgcgccgtgagcaagaggaagctgcagcccacgcgggcggcgctcacgctgaccccctcagctgtgaacaagataaaacagcttctcaaagacaagccagagcacgtgggtctgaaagttggtgtgcgaaccaggggctgtaatggcctctcttacaccctggagtatacaaagacaaaaggagattctgatgaagaagttattcaagatggagtcagagtgttcatcgaaaagaaagcacagttaacacttttaggaacagaaatggactatgtggaagacaaactatccagtgagtttgttttcaataaccccaacatcaaaggaacttgtggctgtggtgaaagcttcaacatttgaaacctcaggaggactccaagctccaggagagccgggatctacctgggagcttactgaagaaatcatgtgattgtcacgtgctcagagtttataatgtgtggccatctcaagggggaaaataaagtgatgcattttggaaatcaagccagtatgctaagagtcccaatcttgtttaaacccttttgtgtgaattgccatcttgttttgttttagaactttgaaacagtagttgtagttttatatgattgttgataagtctgtatcataagtagacttgttgatacacctttaatttgtgcaatattgtatgtagcgattgagtatcaattaaaaaca

SEQ ID NO: 7545 - DNA, 751 bp, Cricetulus griseus
gacaaccctgacctgtggttcctgcatgatcagagcagctcagctttcaagttctaccgtgagaaggtgctggaactgtgcccatccatctccttccagtctactggtgaggcgggggactcagagcagagtcccacagcccacaaggagggtgagggtgagccagaggaggggcgtccccagcaggaggctacactggagggccctgaggtgctgcctgaggaggaggaagatgatgtggaagtcgaggaggatgagggcagagaggagacctgcaccctcaggccacaggcaggagctgccaaatgtccaggctccgagggcagctcccccactgacagcatccctggagaagggtccagggaggaccaggctggcacccctggcctgtcacaggcctcctccggcagctgcttccccaggaagagaatcagcagcaagtcgctgaaagtcggcatgatccctgcccccaagagggtgtgtctcatccaggagtcaaaggtccatgaaccagttcgaatcgcttacgacaggccagaacctaggcttccagatgttgcagaagatgggctggaaggaaggccacggcctgggctccctcgggaagggcatccgcgagcctgtcagcgtggggacactctcagaaggagagggcctgggggctgatgggccagagcagaaagaagacacgtttgacgtcttccgccagcgcatgatgcagatgtacagacacaagcgggccagcaaatag

SEQ ID NO: 7546 - DNA, 751 bp, Cricetulus griseus
ctactttggcctcacaaacaattgcaggctaccagacacttggagaggagtatgttgggatcatccaagtggacccatcccagcagccatgtgccctccaggctccgccgtggagtgctggttgcactccatgctgtcttgccctacctgctagataaagcactgctgcccctagagcaggaactgcaagccgatggtgacggtacacgggcttcacaggggaatctactacctggaggacgtatctccgaactcgccgcttgcctggagaggacctgagagctcgtacaagctaccgactgctgggactcatctccctgttacatctggcactgtccatgggactgcagttgtatagcttcaggcagaagcagcgagccaggaaggagtggaggctgcaccgcaacctgtcccaccgcaggagttccctggaagacagagctgtttgcagagccccactatgcaccctatgcttggaggaacgaagacactccacggctactccttgtggccaccttttctgctgggaatgcattactgagtggtgcaacactaagacagaatgtcccctacccaagaagaacgtgcccaccccagaaactaccgctgaccagagacagatcatcaccaaacagctccaagaagtggatggaagttcacagagtttatcctcataactgtggttgtacagaaatataaaatcctcacactgttggaaactttagtttgggggtggggaggctgaatctgt

SEQ ID NO: 7547 - DNA, 750 bp, Cricetulus griseus
ctccatcagttcagctttcccccaaagcatggtttggtaccagtcttctcatttccttctagagcctgagaccaatgcttaagtttgggggacacagtcaccatccccctggtactgatgcttgctggattttcgggaaggcattttgctacccagtctcttttcactgcctggggatcagtcttttgttttcattgtttgatgttcccatggacaaaacagctcattaacggggtcttgcaaggggctctgtatgtacccagggtactggcccaaccccccaattctagccatagacaaactccaggccagacccctccaccctggttcagcctgggcagcttgggctgagccaccaggaccaatagatttaagctggcatttcagtccaagaaggcttctaagtggatttaggacctgagaggaagaggggcctctgtgggtgctgggtactccagaggtgcccctggcccccgcctcggctggtgtagaatagccaatagtgtagtgtggtgtgcttttatgtgatggcgagtgggcaacgggcggtgggctgtgccgtctgtccttgaatctcaatctgcctgcgcggcccgtgctgtgtttcgtgctgtgtccacaacgctgcgacgacccctccctgtactgactcctctataaaagcttctcttcgcatagtcacgtagctcctgcctatcccccttctgatatctcttgcaagttttatactctaatatttatatggctttt

SEQ ID NO: 7548 - DNA, 750 bp, Cricetulus griseus
gtgatgtgtgctaagattgaaaagcacctaagctgtgagacttcttttctggtcacagttttttcttttggtctcatgtgtgacaccttgaacgccccggtttccccatcagtgaaatgagggatttgttctcagtgagttgtatctggcccagcacttcttacctgtctcacctctaagtcagcctttcactagacctttggtccctcttttgagactttattctgcactctagttgtcttcaccagtgccacacagggagatgctctgccctggagaatgacagcactggggaggcaaagatgggcagatccctgctctggacagcgtgaacgaatcggtgtgcagctttatcaggtggcataaggataatatggtaatgctgccttttctctctctcaggctgtttccatggaaacctccagagccaaacaaaagctaccaatcatttaaccaaaaagcctgccttggctcagatgtgtatttctttaaggaaagctgttttcatacatttggctatagaacaagggctcttgaacatatcctaaattatagaacacgttttcccctctttatactgttctctggacatattaaaattaagaattaagaatctcttctgtggggtcagtctcctgattgtccctcagatctgcagtccctcacctgataaagcaaggttgggtcacttcttacaatgaagtttgttgccttaatactagttttacaccacatgttcctagaagggac

SEQ ID NO: 7549 - DNA, 750 bp, Cricetulus griseus
gccggtgcaggacgcgtccgggagaagggtgacgttcggcgcgctgtttcgggagcggcgggccgtggtggtgttcgtgaggcatttcttgtgttacgtctgtaaagaatacgtggaggatctgggcaaaatccccaagagcgtcctccgagaagcagatgtcaccctcatagtgattggacagtcatcataccatcatattgagcctttctgcaaactgactggatattctcatgaaatctatgttgatcctgagagagaaatttataaaagattgggaatgaaaagaggggaagaaatttcctcctcaggacagagcccccacataaagtccaacctgctttcgggaagccttcagagcctgtggtgggcagtcactggcccgctttttgatttccaaggagacccagctcagcaaggtggaacccttattctaggtccaggtaacagcatccactttgtgcaccgagacaggaataggttggatcacaaacccataaactctgttttacagcttgtgggagttcagcctgtgaacttcatgagcagacctacagttatccatgtgtgacttcacatgggatcttccacttgtgaatgggcccttgaaatgtgaaccaaaatgccaggcatcatgacttcaagaggttatgaaaacacaaaagctcattcgcctatagagctatatgctgaaaggtatcagttgccagaaatgggataggcattttaaattttatggcctctataatt

SEQ ID NO: 7550 - DNA, 750 bp, Cricetulus griseus
aggcacactggaccagatggtggaccaggtgacccgcagcgttgtgttcctacagaggcggtatccaagcaacgggggcatctacctctgcggacactccgccgggagctcacctggctgccatggtgctccttgccggttggaccaagcatggtgtcacgcccaaccttcaaggctttctcctggtgagtgggatctacgacctggagccccctcatatataccctcccagaatgcccctctgcacatgaccctggaagacgctcagagaaacagcccacagcactgcttggaggtggctccagcgaagcctgtgggtccagcctgtcctgtgttggttgttgtgggtcagcatgactccccagaattccaccgacagtccagggagttctatgagatgctacaccgagtaggatggaaggcctctttccaggagctgcctggcgtggatcactttgacatcatagagaatctaacccaagaggatgatgttctcacccagaccattttgaaaacaatcttccctgatgctctaaggacacctggtctccagcctgtgtgcacctcagaaaacctccagaagatgagacttccacctaacactggcctgtctgtctgtccatgaggtgcactctccctgttgtggacacaccctgcctgtcattctctccccaacgggatgggagctccaggggaaccctacagattggcacgtgggacatgcacatagctaccagctggctgagtctg

SEQ ID NO: 7551 - DNA, 749 bp, Cricetulus griseus
ggaaaactggtagagatgactgatgtttattggcatagtaatgtaattgcagagcggattagacacaatgaacttaggacattatcgggcaacatttatatattaaaaggattgatagaccagatttccatgaaagaagcagggtatccctgttatctcataagaaaatttatgtttggattcccccgaaattggaaggaacacattgatcattttctagaacaattaagggctggagaaaagaacaggaatgagaccagtcagaaaactgcaagacttcatgaaaaacaaaaatcaatgaataatgatgcaaaagataaacagacagatgtcctccagaaggccaacatcacttatgaccttactaatgataacttactattaagatcactgctagagtgggaactcttaaaggaaacgacaagtgagggattgtctggagcagttgccaaaagataaccatgatgattttttcactgcaacacccttgcagaaacaaagaatactgttgccgagctttcaatacagtcaagatgatgattttctgctagatatggaaaggaatccagtatctccattatcaattactttgccattgacagacactccacagtgtcagcatgtcagtcctggtatgctagcctctgtaaaaagtgatgattatgataaatatgttttccatatgcaaaaaatgctaaaaaatttggcaggcgtaaaggaggccttgcctggggcaacattaggaaaaa

SEQ ID NO: 7552 - DNA, 749 bp, Cricetulus griseus
cactttgccttttggaccagcaccaacaggaatttatccttccatccctctgactggaccatcaccaggttccccaccaccctttcttccttctgaactgtcatgtccccaaccccagtggtccttatccagcccctgtcgtaagaggccctggtcccatagggccgtatgctacaccaaatatgcaccttccagagctacctaggcaatatggtgcacccacagatccagctgcagctgctacttcaggtacacggggatccatgtcttctggaccttgggcaccaggaattggggggcagcatcctaatgtgccatatcggtccccggggccacatcccactgttcctcctccagtgtcaggagcaccacctgttccatggggcactgtgccaccaggaccctggggaccaccagcaccatatcctgaccctgaaggatcatattccatgccaggacctcatcctactctgaataatccttaccaagtaacatcaggaccttctggtaccccaccaatacctggtgacccccgtgaagtgaatgaagtcccaggggggtcccgtcctgatacatccaaccaggagagcaccccagagaccactggacaaatgaagcaactgaaggtagatgacaaacccatcaagaggagacggtaccaaaaagaagagtaagccggtaacttggggagacatcaagacattaactcatgaagctgagaccttggggaaacagcaaggacacaatac

SEQ ID NO: 7553 - DNA, 749 bp, Cricetulus griseus
agaacccataatattaactgcactaactaggtgcctccatttggtttaattatgtttgctaatgaatttgtgggcttttcataatatgataagcaactacttaaaacttgtatttatattgggaaagtcagtaatcaccatttctcaagacagaaatagaacaagctttggttacgtatttttattctgtgtatgtctgaaaaaagcagtcactttcagcttccatataccatctatcaaatagaaataatacttaacagaattactgtgaagattatgttggataatgcataagaacccatatctaaagtaatgccagcatgtgatatttgtaactgatatttattacgatatcatttgtgacgccaaccttatgctttatgaatttgtgagaattgtgataaattacgcatgcaggaaagtaaccaaggaaagatgtctttttagaggggaaaatgtggggttttgccttcgaatccttaaggtgtgatagaaaaaaagaagtaaaaataaactctttgatcctcaaattaatttgcattaaaatagatattaaagtagctttgactgagtgccttctatctgcatgagccttcatacagcagcgtcatgtattcatggtcattttgaagaactagtcgagattaaccagacctctataactgatatttttgacatcaacttttgagtggcacatgcccaggaaaaaactcagaatgaacaaattaataaataaagcaacttctaaa

SEQ ID NO: 7554 - DNA, 749 bp, Cricetulus griseus
tagcggcggctgcagcaaagcgtttggcgcgatgtctcacaccattttgctggtacagcctaccaagaggccagaaggcaggacttacgctgactatgagtctgtgaatgagtgcatggaaggtgtttgtaaaatgtatgaagaacacctgaagagaatgaatcccaacagcccctctatcacatacgatatcagtcaattgtttgattttattgacgatctggcagatctcagctgtcttgtgtaccgagctgatacacagacgtaccagccttataacaaagattggatcaaagagaagatctatgtgctccttcgtcgacaggcccaacaggctgggaagtaattgagttggaagctttaggggctggggatgggcttgaaacaggtgcatacagcgtgctgtagtgaacattttgtatgatagtaatcctgtttccattttgttactagagccaagattgaatgtatgacatgaaacatgaatgatcttttcattctgaaaccaccattgccctttgctccttttctttctttttttacttaaacatttttatgataattcagagaggaagcgttttttgccatttaaggttggttccagtccttgaaactgttcgtatctgctctttagcagtgagtgcactaaccctttatggggggtgggggtggtgacaaggttacttatgtcctctgggaaagtcttagtgaaaaaataaaagaaaatgttctgtagttgtattctctca

SEQ ID NO: 7555 - DNA, 749 bp, Cricetulus griseus
cctgactgcagtattggtgaaggtggacttgagccccgggctgttcttttccatcaccatggcatctgtctggttcattaattccttctgtgcagtgcttcaaggcagcctctttgggcagctgggtaccatgccttctacctacagcaccctcttcctcagtggccagggcctggctgggatcttcgctgcccttgctatgctcatgtccatggccagtggtgtagatgcccagacctctgccctcgggtacttcatcacaccctgtgtaggcatcctcctctccatcgtgtgttaccttagcctgccccatctggagtttgctcaatactacctggccaagaagctcgtcccacggccccacgctcaggagctagagaccaaagctgagctcctccaagctgatgaagaagaatgctgccctcgctggtgtgcctgcgtttcctgtttgtgccctccttcatgctctgtcaccgtgcccaagcgagtccggcctgccccaccatcttctggcaggacgcctacttcatcacatttatgctgctcttcgccatttccaacggctacttggtgtctctcaccatgtgtctggcacccaggcaggtgctaccacatgagagggaggtggctggagccctcatgaccttcttcctggccctgggactctcctgcggagcctctctttccttcctctttaaggcattgctctgaggcccattaatgctccccacaaccctcttcatcagtgc

SEQ ID NO: 7556 - DNA, 749 bp, Cricetulus griseus
tacagagtaaaataggcaggcttcctagataacttccgatggccagagtgtgaatgtattgactggagtgagagaaggaatgccgtggcctccgtggttgcaggcattattgttttttacaggttggtggataatgatcgatgctgctgtggtctatcctaagcctgagcagttgaatcacgcttttcacacatgtggtgtgttttctacactggctttcttcatgataaatgctgtatccaatgcgcaagtgagaggtgacagctatgaaagcggctgtttaggaagaacaggtgctcgagtctggctcttcattggtttcatgctgatgttcgggtcacttattgcctccatgtggattctttttggtgcatatgttactcaaaatacctgatgctgattgtcagggttttagtcccgaaactctaagattggtatgtgtcctgagctgaggctctattgtcctggtgtttaggggtaaatactctgcctcagtatctgatgtttgaaaatgtgcaaaatattcagctctgtgactctaggagcagccctgagctcttagagaagtgatgtctgccagttgtaatttattttgattggaaatgatactttttaaaaggaaaaatgtttgtgcttacatgtgcattagagaactggactttttatataaagagttttaaatgacccaaaggactagtttgaaacgccccctttagaaaagtaatttctctaacatgacttttatttga

SEQ ID NO: 7557 - DNA, 748 bp, Cricetulus griseus
cagggtgccagggcaggatgtacacgctgctttcggggctgtacaagtacatgttccagaaggatgaatactgcatcctgatcctaggcctggacaatgccgggaagacaaccttcttggaacaatcaaaaacacggtttaacaagaactacaaagggatgagtctatccaaaatcaccactaccgtgggcctaaacattggcactgtggacgtggggaaggctcgtctcatgttctgggacttaggtggacaagaagaactacagtctttgtgggacaagtactatgcagagtgtcatggcgtcatctatgtcattgactccactgatgaggagagactgtcagagtccaaagaggcatttgagaaggtggtttcgagtgaagcactggacggtgtccccatcctggtgttggccaacaagcaggatgtggagacctgcctctccattcctgacatcaagactgcattcagtgactgtacctgcaagattggccgtcgagactgtctgacccaggcctgctctgctctcacaggcaaaggagtccgagagggcatcgaatggatggtgaagtgtgtcgtgcggaatgttcaccggccaccccggcagagggacatcacataagcaccaactttgcagtcttggaactgttcatcccctggtgttggaattccgagtgctccctgctggctctgtgccactgatgctggggctaagctggttgtttgttaattcttttatttgcttta

SEQ ID NO: 7558 - DNA, 748 bp, Cricetulus griseus
ttttcccatggttaaaaagtgagctttagttttaagttaaacattcaaaggtccattgatagggcttgtgacagagaacaagaaactgttgacgccttttgttgctggttgtggtagaagagacagcctcatcaagctatagaaccaatttccaaactaaatcactgttttagaaaagcataagctacctttcccatgggctgcaggaatcattttgaaaggcagcaaatattaggaagagatcagatgcagaacttagtgcctttgagaagactataattaagtcaaattaagaggggtttttaaaaaaggcaatttagaagaatattcttgtaaaattttattgtttctatataagaaacaacagattacacaaattccttactccaaagtattttttttattttattattatttaaatttgttagctttaggtttcaatgagtcataattggtaagagacaactttagctactaagacatgataaagataatctagtgaaaagttccttcatactatgacttcagatttgtctatcgtggagacagtgctgtttccgagatcctgtaaagagtttgaatctctttctgcactacatacttttgatagaaacatatttctgtgttgacagagattatgttggacctgtgaagatggcattcagatatattacttagagtccagctcatttgcagggctattcttcccatggcttaacctaagagaacttactaatgtcaatgggaa

SEQ ID NO: 7559 - DNA, 748 bp, Cricetulus griseus
  modified_base (531)..(531): a, c, t, g, unknown or other
gatttattggctccccatgcaggatccgaggaactgggcagaaaaactccaggcgcaagcgagatctggtgctctccaaactggtccacaatgtgcataaccacatcaccaatgacaagagattcaacggctctgaaagcattaagtcctcttggaatatttccgtagtgaaattccttttggaaaagctcaagcaggaactgatgaccagtccccacaattacactgataaggaactgaaaggagcctgtgtggcctacttccttaccaagaggcgagagtaccgcaactctctcaaccctttcaaaggcctaaaggaaaagaggagaagaaacttcgaagtcgccgatacaggctttttgccaaccgatccagtatcatgaggcatttcggacccgaggaccaacagctgtggaagaatgtgacagaagaactgatgtccgatgaggaggacagtcttaatgagccaggtgtgtgggtggcccgctctccccgattccgggctcagcgcctcacagagctctgctaccncctggatgctaactcgaagcacggcaccaaagccaaccgtgtatacgggcctccctcagacagactgccttctgtgaagtttcagtcatgggctttctcttctgagcaggggaatatgggcttactgctatttggatatgggtctagatttgctagttattgtttggatttttaaaatgatagttattgtttgctggattatatgagaaaattttat

SEQ ID NO: 7560 - DNA, 748 bp, Cricetulus griseus
ggaactcagctctctcatagtaaaaaggtacccacgaagctcttcctgttttccggacttcctgtactacctcactgctaatgggcaacgcttccacaaggcctgtgacctggtgcatgacttcacagatgctgtcatcagggagagacgccgcatcctctctagccaaagtgttgatgagttcctgaaatccaaggctaagtccaagactttggacttcattgatgtgctcctgttagccaaggatgaacatggaaaggagctgtcagatgaagacatccgggcagaggctgacaccttcatgtttggaggccatgacaccactgccagtgggctctcctgggtcctgtacaacctggcgaggcacccagaataccaggagcgctgccggcaggaggttcgggagctgctgagggaccgagagcctcaggagattgagtgggacgacctggcccagctgcccttcctcaccatgtgcatcaaggagagtctgcggctgcaccctccggtcatagaccttcttcgccgctgcacccaggacattgtgctgcctgatggcagggtcatccccaaagggaacatctgtatcatcagcgtctttggtatccatcacaatccttcagtctggccagaccctgaggtctacgaccccttccgatttgacccagaaaaccctcagaagaggtcacctctggcttttattcccttctctgcagggcccaggaactgtataggacagactttcgcc

SEQ ID NO: 7561 - DNA, 748 bp, Cricetulus griseus
ggcggcaagaagcgggactcgctggggacgccgggtgcggcgcacctcattatcaaggatcttggagagattcattcaaggcttctggatcacagaccagttacccaaggggaaattcgttactttgtaaaagaatttgaagaaaaacgtggccttcgagaattgcgagttcttgagaacttgaagaatatgatccaggagacaaatgaccgcatgcttcccaaatgcagggagacgatgcaggatggcctggaggaggccctgcagagattgcaagcagctaacgactccatctgcagactccaacagagagaacaagaacggaaaaaggtgattaatgaccacttgacagctagtgagaagaggcgtctgctccagtgggaggagttcctgaaagaacagccacaacaccgagccgaagtggatgacgagcacagaagagccatggaaaggctcaaagagcaatatgctgcaatggagaaggacctagcaaagttttccaccttttaagaatttgatctacagggacagatgaatgagaaagcactggctttccaccaaatcttcccaccaaccatgtagccttttcttcaagctgagaaatatactcagtggcactctaaggtctgaagagagaaacttctggagccagataaatgtccggtgaaaagagagtgcttacgtgtctaaatgtgatcatttgaagaagagaagataatagaagagaaaaaaaaaaaaaaaaaaaaaa

SEQ ID NO: 7562 - DNA, 748 bp, Cricetulus griseus
  modified_base (195)..(195): a, c, t, g, unknown or other
tgatcacattgagagagtgtatagaagagctggcagcaaaaagctttggtcagttgtacgccgtgcagcaagtcttttaagtaaaagtagtggacagcctggccccatccaattaactaatgttttagtacaggggtaaacaggtaactttgggtagacctttaggacatgaagaggaggtcatctctaacccgntgtctccaagagtgattaagaacattatttattataagtgtaatacccacgatgaaagggaggcagtcattcagcaagagctggtcatccatatcggctggattcatctcaaatagccctgagttcagtcagcaaagctgggaataatggtacaattcagccttgcaagctagacaaagaagagaaatacctgactcagtatgtgaagagaagttatgaaaagatggtccagaggaagccacttacaaaacttaagccagaaaaacatagttagttgttaatcccatggagagagaataagttctgatggctgatgggtagggaagagaaattaaagaatggcagagaggaaaagcccttgaaatatttaatacttgttaaaattcagaaggaagtaaatacttgtatccttaagaattaaaatttttgattagctgagcaaagttgcaaaaaaacagctcttagttaaaatagacatcacttgcaagtctgtttctgaacaagcacttagtttcctgttacacatgctaagttttgactattttctgctgct

SEQ ID NO: 7563 - DNA, 747 bp, Cricetulus griseus
gcgtggctgttttccggcttcccgggtaaagatggcagagcgcggctatagcttttcgctgactacattcagcccatctggtaagcttgtccagattgaatatgctttggctgctgtagctggaggagccccttcagtaggaattaaagctgcaaatggtgtagttttagcaactgagaaaaagcagaaatccatcctgtacgatgaaaggagtgtacacaaagtggaaccgattaccaagcatatcggtttggtgtatagtggcatgggcccagattacagagtacttgtgcacagagctcggaaacttgcccagcaatactatcttgtctatcaagaacccattcccacagctcagctggtgcagagagtagcctctgtgatgcaagagtatacccaatcgggtggtgttcgtccatttggtgtttctttacttatttgtggatggaatgagggacggccatatttatttcagtcagatccatctggagcctactttgcctggaaggccacagcaatggggaagaactatgtgaatgggaaaactttccttgagaagagatataatgaagacctagaactggaagatgccattcatacagccatcttaacactaaaggaaagctttgaagggcaaatgacagaagataacatagaagttgggatctgcaacgaagctggctttaggagactcaccccaactgaagtgaaggattacttggctgccatagcgtaataaagatgtgc

SEQ ID NO: 7564 - DNA, 747 bp, Cricetulus griseus
atggctcacgttggctctcgcaagcgctcgaggagtcgcagtccgggtcccgggggtcggcgggggtcagaaaagcgaagtaagaagagtagcaaggacgcctcgaagaactgctcagcctccaagtccccaggtcacaaggcctgcagcacctctgaggagagaagcaagcacaaggcccggaggacagcgaggtccagctcttcctcctcctcttccagttcttccagctccgcatcgtcctcatcctccagtgatggccggaagaagcgggggaagaacaaggataagaagaggaagaagaagaagaaacggaagaagaagctgaagaggaaaggcaaggagaaagccgtggtgctgcacccggctgaggctctgcccggcccctcactggatcagtggcacaaatcagccggggaggacgatggcccagtcctgactgatgagcagaagtctcgtatccaggccatgaagcccatgacaaaggaggagtgggatgctcgacagagtgtcattcgcaaggtggtggacccagagacaggtcgtacaaggctcatcaagggagatggtgaggttttagaggaaatcgtaaccaaagaacgacacagggaaatcaacaagcaagccacccgaggggatggcctagccttccagatgcgagcaggcctgcttccctgagggccctggtttcccaggtctgtgaactactgttggtggcttgaagacagatgggtccaattgcctttc

SEQ ID NO: 7565 - DNA, 747 bp, Cricetulus griseus
agcgcgtgctgctgggagtcgtcgggaggccggcggcgcggggctgagggccctcgggctgagcagtcatgtcgcacaaacagatttactattcggacaaatacgacgacgaggagttcgagtaccggcatgtcatgttgcccaaggacatagccaagctggtccctaaaacgcatttgatgtctgaatctgaatggagaaatcttggcgttcagcagagtcagggatgggtccattatatgatccatgaaccagaacctcacatcttactcttccggcggccactacccaagaagccaaagaaatgaagctgttgacccacctttcagcctcaagctttacacagctgtccttcctacaccttctgatagcatgattatgttgctttcttatttctcactttgatatttaaaggatgtttgttcaaaacactgtttgaatgtgttggtacctgctttgcttcttgagctgagccaccaatgccacaacctgtcagatgagtgtgacctcaaagacctagtgtgctctttatccagcaggccatatttgccatctctgggaagcatgtgaaaatcagatcatggctgttacagggatagtgtgaatttgctgttgtagtttttactattgggtattgtatttatggtgacttaccgatttatgtttcaatatattggaaactttccattttatatgacaaatctcttctatgttacaagccttgattaaaggaagtttttataatct

SEQ ID NO: 7566 - DNA, 747 bp, Cricetulus griseus
tgtcacatgtcatgcatctgtaattgtagttcttaatatgtcaaatgtgtttgtgaaagacactaaacatgaagccccttatggagaaaacagttgaggggactcacaatcaggaaacatttactctccctaccaactgtggcatccatccagggcatcagggtgtggcaaacagtatatgtgggggcttcggtaaagtcctaggtctcagccatgtagttcatttttacatttaaaagatcaaagaaggagccaggcatggcagtgcatacctgtgtttctagcacctgaggggctaaagcatgaggattgccttcagttccaggccagacacacacacacacacacacacacacacggtagctcaacaacagtctgcacacacacacacacacacacacacacacacacacacacacacacacacacacaacaaccttctcatttctgtgttgcatgcagctgtgttcaaatgccaaatagcaatcagagctgagtgttctgatcaggtgcgttccttggtcactgtgtgacttgctttactctctccatgtgctagatgaacgaggaatgcacacctgtgttttccaaggtattttttaatgtgtttttaaaaacttttaaaatgagcctgatacctgtgtttcggaatttggagacatggccatgttgttgggttttttcatgtatatttactgatatatatattgtttgtaaccaagacatgtttaatttatgtgcaatctt

SEQ ID NO: 7567 - DNA, 746 bp, Cricetulus griseus
gcatcctggcatttcccatgtatctgctcaaccttttaggagtgtggaactggatatgcaaaatgtggtttccctacttcctgtcgcggttcacggtgatgtacaacgagcagatggcgagcaaaaagaaggagctctttagcaaccttcaggagtttgcgggcccctcggggaagctgtcactgctggaggtgggctgtggcaccggggccaacttcaagttctatcccccgggtgcagggtgacctgtgtcgaccccaacccaacttcgagaagttcttgtacaagagcgtctcagagaaccggcagctgcagttcgagcgcttcgtggtggcggccggcgagaacatgcaccaagtggccgatggctctgtggacgtggtggtctgcaccctggtgctgtgttcagtgaagaaccaggagaagattctgcgcgaggtgtgtcgagttctgaggccgggaggggctttttactttatggagcatgtggcggatgagcggtccacctggaactacttctggcaacaggttctggatcctgcctggtaccttctgtttgatggatgcaatctaacgagagagagctggaagaccttggaacaggctggcttctcaaagctgaagcttcagcatatccaggctccactgtcctggactttggtgccggcccccacatctatggatacgctgtgaaatagtgggaggtgatattaatttaaaaaaaataaaaaaaaaaaaaaaaaaaa

SEQ ID NO: 7568 - DNA, 746 bp, Cricetulus griseus
cggctgccgaagatggcggagggacaggttctagtgttggatggcagaggccatcttctgggccgcctggcggccattgtggcaaagcaagtgctactgggccggaaggtagtcgttgtgcgctgtgaaggcatcaacatttctggaaacttttacagaaacaagttaaagtacctggctttcctccgaaagcggatgaacaccaacccctctcgaggcccctaccacttccgagccccgagccgcattttttggcgcactgtacgaggcatgctgccccacaagactaagcgaggccaggctgccttggaacgcctcaaggtgttggatgggatccctcctccctatgacaagaaaaacggatggtggtccctgccgccctcaaggttgtgcggctgaagcctactagaaagtttgcctacctggggcgcctggctcatgaggtcgggtggaaataccaggcagtgacagccacgctggaggagaaacgcaaggaaaaggccaaggtccactatcggaagaagaagcagctcttgaggctacgcaaacaggcagaaaagaacgtggagaagaaaataagcaagttcacagaggtcctcaagaccaacggactcctggtgtgagcccaataaagactgtttgtgctaatgcctgcctggcctgctcttcctccaccgccgaccaggggagtggggacaaaggtgctttagtcactgctccagtaggaagagggtacttagaaagct

SEQ ID NO: 7569 - DNA, 746 bp, Cricetulus griseus
gtgagtgggccccggaggtcgcgtctttcccggatctccgtggtccccagcgctcgcccgcgcggtcctgccacggcctgcccgcctgccctcaccatggtctccagctgccactcctcagtgcgagctgagtggattgcagccgtgacatttgctgctggcacagctgctctcggttacctggcttacaaaaagttctacgttaaagaaaaccgaagccaaatctatggtgaaccttcagatccagaaagacaaccccaaggttgtccacgctttcgacatggaggacctgggagataaggctgtgtactgccgctgctggaggtccaaaaagtttccgttctgtgatggagctcacataaaacataacgaagagactggagacaacgtgggacctctgatcatcaagagaaaagaaacttaatggacattttcagtgctgcaccccagagtgttgtgatatcacctgattgtttaattagaataagaaagggtaaaccgacctcatgatatatgggttattttggtcttgtaaggatccgttcctttacaataatggtcttagaatatagtggtatcttgaggttaacgtattaaattattctcaaaatcatgtacatgaacattgtacttgtaagtttaaagaaaaaataaaccttctcatattacttagtcaacttggaaagtaatagagtgtgatgacattgcattgatttcttacagcataggagaaacctaccatgacc

SEQ ID NO: 7570 - DNA, 746 bp, Cricetulus griseus
  modified_base (6)..(6): a, c, t, g, unknown or other
tttttnttttctttctttctttttacttttttgaggtggcctcagggtaataacaaagcacaaatacttgagggctttactgaggcccagccagggttctgtgacgctaggtgggaagccaccttcaggttctccttctgcctcgtgcaaaatccactgagagggtgtattttggccccagattttcacccagcttgtgatatcccctcgatgttgctagcatggggacagattttagactgtgggtttctgggaagactacggcctctgtgatagcagttccacatttgccaactagctttctgagtagaggtttttagcgcagctttctgtttgcacagtctgctcagagggagggcaggcactcccttaaggtcccatctccgcagtttgggtgtgtgtggctctgcatgtatgtatttgtgtctgttgtaggtagagatagtcattccatacgtggatgtgaggtcatgtgacttcacctctgtccatactgtcgtttgtgatgtccttcaacacggacacttgtgctctccgatcggcactcttgtcttctttattacctcattctccagtgaactgcatctggccagttgattcggaatcaggcaagatccccaccctgtggtacacccagtgaaagccaagccacaagcccaagtgagttttaaattttaatcaccctttatttttacactcgagagtgattgtaataaaagctgtcagtaataaacttggttctacct

SEQ ID NO: 7571 - DNA, 745 bp, Cricetulus griseus
ggacctgtgtgtgtctccagtttgggtttccttagaagtcaccctaactccttctgatacaaatcgagggggcaagaaagccccccaaccaaaccaaaacacttttgccttctaaaggttatataccaagtgtgttcagatagataagccactttgtatttttttaagatggaagccttatctgatgctatttattgttgcgtgtggtagcttgaagcacaccactgtccatgtgtttgtttgataactattttggcagcacttacaaacgcagtgtctggtcacactttccagttttcattaattgtgtcaattaatgttaccatgggtgccaactgcatcctatttaagttcttcaaaagggtactctatttgtacattaaagaaaaaaacaaaaaaaaacctcaataataaataaaagataattctccaaaacttttcaatttgttgttcttaaaaaaaaaaaatgaatgcataaaaaaaaaagattttttttctatgtgagaactttagttgtctgttaacttcatgtttacaaataattgtttgctttgtaatgcaatacttaaaatataccagccaaaactataacttacagtaatttcttaggtgttctgaataaaattccatgtctttcgataccattcttagatttctgtggaacaacaacaacaacaacaacaacaaaaaaaattgtaagcattttgtgtaaatacagcttttgtttttatttcttatttttctg

SEQ ID NO: 7572 - DNA, 745 bp, Cricetulus griseus
gccaacagtttaccgagaaatatttgatatgtaccagaattattcatactataaacactggaaatttgagctgctgaattacacaccagcagattatggtggactacatcatgcagctgccagaatttctggagacagtgtctataagcatttgaagtatgaaggtggaatccatagagttcagcgaatcccagatgtgggcctgtcgtcaaggatgcagcgtattcacacaggaacaatgtcagttattgtccttcttcagccagatgaggttgatgtgaaagtcgaccccagggatctgcggatagacacatttcgatcccgaggcccaggagggcagcatgttaacacgacagacagtgcggtgaggctcgtccatacccccccaacaggactgggtggtagagtgccaaacaagaacgatcacagctgaaaaataaggaaatagctttgcgtgtgttgagagctagactctaccagcagatacttgagaaagacaagtgtcagcaacagagtgctagaaactgcaggtgggaacaagagcacaatcagagagaatccgaacatataattttacccaggatagagtgactgaccatagaatagcatttgaagttcgggacattaaggaattcttacgtggtgagaaatgcttggatcagctaattcagagactgcttcaatcagcagatgaagaggccattgctgaatttttggatgaaagccttaaatcagtgaaataaat

SEQ ID NO: 7573 - DNA, 745 bp, Cricetulus griseus
gggaggggaacccgttggtggaagcgtcatggcgcgcctactgcgagcactgcggggcctgcccttgctggaggtgcctgggcggccagttcggggttgtgcggggtcgggatgcggggactcagggtcccttacaaagtccaagctctgtctaagcaagactgactggcagaagaagctgactcctgagcagttccacgtcaccagagagaaaggaactgaagcgcctttcagtgggatgtacttgaacaacaaggagacaggcatgtaccattgtgtatgctgtgatagcccactcttcagttctgagaagaagtactgctctggcactggctggccatcattttccgaagctcatggcacagaaggctccgatgagagtcacgcagggatcctgagacgactggacaattccttaggacatactcgcatggaggtggtctgcaagcagtgtgaagctcacctcggccatgtgtttcctgatggaccagagcccactggccaaaggttttgtatcaacagcgtggccctgaagttcaaaccaagcaagcactgaccatcactaggaggcccttgctttgcccaccatcttgtagagccttggttctgtaattaagatggatgccttggttcattcactaaaaaatttagactaaggttgttttactggctgcacgtgagccacagcttcttagtcacctgaaaacaactcaaccccagctttctcttgggttgtgggatctca

SEQ ID NO: 7574 - DNA, 745 bp, Cricetulus griseus
ggaagaggagaaaggagggaagaaaaggaagatcgcggagaaagtcatcaggcctagaagtattcagagcattcagcagccatcgaagaaaggacgacgtcatcatggcctcagtgtccactcatggaaaccaagaaaaaagcccccacttgccaccactgagcaagcagagcctgttgttttgcccaaaatcaaaactgcacatccacagaggagagattgccaagattatccgagagtgtcaagaagaaagtttctggaagagagctctgcctttttctcttataagcatgcttgtcacccagggacttgtccatcaaggttatttagctgctaatccaagatttggatcattgcctaaagttgctctggctggtctcctgggatttggcctttgggaaggcttcctacatcagagtgtgccagagtaaattccattccttcgaggatcagctccgtggtgctggttttggtcccgagcacaacaggcactgcctgcttacatgtgaggagtgcaaaaccagacgcggattaagcgagcagaaagggccccagccatcccattcctaaactgtgtatgtgggtttacaatgatctctaaacctctgaatatgtgtacatttagactttcaaatgttctttaagataatctacttctgttgaaacagaaaccttgtaactcttgcgttcctttgaaatgcttgcagtggaaggctctgggtagacctgagcatggcacgttctt

SEQ ID NO: 7575 - DNA, 744 bp, Cricetulus griseus
gcgccaccgactatcctattgtcatcatgggtcgccgccctgcccggtgttaccgatattgtaagaacaagccgtacccaaagtctcgcttctgccgaggtgtccctgatgctaaaattcgcatctttgatttgggacggaagaaggcaaaggttgatgaattcccactttgtgggcacatggtgtcagatgaatatgagcagctctcttccgaagctctagaggcggcccgtatttgtgccaacaaatacatggtaaagagttgtggcaaggatggctttcatattcgagtgaggctccaccctttccatgtcatccgaatcaataagatgttgtcctgtgctggagctgacaggctccagacgggtatgcgtggtgcctttgggaagccccagggcacagtggccagggttcacattggccaggtcatcatgtccatccgcaccaagctgcagaataaagaacatgtgattgaggctcttcgtagagcaaagttcaagttccctggccgccagaagatccacatctcaaagaaatggggcttcaccaagtttaatgcagatgaatttgaagacatggttgctgagaaacggctcattcctgatggctgtggggtcaaatatatccccaatcgtggtcccctggacaagtggcgagccctgcactcctgagagcttccacagtgctctcctgtaccctaccaaatcatgttcagtaataaatctccatccagtctgcttaaaa

SEQ ID NO: 7576 - DNA, 744 bp, Cricetulus griseus
caaggaccaccatcctggccaactcctgagattgaatcagaaagcagtgctgtgtctcctgaactgaaaacaactgaggaaaatgtggctttgaaaatccctaacaataaacctcagggcaaaagagaaacatggatcagggcacaggagcaaattattagaaactggacatcttccatcactgggagccatggatgcccccttaaggtcacatggtgtcaggggtacaaaggctagaaaggcagtagttgtatctgaagctggccaaattcactttcaaacagaaaacaaaactgagtcactcctctgatggccacagccctgtgcctcccagttctcctaaaatagcagtgagcagttctaaaattccccaacaaagaacaagaagagaagcaactgtgcctgtgaaaggccggagaaagttgacatctacctcaggagatggatgctctgaccagctgcagggaaacacaaaggagctctcaaggcagctaccagagagaagtcaaccacaggaggagagggaccaggggcctgaaaggagggttattcagctcgaactggagcttgggaaccaggctgggcattctcatccagcttgcgagacagacaaaaaggaagggggttcctgcagtaataaaagcagcaaggttcattctggcacgttagcaagactggcaaccttctccttcgctttccccaccagaatccaaatcagaatccctccctcctgaaaggaaggac

SEQ ID NO: 7577 - DNA, 744 bp, Cricetulus griseus
ttccagaagaaattcaacagcagattgttcgagagactttccatctggtcctcaagcgagatgacaacatctgtaatttcttagaaggtggaagtctcattggtggtgctgactacaaactgatttaccggcactatgccaccttgtactttgtattttgtgtggattcctcagagagtgaacttgggatcttggacctcatccaggtttttgtggagactctggataagtgttttgaaaatgtatgtgaattggatttgatcttccatatggataaggtgcactacatccttcaggaggtggtgatgggtgggatggtgttggaaacaaacatgaatgaaattgtggctcaaattgaagctcaaaacaggctggagaagtcagaggggagcctctggagtcgcacctctggacactgagcctttcaaagagtgggaagggagtttgagtgcacactgcttgtccatcctgctgctctctgatacacatggctgtagtagacatcagtgcactaagccactgcttctttgcctcccacacacagctgcctcagggttggggactgtggaacaagccacctgcttctcagggccccgccaccgagactgaacacatctgacttcctccctagcacccagggcttctgagattctgtatcattcagtgggcaagagaccagggagaagggccagcctttcagatgccaggtgtgtcaagtggcaggtcagggctgcagagatagtg

SEQ ID NO: 7578 - DNA, 744 bp, Cricetulus griseus
ggtttgagctgctggtgcgacagtctgcgcgatgcccaaggccaaggggaagactcggaggcagaagttcggttacaacgtcaaccgaaagcgtctgaaccgcaatgctcgtcggaaggctgctccgcggatcgagtgctcccacatccgacatgcctgggaccacaccagatccgtgcggcagaacctggcggagatggggttggccgtggaccccaacaaggcggttcccctccgtaagaggaaggtaaaggccatggaggtagacatggaggagagacccaaggaccttgtgcggaagccctatgtgctgaatgacctggaggcagaagccagcctcccagagaagaaaggaaataccttgtctcgggacctcattgaatatgttcattacatggtggcaaaccatggggaggactataaggctatggcccgggatgagaagaattactatcaagatacaccaaagcagattcggaataagatcaatgtctataagcgcttttacccatcagagtggcaaaccttcatggattctttgcagaataagaagatggaggttgactgagtggtgggcacccccacacttaggtctactggactaaagaaaccaaagccaggttttggggcaagggctgtcctggaactagctcttgtagaccaggctggtctcgaactcacagagatccacctgcctctgcctcccaagtgctgggattaaaggcgtgcaccaccaacgcctgg

SEQ ID NO: 7579 - DNA, 744 bp, Cricetulus griseus
  modified_base (17)..(17): a, c, t, g, unknown or other
agcatttgccagctccngttcctggactgactgactacatttttttcttttcctattagccccgtgtcatttaccctcccacttttacttgccttccagtctacccctggtattgaatgggctttgtaattttaactgttgtattttgtgaatttgttgttactgtttttctgtgaagcacatacattggatgtgggaggtaaaggagcattccagttgctccaggtcactccttctatagccatcactgtcttgttttcttgtaactcaggttaggttttggtctctcttgctctgctgcagaaaaggaaagaaagaaaaaaaacaaaaatagagcctgaagagatgggacagatagattgagataaactagctgggttttgtaagagtttgttttttttttttcttccccttgaagggaacagcttttttcactggtacaaattaagttccccaactatggggctgtaccagttctggacaagtgccactgcatcacagagtgctcagaggatctgagctgtttaaccctgaagatgaaattcactgttggccactgccaggtctcattggtgttttaaggaatattgggtgcttcatataggaactgaaggggtaaacttattaaacccattcaacctgtgattggtgatgttttcctgtcattttaagagtctaaatatggggtgggagggcagatgtaaaaaacttgtacaattttaaaatatcacaattaaacgtgag

SEQ ID NO: 7580 - DNA, 744 bp, Cricetulus griseus
ccatggctcctaaaggcggctccaagcagcagtccgaggaggacctgcttcttcaggatttcagccgcaacctgtcggccaagtcgtcggcgctgttcttcgggaacgcgttcatcgtgtctgccatccccatctggttgtattggcgaatatggcatatggatcttattcagtctgctgttctctacagtgtgatgacattagtaagcacttacttggtagcctttgcatacaagaatgtaaagtttgtcctgaagcacaaagtagcacagaagagggaggatgctgtttccaaagaagtgactcgaaaactttctgaagctgataacagaaaaatgtctcggaaggagaaagaacatggcctctccaacttgagggagagaaacttgcagttgatttttttttttttttaggtaaaggcagccaaggtagtaacctaaaaatagtacccagcctatgagtgttggcctgtgaagctacagcacacactgttcagctgtatggctttggccctgggctgccagggaggtcagcttgaccctgccatattggtttgatgtgtgaagtcactagaatcattgttttctgtgaccaggctctcagcactataggcagaatattaagtgagaaagcacttctttcctggttattgacacatgagagaccagaagaatttttgtgaacttagtcctggaattcagtgaactctccaaggaatttacagtggtttaaaagggttgtcag

SEQ ID NO: 7581 - DNA, 744 bp, Cricetulus griseus
gggtgagaggcccagcagccatggcggtggaaggaggaatgaagtgtgtcaagtttctgctctacgttctcctgctggccttttgcgcctgtgcagtggcattgattgccattggtgtagcagttcaggttgttttgaatcagaccatcacccgtgagactacgcctggctccctgttgcctgtggtcatcattgcagtgggcgccttcctcttcctggtagcctttgtgggctgctgtggggcctgcaaggagaactactgtcttatgattacatttgccatcttcctgtctcttatcatgctagtggaggtggctgtagccattgccggctatgtgtttagagacaaggtgaagtcagagtttaataagaacttccggcagcagatgcaaaattaccttaaagacaacaagacggccttagttctggacggatggcagaaggaatttgagtgctgtggagctaacaactacacagattgggagaacatcactggtatgcctaaggaccgagtccctgattcctgctgcatcaacatcactgtgggctgtggaattgatttcaaggaaaacaagatccatactcagggctgcgtggagaatataggggtctggctgaggaagaatgtattgctggtggctgcagcagccctgggcattgcttttgtggagatcctgggaattatcttctcttgctgtctggtgaaaagtatccgaagtggctatgaagtaatgtaggggcggg

SEQ ID NO: 7582 - DNA, 743 bp, Cricetulus griseus
tgtgcgcatcccgtgatgattggcgctgtgcgcgctccatgcacgaattcgcagccagggacatcgacggtcacatgatttgcctggataagtacaagggttgcgtgtgcatcgtcaccaacgtggcctcgcaatgaggcaaaaccgacgtaaactacactcagctagtcgatctgcatgcccgatatgctgagtgtggtttacgaatcctggccttcccctgcaaccagttcgggaagcaggaaccaggaactaatcaagaaatcaaggagtttgcagccagctacgatgtcaagtttgacatgtacagcaagatctgtgtaaatggggacgatgcccacccactgtggaaatggatgaaagtccagcccaagggcaggggcatgctgggaaacgccatcaaatggaacttcaccaagtttctcatcgacaagaatggctgcgtgatgaagcgctacggtcccatggaagagcccctggtgatagagaaggacctgccgtgctatctctagccctacaagagtgtgcccccaccgagcccccctgccatgtgacccctggagccttccaccccggcactcatgacggtctgcctgaaaaccagcctgctggtggggcagtcccgaggacctggcgtgcatccttgccggaggaaggttcagaggcctgtggccccgggctcgagcttcacctggctgccttgtgggaataaaatgtagaaatgtgaaaaaaaaaaaaaaaaa

SEQ ID NO: 7583 - DNA, 743 bp, Cricetulus griseus
gcgcgcgccgagagccgcgcggttgggactctgcggaggagcgttaggcccgggcggcgctcactcatgaggagcaggaagctcacaggtggagtgcgatcctcagcacgccttcgggcccgccgttactcttcagccagctcggcccctgccgaggacattgccagctccacatccgccaagacagcatgtctggcttcatcacaaaagaccacagacaaacgcacttccaaaaagttcaagtatgacaaaggtcaccttgtaaaggcagaattgcagaaagctgaccctaaacgtgacatttcttctttgtcaaaagtggcccctgtggccccttgtgaaaatgagtttgcagaggacagtgctaagactgctgtccctgtgccagagagggaagagcctccccagggctgctcccaggctgtgagcgaggaaccctcagcaaagactgaagattgcctgcccacagcagaacccagcagtgctgcggcagcccaggagcctgatgaaagttctgccagacaggctgagcctgcgcccaggacagaggaggtgcgggcacctgtgcttcagatggacagcagcgtctttctagatgatgacagcaaccagcccatgcctgtgagtcgcttcttcgggaatgttgagcttatgcaggatctgccaccagcctcttcatcttgtccttccatgagcaggcgagaattccgaaaaatgcatttcagggccaaagaggatgagga

SEQ ID NO: 7584 - DNA, 743 bp, Cricetulus griseus
aaggagatccttcttccggaagggtgtgcagctgttattgagtgagcgggtgagcaacctggaggaactacctctcaatgagtaccgggagtacatcaaggtgcagacggacaagggcacagaggtggccaccaacctggtgattgtgtgcaacgggatcaagatcaacagctctgcctactccagtgcgttcgagaatagactggccagcaatggtgctctgaaagtgaatgagttcctccaggtcgaaggttacagcaatatttatgccatcggtgactgtgccgatatcaaggagcccaagatggcctatcatgctggtctgcatgctaacattgttgtggccaacattgtcaactccatgaagcagaggcccctcaaagcctacaagccaggtgcactgaccttcctcctgtccatgggcagaaatgatggcgtgggccagataagtggcttctatgtaggccgcctcatggtgcggctggccaagagcagggacctcttcgtctccacaagctggaaaaccatgcggcagtctccaccatgacagggaggctgcgagggagtctcggtaccgcttggaggggtgacagactgcttgacaaaggacaccctcctgacaggtgccaagggcaaaagctctttgtctggatcatggtgtcaggtcgtgggctggctggaaatacaacttgtagtaaagccaaaatgagagacagagagtaaagaggggggacattaaaaaa

SEQ ID NO: 7585 - DNA, 743 bp, Cricetulus griseus
ttacaagggcttcggagaactctaaatttctttctttctttctttctttctttctttctttctttctttctttctttcttctttccttccttccttccttccttccttccttccttccttcgttccttctttcttttccagacagggtttcgctgtacaacagccctggctgtccttgaactcacgttgtagactaggccagccttgaacctacagaaatctgcctgccattgcctctggagtgctgcttcaagagccccgataacctaattttgttagaacctgatacaaagattacaaaacatgttcatttctatttctaattctgcttttagtaacatattgtttaacttacttttgcatgaaatttaacttttttattctaattgaaaaaagttagcttttataccactcgaattagaaaatcctgccttgaatgtactgttgttaaagcacacgtgactgtgtttgcatctgtcagtactgttctgtttgtactggagtctcatttgaaagtggctactaaacactgtactataccttgtaattttttagcctcacttgtagctttaaatgtttccagatgcctttagtttttagctgctgtaaaatggctactttgtgttatttgatatagaattgtttaaaaaaactccatttatttatacagagacatttataatattttacaaacgttcttatattctgaataaatatttctaattccatgaccaaaaaaaaaa

SEQ ID NO: 7586 - DNA, 743 bp, Cricetulus griseus
ggggcccggcatggaggggccctacgaggtgctcaaggatagctcctcccaggagaacatggtggaggactggcctgtacgaaactgtaaaggaaatcaaggaggtgacggacaaaggccagaatggcgaagtccaaatccacttctgccttgaaggagcttcagcggccccacacagagggcaaagccgactttgcggaatatgcctctgtggacaggaacaaaaagtgccgccaaagcatgaacgcggagagcattctgggaacttccagtgacctggaagaggaaaccccaacacctgttccggttaaacttctggatgagaacgcaaaccttccagagaaaaggagagagcgaggtggaagagccagctccagaggggaccagtggacacagcaagagatttagttccttgtcatacaagtctcgggaagaagacccaatcttacagaagaggagatctgtgtggatggcagctgtggtgtctatccccaaagggctgcggacattaatttgtgtttccagtgatctctgctgcccacatgtgtgactttcctgttatctgatggtaatctaagagtaaaatgtaaacatttattttattatataaatttataagatgttttatgtttcatgcctaatttctagaaaatgccagaaaatatatattaactattttgattttatgtacaatgatttatactctcattttgaaaaagacaccaataaagcacataagctag

SEQ ID NO: 7587 - DNA, 743 bp, Cricetulus griseus
tgagaacatttttttgttaatactaatgtcttagactttttgttgattgtcttttcaaaagattgagatgcagtatctctggtgcttggcgtggattgtgtcctatagaagatgctcaggcaagttgaagttcatatatcctgtaaaggcatagtgtacttgctcagggaatatgactttggcgacatttcatctgttggtcaaccttttttcccaccaccctgttctttttcattccttgtggcctcactgctaggggaagtctcattcaatttaatagcattttaaccagaccacattattagaaatggtcaaaacaagtttagagagaaattgtttcatgtactttttaaacagatctgccagatgcattcatgaggaaataccatactttgtcttaatttaaaaaaaaaaaaaaaagaaaacaaaaaaggaaagaaaccacagaggatactgttccaagaggatagcctgatgaggtcagtccagttttggaagcactgcaccagtccaaagccttactagttagtaaatacgctggcaggaggggcgcagccggcaggcagaactcagtgctgtttgctttgataatcgttaagccatatcatctgaggtttccggcttgagatgtgaatttgttttatagactataaatatacagtgtatgtataaagcagaatgcctgtccttctgtatttattttttgtaccatattgtaaattactatttatttattctttacc

SEQ ID NO: 7588 - DNA, 742 bp, Cricetulus griseus
caactataagcacccagctcaaaatttcctatccacagtgaaggctaccatgctgggccggactaacatcagtgacgaggaatctgagcaggccacagagatgctggttcataatgcccagaacctcatgcaatctgtgaaggagactgttcgagaagcagaagcggcttcaatcaaaattcgaacagatgctggatttactctgcgctgggtccgaaagactccctggtaccagtaggcacctacataacctggctgggacataagcctctgctagagaagagaatgatgagttccagaagctattcagagttgccgggagtagaaatcaaattccgtggtctcacaccagaaaggaatgctgcagggtaaggtggtctctagggagggccagcttgtgcagcctggattcatttcctgctttcccccccatgcaatcctagttcctctcacaatgtaaaaccaatttacactgttgggaggaaatcactattctgtctttatcatgcccctgagtaatatctgtgctagggaaacttcctgcctcacatcctgccttgctttggttgccaaggtaaccatccagcaaacacactggtgctctctgccactagaggggcagagtagctggggtgtgatcctgcctaacctcccagtggggccactcccaggtttttatgctttgtcactgccagtagaggtctgtgctgaggccttagcatacactcttagtccttttttt

SEQ ID NO: 7589 - DNA, 742 bp, Cricetulus griseus
ggagaatttggttctggagaagggtgactcttaagaggcccctggcagtggtgacttggaccatggcctccgacctagacttctcacctcctgaggtacctgagcccaccttcctggagaacctgctgcggtatgggctcttcctgggagccatcttccagctcatctgtgtcttggccatcatcgtacccattcccaagtcccatgaggcggaggcagagcagtcggagcccagaagtgcagaggtgctgaagaaacccaagactgccattccttccaccagcaagaggccaaagaaggaggcgaagaagaagcggtagaagccttggggacagccctcgtgggaaccagcatcctgtttcctctcacagactgtctctgcccttggctggggtctgaggagattgaaactccctctgaccacagagatctgaacagtccccaggctccagctgtgcagaccaccacttcctcttccttcactctgtggtacagaggactcccagagcaaaccctgccccccctgtgggggggtcccgaagccaggtcaggctcacagagccaagtattcacgttaatccttgggtccagtggcttttcacttttagatcaacctccgttcacccattctgacattcaaagtgcctttgactctgacctgacatcccccgtgtcttcattccctgaccagtgaaaaccaattatgtggagaagtcaaagccaataaatgatcatgcatgct

SEQ ID NO: 7590 - DNA, 742 bp, Cricetulus griseus
aattggaacatgtttcagcaaacacattgtgaagccagacccagcacagctgtccctgactgcctccaccccgaagctcttgtacctcattttggccaaaggtttcagtactgatggaaacacccctggtgagaagaaacagaaaaggaaagatgcttttactaatactggaaggaaaattagtgagcggattatccgtgtcctggatgagaaaggcactgacctgggaatgatgcaccgagcggatgtgatcagactcatggacaagctggacttgaggttggtgcagaggaatgccagctcagagccacccgagtaccagctcatgaccggagagcagatccaccaggagcggctaaggatccgggaacaggaaaagaccaaccccaaaactggaccagctgcgacaaaggaactcattttttcttcaaatattggacagcatgatttggacacaaagagtaaacagattcatcagtggattgagaaaaaagtacctcgttcaaagtcacaataaagaaagaaaacaaaaaatgctgagcagccaaggaatgagatggatgagatatttaaccagattctccagactatgactgcgatagcgaccttctcaagcagaccgaaagccatcagaggaggaaccgcctccatgtgtgtttttcgtcccttgagcaagaaagaaatgaaggcgtacagacacactcaggagactgagggaacagacactttgaacaaagatgac

SEQ ID NO: 7591 - DNA, 742 bp, Cricetulus griseus
catttttattccatccctcttcctggataacttctcaatactggaaactcacctgacttggctgtgtacgtgttctgcttctgtgactggtgtcaatctcctgttacatttagtagtgaaaccaaatgtgtcttctagaagaagttccttatcacacaaggtgaccagagttttgaaatgctgcatctactttcttctgtcttgttttttccttcatatcatttttgttctatatggagcaccactaatagagttggtgttggaaacaattttatttgcagttatcttgtctacttttactacaattccttgtttgtgtttgctaggaccaaatctcaaagcatggctgagagttttcagtagaaatggagttacatccatttgggagaacagtcttcagatcactacaatttccagttttataggagcatggcttggagcatttcctattccactggattgggaaagaccatggcaggtgtggcccatctcctgtaacactcggagcgacctttggctacgtggctggcctggttagctcaccactctggatatactggaatagaaagcaacttacatacaagagcaattaagaggagaaaggggagaagacatttctttgtgcagattccgtaagggctgtgcagaaatgtgtatggtcaaagccaagcagttccttttacagcactgttgtttttttcaatgtcggttcaacatggtgtgattgtagctttttaactat

SEQ ID NO: 7592 - DNA, 741 bp, Cricetulus griseus
ggatcccgtcaccaagctgggccgtctggttaaggacatgaagatcaagtccctggaggagatctacctgttctccctgcccattaaggaatccgagattattgatttcttcctgggcgcatccctaaaggatgaggttctaaagatcatgccagtgcagaagcagactcgggctggccagcggaccaggttcaaggcttttgtcgctattggggactacaacggtcatgttggtcttggtgttaagtgctccaaggaggtagccactgccatccgaggggccatcatcctggccaagctttccattgtccctgtgcgaagaggctactgggggaacaagattggcaagccccacactgttccatgtaaagtgacaggccgctgtggctctgtgttggtgcgtctcatccctgcccccagaggcactggcatcgtctctgctcctgtgcctaagaagctactgatgatggctggtattgatgactgctacacgtcagccaggggctgcactgccaccctgggcaactttgccaaggccacctttgatgccatctccaagacctacagctacctaacccccgacctctggaaagagactgtgttcaccaagtctccttatcaggaattcactgaccatcttgtgaaagcccacaccagagtctctgttcagaggacccaggctgcagctgtggccaccacataagggtttttatataagggaaataaagtgaattaagtctg

SEQ ID NO: 7593 - DNA, 741 bp, Cricetulus griseus
gctgtcctgggggagctggtttgtggatgccgctgatactcttgctgcagtagtactgggtcctcaggcagagcatcctctccttgaggggaatcatgagccgcttcctgaacgtgttacggagctggctggttatggtgtccatcatagccatggggaacacgctccagagcttccgagaccacacctttctctatgaaaagctctacactggcaagccaaaccttgtgaatggcctccaagcccggacctttgggatctggacgctgctgtcatctgtgattcgctgcctctgtgccattgacatccacaacaaaacactctatcacatcacactatggacattcctcctcgccctgggacacttcctctcagagttgttcatatttggaacagcagctcccacagttggtgtactggcacccctaatggtggcaagtctctcaatcctgggtatgctgattgggctccggtatctagaagcagaaccagtgtccagacagaagaagagaaactgaggccaaccttgccacctccaaaatgccatcatcttccaccttcgctgtcttcgttcttcacccaagggacgggcagttcttccaagaagggctgccctcggtgtaagcaggaccagccttctcttttatctacaggtggataaggttagaagagtctgggctgtttttagaccttttggtcagttgtatttgtgtaatgcgttttataataaatagaaaaacc

SEQ ID NO: 7594 - DNA, 740 bp, Cricetulus griseus
taccttcaactgagtggtcctcttggggaagctgcaccctgtcagcatggctcaggagtttgtgaactgcaagatccagcctgggaaggtggtcgtgttcatcaagcccacttgcccctactgccagaggacccaagaaatcctcagacaactgcctttcaaaccagggcttctggaattcgtggatatcacagccaccaacaacaccaatgaaattcaagattatttacaacagctcaccggggcgagaacagttcctcgggtctttattggtaaagactgcataggtggatgcaatgatctaatcaccatgcagcagaatgggaagctgatgacccgcctgaagcagatcggagctctgcagtaatggaagggaggcagcagaccctatgctgacagcatctgtccagccatgctgacaccaatgcctgagagctgacctgtatcacaaagatgtcagaatttcctggtgactgggattttgaacaaaaacagctttgacttcttttcgtcagtgctaaaaactgttgcaatttgctcttacccatgcagccaagaagcttaacagaccatactagctagattatgtattcatcatgtgccaccatgtctctacctctaagcttatacttctcaatgaagtttgtctaagtctccagcaaatctgttgccggctctctaatagtgctggtcagctgaaataattttgtagaactcagctttataaagtgttattaaat

SEQ ID NO: 7595 - DNA, 740 bp, Cricetulus griseus
  modified_base (605)..(605): a, c, t, g, unknown or other
tgctgagctggtggtggtggtggttcgtggcccaggcgtgcgagagtgggcgctgcaggatggtaaaacataagggaaaaggtctaggagggacagagaagagtaaaaagcaaaagctaacaccagcagaagagacgctgcgggcatctgaagccaggccagggaaggagggggccagccccaaggtacaggaagccaactctgaactgaccccagaggagagaagagttttggaaaggaaactgaagaaagaacggaaaaggaagagaaaaagcggttgcgggaggcaggcattgctgcagctcagacagccaagggccagactctgccagccaagccctcagctgccgttctggccctggagtacctccaagggtgggcccaaaagcaggagagctggagattccagaagacgaggcagacgtggctcctgatgaacatgtatgatgaggacaaggttcctgatgagcacttctctaccctgctggactacctcgagggactgaagggtagtgcccgtgagctgacggtccagaaggccgaggccctgatgcaggagctcgatgaggctgataccgagacccagagatacacagctggggaanatggaacgcctccggcaggtgctacaactactctcctaatggggtgccttgagaattgaacatggtctccctgtaacagctcgtgtgtgtgtgtgtgtgtgtgtgtgtgtgtgtgtgtgtgtgtgtggtggggga

SEQ ID NO: 7596 - DNA, 740 bp, Cricetulus griseus
cctccccccgagcgccgctccggctgcaccgcgctcgctccgcgctgtcaggctagcgccgctgtcccccgccgccaccatgatcatctaccgggacatcatcagccgtgacgagctgttctccgacatctacaagatccgggagatcgcggacgggctgtgcctggaggtggagggcaagatggtcagtagaacagaaggtaacatcgatgactcgctcattggtggaaatgcttccgccgaaggcccagagggcgaaggaaccgaaagcacagtagtcaccggtgtcgatattgtcatgaaccaccacttacaagaaaccagcttcacaaaagaggcctacaaaaagtacatcaaagattacatgaaatcactcaaaggcaaacttgaagaacagaaacctgaaagagtaaagccttttatgactggggctgcagagcaaattaagcacatccttgctaatttcaataactaccagttttttattggtgagaacatgaatccagatggcatggttgctctcctggactaccgtgaagatggtgtgaccccattcatgattttcttaaggatggcctagagatggagaaatgttaacaaattggatctgtcacctgtcaccatagctgactgctgcttgccatccatacaacaccagggcttaggacaaatgggactgatgtcatcttgagtcttttatttgaccatgatttatttggagtggagacatttgttttttt

SEQ ID NO: 7597 - DNA, 740 bp, Cricetulus griseus
gaagattggcggacagcagcggtcgtgtgagcaagagcagcgggagcagcaccgggaagggggcggtgtcggccgaacaggtaattgctggctttaatcgccttcggcaggaacagaggggcttggcatccaaagctgctgagctagagatggaattgaatgaacacagcctagtgattgataccctgaaggaagtggatgagacccgcaggtgctaccggatggttggcggcgtgctggtagagcggactgtcaaagaggtgctgcctgccttggaaggcaacaaagagcagatacagaagatcatcgagacactgtcacagcagcttcaggcaaaggggaaagaactcaatgaatttcgggaaaagcacaacattcgtcttatgggggaagatgagaagccagcagccaaggaaaactcagaaggggctggggcgaagtccagctcagcaggagtgctggtctcttaggaactaaagcctctaaatttttttttttaaccctgattcccacttctaatttctttttattgttgttattattattattattattattttctctgctattgtgctattgtaatattttttgttaattaaatgttttggtcaaatacttaaaaaaaaaaaaaaaaaaaaaaaaaaaaaaaaaaaaaaaaaaaaaaaaaaaaaaaaaaaaaaaaaaaaaaaaaaaaaaaaaaaaaaaaaaaaaaaaaaaaaaaaaaaaaaaaaaaaaaaaaa

SEQ ID NO: 7598 - DNA, 740 bp, Cricetulus griseus
agtttattgaagtctgatgagggtgaaaataaccgaggaagcatcccagcccttgaaaccagtggggaaaacagttcttcccacaaaacaggtggagcaaagccagggcctagtaagaaacctcttcatggaaggaggaagaggtatgtgctcagtgtcagcaatactatctacaacgtcgagcagagaattaaccacttcctgaagctccagcatgagcgaaggcaggagatgtataaggaatattctcatcagtttttgactttggttgtgatgtggaatatagatgtagaccaagtcaagaagcatgcagaaaatctctctaatatacttgaggagcaacaaaagctttttcaacaatttcaagttattcataaggagaaaatagaagaatttaaagagctatgtaatcgacacttgaagagtctacaggctattaagagttgtcgccgaaaagctattatcgaggaagaccagaaacaaatggacgtcctggagaggaaacttactacagaaactgtaaagctgcaggaagaaaaggctagtgttagatcatctcttctatccctgctattctcataacaccttgaagaaagacgctcaaacaccctaatagcatttcatcatactattagctgtgtgagtctatgatgccatggagactgcaactgaagttattgtaacttccttgttcacatctgtgaggtgccagaaaacctttaactgacaatgttttgttt

SEQ ID NO: 7599 - DNA, 740 bp, Cricetulus griseus
gggcttacactaggcctggggtacctgggaaccatgcatttcctattcaggctagcggttttgctcagcctgtggagctgttctaacgctcagggacaaacgaaagaagaaagcccagaggaagtgaaaatagaagttttgcatcgtccagaaaactgctccaaaacaagcaggaaaggagacttgctaaatgcccattacgacggctacttggctaaagatggctccaaattctactgcagccggacacaagatgaaggccaccccaaatggtttgttcttggtgttgggcacgtcataaaagggctggacattgctatgatggacatgtgccctggagagaagagaaaggtgattatacccccttcgtttgcatatggaaaagaaggctatgcagaaggcaagattccacccaacgcaacactgatgtttgagattgaactgtacgctgtgaccaaaggaccacggagcattgaaacatttaaggaaatagacacagacaatgaccggcaactctctaaactttaagaaaaatgaccacaacagagatggcttcatttctcccaaggaatacaatgtgcaccaacatgatgagctataaatttattttacttttttatttgttagtacttactgtattttgatttttaaaagaaaaattacttttctccaggttgtggtttccttttttcccttatgagaagatatttgtttcctttactaaacataattttggtgta

SEQ ID NO: 7600 - DNA, 739 bp, Cricetulus griseus
tgctggtgccagttctcttacctgagaaatgctatgaccaacttttcgtccactgggacttccttcatgttccctgcctcaagattctcctcagcaaaggccttggactgggcatcgtggctggatcacttctggctgccccagatatttaaaatcttgggcgccaagagtgccgaaggactgagtctccagtcagtaatgctggagctggtagcattgacaggaactgtgatctacagcatcaccaacaacttccccttcagctcttggggtgaagcgctgttcctgacactacagacaattaccatctgcttcctggtcctgcactacagaggagacactgtgaaaggagttgctttacttgcctgctatgcgacactcctgctggctctgctttctccactcacgcctctggctgtagtcaccatgctccaggcctccaatgtacctgctgtggtggtgggcaagttgctccaggcagccaccaactaccacaacgggcacacaggccagctttcagctatcacagtgtttatgctgtttgggggctccttggccagaatcttcacttctgttcaggaaactggagaccccctcatggctggagtctttgtggtctcttccctctgcaatggcctcattgccgcccaggtcctcttctactggaatgcaaagcctccccacaaacataaaaaggagcaatagtgctgagctagcttctagaaccattcattccact

SEQ ID NO: 7601 - DNA, 739 bp, Cricetulus griseus
aaccccatcccgttccctgagctgtatgatggtgacaccgaacgcctcccggagttcatcgtgcagacgggctcctacatgttcgtggacgaccaggtcttcgacaccgatgagctcaaggtgaccttcctgattacccgcctcaagggccaggccctgaagtgggtgatcccctacatcgagaaggacagccccctgctcaaggattacagcggcttcctggccgagatgaagcgggtgttcgggtgggaggaggatgacgacttctaggccgctaggtctcctccgggcctggggcgggggctccgggagggtgggctggtgcagatctcgaatgctcgcccctctctcctcctgtgtcctttgttccaagaatagctccccaggctcccgctgctgtccctgtagggcctggctctggagagcaccaggcctccctgtgctgacagccctgcccctcccatgaacatttggactctcccctggtctccaactgcaagatgggctcctgtcacataatggacagatcacctgccgccgccatttcaagcctctgcccaccatctgtgaaaggactgctgccctttactgatctggactcacatgggagggaggtacctgagctgccctcagcccgtggacattgcttgattcaccttcagtgggacccattccctccctgctcccagagacctcttgtctctcatgttttcacatggaccagttcgttttcccgaga

SEQ ID NO: 7602 - DNA, 739 bp, Cricetulus griseus
cacacgtggaaagttgggagcactcaccaactacctgcagccccggcaagagccatacgcccgtggtagaggtgaacttgtgactcactttcttgaccagtgatatggacagcctgtcctacctgaagaaggtgtctacagagggccacctgtacaacggctttaacctcatagcagctgacctgagcacaacaaaaagaagatgttgtttgctactatggaaaccggggggagcatgagcctattgtcttgacaccaggaacctatgggctaagcaatgccctactggagacgccctggaagaagctgtgctttggcaaacaactcttcatggaagtggtggagcagagcgaggcactccctaaagacacccttatcacccatctcctagatgtactcaacaatgaagaagcacagctgccagatccagccattgaggaccagggccgggagtatgtacaaccaattctgagcaagtacgcagctgtgtgtgtgcgctgcgccacctatggcaccagaaccaacaccatcatcctcgtggatgcagatggccatgtgaccttcacagaacggagcttgctgaacaaagacacctctcactgggagaccaacacctatgagttcacactacagagttagcccccactactaggatgccgtgcctcaagggccagcataggcaggaatcttccatggccacactgcatgtctatgactcagccagcatcgctaggaccag

SEQ ID NO: 7603 - DNA, 738 bp, Cricetulus griseus
atggcggctttccgtgagatggaggaggttgtagcagctggctgctgagccttgctgggggccaaccacgtcgagaaagcagcagcggcagctgctcgggcgccacgagcagatggtggagcggctgctggagacgcaggacggcgccgaccagcggcttcgggagaccctggctgtggaggaggaagcggctcagagccttcttgaattgaaagaatgcatgcgcctgggaggcaatgagctacagcatctggaagtcgagctccagaaggccagcaaggaaaatgcctgtctgcaggccagcctctgtcagctgaccacagagctgcaggaggctcagggaggatggaggcggatctccagcaacaggagagagaagtggatgaggacaccaccatcaccatcccctctgcagtgtacgtggcacacctctatcaccagattagtaaaatagaatgggattatgaatgcgagccagggacgatcaagggcatccaccatggccccactgtggccctgcctatccacttggacagcgcacagctctcacagaagttcatcagcgactacctctggagcctggtggacactgcgtggtagccagagccttgacctcttaccttgcacagaactggggatatgggggcctaggcgggggatcactctaaaattaaaaatctatatgtaaaaaacaaaaaaaaaaaaattacaaaacaaacaaaaaaacaaaaataaaaa

SEQ ID NO: 7604 - DNA, 738 bp, Cricetulus griseus
gcagccccagtggatgacagacggaattctaggaactccagattacctggcacctgagctcttactgggtacagcccatggtcctgcagtagactggtgggcacttggagtctgcttgtttgaatttctaactggaatcccccttttaatgatgaaactccacaacaagtattccagaatattttaaaaagagatatcccctggccagaagctgaagaaaaagttatctgatcatgctcaaagtgcaatagaaatacttttaaccattgataatacaaagagagctggaataaaagaattcgtaccacaaccaacgaatgacgaaacaagatacatacctattttgtaagccaggaataatgctcagcatctgaccatatctgggtttagtctatagaccatacatgacatttttatctaaccttgtgatatagaattaagttttgcaataatatgctccttaatactaaattgagctaacatgatagaagtcattattatgcctacgctaatgtgctttcacattactaaatagagcagcttttacaaaacttaaaatactataagaaatatgtaatttatctttaccttaaactgcatataaatcatcaaggcttttttcatcttactatcttatttattcactgcactttatgaatactaacattatcaataaactaaaacactactgtgctatacagaggcaatgagccataagcttgtctacatctgctgatt

SEQ ID NO: 7605 - DNA, 738 bp, Cricetulus griseus
cccctcccatccctgtgctttctgattcactgcccccagccctatcactgggacatttatacaagggcttgtgtgccactgttcccaccataccagcaatccgtaagtcccatgcataaaagcatccattggctgggatgcagggccacaccaaccggagttgacagtgaatggccaggatggggactttcccattctcagctaaggttggaaggaacagctctgaatgacctttcgagggcctgtatgcacaaccctccccgtccacccctgcctaaggctcaggccaccagctttggggcacagcttcctggtactcacagcatctcagaacagggtgcttccccatccctacagctccaaggaccctgcctacccaggggcatctcctggagctgagaagccaagcaagtgcagcaagatagtaactcagtcccgaggcaccttgctgccctaccgacaccccctcctggagtgggaagcagggaccgcaggactgtccaggcaacgtgtctgaactggaactgttccacttgaacccaggagctttaaagctttatttatttatagcttcttaataaaaaaataaaagtgtggaggaggagtctttcggttattcgtacagagcgatgaattgatggaaaagcaactggttgtcttctaattgtctttgtctaggtggagaatgaacattagcagatgaaataaaccctagaaaaaggtaaaaaaaaaaaaaaa

SEQ ID NO: 7606 - DNA, 738 bp, Cricetulus griseus
gggcggccggcgtgatgaccctgttccacttcgggaactgcttcgccctcgcctacttcccctatttcatcacgtacaagtgcagcggcctgtctgagtacaacgccttctggaaatgcgtgcaggccggggtcacctacctctttgtgcagctatgcaagatgctgttcttagccactttcttccccacctgggaaggtggcatctatgacttcattggggaattcatgaaggccagtgtggatgtggcggacctgataggcctaaaccttgtcatgtcccggaatgcaggcaagggggagtacaagatcatggttgctgccctgggctgggccactgctgagctcattatgtcccgctgcatccctctttgggtgggagcccgaggcattgaatttgactggaaatacatccagatgagcattgactccaacatcagtctggtccactacatagtcgcctcggctcaggtctggatgataacacgctatgacctgtaccacaccttccggcctgccgttctcctcctcatgttccttagcgtctacaaggcctttgtcatggagaccttcgtccacctctgctcgttgggcagctggacagcattgctggcccgggcagtagtaacaggacttctggctctcagcaccttggccctgtatgttgctgtggtcaatgtacactcctagattgtcggcccaggtgttggctattacctttttgctgcctctctccaga

SEQ ID NO: 7607 - DNA, 738 bp, Cricetulus griseus
cagatggcccgggattgtcggagagcggcggcggcggctcgcgcaggctgcgcacggcctacaccaacacgcaactgctggagctggagaaggagttccatttcaacaagtatctgtgccggccgcgacgcgtggagatcgccgccttgctggacctcaccgaaaggcaggtcaaagtctggtttccaaaaccgacgcatgaaacaataaagcggcagacgcagcatcgggaacctccggatggggatccaggcgggccgagcgccccggacgactcgggagacccagcagaggaatccgcagtcagcccaggccctgcctccgcctctcaccggctgcgagaagcttgcttcctcccggccgaggcagcgcagggtccccagggcgcaccgccgcccgcgcctcctgccacttccctggagaggtatgggcgcgccgagccctggctgcacgatgctcagagcccgaggcctcgcagccagagaccctgcccgaagacacctgtcctgagcagccggattcgcctttcctgccggacctcaacttcttcgctgcagactcctgtctccagatgtccggaggtctttctcccagcctgcagagctcgctggacagccccgccccttttccgaggaagagctagacttcttcaccagcacgctctgtgccatcgacttgcagtttccctaacctttttctttcctcgatcctttccacctggtcctctttggctgttgg

SEQ ID NO: 7608 - DNA, 738 bp, Cricetulus griseus
tctatgtcctcctgcttgcaatcaatggtgtgactgagtgtttcacatttgctgccatgagcaaagaggaggttgacaggtacaatttcaccatgctggcactgtcttcctcatttttggtcttatcctacctcctgaccagttggtgtggcagtgtgggtttcattttggccaactgctttaacatgtgcattcggatcacacagagcctttcctttatccaccactacttccagaggagcccccacaaacccctggctggcctgaacctctcaccatttcttctcggggtgtttgccctcagtggtggcattactagtgtttcagagacactcctgtgctgtgagcagggctggcctgctaggctggcacacattgctgtggggaccatctgcttaggagtgacccttgggacagcattcttcacagagaccaagctgatcaactttctcaggactcagttgggtagatccagactcagtgacaaaatgacatgactttgatgatgctttgacttttggtacctggacccaccatggagtgtttcttgaatagcatgtgttgctgtgcaaaagtcctgctatggagtgagagtcaccccacaaaagtgggtagcagagaagagaccaaccagtcaaagtcttccaaccaaaggagggctttaagtgaagaccaaaaagccaattttgtaatgaattagttccctttgcgtgtgattgacctttgaagttacatctt

SEQ ID NO: 7609 - DNA, 737 bp, Cricetulus griseus
atgatgcttgtcggtttccttgggcgtgctgtggagctgtgcaagagtcccagtgcatgctgggattgttcttcgggttcctcttggtgatatttgccattgagatagctgcagccgtctggggctatacccacaaggatgaggtgattaaggaagtccaggaattttacaaggatacctaccaaaagctgaagaccaaggatgagccccaacgggaaacactcaaagccatccatatggcgttgaactgctgtggcctaatgggtggtgtggagcagtttatctcggacacctgccccaaaaagcaaattcttgaatccatccaagttaagtcctgcccggaagccatcaatgatgtcttcaacagcaaatttcacatcatcggagcagtgggcatcggcatcgccgtggtgatgatcttcggcatgatttttttggttgtttatttttgcttgttatgttaagcaaaaatcctgctatgaaaggtactatatttgccagactctagacagaagatattgtacataaagagaattttttgcctttaatagataaagtatctatcagatttaatcaggttgtaagttatattgaagacaatttgatacaaaataaaagattaaaatagtgaaaaaaaaaaaaaaaaaaaaaaaaaaaaaaaaaaaaaaaaaaaaaaaaaaaaaaaaaaaaaaaaaaaaaaaaaaaaaaaaaaaaaaaaaaaaaaaaaaaaaaaaaaa

SEQ ID NO: 7610 - DNA, 737 bp, Cricetulus griseus
gatggggaccaaagaacaaaaatcccacccaaccctgaagaagagcggttgaaaaatgagaggactgtgtttgttggcaatttgcctgtcacatgtaataagaagaagctgaagtcactttttaaagagtatggacagatagaatctgtacgatttcgttctgtgatgccagcagagggaacactaacgaaaaagttggccgcaataaaacgtaaatttcatcctgaccagaaaagtatcaacgcatatgtagtgtttaaggatgagagtgctgctacaaaagcactgcagagaaatggggcacagattgaagaaggatttcgtattcgagttgatctcgcatctgaaaccacctctagggacaagagatcagtatttgtggggaatcttccttacaaagttgaagaggctgctttggaggaacactttctggactgtgggagcattgtggcagtgaggatcttgagaaacccacagacaggagtcggcagagggtttggctatgtgctctttgagaatacagatgctgttcatcttgctttgaagttaaataattctgagctaatgggaagaaaactgagagtcatgcgttctgttaataaagaaaactaaaacaacaaaattcaaattcaagcttgaagaacgccaataaatctaagcaaaactcagtttacttccaaagacattccaaaatgcatttattggagaaaaggcagttctcatgaaaaagaagaaag

SEQ ID NO: 7611 - DNA, 737 bp, Cricetulus griseus
ggccatctgcctggctccaggtcaggttacaagaagccaggcaagaactgcaccagccacaggaacagaaaccagatctctaaggtgagcactgggaagcagattcctgaactgcaggactatgcccctgactaccagcacaagttcagctttgacatcatgcccaccgtgcgacccaagaggaagggcaagtgtgcccgcaggacccccatccgtgcccccagtggggtgcagcaggcctcctcgggcacttccctgggggcctcgctcctggcctggatactggggctggcgatcactctccgctgaggaccagggcaacattacccagcactgccacaagtccagcaaggaacagaatcttttctcctttttttcgaaggagcaggactcaggacaaggcttacccagagccagctggggcagccagcagtctcagagcactcttagctcttgtctgaagctacttagtcaacctgcccagtccaaccctatgccaccctctgtccctgcctgtggggtaatgcctctcattcctgatgtctcaggcagtcctggcagacctgctggggtccaagaaccaatcaccaaaggaaagatcgccagaggatggcatttagaactttactggcaatgacagtcacatagaaggtgcagttttatacctgtgtccacttatgtatattctcactccctacccacacaacccacccaatataaatatataaatatatata

SEQ ID NO: 7612 - DNA, 737 bp, Cricetulus griseus
aagactccaaaccagacttctaaaggacgcaataagagtgttctagtttcattaagtaggagttgtccagtttgttgtaaatcatttgctacaaaagcgaatgtaaggaggcattttgatgaagttcatagaggactgaggagggattcaattactcctgataaagcaacaaagcctgggcaacctttgttcctggatcccgcttctcctaaaaaatcttttaagactcgaaaacaaaagtcttcaaagcctgaatacaatttaactgcatgcaaatgcctcctttgcaagaggaaatatagttcacaaataatgcttaagagacatatgcaaaattgtccacaagataaactctttctggagcaaaactctaaaacgagagaaaaggcccaaaataataactgccaacagttcagaaataaaagttttctacaagtgtcctctctgcacttacgaaactcgtcggaaacgtgacgtgataagacatataactgtggttcataaaaagtcatctcgctaccttgggaaaatcacagccagtttagagatcagagctataaaaaaagcccattgattttgttctaaacaaagtggcaaaaagaggcccttcaagggatgaagcgaaacataatgattcaaaccctgatggcacttccaattctcctagtaaaaagtatgaagtagctgacgtcggcattgaagtgaaagtcacaaaaaacttctactcttcacagatg

SEQ ID NO: 7613 - DNA, 736 bp, Cricetulus griseus
cttttttgcccttaggtctatcaaaattccagttaaaaagtttagttctttgactgaaactcttcatcctctgaaaggaagacaaggttttcatcctccactcgttccatgtgctcaagggcaggaaacggtggctgctgaggactctctttgttccagtgagtcagctggcagtttcctgaaagaagtggatcgggacatagaacaaatagtaaagtgcacagacaccaagaaggagaacctgaacgaggtcgtctctgccttaacggcacagcagatccgatttgaaccggacagcagaagcactcccagaaaggatccctactatggagcagactggggaattggttggtggacagctgtagtgataatgttgatagtgggtataataacaccagtaatttatttgctgtattatgaaattttagctaaagtagatgttagtcaccattcaacagtgggctcttcacatttgcatccaggactcacacctccctcacagaacagagaaatggaaaatggaatcgctccaacaaaaggaatacatgttggtcaacaagatgaccacagactatataggcaagattctcagtcccctgctgctcaacacaaaacgtagcagtgagctctagtcagtgttgatgatcaagtatgcatatgggatatggggtttcagggacctcaaaaaactgcttcgaagtcaatctaggaacatcgaagatgcttcgtttttacc

SEQ ID NO: 7614 - DNA, 736 bp, Cricetulus griseus
gccagcaagccttcagcatcctcccgtaatgccgctccctgaggacagcaagggctcatgcttccagagtggaagcaagcggagccacgagcccttcatcgtttcagagagattttggaaacagcggggtaggctttggaggtagccctccactcccaagccccagagaaagtgacacttcttgtagatggcacacgctttgtggtaaaccctcagtatttttactgctcacccggacaccatgttgggaagaatgtttggaccagggagagaatacaacttcacaaggcccaatgagaagggggaggtatgagattgccgaaggcatcagcgccgctgtgttccgcacagtgctggattactataagactggcgtcatcaactgtccagatggcatctctatcccggatctgagagacacgtgtgactatctttgcattaactttgactccaacaccatccgatgtcaagacctgagtgctttgctccatgagctgtccaacgatggtgctcacaagcagtttgatcactacctcgaggaactgattctacccatcatggtgggctgtgccaagaaaggggagagagagtgccacatcgttgtgctgacagatgaggactctgtggactgggatgaagaccaccccccacccatgggggaagagtattcccaaatactttacagctccaagctctacagattcttcaaatatatcgagaatcgggatgttgctaa

SEQ ID NO: 7615 - DNA, 736 bp, Cricetulus griseus
gagcccgcgcctgagccatgtccgcgtctgcaggcggcggccaccagcccagccagagccgcgccatccccacgcgcaccgtggccatcagcgacgccgcgcagctacctcaggactactgcaccacgcccggggggacgctgttctccaccacgccgggaggaacacgaatcatttatgaccgaaagtttctgttggatcgacgcaattctcccatggcacagaccccgccttgccatctgcccaatatccctggagtcaccagccctggcaccttaattgaagactccaaagtagaagtgaacaacttgaacaacctgaacaatcacgacaggaagcatgcagttggagatgaggctcagtttgaaatggacatctgattgctgccctcctttgaatctgctttgtacttggctgccgagagaaaagcatgggctaaaaaagtgtgttcctccccgtttccctgcccttctcattgtagttcatccttcctgcttccctcctccttcccttttcaggcctcactctctttccttctggttcttccaccaggccattttccaaatctacatcaaaggtacctcaacatgttggtatctgataatacctgtctcttattagaggagagaccttttatttttaagatgactacagacctatttttagataagttttcagtacaattttgaactgcaacttttttaacaaaacatcttccagtattaggaaggttatt

SEQ ID NO: 7616 - DNA, 736 bp, Cricetulus griseus
cctgactccaaggatgttccattgaaattacccatacctctttgagaggaacctgccttccgtgcctggtctactaaagatcactggtgtttccacctctgtggctcttctctgctttgttcttgtacaagtttaaactgctgcctccaacctgagctttttcatcctcgggcctcctgctagatcatccttagcatcatcatcatcaaaaggaaaaatgtggatgaattacagcctgtgtcattggaccatttaagtgcacttgatttaatcttcttcagtttaattttagtctttgtaaagtgataacaatccaaagaattaattacctagctaattttagtaagctcatgtttcatcctgtttgctagactaattcatgttggttgatagaataaaatcctgtgagtgcttaatttcaaaattgcctttaatgcaaagtagttgatggtttcagaaataaaacacttgacttactgtgatttatgtgtagctacccagatgtgcagagtaaaatagtggctgaaatgttccctaggtgtcctccctgaccggttccatgtgagacaaattacaataggcactttcttttctggactgtatctaaacatgaattggcccttgtcagtaacattctgtgcttatttaaggaaattagcatttttcagttgctccttggctgtctgatcatagaattagatatctaagtctacctgtgtcttcaatgtggttaaat

SEQ ID NO: 7617 - DNA, 735 bp, Cricetulus griseus
cagcagccatgccgccatacaccattgtctacttcccagttcgaggacgctgtgaggccatgcgcatactgctggctgaccagggccagagctggaaggaggaggtggttactgtagaaacctggaggaaaggttcgctcaagtccacctgtttgtatgggcagctccctaaatttgaggatggagacctcaccctgtaccaatctaatgccatcttgaggcacctgggccgatccttggggctttatgggaaagaccagagggaggctgccctggtggatatggtgaatgatggggtggaagaccttcgctgcaaatacatcaccctcatctacaccaaatatgaggagggcaaggatgactatgtgaaggccctgcctggacacctgaagccctttgagaccctgctgtcccagaaccaagggggcaaagccttcatcgtgggtgaccagatctcctttgtggattacaacttgctagatctgctgctgatccaccaggtcctggcccctggctgcctggacaacttccccctgctctctgcctatgtggcacggcttagtgcccggcccaagatcaaggccttcctgtcctcccctgaccatgtgaaccgtcccattaatggcaatggcaagcagtaatggacagaagaaacagcatctgtctgtccccttttctatggctaataaagtttgtaagacaaaaaaaaaaaaaaaaaaaaaaaaaaaaaaaaaa

SEQ ID NO: 7618 - DNA, 735 bp, Cricetulus griseus
tgagattgtcccaagttcctaggcaagcaatgccagtgttgcctccctgtcctgggcagggccacttattattttatttatttttaattttataatttattcaaattggattgccttggtgacctcccaaacctgataattggcatcaccccacctctcagatattgctccaacctcaggacttgaagaagctgatgtcgaggcaaggggagaactgctctcccttggctaaggtagagcttattccagaggaactgagtcactagccaaagactcggtttcccttgtttttctctattccttttccttcccaacccttaaattcatctttgaaatctaattgtttgtgtgtgtgtgtgtgcatgcacaaaacttaggtttgtatggggtgtgtgtatgtgtgtgagagagaatgtgcatgtatgtgtaacacaggggtttaaacaccccttacctagggcttcagactcagttgtccctcttcttctgcctgtgtttccttgctttggggtcctgactgaggaaggtgtccaaggacagagtcaggcctaaggactggggagcctcctctcacttgaccagactctgacccacctacctcagctgggagtaaggggtgccccttgtattcagtcatgtggttcccagttaccccactccccactcaagaactctgacccagcctcaactcttaattcttgggcttgctgagggaacaagcatttgctgaacttg

SEQ ID NO: 7619 - DNA, 734 bp, Cricetulus griseus
agggaagacatctttggcccatcaatttgtggaaggcgagttcctggaaggctacgatcctacagtggagaatacttacagcaagacagtgactcttggcaaagatgagtttcatctacatctagtggacacagcagggcaggatgagtacagcattctgagaggtgcagttaattcaagggaagaagctggcacagtcctggggcgctacgtttatggaatcatctgctagagagaatcagttaactcaagatgttttcatcaaagtcatccaggaaattgtccgtgtggagaattcttatgggcaagaccgccgatgctatcttatgtgagctcttggcatcgagtagcttccttgtttctgctgtatgcattttccagcctggagacagaggcagaagaccctcaggacttaacttgtatggttgccaactatgtccctggccctctgggcatatggtgtggtgccctcatttttgcacactcatcccaggttctggtaacctggatgttaatgtttacaaaggggcaagatgtctcatggacactggcttctaactccttgtttttctaaaggaacttttataatctgcacagttgggatatgaggacccaccctcctgggtaggttttgggttttggttgagtaagaacattggttgcttggcagttctaaagtagaactggcttctggggtgacaatgtgtatttgcaaataaactgagaaatacttt

SEQ ID NO: 7620 - DNA, 734 bp, Cricetulus griseus
agagccggtttgcaggaatcgcagtggcggtcggagtcccagcagagcgcaatcatgtctattatgtcctataacggaggggccgtcatggccatgaagggaaaaaattgtgtggccatcgctgccgacaggcgtttcgggatccaggcccagatggtgaccacggacttccagaagatctttcccatgggtgacagactctacataggcctggccggactggctaccgacgtccagacggttgcccagcgcctcaagtttcggctgaacctgtatgagctgaaggaaggtcggcagatcaagccttacaccctcatgagcatggtggccaacctcctgtatgagaaacggtttggtccctactatacagagcctgtcattgctgggttggacccgaagacctttaagcccttcatttgctctctagacctcatcggctgccccatggtgactgatgactttgtagtcagtggtacctgctctgaacaaatgtatgggatgtgcgagtctctctgggagcccaacatggatccagaacacctgtttgaaaccatttcccaagccatgctgaatgctgtggaccgggatgctgtatcgggcatgggcgtcattgtccacatcattgaaaaggacaagatcaccaccaggacgctgaaggcccggatggactgaccctgtattctggtcccagtttcccttttgtttttctttttaataaaattgtcctttctttc

SEQ ID NO: 7621 - DNA, 734 bp, Cricetulus griseus
cccttcggagacatcagagcagcccggtacaggcggcgcacgcagtcttcaggccaggatggccggtcccaggagccccacatggaggatctgcagaagatcacagtgcaggtggagccagtgtgtgacgtggggattatggtccccaaggagcagggtgcgggaggggaggtccccctatcaggggcatcagctgtaaccactgtggaagtggacgctgccagccaggcctcagagcctgccagccaggcctcggatgaggaggacgcaccttccacagacatctattttctgtcatcccaacacttggaaggctaacgcaggaggattgtggcaacttccaggctaggctgcgctacagagtgaaatcctgtctgaaaaaaaatcacagggctggcgctactgctcagtgggccccagccagtcccctgtccagccccacagcaacctcagtgcaatatatgccctccccgtggggtcccttggcacggtactgtctccgcagtccttccgtaccccacctctccggtggtaaaaaaagatcgcatcgcacactttcaccccaggccttgtttttaatgctgaatccattctgaaaacttcaaaacctcgtgtgtcttactcatcagggcgagggagtccccgggtcctcagcctctgcggtctggtgtgtgacaatccaagcacggtgtcccttgcaccaaccaggggccctcgtccctccagtgcagccg

SEQ ID NO: 7622 - DNA, 734 bp, Cricetulus griseus
aaataaaggtactcaggttacacaggtccccccacttatattttcaggggatacccatttgtcccacacttatcctgtaattatggaaccacttggtggcctaatgcacttctcactagaggctgctagcagtattttagccaaagtcatcctccttgctttgagaagcagactacaggacagggaaggcaagtttttagtatgtatgcagttgctgtccctgcttcacccatgacaaacatcgctaatcaatcacagcactctatctcatggagtgtggataagctggaggagggttcggcatgggtgacatcccagaaggaaacttgcatcttctccattccaaaattgtcaactggctgaggacaaagagaaagcatctcccagaatgctgagtgtggttcagtgcagagctcctccaatgccctgtgccaggcactgactcaagcaggaggagcctggcctgatctgttgctttgggaaacccagatctctcctatgattttttgcttgtaatgatcagaaccccagttgcaaccatgtgggaagtggccagctgagcccggtcactcagtacccactctgccttgagccttcccccagggtctaaatttttcgtggaccatgtggcagtagcatgttgcagttcagatgtctccactaccctgttcagaacagcctgggaatgtacaggccaatgaggctatttatttaaatacacacacacacacaca

SEQ ID NO: 7623 - DNA, 733 bp, Cricetulus griseus
  modified_base (267)..(267): a, c, t, g, unknown or other
ctgggaggtttggcctctgtgaaccattcttcctacctgcatggctactacctggcccacccactgcctgtggagggcgccccaagcacacctctagaccccaaagcctgtatatatctgctgcagaacctcccagctcctggcttcctctttttacactagtgggccagggcctgacctggaagccttgattagcagggtatgccgggccactgactatctgagtgaccatgagattgcacataacttatttgtgacccgggggancctccacctgggcaggcatcaccttcctcggacctcactgggatccgagtcattttgtgggccaggaagtccagctttggaataaaggatagtggggctttcaatgttgcgctctgtgagctggctggccacctacccgttaaaacatcccaggacttcggcagcttgacagaggcagctgcaatggccctcattcaggactgtctgctgccccaaactcaggcagatgaggtgcaggcagcactggtggccctgatggcccaagaagggctataattcttcaggtttttctaagacagtttctctctgtgtagcctggctgtcctggaactctgtgtagaccaggctgacattgaactcacagagatctgcctgcctttgcttcccgagtgttgggattaaaggcgtgtgccaccactgcctggcttctgatcttgaactcagagatccgcctgtctctgtctcc

SEQ ID NO: 7624 - DNA, 733 bp, Cricetulus griseus
ctgcaattccagccccttcccacgtactccaaggtcaagcacttgctgaagacctggatgagctgatggaggctgtcttggacaagattctggctccggagtttggacacaccaacactaccagtaccctaaactttaccatctggaaccacacacctctggttcttattgatgaacggaatcctgaccacccagtgatcctcgagttgtttggggatagccaaaacagcagcagtccagccccaggaagcacctgcaatgcccaggggtgcaaggtggccatgaagctgtgcagtgccaatgggactgtgtgtaccttccggaacttcaccagtgccacccaggctgtgactgagtggtatatccttcaggccaccaacatcttctcacaagtgcttccagaggacctggtggggatgggctatgcccctgaccgcataatcctagcctgcctgtttgggacagaaaccctgcagccatcggaacttcacggcaactgctacatcttcaactggggcatgacggagacagtgcttccttccgccaaccctgggactgaatttggtctcaagttgatcctggacatcggccaagaggactatgtccccttccttgcgtccacagcaggagccaggctgatgctccatgagcagaggacgtaccccttcatcagagaagagggcatctatgccatggcgggaactgagacgtccatcggggtgctggtggtaca

SEQ ID NO: 7625 - DNA, 732 bp, Cricetulus griseus
ggacctgttcaccaactacatctcactctacaacacctgcatgaaggtggtgtacatagcttgtcctttactacggtgtggatgatctacagcaagttcaaagctacttatgatgggaaccacgacactttccgggtggagttccttgttgtccccacggctattctggcattcctggtcaaccatgacttcacccctctggagatcctctggacttttctccatctacctggagtcagttgccatcttgccacagttgttcatggtgagcaagacaggtgaggcagagaccatcaccagccactacctgtttgcactgggtgtctaccgcacactctatctcttcaactggatctggcgctaccactttgagggcttctttgacctcatcgccatcgttgctggcctggtccagacagtcctctactgcgatttcttctacctctatatcaccaaagtcctgaaggggaagaagctgagcttaccggcatagccctggcctcaccagccttctccgaggcaggacaggaggaagaggaaggctgccgaagacccagagccttcccacccagagttgactttttaaagagctcacctctcctggcttcccaccccttcagctgggtttgggggtcagtggaagatccctatcctgggcagctcagaacctgagctgtttgtagccctttgccttttagagaagaaaaacaaaaaaacaaatacttaccacta

SEQ ID NO: 7626 - DNA, 732 bp, Cricetulus griseus
  modified_base (534)..(534): a, c, t, g, unknown or other
gcagttctacagctgaagcagccgccactaaagcagaggacagctcttttctccagtggttcctgcttctcatccctgctactgcttttggcttggggacttggcaggtccagcgtcggaaatggaagctgaaactgattgcagaattagagtctcgagtcatggctgagcccatccctctgcctgcagacctaatggaactgaaaagtatggagtacaggccagtgaaggtcagggggcactttgaccactctaaagagctgtacattatgcctcggaccatggtggaccctgcccgagaggcccaagatgctggcagaatatcctcctcgatggaaagtggagcctatgtagttactcctttccattgctctgacttgggaatcaccatcctggttaacagagggtttgttccgaagaagaaagtgaatcctgagaccagacagaaaggccaggttctcggagaagtagacctagttggcatagtgaggctgacagaaaccaggaagccctttgttcctgagaacagcccanaacagaatcactggcattaccgggacctggaggctatggccaagataacaggcgcagaccccattttcattgatgcagacttccaaagtacaatccctggaggacccattggaggcaaacaagagtcactcttcgaacgagcacatgcagtacatcattacctggtatggactgtgtgcagccacatcgtacttatgg

SEQ ID NO: 7627 - DNA, 732 bp, Cricetulus griseus
acacacaaaaaaaaccaataccacggtcccttagttacagctgaactcctccaccttccaactcagtcaggctcatccatctcctgcttccctctcctcacccaacccacccccttccagtccctctcttgagcaaggtggttgggctgttgtggggacaggtgacccaagcaggctcctagttctggagagttgggcgagtgttataaccttttggcctctccatcagttcagctttcccccaaagcatggtttggtaccagtcttctcatttccttctagagcctgagaccaatgcttaagtttgggggacacagtcaccatccccctggtactgatgcttgctggattttcgggaaggcattttgctacccagtctcttttcactgccgtggggaatcagtcttttgttttcattgtttgatgttcccattcagtccaagaaggcttctaagtggatttaggacctgagaggaagaggggcctctgtgggtgctgggtactccagaggtgcccctggtggaagggtgggtcagtggtcctagcaggaagggagacccagcaaggccattcttgctgggttgagtcaaggagctagaacaagggaccaagtggctgtaaaagtctcaagccaatgatggggcttctccactgggctcctgtagtcctcaagtccctggcctccaccttaccaggtgccacttctcagaaggccactgcccaggcccccag

SEQ ID NO: 7628 - DNA, 732 bp, Cricetulus griseus
tccctgctcttagtctacatgggattggccacctgcctggacaccttacctcatggagagcaaaatcaagttcttgatatcttcctggatcccccgaaggcccagagtttcctagttggccacaggcggattccacgggctaaccattgggacctggagttgctgactcctgggaacctggaacgggagtgtcaggaggagaggtgctcctgggaggaggcccgggagtactttgaggacaacacattgacggaacgcttctgggaaagctatgcctacaatggcaaaggagggcgtggacgagtagacgtcgcaggcctggcagtaggactgacctctgggatcgtggtcatcgttttggctggcttgggagccttttggtatctgcattaccgacgacggcgccacctcagagtccgggagtcctgtcagcaagaggccgggctcatcacccccctgagtcccccgacgcccttgtctccacccttacctccaggcctccccacctacgagcaggcgctagcagcctctggggtgcatgatgccccaacgccccctcctcactgaagacctgctcaagagcgcgggctccccgaactgtgcccccgatgcacggcgggattccggaagtcgctgggcctcttcgactccccggcttcagtgtgtgcatgggggaggggtcgtcggacccgaggtctaccatgacacacgtgtttccgccgcgcacggata

SEQ ID NO: 7629 - DNA, 732 bp, Cricetulus griseus
agcggctgcaccgccgaccgcacgcacggccatggctggggcgctggtgcgcaaagcggcggactatgtccgcagcaaggacttccgggactatctcatgagcacgcacttctggggcccagttgccaactggggtctccccattgctgccatcaatgacatgaagaagtctccagagattatcagtgggcggatgaccttcgccctctgttgctattccttgacattcatgagatttgcctacaaggtacagcctcgaaactggcttctgtttgcgtgccatgtaacaaacgaagtagcccagctcattcagggaggacggcttatcaactatgagatgagtaagaaggcgtcttcgtagcagttcgaggaccagctcttgaaagggagtgcctcagccactgctgccaagccacagattacattagcataaatggtcttgccgaagggaaaacacggaatgctatccttaattaccatgccaacattatagaaaagccgagagtccctaaaccaactctctgctgccttaccaatgctaaaatttatttgtcttcatcaagagtagttcaaaatatgcaactaatttaataattttgaatgatggttttatcagtagtaatctgtagtaatgtgtatattatctattgggatttgtgtaataaaaatctaaggaacaaaattttataactataagcacttattcaaattcttgactttttctttaatgac

SEQ ID NO: 7630 - DNA, 732 bp, Cricetulus griseus
ggacaaagactgggccaggatggacgtgggggatccccagccgctgggcctttttccagagagtgagtttcggtgggcatggacaccttcatccaccgcatcgattccaccgaggtgatctaccagccgcgccgcaagcgcgccaagctcatcggcaagtacctgatggggggacctgctcggggagggctcgtacggcaaggtgaaggaggtgctggactccgagaccttgtgtcgcagggcggtcaagatcctcaagaagaaaaagctacgcaggatccccaatggcgaggccaacgtcaagaagttgacggcctggagtacctacacagccagggcattgtgcacaaggacatcagccggcaacctgctgctcaccaccaacggcacgctcaagatctccgacctgggtgttgccgaggccctgcaccctttcgctgtggatgacacctgccggacgagccagggctccccggccttccagccacccgagatcgccaacggactcgacaccttctcaggtttcaaggtggacatctggtcagctggggtcacactctacaacatcaccacaggcctgtatccattcgagggagacaatatctacaagctgtttgagaacatcgggagaggggacttcaccatcccttgtgactgcggcccaccactttctgacctgctccgagggatgttggagtacgagccagccaagaggttctccatccgacagat

SEQ ID NO: 7631 - DNA, 732 bp, Cricetulus griseus
tcctcgtcaccttttaattcttgttctaagaaacacttttcctatgatccatggaagctcctcattgcaactatatttctcaatcggacctcaggcaagatggccatccctgtgctttgggagtttctagagaagtacccttcagctgaggtggcccgaactgctggagggatgtctcagaacttcttaagcctcttggtctctatgatctccgtagcaaaaccattatcaagttttcagatgaatatctgacgaagcagtggaggtatccaattgaacttcatgggattggtaaatatggcaacgaccccataccggattttttgtgtcaatgagtggaagcaggtgcacctgaagaccacaagttaaataaataccatgactggctttgggaaaatcatgaaaaattaagtctgtcttaaaggtgccttgtttgaagtttgctatgcattgctttgtgcttccttttctaagatcctctgatggacagcgagctcccttcccaggcatgtagattttttcagtttgtgagaagtccatgtgtgtcctaagcctctgccaattacttaacttttttttttttttttggttttccaagacagggtttctttgtagctttggaacctgtgctggaactcattctgtagaccaggctggcctcaaactcaaagatctgcctgcctctgcctccccagtgctggagttaaaggcatgtgccaccactgcctggct

SEQ ID NO: 7632 - DNA, 732 bp, Cricetulus griseus
  modified_base (166)..(166): a, c, t, g, unknown or other
  modified_base (290)..(290): a, c, t, g, unknown or other
caaggagtttgtccagagtgtccccaccaagggcttcaacactgagaagatccgagtgcccttggggggatcccgtggaatcactttccaaggtgtgggatgttgggggtcaggagaagctgcggccactgtggcgctcctatacccgccggacagatggactggngtttgtagtggactctgcagagattgaaaggttagaggaggccaaggtggagctacaccgaatcagcaaggcctcagacaaccagggggtgccggtgctggtgctggccaacaagcaggaccanccgggggcagtgcagccgaggtggagaagaggctggcagtccgggagctggcagctgccaccctcacccatgtgcaagcctgcagtgctgtggacgggctgggcctgcagccaggactggagcgcctgtatgagatgattctcaagaggaagaaggcacctcgggcaagcaagaagagacggtgacccgaggctgccccctaccctacctacttggggtcagtacttaagatagtctggcagggcctgtgacctctcagccagcctgggtgctggacctgtccacctcaaaaggactgaaggagcctggggggtcctgtttcggtgccacatggggggaggggagatgaagtgtcttctcagctcttcacctctagagggtaggggctgcaagaccggagatgtaaatgcaaacgctgactctacctcgaccctggttctcc

SEQ ID NO: 7633 - DNA, 731 bp, Cricetulus griseus
  modified_base (126)..(126): a, c, t, g, unknown or other
agaataagttaagaatgaccacgccgaacaagactcctcctggtgctgatcccaagcagttagaaaggactgcgacagtaagggaatcgggtcccaagcagtttggcactgtcatcatgcaaaccnggttttggagtggatcaattacgagatgacaatctagaaacttactggcagtctgatggctctcagcctcatttagtgaacatccaattcagaagaaaaacaacagtgaagacattgtgtatttatgcggactataaatctgatgaaagctacactccaagcaaaatctcagtcagagtaggaaataattttcacaaccttcaagaaatccggcaacttgaattggtggaaccaagtggctggattcatgttcctttaactgacaatcataagaagccaactcgcacattcatgatacagattgctgttctagccaatcaccaaaatggaagagacacccacatgagacaaattaaaatatatacaccagttgaagagagctccattggaaaattccccagatgcacaaccatcgattttatgatgtatcgttcaatacggtgacttgaaaatggagagaagtgaatagacatttattttatcctgacattgagtattatgtcaattatctttagtggaaaagcatgtcgttttacagttttgtatatatttaaaacatttcaatttagataagtaacttttgggtgatgccttttttctttata

SEQ ID NO: 7634 - DNA, 731 bp, Cricetulus griseus
ggaccccgcagcatggctgtcaagaagatcgcgatcttcggcgccaccggcaggaccgggctcaccacgctggcgcaggcggtgcaagcaggttatgaggtgacagtgctggttcgagattcccgcaagctgccttcagaggggccccagccagcccgcgtggtggtgggagatgttcggcaggcggctgacgtggacaaggccgtggccgggcaggatgctgtcatcgtgctgctgggcactggcaacgatctcagtcccactacagtgatgtccgagggcacccggaacattgtgacagccatgaaggctcatggagtggacaaggtcgtggcctgcacctcggccttcctactctgggacccatccaaggtgcccccacgcctgcaggacgtgaccgatgaccacatccggatgcataaggtgcttcaggagtccggcctgaaatacgtggctgtgatgcccccacacataggggatcagccactaactggagcctacacagtgaccctggatggacgagggccctcaagagtcatatccaaacatgacttgggacacttcatgctccgttgccttaccaccaaccagtacgatggacacaacacctacccctcccaccagtatgagtaggaccctggccctggttgggagaatggcttcctgagaaatgactacacatagaaggatcaataaatctttagccaagagcttcaaattatttacaagaa

SEQ ID NO: 7635 - DNA, 731 bp, Cricetulus griseus
  modified_base (720)..(720): a, c, t, g, unknown or other
gtaccacggactatgtctcagctggcactcaggacattcttggaaccacagaaagccaggctcttggaacaccaccggagaagaaaaggaccattacttggacttggaggtgaatacagagtggtttggacaccacaccttcggaagcagtggctccattacctgctgttcagtgccttgcaaagcaaaggaatctattagatgctcagccacctcagctgggtttagacaatatggaaagtcttaattcctgtgcatctaataacttctggtatttggtttggaacattttactatgcagctataaaaggagtgaatgtcatccctttcctagagttcattggattacctgacagtgtagtagacattctgaaaaactcccaaaagtggaaatgccctgacagcatatgccatgtttaagattgcaacaacctgcccgctacacagtgaccttgggaggaacgtcctttactgtgaagtatttgagaagtcatggctacatgtcaaccccaccacctgtcaaggagtatttgcaggacagaatggaagagactaaggagctcatcacagagaaaatggaggagacgaaggatagacttactgaaaaattacaagaaaccaaagaaaaagtttcttttaagaaaaaagtagaataagggtgccttatttaactttttttttttggaagtaaaacaaaaaataacctcgaactaaaaaaanaaaaaaaaaaa

SEQ ID NO: 7636 - DNA, 731 bp, Cricetulus griseus
  modified_base (396)..(396): a, c, t, g, unknown or other
agagaaactggaaggaaaagacgtttttaaaaggacatttttcacaggaagaaaacaaaagatactaaaagtaagtgcacatttaaatggaaaaccatcaaacatgacaacagtggtatccacgcccacattcggatcccagggccccgagccgagccctcctaaagcagtcgggttccctctgagccccagtggttctgaaaccagggcattcttgacgggacctgtagcaaggtgctcatggggttggtgtcctcatccactcccggaggaatttttaaatcataggcttagggagctggctgagttactgccactcatctcttcaggagctcccacaatcacctcccactgccacccagcgctccttcagatcccagctcccagcctccccanatacatcccttccccctttggccagcaggaaatagcatgtctggccagattcactcttacccaccgactatccttgaatagcccttcagtttgcctgctgaaatagactctgggaggctctgggtctcagtcttctgttagtcctgcaggagggctgtatccgtgcccatcttattaagtcctttcttctgtgaatgtactgcccagccttgactgtgaaggtgctgagaaccagtcagtgaactcccaggtgggtctcctgggtccttacgatgccagcagacagcatcctaataaaaaaaaaaaaaaaaaaaaaaaaaaaaaaaaaaaaaaaa

SEQ ID NO: 7637 - DNA, 731 bp, Cricetulus griseus
cctgaatgaatctttgaacaatggtgacacttcggaaatgcagccagaggaccagtctgcaagtgaaattactcgggcatttgacaccttagctaaagcacttaataccacagatagtgcttcacctccaagtctggcagatggaatagatgctagtggaggagggagcatccatgttatcagcagagaccagtcaacacccatcattgaagttcgaaggccccctcctttcagacacacatgtcacatttaagcttacgatgcccagccctatgccagagtacctcaatgtacactacatctgtgagtctgcatcccgcctgcttttcctctccatgcattgggcaaggtcaatcccagccttccaggcacttggacaggactgcaataccagcctggtgcgggcctgctggaatgagctcttcactcttggcctggcccagtgcgcccaggtcatgagtctctccaccatcttggcagccattgtcaaccatctgcagaacagtatccaggaagataagctttctggtgaccggataaagcaagtcatggagcatatctggaagttgcaggagttctgtaacagcatggcgaaactggatatagacggctatgagtacgcataccttaaagctatagttctctttagccctgatcatccaggtttgacaggcacaagccagattgagaaatttcaggagaaggcacagatggaactacaggactatgtg

SEQ ID NO: 7638 - DNA, 730 bp, Cricetulus griseus
tgtgtgtttccaaaatggcggcagcgatggatgtggatacccccagcggcaccaacagcggcgcgggcaagaagcgctttgaagtgaaaaagtggaatgcagtagccctctgggcctgggatattgtggttgataactgtgccatctgcaggaaccacattatggatctttgcattgaatgtcaggccaaccaggcgtctgctacttccgaagagtgtactgttgcgtggggagtctgtaatcatgcttttcatttccactgcatctctcgatggctcaaaacaaggcaggtgtgtcccttggacaacagagagtgggaattccaaaagtatgggcactagaaatgactctccctaaagctcacccatttgttactcgtgtagtgacttgccttcctgttaattataaattagatagaaccgtggtttttttctttcctttgtttttggagtttgctgttcccacagccatattgtattttgtgtcaaataaagtcgtttaagttcgagaatggttgctgtcgtgtgtatatggaaagagaaggggcctcttcagtgccagaaacaacctcaaaaagtgtactgtcatcaccagaatggaggtgtcctgcagctgcatcatcacaaggtcacaggaacctgtaaaggctggaattgtgggtcacctgcacccggaaacaccaaggtctctgtcttccttctgagatagcactgggcagctgaatgaggaa

SEQ ID NO: 7639 - DNA, 730 bp, Cricetulus griseus
ctgctgtgcctggaaaccaatctaccggaaagtaacaggcaaggagctgaaatacgagggcatgacgggcaaacccagcatcctccacttaccagtacgctgaggacataatcagacagcaggctgagagatggggctggtccgcccccatcaggaagctctatgctataggtgataaccctgtgtctgatgtctatggtgccaacctattcaaccagtacctgcaaatgacaaagcgtggagagaaggagcatggggctggtggacagcagaagcagcggccttcaacaacccagagctgtgtctccatcctggtgtgtactggcatacacaattgtcagggcccaggccccaaagcgcctacttctggaagggcggagcttccgttccacgggtcacaggcatcaagtcccagcctggccccttgccactgcttcctgggatgaagaagaccacagcttcagtagctatagaatgatccttgggcagcatttcagaaggggggatggatttctggcccttcctgtgtgtctcttgaaatttgacctcatgttgcttcctttacctctgtgcctcagtgtcctcctctcagtaaggactttccccctcgaaaaacagggtctcactattgtagctctgactgtcctggaacttgctttgtagagcaggctgcccttgaactcacagacatctgccttcctctgcctcctgagtgctgggatcaaaggtg

SEQ ID NO: 7640 - DNA, 730 bp, Cricetulus griseus
tgtttggtgccattgtcttcatcctgtttgccaaaggggaggtgcagaattgggctctcagtgaccaccacggacacagaaactgaagacaatgacaaataataattaatgtattttatttatcatgtaaactgaaagtgcctttggtattttaatgtgtaaacattctatgtgagaaaaatagtacattttaaaggtaatcatgaaatgttactagatgcaagactatttaaaatgagctgtggcagctggactgagggatctgtgccagacagctgccaggaattccttccctggcttcagggctggagtgcccagcagttatcagaggtggcttccaagtgcagggctaatgccaagtgtttggctgacactctttccctgtggctgttaatgtgtagataaagccctaagtagaccagagcagtgggatccacagctactgtcttgacactgccagcctgcccttggcagcacccaggcctgattactggcaggtggcctacaaagcaaaagtgtgatgcccagtcaattgcagagaacatccttgattaaaatgacttgcacattaatcagtgtaaatttttacgttcagtttttctagctacatgggaattttttttaatgtttgaaatttttcttcagtatctctcaatttatgcttctggttacagtttaaagtgactttcagggccagggggtttggctcaatggtagagcacttacctag

SEQ ID NO: 7641 - DNA, 730 bp, Cricetulus griseus
cgggggcgccggggccagcggaggaggacggggaggacgaggacgaggacgaggaggacgaggaggcagcgggctcgtcggggccccgggaggacgctggaagccccagtgcccgttgtggtgagcagcgtcgacgcggacacggcccgcccgctgcgggggctgctcaagtctccacgcgcggccgacgaacccgaggacagcgagctggagaggaagcgcaagatggtctccttccacggggacgtgaccgtctacctcttcgaccaggagactccaaccaacgagttgagcgtccagggccaccccggaggggacacggacccatcaaccaccccagcgccccgacgcctccccaccccaggagatgggtttcccaacaacgacagcggctttggcggcagtttcgagtgggcggaggatttccccctcctccccccgcccgggcccccctgtgcttctcccgcttctccgtctcacctgcgctggagaccccgggggcctcccacccgggctcccgacgcccggcccgcaggccccgtggagaactgactccccaaagacccagtccctttgcaccccaagaagagggtttgcgagcagaatcttgtgtggacgatggagccattgcccctgacactgacacagcctctggggaggcacccgaggctgggccctccctctcctccaccatgtgaaaagacaaaaacaaaaaaaaaaaaaaaaaaaa

SEQ ID NO: 7642 - DNA, 729 bp, Cricetulus griseus
gacgccgctgtcccctgtcgcctcttcctgcagccatggtcaaccccaccgtgttcttcgacatctcggccgacggcgagcccttgggccgcgtctccttcgagctatttgcagacaaagttccaaagacagcagaaaactttcgagctctgagcactggagagaaaggatttggatataagggttcctcctttcacagaattatcccaggattcatgtgccagggtggtgacttcacacgccataatggcactggcggcaggtccatctacggagagaaatttgaggatgagaacttcatcctgaagcatacaggtcctggcatcttgtccatggcaaatgctggaccaaacacaaatggttcccagttttttatctgcaccgccaagactgagtggctggatggcaaacatgtggtctttgggaaggtgaaagaaggcatgaacattgtggaagccatggagcgtttcgggtccaggaatggcaaaaccagcaagaagatcaccatttccgactgtgggcaactctaattcttttgacttgcgggcttcttacctaccagaccattccttgtgtagctcaggagagcattcccaccccatctgctcgaatgccctgtaatctctgctctcactgaaattctttgggttccatattttcctcattcccctccaagtctagctggatggcagagttaagtttatgattgtgaaataaaaactaagtaag

SEQ ID NO: 7643 - DNA, 729 bp, Cricetulus griseus
gcagcgggggaagatggcggcggctgttccccagcgtgcatggaccgtggagcagttgcgcagcgagcagctgcccaagaaggacattatcaagtttctgcaggatcacggttcagattcgtttcttgcagagcataagctattgggaaacattaaaaatgtagctaagactgctaataaggaccatttggttacagcctacaaccatctttttgaaactaagcgtttcaagggtactgaaactgtaagtaaagtgtctgaacaagtgaaaaatgtgaaacttaatgacgataaacccaaagaaaccaaatctgaagagactcttgatgagggtccacctaaatatacaaaatctattctaaaaaagggagataaaacaaactttcccaaaaagggagacattgttcactgctggtatacagggacactcccggatggaactgtttttgatactaatattcaaacaagttcaaagaagaagaaaaatgccaagcctttaagcttcaaggtcggagtaggcaaggttatcagaggatgggatgaagcgctcctgactatgagtaaaggagaaaaggctcgactggagattgaaccagaatgggcctatggaaagaaaggacagcctgatgccaaaattccaccaaataccaaactcatttttgaagtggaattagtagatattgactgaaaccagtgcatcagctctgaagacatcaacaacaataaaaa

SEQ ID NO: 7644 - DNA, 729 bp, Cricetulus griseus
cttgctgctggagtcctcctggtctcttgtctgctctgtgtcatctactgctgctgccatcgctgccagcgccgcaggaagaagcccaaagacaaagaagctgtgggtctgagcagtgctcatagcagcaccactactcacctggttcaaccagatgtggactgcctggagccctgctctgggggactccaacagtgggggcgactgctgctctcactggagtatgactttggaagccaggagattagggtgggcctgaggcaggctgaaaacctgaaggctgaaggtacagcagacccctacgcccgcatcagtgtttccacccaggctgggagaagacatgaaggtccagctcatgttaaaccagagaaatggaagaagaggaaaacatcctctaagaagggcacaactatgccctacttcaacgaggccttcactttcctggttccctttagccagctccagagtgtggacctggtgctggctgtctgggcccatggcctgcatcaccgggctgagcctataggcaaggttttgctgggtcccagggcttcaggacaacctctacagcactgggcagatatgttggcccatgccagacggcctatcgcccagtggcaccacctgcagtcccccagggaggtggaccgtgctctggccctgaagcctcacctgcccctacctaggcctcactccaaagactgtaggcttcagtttccccaaatggag

SEQ ID NO: 7645 - DNA, 728 bp, Cricetulus griseus
caggaagtggcgctggggctctggtcatcagctacctttcaacctctgtggtcacctcacgaccctaataagaggcaagcagctccacttgaaacacaaggccaccacaaaggtggggagaagggagggagaatccactgcacatgtgctccctagcgtggcctgtgctaggtctatagcaaggtcagaggcctttgagcatgctgtacaccagcagcagcttaccataagcatatgtctgcaaaatctgtaacacaagagcccagtgcacagtccagatatgttggtagtgctgcaacttcctcagtagcctcagatgggtgaagttggttcccatgtgatgttagccattggaatgtgctgaccttgtgacctctacagcctgcaatagagtaaaaagatggctgtccactggccctacttgttgtaataactcagatatctctagagtacctgagccacagtatctccatctttgaagatttgccgacagactctcaggtgaccacacccatctcaagaaccaaaaaggactttcagcatgaaattcctcttttttccggtaatgttttgtttgttttccaagacaaaaggtttctctgtataacagttctggctgtccaggaactcactttgtagaccaggctggactcaaactcagagatccacctgcctctgcctccggagtgctgggattaaaggcatgcaccaccaaagcctggctaaaa

SEQ ID NO: 7646 - DNA, 728 bp, Cricetulus griseus
ttcagttctgtgaagagtaaagaatttagctcaagtgatgaaaatgaagaaatgaatctatgcaaaggcttgctgactctgtaccctactggttacgaccctctccagttctctgagaatgagtctgggaaactacaagtgttggtaaagctcctggcagcaattcacgaacttcgtcccaccgaaaaagtggttttggtctccaactatagacaaaccttgaatattttagaaggcatatgcaagcgccatggatatgcttgtgccagacttgatggccagacaccagtctctcaaaggcagcaaatagtggataatttcaatagcaaatactcgactgtatttttatttttttatttaagtttcaaaagctggtggtgtgggacttaatcttattggaggatctcacctaattctctatgatattgactggaatccagctactgacatccaggctatgtctagagtttggagagatggtcagaaacaccctgtgcatatttacagactcctgactacaggtaccatagaggagaagatctaccaaaggcagatcagtaagcaaggcctttccggggcagttgtagacctcaccaagtcatctgaacatatccagttttcagtggaggagcttaaagacttgttcacgttgcacgaaaattcacagtgtgtgacccatgacctgctcgactgtgagtgcacaggaggaaaaggtcacactgatgatg

SEQ ID NO: 7647 - DNA, 728 bp, Cricetulus griseus
tttccgctcggccgttctcctgtaccggaggcagccatggcgcccagccggaatggcatgatcctgaagccccacttccacaaggattggcagcggcgagtggacacttggttcaaccagccggcacgcaagatccgcagacgcaaggcccggcaggcgaaagcgcgccgcatcgcccctcgccccgcgtccggtcccatcaggccgatagtgaggtgccctacagtgagataccacaccaaggtccgagctggcaggggcttcagcctggaagaactcagggtggctggtatccataagaaagtggctcgaaccatcggcatctctgtggacccaaggagacgaaacaaatccactgaatcactacaggccaatgtgcagcgcctgaaggagtaccgctccaagctcatacttttccccaggaagccttctgctcccaagaagggagacagttctgctgaagaactgaaactggccacccagctaacgggacctgtgatgcgcatacggaatgtctacaaaaaggagaaagccagagttatcacagaagaagagaagaacttcaaggcttttgccagtcttcgtatggcccgggccaatgcccggctctttggcatccgagcaaaaagggcaaaggaagctgcagagcaagatgttgaaaagaaaaagtgatgtgctattggagtactgcaataaaactttgcataaagcaaaaaaaaaaaaaaaaa

SEQ ID NO: 7648 - DNA, 728 bp, Cricetulus griseus
  modified_base (300)..(300): a, c, t, g, unknown or other
ctagtagaacaggaaggctgagaaattaattataaacacctgggctggggtgcagccttctagctgccttaactctgctcctgagtgggctgcaacctccctccgtgactgtccacttcccataattgaaaggtggtgccattgcattcttagcgatgtagaaagcttgaaaataattatattatgcttctagtccagcatctaaaacaaatcattaagactaatttccagctaattgttcattacaattatgctcagaagtctgtttagttgaaggcaagcctggtctacagagaaggngccggcacacagcttctcacttagcaaaatgttacacttccaatctgtctgtgccttccaaaccctaaaacagcaaggtttgcacagctcccctccccaaagcctacttcaggagaattaaatgaatcaagattttgcaaagatgagaaatggccagaacttggcagtacttggaataggaatacaacagcccgaatgtacagactgtaaccgagcccactcaacgggtctgtgccttcgcgtgatcatcatctgtggctcccaagctctgtccaaagtggtgtaggcagcaccttggagccatgcctaaaccatagctactcccaagccctagaaactgtagtcaagtagcaggcctcgtgtgtctccttccttagattgagggcttaaatgttcccttctgagcgccttgcagtgtgttcccacag

SEQ ID NO: 7649 - DNA, 727 bp, Cricetulus griseus
ctgactgcagtctccaaggctggaacagaaatcatgcccgtgactctgggctattgggatatccgtggactgggccacgccatccgcctgctcctggaatacacagagacaagctatgaagagaagagatacgccatgggggacgctcccgattatgaccgaagccagtggctgaatgacaaattcaagctgggcctggacttccccaatctgccctacttaattgatgggccatacaaggtcacccagagcaacgccattctgcgctaccttggccgcaagcacaacctatgtggggagacagaagaggagagggttcgtgtggacattttggagaagcaggttatggacacccgcattcagatgggcacactctgctacagccctgactttgagaaacggaagccagagttcttgaagggcctcccagatcacttgaagctctactccgagttcctggggacatcgccatggtttgcaggggacaagatcacttttgcagatttcctcgtctatgatgtccttgatcagcatcaaatgtttgagcccaagtgcctggatgccttcccgaacctgagggactttgtggcccgctttgagggcctgaagaagatctctgcctacatgaagactaaccgcttcctcccaagccctttgtacttaaaacaggccacgtggggtaacaagtaggaccttgcagctagcttccagtaacttctctgcatca

SEQ ID NO: 7650 - DNA, 725 bp, Cricetulus griseus
cccggctctcccgggtccccttggagttcccgcggcgccgcgctgcagactcgggagtcgggagcagcccgggccgtggatgcgggcggcctcgcaggcccatggctgtcatcaccggctaggctggctgggaaccccgccttgcagtcgcctcgccaccagtgctgagaatcaaacccaagacttgagcatgctaggcaagcactcttgattattgttttatactgggccctactattctttagagatgtgcctttctcagcaatgtactggtataactatgaaattttaaagaagtggttgtgtgagaaatctggtttatatgaaccgacatttatgatcaactttacttcaggggcattgtctggtcttttgcagctgttgcaactttaccatttgatgtggtgaaaacacagaaacagacacaactttggactcacgaaagtagaaaatctcctgtgcctttccatttgtcaacctgggctataatgaagaacattgtttctgaaagtggattttccgggttgtttacaggtctgattcctcgattaattaaaattgctcctgcttgtgccattatgatcagcacatatgaatttggaaaggctttttccagaaacaaaatgttgaaaggcagtataattctctagatggacttttgactagaaatgtcaaccagagccaagtaagatgtaaaatattaatatataaaaaaaaaaaaaaaa

SEQ ID NO: 7651 - DNA, 725 bp, Cricetulus griseus
cgagtgtcgttcggccaaccctgcctcagcctgaaagcggccggctccccgcgtcgcagcgtctgcgtggttgtttcctggactctgtgagccagcagtgtctggagctgcattgcttgtaccatggactctcaggtcagcaacggctcgggcctggatactgagcacatcacaaacctgctggtgtttggcttcctccaaaactctaagtatcatttccaccgagagctggaggtactgggtcaggaactgcccgtgccagtttacctggatgcggacgaggacgagctgcagaccgacggcagccgggccagccgttcctaccatggaagaatacagccagattctgaaagccaggaagatgtcatccaaagaattgcccatcatctcgctcaagtaggcgatgagttaaaccacagcatccagcccacactggtgagacagctggcggcccagttcatgaacgtcagcctgtcggaggaagacagacggaactgcctggccaaagcccttgatgaggtgaagacggccttccctagagacatggagaatgaaaaggccatgctgataatgaccttgctgctggccaaaagcgtggccagtcatgagccgtccttgctccgtgatgtcttccgaacgacagtgaactttattaaccagaatttattcacctctgtgaggaacttacttaggaatgggatggactgaaggaggcctgcagaagc

SEQ ID NO: 7652 - DNA, 725 bp, Cricetulus griseus
cctacacaccaaagatggaggtgctgctaggagtgaaaattggctgcctgtttgcccttctggctctcacactgggctgtggccttgctcccatctacttcaaatggttccagatggatgcagctacaggtcatcactacagagttctcagcctcctgggctgcgtctctgccggtgtctttctgggagcagggttgatgcatatgactgctgaagccctgggggaattgaatcagaaattcagaaattcatggtgcagaatagtactgttcgaaggtctagccgtgggactgcagacaacagtggcggctactatacagctctgtgttgctgttctggctcataaggggcttgtggcattcagtgtaggcctgcggctgctgaagactggcgctgggtcacggtgggccacactctgcatactgtcattagcactcatgtcccctgtgggcctagccctaggactgactgtggccggaggggcctcgggaccagcgcagggattagcccaggctatattagagggaatatcagctggcacgttcctatatgtcaccttcctagaaattctgcccccgggagctggcttgtcctgaggcccctctggccaagtatggctgtgtggctgctggtttgccttcatggctcttattgccttgtggcctgagagattcctcactgcactgacggacctatctaggatgacttctcctgaggacactccc

SEQ ID NO: 7653 - DNA, 724 bp, Cricetulus griseus
gcggcgcggcgatggaaccggctgagctgcagaaccagctagtgtcagccgagggccggaaccggaaggcggtgttgtgccagcgttgcggctctcgggtgctgcagccagggacagctcttttctctcgccgacagcttttccttccctccatgaggaagaagccagctctggctgatggcggcaatcctgacggtgatctcctccaggaacactggctggttaatgacatgttcatctttgagaatgtgggcttcaccaaggatgtgggcaacatcaagtttctggtctgtgcagactgtgagattggacccattggctggcattgcctagacgacaagaacagtttctatgtggccttggaaagagtttcccatgagtaactgaggggactcagctgtaaaactatacagctctcccccctccccccagaactgacagtgaacctgtggtgactgctgtgctggcagtcttctcggtactaatacaaatgataagcaccgatgtttgcccttgaacttgcagagggccgtcctgcttccttcaagcctcagtgcatgcctcccacttagtcctctatgcatcacaactgtcctaacccccacctccccgttttggaacatggaagaacatgggggtactctacaaagtgtagtctggtccttggcactcaataaacaatttctacagattaaaaaaaaaaaaaaaaaaaaaaaaaaaaaaa

SEQ ID NO: 7654 - DNA, 724 bp, Cricetulus griseus
gtgccttgaccttcaactccaacaacatgactgtgtccttcacctcagggctttccccgaagcagcaccaggacacgtcttcactgaaggaatgtgaccaaggaactctcagtgtgtccttgaacatggggagtccagaaactggaccttccaggtgctttccagacccagactctccctgccagcttaggccaggggactctgcagatggcaccagagacataagccaacctgcttcagtccccaggggctgccagagaagcttcaggcattcagaggtggtcggttactctgtaccagggcgaaacgaacaaggtaatgactccataaaaggaagtgcaagagcctatcagactgtagaagacagaaacagagggctcgggagcggtgagacagaaggcaaccaggtctattttgccgtctacaccttcaaggcacgaaacccaaagtagaacgtgagtgtagtcagccaatcagagactcaggatccttgactttaaagatgtcacaggcaatacagagtggtggttggctgaagttaatgggaggaagggctatgtcccttccaattatatccggaagactgagtacacctgagccaggttgcccccaccctccccttgccgctactttcagtctgctgaagggctctggtgggctccaagcgcccactgctgagcacaggccccaccacactgcttatccatatcgtggagtgcaagat

SEQ ID NO: 7655 - DNA, 724 bp, Cricetulus griseus
  modified_base (21)..(21): a, c, t, g, unknown or other
ggcgtcggcgatgacagaccncaatcctcgcgcgggcccgaagggccgtctggcacctacacctacaccacgcaggcccggccgtgccttgccagcgccgccgctaccgggacagcctgttgcagccagttgacgaatctatgacctatggaaacataatgtatgacagaagggtgatccgaggcaacacctatgcactacccgcaggacaggtgcccggacagcctgatcctctggagcttcagcgacagcagcaagccaggaggaagtctcttgccaggaaacgagcccaggcgcagctcaggcctcggacacccgagcctgtggagggcagaaagcatgtggatgtacagacagaattataccttgaagaaattgctgaccgaatagttgaagttgacatggaatgccagaacagatgcatttctggacagaccaccaacaccactcttcattcctgccaaaactggcaaagatgtggccactcagatactaataggagagctctttgactttgaccttgaagtcaaaccatgttacaagttctggtggggaagacgattgaacaggcccttctggaagtgatggaagaggaggagctagccaacctgcgggccaatcaatatgcatatgaagaaatacgcaatgttgaactggctgaagtgcagagactggaagagcaagagagaaggcacgagaagaaaggaacggacgtaagaaacag

SEQ ID NO: 7656 - DNA, 724 bp, Cricetulus griseus
tagcctctgcttcacgagacagaactgtttaggctctgggttcctgataggaaagggaagtcctctgaatttaaagcacacacggctccagttcgaagtgtggacttttcagtggccaacttctggctacggcttctgaagacaaatcaattaaaatatggaacatgtaccgccagcgcttcctctactccctgtaccgacacacacactgggtacgctgtgccaaattctcgcccgatggaagattaatcgtgtcatgcagcgaggataaaactattaaaatttgggatactgcaagtaagcagtgtgttaataacttctcagattctgtaggatttgacaaattttgtggactttagccctaatggtacatgcatagcttcagcaggttctgatcacactgtgaaaatctgggatataagagtgaacaaattactccagcactatcaagttaacagctgcggtgtgaactgtttatcattccatcctttgggtaacagcatggtcacagcctcttctgatggaacacttaggattctggatctcctagaaggaagactcatatacacactccaaggacatacgggtcctgtctttgctgttacattttcaaaggacggagaactgttcgcatcaggaggtgcagatgctcaggtcttgttatggagtcacagagattatgtttgtgtgatttcagtgtgctaaaaagccaaaatgatgaaaa

SEQ ID NO: 7657 - DNA, 724 bp, Cricetulus griseus
aggcggtgtgtctctggggccaggagccaggggagaggcgcagaagcactggagtgactgtctccatcagccagacacagccctggagcgctggcacaccctgaccagcgagctgcccccagcagcaggggctttccctttggcctaagcagacagcagctgcccagcacaggccctttgggccgggtccagtacccaaccttcgcacgagtgtgttgcacgtttacacggggtgggatgccccctgccccacactacctgtcttattttttgtgagtctctgtgaatgtgggtttgtcttcttgtgagggactgtggagagctatattcacatatgcaaactttttcctgcctgacctgctgttacctgcaaatatgcaaccaccccatgcacagggccatgtgggagtctcccgccagtgcccctaccccaccctgctactcctctcttggcctctccaggctgcccggcccctgctgcacagggaggaggtcggattggggagattagaggagggcatttccaaaagaggaaaggacaaataaagaaagagccaaccctttaatacagagccttcatgaaaaagtcccagctctgctcagctgctcttctaaagggacggcctccacggggtctctgcctcctaagatggggaagatcctcttggccacgtcatttaaatcactgtcccctggatggggctgggatgtgagggcagggccc

SEQ ID NO: 7658 - DNA, 724 bp, Cricetulus griseus
ttccttttcactatcctagagaccagacacctaccactccatttctggctgtccccaccctgatggaccactatggagaccgtcttccccactgaatgtcctcagggtgacccagcattaatttctccaggacactccatgggatcaagctgcccctttcccaaggtgcacctccgagctcttctcagctgtctaagccccgccccagacagcttggatctcacaactgttgccatggagaccaaaactctggtgtccagggtaacaatacctgtccctccaaggctgtccctccagggtcttgtcctgtccagctgtcgccatagagaccatcagtgtctccttgacaactgacctgcagctctcaggaacttcttgccatgggcagagtccctctgagtggagttgcctactgtgttcctcaggagcctgatgaatgtcccttcttcagatgggcccaaacagggctctgcttctggagcagctgtctgccatcattcatttgcacgctaactctatgtcaggcagcagctgagcacaagccaccactgcaacactgtccaacattttaaaattatcacaccgcaggtgggaaactgaggctgtggcactgcacacggccatagcttttcttccttggagatcaaggagggtggactgtccctgaaaccaccaattcaaacagtttctgagggcccatgtctgctcaagggtcaggaccagc

SEQ ID NO: 7659 - DNA, 724 bp, Cricetulus griseus
gagaggtataatgacacagtgcaagaccttagagatgttactgctcaattggaaagctataaagcatcaacacttaaagaaatagaagatcttaagctggagaacttgactctacaagaaaaagtaaccatggctgaaaaaagcgtagaagatgttcaacaccagatactgacaactgagaccacaaatcaagaatatacaaggatgcttctagatctgcagaacagatcaaacattagaaagaagaagaaaattaaagaaatcacatctacgtccacttaagaaaatagctgatttgcaaaatcaactcagacaacaggatgaggactttaagaaacaactcgaagaggaagaagcaagaaagcagagaaagaagatgcagtggcagagttaactttggaaagtaataaaaactggatgcattgaagcagagaagcaggcattgttgaatgaacgtggtgcaactcaggaacagctaataaattagagattcttatgcagaactactgggtcaccagaatctaaagcaaaaaatcaagcatgttgtgaaactgaaagatgaaaatagccaactgaaatcggaggtgtcaaaactccgatctcagcttgttaaaaggaaacaaaatgagctcagacttcagggagaattgaataaagctctcggcatcaaacacttcgacccttccaaggcttttcatcatgaatctctgtcataggcagggtt

SEQ ID NO: 7660 - DNA, 724 bp, Cricetulus griseus
ttgtggggacaggtgacccaagcaggctcctagttctggagagttgggcgagtgttataaccttttggcctctccatcagttcagctttcccccaaagcattggacaaaacagctcattaacggggtcttgcaaggggctctgtatgtacccagggtactggcccaacccccaattctagccatagacaaactccaggccagacccctccaccctggttcagcctgggcagcttgggctgagccaccaggaccaatagatttaagctggcatttcagtccaagaaggcttctaagtggatttaggacctgagaggaagaggggcctctgtgggtgcgtgggtactccgagaggtgcccctggtggaagggtgggtcaggtggtcctagcaggaagggagaccagcaaggtaaagtctcaagccaatgatggggcttctccactgggctcctgtagtcctcaagtccctggcctccaccttaccaggtgccacttctcagaaggccactgcccaggcccccaggccgccccttcgtggccagagactggttaaagccccccagtgcctccttgtgcatagaacttcctctgaaaataaaataatggtttcttctgaataaaaaaaaaaaaaaaaaaaaaaaaaaaaaaaaaaaaaaaaaaaaaaaaaaaaaaaaaaaaaaaaaaaaaaaaaaaaaaaaaaaaaaaaaaaaaaaaaaaaaaaaaaa

SEQ ID NO: 7661 - DNA, 723 bp, Cricetulus griseus
gtgtgcacagagcgaccaggggctgagcgcccatccttgttgccaaatggcaaagaaaacagctccggaacctcacgggtgcccccagcctccccctccagtcacagcctggctcccccatcgggagagcggagccgcctggcgcggggctccaccatccgcagcaccttccacgggggccaggtccgagaccggagggcagggggcgggagcggcgggggtgtgcagaatggacccccggcctcacccacgctggcccacgaggcctcacccctgccctccgggcggcctcgccccaccaccaacctcttcaccaagctgacctccaaactgacccgcagggtcgcagacgaacctgagagaatcgggggacctgaggtcacaagttgccatctaccttgggataaagcggaaaccgccccccggctgctccgattcccctggagtgtgaagctgaccagctctcgtcctcccgaggccctgatggctgccctgcgacaagccaccgcagctgcccgctgccggtgccgtcagccgcagccgttcctgctggcctgcctgcacgggggtgcgggcgggcccgagcccctgtcccatttcgaagtagaggtgtgccagctgccccggcccggcctcaggggcgtcctcttccgccgagtggcaggcaccgccctggccttccgcaccctcgtcacccgcatctccaacgacctcgaactctga

SEQ ID NO: 7662 - DNA, 723 bp, Cricetulus griseus
taaaaaagaaacaaagaaatgtctttgtaatcaattgtttacagcctctgaaggtaaaatgtatgtgtcaactgcactctaaggagaagtccatgccaaactgactgtttcaacaaatactgaaggtcagtgcctataccagacagtggcctctgtcactgccactctgtgagacagggtatcaacattgacaagaggttgcttcttccattaccagctgacactgctgaggagaactccattgtgaaagtgaccattataacaccaccaaacaccattagtacaacgtatatctctgccatcatcttctcacacagaaatagttggaaggctatcactaatgcatgttataatgcctaagctgctcattttaattcaatccatttatcacaagttttggttaagaagagtcacgtgttggtgatagaaatgaattcaatctgctctctgtctacctgtcaagaaaatctcattgatattattttaaaacacctttatttttgcattgttaaatcaacttgagtatcacaatgtgtctttattaatttaaaggagacacagtgtatagggcctaccactaaaacttatacttcatagtttgctttaaaaaatgtccaaaatttgtttaaatataaataatgtaaaatataatcagttttctttgtcagcatttgtacataagaaaattattttcaggttgatgacatgacaatttattttacc

SEQ ID NO: 7663 - DNA, 723 bp, Cricetulus griseus
tgggcgggccttgaatttcactgagatcctgggactgcgaaatggaggggtgtgtgtctaacctaatggtctgcaacctggcctacaccgggaaactggatgagttgaaggaaagcattttggccgatagaactctggctactagaaccgatcaggacaacagaacagcattgcactgggcatgctcagctggtcatacagaaatagttgaattcttgctgcaacttggagtgccagtgaatgataaagatgatgcaggctggtctcctcttcatattgctgcttctgctggccgggatgagattgtaaaagcccttctggtaaaaggtgcgcaagtgaatgctgtcaaccaaaatggctgcacacctctccattatgcagcttcaaaaaataggcatgagattgctgtcatgttactagaaggtggggcaaacccagatgcgaaggaccattatgaggctacagcaatgcaccgggcagcagccaagggtaacttgaagatggttcatatccttctgttctacaaagcatccacaaacatccaagacactgagggtaacactcctctacacttagcctgtgatgaggagagagtggaagaagcaaagttactggtgacccaaggagcaagtatctacattgagaataaagaagaaaagacacccctgcaagtggccaaaggtggcctaggtttaatacttaagagaattgtagaaagttaag

SEQ ID NO: 7664 - DNA, 723 bp, Cricetulus griseus
gggatcacacagactcaggtcaagatatggttccagaacaaacgctccaagttcaagaagctgatgaagcaaggcggttcttccgggccctgcttgaccacctgtgtagcttgtttgggaaatggggaaaatcagaggagggggttaatttattgaaaaacagactttatctgatgctgagtgttggccaattccaggttctctggggcatggagtgggcactgtccaaacatactatttacctttaatacaccagaaaagagaacaaggaggggatagtggtttttaaggtacacccttgtaacttttgtgctttgctggaatggagcaatggaagcagaatgatttgcattttacatgtcccaaattattaactaataacaaacaaacaggggctcgaccacagaacccaagtcatcaccctgaacgcacagtctctggtgcagaatctaattgctgtacatattattattattattattattattattaattattattattattgttctgtaaacatgttgcacaagcttagcctcgttctgttctgttgtgtgtggctgtaaacccgatgctttgtgaaatgagaatcttgactattttacttgtgaaatttggaaaatgtgaccaactgaaatcaaacgttgttttgtgttctctatgtctaaagttttagttttatattgagaatgttaacttattgtctttgtatcgttggggggg

SEQ ID NO: 7665 - DNA, 722 bp, Cricetulus griseus
cttccctccggctcctggtctgggccgccaacatgggcaccacctggaggagcccgggacgcaggcgcctggcactctgcctcgctggcttagcgctctcgctgtacgcgctgcacgtgaaggcggcgcgcgccccgagaccgaggattaccgcgctctcggtggggcaagggctttgggctggtggaacatgtgctaggatctgacagcgtcctcaaccaatccaacagcatatttgggtgcatcttctacaccatacagctgttgttaggttgcttgaggggacgctgggcctctctcctactggtactgagttcccctggtgtccttcgccggttctgtctacctggcctggatcctgttctttgtgctctatgacttctgcattgtctgcattaccacctatgccatcaatgtgggcttgatgttgcttaatttccaggaggtgccagaacacaaggccaaaaggcccctgaggtccctcctcatgctaagctaatgtaacctgctttgcctttggcacatgagccttgcccaagagggtcatgtgtgggtccctagaaggccctgttcccttccattccagtccccctccataaccacacacaggacaatgaccagatgtgcctctaagtgctgttcccaagggctgctttctgctcttggctaaagagaatggttttaaacaataaattttctaagttggtcgaaaaaaaaaaaaa

SEQ ID NO: 7666 - DNA, 722 bp, Cricetulus griseus
tggggttcgactccggcggggccgcggaagctgacggaggtcatggcgatgtttgagcagatgagagcgaacgtgggcaagttgctcaagggtatcgacaggtacaatcctgagaacctggcgacgctggagcggtatgtggaaacccaagccaaggagaatgcttatgatctggaggccaacctagctgtcctgaaattgtaccagttcaacccagccttctttcagaccacggttactgcccagattctgctgaaagcgctcaccaacctgccccacactgacttcactctgtgcaaatgtatgatcgaccaggcacatcaagaagagcggcccatccgacagatcttgtacctcggggacctgctggagacctgccactttcaagctttctggcaagccctggatgaaaacatggacctcttggaaggcataactggctttgaagattctgtccgaaaatttatctgccatgtggtgggcatcacgtaccagcacatcgaccgctggctgcttgctgagatgcttggtgatctgactgacaaccagctcaaggtgtggatgagcaagtatggctggagcgctgacgagtcagggcagattttcatctgcagccaggaagagagcataaagcccaaaaacatcgtggagaagatcgactttgacagtgtgtccagcatcatggcctcctcccaataactgctgcgtgcctttaataaaga

SEQ ID NO: 7667 - DNA, 722 bp, Cricetulus griseus
gctggaggagcacagcaggatcaaagtgggcgatcctgcagaggactttgggaccttcttctctgcagtgattgatgccaaggccttctgccgcatcaagaagtggctggagcatgcgaagtcctcgtccagcctcagtgtcctggcagggggccagtgcaatgagtcagtgggatactacgtggagccatgcatcattgagaccaaggacccacaggagcccatcatgaaggaggagatcttcggtcctgtgctgacagtgtatgtgtacccggatgacaagtacagagagacactgcagctggtggacagcaccaccagctatggcctcacaggggcagtgttcgctcaggataaggcaattgtccaggaggccacaaggatgctgaggaacgctgctggcaacttctacatcaacgataagtctactgggtccgtggtgggccagcagccctttgggggtgcccgggcctctggaaccaatgacaaaccaggaggccctcactacatcctgcgctggacatcgccccaggtcatcaaggaaactcaccagcccctgggggactggcgttactcctacatgcagtgagctctgcccagcacctgtgccacccacctgtctatccagccagatgactgacatctctgcactgatcctggcttcccaccagctcctcccggactccttatagcttgagcttgaccctgacctggccattggg

SEQ ID NO: 7668 - DNA, 721 bp, Cricetulus griseus
gtggtcattggctacttcgtgatgttggctgtaatgtcctacaacacctggattttcctcggtgtggtcttgggctcggctgtgggctactacctagcctacccacttctcaacatgacttagtgggccagaaatgtgtaggtgcttagggctggagagagctggggcctctgctccaggttatacttcagctgcttccagtttcgtatgatggccattgctcacctctttcccagttcctggcagctttgagctgaagccagcaaattgtccctggagcttagaggacactggagctacctcccttcccagccttgttcatcacagagaacagcatttcgtaacagagctggctgccccttatttcttacttgctgctaactcctaatgacctgatagggagccatgagtcagtcactgaagtactgattcagcaggggtgtgttgggagggaggtgactgagggtgcaataagcagtcagaccaaagccaggtcatgttaacagttaactggactcctggtatttgagtcctttttgtttacagataaaagttattagacaggaatggggacacatacctgtaatccccagtacccaggagactgagcctggagagttgggtttgagggcagcctgggctacatatggagttccaggctagcctgggatgcacagtgaaacacacacacacacacacacacacacacacacacacacaa

SEQ ID NO: 7669 - DNA, 721 bp, Cricetulus griseus
ttactgaagaataagagcctggttgacaccattaagtgtctgattcagatgggagccgcagtagaggcaaaggatcgtaaaagtggccgcacagccctgcatttggcagcagaagaagccaatctggaactcatccgcctctttttggagttgcccagttgcctgtcttttgtgaacgcaaaggcttacaatggaaacactgccctccatgttgctgccagcctccaatatcgggtgacacagttggatgcagtccgactgttgatgaggaagggagcagacccgagcactcggaacttggagaatgagcagccagtacatttggttcctgatggccctgtgggagaacagatccgacgtatcctgaaggggaagtccattcagcagcgagcaccaccgtactagctcccttggcttggagcctggccagcaacactcactgtcagttaggcagtcctgatgtatctgtacatagaccatttgccctgtattggcaaatgtaagttgtttctatgaaacaagcacatttagttcactattatatagtggattatattaaaagaaaagaagaaaaatatttaattttcttggcagatttgcatatttcatacccaggtatctgggatctatacatctgaattttgatctgaatggtaaaattgccttcaataaacagtaggcttggggtaggaaaaaaaagactcatgggaaaagacttgat

SEQ ID NO: 7670 - DNA, 721 bp, Cricetulus griseus
aaaagttctgctgagatacacagccagatccaagtatttgaaaaacagtatcgtggccgggagctgccagggtttgcgaactataagacatttgagaacattatcaaaaagcaaataaaagtcctagaagagcctgccgtggtcatgctacacgaggtcactgacatggtccgaatcgccttcacaggggtttcgttaaacaatttcggtgaaactttttaacctccacagtgctgccaagtccaaaaattgaagacatcagattaaatcaagaaaaaagaagctgaagaactgatccggcttcacttcaagatggaacagattgtctactgccaggaccaaagtttacagaggagccttgaagaaggtcagagagacggatgccgagaaagagaagactaaggttcaaccagctacctttctctataactctgaacttcttcaaaaggacctgtctaccactgagatgacccagcacctgaatgcctactacgaggagtgcagaaggagcctcgggagacagatccctctgatcatccagtactttatgctgcaaagatttggggaagagatagagaaagccatgcttcagctcttacaggacaaggttaactgtagccggctcttggctgagcggaaagacaccacagagaagaggaagttcctgaagaggcggctttcaaggctggaccaggcttggcacaagcttgccaaattctcc

SEQ ID NO: 7671 - DNA, 721 bp, Cricetulus griseus
gaactgcaagagcttaccctggtggactggggtgtgctcagcagcctggggcaaatagacggctggagtgctgtccagctccgagctgtggtctccagtttcctgcggcagagtggtcggcatgtgagccacctggatttcatttatctgacagctctgggtcacacactctgtggactgcggccagaggagttgcagcatatcagcagttgggagtttagccaagcagctctattcctgggcaacctgcatctcccgtgctctgaggaacagctcgaagttctggcttatctcctggtgctgcctggtggctttggcccagtcagtaactgggggcctgagatcttcactgaaattggcacaatagcagctggcatcgcagacctggctctttcagcattactgccggaacagatccagggcctgactcctcttgccatttctgtcatccctgctcccaagtttgcagtggtattcaaccccatccaattatctagtttcaccagtgctcaggctgtagcgatcacacctgagcaaatggcctatctgagtcctgagcagcgacaagcagttgcatgggcccagcacgaagggaaggagatcccagaacaatggggtcgaagcgcagcctggggcctctatgactggttccagtcctcctgggctctggcactgaccatcagctttgttgaccacctcttatgatcctgctccttcagtt

SEQ ID NO: 7672 - DNA, 721 bp, Cricetulus griseus
gagcccgcggagctgccggccgccgtacgcgcgagcgtggagcggaagcggcagcgggcgctgatgctgcgccaggccccggctggcggcgcggccgtatcccgcggcggcggccaccggaggcatgaccagcgtaaaagcccctcccaaaatgatttgacaccaaaggaggcttcattttagaagaggaggaagaagaggaacacaagattgcaaatgtagttcatgagccaggggaaagaattcatggactcatatcttatgaaccactttgatttgccaacatgtgatagctgcagagatgctgatgacaaacacaagctgataaccaaaacagaagccaagcaggaataccttctgaaagactgcgatttagagaagagagagcctgcgcttaggtttatcgtgaagaagaaccctcgtcactcacagtggggcgatatgaagctctacttaaagttacaggttgtgaagcgggctctggaagtttggggtagccaggacgcgctggaagacgcgaaggaagtgaggcaggaaaaccgagagaaaatgaagcagaagaagtttgataaaaaagtaaaagaattgcggcgagcagtaagaagcagtgtgtggaaaaagagaaacagctgctcaccaaacatgagtatggaccagaggaaaacttagaagactgacatgtaccgaaagacttgaccttgtgtggccatgaactgacata

SEQ ID NO: 7673 - DNA, 720 bp, Cricetulus griseus
gctagggctgacgtctgccccagacctgctggtggagtcctaccaccatggacctgttgttcgggcgccgcaagacgcctgaggaactgcttcggcaaaaccagagggccctgaaccgagccatgagggagctggacagggagcggcagaagctagaaacccaggaaaagaaaatcattgcagacatcaaaaagatggcaaagcaaggccagatggacgctgtccgaatcatggcgaaagacctggtccgcacccgccgctatgtccgaaagttcgtgttgatgcgcgccaacatccaggctgtgtccctcaagatacagactctcaaatccaacaactcaatggcacaggccatgaagggggttaccaaggccatgggcaccatgaacagacagctgaagttaccccagatccagaagatcatgatggagtttgagcggcaggcagagatcatggacatgaaggaagagatgatgaatgacgccatcgacgatgccatgggcgacgaggaagatgaggaggagagtgatgctgttgtgtcccaggtcctggatgagctgggactgagcctcacagatgagctatcaaacctcccctccactggtggttcactcagtgtggctgctgggggaagaaagcagaggccacagcctcagccttggctgatgctgatgcagacctggaagagaggctcaagaaccttcgcagggactgaacaac

SEQ ID NO: 7674 - DNA, 720 bp, Cricetulus griseus
gacagcagatcgactgtcagtgccggctttcctcgtgccggacccttcctaattcaatttccttcccattccaggcccttccctatcgtcgcccccttcaccttggatcatgttcaagaaatttgatgaaaaagaaaatgtgtccaactgcatccagttgaaaacctccgttattaagggtattaaaaatcaattgatagagcagtttccaggtattgaaccatggcttaatcaaatcatgcctaagaaagatcctgtgaaaattgtccgatgccatgaacacatagaaatccttacagtaaatggggagttactgttttttagacaaagagaagggcccttttatccaaccctaagattacttcataaatatccttttatcttgccacatcagcaggttgataaaggagccatcaaatttgtcctcagtggagcaaatatcatgtgtcctggcttaacttctcctggagctaagctttatcctgctgccgtagatactattgttgcaatcatggcagaaggaaagcaacatgctttgtgtgttggcgtcatgaagatgtctgcagaagatatcgagaaagtcaacaaaggaattggcattgaaaatatccattattaaatgatgggctgtggcatatgaagacatataaaatgagcctcaaaaggaatgtgcttgggctcaatatggagattatgctatatctgtgttgtgactgtgtg

SEQ ID NO: 7675 - DNA, 720 bp, Cricetulus griseus
gggagcactgcagaagaaaaaggccttggttcagcagtggttagagtacaggatcacccaagtggacggacactccagtaaagaagacacccacaccctgctgaaggatcttaattcttatcttgaagataaagtctaccttgcaggatataacatcaccttggcagatatcctactgtactacgggctccatcgctttatagttgacctgacagtgcagaaaaggagaaatatcttaatgtgtctcgctggttttgccacattcagcattacccagacatcaggcaacatctgtctagtgttgtcttcatcaagaacagactctatgctaactcccactagaagttcctgctgggcagcagcaagattagaagtgtaaaatgtattttggaccatggttctaatgtaaattaatgtgatgtcattgtttctttgttaatgttggtagaatttttaacatgtaaactcaagtctgaatgttttatttgtcccttagttgaaggtttgcagttttttaatgtaaaaattcaactgttattcaagcaaatcacgattagattataaattatctcatatttataggtgaaatttattttaataaaatttgcttatcagtggcagaaacttaaaaaaaaagtacaccctgtcatcagtgtttcatatctggcttttatgtgtttttaaaattcattttctcctagatgtttatagtagtttatt

SEQ ID NO: 7676 - DNA, 720 bp, Cricetulus griseus
ccagacctgcctattctctccgaagccagctctctcttcttccaccatgcagttctccgcaagaacgcttctgtgcctgctactcacagttgctgcctgtagcatctatgtgctggcccagccagacgctgttaactcccccctcacctgctgctactcatttaccgccaagaggatcccagagaagaggctggagagctacaagagaatcaccagcagcaagtgtcccaaagaagctgtgattttcatcaccaagctcaagagagagatctgtgctgaccccaagcaggactgggtccagacatacacaaaaaaactggaccagagccaagctaaatcagaagctgcaactgtgtataaaacagcacagcacctttgaatgctaacttgacccatgagtctgcagttaatgcatccactactgcctttcccaccacagacttgagaacttctgtaagagtgaccagtatgacagtgaactagtgtgacctggaatgtgatgccttaagtaatattaactttatttaacttattaatgtttcaatatccccttccctgtatacttggatttcttagatgcatgacgtggtttcattgttttccctctgtgaaccctggttctccaccctaaatgttatgagagatgacttttgtaaagatgagtgaaaaaaaaacgttgtgtttgagatcccaaggcattgtttaaaatattattatgga

SEQ ID NO: 7677 - DNA, 719 bp, Cricetulus griseus
cccgccccacaagcagccccgctgggccaggccgcgcgaacatggcgcttgtcccctgccaggtgctgcgggtggccatcctgctgtcctattgctccatcctgtgcaactacaaggccatcgaaatgccctcccatcagacctatggggggagctggaagttcctgaccttcattgatctggtcatccaggctgtcttcttcggtatctgcgtgctgactgatctctccactctcctgacaagagacagcgggaaccaggagcaagaacggcagcttaggaagctcatctctctgcgggactggacgctggccgtgctcgcctttcctgtcggggttttgttgttgcggtattctggaccatctatgcctatgacagagagatgatataccccaaattgcttgacaactttatcccaggttggctgaaccacggaatgcacacaacggttttaccctttatattaatcgagatgaggacatcccaccatcagtatcccagcaggagcagcggactcgccgccatatgtaccttctccgtggcctatatattatgggtgtgctggatacatcatgtcaccggcatgtgggtgtaccctttcctggaacatattggctcaggagccaggatcatcttctttgggtcaacaacaattctaatgaacttcctgtacctgctgggagaagtactgaacagctatatctgggatacacagagaa

SEQ ID NO: 7678 - DNA, 719 bp, Cricetulus griseus
ctctgatcatgtcgctgcgagtggctaggagcgcgtgggccgtggcctgcagtctgcgcaccgccgtggcctcctgcccaccggggccctgggtgccgagcgccgccgccgtccgcgcgctgagcactggatcggctgtccagtcggtgcgtaaattcacagagaaacatgaatggataaccacagagaatggtattggaacagtgggaatcagcaattttgcacaggaagctttgggagatgttgtttactgtagtctgcctgaagttgggacaaaattgaaaaacaagatgaatttggtgctttggagagtgtgaaggctgccagtgagctctactctcctctgtctggagaggtaactgaagtcaatgaagcacttgcagaaaacccagggctcgtcaacaaatcctgttatgaagatggttggctgatcaagatggcactgagtgatccttcagagctggatgaattaatgagtgaagaagcatatgagaaatatgtgaaatccattgaggagtgagcatggcacccccacttccaaataaaactggaaggaacctgatccagcatgcttaagttagcggagaatagaagatctgaaataacttctagcaatactgatggaaagaaactactctcaacagtgctacttaaaaaccccaacttcctgatgggtacagataaatacaatgaacataattttaataatcttcatacta

SEQ ID NO: 7679 - DNA, 719 bp, Cricetulus griseus
agaagatggctcaagaccagcctctcctgactgagcaagaggtcctgaggaagtgcttccctgtggtgcaggagcagcaggacttgtggcaaagcactcttcagggctgctcgtccctcctctcctctctcagcaacctggctgagcagctgcaggcttcacagaatctgaggtttgaggacgtgccggcccttcgtcccttcccagacttacaggagcggctgaggcgcaagcaactggaggctggcgacattgtcctggacaagctagctgagaggctagccaccctcctcaaggttcgagacaccatcagcagccatgtggagcgggtgtttcagacctacgagcagcattcggctgcacttgacatggatgctgtcctgcagccctcagttgtgagcccctctgtggctgacatgttggagtggctgcaagacatcgacagacattatcgaagctcgtacctgaagagaaaatacctcctttcctccatccactggggagacttggccagcatccaagcactgcctaaggcctggaaccaaatttcagaagatgagtgccaaacccttgtgccagatatcctggtgagcgtctccttcttcctggaggagccaggatgctgcacagtgtctggagatcaggagtcccgcagttgagtgcagccctcgaaaaggaagacaaaaagttgaaaagggacagctgtgaagatgacagca

SEQ ID NO: 7680 - DNA, 719 bp, Cricetulus griseus
gatgacgaaggacgttctctcttgccccatctactgcgagaatgaagaccattctcagcaatcagaccgtcgacattccagaaaatgtggacatcactctgaaggggcgcacagtcattgtgaagggccctagaggaatcctccgaagggacttcaatcacatcaatgtagagctgagtctcctcgggaagaagaagaagaggctccgggtagacaaatggtggggtaacagaaaagaactggccactgtccggaccatctgcagtcatgttcagaacatgatcaagggagtcacactgggtttccgctacaagatgaggtctgtgtatgctcacttccccatcaacgttgttattcaggagaacgggtctttggttgaaatccgaaatttcttgggtgaaaaatacatccgcagggttcggatgagaacaggtgttgcttgttctgtttctcaagcccaaaaggatgaattaatccttgaaggaaatgatattgaacttgtttcaaattcagcggctctgattcagcaagccacaacagttaaaaacaaagatatcaggaagtttttggatggtatctatgtgtctgaaaagggaacagtgcagcaggctgatgagtaagacctaagttaaccagttccagaaacaagatcctgaattaagtacgatttggggtgtcttttgggacaataaagacttgtatattgaaaaaaaaaaaaa

SEQ ID NO: 7681 - DNA, 718 bp, Cricetulus griseus
agatggcgtcagccacagattcgcgctatgggcagaaggagtcctccgatcagaacttcgactatatgttcaagatcctgatcattgggaacagcagcgtgggcaaaacctccttcctcttccgctatgctgatgactccttcacaccggccttcgtcagcacggttggcatagacttcaaggtcaaaaccatctaccgcaatgacaagaggatcaaactgcagatctgggacacagcagggcaagagcgctaccgcaccatcaccaccgcctattaccggggtgccatgggcttcatcttaatgtatgacatcaccaacgaggagtccttcaacgctgtgcaggactggtcgactcagattaaaacttactcgtgggacaatgcccaggtgctgctggtggggaacaagtgtgacatggaggacgagcgagtggtgtcgtcggagcgtggccggcagcttgctgaccacctggggtttgagttttttgaggccagcgccaaggacaacattaatgtcaagcagacctttgaacgcctggtggatgtgatctgtgagaagatgtcggagtcgctggataccgctgaccctgcggtcacaggcgccaagcagggcccacagctcaccgaccaacaggcacctcctcaccaggattgtgcctgctgagccactgggatatccccaaacctgtttgacgtcatgagtgtcaaacgtgaccc

SEQ ID NO: 7682 - DNA, 718 bp, Cricetulus griseus
ccccagtgcgctggctccagacagcatggacatcaccctccgcccccctccatacagaaaccaggagcactttcatagagtttaaattattttcctggggcccccagaatagacaggaacccctagcatccagacccactcctttgagaaaccctgtttgtacagttaagactgtttatacgatctttttctatcagctcctctccagcagccacaggcccctctgccttcagctactgatccggccagccatgggctcctcccctagcacaactaggccattgcctcccactccagaggcagcaaggaacccggggacagggctgaagcacagccttcacctgcctggtcctcttttcttttcaagtctccctggccacactccagcccccagaggccaccagacacgttcactgtgctccccgggagcactcatatatatatatatatatattaatttttccctccctccctctctttctttaatgtgtctcctcgaatcttcagatcattcaaatcattttggggacctaatcatgtacattgacaattgtaaattaataatttttggttttgttctattatttttgtaagaatttctgcaaaaaaaagtatttaatttgaggttgatattccatctgatggctggagatagcagcaggtttttttccatgttgatttgttccatttggattttttttatcattctttattgtct

SEQ ID NO: 7683 - DNA, 718 bp, Cricetulus griseus
ccagattataaactaaaccatgcactctgtttgcgaagaggaatgtttaaatctcgttgcatcttgaactggccagttcagaaagaacggataaatgcctttcatcataaattgcaagtagcacttgggtcacgaaattcagcacattaaaattatttggagattaaattggtaaagggatagatccaatttataaagccctatcacaaatctgagttttacttgaaagtttcatgtttatttatatgtatagatgatgatattgtatcataattgaatctcatttttgaagtattttttatttcaggcctcttattaacaactggtttatttatccactccaaataaatacttgggcagttaagagcatcctctgttaatgaagtcacaattgatctctgaggtgtatcacagcttcaaaggggttttaaataaacctgcacacccaagagcagaatattttcataatacttcattgtgtaataggcccctacgactgtaacacaactgactccatgatggaggtaccatttaggccatacacctcagtatgaagatagcatcatcagccaagatgaaaataaagaccaaattcatcagtccagagttctggaaatgtctctaaatgtgctaaccttgctttttggcttctgtagttctgcttctggctaaccattcttcttaactgatgtatgtcaatacagactatgttctttgt

SEQ ID NO: 7684 - DNA, 718 bp, Cricetulus griseus
  modified_base (484)..(484): a, c, t, g, unknown or other
gatgctgctcatcctagcaaagctaccttctcctgtgatcgagaagcagaggcactggttcttcgggtgcggagcgagctgtctgggctccccttcaattggcatttccactgtactccggctagttcttcactggtctctcagcatttgattcgtcctctgatcggtgtgagcctggcattgcagtgtcatgggagggagctagcagcattgcttcggatgaaggacctagagatccagggctaccaggagagtggggctgtgctgagccgaagtcgattgaagacagagccatttgaagaaaattctttcttggaacagtttatggtacagaaattgccggaggcatgcactgttggtgatggaagaccatttgccatgaatctgcagagtctgtatgtagcagtcaccaaacagcagatccaagcaggacagaagcatcaaaggctctggggagactcagacatcatgcagcacttccccncgaggaactgataaccagccagaacagccagtctcttctactccagccctctcagagcctgaacatgagcccatgggtgcttcaggccctatgcagagacctcagctggcaaaggccaagaggaagaagccaagaggactcttcagttaactgaccatgtctccaccactgagaagggagcagaacagcttcccaatatcatctggaaaggagctggcacgtcagaacaccctc

SEQ ID NO: 7685 - DNA, 718 bp, Cricetulus griseus
agctgtcctggatgcagactggaacactgctggagctcagagtggaggagagactgggcttcaccccgcctcttttgctggcccagagggtaaatgttcttcccatggcagctgatttctttggtgccagtttccactcgttttctcctttctctgtggccttgcagcaaggtttgcacgtgcatctgtgctgtagggatcaactacagactgggaagaagattcctgcagggtcaggaattgggccacagtaaaataccaatcaagtctgaagactggctctttgactttgttctgtgttaaagatgggaaagattttaaccttataaaggaacatcacagggagaccagtttaatcggagaagcaggaattaagccatcactcccttctcccaggaatcttgccattttctcctggcttccagatgtcagagggggctaatccttttttagtaaacttactagaaacttctggctcttcacatgagctttcagatattactgaaaaccatgaggaatttctacctttgtggtggtaagggttctaagggaaggaagggttcagggattcctcagacctaatgtctagtgcttaagccagcaattgtagaatgctatttatttgtgtctgtaagtttgtacatatcttaacctcagtttgagttttatttcctttgaaacagatgcttgggtttccatgttgtcactgcattgcagt

SEQ ID NO: 7686 - DNA, 718 bp, Cricetulus griseus
  modified_base (681)..(681): a, c, t, g, unknown or other
aggcgagagacccgggtggtgggagggccggcgggccgggcgggaggcgaagactcatgaaatggccacagatgataagagttccccgacattggaccctgctaatgatttgcctcgctcccccaccgagtccttctcatctcactcactttaaacctttgactcccgaccaggatgagccccccttcaagtcagcatatagttcttttgtaaatcttttcgttttaacaaagagagaggagaagggggccaaggagagcagcaggcttcaggtgcaagttggtccagccctcagatcccttcgaggactcagtctgtgaggtcaccggtaccttacaaaaagcagcttaatgaggagttccagcggcgttcctcagtgttagaaggacactctgaaccatcctggtttaaagacataaaatttgatgatagtgacacagaacagattgctgaagaaggtgacgataatttggctaagtatttggtttctgacactggaggacaacagctctcaataagcgatgccttcatcaaagaatccttatttaatcgacgagtagaggaaaaatccaaagagctgcctttcacccctttgggctggcatcataacaacctggagctcttgcgggaggagaatgaagagaaacaagccatggaaagactgctctttttttttttttnttttgttttgttttcctacatgggagcctatctacct

SEQ ID NO: 7687 - DNA, 718 bp, Cricetulus griseus
tgtctctctctctactgatgaccccactgcagttccactacaccaaggaagcactcatggaggaatatgccatcgcagcccaagtgtggaagctgagcacatgtgacctgtgtgagatcgccaggaacagcgtgctgcagagtggcctctcccatcaggagaagcagaaatttttgggacagaattattacaaagaaggaccggagggcaatgatatccgaaagactaacgtagcgcagatccggatggcattccgctacgagaccctgtgcaatgaactcagcttcctgtctgatgccatgaagtcagaggagatcacagccctgacgaaataggcccagcgttccacacacacttccaccttttggtttaattgcaagcctgcttgggctaatggtggccaagatctcaaacccagggctttcgtctgtgatgaggccgcctctgaagaaatctcaaactcctgattttggttgcaccttacagacacatacccattttgttagggtttctgagctggatgctgaccacctcccatgggggatctgggagctggcacttgtgtgaacttgttcgttttccacatttctcttgtgattgccagtgcttacatggttgaggctgggactttgcaaggctgaatgccaagtgacacaggcctgtgtggtatctgccacactcaaataagtttattatgcctgtgaaaaaaaaaaaaaaa

SEQ ID NO: 7688 - DNA, 717 bp, Cricetulus griseus
ccggaacttggtggaccccatcacacatgacctcatcatcagtctggcacgttacatccactgccccaagccggaaggtgatgcgctgggtgccatggagaagctgtgccggcagctgacctaccaccttagccctcattcacagtggaggaggcatcgagggctggtgaagagaaagccacaggcctgtcttaaggccctcctagctgggaatcctcaagacaacatggtggatctgtcaggcatcccactgacctcacgtgacctggagagggtgaccagctatcttcagcgctgtggagagcaagtggacagtgtggagctgggcttcacaggcctcacagatgacatggtcctgcagctactgcctgcactcagtaccctgcctcgcctcaccacactacgccctcaatggcaaccgattgaccagggctctgctgagggacctcactgacaccctgaaggaccccagcaagtttcccaatgtcacatggattgacctgggcaacaatgtggatatcttctcttttacccccagcccttcctactcagcttgcgtaagcgctctccaaaacagggccacctaccaaccatcctggagctgggtgaggggccaagtactggggaagaggccagggaaggtacaaggaccaaaaaaaaaaaaaaaaaaaaaaaaaaaaaaaaaaaaaaaaaaaaaaaaaaaaaaataaaaaaaaa

SEQ ID NO: 7689 - DNA, 717 bp, Cricetulus griseus
cgacctggaggtgaaggcgcttatccaggatattcgagattgttctggacccttaagtgagctcactgaactgaacactaaggtgaaagaaaagtttcaacagttacgatgcaggatacaggagctggaacagtcagcaagggagcaagacaaggagtcggataagcagcttctacttcaggaagtggagaaccacaaaaagcagatgctcagcaaccagacctcatggcggaaagccaatcttacctgcaaaattgccattgacaacctggaaaaagcagaacttatgcagggaggagacctcttaaggcaaaggaaaactaccaaagagagtttggcacagacatctagcaccatcacagagagcctcatggggatcagcaggatgatgtcacagcaggtgcagcagagtgaagaggctatgcagactctagtcagctcttcacggactctcctggatgcaaatgaagagtttaagtccatgtcagggaccatccagctgggccggaagctcatcacaaaatacaaccgccgggaactgacagacaaacttctcatcttccttgccctggccctgttccttgctacagtcctttatattgtgaagaagcgcctttttccattttttgtgagagctgccagctgtggccctttgcactcccgattcaggactgggctctcaaggactggctgggccgccaaactggactgctcctc

SEQ ID NO: 7690 - DNA, 717 bp, Cricetulus griseus
gtttgcagccctcgtgtttgctggagccatggagttttctgaaggtctgtatgcagtgaaggtccgagccgaagctatgcaagaagcatctgaagctgtccccagtgggatgctgtctgtcctcggccaacgtcagtccaacttctcccttgcctgcatggaagcccaggagcactgcagatccttaggcatagagaacccggtgtgccaggtgtccaactacctctttcctgactgcagggtcatctcaggacaccttgaggccctgcagtttctccggaagaattctgctaagtatcacttcaggcgcaccaagatgttgccagtaagtggtggcttccatacttgcctcatggagccagctgtggagcccctggtgaaaattctaggcacaattaacatcaagaagccactggttgctgtccactccaacgtcagtgggcataaatacatggatccccagcacatccggaagctgctggggcagcaggtggtgtctccagtgaagtgggagcagacgatgcactccatctacaagcggaagaagggcactgatttccccagcacctttgaggtgggtcccgggcggcaactggggagcatcctgaagagctgcaatgggcaggcgtggaagtcctacaaccacgtggatgtgatgcagaccagcacggatcctgaccactgagggccttgaatggaatggccccagggtgagcc

SEQ ID NO: 7691 - DNA, 717 bp, Cricetulus griseus
  modified_base (555)..(555): a, c, t, g, unknown or other
gtccaacacctctacacctggcctgtcaggcttgctccctggaatcgactgtctgtctgctctgcttcaaagccgattacacactttccgagaagagaggctggatgcccatccacttcgctgctttctacgacaacatctgcatcatcattgtactctgcaggaaggatccgagcttgctagaggccgaggccacagctgaaaatcagtgtactccactactacttgccgccacttcaggagcattggacactattcagtacctgttttctcttggtgccaactggagaaaacagatattaaaggaataatatcattcatttgtcagtgctcacatttcatacagaggtactcaagtatataatagatgtcctcagctacaatcgctgaagttggccgtgacaatagggacgtgcaggatgctatagcaatggaaggggccattcctcccctggtagatctttttaaagggaagcagctcagtgtccaagtgaaaggtgcgatggctgtggaatccttggcaaactacaaccctttaatccagaaggcatttcngaaaagaaacttaactaaagatctcctaaaactactaaaggcctttcaactaaatgttaaggagcaaggagccgtagcactttgggccttggcaggacaaactctgaaacaacagaagtatatggcagaacagattggatataactttataataaacatgct

SEQ ID NO: 7692 - DNA, 716 bp, Cricetulus griseus
gcggccctgccggggaggactcgaacccgcttcgaaaatattaagaagacgtgatttccaaggccaattatgaaaacatttgtcattggaattggcggtgtgacaaatggtgggaagacaactctggctaagaacttgcagaaacaacttcccaattgcagcataatatctcaggatgatttcttcaagccggagtctgaaatagacatagatgaaaatggatttttgcagtatgatgtgcttgaagctcttaacatggaagaaatgatgtcagccatttcatgttggatggaaaacccagggcactctgcaggaccagcagctttggaaagttctcaaagggttcccattttaattattgaaggtttccttctctttaattataagccactggacaccatatggaacagaagttacttcctgaccattccatatgaagaatgtaagaggaggcggagtacaagggtatatgagcctcctgaccctccagggtactttgatggccatgtgtggcccatgtacctaaagcacagacaagaaatgaacaccatcacttggaatattgtttacctagatggaacaagatctgaagaagacctcctttcccaagtgtttgaagatatcaagcaagaattagagaagcaaactggtttgtgagtaacagtgcaacgatggaatgcagcaagtcctcctgcgatggattaagaaacttaagg

SEQ ID NO: 7693 - DNA, 716 bp, Cricetulus griseus
  modified_base (11)..(11): a, c, t, g, unknown or other
cagtctccacngaaacagcatcaagtgtgcagagacaggcggctggaagccggcagtacacactgcctgtcagagaagactacagcctgggcaggatctccttacaggatggactcactgcagaagcaggaccttcggaggccaaagattcatggggcagttgaggtgtcccgccaccagccacccacactagcctcactgcagagattgctgtgggtccgtcggaccaccacacagacccacatcaacgaggtccgtggaacttctgtggagtactatggcattgaggctgatgataatcccttctttgacctcagtgtttactttctgcctgttgctcgatacatcagagatgccctcaatactccccaaagccgagtgctggttcactgcgcaatgggggtaagccgctctgccacagttgtcctggccttcctcatgatctgcgagaacatgacactggtagaagccatccagacggtgcaggcccaccgagatatctgccccaactcaggctttctccgacaactccaggttctggacaacaggctgaggcgggaatcagggcgactctgatttagggagcgcctgaagccctgaccccctccactccagcgtggcccaacctcgacctgcctggccctggggatggcagtctctgctgtttccagacgaccctgagtatttttccagcaagtcagcgctccactgaggca

SEQ ID NO: 7694 - DNA, 716 bp, Cricetulus griseus
ggatggaagatggcggtgactagctggctggagagcttgcgggctgccgagaagacggcgctgctgcaggacgggaagaggatggtgcactatttgttcccggatgggaaggaaatggcggaagaatacgatgagaagacgagtgaactccttgtgagaaaatggcgagtagaaaaatgccctgggagccttgggccagtggcagcttgaagtgggagagccagtgctctcaggagccgggagcctggggtctgagctcatcaaggaaagtaatgccaatcccatcttcatgcgcaaggacaccaaaaacaagtttccagtggcggattcgaaacctcccctacccaaaggatgtctatagtgtctctgtggcccagaaagagcgctgtgtcattgttagaacgaccaacaaaaagtactacaagaagttctccattcctgacctagacagacaccagcttcctctggatgattctgcactgagctttgctcacgccaactgtaccctgatcatctcttatcagaagccaaaggaggtcctggcggctgagtcagagctacagaaggagctaaagaaggtaaagacggcccacagcagtgatggggactgtaagacccagtagctgtcctgagccttgcacctccagtgtggaggaaactgagacttgtgggcttggctcttctggcacgggcagcttcttctcgtctaagaacta

SEQ ID NO: 7695 - DNA, 716 bp, Cricetulus griseus
tttgggaatctgaggcctaatcgacatgtggccaacatagtggagagactcaaagggttcaagtccagtccagaggaagagcagaaggtcagtgtctgtgcaaagcatggagagaaactccagctcttttgtgagaaggacaaggtggccatctgctggctttgtgagcgatctcaggaacaccgaggacaccaaacagttctcataaagatagtgatgaaggtgggaaggattatcttcaaaaggagagaacttactgggagaaccaaatacacagtgaggaagaaaatgttcagatggcatttgaaggactgtgggaattcctggactccaagaagaagagtgagctgcagaagctgatgaaggagaaggaagacgttatgaacagcctggcagagtctcaaaatgagctggagaagcagagagaggcagtgagagacctcatctcagatatgcagcatcacttgcacttcccaaccatagaaatgctgcagggtgtgaaatctgtcctaacaaggagtcagaccttaagagtgacactacccacaatgatcccaagaaaacagagaagtatcttccgagctccagatgtgaaaggcatgctgcaagtgtttcaaggcctcatggatgcccaacgccactgggttcctgtaaccctgcgtcaagggtacaataacaacgttctcattgatatggaaaaaagacaaatacaatat

SEQ ID NO: 7696 - DNA, 716 bp, Cricetulus griseus
ggatagctcttgaaggaatttttacatctggacctgacagcacccatgcctggcgcctccccctgaagagactcggcagctgctgctggtacctgagtgtagttccacagttgctgtgggggcatacacattccaggccagcagccaggccttatgccgaagctgggtggacactatttacaatgcacagaaccagctgcagcagctgcgtgcacagcgagctggacgaggagggtgaggacagcagtgcctcagctgccagctcccccaccactcctgcggaagagcagcgacagcctcaactctcagcacggtgcctcagatggttccacagagaccctggccatggttgtgatagagcccggggagacgctgtcatctccggagtttgaccgcggtcccttcagctcccagtcagacgagacttccctcagtaccattgcttcatccattactcccactagcgagctgctgcctctgggcccagtggacggccgatcttgctccatggactctgcctatggcaccctgtctcccacttctttgcaagactttgcagctccaccccctgtggtagagccaccggtgcctgtgccccagccagcgtgcagcctgagcctcccccagggatctccgttcagcacaggaagctgaccctggcccagctctatcggatcaggaccaccttgctgcttaactccacgctcactgcctcg

SEQ ID NO: 7697 - DNA, 715 bp, Cricetulus griseus
  modified_base (669)..(669): a, c, t, g, unknown or other
  modified_base (678)..(678): a, c, t, g, unknown or other
ccgggcgcctctttgaccagcgtttcggcgaggggctgctggaggctgagctggcgtcgctcctgcccggccaccatcgccccctactatctgcgcgcccccagcgtggctctgcccgcagcacaggtgcccgcggaccctgggtatttttccgtgctgctggatgtgaagcacttctcaccagaggagatctctgtcaaggtggttggcggccatgtggaggtccacgcacgccatgaggagcgcccggatgaacatggatacattgcgcgagagttccaccggcgctacctcctgccgcctggggtggaccctgctgctgtgacctcggcactgtctcctgagggtgtcctatccatccaggccacacctgcatcggcccaggccccactgccatcaccacctgctgccaagtaggggtccgggcattacaggaccgaacctgggaagccttttaggctcccttttaaaagcctatctgactccgctgcccagccagatgtcccaatcgctgtcaagacagttcccctccaaccaaatctagatgtcaccccataggacctttccacccaaaaccctacctgtgcctttgtaaccaagacaccctccgtaagcctggctctgcccccagatttcaggtcccacccatacacctctctagaaaaaaanaaaaaaaanaaaaaaaaaaaaaaaaaaaaaaaaaaaaaaaaaaaaa

SEQ ID NO: 7698 - DNA, 715 bp, Cricetulus griseus
  modified_base (612)..(612): a, c, t, g, unknown or other
cctgcaggtttccctagatgatgcataaacagtccttctgcctgaagaacatccttggaaaccttgaccatggcatcgatatcagaacctgtcacattccgagaattctgccctttgtactatctcctctgcagttttccagctcgtgtcttcattgccagggaggaacaagcagcttcggagatttgatgtcactggtgttcataaaaccagcattacagctctggcttggagccccaatgggatgaaactgttctctggagatgacaaggggaagatcgtctactcctctctagatctagaccagagtgttataagttctgaagacttcgaccaggagcttattgtgaaacccatcaaagtgaagaagaggaggaggaggagaaagacagaaggtggaaccaggagcacctgccacagttccctcgagtcaactccctgctccgagttccctggtggcagcccccagtctttgaacacagagctcttgtctatgacctcaagtgctctggccagtagtgtggaccagttgagcacagggtctccagaccaggagagcaaccccagtgttgaggtgaatgggatcgtgcccgaagacaatggccctgaacnttcagtatcctggaggtgcccgagtctcgcccctggcccgccaggtgtggtggcacacacctttagtcccagcacttgggaggcagaggccggtggatctctg

SEQ ID NO: 7699 - DNA, 715 bp, Cricetulus griseus
atgcggaagccggacgggaagatcgtgcttctgggggacatgaacgtgggtaaaacgtctctgcttcagcgctacatggagcgtcgcttcccggacacggtcagcaccgtgggcggcgccttctacctgaagcagtggcgttccttcaacatctccatatgggacaccgcagggcgggagcagttccatggcctgggctccatgtactgccgaggggcggctgctgtcatcctgacttatgatgtgaaccaccctcagagcctgttggagctggaggacaggtttctgggcctgacagaaacagccaacaacgactgtttgtttgccattgtgggaaacaaagtggacctggccatggatcgggccatggagatcagggagaaaagagaggcctctgggaagctgggcagctgtgtctcttccaaggtacccaggcaggtgcagctagaggatgccatggccctttacaagaagatcctgaagcacaagatgctagatgagagggagatgccagccgctgagcagatgtgctttgagaccagcgccaaaaccgggtacaacgtggacctcctgtttgagaccttgtttgacctggtggtgcccatgattgcccggcaaagggctgaggagccatcccagattgtggatataaccagctgcaaaacacccaaaaggactaaatctgggtgctgcacctgatggctgaggtctctct

SEQ ID NO: 7700 - DNA, 714 bp, Cricetulus griseus
gtgaagatcctggtagagctggcccgcagtggaatgcaggcgctccatcttcagcatcgcactcccagcagctgccgggtcaaggccagggcatcctatgtggacgagaccctgtttggcagccctactggaacccggcccacccctccagactttgacccaccctgggtgcggaactgtaacaggtcgagaggagtgggcccaggaccaccgaaggtctcgccagtcaagagagactgtgagtccaccccctccaggggcagcatcccaaacctcacaccaaggaagaaaaacaaatacaggttgattggccacaccccatccttctgtgatgagtcattgtttggcagcaaggaggggtctcggacagccgtgggggatgctgccaagctctggacccttttctggactccaccagccacccctaggggtggccactcacctcaccccagggagaccccacttcgagccattcaccccgttggacccaccaggacagagcccagcatgaccaggggctcccagaagacaccccaggaggggttggatgctccccactctctggagcagaggcgttcccattcagtcacccacctgagtgtccccagcatgggtcatctagatgccagtgtcccccagaccaatggaccttggagtccccggccttccacatcaaggatgactgtccagagtcccctggtcacttccaaggca

SEQ ID NO: 7701 - DNA, 714 bp, Cricetulus griseus
gaggcgcgatgtcggtaccgctgctgaagatcggggtcgtgctaagcaccatggccatgatcaccaactggatgtcccagacactgccctcgctggtgggcctcaacaccacccggctctcggccgccagcggcgggacgctggaccgcagcaccggcgtgttgcccaccaaccccgaggagagctggcaggtgtacagctctgcccaggacagtgagggcaggtgtatctgcacggtggttgcccccagcagaccatgtgttcacgagatgcccgcacaaaaacagctgaggcagctactggagaaggtgcaaaaacatgtctcaatccatagaagtcttggacaggaggactcagagagacctgcaatacgtggagaagatggaaaaccaaatgaaaggactggagtccaagttcaagcaggtggaggagagccataagcaacatctggccaggcagttcaagggctaacttaagagttttttcaatgcgccagtgactgaagaagcagtcccccatgtaaccatgagagagccagagagctttttgcaccatgcatttttacgattcttttccaatccttagcaccatttcactaaggaaccttgaatccaaccaggatcctccttttgcatgcgactctagatgcatcccatgaatagtttgaacccttgtcaatgtctaactttttaaaaaaaaaaaaaaaaaaaaaaa

SEQ ID NO: 7702 - DNA, 714 bp, Cricetulus griseus
agtttatatcctcttcgagtttcctctacagggaacctggttgacacctggatttcccctcatcacttgcctcctcagccaggggcccaagctcatcagccttgggctctaaagactcccattcttggagagaaactgacctgcactgaatcccaccagctcaacttctctgtgggatgaagttattaaactccgatcccacgcttcaggctcaggcccaggtgactggggctctaacgaatgctgtgcagggcctgttgaaggatcgggaacagcagatgaacaagatcagtactctagaagcatcattaaagttgcttcaggagggcccaaaagggagagcccttttggaacaacgcctggaagggtttcgaaaagaactgcagggccttcggaacaaagttcaagagctagtccaaacccaaatgaaaacaagaccagggaagcagtggctttcaccaagaactgcagactgagcaccaacttttgtgggaagagtcagagattcttcgggaggaactgaagttgcttcgagaccagctgagccatcatcaggagttgctgctggaacagattgctgaaggacgcgaggttcaggcccgcagctggaagacattggaacacctacagagtgaccagaaaggcaagttcagaccttggagtttaccaggacagaggccctgatgcccagaaggacggacccctacctcctca

SEQ ID NO: 7703 - DNA, 714 bp, Cricetulus griseus
ggtggatgtcttcaggcaaaatcttttccaggaggctgatgacttcctctccacattcttgccacggaaaatcatatccctgagtcagcttttgcaggaggatttcctcaatgtggccgatctctcctccctccgggctcctctggacatccccatcccagatcccccacccaaggcgatgagatggaaacagacaagcaggagaagaaagaagtccctaagtgtggttttctccctgggaatgagaagcttctggccctgtttgctgtagttaagccagaagtctggactctcaaagagaaatgcattctggtaatcacatggatccagcacctgatccccaagattgaggatgggaatgattttggggtggcaattcaggagaaggtgctggagagagtgaatgctgtcaagaccaaagtagaagccttccagacaaccatttccaagtacttctcagagcgtggggatgctgtggccaaggcctccaaggagacccatgtaatggattatcgcgccttggtgcatgagcgagatgaagccgcctatggggagctcagggccatggtgcgggacctgagggccttctatgctgagctttatcatatcatcagcaacaacctagagaaaattgtcaacccaaagggtgaagagaagccatctatgtactgagctaaggattagaaggagaataaatgatttatactttatgta

SEQ ID NO: 7704 - DNA, 714 bp, Cricetulus griseus
tgatgctattatttgatgaggatcatgatgagatggtgattgtaaaggacattgatatgttttccatgtgtgaacatcacctggttccatttgtgggaagggtccacattggttaccttcctaacaagcaagtccttggcctcagcaaacttgccaggattgtagaaatctatagtagaagactacaagttcaagagcgcctcaccaaacagattgcggtggccatcacagaagccttgcagcctgctggcgttggggtagtgattgaagcaacacacatgtgtatggtaatgcgaggggtgcagaaaatgaacagcaagactgtgaccagcaccatgctgggggtgtttcgggaagacccaaagactcgggaagagttcctcacactcatcaggagctgaacttccgtgtgtgcacatgacctggtttgcagaccccactgctaccggcgttatctgtctcaatcatgcattccagtctcaattgttacagatgtgaattttatttctcaccatggattgtatttaatgattatttatagatatgtcaaataaaagtaattaaggcgtgagccctttctgcttttcttcttgccaccttgttagtggcaatgtctaaagtgaactgccaagagtataggtcatccacatggaccactgccattcaggttcccccagggtgctgtcgacgaggagaactcatgtgcttggttga

SEQ ID NO: 7705 - DNA, 714 bp, Cricetulus griseus
cggaccgtgaagctttgcgcttcctctttccagccagcgccgagcgatgggcatctctcgggacaactggcacaagcgccgcaagaccgggggtaagagaaagccctaccacaagaagcggaagtatgagctgggacggcctgctgccaacacgaagattggtcctcgtcgtatacacacagtccgagttcgaggaggcaataagaagtaccgtgccctaaggttggacgtgggaaacttttcctggggctctgagtgctgtactcgaaaaacaaggatcattgacgttgtctacaatgcatccaataacgagttggtccgcaccaagaccctggtgaagaactgcattgtgctcatcgacagcacaccgtaccggcagtggtacgagtcccactatgcactgcccctgggccgcaagaagggggccaagctgacccccgaggaggaagaaatattaaacaaaaagcgatcaaagaaaattcaaaagaaatatgatgagaggaaaaagaatgccaaaatcagcagccttctggaggagcagttccagcagggcaagcttcttgcctgtattgcctcaagaccaggccagtgcggcagagcagatggctatgtgctagaaggcaaggagctggagttctacctgaggaagatcaaagcccggaaaggcaaataaactcattcatagctcatgtaataaaggtgtttattgttcta

SEQ ID NO: 7706 - DNA, 713 bp, Cricetulus griseus
  modified_base (327)..(327): a, c, t, g, unknown or other
ggctgactgtcctaatgtgtgccaatgccacaggctcccacagactcaagcccttggccattgggaaaggtggtggccccagatcctttagaggtatccagcacctgcctattgcttacaaggcccagggtaatgcctgggtagacaaggagattttctcagactggttccatcatattttgtcccctcggtaagagagcacttcagaaccataggcttgcctgaagacagcaaggcaattctcttgctggaccattcccgagccccacccacaggagtctgagctcgtgtcagagaatgtcttcaccatcttcctgcctgccagtntgacccttccttactgcagccccacagagcaaggcattcgcagattggagctgatgggtagcactgtggttgttgggcctgtgactcccagagccctttgtctgcagccattaactctttttccatcatggctttgtccttgacctccactgcctttgggattcatgtagctgacttaccacagttttcattccagtgttcgacagctgctttaccaagagacttttgcctgttgggcctctgagagccggggaggacttggggaatgttggtttgtgtttctatgtctgtccaaacaaaggatggctgtttcagacagctctagttgtgactggatgtctttttgctttacctgcatgtgtgaacattataaccaggttagtttt

SEQ ID NO: 7707 - DNA, 713 bp, Cricetulus griseus
  modified_base (25)..(25): a, c, t, g, unknown or other
  modified_base (61)..(61): a, c, t, g, unknown or other
tgggaagtgcacatgggcgatcgcnggtccagtcagcaaggcaacagagcagacagcccanagggggatggcaactgggccaactacaacacctttgggtctgcagagggggccacaagtgatgactacaagaaccctggctactacgacatccaggctgagaacctggggatctggcatgtgcccaacaatagctccctgcaaaattggaggaacagctccctgctgaggtaccgcaccttcagtggcttcctgcagcacctgggccataatctgtttggcctgtaccagagatacccagtgaaatatggaggagggaagtgttggactgacaatggcccagcattacctgtggtctatgactttggtgatgctcagaagacagcctcttattactccccttatggccagaaggaattcactgcaggatttgttcagtttagagtgttcaataatgagagagcagccaatgccttgtgtgctggcatgaaggtcactggatgtaatactgaaattcactgcatcggtggagggggattctttccagaagggaaccctcggcagtgtggtgacttctcggcatttgattggaatggatacggaactcacgttgcgtacagcagtagccgggagataactgaagctgctgtgcttctcttctaccgttgagaactttgtggtgtgggacccagactcctccaatctgtaggctc

SEQ ID NO: 7708 - DNA, 712 bp, Cricetulus griseus
tgtgtgtgtgtgtgtgtgtgtgtgtgtgtgtgtgtgtgctgggtgagagaatccttagaaaacaacccccaccctgtgtctcttcaaatgtgggcaagaacaggtcagctaccagctttctgaggaatgggcctccctgctcactagatcagactgtctgcttgtcagagcttgtgagactcagccttctggaaagaaaagggaactttccacagtgaatgttaacgtgtgtgtgcacgcgcacttgctcgagcctgtgtgtgtgtgtgtgtgtgtatttcctagtatacattctgcaggttaaaaggtctcatggcctcaactaggctgtgtctctcttcggggagttcagtatcctacccccaggccctttgtcacctgactcttcaccctataaagggaagcaggctttctctgcctgctctgtagtgtcccagctgaaacaacatgttctccttcttcaagctctccaagtttcagcatctgtgcacaggctgtctgttgtgtgccttggtctagggctcctttgagggcagctacacctgagttagggtggctgtcacataaaccagagatccctgggactgcccacctgagcccggtcctcttggtgccctgctgttgacaggcatgttcccaccagctgtacccaacactacaatgcatttttgaaacttatatttgcatctaagacaataaaaaacttattttt

SEQ ID NO: 7709 - DNA, 712 bp, Cricetulus griseus
ggccgtcttcgaagtggcgggccggaggatttgcggcgcgcgaggaagggacgcctcaggtcgcatccaagaaccatagtgggaaacgcaggacctggcggcctagccaccagcaagccttccccggaagcgttcgagagggacaaggttttgcattttggaggaaactgaagatctagcaagattacaagaaattgctatggaaggtaaagaaggaaccaatgtcccaggaatcccagttcaccgatcattacccagaccatctgaaacacctctatttagctgaagaagaaagactcaagaaacagcggagaaaggttggtctgcctccctcagaagaacaagttgaccagcctgtgcctgaagaagagtgtaacactgaacagactttgtctgagaaacagtctagtgatcaccagtctcagccagagcagctgtgtacaccaaattctgtcactggtaccaaagaaaaagaaaaagaaaacttcaaaccaaaaggcacaagaagagtatgaacggatacaagcaaagcgtgctgctaagaaatttgaatttgaaatgagaaagcgagaacgagaagaggctcagaggctctacaagaagaagaagatggaagctttcaaagtcctgagcaaaaagactagaaagggccagccaaacctgaatctgcagatagaatatcttctccagaagatacaagaaaccagttaaa

SEQ ID NO: 7710 - DNA, 711 bp, Cricetulus griseus
  modified_base (502)..(502): a, c, t, g, unknown or other
actgctgcctcttcctcatgtggtctgtccctgagattcactcctcacaagtgccctcagcatgtcatcagcaaagtcccaaggaccggaggagacagtgccagactgcgaggaagaactgaaaggaaaaacacttctcacctggggccccctttttggtcaccggagtgagaagattgtctttaccaaaggtgatggcagtccagaggagagcctgctcaccgtcaccatcacagagactactgtcattgagtcggacttgggtgtgtggagttcaagggctctcatctacctcacgctgtggttcttcttcagcttttgtactctgttcctcaacagtacatcctgtccctgttagagggagaacccagcatgttaggtgctgtgcaaatgctgtcaacgacattaattggatgtagttaaatatttgtttccttgtcttgtttatatcaacacaaaccgctctcttatccaccattcatcatgactatttttttttttntttggttggttgttgtttatttctttttttttttgttgtttttttttgttttttttttttgtttttggagacaagagtctcgtcttactgtagctatggctgtcctggaactcaccatatagaccaggctggcctcaaactcagaaaataaattggcattgtgtaattaaaaaaaaaaaaaaaaaaaaaaaaaaaaaaaaaaaaaaaaa

SEQ ID NO: 7711 - DNA, 711 bp, Cricetulus griseus
gtcaggttttcagctatccttgtaactgtctggtcctggatctggttcttttgcttctgatggggattctcgaagtagctcggctatacctaggcacaaaaggcaacctgacagagactgaagtgccactggcagccagcctggcattcacggcagtcagtggtctcctttctgttcacttcttgctctggcagaccttggtgctgtggttggactcagtcctcagcaccattctcctggtgttgcatgggctggaggctggattgcaggtggtggtcattgctgacttcatcaggtagacagaccagcataacctacacagcagtgctcctagaaggcaaagcctttcaggaagtcaacagctggggggcagcccagcagctccaccctgtctcagccccagaaatgcagcatcctggcaggaggacgtggctgtgttggtgtgtcacaaagtgttttctcacacaggaattactgacttccgtgccttcccacactggccctggttcttgttctgagaacctgctgtactccctgaataaaactgtttggtttccaaaaggaaacaaaagcacatgtatgccaggtatggcggcacacaaacacgtttaattccagcacccaggaggcaaaggcaagcatatctttgtaagttcaaagccaaactggtctacatagtaaattgcaggtcagctagggttacatagtgag

SEQ ID NO: 7712 - DNA, 711 bp, Cricetulus griseus
tgggatgacacgattctctgcacagccttggttgccaacggctgggctttcctggcattctacgtcttccccgagtttctgctgctcccgaagcaacgaagccccacagattaccccgttgaagatgctttctgtaaaccccagctcatgaagcagagctacggtgtagagaacagggcctactcccaagaggaaatcacccaaggtcttgagacaagggacacactctatgctccttattcgactcatttccagctgcagaaccgaagtcctccaaaggatttctccatcccgagggcccaggccccggccagtccatacaatgactacgagggacgggaaggggacagctaactgttgagaagaacgggacaaccagagccaggcagcaggtccagtcaggagctctgcagatgtgaactgaatcccgagcatcttaggggaactgtacatgagagcttgctccctgcccagcacactgctgtccttctgtctggggctgctgctcctaacagactgcttcttcgcagtgttccagtgttttcctttgtcccattcttaggatacttcttggaggtgggagtcttgggcaactcaggatgagactcttacctctcccatgaatgggagcgaacatctgctcatctaactcctcactgacttgttgggcttcggaagccaattcatttaactcggtggtttcatgaggat

SEQ ID NO: 7713 - DNA, 711 bp, Cricetulus griseus
  modified_base (256)..(256): a, c, t, g, unknown or other
catccacggccgggcatcccttggaggaagaggcaaagctccatcagctggcagctgagctcccgctcccagacctgcagctggaggaggcgctggaagctgtggcaaaggctaaaggcccagtctgcctcctggctggtggtgagcccacggtgcagctgcagggatctggcaagggcagcagtccctcgccctatcctgttatagttgtcaggggtaaggtccccttgggttggcctgcagccactggcctggntcccccttgagccttcatgctcagtatcagagccctccgttggctatcctcaccgtgcgccacggctccaatccctatatgagtgagcagtagaatcacataggaataaaaagccatagagaacagtgaggcctggggctgctcctatgggcccctcttccactgtgagggtgtgcaggactctgggtcagcgctgatgggaagagccaccattctgcatgggctctggacagtctggctagcagttgggccatgtaccatttttttactttcccctgtctgcctcggtcacttttgctgtgcccgtgttttcatagtctgggggccagagtctgaattgggcccccttagagcaaactgttggtgggcttaactcactgtatttgcacacctatatatttggtcagtctagatgaataaaaatatgcaagttcctcacagttagtgctcaatag

SEQ ID NO: 7714 - DNA, 711 bp, Cricetulus griseus
ttgctcaggaacttcaaaacagatcgtgcgcttccagggtgcagctattggtgctttgcaggaggcaagtgaggcctatctggttcggcctttttgaaagataaccaacctgtgtgctatccacgccaaacgtgtaacaattatgccaaaagatatccagctagcacgccgcatacgcggagaacgtgcttaaaagtccactatgaggggaaacatttcattctcaaaaatttttttcctcttcctgttatcagtagttctgaatgttagatatttttccatggggtcaaaaggtacctaagtatatgattgcgagtggaaaaataggggacagaaatcaggtattggcagtttttccattttcatttgtgtgtgaatttttaatataaatgcaagatgtaaagcattaatgcaagcaaaatgtttcagtgaacacatttcaacagttcaactttataacaattataaataaacctagttaaaattttacttggacaatagccagcatttggattttttaaaaaataagtaaatttacttattgacggcaactaaataggtgttttgtagcatttttatcatacagtagattccatccattcactatacttttctaactgagttgtccctacatgcaagtacatgttttttaatgttgtctgtcttctgtgctgttcctgtaagtttgctattaaaatacattaaactata

SEQ ID NO: 7715 - DNA, 710 bp, Cricetulus griseus
ggcacggcaacccctgagagtgctgtgcctggcgggtttccggcagagcgagcggggcttccgtgagaagactggagcgctgaggaaggcgctgcggggccgcgccgagctcgtgtgcctcagcgggccgcacccggtcccagaggcagcagctcccgagggcgccgggccagactccgggcccggtgctccggaggagcaacctcgaggctggtggttttctgaacaggaagcagatgttttctacgcgctggaagagcctacagcatgcaggggtttggagaaggccctggaaactgtggcacaggccctggacacgctgggaccttttgacggactccttggcttcagccagggggctgcactagcagcttttgtgtgtgccctgggtcaggcaggcgatctccgcttccccgtgccgcgttttctcatacttgtgtcggggttctggccccgaggccttggctttaaggaatccatcctgcagagccccttgtcactgccttcgcttcatgtttttggggacactgatcgcatcatccctcctcaggagagtatgcagttggctagccaattccttggcgctgtcaccctcacccactctggtggtcacttcattccagcagctgcgacccaacgccaagcctatctcaaattcttggaccagtttgcagagtgaatcaacatatgtctctgaactgctcccactt

SEQ ID NO: 7716 - DNA, 710 bp, Cricetulus griseus
gcgcaggatgttcgtcctggtggagatggtggacaccgtgcgcatacctccatggcagtttgaacggaagctcaacgactccattgccgaggaactgaacaagaaattggccaacaaggttgtatacaacgtgggactctgcatctgtctgtttgatatcaccaagctggaagatgcctatgtattcccaggggatggagcatcacacaccaaagtccatttccgatatgtggtgtttcacccattcctggatgagattctcatcgggaagatcaaaggctgcagcccagagggtgtgcatgtctctttagggttcttcgatgacattctcatcccccctgagtcactgcaacagcctgccaagtttgatgagacggaacaagtctgggtgtgggagtatgagacggaggagggagctcatgacctgtacatggacactggtgaggagatccgcttcagggtggtggatgagagctttgtggacacgtcccccacaggacccagctcagccgaggctgcctcttccagcgaggagctgccaaagaaggaagcgccatacacgcttgtgggatcaatcagtgagccaggcttgggccttctatcttggtggaccagcaactagtcctgaatttaacagtgactctgcccaggagaatggaacccagggcctctttcatgttttggcaggtattgtactactgagctaggcc

SEQ ID NO: 7717 - DNA, 710 bp, Cricetulus griseus
gactctctgaaagcaagccattagaatgtctcccaacagcccttatgttaaagtactcttggccctgaaacttgagatgaatcaggaaaaccagggaaaggaactggttgaagaagccttaagggaagccccaggtgagacagatgtacttcgaagtgcagccaggttttattataagacacatgataaagacagagctatacagttgcttagccaggctttagaactcctacccaacaatgcctatgtgtattactatattgggtgtttctataggtcaaaagtccttcaacttaaagaaagcagaagagaccaaggagatgatcaaagattcctgtagctaccttgctcaactttatgtcctggcagagcagtacaaagaagccgattattacttccagaaaggattcaagaaggaactcactcctggccttaaacagttgctccacctacggtatggcaattttcagttttttcaaatgaagtgtgaagacaaggccatccaccagtatcttgagggtgtgaaaataaggcagaagacgaaacccaaaagaaaagatgacaaaacaaaacttaagattgattgctgaaaggagacgttctcaaaaatggatttgactccaaggccttgcacatcttggcgtttcttcgggagttgaataaagaaagccagcaagctgctaaagactctgagaggggacaggactctg

SEQ ID NO: 7718 - DNA, 710 bp, Cricetulus griseus
ccctgaggcctacttcagctggcagtgtagttcagaacagacaggctctgggatgaagagtaataggacacccaagggctcaggaaccacatctctaccccagggaaaccacagtatggctgcaaaggctcctgggcctgatgctgcagctctactaaggtggtgtgttagcactggacagatgtctcaggtgtgtgtagaaaggggaaacgaagagaggggcaggtgctctgagatcaaaatgtgaatgtgggttgggtgggcagagtaatcccagtccctgggtgggctcccacaatgccagccctgccatcgtgcccttgctggtgcctgtccttccatccatccccaccagcctcctgtcaccacttagctactgattgcgctccatggcttgacacggagggttcgatgagtggagtttcgccacagtttcacctctcccagttccttccgtctctactgtggccctgggcttttatctacaattccctcctaccatgctccacctttttttttttttaaatatacttattttgctatgggggaggggactatcaaatgaacaagatcacttttaaatggtagttttataagatgttataaacttgtatctttttaccattaaagtgcagtgtatgttccttcgtgatatatttaggatatttaaataaaaagaatggcgcttttctacattaccaaaaaaaaaa

SEQ ID NO: 7719 - DNA, 710 bp, Cricetulus griseus
cagcaccttcggtggccagctccatggcctccagctctggctccctgcgccaccgcaggcccctcatcagccctgcccggctcaacctgaaagggcagaaactgctactcttctcacccccgggggaagcgcccaatactcccagcagctcggaagagcacttgacacccaatggcagcctcttcattgagcctcctcagctcccccagaggaattgcacacgggacaccaaacacaacatggacatgaggtccatgctggcgagagacggcgccgcctgcagcagccactccatcaagaaagaggatgactcgtcacagtcctccgcctgcgtggttgacaccaccaccaaaggtgctcggaggagactgctccctggaaagctcctgtgtgtatgtgtgtgtgagtgtgtatatgtgtgtctttgtgttacatcacttgggatttattgtgggggaggggcatggggcagggaagggtcttcactgtcattcagggataaaatttaactttatttttctacacattttttgccaggtgaggcatgtgctttgaaacagatgcccccagctctccctgccaggaggctgcttgttaagcttgggtgctctctagtgttcttttctttcttttttactgtagggaaggaggcctgacctgacctccacactcctatcctaggagctcttgatgacatcctgggttgtctc

SEQ ID NO: 7720 - DNA, 710 bp, Cricetulus griseus
ccgaggattggctgttgaggggctcagagcactttctccggggaactgtggctgcgttccaggtggctcggccaggatcccggctgcgttctgcccgcctcgggcagccaaggcaaccagagcaccggtgatggggaccccagcctctgtggtgagcgagccacccctatggcaggcttcaactgagtcccggggacgaaagcaggcctctgccaacatattccaggatgcagagttggtgcagatccagggcctgttccagcgcagtggggaccagcttgctgaagagcgggcccagatcatctgggaatgtgcaggggatcaccgtgtagctgaggccctaagaaggctgcgcaggaaaaggcccccgaggcagaaccactgtggccggctgagagcaccagagcttggttctacagcagctgacccacaggacagcaccactgacatggcttccggcgagcagtttgggaactcccggaggacaagtgccagagtccaccgaagctggaataagccgggtcccacaggttacctccaccagatcagacactgactcagtgaaggggtggggaggtcctcccctgatattgcagggactttgccaaagggcttatggagttgcaaagaggcggcctgagcagggccctgtcttggtgacaaacacggtaataggactgttgtcctcagttcagatcagagccagcatc

SEQ ID NO: 7721 - DNA, 709 bp, Cricetulus griseus
ttggcctggttctgtgtgctttgagcacctgtggcctggccatcaactcatcatgttcctggcgcgcctgacttcacagctggtcagggctgttccttgggcaggtttcagtcgttcctggcctgcctctggggtgatcggcagccatgcttttccacccctttacaatttgcagcctgcaagccaaagtcgggctgcctccctccctggtaagggggcccagttggagcttgaggagttcctggtccccaggaagatgtccatcagtccattagagagttggctgactgctcggtatctattgcccagactggatgttggggtcccaatgactgtgattccctcccaaatctacgagtgtccacccagccaggaggaggaagccaagcagggagtcagggaagtctgggatgccactgcagtgcagtgcaaaaatgtgctgaagatccgaagacggaagatgaaccaccacaaataccgcaaactggttaagaggacacgatttcagcggcgtaaagtccgggaaggacggctgaaaaagaagcagatcaagtttgagaacgatttgaagcgcatctggctgaaggcaggcctgaaggaagctcctgagagctggcagaccccgaagatctacatgaagaacaaatgagtctggagtcccatccctcttgtctctcttgctgctgactcattataataaacgttggaa

SEQ ID NO: 7722 - DNA, 709 bp, Cricetulus griseus
  modified_base (649)..(649): a, c, t, g, unknown or other
catttctgtacgagcgacatgagcagtccaagcaggacctcaaggggctggaggagacagttgcccgggaactccagaccctccacaaccttcgcaagctgttcgttcaagacgtcacgactcgagtcaagaaaagtgcagaaatggagcccgaggacagtggggggattcactcccagaaacagaagatctcctttcttgagaacaacctggaacagctacaaaagttcacaaacagctggtacgtgacaatgcagatttgcgttgtgagcttcctaaactggaaaaacgacttagggctacggctgagagagttaaggccctggagggtgcactgaaggaggccaaggaaggcgccatgaaggacaagcgccggtaccagcaggaggtggaccgcatcaaggaagctgtgcgctacaagagctccggcaagcggggccactctgcccagattgctaagcctgtgaggcctggccactacccagcctcctcacccaccaaccctgccagcagcggagccacatctggtggccccttagcttcctaccagaaggccaacatggacaatggaaatgccacagatatcaacgacaacaggagtgacctgccatgcggctatgaggctgaggaccaggccaagcttttcccnctccatcaagagacagcagccagctaactcccattcctggctaccaatatgcactttcag

SEQ ID NO: 7723 - DNA, 708 bp, Cricetulus griseus
cccagtctgatggcacagctgacagttgtgaccagcggctgcccttagggtgtgggaaagcacagcatggccgtagcactgaggagaaacagacatgccttgaagacagaaccccagaagaaaacttcacaaagtccagagacagtacagaaatccagcacacttcgcctgaggatagagagacagtagtggatttggtgctggaatcaagcagaagtgacagtgtgggtatggctgaagagcagcgtggcccacaggatctgaaaagctttctggatgaaggcacagataggtccaggaacatggaacatgccttgggcctgcaggggagcagtgcagagacacggtggccttcctgccatgccaggacaactgacagagtgccctgcagtgtcgtccccacctgggtgaaggaggcccctgcaccctctttacaagtccggtttactcctcatgctgagctggacctgaagaagctcagtccaggaggtgctggtcaggtgtcatttagatactttgagtccacagacgaagccaagcgtgccatcgaggctgtgctgtcagcagaccctcgatctgtgtaccgacggaagctctgtcaggaccgcctttttttcttcactgtcgacatagcacacgtcacatgctggtttggcgatggctttgctgaggttcttcggattaaactggcttctgagcctgttgaga

SEQ ID NO: 7724 - DNA, 708 bp, Cricetulus griseus
agctttgaggatggcggcgtctgcggtgctgatcttgccggagagccccagcatgaagaaagcagtgccgctgataaatgcaatagataccggacggttcccacgccttcttatccgaattcttcaaaagctccacctgaaggccgagagcagcttcagtgaagaagaggaagaaaaacttcaggctgcattctctctagagaaacaagagcttcacctcattctggaaataatatcgtttattctggagcaggcagtgtaccacaatgtaaagccagccgcactgcagcagcaactggagaatattcattttacgcaagacaaagcagaagcatttgccaacgcctggtcggctatgggtcaagaaacagttgagaagttcaggcagaggattctgggccctcataagctcgagacagtgggatggcagcttaacctgcaaatggctcattcggctcaagcaaagctgcagtctcctcaggccgtgctgcaactgggagtgagccaagaagactccaagaacctggagaaggttctagtggaattcaatcacaaggagctatttgatttctacaacaagctggagaccatacaagcacagctggattccctcacatgatgctcttgaaggccggcttctccatcacattcctgccacctcactcttttgcactgaagagaaactgcccgtgtatatttcttagagga

SEQ ID NO: 7725 - DNA, 708 bp, Cricetulus griseus
ggtgccgggggaagagcctgctgagggatgcccaagaagttccagggcgagaacagcaagtcggcagctgcccgagcacggagggctgaagccaaggcggcagctgatgccaagaaacagaaggagctggaagatgcttactggaaggatgaggacaaacacgtgatgcggaaggagcagcgcaaggaggagaaggagaagcgacgcctggagcagttggagcgaaagaaggagacacagcgcctgctggaggaggaggactcacggctcaagggcggcaaggcccctcgtgtggcacctgccaaggtcacccgcgcgcagattgaggactccctgcgcagagagcagcgtgtggaatcagtggagaaggccaagagccacctggagctaccgctggaggagaacctgaaccggcgcctgcaggaagagggcagcctggaagctcgcacagtagaggatgccatagcagtgctcagtgtggcagaggatgcagaccggcaccctgagcgccgcatgcgtgcagccttcaccgcattcgaggaggtacaactgccgcggctgaagcaggagaaccccaacatgcggctgtcgcagctgaagcagctgctgaagaaggagtggttgcgctcccccgacaaccctatgaaccagcgtgtgttgcccttcaatacacccaagtgatggaacaaagcccgagtacagcttgtc

SEQ ID NO: 7726 - DNA, 708 bp, Cricetulus griseus
cagggagacacactcagaagaaagtgtttttgaaagaagaagcaaccagcagggaacaaacatgaagggcccatgcgagacaaccatgctcaagtccctgctgctgctgatgttggggcttgccattctcagggaggtagcagctcggaagaaccccaaagcaggggctcttgtccctcagaaggccgggaattgccctcctctggaggataacagtgtgaaagttgacattcgaatcttcagtcaaaaccagggcgtttttgtctcacatgacttccaaaaccgctccagctccccatgggattacaacatcacccgagacccccaccggttcccctcagagattgctgaggcccaatgcagatattcaggctgcatcaatgcgcagggacaggaagacagctccatgaactccgttgccatccaacaagaaatcttggtcctccggagggagccccagggctgttctaattccttcaggctggagaagatgctggtgaaagttggctgcacctgtgtcgctcccatcgtccaccgcgcagcctgacgaagctacacgtcaaactcagttgaagaaactgagcaaatgcctctctttatccagttctctgcataaagcctgatcgccaagtctctttgcttcttaggactcttagtaagatgtgcacggcattcttgaagctctgtattagaatagtgttaactttc

SEQ ID NO: 7727 - DNA, 708 bp, Cricetulus griseus
tggaggtggctatggggaagcgatacttctgtgattactgtgaccgctccttccaggacaacctccacaaccgaaagaagcacctaaatgggctgcagcatctcaaggccaagaaggtgtggtacgacatgttccgagatgcagctgccatcttgctggatgagcagaataagagaccctgcaggaagtttcttctgacaggccagtgcgactttggctccaactgcagtattttcccacatgtcagaacgagatctgcaggaactgagcatacgaggtggaggaggagagacgggccagagaatggccactggagactgctgagcttcctgagggtcacctggaagactggctggaaaagagagctaagaggctgagctcagtcccaagtagcaggactgaacccatcagaaccactgtcttccagtaccccgtgggctggccaccaatgcaggagctgcccccgtcctgcgggcaccccctcctggaggatgggtcccctacagcccagagttggggctgagctcttcccccacctcccctgcctgacttctggtcaccaggcatagtataaagacagttactcaaccaaggaagtgaagctgccttcgctctgtaaccccctggagcctctgagaccatgagcttggcctccccatccacccaccactccctcagggcatatcttgagaagatgggtgagaaaca

SEQ ID NO: 7728 - DNA, 708 bp, Cricetulus griseus
gtgcggaagcttaagttccacgagcagaagctgctgaagcaggtggacttcctaaactgggaggtcaccgaccacaaccttcacgagctgcgcgtgctgcggcggtacgggctccagcggcgggaggagtacacgcgctataaccagctgagccgagcggtgcgggaactggcgcggcgcctgcgcgacctgccggaacgcgaccccttccgtgtgcgcgcctcggcggcgctgttggacaagctgtacgcgctcggcctggtacccacgcgcggctcactagagctctgcgactcggtctcagcctcctccttctgccgccgccgcctgcctactttgctcctcaagctacgcatggctcagcaccttcaggctgccgtggcctttgtggagcagggtcacgtccgcgtgggcccagacgtggtcaccgatcccgcctttctcgtcactcgcagcatggaggactttgtcacttgggtggactcgtccaagatcaagcggcacgtgctggagtacaacgaggagcgcgatgactttgatctggatgcctagcgagccttctccccgaggcttcacaactacaggtcactgagcccggcatggggagaatcgcccctgagttctgggactttttattagaatttggactgataattaaatgactgttcttactttgtggtgtagaagcaaggacgttaccctccttcc

SEQ ID NO: 7729 - DNA, 708 bp, Cricetulus griseus
gtctccacactccgtccctggggaccccaagcacaagctaccactcgaccccaccccctaaccctgactcctcctcccatgaatctgccgccaacctctcttgcagcggaatatggctgcttcaaatattggcatctcccacagccaaaagactgcaaactcagattgccagcaagggccacgtctcccaatgagaaccaagtcagcatctctgtcaccagccgctgcccacccatcagtcacaaatctatgggcgttcccagactgtagccatgcaaggtcctacacggactttaacgatgcaaagaggcatgaacatgagcgtaaacttgatgccagcaccggcctacaatgtcaactccgtgaacatgaacatgaatactctcaatgccatgaatgggtacagcatgtcccagccaatgatgaacagtggctaccacaggcccacgcagccaatgcagacccaccccaccagtaacatgatgtacacggccccggaccaccatggctacatgaacacaggcatgtccaaacagtctctcaatgggtcctacatgagaaggtaggcagcctggcagcccacagagcccactgggccgctctgttggattgatctgcacaaatacctttgaagagtacgatttcaaaaaccagcattggtgtgaatgcaaaaacattgttggcaccatttaatttaaaaaaaaaaaa

SEQ ID NO: 7730 - DNA, 708 bp, Cricetulus griseus
gggctgctgccctgctcctggttgtgggcatggaaagggctctggctctacctgagatatgtacccactgtccgggaggcgtgcaaaatacgtccagggtagctgtttactgtgagaatgcatcggcggcaataatgcaagcccgatgctgcctgagtcagaagggcaccatcttggggctagatctccagaactgttccctgaaggatcctggtccaaagttttttcaggcttctactgctcttatcatagaccttcaagcaaatcctctcaaggatggtttgaccaacattttccgtggctttacccagctccagactctgatactaccacaagatgtcacctgtcctggaggtattaatgcctgggaaagtattacctctttcacggacaagcaaatttgccaaggacaaaaggacctgtgcaatagcactggaagcccagaagtgtgtcctgagaatggatcttgtgcacctgaaggtcctggtcttttgcaatgcgtttgtgctgatggtttccatggatacaagtgtatgaggcagggctccttttcactgcttatgttctttgggattctgggatccaccacgctagccatctccattctactttggggaactcagcgccgaaaggccaaggcttcatgaacctcacagggcttcttagagaaaaaaaaaaaaaaaaaaaaaaaaaaaaaaaaaaaaaaaa

SEQ ID NO: 7731 - DNA, 707 bp, Cricetulus griseus
  modified_base (94)..(94): a, c, t, g, unknown or other
  modified_base (698)..(698): a, c, t, g, unknown or other
  modified_base (703)..(703): a, c, t, g, unknown or other
tcctggtagggctgcccattgcaggcagtgggcaggcctgaccttgctcgtggccccttagcgcttttgttacttgaatgttttagctgagccngtttttgatggagctactactgtaatgcgtgaactaaccaacctgtgaactgtaaataggcccggaagcacgtgcttaagcctttttgctgatttttaaaactaccacatagagcccgtgggactggcttgatgactgtattcatggtgggctgaggcatgaccatggagagtctttgactggtcaggccccagatgcccttggcagggctcactaaggtcttatctgtgtgtatggaaaggatacactccaacagttaataagctatgacctctcttcagatgctttctcaatagtgcaacctttgtggtgaggtcttctggtgagtaggaagccagcctttcatcctggggagcaggcagtaacctggagtctcagccattgaagcaaggactgactttcctagataaatcttcaaatggactgtgctaatgttgtgtctcaaagctaccaagtttgtgcaataagtggaagagaagggatgccattcctgatcaataatgctgaatgacattcaagttcattttctagaccactgagaaaatctttattacaataaatttcaataaaatttgacataaataaaaataaaaaaaaaaaaaanaaaanaaaa

SEQ ID NO: 7732 - DNA, 707 bp, Cricetulus griseus
cacagagggagctggaggaacagcacgagatcaatgagcagctccaggcccggatcaaagccttggaaaaggatgcctggcgaaaagcttcccgctcagctaccgaggcagccttcaaacaagaggagctgagctctgatgaggaatttgacagtgtctacgacccctcatccattgcatcactgctcacggagagcaacctgcagaccagttcctgttagtgcatgctctgcttgccttgctgctgtactctcagtgccttagcagtgtgaaatgaggatgctgttcttgcctttgtaaacccacacattcatacctctccaaagaccagcctatcctcacaggggccctcagcctgtcctccttccctagtgactgggcaggagagcgacagtctgctctgccaaccagccccctgggaagacgggcttcgatgggccttggtaaggtggtgggaactagttccgctcagggctttcatctttcttcttgccctctgtgactggatgctgccataaagtggttgtacctgggaacatgaggactgtttatacaggttctgaaagcaagcatctagtccttgtggcttctctgaccggatgtgcccagcctcgatggaaaccaacagatccctgcttttctcaggaagtgggccctgattcagagctttgcctgggattagaagctgactgtcagtatgatgggaa

SEQ ID NO: 7733 - DNA, 707 bp, Cricetulus griseus
cgggctgacaggcgagctgcgtccctggaccatggatgccccgaggaaggacatggagctattcagcaacagcctggcggcctatgcacacatccgagctaaccccgagagcttcggcctctacttcgtgctgggcgtctgcttcggtctgctgctgaccctgtgcctgctagtcatcagcatctcctgcgcgcctcgctcgcggccccgggcccctgctccgcgccgggaccctcgcagcagcaccctagagccggaagatgacgatgacgacgaggatgaggacaccatgacgaggctgggccctgatgacacgctcccgggccaggagctgtccactgagcccgacgggccccttagtgtcaatgtcttcacatcagcggaagagctggagcgggcacagcggctggaggagcgtgagcgaatcctgcgggagatctggcgcactgggcagccagacctgctgggtactggcacaatcgggcccggaaccacagccacgggcacgctgggccgtatgcactattattgacacatgaaccgcagcatggacacgggactgagcccagtgctgccccagggccttcgaactgcctctgccccaattctcctggtgctattgggcgtgtgtggatcactgcctgctaagcactcactgttcactgggcaggtgtgggtgggaaaaggataccaggtcccaccttctc

SEQ ID NO: 7734 - DNA, 707 bp, Cricetulus griseus
tgagtcatccacacttttattatccaccagtgttgatttgtacaatctttgcgcttggaattccatgacaaaaaggccacagtgtgatgcacccaatttgacagagatctgtcttatcccgagccaggcccagcccaccccacaagcccttatcctcaggacatacagtcttccaggtaccctccatgagtccctgtcactctgtgactgcccaccctgggtctacacccataggaattacatcagcctatagatccatgagaggatctgactgaccagttcaggccaagccccttatctcccaactctccttgagtggagtggcccagagcccaccaatactaaagatgggtgactgaactgcagctgcaatccaggagggcctgcactccagggactctttgcaacaagcagatgctgagcagagcaccagagggggcttgagagtgactatgtgtgtgcctgtccgggcaacctaaagtcatctgtgcctgacaccctctgacagttccagagtgcaaacatgtaggtgtgagggtgtgtgtgtctgtgtgtgttgtgagggtgtgtgtgtctgtgtgtgtgtgtagccacagctgctagcagaggttctaattagagaaacaagaacattcagtgtaaagtttaatttagagattaattaatttctggttttcatttccctggcaatcaataaagctgccaag

SEQ ID NO: 7735 - DNA, 707 bp, Cricetulus griseus
  modified_base (412)..(412): a, c, t, g, unknown or other
cttccctgggacaatatgttcaagagaatggcggaatttgggcctgactccggcgggagagtgaagggagttaccatcgttaagccaattagtttatggtaatgttgcccgatattttgggaagaaaagagaagaagatggacacacccaccagtggacagtatatgtaaaaccatacagaaatgaggatatgtcagcatatgtgaagaaaatccagtttaaattacatgaaagctatggcaatcctttaagagtcgttactaagccgccctatgaaattactgaaacaggatggggtgaatttgaaataatcatcaaaatatttttcattgaccctaatgaaagaccggtgactctgtatcacttactgaagctgttccagtctgacactaatgcaatgctggggaaaaancggtggtttccgagttctatgatgaaatgatatttcaagacccaacagcaatgatgcaacaactgttaacaacatctcgtcagctaaccttaggagcctataaacacgaaacagaatttgcagaacttgaagtgaaaaccagagaaaaattagaagccgccaagaaaaaacaagctttgaaatcgcagagcttaaggaaagattaaaagcaagtcgtgaaactataaaattgtttaaaaaatgaaatcagaaaacttgaagaagatgatcagacaaaagacatataagcactggc

SEQ ID NO: 7736 - DNA, 706 bp, Cricetulus griseus
ctctctctgagcctggtccgtgcgtggcatctggagaatgtccgccccgtttgaggaacgtagtggggtggttccgtgcgggacgccatggggccagtggtaccagaccctggaggaggtgttcattgaagtccaggtgcccccgggcacacgcgcgcaggacatccagtgcgacctgcagagccggcatgtggctctagccgtgggtggccgcgagatcctcaagggaaagttgtttgattctacaattgctgatgaaggaacatggactttggaggatagaaaaatggtccgtattgttctgacaaagaccaagagagatgctgcaaactgttggacttcccttctagaatctgaatatgcagctgatccctgggtgcaagaccaaatgcagagaaaacttacattagagcgattccagaaagaaaatcctggttttgacttcagtggagcagaaatctcagggaactacacaaagggtggaccagacttctcaaaccttgagaaatgactgctattctttagttttgttctgtcttgcggatcccagcagatgctgagcagctgtcctgtggatggatggtaacttttattgctctgcattaagttttatgtactacattttcctaatttcatatttaattgtgtttttactacaaaagcattggagtacaaatcatatgaaatgaaaaagtgccttcaggga

SEQ ID NO: 7737 - DNA, 706 bp, Cricetulus griseus
  modified_base (9)..(9): a, c, t, g, unknown or other
ttaaaaaanaaaaaaaaaaaaaaaaaagtgataaggactgtgccaattgggaaatcgttacaatgaagtgccaaactcactacaccatataattgcagaaaagactttcagatactggcgtgctttcaagttttgtatatatgcagtagacacagaattgtatttgtgtgcgtgttttttaatatctacttggtccaaggaaagtttatactcttttgtaatactgtgatggtcttgtgtcttgataaactttgctttgtactacctgtgttccgctaaggtgatgaatcacgaactaagatctccattctgcacctctgctgagtgactttgaacctgttcatcttccacaggattcgtatgagaaccaagtagcctgtgatcaatctgctgaataaaaaaatggacttgtcaaactttggggcagaataagattaagtgccagctttgtacaggtcttttcttatttttttttttttattttgttatttgcaaatttgtacaaacaccttaaaatggttctaatttcaggataaatgacttttgatgttattgttaggacatgatcatttttggaatagatattgaactgtaatgttttcttaaaactagagtctactttgttacattgtctgcttgtaaatttgtggaatcaggtatttgggggcagcattcataattttcatttcctgtggccggagacaga

SEQ ID NO: 7738 - DNA, 706 bp, Cricetulus griseus
tgttggggacactgggctttctccgtgggcaccgctgtgatggccatgtttcccaacgtctatgtggccatggtcaccatcagcaccatgggcatcatctccatgagcatctcctactgcccctatgccctcctagggcactaccatgacatcaaggagtacgtccaccacagtccagggaactccaagcgtggatttggcattgactgcgccatcctctcctgccaggtctacatctcccagatcctggttgcatctgcccttgggggcgtggtcgacgctgtagggactgtccatgtcatccctgtggtggcctcagtgggctctttcctgggcttcctgacagccacattcctggtgatctaccctgaggtgtcagaggaggccaaggaggagcagaaaggcctgtctgcagggcccgctggtgaaggcgagggtggaacaggcagtgagaagcccactgtgctgaacgctttactacggaagggggtccctcggggccggtggagacacattccacaccggagggcagggtggactggggactgtgcttgccgacactgtgcgagctggagttccttcccagggcgcagttcaagttcagtaggtgttaggtgtagggtaggtttgagctattaggcaaaaatattacactaattacctttcccacaattgaaaaaaatcatttgaaatcttttttttattg

SEQ ID NO: 7739 - DNA, 706 bp, Cricetulus griseus
  modified_base (44)..(44): a, c, t, g, unknown or other
gtcaatggttaaaattgtaaattatgtgaacaggaaatgctggngttttacaaccaagggaatgcatgctgtgggtcaatctgagatagaattttgctacagtgtctaccagatgaaaagtgcttgccaaaggacatctttaatcactttgtacaactttatcgggatgcactggcagggaatgttgtgggcaacttgggacattctttcttcagtcaaagtttcctgggcagtaaagaacatggtggattcttatatgtgtcatctacttaccagtcactacaagacctagtgcttccaaccccaccttacctgtttgggattctcatccagaaatgggaaactccctgggccaaagtgtttcccattcggctgatgttaagacttggagctgaatatcgactttacccctgcccgctattcagtgtccgatttcggaagccattgtttggagaagcatgtcgctaagacatcccacctgaagcttctaaaggaggatggaatgacaaaactgggactgcgtgtgacacttgactcagatcaggttggctatcaagcagggagcaatggccagccccttccgtctcagtacatgaacgatctggacagtgccttggtgcctgtcatccatggaggagcctgccaactcagtgagggccctgtcgtcatggaactcatcttttatattctggaaaacatcgcatag

SEQ ID NO: 7740 - DNA, 705 bp, Cricetulus griseus
gggagaccgggaccctgatccggggccgtcagggaaactgtcctcttgtgcaaaatgtacagaaccaaagtgggcttgaaggaccgccaacagctctacaagctgatcattaagccagctgctctacgacggctatattagcatcgccaatggcctcatcaacgagatcaagccccagtcggtgtgcgcaccctccgagcagctcctgcatctcatcaaactagggatggaaaacgatgacactgcagttcagtatgcaattggtcgctcagatacagttgcacctggcacagggattgacctggagtttgatgcagatgtccagacaatgtcgcccgaggcttccgagtatgaaacctgctatgtcacttcccacaaaggcccatgccgcgtggccacctatagcagagatgggcagttaatagccacagggtctgctgacgcttccataaagatactggacacggagagaatgttggccaaaagtgccatgcccattgaggtcatgatgaatgagactgcacaacagaacatggagaaccacccagtgattcgaactctgtatgaccacgtggatgaagtcacgtgtcttgcttttcaccctacagaacagatcctggcctcgggctcaaggactcagcatcctacactccgcctttattgatatcaacaccttccagtgttttgttctcgtgcaatccccaa

SEQ ID NO: 7741 - DNA, 705 bp, Cricetulus griseus
ggaagcgggcaaccggaggaaagatggtttacatctcgaatggacaagtgttggacagcccaaatcagtccccatggagattgtcttttataacagatttcttctggggaatagcagaatttgtggttttttttttcaaaactctgcttcagcaagatgtgaaaaaaagaagaagctacggaagctcatctaattccagatacgatgatggaagagggccaccaggaaaccctccacgaagaatgggtcgaatcagtcatcttcaaggccccagccctcctccaatggctggtggatgaggaaggtaaatgtctgctctaagaagcagacaactagacatacacatgtgtagaaggaagccatcaagagatgaagagcagctcacgtaggacaagatatggtgtatgtctaaacaaggactgttctgtgtcctcacagatgaatgaggtcatgttgggaattccctctacaggatctggcatgactgacatgcagttctataaatgtacatgtttgtctccttaccttttttgtatagtttactaaagtattaatatagttttaataagtatttttaggttgctaaacttgattcatcatctttatatgattaaacccaaaaaaaatacctgatctggaagaaataaaggctatgtatttagttctggctttttgtttgtttggttggtttttgtttttgttttt

SEQ ID NO: 7742 - DNA, 704 bp, Cricetulus griseus
cctttctctgctgcgtccgcagccatgagtatgctcaggctacagaagaggcttgcctctagcgtcctccgttgtggtaaaaagaaggtctggttggaccccaatgagaccaatgaaatagccaatgccaactcccgtcagcagataaggaagctgatcaaagatgggctgatcatccggaagcccgtgactgttcattcccgggcccgatgccggaaaaacactttggctcgacggaagggcaggcatatgggcatagggaaacggaagggtactgccaatgcgagaatgcctgagaaggtgacctggatgcgaaggatgcggatcctgcgtcgacttctcaggagataccgggaatccaagaagattgaccgccacatgtaccatagcttgtacctgaaggtcaaagggaatgtcttcaaaaataagcggattctcatggagcacatccacaagctgaaggcagacaaggcccgcaagaagctcctggctgaccaggctgaggctcgcaggtctaagaccaaggaagcacgaaagcgccgtgaggagcgcctccaagccaagaaggaggagatcatcaagactctgtccaaggaggaagagaccaagaaataaagcttccctcgtgtctgtacatagtgggctgcctgtggcctcaggtggatcagtcattaaaataaaacaagcctttgtctgttgaccct

SEQ ID NO: 7743 - DNA, 704 bp, Cricetulus griseus
gcgcgggcgcgcagacacacgcgagccggggcagcatgcaaatgagccggctccagcacccagactgcagctccccactgctcaatggacaaccccagcccagacccagctccgccttcttccactttgtctggggaggaagaaaaacctcgggcccggcttcctccagttccccggggccgccgaggccggccaccagggggagccaccacctccaatcggactctcaagtcctccctccctcgaaagcggggccgaccccccagatccgtgcaggaagccccgttggcagcagcaggggctccacacttctgccccgtgtgcctgagagccttcccctacctctccgacctggaacgccacagcatctcgcactcggagctcaagccgcacgagtgcaaagattgcggcaagaccttcaagcggtccagccacctgcggcggcactgcaacatccatgccggcctgcggcccttccggtgcgtgctgtgcccccgccgcttccgcgaggcgggcgagctcgcgcaccaccaccgcatccactcgggcgagcgcccctaccagtgcccctcgtgcagggtgcgcttcaccgaagccaacaccctgcggcggcattacaaacgcaaacacccggagctggtggggatgcccgtgcgcctgtgccccccaaacccgaggccccagccgctgtgggatgacgacga

SEQ ID NO: 7744 - DNA, 704 bp, Cricetulus griseus
gtgggcctactttagaatcatggctgctaccagtgtagtgggtggtttgtagaagagtctcagcgttcctgaaggctgtgggttccctagcaaatcctcaggcccccgctccttccgggttttctcttagtttcgttgcataagaatacaccacatgtcacatctttttctccagtgtaaaattacttcacaccacgttgtcaaggaaaggactagaagaattttttgatgacccaaagaattggggggaagaaaaggtcaaaatctggagcttcatggacctgccagcagctaagaaacaaaagtaatgaagacttacataaactttggtatgtccttctgaaggaaagaaacatgcttctaactttagaacaggaggccaagcgacagagattgccaatgccaagtccagagcggttagaaaaggttgttgattccatggatgccttagataaagttgtccaagagagggaagacgctctaaggcttcttcagacggggcaagaaaaagcaaggcctggtgcttggagaagggacatcttcggacgaattatctggcacaaattcaagcagtggcctctaccttggtacctaaataaaagatacaacaggaaacggttcttcgcaatgccttatgtggatcactttatcagactgagacttgagaaacaagctcgaattgaagcaagaaagaaaagtttaca

SEQ ID NO: 7745 - DNA, 704 bp, Cricetulus griseus
cctcaccactggccagccatgaagttccgcaaccaccccaaccactctacctacacagaggtcgagccctcgggccatgagaaggagggcttcatggaggccgagcagtgctgagagcaccaggccactgaccttggggatggtgtgaaagcaagtcacagcaaagagaagtgatttttcctgccctcctctgagctagccatgtgtgggccaggaagacaacagcttatggtgcccaaaccatagtttggtcctcacaccccagaaaaaagggtgcagtaatgcaaccatgagggtttcttaaaggaacactaacctcagagttccctgtttggatgggaggaggcccctttttgggatctctcaatggtctgcactgtagctattgaagagcccctccctactggagacagcctacaaacaggtggctggaggtttccttgagatacccctgcctcagcagggagctccagttggatcctgttgaaacacagctgccatgaaggtagggcagagaaacctggcatgggagggagggaccttgacctggagatcggctgccatctttctggctctgcaaagagctttgggggcagggagctgctgctcccctacttagcctggctttaagggacttctgtccctgtggtgggcaggactgcttcgaaggtaaggaatctagagctcaccctcctccaaataag

SEQ ID NO: 7746 - DNA, 704 bp, Cricetulus griseus
ctgacttctaagtacagaggcgaatctgagaagttggtccgtctgttgtttgaaatggctaggttctatgcccccaccacaatcttcattgatgagatagattctatctgcagtcgaagaggaacgtctgacgaacatgaagcaagccgcagagtcaagtctgagctcctggtccagatggacggagtcggaggagccttagaaaatgacgatccgtccaagatggtgatggttctggctgccactaacttcccgtgggacattgatgaagctcttcgaaggagactagaaaaaaaggatctacatccctctaccgacagcaaaaaggagagctgagctaggtggagctggatcctgacatacgcctggaggacattgctgacaagattgagggctattccggtgccgacataactaacgtgtgcagggacgcatctttgatggcaatgagacggcgaatcagcggcctgagtccagaagagatcagggccctgtccaaagaggagctgcagatgcctgtcaccagaggggactttgagctggcgttgaagaaaattgccaagtcagtctctgccgcagacttggagaagtacgagaagtggatggttgagtttggatctgcgtgatttctgccagctctttcatttgtggtatttttgtctataaaatgtgaagaaattccttaaaatttaaaaaaaaaaaaa

SEQ ID NO: 7747 - DNA, 703 bp, Cricetulus griseus
tttgtcgccggcgtgagttccgaggcgcggcgggccctgagtcgccaccatgccggttgccagaagttgggtttgtcgcaaaacctatgtcaccccacggaggcccttcgagaagtcgcgtctcgatcaggagctgaagctgataggagaatacgggctccggaacaagcgcgaggtgtggagggtcaagtttaccctggccaagatccgcaaggccgcccgggagctgctgaccctggacgaaaaggacccacggcgtcttttcgaaggcaatgccctgctgaggcgacttgttcgcattggggtgctggacgagggcaagatgaagctggattacatcctgggcctgaagattgaggacttcctggagaggcggctgcagacccaggtctttaagctgggcctggccaagtccatccaccacgcccgagtgctcatccgccagcgccacatcagggtccgcaagcaggtggtgaacatcccgtccttcattgtccgcctggactcccagaaacacattgatttctccctccgttctccttacggtggtggacgcccaggccgcgtgaagaggaagaatgccaagaagggccagggtggtgctggagctggtgatgacgaggaagaggattaaattaatgcctccctggactggagaattgtctagatttccagttgactaataaaacagaattcacacttg

SEQ ID NO: 7748 - DNA, 703 bp, Cricetulus griseus
gcttgagatccgcattagctatgaaacgaggaggcagagaggacccacccaatcacaggttcgctggcacctccttggagcacagctggaaccgaacccctggaatcccataagcctttagaccggctaacagtcctcccacttgctctcgcccttctttccccgtggagggagcataaccgtggtcataagcaagaaaatgagcaatgcctgggctaggcccagagccagaaagccaggccccaggaaggtgagcctgacccacttccacacgaaggaaaggaagaggcccagtccgctggccagcagcacggaggatgccgccaggaagcccaccgccagccgccactctccttcatcaccgttgcactgggcgaggaggagaggcagaggggcaaagatggtgaggaccagggccccatacacaccaagcctggccagggctaggccaacccgaggaacccccagggcctccagctcaggaaagttgtaacactgtagggagccagtgtcctccttccacagacagaagttgtagaagccgattctcaggttaggcaggtcagcgaggttgccagccttccagaggagagcgtaggacatcagcgacaggaccacagccacaaggaccatgatgcccaccaagggcaggcagtggctccgacacagcctgggagacagacatttctctgcccttgctggg

SEQ ID NO: 7749 - DNA, 702 bp, Cricetulus griseus
cgttcgcgtgtccggctcttgcccacgcagtcatggcctccggcaacgcgcacatcggaaagccggccccggacttcacggccaccgcagtggtggacggcgccttcaaggaagtcaagctttcagactacagagggaagtatgtggtcctctttttctacccactggacttcacttttgtgtgccccacggagatcattgcttttagcaaccacgctgaagacttccgaaaactgggctgcgaggtcctcggagtgtctgtggactctcagttcacccacctggcgtggatcaacaccccacggaaggagggaggcttgggccccctgaacatccccctgcttgctgatgtgactagaagcttgtcagagaattatggagtgttgaaaactgatgagggcattgcctacaggggcctctttatcatcgacgccaagggtatccttcgtcagatcacagtcaatgacctcccagtgggacgatctgtggatgaggctcttcgcctggtccaggcttttcagtatacagatgagcatggagaagtctgtcctgctggctggaagcccggcagtgacaccatcaagcccaatgtggatgacagcaaagaatacttctccaaacacaactaagatgatcaaacatcagtgagcctgaattcttgtatcccgcccctacctggatgtcctgtgctggtccagaaaa

SEQ ID NO: 7750 - DNA, 702 bp, Cricetulus griseus
ctcagcagcacagctgcagtgacaccctgacaagccttattgaggctgcagttcctggaaaagaagagcccatggtgggtgctggagatccaggtcatatagaacaggaaatgagtccagctgtcaaaaccaaggactctggctctgatggacagttgccagaagagataggaacactgcctttagaggcacagcccatgagccaaaaggtagtggagttaagcagcctgaactgccatcaagacgttgagagcctttgtcccctgatacctcctctcagctagagcatagccatgcagctagtgaccttccccagaggaccaaggcctctcatagcagcccagggattcccatagacctgacaggagcagggttttcctgcagggaacgagccaggccatggtggacctgtccctaacccagatgtcattggaggatccccaaaggccgtggccaaatctcagcccagaccccctatggggacctgggcccaggaggccttcaggatgcaagatgccacagacacagtgcgcggcctcgtggtggaactctccagtctcaaccggttgattatgagcacccaccgggacctggaggccttcaaacgcaggaaggccaagcctctgccttacctgacaaaggggttgggagccttgctagaggggatcagggctggagggaactgtaggctgctccagcctg

SEQ ID NO: 7751 - DNA, 702 bp, Cricetulus griseus
ggggcgttggatttggcgtctggactgggccaggaggatggaaatcctctatgaaagtggaagccattaacagagtaattgctgtctgttgccatgacaacctagccgctgcagtcaccctgcccgaagtcttgccagactgcaccagctcagccgcgcctgtggtgaagactgtggaggatttgtgggcagcctagtgaatgggcaggccacagtatgtcatgcaagtttcagccaaggacgggcagctgctgtcaacagtagtgcggactcttgccacccacgagccccttcaatgaccggccaatgtgcaggatctgccatgagggcagcagccaagaggatttgctctctccatgtgaatgtactgggaccttggggacaatccatcggagctgcctggagcattggctgtcatcctcaaataccagctactgtgaactctgccacttcaggtttgcagtggagcgcaaacccaggccgttagtggagtggctcagaaaccctggcccccagcatgagaagcgaactctgtttggagacatggtgtgcttcttgtttataacgcccctggctaccatctcaggctggctgtgcctgcggggcgccgtggaccacctgcactttagtagtcggctggaggccgttggactgattgcactcactgtggcactcttcactatttacctcttctggacacta

SEQ ID NO: 7752 - DNA, 701 bp, Cricetulus griseus
  modified_base (111)..(111): a, c, t, g, unknown or other
gattaattaacttttaatttttaattttaactttttttatttatttgctgtgttatcttgctatttgtgtgagccctttttatttttatttttatttttaacttttttttntttgtgaaagaagttctctttcaccttggcacacagtatgcttcatatgccatacattcagagcacggacaggagggcagctgcttaaaggggacttacaaaccaagcattttctctcatgtctgtgtcacggctgccacttagttccaggcacgcccactgggagcagctattctgcagagcgtagaggaggccggcaggggtttggaaaggcctatcggtggcgctggctgtggtttgctgggggggaggacacatttggggagatgaggggcttttggttgtgatttccctttaaacaggaagagatggttcacattttccatatatatatctcaatgaatgtactgtattactgttttaaaaatttgatgaaataataatggattggtctccttttgttatctggtccttgtttaatttgtttaaggtttttgtatacaaagtttacattttatgtatattttcttgtgtaaaaactgatgtaatatgtgtataaaaacaactgtatgtattatctgtatatagtgtgacaaaatgatttttctttctttcttttggatgtattaataaatcttgctgtgaagtaa

SEQ ID NO: 7753 - DNA, 701 bp, Cricetulus griseus
cagcagccatgccgccatacaccattgtctacttcccagttcgaggacgctgtgaggccatgcgcatactgctggctgaccagggccagagctggaaggaggaggtggttactgtagaaacctggaggaaaggttcgctcaagtccacctgtttgtatgggcagctccctaaatttgaggatggagacctcaccctgtaccaatctaatgccatcttgaggcacctgggccgatccttggggctttatgggaaagaccagagggaggctgccctggtggatatggtgaatgatggggtggaagaccttcgctgcaaatacatcaccctcatctacaccaaatatgaggagggcaaggatgactatgtgaaggccctgcctggacacctgaagccctttgagaccctgctgtcccagaaccaagggggcaaagccttcatcgtgggtgaccagatctcctttgtggattacaacttgctagatctgctgctgatccaccaggtcctggcccctggctgcctggacaacttccccctgctctctgcctatgtggcacggcttagtgcccggcccaagatcaaggccttcctgtcctcccctgaccatgtgaaccgtcccattaatggcaatggcaagcagtaatggacagaagaaacagcatctgtctgtccccttttcctatggctaataaagtttgtaaga

SEQ ID NO: 7754 - DNA, 701 bp, Cricetulus griseus
ctggagctggggagcgggcttctgaagcagcaagtgcctcctttggtgaaggtgactcatcattgggctcctgcagggacctctctaagatgtcaggctctgaacttcttccctcagaacatcactatgaagtggctgaaggacaaccagccactggatgtcaatgatatcaaccccaaggatgtgctgcctaatggggatgggacctaccaggcccacatgaccttgcctgtggcccctggtgatgagacaagattcacctgtcaagtagagcaccccaggcttggatcagcccctcattgccacctgggagcccttgccatctcgggccatgatcattggaaccatcagtgggatcaccatttgtgtcatcttctttgttggaattttgttcctaatcttaaggaaaaggaaggcttcagaagaaaccatgggtgactatgtcttagcagagtgtgaatgacctgcagcctgcagacccatggaagggaggagactccaccaaagacctggaggaagcacgcatgctccattctaggacagagttggatctaatagacagaaagtgcctgatgtactctgctcgtagctttccttgttcactttcttaagatgtttcccccagtcaagtctttgagttcctgaacaacagtgactgctccagatgtaacctctccctccagaactggtctcatgaatct

SEQ ID NO: 7755 - DNA, 701 bp, Cricetulus griseus
tttccggtgcgcgcggcctccgcagccatgagcagcaaagtgtcccgcgacaccctgtacgaggcagtgcgggaggtcctgcacggcaaccagcgcaagcgccgcaagtttctggaaacggtggagttgcagatcagcctgaagaactatgacccccagaaggacaaacgtttctcgggcaccgtcaggctcaagtccacccctcgccccaagttctcggtgtgcgtcctgggggaccagcagcactgcgacgaagccaaggccgtagacatcccccacatggacatcgaggcgctgaagaagctcaacaagaacaagaagctggtcaagaagctggccaagaaatatgatgcctttttggcctccgagtccctgatcaagcagatcccacgtatcctgggcccaggcctaaacaaggcaggcaagttcccttccctgctgacacacaatgaaaacatggtggccaaagttgatgaggtgaagtctactatcaagttccagatgaagaaggtgctgtgtctggctgtggctgttggccacgtgaagatgacggatgacgagctggtctacaacatccacctggcagtcaatttcttggtgtccttgctcaagaagaactggcagaatgtccgggctttgtacatcaagagtaccatgggcaagccccagcgtctgtactagggcacccaataaacctgact

SEQ ID NO: 7756 - DNA, 700 bp, Cricetulus griseus
gatttgagtactcttactgcatctgaaataaaaactctccctattcgctctccaaaggtgttcaatgtaaaaaaggctctcagagtttaccatgagcaacagatgaaatctcggggactcgaagagattccagtttttgatatttctgagaaggcagtaaatggagtagaaagcaagcccctctcatctgatgaagaaaggcttgcctcagatttgattgatcctgtgactttagacaccccgttgtctaaaaatctcatgacacaaattagtgctcttgctcttcaactggattcagaagatctctacagttactctggaagccagctttttgaaatgcatgagaaacttggtaccatggcaaactcaataataagaaatctacagtcacgttggagatcaccagcccatgaaaattcttagtatttcaagagaaattagttaaagtttttttttttaatttataaagttcaaccttccttgcatgagtttctgcagcttcttgtggatatcattgttttgtttaatagaaacatttgtatatatttaatatcaaaatatccatatggatagtaaaagtacttcatggacttactgtggatatttgtaggagtctgtatctacaaataaagcgacagatagtttgtatttaagttaaaacatgagtttattttctaaagtgtccagagtaattaaaatt

SEQ ID NO: 7757 - DNA, 700 bp, Cricetulus griseus
ggagcatcatgcccaagttttactgtgactactgtgacacgtacctcacccacgactctccatctgtgaggaagacacactgcagtggtcgaaaacacaaagagaatgtgaaagactactaccaaaaatggatggaagagcaagcccagagcctgattgacaaaacaacggctgcatttcaacaaggaaagatccccccagctccattctctgctcctcctcctgctggggccatgatcccgcctccccccagtctcccgggtcctcctcgccctggcatgatgcctgcaccccacatgggaggccctcccatgatgccgatgatgggcccccctcctcctgggatgatgcctgtgggacctgctcctggaatgaggccacccatggggggtcacatgcccatgatgccaggccctccaatgatgagacctcctgctcgccctatgatggtgcccactcggcctggcatgactcggccagacagataagagcaaaaaggctctatttcagttttgtatttcttgttttgtttcaccaggagattacggtgctgagcctgagtgttttctatctgcatcacaagcaaggcttccccttcctacctacagaggggagaagtggggttaaaaaagtgcagctctctcacttatattgtgaaagtgaaaataaatggtcagctgtcttacttaaaaaaaaaaaa

SEQ ID NO: 7758 - DNA, 700 bp, Cricetulus griseus
agtgcagacgctggtaaactctgtgaattccaagatcccgaaggcatgttgtgttcccacagagctcagcgcaatctccatgttgtacctagatgagaatgaaaaaggtcgtgctaaaaaaactatcaggacatggttgtggagggttgtgggtgtcgttagcacagcaaaaaataaataaataaataaatatatattttagaaaaagaataaaccctactctccccccctataaaccagctgacactttaatatttcccaatgaagactttatttatggaatggaatggaaaaaaacacagctattttgaaaatatatttatatctacgaaaagaagttagggaaaacaaatattttaatcagagagttattccttaaagatttaaaatgtatttagttgtacattttatatgggttcaactccagcacatgaagtataatggtcagagttattttgtatttatttactattataaccactttttaggaaaaaatagttaatttgtatttatatgtaatcaaaagaaatattgggtttgtatataattttccaaaaaattgtagttgtttttcagttgtgtgtatttaagatgcgaagtctacatggaaggttactgggcaaagtgcttgcacatttgtcttttttgttttttgcagcactactgttaagttcacaagttcaagtaaccaaaaaaaaaa

SEQ ID NO: 7759 - DNA, 700 bp, Cricetulus griseus
agaaaagcgaatttcaagttggccgctgcgtgggccccggagtgggggaggggacggcaggtttttctccctggatctctgagtatccaggccccctccaccatggccagccggggtgggggccggggtcgtggccgaggccagttgaccttcaacatggaggcgtgtgggcattgggaagggtgatgctttacccccaccccacctctaacagccttctccacctcttcccccccttagagttccacccagtgcctctgcccgcaggagaggaaggggagtatgttctggcactgaagcaagagctgcgtggggccatgaggcagctcccatacttcatccggccagctgtccccaagagagatgtggaacggtactcagacaagtaccagatgtctgggccaatggacaatgccatcgactggaaccctgattggaggcgtctacccagagagctcaagattcgagttcggaaactacagaaggaacgggccaccattttactccccaagaggccccctaaggccatggaagataaggaggaaacaatacagaagcttgagactctagagaagaaggaggaagaagtgacttcagaggaggacgaagagaaagaagaagaaaaaaaacaaggaagagggggaagaagaggagtacgatgaggaggtttgttttttcaagacaggtttctctgtgtagc

SEQ ID NO: 7760 - DNA, 699 bp, Cricetulus griseus
ccttccgtggatggtgaggacaactttcgatactttctggcccagatgggccgctttgtctgtcttcgggagctcagcatgggctcttctctcctttcaggcaggctggatcaactgctcggcaccctacagagccccctggaaagcctagagctggccttctgtgcactgttgcctgaggacctacgcttcttggctcagagctctcatgctgcccacctcaagaagctagatttgagtggaaacgacttgtcaggcaaccagttgatacccttccaggggctgttgcaggctgttgcagccacactgctgcatcttgagctgactgagtgtcaacttgctgatgcccagctgttggccacactgcccacctgactcaatgtgtcagtctccgctaccttggtctctatggcaaccctttgtctatggcaggacttaaagagctgcttcgggactctgtggtacaggctgagctccgcactgtggtgcaccccttccctgtggattgctatgagggccttccttggccaccacctgcctctgtccttctggaagcctccatcaatgaagagaagtttgcccgggtagaggctgagttgcaccagctactgttagcttcaggccgtgcccatgtactctggaccactgacatctatgggcgcctggctgcagactatttcagtctctgatctccaaggt

SEQ ID NO: 7761 - DNA, 699 bp, Cricetulus griseus
tcgctgcctcgcgtcgttcctggcgctgctgcatctgctgcagctcggctatttgtacaggttcctgcagggcgttcagcagggctgtccatgttgcggcaggagctgccaattgagagtgacctagcctatgcagacttcctctccctggatatcagcatgctgcggctctttgagagtttcttggaggcgacaccacagctcacactggtgctggctatcattttgcagagtggcaattctgaatactaccagtggtttggcatcagcacatccttcctgggcatctcgtgggcactaatggactaccaccggtccttgcgtacttgtcttccctgtaagcctcgcctgggctggagctcctctgccatctacttcctgtggaacctgttgctgttgtggccccgaatctttgccgttgccctgttctcggctctcttcccctactacatagccctgcatttcctcagcctgtggttggtgctgttgttctgggtctggcttcaagacacaaatttatgccaaactccactactgagtggctgtaccgggattttaatttatttatttattgggtttatgagacggggtttctctgtgtagtcctagctgtcctggaacttgctctgcagacttggctagccttgaatttaagagatccacctgcctctgcttcccaagtgttggaattaaaggcat

SEQ ID NO: 7762 - DNA, 699 bp, Cricetulus griseus
aaaatcacaagcaagggcataaaatgcctgagtaggaaaggccctggggctgatccacaaggctctggccccggagcagtggcctacgtgtgaaagggtgctctgccttgggcaccaaacagtccaggccaaggcatctcgaacactgaccaaagctgctcatgcccacgccagcctagctcgaacccagaacaagacagtaagggtcagggccaagacaacaaagaccaagcccagggcagcaggagccaaagccaaggccactgtagtaaggaacaaggctaaagccaaggtggttaaggccaaggccaaagcagctcagaccaagcacaagggaaggccaaaaggatctgttcagaacagaactggaaggacaagcctgaaaagtggctctgagtctgtggggaagaagaggaagaaagctgaggaggtaaagggtcttcctcctaagaagagagcacggcttgtgctccagtctcctaaggcaaggctgcggcctggagcaaaaccacaaaagtcccagactataaaggtggacaggaaattctcagacgatgaggttcgacagtgggcccagcagatcctccgtgtgaacctctctccagtagtatggctccagccattgctaccatcttgattccgtactcagcatcctgagtcgtccttggcagcagtgcttgggaaaacagttgggctgtc

SEQ ID NO: 7763 - DNA, 698 bp, Cricetulus griseus
catgaaaagccttatgagtgtaaagaatgtagggaaacattctattctaagtcagagctcactgagcatcaaagaagtcatacagatgaaaagccctatgtgatgtttaatattgattgtcaacttgacaatatctggaataatctgggagacaggcctctagtcatgcctgtgaaagattatgcagattcttagcctttgggggtgtctcattgattatcttgatttggctagttaaagtgggaaggcccaccataaatatggtcgcatcattccctggtctgggtttatgtactgcatgaaaaggggtggcaccattctataaactggggttctggactacatgaaaaggagaaaggtagatcaagcatgaccattggttgttttctattttctttgtggatgccacttgacaatgtcaggaactgggctagagaccatttgtgcgatcctttgcaaagaatctggtttcatttacctgtgttctgagaacttgagtaaaggtgaacttaaaggaaatatgctgatttgttggatgaagaaatttccaagtaggagtgcattcaggctgtgacacagctcctggtaacagcacttccaaaagtttacaatgaaaacacttgattgagcagaagataaatacaaaagtgattaaaaattgcaccttctcaaggattaagaaatctaaaagcaaggca

SEQ ID NO: 7764 - DNA, 698 bp, Cricetulus griseus
  modified_base (333)..(333): a, c, t, g, unknown or other
tgctataattggttctgatggctggtaataaaggaagaggacgtgctgcctatacctttaatattgaggctgttggcttcagcagaggggaaaagttgcctgatgttgtgttgaagccaccaccactgtttcctgatacagattacaaaccagtgcccctgaaaacaggagaagatgaggattacatgctggccttgaagcaagagctgagagaaacagtgaaacgaatgccttattttattgaaacacctgcaagaaaaacagatgatattgaaaggtatagtaaacgatatatgaaggtataacaaaagaagaatggataccagactgganaagacttccagagagatgatctcaggtcattctgaaattacaattgattcttcttgtcttaacttacagggtgactcccctgcagttttatattttgcagagaaaatagccagaacccttctcctctaaggatttttaacatgccaaaagattttcaagaaaatgtatatttgcatttcaaaactaatatattaaaattatctacctaagggatgaaaacctgctttcccctttggggagacttatcacttattaccttctgacctggaaacagggagccctgtttttctctcaggatcaagataaccttgaaattgagcttaagtttgtgtgccttagttctccgcttgtaaacagtttcctat

SEQ ID NO: 7765 - DNA, 698 bp, Cricetulus griseus
  modified_base (679)..(679): a, c, t, g, unknown or other
ggcggcggagatccagccccagcccctgacccgcaagccgatcctgctgcaacgggtcgaggggtcgcaggaggtggtgaacatggcggtgatcgtgcctaaggaggagggtgtcatcagcgtctcggaagacaggacagttcgtgtttggttaaagagggacagtggacagtactggccaagcatattccatgcaatgccttctccatgttcatgcatgtcttttaacccggaaacaagaagactgtccataggtctagacaatggtacaatctcagaatttattttgtcagaagattataacaagatgacacctgtgaaaaactatcaagcacaccagagcagagtgacgatggtcctgtttgttctggaactggagtgggtgctgagcacagggcaggacaagctgttcgcctggcactgctccgagagtgggcagcgcctgggatgttaccgtaccagtgctgtggcctcgggcctgcaatttgatgttgaaacccgtcatgtgtttattggtgatcactcaggccaagtcaccatcctcaaactggaacaagaaaactgcacactgctcacatccttcagagggcacacaggaggggtaacggcactctgctgggatccggtccagcgtgtgctgttctcaggcagttccgatcactccgtcatcatgtggacngtcggtgggagaaagggca

SEQ ID NO: 7766 - DNA, 697 bp, Cricetulus griseus
  modified_base (241)..(241): a, c, t, g, unknown or other
  modified_base (261)..(261): a, c, t, g, unknown or other
tcggagatgccttggcagtctcagatgatagagtggtttaatcaacagaaaacagatgggattccagtgtctgggactctttgtgcaaaacaagccaagttctttttgatgccctgggcatggaaggtgattttaatgcctcatctggctggctcactcggtttaagcagcgtcacggtattccgaaggctgctggtaaaggacaaaattaaaggggcaaactgctgctagtgaattttgnggtagcttccaggaatttgnggaaagagaaaaatctcctcccagaacctgagcaaaagccttccaggaagactaggaaagcggaactgcatccagagaagcatattagccacaaagctgcactggaatggactgaaaatttgctggattatctagaacaacaggatgacatgctcctgtctgataagctggtgttgcggaggcttcggaccattataagaagaaagcagaggattcaaagcaaaaatcatctatagcgctcccttctgttgctaatcattttcatccttgtgacttgtctgcagtgattttctctaaggccaaataaatgttgcagatcactttagaattagatgctgctttggattacttgaattacagctctttaatgttgtctcttgaatgaggaatggcatggaattcattatctgtttctaaattgtgttgtactaattag

SEQ ID NO: 7767 - DNA, 697 bp, Cricetulus griseus
tctttcggtattctgcagatgactctaatatggcagtggaaatgttgaaaatttttattgtctttgcttgtgggcatcacttcaggcatgtggatttggtcagccaaaacccttcacacgtggcaaaaatgttctaaccgattggtgaattctgggaaggtaaagagagagaagaggggggaatggttgggtgaagccagggaaaggcaatgaaactgtggtataagactagccggcttctacactttcctcattttgaaggaaattactcagtgactctcagtttgaacaaactagaaacactttagcaccccccactgtcagcccaccacccctcaccccacccagcatcattttttgcactgcagcatgcctaatgagggggaaggaaaggtgattcactttctgacaatcacttaattcagaggaaaacgagatttactaagttgacttcccttaccgaccccagagacctattgcattaagtaatgttaagcaattgggacttaaaatattttagtttgtttgattgcatctaggcagacgccagtctggaagaactgaaatgttaaatttcttggcaactttgcattcgcacagattaactgtgtaatttgtgtgtgtcaattacaattaaaagcaaattcttggaccatgacatagtatactcaattgactttaaaactgtggtcagctt

SEQ ID NO: 7768 - DNA, 697 bp, Cricetulus griseus
  modified_base (52)..(52): a, c, t, g, unknown or other
atctgctctcaaaccgactttcagccagctgtatactttctttagtcagcancttttaaggagctgcctgccaatagtgtgcttctgatttacctgtcagccactggcgttttccccacaggtcgttctgatggtgaaggtccttacgactttggaggtgttcttactaatagtaaccgagacattataaatggagatgcaatccacaaacgaaatcaatcccacaaggaaatgcactgccttcatcctggagatctctatccattcacacggaaacccctgtttatcattgtggactcctccaacagtgttgcctataagaatttcacaaacttgtttggacagccactcgtctgcttgctttctcccaccacatatccaaaagctttgcaagatcagtctcagcgaggtagcctcttcaccctctttttgaacaatcctctaatggccttcctatttgtgtctggattgtcaagcatgcgtagaggcctgtgggaaaagtgtcaagaatatcttcgaaaaaatcaaccgtgacattgcccagctactgacccattcacgttcaatagatcaggcctttctccagttttttggggatgaatttcttcgattgcttctcacaaggtttgtcttctgttcagccaccatgaggatgcacaaggccttccgggacactctcctggcctctgttgggcac

SEQ ID NO: 7769 - DNA, 697 bp, Cricetulus griseus
tggtgggggccgagatggatgctccgtgggctcgggagcagctccgacggcgttacctgtttccttccgaagcggtgctggactgcgaggacaatgccagaccagaagcctccacaactgttgaaaaaaaggagagacctcttccaagagttaacattcattctggattctggattttggcatccatcgttgtgacctattatgttgatttctttaaaaccttcaaagaaaactttcacactaacagctggtttctctttggcgggaccttgctgtttgtcagcctgtcaattgcattttactgtatagtgtatctggaatggtatcgtgggattgaagaatatgatgtcaaatacccaacgctggtgcccatcacaactgcaactttcattgcagcagggatttgcttcaacctggcgctgtggaacgtgtggtcattcttcactcccttgctgctgttcacgcagtttatgggggtcgtgatgttcatctcactcctcggataagtccacgatttaagaagatgaccatttaaagtgaacaaagtatccagcttgtgccactgaggtgaaggagaatcctagtgtgtgctggtgtctctgaagtgagtggttcccatggaaaattgtgactttctaaatctgctgttgaaatcagaataaatgactttctcttgggtgttctcaaacaagtgatt

SEQ ID NO: 7770 - DNA, 697 bp, Cricetulus griseus
  modified_base (648)..(648): a, c, t, g, unknown or other
  modified_base (676)..(676): a, c, t, g, unknown or other
aggacctgcagcagcgtgtgatggccctggaggcacgactccatgcctgtgcgcagaagctgggctgtgggaagctgacaggggtcagtaaccccattaccattcgagccatggggtcccgattcggctcctggatgactgacacaatggcccccagtgcagacagccgggtctggtacatggatggttattacaaaggccgccgggtgttggagttccgtactctgggagatttcatcaaaggccagaacttcatccagcacctgctgccgcagccgtgggcaggtacgggccatgtggtgtacaacggctctctgttctacaacaagtaccagagcaacgtggtggtcaaataccacttccggtcgcgttctgtgttggtgcagaggagcctcccaggggctggctacaacaacaccttcccctattcctggggcgcttctcagacatggacttcatggtagacgagagcgggctgtgggctgtgtacactaccaaccagaatgcaggcaacatcgttgtcagccggctggaccctcacaccctggaggtcgtgaggtcctgggaccaccgggtacccaagcgcagtgcgggggagccttcatgatctgcggcgtcctctatgtgaccaactctcacctggccganccaaggtctacttgcctactcaccaacncgtccagctacgagtacacgg

SEQ ID NO: 7771 - DNA, 697 bp, Cricetulus griseus
tgaggccgcttacgcgtcgcgcttcctcgtctgctccgcatgttcagggcggcttgctctcttttcccttcggcagagaagaggcgatggcggcgatggcatctttcggcgccctggcgctactcctgctgtccggcctatcttgctgctcagcagaggcctgcctggagccccagatcaccccttcttactatacaacctcagatgccgtcatttctacagagaccgtattcatcgtggagatctcactgacttgcaagaacagggtccagaacatggctctttatgcagacgttagtggaaaacagtttcctgtaacccggggccaggatgtgggccgatatcaggtttcatggagcctggagcacaagagcgctcatgcaggcacctatgaggtcagattcttcgatgaagagtcctatagcctcctaaggaaggctcagagaaataatgaggacatttccgtcattccacccctgtttacagtcagtgtggatcatcggggcacctggaatgggccttgggtctccacggaagtgctggctgcagtaatcggcatagtgatctactacctagccttcaatgcaaagagccacatccaggcttgaggacagcatcctcaaccctctattgcttctttcaataaacagttgctatttgccatgaagtaaaaaaaaaaaaaaaaaaaaaaaaaaaa

SEQ ID NO: 7772 - DNA, 696 bp, Cricetulus griseus
gtcaatttcagtcatgcaggttgtaagaaacacgggagcgtggctcctgcgatcttggtctggacctgggttgaccaggcttgtggccattgctccggctcagactatccacaccggagtcccgaggttagaagacgcggctgccaagcaggaagttgaaaagcaagcggctccgagccgcttcagcatttaccctcccagctcctggacaggaaagctctctgcggtgggcggggatgagatttgaggaggtcccagttgcacacattaaagcaacccacaacaacacacagatccaggtagtatctgccgctaacgtgcccctggcccgcgcctcctgtggcacagaaggctttcgcaatgctaagaagggcaccggcatcgcagcacagacagcgggcatagcagcagcggcaaaagccacaggaaagggagtgacccacatcagagttgtagtgaaaggcatgggaccaggacgctggtctgccatcaaaggactaaccatgggcggtctggaagtgatctcagtcacagacaacacccctgtcccacacaacggctgccggccccggaaggctcgaaggctgtgatggaaaagaagcctgcacttgaacctgacctaaagtctggactccagatggatcctgcagagcgcccactgtgggagctgctagagctggcagcactcaagccctc

SEQ ID NO: 7773 - DNA, 696 bp, Cricetulus griseus
  modified_base (540)..(540): a, c, t, g, unknown or other
gccctgccctgtcagccctgctagtcaggcccactcagccctctacacagtggctctcctgctgttgccctggctcatgctactcacaggcaaagtgtctctggcccagttcgctttagcttttgtggtggacacctgtgtggcaggcgcactgctgtgtggtgctggactgctcttccatgggatgctgctgcttcggggccagaccacctgggagtgggctcgggggcagcactcctatgacctgggcacctgccacaacctgcaggcagccctgggtccacgctgggccctagtctggttctggcctttcctagcctcccctttgcctggagatgggatcactttccagacaccagctgaagtggtgggtcttgtggcttcctgactccaggtagagccggaactgaatagggcccttttggcagaggagggtctggcaagggggcgacttggttagcctgcctgcccctctaccaggctgataaagtgcccattaggttcttgtccttccccgtctttgctgggttcccacccctnactttactgttttgcttgctgttttccagttcccattattatcaggcctggagactacaggaggacatgagatcctaatgggccagggctctgcctcctccggccttgggagggtgtggtggatccaggcaaggagagtccaaatgtgctctagag

SEQ ID NO: 7774 - DNA, 696 bp, Cricetulus griseus
caggcttcggcggtttcctccgcggcgggcgtgtcgggtccgggctcggccggtggccccgggtcgcagccgcagccgcagccgccgcaactggtggggcccgccccgagtgcgctcctgcagcagcagcagcaggacttcgaccccgtgcagcgctacaagatgctcatcccgcagctgaaggagagcctccagactttgatgaaggttgcagcccagaacctgattcagaacactaacattgacaacggacaaaagagcagtgatggacccatacagcgatttgacaagtgtctagaggagttttacgctctctgcgatcagctggaactctgcttgcgcctggctcacgagtgcctttcacagagctgtgacagtgccaagcattctccgacactggtgcccacggccaccaagccagatgcggttcagccagacagcttgccctatcctcagtacctggctgtcatcaaagcccagattacctgcgccaaggacattcatactgccctgctggactgtgccaacaaggtcacaggcaagacgactgcagcctcagctggccctgggggcagcatctgacgtcttggtggggcagagagaatgaagtatggcctaaggtaaaacaggtggctcctgttttgatatttgtcatgccatagcgatgtagctataaccagcaggggggcagcagag

SEQ ID NO: 7775 - DNA, 696 bp, Cricetulus griseus
ggcgaccagccgacggcagacacatctgacatgtcatttgaggagctgttggagttgcagagccaagggggacccaaggcatgcgaaacaggtggtagctggaaggagcactgagaagcaaagccccagacaacccgtgtgtgttgcagataagcaccgacctctggaaatgtcagccaaagttcgagtgccattcttacgtcaggttgttcccatcagtaaaaaggtagcccgagacccccgctttgatgatctgtcaggggagtataaccctgagatatttgacaaaacttaccaattcctgaacgatattcgagccaaagaaaaagagcttgtgaaaaagcagttgaagaagcaccggtcgggggaggagcatgagaagctgcagcagctgcttcatcggatggaacagcaagaaatggcacagcaggaacgaaagcagcaacaggagctgcgcctggcctcgaagcaggagcggcgggctctggcacaacagggtcatcggccatacttcttgaagaaatctgagcagcgccagttggccctagctgagaagttcaaggagctgaaacgtagcaagaagctggagagtttcttgagtcgaaagaggcgccggaatgcaggcaaggacaggaagcatctccctctgagcaatgagtaaggaacactgtcgcagggagacctggatctgtagga

SEQ ID NO: 7776 - DNA, 696 bp, Cricetulus griseus
caaatgaattccaaagtatcccactcatcaactgccaaccaaggggataaagatgaagaacttgtcgggagcctggacccagtgtaggagagttcatctaaaatcatcagtatccctaagatgatacggcagcatctgcctgccatatgtggggaaaactcatggtcacaaacattattttgctccaggggactccagaaagccaaatttttgatctctgtattaatcagccctcagaagcaagcaatatctccagataaatcacaccccttagtgatatgattatgtaactcctgacttaaaaacctgggctgggtggtaggattatatgtttgaagttctggtagaaatgataagtaattagtatatcaattcatatactaggaattatctagtataagaatttattgtaatgaaagtatatatagatggaaactctgtcatgttataaaagatgcaagcttgtcctttaatttgggttacagcaatttttagttgtgtccctgcccactctcaagtctacatactgcagtatttcacttgcatttactgtaagaccatgagaaattgaaatgagaggagtcactgatattaacatattggacagctcatagaatccattgataaagtgagtgtgttactgagtaaacagctcctttttatagttgaaataccattttttattcaccatcgttg

SEQ ID NO: 7777 - DNA, 695 bp, Cricetulus griseus
cctcttccgagcacgcttcttggcctcccgcacagctttcatcccgcgcctttctcagcgtcgcccctcggagtcgccgccgttcctgctgccatccggagcacagtctcacactccaccagcttgccgccatgcccaagaataaaggaaaaggaaggtaaaaacaagacgtagaggaaagaatgagaatgaatctgaaaagcgagagctggtgttcaaagaggatgggcaagaatatgctcaggtaatcaaaatgttggggaatggacgattggaagcaatgtgtttcgatggtgtaaagagactgtgccatatcagagggaaattgaggaaaaaggtttggataaatacatcagacatcatattggtggggctccgagattaccaggataacaaagcagatgtcattttaaagtacaacgcagatgaagccagaagtctcaaggcatatggcgagcttccagagcatgctaaaatcaatgaaacagatacctttggtcctggagatgatgatgaaattcagtttgatgacattggggatgatgatgaagacattgatgatatctaaaatgaactcaacattttacattctggtcctgaagattgccctgcaagtttgaaatctggccagtcatagacctcaaggaaaagttttcactatcatcttgattgtaatttattgaggcagacttgat

SEQ ID NO: 7778 - DNA, 694 bp, Cricetulus griseus
tgacaactacgtgaaccctgaaagcctgctgcacctgctttccaccttctcttccaaccaggacatctacctggggcgacccagtctggaccaccccatcgaggccacggagagggtccagggtggccgcacctcaaacacagtgaagttctggtttgctactggtggggctgggttctgcctgagcaggggccttgccctcaaaatgagtccatgggccagcctaggcagtttcatgagcacagccgagcgggtacgcctgcctgatgactgcacagtgggctacattgtggaagggcttctgggtgcccgtctgcttcacagcaccctgttccactcccacctggaaaacctgcagagactgccatccgatgccgttctgcagcaggtcaccctgagctatgggggtcctgagaacccacgtaatgtggtaaatgtggctggaagtttcagtatacaacaggaccctacgcggtttcagtctgtgcactgccttctctacccagacacccactggtgtcctgtgaagaacaggggtgaggtagcttttcggtaaccgatgaccccaggtggctgctctacctggctccctcaggccttggactcaatcactcagcagcagataaggctgcttgaagacctcccgagatccctcttccagttggacaccaggtacctcgggaaagtgaggaca

SEQ ID NO: 7779 - DNA, 694 bp, Cricetulus griseus
  modified_base (25)..(25): a, c, t, g, unknown or other
acttctttttttttttttttttttntttttttctggcgtaattcagcctggtagctgcaattccgcgcagactctgctgtggcaatccggcgaccacgtggccatggtgcatgctctcaggatcagccagccatggaacgaaggacgatgatcacagttacttgctgtacttttcaggactgcttcctgatccactttgggggagggggaacaagaatggatgtagtttcggggaacaccccaaaatactacacttgaacattttatggcagttaaaagaccgtctcatgtctttgcggtgctggttttaatgtaaaacatgcggtaccactaaaggaccctcttgggcctaagtagaagtaacaatttttcgcctgtctgtacctttttggcaactggttgctgttaccggagtgttgagggaatgtcgtaccacacgtgggggtgggaggcggcagtgaagcggtgttgggcgatggaagggtacgtcaaagcctggattgaactctcctgccttcctaaagtgtttttaaaggcgaccggttcctgcttgggttcaaggtcactgtttcctggcttcgcaccgaagtgactggaattgtggctgtcctgattataggattttaacttaactgaaataactgtttttgaataaatgtgttggggttttttgttaaaaaaacaaaaaaaaaat

SEQ ID NO: 7780 - DNA, 694 bp, Cricetulus griseus
cttcatcattacctacctgcagagattcttcaaaagaagaaaaagagtctctctgatgtaagccggatttcaggtggccttcagtccaaaagatcgtccctggatagcagttgtctggatagctccagagacaccgatagtggaacaccttttaattcgccggtgtctacaaataagccttccaacccagacagcccctcaggagaagcagaaaggaatagtactgaacctgctactgtaattgtggagaagctgccaagtgttcccccagctcaagggctatctattccagtcattggcgcaaaggttgaccctacagtaaaagctgtatcctccccccaacagtctcttcatggattaggcatgcagaataagcagtggattttattgaagcctcaaggcatctttgaatgacattgttaccattaattggctcaggacctttgtagtttttatttaactatatgagttgtcttttttacactgcttttttcagtgcatttcttaatatttttaagtttcatgaatgcatgctcagtttattaaaaatccacaaccatgtaattcttgtaatctgttgactccgtgttttgtaaatgaagtcgtatgtattttcagagtatttttgtatgtactgtaagatatcatcttttcaaaagagaaaacttgaaaaaacctttaaaaaataaaaaaa

SEQ ID NO: 7781 - DNA, 693 bp, Cricetulus griseus
cgcagtctgagccccggccgccggcgcagccccagctcgccccgtcgccgttgctgctcgtcccagcaccggccccacaccggcaccctggaggtggggatgctcctgtccaagatcaactcccctggcccacctgcgcgccgcgccctgcagcgacctgcacactaccaagctggcgccgggcaaagagaaggagcccctggagtcgcagtaccaggtgggcccgctgttgggcagcggtggcttcggctcggtctactcgggcatccgcgtcgccgacaacttgccggtggcacacagtctacacggacttcgatggaacccgagtgtacagtcctccagagtggattcgctaccatcgataccatggcaggtcggctgcggtctggtccctggggatcctgctctatgatatggtctgtggagatattccatttgagcatgacgaagagatcatcaagggtcaagtgttcttcaggcaaagagtctcttcagaatgccagcatctcattaaatggtgtctggccctgagaccatcagatcggccatccttcgaagaaatccagaaccatccatggatgcaggatgttctccttccccaggcaacggctgagattcacctgcgcagcctatcaccggcacccagcaaatagcagcctttctgaaacaaaaaacaaaaaaaaaaaaaaaaaa

SEQ ID NO: 7782 - DNA, 693 bp, Cricetulus griseus
ccagacctcttcacaaataagcatactcagtggtactatttccaggtcactaatactcaagcagaaatagtctacagattcactattgtcaacttcacaaagcctgctagtctttacaatcggggtatgaggccactgttctattctgaaaaagaggccaagattcataacattggctggcagagaataggagaccaaatcaagtattataaaaacaatcttgggcaagatgggcgccattttttctctgacgtggacatttcagtttccacacaacaaggacacgtgctactttgctcactgctatccatacacttacaccaaccttcaagaatacctttctggcatcaacagtgacccagtaagatcaaagttttgtaaaatacgtgtcttgtgccacacgcttgctaggaatatggtttatgtcttgacaatcactactcccttgaagaacagtgactcaagaaagcgcaaggctgtgattttgactgcaagggtccatccaggagagaccaacagctcttggatcatgaaaggcttcctagattatattttaggcgactcgagtgacgcgcggttgcttcgggacactttcatcttcaaggtggtgcccatgctgaatccagacggtgtgattgtggggaattaccgatgctccttagccggacgggatttaaaccgtaattacacatc

SEQ ID NO: 7783 - DNA, 693 bp, Cricetulus griseus
ctgaagagcgtaactgcgtcagccccaggaagtgaaaatctgactcttattcaacaggaagtagatgctctggaagaactaagcaggcagctctttctggaaacagctgatctgtatgctactaaggaaagaatcgaatactccaaaacattcaaggggaagtatttcaatttcctgggttactttttctctatttactgtgtttggaaaatttttatggcaaccatcaatattgttcttgatcgagttgggaaaacggaccctgtcaccagaggcattgagatcactgtgaattacctggggatccagttcgatgtaaagttctggtctcagcacatctccttcattctggttggaataatcattgtcagctctatcagaggactgctgatcactctcaccaagttcttttatgccatctccagcagtaagtcctccaatgtcattgtcctgctgttagcacagataatgggcatgtacttcgtctcttccgtgctgctgatccgaatgagcatgcccccagaataccgtaccatcatcacacaagtcctcggagaacttcaattcaacttctaccaccgctggtttgacgtcatcttcctggtcagtgccctctccagcatactgttcctctacctggctcacaagcaggcaccagagaagcacatggcaccctgacctcatacccactgc

SEQ ID NO: 7784 - DNA, 693 bp, Cricetulus griseus
gaagataatcaagaaacatacctgaatatttctcaagttaatgtagattattctgatgaaactttctcatcagtttcacaactggccacagacttcatccagagccttctagtaaagaatccagagaaaagacttacagcggaatcctgcctttctcattcttggctacagcagtgggactttggaagcttgtttcaccctgaagaaacttcaggttcctctcaaatccaggatcataccctcaggtcctctgaagataagacccccaagtcctcctgtaatggaagctgtggagaccgggaggacaaggagaatatccctgaggatagcagcatggtttccaaaagatttcgctttgatgactccttgcccagcccccacgaacttgttccagatttgctgtgttagccttttctctgtgactcatctggactgacttggaaagttaaaatcttctctggtgtgagattgtgtttttagcttcatatatgatatgtttatattacaaatgcacttttgcttagaacaacttagggaacagtttaaatgctaggtttctttttgctggcatatcacttcctgtcctaaaattgttttacagagaaaaatatttaaatatatgacaaaaatgtaaattgtgcatgtgagttcacatgcaactaaagaattcaagttcagttgaacttataaaat

SEQ ID NO: 7785 - DNA, 692 bp, Cricetulus griseus
tgcctacctgcgaatcacccctcgtgcccacaagccctgcagtcacggagtttgccatgatgcatccggcgggttccgctgtgtgtgtgagcccggttggagtggcccccgctgcagccagagcctggctccagatgcctgtgagtcgcagccctgccaggctggtggcacctgcaccagtgatggaataggcttccactgcacctgtccccctggattccagggccgtcagtgtgaggtgctgtccccctgcattccaagcctctgtgagcacggaggccactgtgagtctgatcctggccaactgactgtctgttcctgtcccccaggctggcaaggatcacgatgccagcaggatgtggatttaaataaacttaatataatgtagtattttttacaaaatatatatatggagatgctcccccccccccacctgcaaatccctcctgcgcccccgtggggctgagtctgtgggcccattcggccaatccggactctgtgtaccaagcacacagacatgaccagggtcccgtgtactgagtatgcggccctggtaggtaccaagtagccagccttgggcacaccctcccctggggtcagggggacatttgggagcctccttcccctccccgtccttcctcacttcactgcattccagataaaacttgtagactcactgggaaaggggtctt

SEQ ID NO: 7786 - DNA, 692 bp, Cricetulus griseus
acaggggtagttttagtcaagtgatcttcacacacaaatccttagcaaagagagaccatcatgatgaatctcaaagatgcttaattctaagtacaaactctgtaacatgtcagaaagtttctccagaagagagaccttacagatgtgatgtatgtgggcatagctttaaacagcatttttctctaacacaacatcagagaatccatactggagaaaaaccctataaatgtaatcagtgtgggaaggcctttagtttgaggtcatacctcattattcatcagaaaatccatagtggtgaaaaggcttatgaatgtaatgaatgtggaaaagccttcaatcagagctcagctctcactagacatcggaaaattcatacaggtgagaaagcttgtaagtgtgatgagtgtggcaaagcattcagtcaaagttcttacctaattatacatcagagaatccacactggtgagaaaccctatgccagagctccaagcttattagacaccagaggaattcatacaggagagagaccctatgtatgcaatgaaataggtgggaaaagctttcaagcagagctcggagctagataacccgatcagaggatacacagtggaagagaaaccctatgaatgtagtgagtgtggaaaaagccttcagtctgaattcaaacctcataagacaccagagaattcaca

SEQ ID NO: 7787 - DNA, 692 bp, Cricetulus griseus
gccgtgtgttcctgtttttcatctgtgtgccagaccgtgttactgaacattggcagattaggtcaggcaagaatgctgcccgtctctgcttcctgtgcagtcaggatgctgggtgctcatggggtgaagtgaaggacttgactgaggaggtcattggctcagaggtgaagcactgggccacatttgctgtgggcccaggccatggcatccagctgcagtcaggaaggctgatcattcccacctacgcctactatttctcacgcaggttcctctgcttcccgtgttcagtcaagccccattccctgatgatctacagtgatgacttaggagtcacatggcaccatggcaagctcattgggccccaggtgacaggggagtgccaagtggcagaagtgactgggacgtctggtaaccttgtgctctactgcaatgcccggacaccaaacagattccgagcagaatcttttagtactgattacggtgactgttttcagaaaccaaccctgaacacacaactctgtgagccccgctatggctgccaaggcagtatagtgagcttccagcccttgaagatgccattctcacaagacccaattggtaaagctgctcccactactcagaagagccctctgctggacagttttctggagcgggaggaaggagttggaagaccatcaggaacatggctcttg

SEQ ID NO: 7788 - DNA, 692 bp, Cricetulus griseus
  modified_base (676)..(676): a, c, t, g, unknown or other
gcagatctcagaattttgagaccagtctggaatacaaaggtggttctaggccaattggagctgcaaagtgagaccctgtctcaaaaaaaaaagttgattccatgagaagagggctaatgtgaccacactatatctttgagaatctgtgagctgtgaacagtagacgaaagagagctctatgttcttctcagtagggaaatactaaaccttcagcacctatttggatgataaaacaccataatttagtggcaaaatgaaactaagtagtttaaaatgtaatgtttaaagtggtgttaaatttcctgtagcctgtttaaatatacttataattgtaacttatgtttctgaaaactgttaaccacttccctaattctgttcattttaaagcttgtgactacacctaatttagacttgatggtgattgagtctaaattcaggagaagcacacagctttatcaacgaagaaggtgctcacattcctgtgtggaggctccagggcagctcaatgctttggcctaccatcaagagggttgattcatttaccacattgaataacaatatctcaaagtccatcaactggaatagagtgtttaagccaattattttctaaaggaaatttgatgctgtcaccaataacctgtttggtaaaaggtcttgttttcaacttataaaaaanaaaaaaaaaaaaaaaa

SEQ ID NO: 7789 - DNA, 692 bp, Cricetulus griseus
tatggatcaagtacagacatttgtgttgtacccactggactcatattagctgttgcatgttatatgatttcataacccgcttattcaaatcagtcagaatattgtcagtctgaaagatcatagctaatgaaagttgctcattccttgtgctccctttaaaaatatttttgaatatgccttgagaggttagtggtgacagttacatactgtatttcttgcatattttccccctctattttaactttttttttttccttcctcatcccttatgcttctaaacttttaaatggaggaggagcaaaatctatgccggatactgtatattctaccatggtgctaatatcagagctaaatgatactccatttaatttaaagaagagttttaaataattatctatgtacccatttttcccttttgagtgttgtacatcatgttaacacgctagtgtgaagacagatgaaacaactgtatgttctacagtatagggacagtactatgatccctatttaattcaaaattaactagagcttttccatgtgaaatggaccaaactggcattgttcttatttaaacacagagttttaaagtagtatgacatcccacagggaaaaagaatgtctgtagaggataattgtcctcaaatattttacagaaaaaaagatgatgaaaagactggtaacttgcttgagtt

SEQ ID NO: 7790 - DNA, 692 bp, Cricetulus griseus
ctaaggtatcttcattgtctccatctcttcctcaagttgttgtatctgctagtcaaaatcctgcctctgtcttccctgcttttcaatcatctggttcagagaaacctgacaaagctgcatcttgaatttagactaaatgagccagtttttaaataatggggcattgttttaactcccataaaaattttaactgtttattatactgttgaaaacatattgttcatacccatttcactcattgttgtgaagattgttttccaagattcttttttgttcaaaatatgtcatcaaaatttacctgtctatataacataaattgaacaaagtcgtttgactagtttaagtaagctagccttttcataattatattgatgtttcttcttaaatttggactgttgtggtgtatctacagtatagtattctgtgtcattagtgacatcttattttgtttctgtaaaaatatatatagatatatatatttatgcattaagaaaatgcagtccatggtgtaaaattgtacatattccttaaatccctaataatctgtactaaatatatgtacaaagaacaatactgtcttatttatgttttgtttacataatgtatagtttttaagtattttagtaattttggaccagtgaactgttagcaacaatgcagaagaatctgcatataataaaactgagttgctg

SEQ ID NO: 7791 - DNA, 692 bp, Cricetulus griseus
gagcatctcaacaagcaccagggcggtgcatgcccgtgagcagcagttcaagtgtgtgtggtgtggcgaacgcttcctggatgtggcactgctccaggagcacagtgcccagcacagcgctgcagctgcagctgcagagggggcttaccaggtggcagcctgcctgccctaaggccttggggccaccacctatcctgtctagtctcacctgcttgcagctgcactcaggagtgaggaccaagggttctgggcaggtggaaggtgtgcatgttcagtactcctagcaccagcccggccatcagaggagccaaactgctgtggccagaccagattccattaacctcttccctatgacaggacttgctttctgagagcctgctgccccccttatctatagagaacttgaatcccacctgtagtgaggtgcctctctgccccagatatgagggatgccaacctagccttcccaaattgttcagtctagttagaagccaagtggcttgggaagaaggaagtagggtttcttctcaaattgctttttttgggggggggagagtccagctttgttgcagttctggagacttgagtgtagaccatgagctacagtcctctgtctgcccatacagtgagtttgtatgtgtgttcttagaagtaaagccattgactggtgcaaaaaaaaaaaaaaaaaaaaa

SEQ ID NO: 7792 - DNA, 691 bp, Cricetulus griseus
tttttcagaagaggtcagaattgatcgccaaaatccccaaatttttggggtaacaacatttgtcaaccatccacggggtgaagtgacaggatttgaagatatataatcagattacatatgaagatttattttgatgagaatccttactttgaaaacaaagttctcttccaaagaatttcatctgaatgagagtggtgacccgtcatcaaagtccacagagatcaaatggaaatctggaaaggatttgacaaaacactcaagtcaaacacagaataaggccagcaggaagaggcagcacgaagagccagagagcttctttaacctggtttactgaccattctgatgcaggtgcagatgagttaggagaggtcatcaaagacgatatttggccaaaccccttgcagtactatttggttcctgatatggatgatgaagaaggagaggcagaagatgatgatgatgatgatgaagaggaggaaggcttggaagatattgacgaagaaggggatgaagatgaaggtgaagaagatgaagatgatgacgagggggaggaaggagaggaggatgaaggcgaggatgactagcacagaagactgatggattccaaccctctttttattttcttttattttcaattttctccagatttaccaacatgtatctgtctactttctcttgtttaattaaaaaa

SEQ ID NO: 7793 - DNA, 691 bp, Cricetulus griseus
cacctctgctacctagcaaggtagatctcaaccaggtcaccataattccacatgctgagtgggaaaggattcgggatagccttgacaggttgacaagagaggcggcggccctccgtgcagaaagaacagcaaagaaaagattcatgttcaatcacaagagttggtaaagcactggactaacacatatgcaggaatgaaagaacagaaacttaaagccaagcaaaaagcgtgacgaagagcttgaagcagaaaagacaaattcttgttatttggaagaagaaatataacaaacaaggagaaagaaagaaggccaattgaaaatgcaaagcagtaccagttttaccaaacagaaagagtgaaaagctttcattcaggacttcttctcagtagagttatgaaaagaacgtgatgctcagattcagttcaaaaagaattcagtaaaatcagacaaaaaatgggaggaacaagtgaaactcgacgttgaaaaagctctacaaagaagagaaagaaaaagaagaaaaacgacgcagagaaagatatgctcttgctgaagatcatctgaaacaaataaaggaacataaagaggaagaacaaagaaaggaaaaaaaatagaaagaaaaagctgaagctgaagctgaactggagaaaagagaaaagaaaaatatgaaaaaaaacaagcagagctgaaagc

SEQ ID NO: 7794 - DNA, 691 bp, Cricetulus griseus
ggcttattccgcatccgggtccattccccttgaagaggaagaggagccaaaagtgagatcctgccccaagcgcatcacgtggctggatgtcagcaagcacagagaagcagctccatctcgctgtgtgctgggcttcagtaatggttactcttaggtggttttttaatgcttagaagcttgggcttctgctcttgtttggaaccgtgtaactgttgaaaaactacccgggaggaatcagttcctccagcctgatgcgtctgtaaactgtggaggctagtgaatgtcaaaagggaggagggagtgggggttagtgtcatacgaaatatcaaagtcaaagccctaaggtgcattttcccagaagggagctcttacctaactgatgctgtgtcctagtgtgtgtggctgtggtaaacaaacaacagaattcatgtatgcaagccaacacacccagcatacaaggttgtccttgtactgtgtgtggagagatataatgcctagccccactcattaaattgaggtttgtgccagttagttcccatttaatactagtgctctgtcttaagattctttaagaactatattctgatgaattgaaactaagataaaactcctgtctggcagcaatctgtcttagtaaagattcagtcacccaaggagatcaagtccgaagcctttgtatgagcttaaagga

SEQ ID NO: 7795 - DNA, 691 bp, Cricetulus griseus
gtcgttggtggcgcagtcttggagtaatccaggatggctacgctgatctttattgataaggataatgaagaaccaggcagccgtttggcatccaaggatgggttgaagctggcgtctggtgtcaaagcctcagatgggaaattgcagatctcagcgccacaagttggcaaagtgttcaatgctccagtcttgcctaaagccagcagaaaagctttgggaactgtcaacagggttacagaaaagccagtgaagatcaatagacccctcaaacagaagcaaccaactttgactgtgaaaaagaccattgagaaggctcctaagacacaacaagtctctgttcctgcttctgatgacgcctacccagaaatagaaaagttcttccccttcaatttccttctagattttgagagttttgacctgcccgaggagcaccagattgcacatctccccttgagtggagtgcctctcatgatcctgaatgaggagagtgggcttgagaagctgctgcacctggaccccccttcgcctctgaagacgccttttctaccgtgggaatccaatcccttgctatctccttccagcgttctctccaacctggatgttgaattgcctacctgtttgttatgatgaagatatttaaacttcttactcctttatagtttatgtatgttgtattaataaagcatttgtg

SEQ ID NO: 7796 - DNA, 691 bp, Cricetulus griseus
taatactaaggcatcatatctgaagagtgatgctgaacttaaaaagctatttggtctcactaaagatttgagagtgggtcttactcgcattcctgactatctgggttctagaaaaggttctgattccgttagcagtttgatgaagagtagctcttacaaagatgcagagtttgtggtgaaggaagaagaaataaaacagagttttctaagaaaagaagagcaaaaaatattaagaagatggaatacacaaaaaggagaaaaattaagagggctagtgacacagtcatgatcatgaatggaacagatgttgccagttcccaactccttagtattttacccacatcagaagtaccgcaacataacattgtcacaagccatagcacaaccagggaagacaagagaactgaggtagaacattgctcccatgagaagcaggacaaaggcacattaagttcaagtgtatcttttgaacagagtaattgttttaataaaagctacactgaagacatttttctagtgacaccaccagaattagaagaaaccatcagagatgaaaaaataagaagacttaagcagattgtaaaagagaaagaagcagctcttgaagaaatgcgtaagaagatgcaccaaaaacagtaaaatgtctaggatttaaaagacttgtactactacagtagttctctctcacctg

SEQ ID NO: 7797 - DNA, 691 bp, Cricetulus griseus
  modified_base (228)..(228): a, c, t, g, unknown or other
accatggtagtgttcaatggccttcttaagatcaaaatctgtgaggccgtgagcttgaagcccacagcctggtcgctgcgccatgcggtgggaccccggccacagactttccttctggacccctacattgctctcaacgtggacgactcgcgcatcggccaaacagccaccaagcagaagactaacagcccggcctggcacgatgagttcgtcactcgatccgtgtgnatgggcgcaagatcgagctggctgtctttcacgatgctcctataggctacgacgacttcgtggccaactgcaccatccagtgatctacagggatttgaaactggcaacatccttctagatgcagaaggtcactgcaagctggctgacttcgggatgtgcaaagaaggaattctgaatggtgtgaccaactaccaccttctgtgggactcctgactacatagcccgatcctgcaggagttggagtatggccctcagtggactggtgggcactgggggtgctgatgtatgagatgatggctggacagccccctttgaagctgacaacgaggacgacttgttcgagtccatccttcacgatgatgtgttgtaccctgtctggctcagcaaggaggctgtcagcatcctaaaagctttcatgaccaagaaccctcacaagcgcctgggctgtgtggcagacacagaa

SEQ ID NO: 7798 - DNA, 690 bp, Cricetulus griseus
  modified_base (602)..(602): a, c, t, g, unknown or other
  modified_base (629)..(629): a, c, t, g, unknown or other
ccccacttcccagcccaagaagaaaggacatcggtgcaatctatcttttccaaggtctcttggaaactgaggttgcagaagcgggagcctttgaagaatgtggttttcatcttggcagaaagagcccgggatcccaatgctgaaaagcgccatctggcaatgagaggcctgggcaccttggcccgtgaagcccctcgacaagcaggtgagaaggtacaaaaaagttttacttgacctcctggtgcatggactgtatgatcccgtgagttctgaagtgatccacgagagtgtgaagaccctgaccatcatgctgggcaagatccagggccaaggcctgggctccttcttcatagacatcacccttcagaccaggactttactggatgatgagaatgacaatgtgcggtcgtttgctgggcggaaatggaaggaaatttttcacccaccaggttaaccagacacaggattctctcctgacccatttacaggacaaaagccctcaggttgccaaggcttgcaaaatgactgttcgagcctgtgttccgtatctgaaacccaggagggagcagtgttccaaagtgaagaagatcagaggaaccccnggctttccccggcagctgagccattancatcctgagctctccctctcctctcctactccctccctctctctctctctctctctctctc

SEQ ID NO: 7799 - DNA, 689 bp, Cricetulus griseus
ctgctcgcgctctgggttgaccgccgcccgctgtcttcagagtcatggtgtgtcactgtacattcctcggtcagccatcaatgccactgtccaagaagatattctgctgtcagtggactattcctgccatggagtccccactgttgagtggaagtacacatcaagctggggtggagcagaagatcgtggagtggaaaccagggaccccacgccaactgtctcccaaacgccacaaagacagagtctgcaccttcgacaatggctccatccagcttttcgggtgtgggggtgagggactccggttgctacatcatcactgttacagagcacccagggagcagacagtttggcacaattgtgctgcatgtgtctgagatccgctatgaagacctccactttgtcgctgtcttctttgctctgcttgccgcggtggctgtggtgctgatcagcctcctgtgggtctgcaatcgctgtgcatataaattccaaaaggacgaggagacacaaactcaaagaaagcaccactgaggaacttgaaatgaaagatgttgagtgttagccgagactgtgcccaattacactgctacctcaagagaaagacagtattttccagtcaacggaacaaaccgagccaatccttgctgcagcagggctggagggatagatcagctgttaaaggctaggctcac

SEQ ID NO: 7800 - DNA, 689 bp, Cricetulus griseus
  modified_base (327)..(327): a, c, t, g, unknown or other
aacactgatgctgtgaaggaaggaacagccatgctattggaacaccttgcgggaagcttggcatccgccatccccgtgagcacacaactggacatcgcagcccagcatcacctcttcatgatgggccgcaacgggagtaacgtcaaacatatcatgcagaggacaggggcacagatccactttcctgaccccagcaatccacagaagaaatccaccgtctacctccagggcaccatcgagtctgtctgcctggcaaggcagtatctcatggggtgtcttcctcttgtgctgatgtttgatatgaaggaagaattgaagtggacccanagttcattgcgcagctgatggagcagctcctcgaagtccatcacattctgggaatgctggtgacttgaagcagatgctgggtccctccaaggtctcctgtgccaagagacagacagagctaagtaaaaaccgaagaaaactgtttgaaccatcaactgcatgcacctccttcctagaaggcggagccagtgggaggctgccccgccagtatcactcagatattgccagtgtcagtggccgttggtagcggtaccttctggacacacaatcacctgctatctgcagagatggacacgatttgtggacagtcttcactgcacctgcccgtctggcactctgggtatctggtatcgggaccaaag

SEQ ID NO: 7801 - DNA, 689 bp, Cricetulus griseus
gccgttaaaaatggcgaccgtcactgagctgaaagctgttttaaaggacaccttggaaaaaaagggagtgttaggacatttaaaagcaaggatccgtgctgaaattttcaacgccctggatgacgatcacgaaccccgcccatcattgtctcatgaaaaccttctgattaatgaattaattagggagtatttggaattcaacaaatataagtacacagcctctgtcctcatggcagaatctggccaacccatagtgccattggacagacagtttctcatccgtgaactaaatgcctttgaagaatcaaaggataactcaattcctctgttatatggaattttagcccatttcttgcgtggtcctccagatggcatgcagaacgtgctgcagactgagtcgacactccaacctccaaacaggcatcccagctggaagcccaacagaagaccaaatgacaaccacctgaggaaggacacggggctgagcaccatgactgaagagcttcatgctgctgtgcaagcagtcagtagatgatgcatgcaccaggcaggctcctgatctcagctgtgcatgtggagtaataacttcttattcccaatcccatcaatgagaccaccattgtttgtaaacatgtgagcttctatatattcagcccctcaaggtttactgcacctgtgaaaagctcatc

SEQ ID NO: 7802 - DNA, 689 bp, Cricetulus griseus
tgacacttgtacaggagccacagcagatgcctgtggtccccctgtcatggttcctcccgagcctgtttgctgccttcaatgtaatgttgctggtctttttgagtggccttttcttcgggttcccttgtaggtggctggctcagaacggagagtggctctttcctgtgatcacaggtccactcttcatcctcaccttctacagtctcgtttccctcaacttctcagatcctggtatcttacatcgaggctccatccacgaggaccccatgacggtgcacgtggtgagtgtgaaccggagagccttccgcctgcagtggtgtccaaagtgctgctttcatcgcccaccccggacctaccactgcccctggtgcaacatttgtgtggaagattttgatcaccattcgagagcaagtgcaagtaccatcaagaatacaacccctttgaccagggctttgccaggaactggtatctaactatgtgtgcaccactgggtcccaagtatatgtctgatgttatctgtctgcaaagaccatggggacaggctggatccatgagaagacacagccctcaccaccatgccctcctgaacacggttctccaggcccccatggcccccagccccaatcttcgagcacagcagggaaggggcccctaggaagtggtgaggctgccattgttctccaagagat

SEQ ID NO: 7803 - DNA, 689 bp, Cricetulus griseus
  modified_base (116)..(116): a, c, t, g, unknown or other
  modified_base (121)..(121): a, c, t, g, unknown or other
aattaatcgacgaatctagaaactctaaaaaataaaaaaaaaagttaatttaaaggagcccagcgccgacatcttaaagccacatgtgctaattgctgcaagcaacctccagtggnacccngaatccagatcaggagtgccaacgttattttgtcccggggaaatctttccatagtttctgccagtccaaaggaggtctacttccagaagcgagtcaacagaatgaggcaaactgttgagaatatcgatacattttacaaggaggcagaaagaagcttttacatctgcttaatggaaacagtcccaagtggtccaccccaaataaagacgaagagccttggattttctgagtcggctgcccttacctcccccggtcagtcccatttgtacctttgtctctccggctgcacagaaggcttttcagccgccacggagttgtggcaccaaatatgcaacacctatgaagaaaaagaacccagttcccctcagaggaggacgccatttcagaaggacagtggcatttctcttctggaacaagattcggtagctgatgaagaacttgccttcctcaatacccaagctcttgtacctggctcaccagaagaaaatcaacaacgtacttcctggtgactccacaagaaccaaaataaagatatttgctttggttttttagaaaaaaaaaaaaaaaa

SEQ ID NO: 7804 - DNA, 689 bp, Cricetulus griseus
tgaagcgaaggggtcgccatggagctgacgggcgagtacgtcgggtgtgacggcgagccccggcggctgcaagtgtcctgtgaggcgtcgggcgacgcggaccctctccagagcctgtcggcgggtgtggcccggatgagggagctggtagccgagttcttcgggcccctcgtggagcagcgggacgcgcagggcgtgacggcagatccggaggacgccgaggagggtgatgatgaagatgatacagaagatagaaaaaaacattggtagcagaactaactcagatggaccatctgcaaaacgacaaaaaccagcatcttagcaacagtttttatgaaattaagactgctactaagttgagtgagatgttgtatatttgtaatcccagctacttcagagactggggcaggaggattgaaagttggagcctggcttgcaatatatgtcaagacattgcttcaaataaaagatcaagacatcggaacacccctatttcctgatcttcatgtgctagtacttgcagaagacctgtgctctagttggggaactcatttattttctctcattggaaaaagtttgtcacaaagaaaacttcctgtttctaacaaagaaaagtacaataaatgtttgggaatgaagtcttgttttctcattccaaaatacaatgaaccattcataatagataaaat

SEQ ID NO: 7805 - DNA, 689 bp, Cricetulus griseus
atttcctggttctgtgggctccgtggtaatgagttcttctgtgaggtggatgaggactacatccaggacaagtttaatctgactggactcaatgagcaagtgcctcactaccggcaagctctagacatgatcttggacctggagctgaagagctggaagacaaccccaaccagagtgacctgattgaacaggcagcggagatgctttatgggttgatccacgcccgatacatcctcaccaaccgaggcatcgcccaaatgttggaaaagtaccagcagggagactttggctactgtcctcgtgtgtactgtgagaaccagccaatgcttcccatcggcctttcggacatcccaggcgaggccatggtgaagctctactgccccaagtgcatggacgtgtacacacccaaatcatcaaggcaccaccacgacggacggcgcctacttcggcactggtttccctcacatgctcttcatggtgcatccagagtaccggcccctgcagctccaagccgccagcaacttcaagagcccagtcaagacgattcgctgactcctcgcccacccatccctctatctttaacaccaccattcctttgcttccaccctttcaggaagtctatggtttttagtttaaattaaaggaatagttattgtggtgggaacatgaaataaaaagaaaggccgtga

SEQ ID NO: 7806 - DNA, 688 bp, Cricetulus griseus
gatgcaaacagaccctgccaactgttgtactatgtcatcgtgagtggtgccagccgcaaggaggagcgttgggatatggaagacaacgagcaggtcctgaccacagagcatgagaagaaagaaaaactaggagacagatgccatgttccgcctggagcatggtgaggctgaccgcagcacactgaagaaggccctgcccacactcagccacatccaggaggcacagaatgcttggaaggatgacttcgctctgaatagcatgctacgcaggcaattccgggaaaaaagaaagccatgctagaggaggaagagaaggaccaggcactacaggcaaaggctagcctagccatccctcttgtgccagagacagaggacgaccgaaggctggctgccctgctacggttgcataccttggactcctctgaggacagacagaaactgaagcgcacagagatcatccaccgctcttggttcccttcagcccagggacccagtgccagcagcagcaaagctagcaacgtcctcaagaaactgtgccagggccgcagaccaacccccagcaccacgggcacagtgggggacctgggcatagtgaggagaagatctcgagaagttccagaaagcccccagtgtgcaacagacagttctttgtcagcagaaccaagaggaccaccaagaaccacccagg

SEQ ID NO: 7807 - DNA, 688 bp, Cricetulus griseus
aggcgctttatctttatacaccgctcttaccacacagcagaaactggccggcgtcactgcgctcagttgctggcttccactccggcttcatttccgcagggtcctatcaatagcactaatagagatatttctattctccagtgccatggagattgtgaccctttagttccctaatgtttggttctcttactgttgaaaaactaaaatcattggtaaatccatccaatgtaaccttcaaagtctatgaaggcatgatgcacagctcatgtcagcaggaaatgatggatgtcaagcaattcattgataaactcctacctccaattgattgacgtcactaagaggccttgtgtagatggtcaccagcatcactgttgtagagtataaacctttccccatgcctgatcataaaacttctagtgttcacagtgttaaaatgttttgctgtaagtgacttgtaaatgctgtgagttagactatggttttattcctcagctctttagtcaccatgcaatgtctgtattttatatgtgtgttcatatatccgtgactgtaatacataaaaagtagatggtattacattatccttgatactagggataatgctttttaagtgttcagaaaagtaaataactgctctctccaattaatggcccttttattgagggaccaggctattcttttccttcta

SEQ ID NO: 7808 - DNA, 688 bp, Cricetulus griseus
aaagccaaacgctgcaaccgccgtctgaagtcccagatcctgcttaagaaataacctcatgaagaggcgctggaagaaaaacttacattgctgtcagcgcagccaatcgcttcaagaagattagtagctccggggcactgatggctctggggggtctgagcccagagcagctaagcctggacgcagctgcacagtggtcaaggctgaagccacacagctcagaaggccagagaagagccggccagatctctagaggaggctggtcagagtaaagttgcaccaggccgggaggcttgggctccccaggcccttattcgataccgcttctcctatgtaaacatggagtgtggcctggaatctatcttgccaacgcctcagccccacccagactccaaggacgtccaggccattccctattctctccctagcttccccctttgaactgctgccctgtagcctctgctttgccccacctggggcacccttgcctggagtgggatggctgggggtccagcaggtgggctgctgggtggtgggtgggaagcttctagtagggtaagaatgcagaccagctgctaggggagacagagcgggctttgtgtgagacgacctccacgccctgcctcatactcccaacagatgtggtggtggtggtggtggtggtggttggtggtggtggtggtggtgg

SEQ ID NO: 7809 - DNA, 688 bp, Cricetulus griseus
attttaataaagaaaatgaatttaattgataataattagattcccctaaattcactctgtggatttaaataggtttttctcatatttttcacaattaaaacatttatatttaatgccaaatgcaaataatttctatgtttccatttttatcaccccattgctgttgcaggcactagatctgttttccattgtgcttcagtttcataaacacttatttaatccttttttaattgtacagcaaggtgctcaaagtaatagtctataaatatatttaatagaaacttgagttcgacattcatgggcataaagtatgttgtgaattttttaaagtaaattaagtattgtgtaacattatggctttgcttctgtagccaaagtagagaaccttctggaataccatgtaaaaaagcaacagctgattctgacactgtgtcattaaaactggacgattggcatttggtcatgttacgttgcacatttgagctgcaagccttaaagccaaaactctagagttgtgtgtgtggtagagcaggccacctgtgcagaagagtgcagcaagccaccaggcacctctttaccttcacaagtactgtgcaaaattagaataatttattttgctttacaggagtttgtcatgtattgacttaaatattgtatttggtaataaattttttgttaaaaaaaaaaa

SEQ ID NO: 7810 - DNA, 688 bp, Cricetulus griseus
ctggggagatgtgggctacgcgcgggctggcggtagcgctggccctgagcgtgctgcctgacagccgggcgctgcggccaggcgactgtgaagtgtgtatttcttacctgggaaggttttaccaggacctcaaagacagagatgtcacattttcaccagccactattgaagaagaacttgtaaagttctgccgtgaagcaagaggcaaagagaatcgcttgtgctactacattggggccacagatgatgcagccaccaagatcatcaatgaggtatccaagcccctggcccaccatatccccgtggagaagatctgtgagaagctgaagaagaaagacagccagatctgtgagctaaaatacgacaaacagatcgacctgagcacagtggacctgaagaagctccgggtgaaagagctgaagaagatcctggacgactggggagagatgtgcaaaggctgcgcggaaaagtctgactacatccggaagataaatgaactgatgcctaaatacgcccccaaagcagccagcgcacggactgatttgtagtctgccccatccctgctgctcctgagggaagaacagttcacctgtctcttccccagacaaccattttgtaatttattttttaagcaggcttctgacaatgaggtgtgaagcctggagctttcctaatgatgctggctctg

SEQ ID NO: 7811 - DNA, 687 bp, Cricetulus griseus
agagcatctcagacgggaccttctgctcagcagcagcggccttacggctatgagcagggtcagtatggaaattaccagcaataagggacaggcgttgtctttggacccttcatggtagtatgttctggacaagccagtggcagttctgatgaatcatgacatgttggtcaccctgcgcccagtgccacgtctgcgtgtgaagcaggctcattcatgggtgtgatgacaagcgtgtactcctgactgcgatggtgtgacatacttggtgctgtgtaaagtattgtatatcgatacaatggagaggttgtccttgtttttgtccctcaccccctcctcgatgttcgtagctagcgtttggggggccatactgtcatcacgtgttctgtgcccagtgatgagacaatatctaaaagacagttgtgtatatatttttaaaagcactttgtgagatagtttgtacatttatttcctaatttatacatgatttcggtgttaatatatttaatgattaataataatgtttatttaacgttttgttcatgtttatgtaattttgtgggggaaagcgatgccggccgttctttttcatggactgtattaatagtttttcttctgtaacaagagtgtttggaaagccctagctgaaatgaacccttcatccaggtgtggttgactgtgcgttgtttt

SEQ ID NO: 7812 - DNA, 687 bp, Cricetulus griseus
agatgatatagaaaaataaagtcatatactacatggaaagcaaacctgaagatgatgtctatttaaaacgtttatacccaagacggatttacgaggtggagaaggctattcacttactaaagaaatttcaggttctggactttactaatccaaagcaaggcatttatcttgatttgacattagatatggcatcggggaaaaagaaaaaagtggagccatttgccagtgttattagtttaccatacccttttgcttcagaagtcaacaaagttgctgtatttacagggactgcatctgagattaaaatagcagaagagaatggagctgcgtttgcaggaggagctgacctggttaagaagatcttggatgatgaggttgttgtggacttttatgtagctgttccggaaataatgactgagcttaacccattaaggaaaaaactgaaaaaaagatttccaaagactactagaaattccattggtcgtgacatccctaaaatgcttgaattatttaaaactggacatgaaattgtggtagatgaagaaaggcagaactttctcagcaaccaaaatagcaacaattttttttaatttttaacttttttattttttatttatttatttcagaagacagcaccagatctcataagggatggttgtgagccaccatgtagttgctgggaattga

SEQ ID NO: 7813 - DNA, 687 bp, Cricetulus griseus
  modified_base (24)..(24): a, c, t, g, unknown or other
  modified_base (33)..(33): a, c, t, g, unknown or other
ctggatccctacgtgagcttggcnctggctgcngatcctcttctcggtgatcgtcagggttgttggagacctgatggttcggattcagcgcattcaagacttcacccccaagcttctcctggtcagaaagcgactgctcggtttggagcccgaaggccccattattgaccacgtcacattgctggagggcgtgattgtcttagaggagttctgcaaggagctggcggccattgcctttgtgaaataccatgcttccaccacaccctgacagacctagagtcagcacaagtcatggagtgtatataaatatgtgtgtatggaccatatttggtctatatatgtatatggaccaaaacccttagcttgcttacactgttgctagtgtaaagattgttacaattgattttacagggcacaaattgtagaatgacttcatactttcatggtaatgtctccataaattattaacattactctacagttaccatttagctattaagtttactgtgtaacagaagaagttaacagtgaaatgctaaacccacagactagatggtaattgtagatttggggttgtacaataaagtaaaatatgcatgtcatagtgacacttgataatcctacttctgccctgtaaaatattgtcactaatactctgttggcctcctgccttgtttacattaaaca

SEQ ID NO: 7814 - DNA, 687 bp, Cricetulus griseus
tccaagaagaagagtaaagcaggagtgctactttcaatggggtttgggtttgtggaatacaagaagccagagaaggcccagaaagccctcaagcagctccagggtcacgttgtagatggccataagctggaagtgcgaatctccgaacgggccactaagcctccttgacacccactcggaagaaacaggtctccaagaagcagacaacctccaagattctggtgcggaatatccccttccaggccaaccagagggagatccgggagcttttcagcacctttggggaactgaagacagtgcgcctgccaaagaagatgacagggacaggcgcacacaggggcttcggctttgtggactttgtcaccaagcaggatgcaaagaaagccttcaatgcactgtgtcacagtacccacttgtacggccggagactggttctggaatgggcagactcagaggtgacgttgcaggctctacggaggaagacagccagacacttccaagagcccccgaagaaaaagcggtctgcagtgttggatgggatcctggagcagctggaagacggggacgacgatgacgacatcgagcaagctcttcagctgtgatctagcacagccagggtgtgtggctccagggccctggggccaggcagggcatgtcaggaggtctcccatgggtcagagacaaaag

SEQ ID NO: 7815 - DNA, 687 bp, Cricetulus griseus
gtgtgtggaggacatcagtgacatcttggaggaacacgcggagaagcacttccacccttacgttgcctactgctccaacgaggtctaccagcagcgcaccctgcagaagctgtcgaacagcaacacagccttccgagaagcgctcagggagatcgagaaacggcctgcgtgtgggggcctgcctatgatctccttcttgatcctccccatgcagagggtgacccggctgccgctcctgacagatacactctgcctgaagacacagggccatcccgaaaggtacaaagctgccagccgtgccctaaaggccatcagcaagctggtgaaacagtgcaacgaggggggcccacaaaatggagcgcacagagcagatgtacacactgcacacgcagctggatttcagtaaggtcaacaagtccctccccctcactctctgcctcacgctggctgctgaagcgcggggagcttcgggatggagaaactggctggtttcctgaggagctttgctcgctctatcaccagtcgcgtggcggtggaaggcaatgtacgcaggatggagcggctacgggtggagacagatgtgtagctggacagttctgaaacccaccatggtggacgcagcttcagtccttcaagcagcaagtggttctgcctgactccaaggagtacaaggggtttgtcatggga

SEQ ID NO: 7816 - DNA, 686 bp, Cricetulus griseus
  modified_base (570)..(570): a, c, t, g, unknown or other
gagacaggtggccagcagcccaggaagccagccgaagcctgccccagctttaggccccactgttcctgtgagaccatcagcatgtctgagccacctcgggctgagacctttgtattcctggacctggaagccactgggctcccaaacatggatcctgagattgcggagatatccctttttgctgtccaccgttcttccctggagaacccagagcgggacaattctggtgctctggtgttgccccgtgtgctggacaagctcacactgtgcatgtgccctgagcgcccctttactgccaaggccagtcgagggattacgtggtttgagcagtgaaggcctgatgcactgccggaaggctggtttcaatggtgctgtggtgcggacactgcagggcttccaagccgcacacgctgcttctgatcttcctgcaccgtgctgctgagctgcttgcctgggcagatgagcaggcccgtagctgggctcacattgagcccatgtatgtgccacctgatgggccaagccttgaggcctgaatgccagtgtcattcattcatccaggctctgagacangttttttgctctctgcagcacctgcctggccttcctcagccctggcctacctgaatataggatcccagagccttctctgttccccacctccagttggacaccctctggccagcctg

SEQ ID NO: 7817 - DNA, 686 bp, Cricetulus griseus
acatggtgttcaggcgcttcgtggaggttggccgggtggcctacgtctcctttgggcctcatgctggcaagctggtcgcgattgtagatgtaatcgatcagaacagagctttagtcgatggaccttgcactcgggtgaggagacaggccatgccttttaagtgcatgcagcttactgacttcatcctcaagttcccacacagtgcccgccagaaatatgtacggaaagcttgggagaaagcagatatcaatacgaaatggtcggccacaagatgggccaagaagattgatgcccgagaaaggaaagccaagatgacagattttgatcgtttcaaagtaatgaaagcaaagaaaatgaggaacagaatcatcaagactgaggtcaagaaacttcagagagctgctatcctgaaagcttcgcccaaaaaagctcctgttgctaaggctgccattgcagcggcagcggctgcagctgcagctgctaaagctaaggttccagccaagaaggggacagcaccaggcaagaaggctgcaggccagaaggctgcaggccagaaggctgcaggccagaaggctgcagctcctgctaaaggtcagaagagtcagaagaccccgacccagaaaacccctgctgcaaaggcagctggaaagaaagcatgaggctgtacaaagtaataaaggctcttt

SEQ ID NO: 7818 - DNA, 686 bp, Cricetulus griseus
tgccgcgtgcgggctgtcccgacaggtacggagcttcagtacatccgtggtcaggccctttgccaaacttgtgaggcccccggttcagatatatggcatcgagggtcgctatgctactgccctttactctgctgcagttaaacagaacaagctggaccaggtggagaaggagctgctgcgtgtgggccaactcctgaaggaccccaaggtgtctcttgccgttctgaatccctatgtcaagcgctctatcaaagtgaaaagcctgagtgacatcacagcaaaggagaagctttctccgctgaccgccaacctcatgaatttacttgctgaaaacggtcgcctagacaatacccatggcatcatctctgccttttccaccatcatgagtgtccaccgtggagaagtgccctgcatggtgaccacagcatctgctttaaatgaagctgttctctctgagttaaagacggtgctgaagagcttcctgggcaaaggccaagtattgaacctgaaggttaagactgacccgtcaatcatgggtgggatgattgtccaaattggggagaaatacgtagatatgtctacaaagaccaagattcagaagctcagcaaggccatgcgggacttgctatgagagactgccacgtgtctgagctctggtccttggagcaacaataaaacgcttcctg

SEQ ID NO: 7819 - DNA, 685 bp, Cricetulus griseus
ttttgttagtgacattgacatgcttctctcctcccaagtgagtgaggaacacagtccagtcagtcggatgagaaccgaatttctgatgcagctggacactgtactaacttcggctgaggaccaaatcgtagtaatttgtgccaccagtaaaccagaagaaatagatgaatctcttcggaggtacttcatgaaaagcttctcatcccacttcctgacagcacagggaggcaccagataatagtacaactgctctcacagcacaattactgtctcaatgacaaggagtttgcactgctcgtccagcgtacagaaggtttattttttgtttgcctcacaattacattggtggcatgtgctaatataaagagctttaacttcaaacattattggactaaagagatgaacggttgtgttactacagaaaaccagatttttgccattttaagagcaacagtattcctcaatcctgtctgttctgcagtgttaagctaagaacaggtaaaacagggtaacggtaatctggaccttaatttctgcagttcatttcttttaatgttcttgtctgcaaaaactcaggaaagtgattgtgatttgtacagtacctcaaaggaatgtagttaaaagcactatgtactgctgagagtaataggctaggcttcaattgttactttatattaaatgtatg

SEQ ID NO: 7820 - DNA, 685 bp, Cricetulus griseus
gatggaccagttctgggaggctgtgggaaggcttcagctggtctggaggtgccttcttataccctccaatacgagaccaccttcatcaacatgtctaaggagaatgtggacatgagggatgcttacctgggttactccaccgcactggccttttggaagggggtctacagcctggtcctgggggcccctcgacaccagcacacagggaaggttgtcatctttacccagaaatcccagaaatggaggcccaagtctgaagtcagcgggacacagatcggctcctacttttggggcctcccctctgctctgtggacatggatggagatggcagcactgacctggtcctggtcggggccccccattactatgggcagacccgaggagggcaggtatccagtgtgcctgacccagattcaaaggcgttctgtgctggactgctccattgccgactgtctgcacttccgctgtgacatcccttccttggacatccaggacgagcttgacttcattctgaagggcaacctcagcttcagctgggccagtcagacattgcagaaaaaggtggtggtcatgagtgtggctgagattacattcaacacctctgtgtattcccaagactgccgggacaggaggcattgtgggcagctcggtgggaggcctgctggtgctggctctcatcacagct

SEQ ID NO: 7821 - DNA, 685 bp, Cricetulus griseus
gcgatgttattctgctgcgggagctggtgcagtggctgggcttcgccacctttgagatcttcgtgcacctgctggccctgttggtgttctccgtacttttggcactgcgagtggacggcttggccccgggccgtttcctggtggaatgtgtttgtgccggtttttcgccgccgacgggctcagcacctacttcaccaccatcgtgtctgttcgcctcttccaagacggggagaagcgactagctgtgctgcgcctcttctgggttctcacagtgcttagcctcaagtttgtctttgagatgctgctgtgccagaagctagtggagcagactcgagagctctggttcggcctgatcacgtctccggtcttcattctcctgcagctgctcatgatccgggcttgtcgcgtcaactagcctcgtgcaggggctgggaatggagcactgcgcagctggagtgctgggtcatccagtccagaccctacttggcgccacactggagaagctttggtcagaaatccgtgtctgcttgtgccccgtttactgtccagttttctctatatctaagattgtttcctcagcaaaacttaaaagtgaagcctcgattattaaaagttatttcctgttactcatgctctgagttgccagacaatactgaacttttatgacatttggaaactgcatata

SEQ ID NO: 7822 - DNA, 685 bp, Cricetulus griseus
tccttcgggaccggcctcccgaacctactgcaggcttgagacggccactcagcagtcccacacggttggattttgttttgtttttgtttttgagttgtatcctcatgcaaccttgtcaaagacctcatgcaatatcactttgaaatttattttctgtttactacacaaacattgtaatataactgttaatactatttatatatttgaaaggtataagaggtaggagttaaaaaaaataaaacctctatgtgtagatattaactcagaacttacactctacagggagaagacacgttgtctggagttctcaaagggacatttcctgtacttttcaaataatgatgttgaaaatggttaccttgacatgagtgtcatgtatctttgcaaaaggatggctgtttgcagttgaggcctgggcccgcccttcctgtttctgtagatgctgcagcttaatcagaaagtcctcagttgctgcttcctgatctccgagttactctttccaaattgtcttctgacaccgttgctgaagtcaccctgtacatgtcctaggcaccaatttttttgcccaagctcttacaggtggttcatcgatcgatggcatccgcatttggtatcttttacacttcaaccaaaaatttattaggtatttttcaatgctaagtcttgccttttatttttaatttca

SEQ ID NO: 7823 - DNA, 684 bp, Cricetulus griseus
gagcctaacagtgtccacggcaacatggccttgaacggcgctgaggttgacgatttcgcctgggcgcctccgacagaagcagagacgaaggtgctgcaggcgcgacgggagcggcaggatcgcatctctcgtctcatgggcgactacctgctgcgtggttaccgcatgctcggcgacacgtgcgcggactgcgggacgatcctcctccaagataagcagcggaaaatctactgcgtggcttgtcaggagctcgactcagatgtggataaagacaatccggctctgaatccacaagcggccctctctcaagctcgggaacaccagctcgcctccacgacagagcctgccacaggctctcgtcccacaccccagcccccagtaccccgtccagagcactgtgagggagctgcagcagggctcaaggcagcccaggggcctcccctacctgctgcacctctaaatacagatgtggtggcttacacacagacagccctcctgcagaagctaacctgggcttcagctgagctgggctctagcacctccttggagactagtattcagctgtgtgggcttatccgggcttgtgctgaggccctgtgcagcctgaagcagcttcagctctgagacctctactccaacctctgttcccctgagaaaaaccctctagaaaaacagctgttcctc

SEQ ID NO: 7824 - DNA, 684 bp, Cricetulus griseus
  modified_base (57)..(57): a, c, t, g, unknown or other
ttaaaaagataacaaaacaaaaaaaaaaaaaaggcgactctgcagaacagcccttcnggtgaacacaggtcaagaaacctacatgagtgacatcacatcaccagctgtctgcatcagtggccctaccactacttagcttgttatttaggtgtctacaatggcctgaaccactatatccatcctatgccatttactgaaaacttaattttggcttttacatggccagaaaaacaaactagttttcatagttaaaaaaaaaaaaaagaaaacaaaaacaaaaaaacctcaattgaggggagtcagcagtgatcatggggaaatgtttacatttttttttccttcagaaataccactttctgatgattttatctgatatttaaaacagggagctacggtgcactctagtttgcacatggtgtgtaaactcggggttctcacctgcagcgagctccacatttcacccagcgcatgctcactcccatctcagcagcgggtgctcctgcagcgcgtgggcacagctgactccgacttccaatacaacagccatcactagcacagtgttttctgtttaaccaatggagttgtatcagtagttctagcaagagaactgcttttaacattagggactgggagcagtccatgagctaaaaaggaaagtgttttctcacgagaaaacatgtcagg

SEQ ID NO: 7825 - DNA, 683 bp, Cricetulus griseus
  modified_base (631)..(631): a, c, t, g, unknown or other
gaaactgtgctgtagttaggatgcttttctgcagctatgtcagttgggcttaaaatttagcaccagccatattgagagaagattattctgggtaaaaggaataggaagaccctctttcttaaagcaaaaaacttggtctttgtacttttacatcatggatctattgaatgatcatgttccatcaaagaggttgctcaatgctgacattgtttgaagtctttgaatgtatgaaaactgtcagttggaaaacaaacctcatcataaatgtggacataagtatcaaaagaagaagatattataaaattccaaattattataatagtccaaacaatgtaaagaagataccactagaatatcaaattccagctttaagccgtaataacagttgataatgccagtattttcaccccagcctgatctgggaggactataaacttccaagaaggaccataagctgcctaatatactttagaagaacttttttttacacaaatttatcagagtttattcctactgttttgatgaatgcctaccacatttagaattctgtcaatagccagcatggtggcaccctttaaggaccccccatgaagatgtgaaatttggttatctatactgattggggaaaatntaggggaattccagttgacattaaggaagggatcttgaactctccttgccat

SEQ ID NO: 7826 - DNA, 683 bp, Cricetulus griseus
cgagtacgtcccatagaggaggctgcactggaatataaggagcaaatccagaagcagctggagcgcctgagggagctgagggtgtgtgtggaggaacacagtctgcagggggataagaagacagagaacttcctgaaagaaacagaaacccagcagcagagggtttcgtgtcagcttgagaagctgtaccaattcctggagcagcaagagaaactctttgtgacctggctacaggagctaggccagactattggcaagatccgagagacatatgacaccagggattgccctcctggatgaactgattggagaactggaggccaagcaagaccagccagaatggaagctcatgcaggacattggagtcacgttgcacagggccaagatggtgactgtctctgagccatcggccactcctccagatgtcaaagagaagatccacctgctctatcagaaatcaaagtttgtggagaagagtatgcagtacttctcagaaaccctgcgctctgaaatgaaaacattcagtgctgtggatgtagacaaaagtggggagagtgctggcctagcataccacaggcccagggtttgattcccaacacttaaccaaaaatgggaatggtggaaacacactggactatgatatagtactttatccagaagtggaagctggaggagcagagcct

SEQ ID NO: 7827 - DNA, 683 bp, Cricetulus griseus
gatgggtttgagcagtgtgattgcaggatggctgtctgatcaaaactgttagataccccataaggactcctagagaaggctgttatggagacatgatggggaaggaaggagtcaggacctatggattccgctctccccatgaaacctatgacgtatattgttatgtggaccatctggatggcgatgtgtttcacatcactgaccccaaataagttcacctttgaggaggcagaagaagagtgtcgtctgcagggtgcccatctcacaagcatcctgtctcacgaggaacaaatatttgtgaatcgtgtgggtcatgattaccagtggataggcctcaatgacaagatgtttgaacatgacttccgttggactgatggcagcgcactgcaatatgagaactggagacccaaccagccagacagcttcttctctgccggagaagactgtgttgtgatcatttggcatgagaacggccagtggaatgatgttccctgtaattaccatctcacctacacttgcaagaagggaacagttgcttgcggccagccccctgttgtagaaaatgccaagacctttggaaagatgaaaccacgttatgaaatcaactccttgattagatatcactgcaaagatggtttcattcagcgtcaccttccaactatccggtgtctaggaatgggaga

SEQ ID NO: 7828 - DNA, 682 bp, Cricetulus griseus
  modified_base (675)..(675): a, c, t, g, unknown or other
cgcgtgagcagccagccaatgtggaacaatggcgactgagccactccgtgaaggagcgaaccatctctgagaacagtctggtcatcctgttgcagggcctccagggccagataaccacggtggaccttcgagatgagagttcggctcgaggacgaattgacaatgttgatgctttcatgaacatccgactggccaatgtcacctataccgaccgctggggacatcaagttgagctggatgacctctttgtgacaggccgtaatgtccgatatgtccatatcccagatgacgtgaacatcactgccaccatcgagcagcagctgcagatcatccatcgtgtgcgctaactttggtggcaagggtcaaggtcgacgagagtttccctccaaaaagctgtgaagccgtgtcctcattgaacttcgagcaccacctcagggtcctccagtgttctgagccaactccctgctatccttccctaccagtgacctggtatctatgagacacctgttccacttttcagacacactctgggacccagaattccttctgtctgtgaccttggggtaggtgacaatccctctttttgatcatttgtatctggaatctccatttatggattgaccacgtctatcaaggagtaatcaactctgccagcgaggaatacacacaacaaanaaaaaaa

SEQ ID NO: 7829 - DNA, 682 bp, Cricetulus griseus
tggacagagaaggagcctgttccctgcctcttaccatgggtacaaaccatgaaggattttgtcaggagaaggtgctgggccagaaaatgcaagctggtgaccagtgggccgtggctagaggtagcccctattgccctcagcgatgtgtccatcatcccagagggtgcagatgtggatggacgaggacaccacattgcactgtgggcggctctgcattctaccggggctctgtgtcgccctctcagccagctggtgactgctggtatcacatcccatctctcccaaacagaagctgacacaggtgtctgtgggccagacatcagtatatgccttggatgaaaacgggaacctgtggtaccgagcagggatcacccccagctacccgcaaggctccagttgggagcacgtatccaacaatgtgcgcaaagtgtctgtgggggccactggaccaggtctgggtaattgccaacaaagtccagggaagccatggcctgagccgtgggacagtgtgtcgtcgcatgggtgtccagcctcgggagcccaaagggcagagctgggactatggcattggaggaggctgggaccacatctctgtccgggccaatgccaccatggtacccaggaacatgtccagggaacaggaggcccatgttcaaggtcccgtttactgctgaagcctctc

SEQ ID NO: 7830 - DNA, 682 bp, Cricetulus griseus
actgcagaatccatcttctacaagggagtgtattaccaaattggtgatgttgtttctgtggttgatgagcaagatggaaagccgtactatgctcagatcagagggttcattcaggaccagtactgtgagaagagtgccgccctgacctggctcattcccacctcgccagccccagagaccagtttgaccctgcgtcctatataatagggccggaggaagatcttccaaggaagatggaatacctggaatttgctgccatgcaccttctgagtatttcaagtcaaggtcatcaccatttcctacagttcccaccagaccagagaagggctacatatggactcatgttggacctactcctgcaataactattaaggaaacagttaccaaccatgtatagttaacaaaaccaaacctggggcatgttttagcatgtatgaagcttttggttctaatccccagaaccatactcacacaccccaaaataaaaccagatttccaatttcttacattttaatataataagatagtgggcaggcacccacttgctgcctctgtcctgatctatgcagatacaagttttaaccacagtaatctatgagaatttgacatgatcttaatgattttcaccagaactcttttatctttgtcatcccaaagttggaaagaagcatcttcttcctta

SEQ ID NO: 7831 - DNA, 681 bp, Cricetulus griseus
gttacagaaccaactcttagaacatagagactctcaaggctgagacagataggcatggtcacctgtgactaacttaagtcagtaggacaagctaaagctttgcctgatgtgacttcacgtcttgtgaaggcctgtggagaagatcaggatcaggagattgtgattgtgaccgggtggaatacagcttgacccaaaacacagtgactgggtggatggggtgcatcactcacagaacttccacactcccacccaaaacaacgaataaaatggggaccaatgttttttaactttgcatatttgttttgggggtaaatttctcccatttccttcaaccatgggcaacacccttcatttatgagaagaaaaactgttggaaccacaccaatgatattttcatttgtgatacttgaaatttatttttttattattttgatagcagatgtgctatttatttatttaatatgtataagggagcctaaaactagaaagctgtatagattgggtttaattgttcattggtttggggcctttcaatgtgtgattgatgacttcatgttctgtgtaattgtctctctcaagggcctgggaagaagctatgcaagcttttaaacaggacacacctttcagaaatttgtatattttgcagttgctagaacaataaaaacctggttgagatatacc

SEQ ID NO: 7832 - DNA, 681 bp, Cricetulus griseus
gagtgacctcaaccgcgtggactttgccaatgttcaggagcaggcctcatgggtgtgccagtgcgaggagagcctggtacaacgtctggaacatgacttcaaggtgaccctgcagcagcagagctcactggaccagtgggccagctggctggacaacgtggtcacccaggtgctgaagcagcatgcaggcagccccagcttccccaaggccgcccgccagttcttgctcaagtggtcattctacagctccatggtgatccgtgacctgaccctgcgcagtgccgccagctttggctccttccacctcatccggctgctgtatgatgagtacatgttctacctggtggagcaccgtgtggcccaggccactggagagacgcccattgctgtcatgggagagttcaatgatctagcttcgctgtcgctgaccctgctggacaaagaggacattggggatggacacagcagtgaggcagatgtggatggccgcagcctgggcgagcccctggtgaaacgggaacggagtgaccccagccacccactgcagggcatctagccccttccctgggcgccttccaccagcttccggaaggcgtcacctggccccccagggaccctggactctcagcctatcacactagtgcctcttagatgatgccatgtttactgtgacccaaggtg

SEQ ID NO: 7833 - DNA, 681 bp, Cricetulus griseus
cgggaatacctgacaggcttccacaaacggaaggtggagaggaagaaggcggccattgaggagataaaacagcggctgaagcaggagcagaagaagctccgggaagagcgccaccaggaatacctgaagatgctggcagaaagagaggaggcactggaggaggcagatgagctggagcggctggtgacagcaaaaacagagtcggtgcagtatgaccaccccaatcacacagtcaccgtgaccaccatcagtgacctggacctctcaggggcccggctgctaggtctgcccctgcctgagcaaggggacctggatgggtcccaggaggaggtgtcatgcatggagaagccaacaaaagccttgcccaggaagtccaaagatcccctcctatctcagcgcatctcctccctcacagccacactgcatgcacacagtcggaagaaggtcaagaggaaacaccctcggcgggcccaggactccaccaagaaacctcccagtgccactcgtaccagcaagacccagcgccgccgccggatgaccggaaaagccaggcacagcggggagtgagccctcaagaagcctgtgggtccccagccaaagtccgtggctgtccctgcaacccagctctgctgaggggtaactgcagcctaagcctgaaaaccaggacttttccagcctggg

SEQ ID NO: 7834 - DNA, 681 bp, Cricetulus griseus
cttctctcgccggacgcttgtggctcgcccgcggccatgggggaggccgaggtgggcggcacgggcgccccaggcgacaagggccccggcgaggcagccccgagccctgctgaggaaacggtagtgtggagccctgaggtggaggtgtgcctcttccacgccatgctgggccacaagcctgtcggggtgaatcgacatttccacatgatttgtattcgagacaagttcagccagaatattgggcgccaggtcccatccaaggtcatctgggaccatctgagcactatgtatgacatgcaggcactgcacgagtctgagattctcccattcccaaatccagagaggaactttgtccttccagatgagatcattcaagaggtccgagaaggaaaagtggtcattgaagaggagatgaaggaggagatgaaggaggatgtggacccccacagtggggctgatgacgttttttcatcttcagggagcttggggaaagcattagaaaaatccagcaaagacaaggagaagaactcctcagacttggggtgcaaagacggggcagacaagcggaagcgcagccgggtcactgacaaggtcctgactgccaacagcaatccctccagccccagtgctgccaagaggcgccgaacatagacacctcagccccaggtgccacagagatgc

SEQ ID NO: 7835 - DNA, 680 bp, Cricetulus griseus
ggtctcgagcagctgccagagccgccggacggaccgccgcccccgccacgccatggccgagagcgactgggacaccgtgacggtgctgcgcaagaagggccccacggccgcacaggccaagtctaagcaggccatcttagcagctcagagacgaggagaagatgtggagacatccaagaaatgggctgctggccagaacaagcagcattccatcaccaagaacacagccaagctagaccgggagacggaggagctgcatcacgacagggtgaccctggaggtgggcaaagtgattcagcggggccgtcagagcaagggcctgacgcagaaggacctggccacgaaaatcaatgaaaagccgcaagtcatcgcagactatgaaagtggacgggccattccgaataaccaggttttgggcaaaattgagagagccatcggcctcaagctccgggggaaggacatcgggaagcctatcgagaaggggccgaaggcgaaatgaacacaaagcctcgaagccagtggttccggctgagctcttctggctggtcccccaggaccaccagcactgccgtgggtctcctcacatggtcaaacggaacatgggggtcaggcctgtgtgccccctcaacccatacctgctgtcaaacaaagcaaaaccttgcaaagtaagaaaaaaaaaa

SEQ ID NO: 7836 - DNA, 680 bp, Cricetulus griseus
ttcaccgcggttgtcgcagttccggaggagcgtccgctgagttctgacggcccgaggctgctctgccggcaggcaccggtagcggtgggttcccgctccgccaacccagctcctgcgggatccccggctggccccgggcccggacaccgcactcacggcggctccgccgcaggcgcggagcgagcagcagcccgcgtccgccgaggtcggcgtcatgaggagcctgccgttcttctgccgcggcgaggtggtgcgtggcttcggccgcggctccaagcagctgggcatccccacggccaattttcctgaacaagtagtagacaatcttccagctgatgtgtccactggcatttattatggctgggccagtgtcgggagtggagatgtccataaaatggtggtgagcataggatggaacccatactacaagaatgtgaaaaagtccatggaaacccacatcatacataccttcaaagaggacttctatggggaaattctcaatgtggccattgttggctacctcagaccagaaaagaacttcgattctttagaatcacttatttcagcaattcaagctgatattgaagaagccaaaaagcaactggatttgccagaacatttgaaattcaaagatgacaatttcttccaagtttctaaaggcaaaattatgaatggtcact

SEQ ID NO: 7837 - DNA, 679 bp, Cricetulus griseus
cgcatagaaattgccaacaacttgtgtctcaacgagagacagatcaagatctggttccagaaccgcaggatgaagtggaagaaagattccaaaatgaagagcaaagaggctctttagaggaagcggggagcccagcctgagttaaggtgagacaggaccagctgccaccccttagccccgacctccacctcaccctctttgtttctgcctaaggtggccaggccgctaaaggctggttgtaccaagcagaaggtatgaccagactagacgcgcggtcctatagcctatagcaactaacctttatagcttctaaactcgtctttacttattaatgatttgcatatgaaagagggagatgagtgaaagtgggcctgtagacctggaggttgtcccatgcactccagaccttctaaccccctccccaaaacccgggagcctccccagcctggcctgctgcatgcactctcaggttcacagccccagcctgctacctagctcaactattggggtctcttgccttaggaccccagcaagtggtttttaaggcttttttgctatcctatatatcttgccatgactttctcaccctcctgccccattgcagtgcaactatttattgactccaggtccttcctgaaacctatattttgtcatatcaaataaagacaaagaaagaaca

SEQ ID NO: 7838 - DNA, 679 bp, Cricetulus griseus
  modified_base (332)..(332): a, c, t, g, unknown or other
agctccagccagtccaccgacaatagcctcctgggctacccacagcaagtggaagccagcttgagccagaggaccaggacagcgatgaggacgacatcatcattgaagacagtggcgagccacagcagatcccaaaggctgccccggatgcccagagcctggagtccctgacgcagatagaagctcagttttgaggcggggcaagaatgggttctcccctccacaggacatgtgcactttttatacaaaagatggagtttttcttcctggggattctaggatgctgcctccacttcaggaagcctgtgtcaagttcgccacccaaaggggtnttaattatgagttatttattctcttctgcatccattcaggaagagggcatgggttcaactttgtaagtacaaatacttccatatactacctctctcttctctctctctctcttctttttttaacagagttttaacattagagcttttctcttgaggaaaaacttcagggcttgacttttgtacaaattttaactgtaaaacacagatttatcttccgtctgaaaatggagagcaaagctgctgacgcctgtcttaacttaaggacaatagtgtttgtcaagttagctttagttacatattatttttacaaataaaaatggacttgtataaaggactaaaaaaaaaaa

SEQ ID NO: 7839 - DNA, 679 bp, Cricetulus griseus
gcaggcaaaggtacactggggaccaccgtgttcacgtgacattaagaggaaacggaaacctgtggcctcagcatctttatctagctctagtacagtgcacccagatgtgctggagccagccaccccatcccagaagcctccccactccacgtggttggacaggaccgctgcagcagagaaagccactgcctccgctcctgccacgtttttcaaaatgccacatgaaaagagctctggatgcagctagagcccagtagctgatgagtgttggaactgcattgtacagtcttggtgtcctaattggcattcctggtccctcgtaccaccaggaccacctcctcttcacatcagcagcagctctttcttatggaaaaagttgtatatacggttgagcctgaagtctggatgctactttgtcaaagtgaggaatatgtgactgcctggagctgctggggaaagccacatttcccaaaagtattatcaagagcacctgtcattcagaggcctgcttgacagggtgctcttactttgtgtcaaccgagtgcttttactctgaaatacacaggagctctttgcagaatgctcactgctctggtcgaatgggacagaacacctctcccttagacaggtgccaagtagtctagtgcctccttttcccaaagtgtaattgtccctccca

SEQ ID NO: 7840 - DNA, 678 bp, Cricetulus griseus
ctcttcaccatgcacttctttggaggcattgaagtcttcatcctcacaggaatggcctatgaccgatatgtggccatctgcaagcctctacactacactatcatcatgagcagacagaagtgtgatgccatgattgctgcttcctgtgctgggggatttctgcattcctttggtcaatttctcctggcagtcttcttaccttactgtggccccaatgaaatagatcactacttctgtgatgtataccctctgctcaaattggcctgtactgacaccagaaagattggtttcttggttattgcaaactctggtttgatgggcttagtgacttttgtggtcttgttgatatcatatgctgtgatcatatatactgtcaggtcttactctgcagagaatcgtcgaaaagcactttccacttgcagttcccatgtcactgtggtagtccttttctttgctcccctactgtttatttacattcggccagcaactacattaccagaagacaaagtatttgctctgttttatactatcaacgcccccatgctgaacccccttatttacactctcagaaacaaggagatgaagaatgccatcaagagactgtgttaccgtatcacagggaatgaaggaaacaagttgaaaggcatcactgctttccaccatcacacagtttcttga

SEQ ID NO: 7841 - DNA, 678 bp, Cricetulus griseus
gatgcattctgtatgaactctgcgccctgaaacatccgtttcaggcaaatagttggaaaaatcttatcctgaaaatatgtcaagggcccatccacccccctgccagctcagtattcctacaagcttcaatgtcttgtcaagcagatgctgaaaaggagtccttcgcagcgcccgtccactactaccctgctttgcagaggcagcttagcgccactcgtcctgaagtgcttaccccctgagatcatcagagaatatggagagcaaatactggatgaaaccaaaatatctgagcctaagaaactagaaaaaaggggacccagcagaatgaggagagctatgcccgtaagcagtggctcagagagcccccccgagaccttgttgtcaatgctgaaggatgctgatctcagcctggcatttcaaacatacacaataaatagaccaggtacggaaggattcttgaaaggtcccctttctgaagaaacagcatcagacagtgtcgatggagatcaagattctgtcgttttggatccagagagatttgagcctcggctggatgaggaagacacggactttgaggaagatgatgaaaaccctgactgggtgtcagaactaaagaagcaagtgggacggcaggatgtatgtgatgggaaactcctcggagaatgtgcctgagccatg

SEQ ID NO: 7842 - DNA, 678 bp, Cricetulus griseus
ggagctggtgaccctctgggtgctaaggatggaaatgccccgttcgctcagcgcatcgacccgtcgcgggacaaactgacccctgcgcaactgcagtttatgcggcaggtgcaactttcccagtggcagaaaacacttccacagcggcggacccggaacatcgtgaccggcctgggcattggggccctggtgttagctatctatggttacaccttctattcagtggctcaggagcgtttccttgatgagctggaagatgaagccaaagctgcccgagcccgagctcttgagagggagagagcgtcaggaccttaactgtaccgaccaccttcaaactgctggcgcccctgtacatgttaaacggtgcctggtgatctcacagcatcactggcttacaaacttcggactgtgattgagcccaagaagccacagactctgcatttggccactgccaaagggggattgctcatttcacatgcaatttgtacagttactcagccttcttatttccttgttcgagaggtatgcgaccttgcctttccccaaacttttgtggtttaccccttcacctcccaggggcccaactgttaagggggaggtgtggcgtgtctgcagagttggaacctaaagtgggaacgatagggtcaagttaagagtaataaaatgagtcatctctcc

SEQ ID NO: 7843 - DNA, 678 bp, Cricetulus griseus
  modified_base (418)..(418): a, c, t, g, unknown or other
  modified_base (427)..(427): a, c, t, g, unknown or other
cagcagcctcttgcagcggggcccaggtgagctgggtcgccctgggatcctcacagagcgagaggctgaacctcggatcaaggagagccactcacctggcaaagaggatggcgccaaaactggctgtccgacctccatcgccctactgcaaggcagccctgggtgactgcctgcgcctggcaggcctgttgggtcgggagtccgggaagcagacacctgagaggccccagggcgacgtgaaggtaaaggaggagcgcagggaagagggagacaccggagctcaccggcgtcactgtgcactccacggccacacacctggggtctggggcacgtcgggcttcgtatgggacccgccgcgtgacagctaccggggcctgaactgccgcgccgcgcctttcccgccccgccgcccgcccgngggccccgncccttcgagctgtcggagcgcgcctaccgcaccgggagcctcacgactacagcccggagcgcctgagggaggtgcgccgggaggagctggagcacgcgccatttgagccccagagtttgtcttatttatggaaagaaacggtctttctgtccagcgcactgtgaggctccgcactcaggcccggctctggcctcccttggtacttggaaccgaagttacagatatatatatatatatattaaaataataat

SEQ ID NO: 7844 - DNA, 677 bp, Cricetulus griseus
tttacccagagttctttgctccccttactcagaataagagccatgatgatccaaaagatgcaaaagaaaagcaagctgggacccaagtggagtttgcagacataggctgtggctatggcggtttgttagtggcactatcaccactcttcccagataccctgattctgggtctggagattcgggtaaaggtgtcagactatgtacaagacaggattcgggccctacgtgcagctcctggaggtggattccagaacattgcctgtctccgcagtaacgccatgaagcaccttcctaacttcttccgcaagggccagctgacgaagctattcttcctcttccccgacccacattttaagcgaacgaagcataagtggcgaatcatcagcgccacactcctggcagaatacgcctacgtgctgagagttggggggctggtgtacaccatcaccgacgtgctggagctgcaccaatggatgtgcacccattttgaagagcacccactgtttgagcgtgtgcccctggaagaactgagtgaggatcccattgtggaacatctgggcacttcaaccgaggaaggaaagaaagttctacgaaatggagggaagaatttcccagccatcttccgaagaatccaggatccaatcctccaagcagtgacccccaaccccaccctgcct

SEQ ID NO: 7845 - DNA, 677 bp, Cricetulus griseus
ggtggccgggacatcgccatgcctaaaggactgaaaggaaagattgtaggtcgggaaaagaaagtcatccatccgtacagcaggaaagcagctcagattacaagagagtcccacaaacaagacaagaaggaaagattgaagactgagagggccttgcgtctcaaccttattggtgacaaacttcagtggtttcacagtcatctggatacaaacaaaacgagatatacaaagaaggatgcctgtgaattaattgaaaggtatttgagtcgattcagcagtgagctggagcagattgagctgcataacagcatcaaggacagacagggaaggcgccaccattcccgggaggctgtcatcaagcagacgatggagcgggagcggcagcagtacgaaggttatggcttcgagattcccgacattttagatgctaataatctgcagacttttcggcaatgggattttgatctgaagaaattgccgaacatcaaaatgaggaaactttgtgctaatgatgcaattcctaagaagcgcaaaccgaaagccatgttaaatatagaaatagatttaggggattagaactaactggggaaattggagactctaaagatgggaaattggaatcagcaagtgaagcaagtgactcggatgaagaaatgactccagtgcctgcctgccct

SEQ ID NO: 7846 - DNA, 677 bp, Cricetulus griseus
accggcggagctcaggatggtgttgctcgagagcgagcagttcctgacggagctgaccaggctcttccagaagtgccggtcgtcgggcagcgtgtacatcaccctgaagaagtatgatggtcgcaccaaacccactccacggaagagtgcggtggagagcgttgagcccgcagaaaacaagtgtctgttgagagctacggatgggaaaaggaagatcagcaccgtggtgagttccaaagaagtgaataagtttcagatggcctactcaaacctactgagagctaacatggatgggctgaagaagagggacaagaagaacaagagtaagaagaccaaaaccggcacagtgacaggcgtggccattgccaaccagctgaagggcagtttcctgtgttgctgcttttggcaccttctgtatgtaactgttttcatgtaagggttgttttcagagggaagggttggatgatcaacccttctaaactgatgagaagccagtttgtttttagatcttcggtgtatggctggatattctgagactccagtcttccagtgtctagtcatctttgaagaactgtgcatcaccaagtccatccgtgctgtttctttgcttaccctgtttctgacagtgactactaaactctaggatgatacagttactcaatggtttttgccttgtc

SEQ ID NO: 7847 - DNA, 675 bp, Cricetulus griseus
ggagcgcgcgctcgaagcgcgcacggcgcgggactacttcggcatctgtatcaagtgtggactcggcatctacggagcaaggcaggcgtgccaggccatggggagcctgtatcacaccgactgcttcacctgtgactcctgcgggagacgactccgcgggaaggccttctataacgtgggtgagaaagtgtactgccaggaggacttcctgtactccgggttccagcaaacagctgacaagtgtagcgtgtgcggacaccttatcatggagatgatcctgcaggcccttggcaagtcctaccacccgggttgcttccgctgctcagtgtgcaacgagtgtctggacggcgttcccttcaccgtggatgtggagaacaacatttactgcgttagagactatcacacggtgtttgcacccaaatgtgcttcctgtgcccgccccatcctccccgcacagggctgtgagacaaccatccgtgtggtgtccatggacagagactaccatgtggagtgttaccactgtgaggactgcgggctccagctgagtggggaggagggtcgccgctgctaccccctggagggccacctgctctgccgccgatgccacctgaggcgccttggacaggtcccgctggcctcaccggctgtgcacgtgactgagctctgagaagcagc

SEQ ID NO: 7848 - DNA, 675 bp, Cricetulus griseus
  modified_base (569)..(569): a, c, t, g, unknown or other
ctcgaggtctcggcagattccatcaggatgtcgcctccgtcagtctttgcccaggttccgcaggcccctccagttctggtctttaagctcactgcagacttccgggaggatccagatcccctcaaggcaacagcccagctctccaggaaaaacgggtcgcaagtgtgcagtctttgggaggaacaggtgcacttcgaatcggagctgatttcttagggcgatggtacaatggcatagacaacaaggacacacctgtctatgtgtcgtcgccaacttgggagaaccataatgctgtgttttctgcggctggttttaaagacatccggtcctatcggtactgggacgcagagaagagaggccttgacctcgaggtttcctgaaggatctgaagaacgctcccgagttctccatcattgtcctccatgcctgtgcacacaacccaaccgggaccgacccaactccagaggagtggaagcagatcgctgctgtcatagaaagacaaccgtttttctgttccccctttttgactcagcctatcagggctttgcatctggagacctagagaaagntgcctgggctattcgttgaatcccaagcaggttgaatatctggtcaatgagaagcatatctatctcctgcccagcggtcggatcaacatgtgtggcttaaccacca

SEQ ID NO: 7849 - DNA, 674 bp, Cricetulus griseus
ttacaaatgcagtgaatgtgacaaatcctttacaacaaaagaccatcttcaaagtcatcagagaatccacacaggagagaaacctttcaaatgtagtcagtgttccaaatgctttataacaagagaccatcttagaactcatcagagaattcatacaggagagaaaccttacaaatgtagtgaatgtgacaaatccttttcccatgaatcaaatcttagaacacatcagaaaattcatacaggagaaaaaccttacaaatgtactgaatgtgacaaatcatttactcagaaaagcagtctgagaaaacatcagagaattcatacaggagagaaaccttacaaatgtagtgaatgtgacaaatgatttaccaagaaaggccatcttagaatacatcagagaattcatacaggagtgaaaccttacaaatgtagtgaatgtgacaaatcctttatcaacaaaggaccatcttagaacacatcagagcaattcatacaggagagaaaccttacaaatgtagtgaatgtgacaaatcctttaccagttgctcaaatcttcgcaagcatcagaaaattcataaggacaggaaccctacaaatgtactgaaactgaaaaatcctttaccagctcctcatctcttagaagacattagagtattcatacagaagagaaacct

SEQ ID NO: 7850 - DNA, 674 bp, Cricetulus griseus
actgcttcgacctctgccgccgctgtcgccgccgcctcgggagagaggaagcgggagaggagcccacgtcgcctgtcacccaaatccacgccgccaagaggaaagatgttcgcctgcgccaaactcgcccgcacccccgctctgatccgagctggatccagaattgcatataggccaatttctgcatcagtgttatctccaccagagactaggactggacagggctctacagtatttaatggggcccagaatggtatgtgtcagctgatccgaagggagtttcagaccagtgcaatcagcagagacattgatactgcagccaaattcattggtgcaggtgctgcaacagtaggagttgctggttctggtgctgggattggaacagtctttggcagccttatcattggttatgccagaaacccttcactgaagcagcagctgttctcatatgctatcctgggatttgccttgtctgaagctatgggtctcttttgtttgatggttgctttcttgatcttgtttgccatgtaacagaaattactgcctgaaatgttggcattcatagtaataacggatataattctgtgtatcttactgtgactccaaaaactgtagtgctggtgtcatggagatgtacgttatttccaaagtcatttcattaaagatgaaaactt

SEQ ID NO: 7851 - DNA, 673 bp, Cricetulus griseus
cttgaagaaagaaaaaggcagagatcatggtggcccactgcctgagagatttttacctaggaatcattgacctttgatgatgtggctgtggacttcacccaagaggagtgggttataatggatcaaactcagagagacctctacagagaggtgatgctggagaactaccagaacctgttctcagcaggatgtgaggtcagcaaacccagtctgatctcctggttggaagaagaggattttttctataccttactaaacacgttcgtattcacaccggaacaaaaccctataagtgtaagtactgtgggaaagatttcactacttcctcaagccgaactgagcatatccgaactcacactggtgagaggccctatgagtgtacagaatgtgagaaaaccttcacttcatcctctaacctcattcaccatgtaaaaatccacactagagagaaaccttttgttgagaatgtaggggaaagcctacagcagattttacctactaaccgaatagtaagtaactcaagatgatcaaaatgacttcagataggaggaatgaccaaaaatccttaatctctccatgtcttgattacatcatactggagtttacactattaagaaagcaatgtggaacagcccccaattatgacagttttcctttgaaaaacaataaaaag

SEQ ID NO: 7852 - DNA, 673 bp, Cricetulus griseus
cacaaggcatcagtggacgtcaatgcttgggggtttggaacaggaactgcaagatcttgggattgccacggtgcccaagggccactgtgcttcctgccagaagccaattgctgggaaggtgatccatgctctgggccaatcctggcacccagagcacttcatctgcactcactgcaaggaggagattggctccagtcccttctttgagcggagtggcttggcctactgttccaatgactaccaccacctgttctctccacgctgtgcctactgtgcggctcccatcatggataaagttctgacagcaatgaaccagacatggcacccagagcactttttctgctctcactgtggagaggtgtttggtgcagaaggctttcatgagaaggacaacaagccatattgaccgaaaagatttcttagccatgttctcacctaagtgtggtggctgcaaccgccagtggtgtgtgctttctgcctgacacaactgtcaaaaggcatcttcagagaacagaacaacaagacctactgtcaactctgctttaataagctcttttcacagtagttccctttgatccacaactactacttgttgcctgtaaaactgagaccaaggcagggacgagtacacttgctttccctgaccttcactcagtgggctaatagagtcaaa

SEQ ID NO: 7853 - DNA, 673 bp, Cricetulus griseus
gaagttttagcctagctgttctggaggagttaagttaattagtccaagaaacgttatattcagagtcaagtttcctaaaggctcgagtccagcaagttcaggttcccttaggtgatgcaactaagccaagtcacctacttacttcccaactacctctcatgtggcaactctacccagaggagcgctacatggataacaactctcgattgtggcagattcagcatcatttaatggtcaggggagtacaggaactactgcttaagcttttgcctgatgaataacaatggtgctggaattctaggaagataatgctcctctgttctattcattatatgtcagtcacatcattcaccactacagtgctcccacccttagatgtttaggaagggtcatgaagaacacttccagtgacactacagagagagggttacacagggtagaaatcaagccaacaaaagcatttagtcaggaactgtaacttgaaattgactcctcctttggaaattgccatagaacctttaatggacttcatcagctgaacctgggatctggtgaatctctcaaaaatcagcacatgctacagaacagatgccctcatcatcaaggacttggtactcatttagagagaagagagcagcttctgtcagcatcaacatgtgtttgccacttattt

SEQ ID NO: 7854 - DNA, 673 bp, Cricetulus griseus
ccatgatatcatgtatcctgcgtggacattttgggaagggggccctgccgtgtggccactttatcctacgggtcttggacggtgggacctcttcagagaagatctgctaaggcagcacaatggccatgggaaaagaaaaattctacagcatatttccgaggatcaaggacaagcccagaaaagagatcctctcatttcttctgtctcggaaaaatcccaagctcgttgagagtacaccaaaaaccaggcctggaaatctatgaaagataccttgggaaagccagctgccaaggatgttcatcaatagatcactgcaaatacaagtatctgtttaattttcgaggtgtagctgcaagtttccgtttcaagcatctcttcctgtgtggttcgctggtcttccatgttggtgatgagtgggtggaattcttctacccacagttaaagccatggggttcactacatcccagtcaaaacagacctctccaatgtccaggaactgttgcagtttgtaaaagcaaatgatgatattgctcaggaaattgctaaaagggggagccagttcatcataaccatttgcacatgaatgacatcacctgttactgggagagcctcttgactgaatactccaaattcctgtcctataatgtaacaagaaggaaagattatgatcaga

SEQ ID NO: 7855 - DNA, 673 bp, Cricetulus griseus
gcaccacatggagacccagactgtgcagcgggagctggaaactcttccaaccaccaagatggctcagaccaaccctatgccagggtccatggggccatggaagataaccatctatgatcaggagaacttccagggcaagcggatggagttcaccagctcctgcccaaatgtttctgagcgtagttttgataatgtccggtccctcaaggtggagtgtggcgcctggattggttatgagcataccagcttctgtggacaacagtttatactggagagaggagaataccctcgatgggatgcctggagtgggagcaatgcttaccatattgagcgtctcatgtccttccgccccatctgttcagccaatcataaagagtctaagattaccatctttgagaaagagaactttattggacgccaatgggagatctgtgatgactacccttccttgcaagccatgggttggttcaacaatgaagtcggttccatgaagatacaatgtggggcctgggtttgctaccagtatcctggatatcgtggttatcagtacatcttggaatgtgaccatcatggcggagactacaaacactggagagagtggggatctcacgcccaaacttcccagatacaatcaattcgccgcatccaacaatagtggactaaaagttccaaa

SEQ ID NO: 7856 - DNA, 672 bp, Cricetulus griseus
gacaccactgccagtgggccgtcgtccctgggtcctgtacaacctggcgaggcacccagaataccaggagcgctgccggcaggaggttcgggagctgctgagggaccgagagcctcaggagattgagtgggacgacctggcccagctgcccttcctcaccatgtgcatcaaggagagtctgcggctgcacccccccgggtccacagaccatcttacgctgctgcacccaggacattgtgctgccagatggccgggtcatccccaaagggaacgtctgcaccatcagcatcttcgggatccaccacaatccttcagtctggccagaccctgaggtctacgaccccttccgatttgacccagaaaaccctcagaagaggtcacctctggcttttattcccttctctgcagggcccaggaactgtataggacagactttcgccatgaccgagatgaaggtggtgctggcgctgacactgctgcgtttccgcatcctgcccgacaacaaggagccccgcaggaagccggagctgatcctgcgcgcagagggcgggctgtggctgcgggtggagcccctgagctcgggtgcacagtgaccaccaagcctggcttggggaccaccccacccacctgcctacctctttgaatttctgaacaagtagagttgtctcctgt

SEQ ID NO: 7857 - DNA, 672 bp, Cricetulus griseus
gcaactctcactccttcagagaggagtaacctttgaatgacagccttgaaaattatggtgcccagaacagtccagagacatccattattgaagttcccagtcctgacttcaatttcgataaggatgagtgtctaggcatctacatttctgcttatgaacaacctacccacttctagatccaaatcaatgtctcccacagccaccagttggattaacttctcattgagatgaaccagaactatgaaaatagtctgcttgaagacttgactgtgcaggtatgagacattcactgaaagaactcagcgttctcaggagtgactacctgagccttccctttcaagtaatagaatgcagtctggctcaaattgtcccctcaggtgaacagtaggaagaggaagatctagatgagtttttgagactcactcattttgctgacttgaagccattgatggccaagatctctagctgtgtccggactggaaactcaagttggccaaaaatccatttatatgataccagtaatggaaagaaactcgatatcaggctggaattaatttgcaaaggatatgcggtagaagttcctgaagatgtgcaagaagatgggactgtcccaaatgtgttgaaggacatggccactgaaacagatgcttctcttgccagcatactcaatga

SEQ ID NO: 7858 - DNA, 672 bp, Cricetulus griseus
aagaaactcttaattctggaagtagcgactcaataccatggccagcctcctaaatgaagatccagaaagaagtcgaatcacatacgtgaaaggggatcttttcgcatgttccaaaacagactctctagcccattgtatcagtgaggactgtcgaatgggtgctgggatcgctgttcttttcaagaagaaatttggaggggtgcaggaactgttaaatcaacaaaagaagtctggagaagtggctgttctgaagagagatggacgatatatatattacttgattacaaagaaacgggcttcacacaagccaacatatgagaaccttcggaagagcttagaggctatgaagtcccattgtttgaagaatggagtcactgacctctccatgcccaggattggatgtggtctggatcgtctgcagtgggagaatgtgtctgtgatcattgaagaggtgtttgaggcaacagacatcaaaattaccgtgtatacactctgaacagatgaagaatttggatgagcccgtggtctttttgtcttctctacttggctgtaggactaagcaactgtaggaccttaaaatgggcagaggacaatgtgtgaggaaatctgtgtcgcaggccagttgtaggcttctgtattccaaaaagactggagggcattgcgaccaagcag

SEQ ID NO: 7859 - DNA, 671 bp, Cricetulus griseus
ggacttccatttatgagactgcagccatatgggcattcggaagtacttgtcaggggtgctggctgaggactggggtgtgggttctgacgtagacactacgcacaagggtcattgtttacagttcctcgggagagaacagaagccctgccttgccccaggctgcctctgtatcctgggcttccaaggaaccactaaacactaactgtgtgtgtgtgtgtgtgtgtgtgtgtgtgtgtcgccaagtcgactttagaatttcattttctaaagtacattacaaatcagaggccattaggggaaagcaagccatctggctcgtctttgaaactgtggtcaatacttgaaggcactttagtcctgctggtcaagccagcttctgcctgattggtttcctccttttctgtgtatcccgagtcattcctggtcagggacattaaaatgtgctcatagacagttatcagggaaaaaaaaagtggacaatgaggctggaaggtgcatggtgtttgccctgttctttgatttaaatcaaggtgatgttaaagaaactgttttctttctttttaatgaaaaataaattccatatctgtgttgtaaactgtcagtggatgtgtgaatcaaggaactagagaactgctgtacagagagtcttgagagccagacagtactgtgtg

SEQ ID NO: 7860 - DNA, 670 bp, Cricetulus griseus
agcctgtactcaagtggagaaatgtgcgaggccacaaccctctgggtctaatgtaccacaatgccagtcgatggggccttgcactgcagacgtacgtgcagctcactatgttggaccagcacactcgtcctcagatgtcacctgtacggttgatggaaaggtcaatttacagcgcaagatacatttttgtagaaaacctgtatagaagtgggaagatgcccaaagttgagtatgtgattctgtctgaatggtttgattggatcatcaggaacattaatgtccccattgatctgatagtttatcttcgaaccactcctgaaatctgctaccagagattaaagatgaggtgcagggaagaggagaaagtcattccaatggaatacctcagtgctattcaccacctctatgaggagtggctggtcaccggtagccttttcccagctacagcccctgttctggtgattgaggctgaccacgacttggagaaaatgttagaactctttgaacaaaaccgggcccggatattaactccagagaattggaagcatggcccgtaggactgacaacgccgcagtcgacgaagactacaagacaggaacaggaacagcccagtagggccaggttagctgtttaggagcatttggaagaatctactgttaggagtgtttgt

SEQ ID NO: 7861 - DNA, 670 bp, Cricetulus griseus
ggaggcagaggcaggcagctctctagagttccaggacagccagggctattattagagaaaccctgtctcaaaaaggaatggggtttgggaagcctctgacctgccaggggaccaattagtcacataggtctgaccgatcatgactggctcctcagtgcccttttcttccagttcctggggaaattttcatgtctctgtggtagtgcctgtactttgtgtttgctgtttgaatgacaagtgcccaacctcagaagcactaaattgtagccacagcaggagctgatggtacataaggaactgatgggccattcttctgaatggaacacagtaggttaaaaaaagcacagtttgtggaatgttaatgggataagcccctaaaagctgcttgcttttccaggtcttcgagttatatacttctcatttgattttagaatttggaaactttacatgaatgtaattcagcgaagaaacatgttgctaagatacaatcctcagtgttctctctgtatgtatatttatgtatataccacatgttacagcctgcatgagcttcctctcacaccgagcccagctggaactgagcatgagatgttgtcacatgtagaacaaaggactgagatgttctcaaataaagactaagacgtttaactaaaaaaaaaaaaaaaaaaaa

SEQ ID NO: 7862 - DNA, 669 bp, Cricetulus griseus
ctagagtgccaagcggcgccatgtcctgagcgtccgggctcgggcgggggccggctgggtgcggcggggctcgaggctgtccgcggcgatcccacacaccgcagcgtagacatggcggcccagaaggaccagcagaaggatacggaggtggaggggctgagcgccacgaccctgctgcccaagctgattccctccggcgccggccgagagtggctggagcggcgccgcgcgaccatccggccctggggcgctttcgtggatcagcagcgtttctcgcgaccccgcaacctgggcgagctttgccagcgcctggtacgcaacgtggagtattaccaaagcaactacgtgttcgtgtttctgggcctcatcctttactgcgtggtgacatcccccatgctgctggtggctctggctgtcttctttggcgcctgttacattctctatctgcgcacgttgcagtccaagcttgtgctctttggccgggaggtgagcccagcgcatcagtacgccctggctggcggtgtctctttccccttcttctggctggcaggtgctggttcggccgtcttctgggtcctgggagccaccctggtgatcatcggctcccatgctgccttgcaccagatagagccttcagacggagaggaactgcagatggagcctgtgtaa

SEQ ID NO: 7863 - DNA, 669 bp, Cricetulus griseus
ttttgtatttttcatttgagtgttattggagcaatataatcctagtgagtgttcctttctttgaatgtaccaagtgtctcctttcccatatctccctttctctgctttgagataaaactgcttaagtttctataggaatgatgtttggctttgcagtgctaaaatgctttcttcttacagaactgtaaaccataggtcagtattatagggggaacagcgtttttaagatagtgacaatctgagtgtgtgtgtaaaaatgtaattctccgtgtttcctatgcagtgatctgaagattcaatgcaaatatcttttgttcagtagttttgtctacagactacgctttagcatgtgcaatatatccttgcaaaagcacgatgaatacacatcttgtgccagtgttatattttgtataatgtatttgtaacaccataactattatgtgatgattggagttgaatgactctgatcagtgtcatgagtataaaaatgaggaaaatggctttcagttcagctcagttgaaccagtctgaatctccccaagcacagtttcatactttgcaactgctgaatgccctgataatggaaagaagtacttacctgtaatatactatggacatgcattcagatggttatttttacaaataaaaacggtacaaatattgttgcaa

SEQ ID NO: 7864 - DNA, 669 bp, Cricetulus griseus
aagtagatttccaacaccaagacggagctggtgcagaagttccacgtgcagtacctgggcatgttgcctgtagacaaacctgtcggcatggacaccctgaacagtgccatagaaatcttatgacctcatccagccaggaggattggccttctgtgaacatgaacgtggcggatgccactgtgacagtcatcagtgaaaagaacgaagaggaagtcttggtggagtgtcgagtgcggtttctgtccttcatgggtgtcgggaaggatgtccatacatttgccttcatgaagccgtccaggctgcctgcatgttgcgatatcagaagtgcttggtagccaggcaccttcacagaaagttcgacctccacccccgccagtggattccatgactagaagagtcacaactaatgtaaaacgaggggtcttatctctcattgacactttgaaacagaaacgccctgtcacagaaacaccctagcagctctgggggctcaaggattctgtcacttacccctgaagatcaaacgtctacactaaagaagccgacagctggccttcctccattctgttgctgatgctctgtctccagataatttatccctaaccgaacatgttagacaagcatgtgatctcgtcttgccgccatcatgtgacatgaaaagaagcatga

SEQ ID NO: 7865 - DNA, 669 bp, Cricetulus griseus
cccttatcctggcttgccctggtggcctgtgtcattgttctgggcttcaactactggattgcaagctccagaagcgtggaactccagacacgcattgtggagctggaaggccgggtccgcagggcagcggcagagagaggagctgtggagctgaagaagaacgagttccagggcgagctggagaagcagcgggagcaactcaacaggatccagtctagccatatcttccagatggagaatgccaacaggttgcacgaggacgagaaggcgattttagtgaataatatcaccacaggcgagaggctcatcagagaactgcaagaccagctgaaggctctgcagaggagttatggcatcctgcagcaggacatctttcagttccagaagaaccagtccagcatggagatgaagttcacctatgacctgagccggtgtgttaaccggatgaaagaggtgaaggaacagtgtgaagaacgggtggaagagacgaccagaaagagaaatgaagcagtggtttccagagatgcgggtgaaagaaatgaccagcctcagcaggacctcaagcctcagcccaagcttcagcaaatggtcccgccaaaggaacaggtgccacaagggaaaggggatgtgcccacaaacaagtcccaggcaccagcccccagttcagag

SEQ ID NO: 7866 - DNA, 668 bp, Cricetulus griseus
aactgacaggacccgaacatgggggccctggccgccaggcgctgcgtcgagtggttgctgggcgtctactttgtctcgcacatccccatcacgatgttcatcgacatgcaggtggtgctgccgcccgaagtgtacccgcaggagttcagcaatctgttgcggtggtactccaaggagttcaaagaccctctgatgcaggaccccccattgtggttcaagtccttcctattttgtgagcttgtgttccagctgcctttctttcctgttgcagcatatgccttcttcaaaggaaattgccggtggatccgaatccctgcaatcatgtatgcagttcacaccataacaactttaattccaatcctctatacatttctatttgaggatttctccaaagctgttgctttcaaaggactcggacccgagaatttccgtgaacgactgaccctcataggtgtctatgccccctacctaataatcccccttatactcctcctgttcatgttgcggaaccctttctataagtatgaggagaaaagaaagaaaaaataggggccagccactagcccaaccagggagatcccacagcacagttgccttttggacaatactagaaaaactgctctgaacccatgtctcagcagcatttgaaacataccaacagcagtgca

SEQ ID NO: 7867 - DNA, 668 bp, Cricetulus griseus
cttccggtcgcgagcagccgggatctagagggcggtcgcggcggtcgctagggcagcagtggcagaatgttggctaccagggtgcttagcctaattggcaagagagctatttccacctctgtgtgtgttcgagcacaagggagtgttgtgaagagtgaagactatagtcttcctgcttatatggatcggcgtgactaccccttgcctgatgtagcccatgtcaggctgctgtctgccagccagaaggccctgaaagagaaggagaaggcagactggagcagcttgtctagggatgagaaagtccaattgtaccgcatccagtttaatgagagctttgctgagatgaacaggagcaccaacgagtggaagacagttgtgggcctggccatgttcttcatcggctttactgcacttgttctcatttgggagaagcactatgtgtatggccccatccctcatacctttgatcgtgactgggtggccatgcagaccaagaggatgctggacatgaaggccaaccccattcagggcttctctgccaagtgggactacgacaagaacgagtggaagaagtaagaccttactgcttgccagttccctcctctcagcatgctggaaggaagctgctgtgtccaaaggtccatgctaataaatgaccagtttacgtg

SEQ ID NO: 7868 - DNA, 668 bp, Cricetulus griseus
cagccatttgttctctttggttaaccactctacacgagacaacctgagtgctggcagctttaacttttccctttcttagagggggcgacctggtgcgaaacactggtcctgcgggagctttgccaacacatggttgctcagtgtgtctcacccaagggacctttggcatgttcaaggacatacttttttggtcgctactcatgttccttacttgggcgatgacgacaagctgcccaggacaactgaacaaatgctcttatcccagatatatgctgctgttattgaggctgtttttggctggcattgcatgttatgctaaaacttacagtctggcaaaggccaaggaggtagcagaacatactctggaatctgggctagtggtcactgagttggctccatttaaagccgatctacgctctaaggtggcttttcatatacatgctgtgaataaccagggaagaattaaggggctgtctctgtcctccctggcctgtgcctgccagagtagtacatgtcgtctttattctctcttctctctggggaggcagagggaggcagatctctgtgagttcgaggccagcctggtctacaagagctagttccaggacagtctccaaagccacagagaaaccctgtctcgaaaaaccaaaaaaaaaaaaaaaaaaaaa

SEQ ID NO: 7869 - DNA, 667 bp, Cricetulus griseus
  modified_base (473)..(473): a, c, t, g, unknown or other
cccctccacagatgtcgacatctcctccagctcagatcccaccactgcccttgcagtctatgcagtctttacaagtgcagcctgaaattctatcccagggccaggttttggtgcagaatgcgttggtgtcagaagaagagctccctgctgcagaagctctggtccagttgccatttcagactcttcctcctccacagactgttgcggtaaatctccaagtacaaccagcagcacccgttgatccaccagtggtttatcaagtagaagatgtgtgtgaggaagaatgcctgaggactcggatgagtgcagccagagctacaaaataacacaaagcatgcagataactcatctgacacagagagcagaagaagacttggcttctcatgaagattctgtgccctctgctatgacaactcgtcttcgaaggcagagtgagcgggaaagagaacgtgagcttcgagatgtgagaatcnggaaaatgcctgagaacagtgacttgctcccagttgcacagacagagccctctatatggacggtcgatgatgtctgggctttcatccattctttgcctggctgccaggatgttgccgatgaattccgggcacaagagattgatggacaggccctgctcttgctaaaagaagaccatctcatgagtgcaatgaac

SEQ ID NO: 7870 - DNA, 667 bp, Cricetulus griseus
tttgtgaaatgagtgattcagaagatgatgatataccccagctttcttcccacgccttagcagctctccaggaattttatgctgagcagaagcagtccaccatcccaggaagggatgataaatacaatgttggggtaagtagaggagaactggcagctgagccagttttggtacagtcaggacaccgctttgcgacttgcacaggaagcgatcgctgctgctggagaaggtggcagaattgcatgtgtgagtgcgcccagcgtgtatcagaagctccgggagctgcacagggaggacatctctgtatacatctttgagtacgacagaagattcgccatatacggggaggaatttgtcttctatgactacaacaatccactggacttgcccggaagaatccccgagcacagttttgacatcgtggttgcggatcctccttatctatctgaggaatgtctcaggaagacgtccgaaacagtccggttcctgactcggggcaaggttctgctctgtacaggagccgtcatggaagagcaggcaactcagctccttggtgtgaagatgtgcaaatttattccagaacactcccgaaacttggaccaatgaattccgctgttacacaaactatgattctggtctggactatgaaacctaaattcacatggca

SEQ ID NO: 7871 - DNA, 667 bp, Cricetulus griseus
agttaattaatcgacgaatgagatcgctacaacagtgacaacgatcgatcttctcgtcttcttttggaaaggccctctccaatcagagatagacggggcagtttggagaagagccagagtgacaagcgagaccgtaaaaactctgcatcagctgaacgggataggaagcaccggacagctgctcccacagagggaaaaaaccctactgaaaaaggaagaacgttctgatggcaatgcacccagtgccagcgcgtcatcatcaaagcagaaagctccttcccagaaacaggatggagggacagctcctgtggcagcatcctctcccaaactctgtttggcttggcagggcatgcttctactgaagaacagcaacttcccttccaacatgcatctattgcagggtgacctccaagttgctagcagtctacttgtggagggttcaactggaggcaaagtagcccagctcaagatcactcagcgtctccgtttggaccagcccaagttcagacactgccacctctacacagaggccacttaggaaccttgtgtcctatttaaagcaaaagcaggcagctggggtgatcagcctccctgtggggggcaacaaagacaaggagaacacaggggttcttcatgccttcccaccttgtgagttctctcagcagtt

SEQ ID NO: 7872 - DNA, 667 bp, Cricetulus griseus
agtgagctgcagagttgtaccggaacggctgcgtgttcagggtcctcgccatggggcagatcgagtgggccatgtgggccaatgagcaggcgctggcatctggcctgatcctcatcacagggggcatcgtggccactgctgggcgcttcacacagtggtactttggtgcctactctatcgctgcaggtgtgctcatctgtctgctggagtacccccggggaaagaggaaaaagggctccaccatggagcgatgtggacagaagtacttgactactgtggtgaagctgtttgggcccctgacgagaaattactatgtccgggctgtcctccacttcttgctgtcagtgcctgcaggcttccttctggccactatcctgggaacagtttgcttggtcattgccagtgtgatctaccttctggcagccatccggggtgagcagtggacccccattgagcccaaacccaaggagcggccacaggttggaggcaccatcaagcagccacctaccaatcccccaccccggccaccagtggaggcccgcaagaagccaagtgtggatgaagaggaggcagcctcagctggacggcccccaggtccaacccaattccagtaacagatgaggttgtgtgaccttcagttgctgtctgcagctcctgctttaagttt

SEQ ID NO: 7873 - DNA, 666 bp, Cricetulus griseus
aagggcacttggccagaaagtgcaactgatgacggattgtggctaacgcttttgcatttagatcacatgagagcaaggactaaatatgtcaaaactgtggagaagtgggcttctgagttaaggtcttgacaggaagattgatgttcatgggcaaaacaatactcatcttactgcaaggagacagaagcaacatcaaggagtacctggttcttcagaaaacctccaaagtagatgtggactcaagtggaaagaaatgcaaagagaaaatgattagtgtactgtctgaaacaaaagtaccaacggaacacaaaaggtttctggcattcgaagtcaaagagtattcaacattggaggagttacaaaaggaatttgaaactgcaggacttcaggggctcttctcagaatgtgtgcttgggctggtaaaatgaagtgaatgacaggagccattggtaaagcagccgctttgttgttgagtttcctctgcctttggggagggctcattgaagtaatcataagagagcaatttaaagtttctctgtagcaaaattgttcccattccccgaagaaagcgagttctgtttataggatgttaaacatgaaaagaccctatgtattctaatgtttgctggaaaagactgggttcaatggatggattatctgaaggag

SEQ ID NO: 7874 - DNA, 666 bp, Cricetulus griseus
  modified_base (48)..(48): a, c, t, g, unknown or other
cgcacagatggcttggcctggctggggatgtgcaaacgcacagttggngaaatgcctctaccgttagcttcctgaagccttggtcccacggcaagctcagtgaccaacagtggcagacgttggagcatataattacaagtttatcgaaccagcttgaccagagacatacaggaattagtcaaaatgttgcctaccatgcactatcccattgagatgcaggtgtctgctgggtgtgaattgcactctggaaacacttcagaaaactttgccaatgtagcatttcaaggacaacatgtcatgagttttcagggaacttcctttcagaaggccccagatgccccaccttggacagagttggccattaaagtgctcaacactgatcaagggacggcctggttgtcaagtgtcctcagccctagacatggccatttgcagttcgtgtgccactgtctccggcttctacccacagcctgtgtgggtgatgtggactcagggtgagcaggagcaaaacagtactcagagaggtgacatccttcccaatgctgatgggacatggtatctccgagctaccctggatgtggaggctggagaggaggctggcctcgcctgccgggtgaaacacagcagtctaggagggcaggacatcatcctctattgggatggcag

SEQ ID NO: 7875 - DNA, 666 bp, Cricetulus griseus
gtctatggttctgggttactgggatatccgcgggctggctcatgccatccgcatgctcctggaatatactgataccagctatgaggagaaacggtacacgtgtggagaagctcctgactatgatagaagccaatggctggacgtgaaattcaaactagatctggattttcctaacctgccctaccttatggacgggaagaacaagctcacccagagcaacgccatcttgcgttacatcgcccgcaagcataacatgtgtggcgacactgaagaagaaaagatacgagtggacatcatggagaaccagataatggacttccgcatgcagctggtccggctctgctacaattctgaccatgaaaacctgaagcctcagtacttggaacaactaccttcacagctgaaacagttctcattgttcctggggaaattctcatggtttgcaggggaaaagcttacctttgtggactttctcacctatgacgtcttagaccagaaccgtatgtttgagcccaagtgcctggatgagttcccaaatttgaaggctttcatgtgccgttttgaggctctggagaaaattgctgcattcctgcagtgtgagcgattcttcaagatgccaatcaataacaagatggccaagtggggcaacaagtgcatatgctgagc

SEQ ID NO: 7876 - DNA, 666 bp, Cricetulus griseus
cgattcatgtttattcaaacacaagacaccccaaatcccaacagcttaaagtttataccaggaaagccagttcttgagacgaggaccatggacttccccacgccagccgcagctttccgctcccctctggccaggcagttattcaggattgaaggagtaaaaagtgtcttctttgggccagatttcatcacagtcacaaaggaaaatgaagaattagactggaatttactgaaaccagatatttatgcaacaattatggacttctttgcgtctggcttacctctagtgactgaggaaacacccccaggagaagcaggttctgaggaagatgatgaggtggtggcaatgattaaagaactgttggacactaggatacggcctactgtgcaggaggatggtggtgacgtgatctacagaggctttgaagatggcattgtgcggctgaaactccagggctcctgcaccagctgccccagctccatcatcaccctgaaaagcgggattcagaacatgttgcagttttatattccagaagtggaaggtgtagagcaggtgatggatgatgagtcagatgaaaaagaagcagattcaccttaaataatctgcattttctttggccgaaacctttggatctaactgtacagagccttattaatctctgcaatg

SEQ ID NO: 7877 - DNA, 666 bp, Cricetulus griseus
  modified_base (386)..(386): a, c, t, g, unknown or other
tggatgaggtattattgactgcgatgctccagatgtgtctctttgccatcacagacaaggacaacagtccagcacttcctgggactgaggcagaggtgataggcatccttgtttgcattattggggtgtccctaggcatgaactcgggatatgcaatcaacccatcccgtgacctgcctccccgcttcttcactttcattgctggctggggcaaagacgtattcagtgccgggaacaactggtggtgggtaccagtggtagcacccatcctgggtgcctacctaggtggcattgtgtacctgggcttaattcactccagcatacctcggaactcttggagactggaaactttttttttttgttttttgttatttctttctttttcnctcttttctctctttctctctttctttctttctttctttctttctttctttctttctttctttctttcttctttcttcctttcttttccttccttccttcattcgttcgttccctcctttttttctttctttgtttagtttttcaagacagggtttctcgtgtagccctggctatcctggaactccctatgtagaccaggatggcctcaaactctcaaagaaccttttgcctctgcctcccaagtgctgggattaaaggctcacgccactgctgccaggc

SEQ ID NO: 7878 - DNA, 666 bp, Cricetulus griseus
  modified_base (192)..(192): a, c, t, g, unknown or other
  modified_base (230)..(230): a, c, t, g, unknown or other
tgccgctggcccgtgtgctgcacgagctcggggcgggacgcagccgagcgggccagccgatcacgccgggagtggggtgccgagctgctggtcgacgtgggtcagtggctggaccgcggtacaccctggctccgcgtacatctggacggcccagtgctcagctgccagcagcgccgcgctctgcagggggcnctcgtgctgtcgaaccgcgcacccttcaaggccccttnacctttcgctgagttagtcctgccaccgaccttcgctcagccctaaatccgaccccaccgcagccaggagcttcatgtccatggtgctacaggctctagggcccagagtttggcccaggctctcccagttcaaacctccagtcctcaggatcccaggaggcgaaactctgtatgtaaagtccagacactggtcagggcagagccagccccaaggtcccaggctaagaactaggctgctgatcactgccctgtttggagctgggctgggctgggcctggctggcagcaagagctgagaaggaacagaggcgtcaacagcaacgaacggaggccctgcgccaggctgctgtgggccagggtgacttcagcctactggaccacaaaggccagcctcgatgcaaagctgacttccaaggccagtgggtactgatgtactt

SEQ ID NO: 7879 - DNA, 666 bp, Cricetulus griseus
caccatgtcgggtcccgatgacgtccgacccgtgccacacaggagcaaggtgtgccgccgtctcttcggtcccgtggacagtgagcagttgagccgcgattgtgatgcgctcatggccggctgcctccaggaggcccgagaacggtggaacttcgacttcgtcaccgagacgccgctggagggcaactatgtttgggagcgcgtttgggacctagggctgcccaagctctacctgagccctgggtcccgcggtggccgtgacgacctgggaggggacaagcggcccagcacctcctctgccttgctgcaggggtcagcccccgacgaccatgtggccctgtcgctgtcctgcactctggtgtctcacggccctgaggacacccccggtggacccggaacctctcagggtcgcaaacggaggcagacgagcctgacagatttctatcattctaagcgccggctggtcttttgcaagaggaagccctaatgtgcccacaggaggcctcaccctcttctgcagtgggccaggaggccccctccccaccttctgccttagcccttccttcactctgtgtgtcttaattattatttgtgttttaatttaagcgtatcctgtatatactctgcctgccctcccccagcctccaaccttagacttatttaaaa

SEQ ID NO: 7880 - DNA, 666 bp, Cricetulus griseus
gggtgtggtggttggtccagcctgcttgtagcaatgaccttgatagagggagataatgacattggtttctcccctgtcagagcagaagagcccatcctccaccgccagtagagagggttaagtattattagtgtctattcttaaaattaagtgggctggaaaagagctgagttacagatgccagtgtcttgcttggatacaaaagctaaagcagtcagaccgccttaagaggtgggagggcacaggcaggctttaaggagaggtcttggaaaagtccctgccgttcaccgtgaggtctgccctgctctgccctcttgggtcctgcatgcagtgcaccctcaccccatggcaggtctcagcataggtgtcctggctacctcagctgtattctcagggccaggagggcagccctggccatactgtagggaagccaggccaacttgtgtaaagcaagctgtgtttctggcttgatcctgcctctgtagcctccagggatcatcttcgggagtcctgtgcttgctttcactcgactcaacagctttaccaaacacactgagctttgctatttaccagccgtgtgggccttgccaaggggttatttcagggggcttcctgggagtcgtactggtgtcaataaactagtatattcaagaaaaaaaaaaaaaa

SEQ ID NO: 7881 - DNA, 666 bp, Cricetulus griseus
gcctgtcctcccttggaaacctcttaactgcctgcttgaaatggctggatcaagcccatgcactgatttaccctgctaagtactgtggaaagccaggggtaagatgacctccatcttgcgaagtcctcaggctctccagctgacactagccctgatcaagcctgatgcggttgcccacccactggtcctggaggctgttcatcagcagattctgagcaacaagtttctcattgtacgaatgagagaactacagtggaaaaaggaagactgccgcaggttttaccgagagcatgaagggcgttttttctatcagcggctggtggagttcatggccagtgggccaatccgagcctacatccttgcccacaaagatgccatccagctttggaggacactgatgggacccaccagagtatttcgagcacgccacatggccccagattcaattcgtgggagtttgggcctcactgacacccggaacacgacccatggctcagactccgtggtttctgccagcagagagattgcagctttcttccctgacttcagtgagcagcgctggtatgaagaggaggaaccccagctgcgccgtggtcctgtgtgctacagtccagaaaaaggcatccactgtgtagctgacaaacaggaagccccaaaccagaccta

SEQ ID NO: 7882 - DNA, 665 bp, Cricetulus griseus
acgccgcggccaccgataacgccgcggccaccatggggaacaagcagaccatcttcactgaagagcagctggacaactaccaggactgcacgtttttcaataagaaggacatcctcaagctccatgcgcgcttctatgagctggcccccaacctcgtccccatggactacaggaagagccccatcgtccatgtgcccatgagcctcatcatacagatgccagagctccgggagaatcccttcaaggagaggattgtggaggctttctctgaggatggcgaggggaacctcaccttcaatgactttgtggacatgttctctgtgctctgtgagtcggcaccccgagagctcaaggcaaattatgccttcaagatctatgacttcaacactgacaatttcatctgtaaagaagatttagagctgaccctggcgcgactcactaagtcagagctggatgaggatgaggtcgtgcttgtctgcgacaaagtcattgaggaagctgacttggatggtgatggcaagctgggcttcgctgattttgaggacatgattgccaaggcccctgattttctcagcaccttccacatccgaatctgaggacactgccaaggctgcaggggcctagaagtctgccctctggcctgctgtctgtgaaggtgtggcttc

SEQ ID NO: 7883 - DNA, 665 bp, Cricetulus griseus
gggctctcacaagaaatatgcaatccctagtactttctactcctaggtttctatacagcactcattcagaactttgatttccaagactgaagtctttaactggagaactgaagggggcggggcagagcctaaatacaagagtcccagaaacatgtgcatgctgttgggtaacttaagggcaagaggaccagacacctgccctcaggctaatagatggggctctgtcatcagctcagctgaacagccctctgttcctgcccttccgtggctggctctgtgccctgtttcttgccctctgtctgtgcccctgggatgacggctgaagtccgaagtgctgtttgattctgtctgcccccctattcccagcagcagggaaggatgccgagcttctaacaacaggttctttctctctggccctcacccaacagcctggccactcctcatctttgatggccttccccttttctgaaaggatatgggttacagaggggttggtggtagtgttggcttccattgcctgacaactgcagggtttatttggaggctgaactgaaaactcagttgcttgcagttcccttgaccaaggaacaaggtacttagcagaggggaggctttggaggaagcatgaggagcagcaagtaaagagggctaagcagagcatctaa

SEQ ID NO: 7884 - DNA, 665 bp, Cricetulus griseus
gctggctttggcagttaaggtactaacttccgcttgcctgctgacacctgcctcctggagtttgccaggctcgtgaggggcctcggactgaaaccagaaaatcttgagaaagatctagacaaatattcagagagtgcaaggatgaagagaggagagaagattgggctcccagagttcgcagcctacttggaggttcctgtctcggatgcgctggaggacatgttctcgctgtttgacgagagtggtgacggtgagatagacctccgtgaatatgtggtcgccttgtctgtggtgtgcaggccatcccagaccctggccaccatccagctggcattcaagatgtatggatcgcctgaggatggcagcatagatgagatcagcctgtcctgcatcctcaagactgcactgggtgtgtcagaattaacagtgactgacctattccaggctattgaccaagaggagaagggaagaatcacatttgatgacttttgtaggtttgcagaaatgtaccctgacttcgcagaggactatttgtaccctgaccaaacacatttcgacaactgtgcacagacacccccggcaccaactcccaatggcttctgcattgacttcagccctgaaaactcagactttgggagaaagaatttttgtaagaaagtggacta

SEQ ID NO: 7885 - DNA, 665 bp, Cricetulus griseus
tgcgttgtcctctcagcggacctgaacctaacgcgatctcgaaagcccaggactccgctcacctgcatcatggcagtcccaggttgcaacaaggacaatgtccgagcaggctgcaaaaaatgtggctaccctggccatctgacttttgagtgccgcaattttctccgggtagaccccaaaagggacatcgtgttggatgtcagcagcacaagtagcgaggacagcgatgaagaaaatgaagaactgaacaaattacaggctttgcaggagaaaagaataaatgaagaagaggaaaagaaaagggaaaaaagcaaggagaaacttaaattgaagaaaaaaaggaaaaggtacttactaccagctccactgaagaggactcttcaaaacaaaagaaacagaagtatcagaaaaagaaaagaaaaaagaaaggaagaacaaatcaaaaaaaggaaaacatcacaaaaaagaaaaaaaccccttttttaaagacactcacttagcttactagaaagtctggcagggaggattctgtgctggtcaggattatcagggtccatcctgggttgatgaacacgtgtgccacattggcatgtcttacagtgatacctcaaacatagaacttttgtgtggaaacagcaaaatcctcattaaagctgatttttatt

SEQ ID NO: 7886 - DNA, 665 bp, Cricetulus griseus
  modified_base (228)..(228): a, c, t, g, unknown or other
catggacctgctctctgcgctgagcctgggagagctggcgctcagcttctcgcgcgtgccgctcttcccagtcttcgacctcagctacttcatcgtctccatcatttacctcaagtatgagccaggagctgtggagctgtcccggcgccacccggtggcgtcctggctgtgcgccatgttgcactgtttcgggagctacatcctggcccgacttgcctcctcggggancccatcattgactacttcagcaacagctccagtatcctgctggcctctgcagtgtggtacttgattttcttctgtcccttggacctcttctacaagtgcgtctgcttcttgcctgtgaagctcatctttgtggctatgaaggaggtggtgagggtgcggaagattgccgtgggcatccatcacgcacaccaccactaccaccacgggtggttcatcatgatcgccaccgggtgggtcaaaggctctggtgtcaccctcctgtccaacctggagcagctacttcgaggagtctggaagccagagaccaatgagatcttgcacatgtctttccccaccaaggccagcctgtacggagccatcctgttcaccctgcagcagacccgctcggctccctgtgtccaaggccagcctcatcttcgtttcaccatgttcatggt

SEQ ID NO: 7887 - DNA, 664 bp, Cricetulus griseus
  modified_base (246)..(246): a, c, t, g, unknown or other
caactatgtggctttgtcggggtgttctgtcaaagattggcaaaagtggtgataacccatacccacctttgaatctcctggctgactttgctggtggtggcctgatgtgcacactaggcattgtgcttgctctctttgaacgcacacgttctggccaaggtcaggtcattgatgcgaacatggtggaaggaacggcatacttgagttcttcctgtggaagactcagcacatggggctgtgggaacngcctcgaggacaaaacctgttagatggcgggtcacctttctatacaacctacaagactgcagatggagagttcatggctgttggcgcaatagaaccccagttctagaaggctgcatttacactggagaatgacactcatgatggtatgcatggaaatgtggatgagcagtaatgacgtgatccaagcattccaatcaagacacaactaaagactgattacagagtaatgattgcattctgaatccgcttttcagagcctctgattgaggaatatttttgtgtgtgtactgatattaacttgtcacagtctttctgccttttggttcacttgataacgtgcattcattgatattaaagcccttatataaatatagcgatgctatattttaaatgaagtaatataattttaataaataaa

SEQ ID NO: 7888 - DNA, 664 bp, Cricetulus griseus
tgcagacactcctgtgcttcctccacgacgtagtgaacttggtgaaagagaaccagatgacgcccatgaatctggccgtgtgtctggccccctccctctttcaccttaacttagcgaagaaagaaagctcaccaagagtcatccaaaagaaatacgccaccgggaagccagatctgaaggacctcaatgacaatcaagctgcagcccaggggctcgcccacatgatcacagaatgcaaccggctctttgaggttccatatgagatggtgctccagtcccggagctcctacctggaggctgaaatccacacacccagcctggaagacttgggaacacagctggcagagagcggggcaactttccacacatacctggagcatctcatccaagggctccagaaagaagcacgggagaaattcaaaggatgggtcacctgtcccagcccagacaacacagacctgctttcaaaaggtgggcttgtttgtcaaataccacagtattttactcattgttatcttgccaatggaaataaaatattttgcatttaaatattatatttatacctcatgtatatttttacctcaattgttggtatcaatcatcagttgtaaataattgccaaggcagattaaatttatatacattaaatatttcctattttcta

SEQ ID NO: 7889 - DNA, 664 bp, Cricetulus griseus
tcatggcgacacccccgaaacggcgggccttggatactgtaggagagaaagtgctgcggtacgaggcctttatcagtgacgtactgcagcgagacttgcaaaaggtgctggatcatcgagacaaggtatatgagcagctgtctgtataccttcaactgagaaatgtaattgagcgactccaggaaactaagcactcggagttatatatgcaggtggatttgggctgtaacttcttcgtttgacacaatgtggccttgggatatggttttttcctggagttgacactggctgaagctctcaagttcattgaccgaaagagttctctcctcacagagctcagcgacagcctcaccaaggactccatgaatatcaaggcccatatccacatgatgctagagggacttagagaactacaaggcctgcagaatttcccagagccatctccccattgactgcttcatcccatctaatattaaagagcctagaatgccttaggaatcacatagcccttctctttccccctaataatcactgattgactaagtgccctggagaccaaagttactggaagacccatcctttctgtagaacctctaaaacactctagagatcttgcctccaatttgtattttccacatgactttatgctttgtcccttttttgt

SEQ ID NO: 7890 - DNA, 663 bp, Cricetulus griseus
ggcagccttccatcgagcggtttcccatcagctttaaaacctatttctcaggaaactactttcaccacgtcgtgctggggatctattgcaacggttactacggctcactgggcatgagccgaagggctgagctgatggacaagcacctttcggactctgagtgaccttgtcttcgactttgaagactcgtacaagaaatacctgcacacagtcaagaaggtcaagattgggctgtatgtcccccacgagcctcacagcttccaacccattgagtggaagcaactggtcctcaatgtctcaaagatgctgaggtctgacataaggaaggagctggagaaatacgccagggacatgcggatgaagatcttacaacctgcaagtgcccactctccaacccaagtgagaagccggggaaaatccctgtctcccaggaggaggcaagccagcccctcaaggaggctcggcaggggagacaaatcgcctgctctacctgagaagaaggtggctgacctcagcactctgaacgaagtgggctatcagatccggatctagccacgccagctggtgaggcttccatggtgctcttttctgcacttttacccagcagcttcaggaggacctgcaactgttgttcatgtgttctgctgtcttacattaaggcaa

SEQ ID NO: 7891 - DNA, 663 bp, Cricetulus griseus
gaggaagaggctgagatggtgtgtatgatggacagtgacccctggaagctctctcagtctgggcgaaggaaacaggactatggcccaaaagtcaattttcggaagcagaaactgaagatggctggcttccagggtctccccagcttcagccagaaggtggtccagagaatgggcgtctacccagggctggaggacttccagcctgtggaacagtgtaatctggattacagcccagagcggggctcagccatcgacccccacctggatgatgcctggctgtggggcgagcgcctggtgagcctcaacctgctatctgccaccgtggtgtccatgtcctgtgaggcccctggcagcctgctgctctgctcagccctctccattggacctgatgtttttgatggcagcatcgtggcccctagcaggtctgtcccttgccaggaggtggaggtagccatctgtgtgccctgccgctccctgctggtgctcacaggggctgcccggcatcagtggacacatgccatccaccgcagacacatcgtggcccgtcgtgtctgcgccaccttcagagagctgtccaatgagttcctgcctggagggaagcggcaacaactggggcaggagctgctgcaggctgccctctccttccagggaaggcctgtgtga

SEQ ID NO: 7892 - DNA, 663 bp, Cricetulus griseus
  modified_base (650)..(650): a, c, t, g, unknown or other
aggccagagagcatcatgtcctcctttgaagacgctgacacagaagagaccgtgacttgtctccagttgactgtttatcatcctggccagctgcaaagtggaatatttaaatcaataaggttttgcaacaaagagaaatttccttctattgaagaggtgaaatttggacggaattccaacatctgtaggtatacttttcaggacaaacaggtttcccgagttcagtttgctttacagccatttaaacagttcaacagctctgttctctcctttgaaattaagaacatgagtaagaagaccagtttgatggtggacaatcaggagcttggctacctcaataaaatggacttgccttacaagtgcctgctcaggtttggagagtatcagttcctcttggagaaggaagatggagagtcagtggaatcttttgagactcagtttatcttgtctccaagaccactcttgcaagaaaacaactaggccaacacagagtcctataccagaggatgggggttattcgatcctatttcacccataggacttctcctacagaaatggatgaaatgaattgtgaacagagtccaagcggagaaacatgaaggatgaggacaaaaggaagacatctattctgaggctagtaaaaaaaaaanaaaaaaaaaaaaa

SEQ ID NO: 7893 - DNA, 663 bp, Cricetulus griseus
aaagccgcagggaagatggtggaaaactcaccgtcgccattgccagaaagagcgatttatggctttgttcttttcttaagctctcagttcggcttcatactttatcttgtatgggctttcattcctgaatcctggctaaactccttaggcttaacttactggcctcaaaaatactgggcggtcgcattgcctgtctatctccttattgctgttgtaatcggctatgtcctcttgtttggatttaacatgatgagtacttctccactcaactccattcatacgatcacagataactatgctaaaaaccaacagtggaagaactaccaggaagacgccatcccagcgttgagagacgttcccattagtgaagtaaacaaaatgttcttccttgaagctccagagcttagcacccagaactgagctgtgtgtgaacgtcctaacgccaaacagttacaagtttggggtgaataattttgagcataattatactgactgtccttttaatactcagtattgacatgaaaaagcatggaagttgatttcttaaattgagttcaattagtattgtaaatactttgaatttgtgtttttaattgacagaataaataaaataccacattatactataaaaaaaaaaaaaaaaaaaaaaaaaaaaaaaaaaaa

SEQ ID NO: 7894 - DNA, 663 bp, Cricetulus griseus
gcgaaagcgaagagctggtttctggggaagtggtgtctgtggcacatgctctctctctccaacccgagtcctatggcaacgaccctgatattgagatggcttgggccattagagcaatgcagcatgccgaagtctattacaaactgatttcatcagttgacccacagttcctgaaactcaccaaagtagatgaccaaatctactctgagttccgtggaaattttgagaagctcagggtagatgtattggacccagaagaactcaaatcagaatcagctaaagagaagtggaggccattctgcttaaaatttgaagggattgtagaagactacaattatggtactttgctgagactggattgttcccagggctacactgaggagaacaccatctttgcacccaggattcagttttttgcaattgaaattgctcggaaccgggaaggctataacaaagcagtttccatcagtgttcaggacaaagaaggagagaaaggagctgacaatgaagaagaggaatcagagaaaggagctgatagtggaggagaaaaagaggaaggagtcaacagagaaaagtaaaaaactaaccagagaggagaaaaagaaagccaagaatcgagtgactcagctgaacccacaagtatcaggtgcacagacccctttg

SEQ ID NO: 7895 - DNA, 663 bp, Cricetulus griseus
gctgtttcttctgcccacggaggaagcatgggcgtccaggggcttccaagagttcctggagaagcgctgtcccggggctgtggtgcctgtggacctcctcaaactcgcgcgcaccgtctcgcgccagcagcagcagcagcacctgcaccgccagctgccgccagcagccctagcgcccggggctccacgcatcaccaggggctccgctcctctgccgccgccgctcccgcccgctgccttttggcgcttactccgggggcgcggggccgactcggcaccatcaccctgctcaccatttccaccatcacggccaagcgccgcctgggctgcacccgccgccgcccctccgctggccggggctcgggtattggtagacgcgggctcggcgcttgccgcggctctatggtggctaccagacggattgggtttgtggcggccagtggaatgccatgctgggctacttgtcagcgctgtgccaggcttgtgcctatccgggcggcgacggcctggagctggtggtcatgttccctggggcctggggaaagaccgactggccgaatggggccgtcggtgccaggcggagcggcagactgcgcaactgatcgtgggacacgtgggcaacaagggcacccctcgagagagagagagaaaatacacaaacaa

SEQ ID NO: 7896 - DNA, 662 bp, Cricetulus griseus
gacttccttgatgacgaggatgagcaggaactgttagacagtctggagcccactgatgcatccctacgacagagtcacaagacccccaccccaacagcctcccctggaactacagacacccctaccccacccatgaccagtcctctggatgagcagacccccagacactcccgggcactgaattgggcctcacgctccctgccccttttcttggggagagctccacctccccgaactgtggagaagtctccctcaaaggtgtatgtgaccagggtgcgacctggacagcggacttccccaagggcactgagagactcaccctggcccgccctttccctggcattcttccttaccaccccaagcctctgcccagagtgcagctgcggacacccccacagatggggcccctggtgatgaggctacatcagaagatagtgaggaagaggaggaacaggctgctgggcggcccatgggccgctggcgcgaggatgccattaactggcagcgcacattcagccgtgggtgccatggacttcgagctgctgcgttctgactggaacgacctgcgctgcaacgtctcggggaacctgcagcttcctgaggcggaggcggtggatgtggtggctcagtacatggagcggcttaatgcacgccatggcggg

SEQ ID NO: 7897 - DNA, 661 bp, Cricetulus griseus
ttttttgcataactcggactcggccgagtggcctccggactcccgtgtgctctcggactttcttctccgagaacgggctccgggaacacctgcagacgcaccggggccctgccaagcactacatgtgtcccatctgtggcgagcgcttcccctcgctgctgacgctcactgagcacaaggtgacccacagcaagagcctggacacaggcacctgtcgcatctgcaagatgcccctgcagagtgaggaggagtttattgagcactgccagatgcaccccgatttgcgaaactccctcactggcttccgctgtgtggtctgtatgcagactgtcacctccacgctggagctcaagatccatggcaccttccacatgcaaaagctggcggcagctcagctgcgagccacatgcaggtggatcaccgtgatcttacaccagagaccagtgggccccggaaaggtgcccagacgtcaccggtgccccggaaaaagacgtaccagtgtatcaagtgccagatgaccttcgagaatgagagagagatcttgccggagacgccgtggggagggccatttgaacattacatccaatcaaagtgtcatttgcaacccagatgtaaaacctctaatgtatttggccatgaggcgctgctattataagcagct

SEQ ID NO: 7898 - DNA, 661 bp, Cricetulus griseus
gcagacatgcatggggtggagcagcccctggaggccagtggggtgcgggtggaggcggcacagagccgaggagccgccccaggaagagggagcggcctgccgggagccagggagcagctggcgcgggcagcaggagcctagttccgggccatggggaccctgcatcctgagcagcactggccctcttggccactgatatgagcccctgtgggcttaacgagagcctagtggacgagacaacaacgtgtgcaacacccagggtccccaacacatctgcggtgctgccaccaggcgattccggcacatcaccagtgctgcctatcttctccatgaccctgggtgccgtgtccaacgtgctggcgctagcgctgctggcacaagctgcaggccgtctgcgtcggcgccgctcagctgccacctttctgttgttcgttgccagcctgctggccatcgacctggcaggccatgtgatcccgggcgccctggtgcttcgcctgtatgctgcagggcgttcgcctgctggcggggcctgtcatttcctgggaggctgcatggtcttcttcggcctgtgtccactttttgcttggctgcggcatggctgtggagcgctgcgtgggtgtcacgcaaccgctgctccacgcagcacgtgtatcggtggccc

SEQ ID NO: 7899 - DNA, 659 bp, Cricetulus griseus
  modified_base (626)..(626): a, c, t, g, unknown or other
ggatggcttgctctctattttgcgcaattgaaagtgcaccagaccacctacacagggttttaacatcaaaagtgtacaatcacaaggttttaagctgaacgtatgggacattggtggacagaggaaaatcaggccatactggaggagttattttgaaaacacggatattctcatatatgtaattgacagtgcggacagaaaaagatttgaagagacaggtcaggaactaacggaactgctggaggaagaaaagctgagttgtgtgcccgtgctcatctttgctaacaagcaggacctgctcacagcagcccctgcctctgagattgccgaagggctcaacctgcacaccatccgggaccgagtctggcagatccagtcctgctcagctctcacaggcgagggtgtccaggatggcatgaactgggtctgcaaaaatgtcaatgcgaagaagaaataaagtctggaccactggagccgcaggagctgtgggagcccaaaccggccctgaaaaatcgctgggttgctgtttcctgactgaaggctttctcatctgtgcccagccaccgctgtgtgacgagaggggacaacagcttcagaacgacccccttccagctgtagatttaacngatctccaaggttcggtatcgtttttcaaataa

SEQ ID NO: 7900 - DNA, 659 bp, Cricetulus griseus
gcagtcatgctcaccgccacggcagaggtgccggctgctgtggacgctcccgcatctacggagccggcgtgggcctggagagacgccccgatctccacgttggtacagaggatccagcagctgcagaatgaacgcgcgcaggccttccgccgcctggaccaagctcaccgccagtacctgctcagcggccagcaccacgacttcccgagttatcggagtgtcgtgcacgaggtgacccaggccttcgccgctgcctctcgggaggtactggcagtggaagcggaactagcggggcctcgtgcgcagccggtgctcgctcgccacgtgcgcagcctgcaggacctggaacagacgcgcctggccacggtggcgctgctgcaggtgatggggacaccaggagtgtcagaacaggaggaccctgaaaagttgcaccagctgaaaataaaggtaattaaaaccatggaggcgatcagcgaggttctgcaggaactcaggtttgatgccgaatctgcagagtgagggcggctccccagggaccagaggaagatgggaaagaggcccatggcgtccagcccagccctgatcgccagctggctgaggtcgtgcccctccaggctgccctccaatgctcctcacgaaataaagaattctccctctgc

SEQ ID NO: 7901 - DNA, 659 bp, Cricetulus griseus
ctacaccaccaccatgggcaccctgatgaagcatccaggttccaagttttcacagatattataccgatccgagaaatgctacagggatgcacagggccgtgtcttcattgatcgtcctggcacctactttgggcctatcttggactacctacgcactgggaaagtgcccacagagtacattcctgaggtataccatgaggctaagttctaccaaatccatcttttggtcaaaattttggaggacatgccacagatctttggtgaacaagtggctcgaatgcagttcctgctgggagtgccaaactacaaagagaacctggaggtcctgctgcacctggctcgggcagaggccgtggcaatgcgattgtcaaaggtggtggtgtgtgtggtgcatacagaggaggaagatgcaaagtgtgtggaaccattgcatatcttggaggccaaaaagacacctgttgtcaaatttgggccctggaaggcaggccccgggaacgaggaccttgtgtactgcctggagaaggacattagagcccaggggtataaggtgtcccctcagaggtaccacctgaatagggacccctacacatgcttctggatattcgtcttcacttggtggtgatccccaggaatggggactgtttgttaggggctgtggt

SEQ ID NO: 7902 - DNA, 658 bp, Cricetulus griseus
ctgctccagggcaggcaccatgttgcattcatctttacaccccagcatctagcagtgttggcatgtagtaggcactcaagaaatgtatgttgaatgaacgatgcctgtgacaagcaattggactttattctttcctgacccttgctcctatgacatacctcctgactgccactgtcaccccttcaaagcagaacttctctagggagcctggaagggaaacagctatggccaaggacatcttgggggaagcagggctgcactttgatgagctgaacaagcttcgggtgttggacccagaggttacccagcagaccatagagctcaaggaagagtgtaaggattttgtggacaaaattggccagtttcagaaaatagttggtggtctaattgagcttgttgatcagcttgcgaaagaagcagagaatgagaagatgaaggccatcggtgctcggaacttgctcaaatccatagcaaagcagagagaagcccaacagcagcaactgcaagcgctaatagcaagaaaagaaaatgcagttagaaaggtatcgagttgaatatgaagctttgtgtaaagtaagaagcagaacaaaatgaatttattgaaccaatttatttttcagaaatgaactgaaattttcattatttatagcaggaaggc

SEQ ID NO: 7903 - DNA, 658 bp, Cricetulus griseus
actcgaacagccaaaaccaggatctggagaaattatacatgtgttgttacatatcctgaaaatggacgcctatttcacctcaccaggactgtgagtgtaaaggtggtaggctcgccaaaagatgcattaccaccccagatctattctccaaatgaccgtgttgtctatgagaaagaaccaggagaggagcttctcatcccctgtaaagtctatttcagtttcatcatggactcccacaatgagatctggtggaccattgatgggaagaagcctgaggacatcactgctgacataactactaatgaaagtgtaagttattcaacaacagaagatgaaacaaggactcagatttatgagcatcaagaaagacacccctgaggatctcaggcgcaatagagtgtctacttacacagccacatgtgatttatttaattctcttttgtaccttagatgagtccctgggattctaataaaaaatattgtcttatactgggaaacaaaacatcactccacttgttacttacgcatctgtttccataggttttagtactttaagaccgtctttttaatttattcataaacatttgtattttccattttcatttgatttgtatatttacatattttttacaataaaccatttattttcacctttgaa

SEQ ID NO: 7904 - DNA, 657 bp, Cricetulus griseus
cctcagcccagtctaggtccagcccggttctcgggagaatgaagttcgtgtacaaagaggagcatccgttcgagaagcgccgctctgagggcgagaaaatccgaaagaaatacccagaccgggtcccggtgatagtggaaaaagctcccaaagctcggataggagatttggacaaaaagaaatacctggtgccttctgatcttacagttggtcaattctacttcttgatccggaagcgaattcatctccgtgctgaggatgccttgtttttctttgtcaacaacgtcattccacccaccagtgccacgatgggacagctataccaggaacaccacgaagaagacttctttctatacattgcctacagtgatgaaagtgtctacggtctgtgaagctgctgtccctgaggtgggggttccattccacaaagagaggtggcgctccttccttgacatctacttcctccttcaggcgaaaacatcatctcccttcttcaagatctgcacttaatgtttgaggctgattctccagtccctctcagcaagaggggtaatggtagacacagtctctacatctccttcctttctccttgtttgccctcattcccactctgctttagacttcttgattgtcaatctctgtcacatccgttgattg

SEQ ID NO: 7905 - DNA, 657 bp, Cricetulus griseus
gcagactgtatagagtgtgcgaccaatttctcctgtacttatggaagcctgtcacttttgactgtacagtgaaaccttctgttacctgcgttgatcaagacctcaacccccagaggaacttcatcatcaacatgacttgcaggttttgctggcagcttcctgaaacagactatgagtgtaccaattccacaagctgcatgacagtggcttgtcctcggcagcgctatcttgccaactgcacagtacgagaccacattcattgcctgggtaaccggactttcccaaaactgctgtattgtaactggactggaggctataaatggtcaactgctctagctctgagcatcaccctcgggggatttggagcagatcgcttctacctgggccagtggcgtgaaggcctcggcaagctcttcagctttggtggcctgggaatatggacactaatcgatgtcttactgattgggagttggctatggtgggaccggcggatggctctttgtacatttaactgtggttatgtgcttcgggagagcagtgtgtagaacaagtcctttgtgtggaaatggatgtggtatgagagttgtatttatgtttttaatgtacagcatctgtacttggcttgccttgatgaaggtaaaataaagaaatggaaca

SEQ ID NO: 7906 - DNA, 657 bp, Cricetulus griseus
ctgcatggagcccagccaccctgtgctgctcagctcggaacaaagaaagaaactgtcttccttgttagagatcgctcagcatttgttggcacacaatatgttctcccgtctcaccttctgtcaagaattgtggaaagcacagaactctttattgcttgaagctgtgtggtgtcttcacatgcacagtgttgtgagcctacaagagctactgcatggggcacctcctccacctggctccaggtcagcacaccaggttgctaccatttgcttttctacagtcttctctcctacttcagtgaacatgccatcatcaaggaagaggcttttcctgtatgttgctgtcgacatgtacctcaagctgatgcagctctttgtagatgggggaaagctccaaggccactccttgctccagggtagccctgtacaactgataacagaagcacgatttttctgctgcagctaatacctcagtgcccagaaaagtgtttctccaacatgacagagctgctggctggtcgaagagacgatgaccctgagatgagcaacgccctcctgcagaggcggcaggctgtccccagctttgatctctcccaggagcctcatctgttctgactgtacccatctcagtgcaccagctggcacctttgtgaataattt

SEQ ID NO: 7907 - DNA, 657 bp, Cricetulus griseus
ctgaatttgaagtaaagaggccccctgcctggacagaggattgtggtccttcctccaagacctctctgggcacatcttcccatcatcatctagcaaagatgcgtcagctcaagggaaagccaaagaaggagacatccaaggacaagaaggagcggaagcaggccatgcaggaggcccggcagcagatcactacggtggtgctgcccaccctggccgtggtggtgctcctgatcgtagtgtttgtgtatgtggccacgcgccccacagtcaccgagtgagcacctccattccagctttcctctgcagagacgcctacaatgcccagccctgaggaggagtgcccatcttctctggtctttgacttgacaaaaatttctctacttgtttgggggtgtgtgtgtgtgtgtgtgtgtgtgtgtgtagtgtgtgtcttttcctcctgaaatgatgctgagctgcacccggggagcagaggcctctctgggtgaggctgttggaatcagtcccaccctccctccattcctgcaacatacttttcctgctcccgttcgctcacaactttctaagaggacagcatttcttctctgtgcttgatgggatttgttgactcaaagtgaaatattttattttttgaataaaggagataatagtcttaaa

SEQ ID NO: 7908 - DNA, 657 bp, Cricetulus griseus
atgatgacacccaacaacactggggaggtggccagctccattcccatgggggcactggagctttccctggccctggcaagcctcatcgtcgtcgccaacctgctcctggccctaggcatcgccctggatcgccacctgcgcagcccacctgccggctgcttcttcctaagcctgttactggccgggctactcacagggctggcactgcccatccttcctgggctgtggagcaggagccaccggggctactggtcctgcctccttctccacttggcacccaacttctccttcctttccctgctcgccaatctgctgctagtgcatggggagcgctatgtggcagtcttgcagccactccggccccatctgtgctggggaccctatgtggcgacactgctcctgtcagtgttggcttatgagcggcgtccaccactagggcctggaactctgttatctctcatctcactgggcagcgccagtgctgcagctgtgcctgtagccatgggtctggctgatcaacgctacacagccccatggagggcagctgcccaaaggtggctgcgagtgcttcgaggaagagccaagagggacagtccaggccccagcattgcctaccacaccagcagccaaagcagcatggacctgggcttgaattag

SEQ ID NO: 7909 - DNA, 656 bp, Cricetulus griseus
tttggaaaagttgtccacaaattataagaaatggactgtgcagataatcaatatccaaacctatgaatctctactttacaaagttttcagattttgcccaattcaacattatccatttcactaaaatttagacaatataatgttaactgtagccaaagtagaaatttatgtcctatatacatgtccagattttctggtggctcctgtactgtgtctctcttgatgttacagtaccgtttgtaataaatgttctaatttctatttaggaactctaaatatacatctctattaaatcggaagtttcatgcttttagaggtggacgtattttgaactgtacattttaattttcagaatgcatgttatatactgtttaatacttgacatatcttggcaaatctagtcttttcattcctacctgtgacatacagagtatctcttgaaaactgacactgtcccatttaccaaatcatgctagcctatgctgtatcaaaagtatggtatattttatggagatttagtgatatacatgtaaatgttttttaagttattttattgaacttcaatatttacataaagttataatctttttttaaagtaaagtgtcagtgccagagctgtataagaaaataatcaaataaaggtaaagaataattca

SEQ ID NO: 7910 - DNA, 656 bp, Cricetulus griseus
atctgtttccatcctgagagcagaagccaggactcagcccagtcccagaaaggacatgattctttgtggagaagggacatatggcccaggatactccagggttttcaactctgtctcaccttgtgaaatattgggtcagggtcacaggccttctctccagctctggtgtggattattctttaagtttcaaacacttctagatgtgacaacactggagatgttggtgtcttaaagaaacagtcacaccaaaaaccctgcacccagcccactgccctcacccctctgacagtgtgagtatggatttcatattcttagctgagttgccagagcctagctaggacagagccctgtataatccctggttcccagccagtgactgagttcccaggggaagaaaaacagccttgattatttaatgactatttattttgtcttcctccccttgcaggggtcattttgggagtggcagtagaatacactatagctcagattcctgggcactgggcctgctggttgcccaaagcttaggttggggcctccgtgggcaacaactcccttcctaccctaacccctgaagccttcctgtgtggtggggcctggtgagcatgaattgtgttgaaagctgaatcctgtctaataaataatggtgatgacaa

SEQ ID NO: 7911 - DNA, 656 bp, Cricetulus griseus
ggcctcgtctctggatcaagctatggtgaaagatgtttcgaaaaggcaagaagcgacacagcagcagcagttcccagagcagtgaagtcagcacgaagagcaagtctgtggattccagccttggggggctttcaagatccagcaccgttgccagcctcgatactgattccaccaaaagctcaggtcaaagcaacaatttagacacgtgtgctgagtttcgaataaagtatgttggtgccattgagaaactggacctgtctcaggggaagagtctccaaggaccactagacctgataaattatatagatgtcgcccagcaagatggaaagttgccttttgttcccctggaggaggagtttattctgggcgtttccaagtacggcataaaagtctcaaccacagatcagcatggcgttctgcataggcatgccctgtatctgatcatccggatggtgtgctatgacgatggcttgggagcaggcaagagcttgctggcactcaagaccacagatgcaagcaatgaagaatacagcctgtgggtttaccaatgtaacagcctggagcaagcgcaagcaatctgcaaggtcttatccacagcgtttgactccgtgttgacatctgacaagtcctgaactctgcagtcaagtggaaactga

SEQ ID NO: 7912 - DNA, 655 bp, Cricetulus griseus
gcaggaagtgaagctgtggctgccttgagtggaaacagactaggcgagtactgctttgagaggcccaagtgctccgagacatggaggaggccagtgggggtgccggaaatgaccgagttaggaacctgcagagtgaggtggagggagtcaagaatatcatgacccagaatgtggaaagaatcttggcccgaggggaaaacttggaccatctccgaaacaagactgaggacttggaagccacgtctgaacacttcaagacaacatcgcagaaggtggcccggaagttctggtggaagaatgtgaagatgattgtcatcatctgtgtgattgtttttgtcatcatcatcctcattgtgctctttgccactggcaccatccccacttaagagccccgttcatcccaccctcctcttcagggtaaccctccctcatgtgtgccaagaggggccctctcctgtcctcctccacagaaacgctgctctgtccctgtgagggccttctgctacatcatataatccagaagcaccttgatcccctgggaggagagagctggactgtggctgcatctcatgggtccggagagtgggttagagagacccagaggaccctgcttgtggctgggaaactgctggtggctggtgggcaataaagacct

SEQ ID NO: 7913 - DNA, 655 bp, Cricetulus griseus
cagccagccagccgctactcttctcgagaacagctggacttgctcctaaggcgacagctgagccgagagagactagaggaagttccagttcctgcctctgttttgcatcccctgagcaggccaggctcccaggagcacctggatgcagcaccagcccgcctggagcccagagatcggggaagcacgctaccacggaggcagccaccccgggactaccctggcactatggctggacgctttgggtcacgggatgcactggacttaggggcaccccgagaatggttgagcacactgcccccacccccgccgcaacgccctgaaggaggctcagggctggggtctgtgcccaccccgaccctcccacctctacctggcacttacacttggaggcagtttctgagattcaaaaatcccacttcgctgcctgtgccaaaccccacaaccaggtccctagctccccttgcccagactggcctgacctctgcccctgaagggctgagtggcctgttggtgggagagcgtccttgctatttccctggttctgtagctgcccatctctggggtctccctccagcacagtggccctcttccctgtttgtggaaattgttccgtgaagccgcgctctgttttgggaataaacttctatagaaaaca

SEQ ID NO: 7914 - DNA, 655 bp, Cricetulus griseus
aggctttggactctctctctgacttttccggttaagaaaaggaaatcgtagcctcttcttcctctggtcttaatgaagctactgttgatgcaacgaagaacctaaaacaatggaagagcggaaagctaagaggaagagtcccaagtctttcagtgcccactctactcaggtttgccaaatagccaaaaaaaaatgccatcccagctagtaaaagcacgggcttttcaaatcctgcggcacagtcaacttcccagcggccaaagttaaagagagtgatgaaggaaaagaacaaacctccaggaggagaagggaagggtgctcagaccacccccatccagcattccttcctcacagacgtctctgatgtccaggagatggagcgagggctcctcagtctgctcaatgatttccattctggaaagctgcaggcgtttggaaatgaatgttccatagaacagatggaacatgtccggggaatgcaggagaaattagctcgcttgaatttggaactctacggagagttagaggaacttcctgaggataagcggaaagcggccagcgacgccaacctggacaggcttctgtctgatttagaagtaaatttgaattcttctatacagaaactgcatttggcagatgcacaggatgtccccaa

SEQ ID NO: 7915 - DNA, 655 bp, Cricetulus griseus
gcgcgtttctcccagccatggagtcggaactggtgcggcgcctcgccccgcgcctcggccttgcggagccgggggtcctgaggaaagcagaggagtacttgcggctgtctaaggtgaggtgctccagtctgtctgcacacagttcagaaaccagcagtgctgtcatatgcctggaccttgcagcgtcctgcatgaagtgccccttggatagagcttatttaattaagctctctggcttgaacaggaagatgtatcagagctgtcttaaatcttttgagtgtttactgggattaaattcaaatattggaataagagacctagctgtacagttcgactgtacagaagcagtggacatggcttcaaacatactgcaaagctatgagtccagccttaccgaagcacagcaggcagatctcgacttgtccaggccacttttcaccaccgctgcactactgtcggcatgcagaattctgaagctaaaagtggacaaaactaaaatgataactacatccggtgtgaaaaaagcaatatttgatcggctatgtaagcagttagagaagattgggcagcaggttaacagagactctggagatttagctagtccagcactgaagaaaaagaagccagtgtgtgagtattttgcctgtatggatgt

SEQ ID NO: 7916 - DNA, 655 bp, Cricetulus griseus
aggtccaaatggagcagctgctgctgggggaacagagcctggaggccttcttgccagccttccagaggggccgcgccctggcccacctgaggcggacgcaggcggagaaactgcaggaagtgctgaggcgtcgggaacgctctgcccagccggccccactactgctgctgctgctgctgctgccgccaccgccatggatccccccaaacccttccctgctgctgccgtgctgcccaccggggccgcccgggggccacctccagccgtaccccggagcctgccccccttggactcccgcccagtgcccccactgaagggctctcccgggtgcccctttggtccccctagcctcaggcaggcccagggcccctggaggctgagctggggaagaggggcttcccgaagaggcccgcagagggctgggggtggggtgggcagggtgctggacctcggtcaccaaggaaactctgcctttttattttattttattttattgtctccccggtcctccagggtgccaagccaggtctccaaatgaaaagaactatatgggggcctgctgcccccccgggggggcttgcttgggagaggcctgtcgcaccctgccacatgactgggctcgaacttattggccaaggcttactggattgttctc

SEQ ID NO: 7917 - DNA, 654 bp, Cricetulus griseus
tatgtggtggtggtcaagaacgtgggactgaacctgcggaagctcattggtagtgtggatgatctcttgccctccttgccgtcgtcttccagaacggagattgaagggacccagaaactgctcaacaaggacctggcagagctcatcaacaagatgaggttggctcagcagaatgctgtgacatccctgagtgaggactgcaagcggcagatgctcacagcctcccacaccctggctgtggatgccaagaacctgctggatgctgtggaccaagccaaggttctggccaatctggcccacccacctgcagagtgatcgagagagggggctacctgcctgcatcttctgccccaacctgtcatggcgtacctttcctgccttgcctttggttattggtcttcttgggaaggctgagaagagtcctcccctcaccactttgcacgacttccccttccccacccgaccccagactcgtgctacgcaggctgcatctggacacagaagcccctgggcacagacacagggtggggtgacatagttcataggggtactgctgccggccactccctcctactccagcctgggtactggagtgtcattggggtcacagttgtacccctaccagccaagatggctttctgcatggacatttga

SEQ ID NO: 7918 - DNA, 654 bp, Cricetulus griseus
ccctcgtcatcctgattgtggaattaggcgggctccaggcccgctttcccttgtcatggcgaaacttccccatcaccttcgcctgctacgcggctctcttctgcctgtcatcttccatcatctaccccaccacctacgtgcagttcatggctcacggacgcagccgggactacgccatcgtcgccaccaccttctcctgcgtcgcttgtttggcctatgctaccgaggtggcctggactcgcgcaaggcctggtgagatcaccggctacatggccaccgtgccggggctgctcaaagtgtttgagacctttgtagcctgtatcatctttgccttcatcagcgaaccgttcctgtaccagcacaagccggcgctggagtggtgtgtggccgtctatgccatctgcttcatcctggcggcggtgaccatcctgctcaacctgggagactgtaccaacatgttgcccatcccgttccccaccttcctgtcgggcctggccttagtctctgtcctcttgtatgccactgccattgtcctctggcccctctaccaattcgaccagaggtacaacggctacccccggcgtgcgtcggatgcaagctgcacttgtgtgtgtgtgtgtgtgtgtgtgtgtgtgtgtgtgtgtgtgtgttaag

SEQ ID NO: 7919 - DNA, 654 bp, Cricetulus griseus
ctttcgcgatatggggaagagcgtccttttcggcagcaccacctgaggatttcctggagcccgcccctcgcgatggaagaggatcaggagctggagagaaaaatgtcaggattgaagacctcaatggccgaaggcgagaggaagacagccttggaaatggtccaggcagctggaacagatagacagtgtgtgacatttgtactgcacgaggaggaccataccctaggaaattctcttcggtacatgatcatgaagaacccggaagtggaattttgtggttacactacgacccatccttcagagagcaaaattaatttgcgaattcagacacggggtacccttccagctgttgaaccgtttcagaaaggcctgaatgagctcatgaatgtctgccaacatgtgcttgacaagtttgaggccagcataaaggattataaggataaaaaaggcaagcagaaatgaacccactttctagtccctcgtgcagggtacaaggaggatcaccctcatgatggtgcagatcccaaaactagagttagagattgaagaatgaagcatgttctgtcttataggaagggtgtggttccagctgttgacccattacagctgttggaatctctgcaagtatatttgcctaataaattctctcttttg

SEQ ID NO: 7920 - DNA, 652 bp, Cricetulus griseus
gccaagagctatgaccgccaacgcggagccgaggcggcggcccggagtgggtgttggcgtggtggtggtgagctgcgagcatccccgctgcgtccttctggggaagaggaaagggtcgtttggagccggcagcttccagcttcctgggggtcatttggaattcggtgagacctgggaagagtgtgctcagagggaaacctgggaagaggctgcgctacacctgaaaaacgtgcgctttgcatctgtggtaaattcttttgttgagagagagaattaccattatgtcaccatactaatgaaaggagaagtggacatggatcaccattcagagccaaagaatatggaacctgagaaaaatgaaagttgggagtggattccttgggaagaattccctccatcagaccaacttttctgggctctccgttgtttaaaagagcaaggctatgacccatttagagaggacctgaaccacctggaagggtacagaggagagcacctccaaggacccaaggagattccttaataaaaaaaaaaaatacttaaggaaaataaaacattcagtgtttcaagactttgttaatctacaaggccacatgatcaccagtttatttacactctcccaaagtaactcgaacccttaagaaaatcttcc

SEQ ID NO: 7921 - DNA, 652 bp, Cricetulus griseus
accggaagctgtcagtacaaccctccttccccgtccccaacagtaccaccagcaccagcagccatctcctcagtttccaacagggccacagccacctccccagcggtatctgcagcaacaccattttcaccaggaccgccgtggaggcagcctggacataaatgacggacattgtggcattggcagtgagatgaatgccaccctgatgcaccggagacatactgaccctgtgcaactccaggtggcagggcgagtgcgctgggcccgggcactatatgactttgaggctctggaggaggatgagctgggattccgaagtggagaaatggttgaagtcctggacagctccaacccatcttggtggaccggccgtctacacaacaaactgggacctcttccctgccaactatgtagctcccatgactcgatgagtactgccaggaggctggaggctttttgtctgaagctgcctgcaagatagagacaagggaaaaaagctgaactttattactacacatgcatgcatatgatgtacatgtgtgcccgtgtgtacgcaaaacatgtatatgcatgcctgagtctatacacaactattttcgtgtgtgtgtgtgtgtgtgtgtgtgtgtgtgtgtgtgtgtgtgggatctaagat

SEQ ID NO: 7922 - DNA, 652 bp, Cricetulus griseus
tgagcgcgggagatggcaagggcgacctgggggacctccgccgacgcggcccacggtgggcaccaacctcactgacatcgtggcccacaggaagatcaccatccgagagctcgggggttgcatgagccccatctggtccagttactatggaaactgccactcgctcctgtttgtgatggatgcctctaaccccacccagctctctgcatcctgtgtgctgctcttgggtctcctttctgcagaagaacttgcaaaagcctcagtcctgatactcttcaataaaattgacctgccctgttacatgaccgtggaggaaataaagtcattaatcaggcttccagacatcattgcttgtgccaagcagcatattaccacggcggaaataagtgccagggatggcactggcttgtctgcagtactgctctggctccaggagcaacacaaatgcagcagctgactgcaagacagaggattatagctgacccatccagtgcctaggagacaaacgggcctggtggcacgtgcctttaatcccagcactcagcaggaagagacaggtgaatctctgtgagttcgaggccagcctggtctccaaagccagtgccaggagaggctctggctacacagagaaaccctgtctcgaaaaccaaaa

SEQ ID NO: 7923 - DNA, 652 bp, Cricetulus griseus
caatgtcagtggcggcgctgagacaggcgttgttggggagaagggcagtggctacagcggccgtttccgtctctagagttccatccaggttattgagcacatccacatggaagctggcacaggaccaaactcaagacacacagcttataacagttgatgaaaaactggatatcactactttaacaggtgttccagaagagcacatcaaaacaagaaaggtcaggatctttgttcctgctcgaaataatatgcagtctggagtaaacaacacaaagaaatggaagctggagtttgataccagagagagatgggaaaatcctttgatgggttgggcatcaacggctgatccctctccaacatggttctaaccttcagtaccaaagaagacgcagttgcctttgcagaaaaaatggatggagctatgacgtggaagagaagaaggttccaaaacccaagtccaagtcttatggtgcaaacttttcttggaacaaaagaacaagagtgtctacaaaataggttggcactggcatcatttctgcttgactgtgaatcaagtcagctgtgcactatttatagtccatggataatgcacctcttaatctcctaataaatgtgacctttaaactaaaaaaaaaaaaaaaaaaaaaaaaaa

SEQ ID NO: 7924 - DNA, 652 bp, Cricetulus griseus
cccaccaggaagaagtttgtgatcccactggaagacgaggcccctcctgcaggggccaagcccttattcagatcctcacggaaccccagcaccacggccccctcggtcccagcggcccctcagacgtacgccgagtatgccattgcccagcctccaggaggggctgggcccacagggcccacaggctctgaacctgtgaagggagagaaccccggccagacggtgaaaacgggagcgaaatccaatagcatccttgtgagcccccggcagaggggcaaccctgtgttgaagttcgtgcgcaacgtgccctgggaattcggcgaggtgacccctgactatgtgctgggacagagcacttgcgcccttttcctcagcctccgctaccacaatctccatccagactacatccacgaacggctgcagagcctggggaagagctttgccctgcgtgtgctgttggtccaagtggatgtgaaagatcctcagaaggccctgaaggacctggctaaaatgtgtatcttagcggactgcaccctggtcctggcctggagtgccgaggaagcaggacggtacctggagacctacaaggcatatgagcagaagcccgctgacctcctcatggagaagctggagcagaacttcctgtcccggg

SEQ ID NO: 7925 - DNA, 651 bp, Cricetulus griseus
cacagagaacccatggcgttgtgattgcgcccttcactggctgggctcttggatcaaagaggggggccgtcggctgctgagctccagagacaagaagatcacatgtgctgagcccccacgcctggcgctacagaatctactagaagtatctggtggtagcctcatctgcattcctccctctgtgaacgtagagcccccagagctcacagctaacctgggggaggacctgcaggtagcctgccaggcatcaggatacccacagcccctggtggtctggagaaaggtgccccaggctcgcgatggcaaacctcaagcccaagcccagctggaacctggaacaccaggcctgggtgggtatgcgacccgtgacactggcagcggaatgctcttcctcacaaacatcacactagctcacgccccggcacgaggcaggcagcatggccttccgcgccctgggcctagcaacgcagacagcgatcgcagcagctatcgtgctgctggcgctcactgcgctgctcctggctgccatgatctgccgacgccggcggcggcgtaaaaaggtgcctgcgccccgggggaaggcacattgttcgtcaacgactattcagacgggccttgcacctttgcgcagctcgaggaactccgtgatga

SEQ ID NO: 7926 - DNA, 651 bp, Cricetulus griseus
atgaggaaactgaggcccagagaggttaagtgtattggccaaagtcaaacagctagtaagtgatggagccaggactcaaactcagcttaggagccatgtccaccttgtttccttcactgttccctcgtgtgactgagacactgtggtttaatctggatcgaccctgtgtggaggagacagagctgcagcagcaggagcagcagcatcaggcctggctccaaagcatcgcagagaaagacaacaacctggtacctattggcaagccagcctcagagcactacgatgatgaggaagaagaagatgatgaagatgatgaggacagtgaagaggattcagaagatgatgaggacatgcaggacatggatgagatgaatgactataatgagtcacctgatgatggagaggtcaatgaggtggacatggaaggcaacgaacaggatcaggaccagtggatgatctaggtagacaagccaaggtggcctcagggtgattccaggccaccccagcctatcttgcatccacagcctcagcccctcagtctgcagaaccagcttgtggctgtagtgtctaaagctttcccttaggcactttctcagctgctgccaggataaggactcgtttggccctccaggccatcagtcttcccttgaa

SEQ ID NO: 7927 - DNA, 651 bp, Cricetulus griseus
ggagaatctgcttcagctgaggtgtcacttcacatggggactgctgattgaagacgttgacatacctgatttggaaatgagaatccaggaggaggttcagttcctagacatcaagaacccagcagggatgcacaacctgctggcctatgtgaggcacctgaaaggccagcatgaggaagccctggagagcgtgaaagaagcagaagccctgacccagaaggagaagctggacaagagaagcctggtgacctggggcaactgtgcctgggtgcattacaacatggacagcttgtcagaagcccaggcctacctggacaaggtggagaacacttgcaaggaattcgcaagtcccttccgctataggatggagtgtgctgagatagactgtgaggaaggcgtgggccttgctgaaaggtggaggacagaattatagacgagccatggcctgctttgtgaagcagaaacacacattgaagaagccctcagcagcacatcctgccaaaattatgtgtttcgctatgcagccaagtattaccgtaggaaaggctgcatagacaaggctctccatctcctacacagggccttacaggcatcacctgactctggctacctgcattaccaaaaagtaaagtaaaagaaaagaaaaaaaag

SEQ ID NO: 7928 - DNA, 651 bp, Cricetulus griseus
atgactgctcagaaaggtctctgggatgctattgtgatcggagcaggcatccaaggctgcttcactgcataccacctggccaaacactcgaagaaggtcctcctgctggagaagtacttgcttccccattcccgaggaagctcacatggacagagccgcataatcagaaaggcttatccagaggacttctacaccaggatgatggatgaatgctatcagacgtgggcccagctggagcatgagactggagcccaattgcacaggcagactgaggattgccacccgaagtatgacaacattgtcatcggtgctggattctctgggcatggattcaagttggcccctgttgtggggaagatcctctatgagctaagcatgaaagtagcaccatcctatgacttggcaccatttcgaatgagccgcttctctacactgagcaaagcccacctttgaccacagctgactctctcctgggggaggagaaccctcatggggaagacgtctaggagaaggaagtagccatggcatgtctcctgtccttctgcttctatggaatctcctgtaaacaccaaataattgatcctctgttcccagtcactctcctgagtccatctcttttcccatccccagaaagtcagccagagactcacc

SEQ ID NO: 7929 - DNA, 651 bp, Cricetulus griseus
ggattgcagagctgcgctactgctgtggctgctgccctggaccgcccagggcctagcagtgcccaggagcagcagccctgactgggcgcagtgccaacagctctctcggagtctctgcacactggcctgggatgcacacccaccagtagggcatatggatacactaagagaagaaggaaatgaagagactagaagcgatgtcccccatatccagtgtggggatggttgtgatccacaaggactcaaggacaacagccagttctgcttgcaaagaatccaccaaggtctggttttttataagcaactgttggactcagacatcttcacaggggagccttctctactccctgatggtccccgtgggcccagcttcacacctccctactggggcctcagccaactcctgcagccagaggaccaccagtgggagtagccaacagatgcctagcctgagtcccagtcagcagtggcagcgtccccttctgcgttccaagatcctccgaagcctccaagcctttgtggcaatagctgcccgggtctttgctcacggagcagccaccctgactgagcccttaatgccaacagcttaagtatggcacccaggttcccatggctcagcaatgataggatcgatctaccgacccaggcatc

SEQ ID NO: 7930 - DNA, 650 bp, Cricetulus griseus
cacagggttccagcaagacgggacagtatattgtacccaaggaagtcctgtttgtgaagagagcaaccagtcattgactcataggagtaccgaagaggagtcagttctctcatggaaaagaggaacaatgggtgccacaatgacagggccactgattctgctgttacaagaagaaagcaagttattggaaataagtggagaaacctgttagagcagaaaagaaaaatctctggatctgtaggaatgaagcacaccgagcaaatgattcattttggacaaagtgtcccactaagtgcaagtgaaccagtacaagctacaagaggccccaagactgaagaagtttcaggtagtacttctgagcgtttggtgagaacagaaggtcctgaagtccctccgtcacctcaatcaaaggttatactatgtacaagaagccatttacaaaaacccatccatcaaaaatactttacagttaataccacttctgaacagccagccaaggaccaggttctctcctgatactggatccagagtgcagaaaaaaatactgatcaactgtgacagtcactatttagtggaatcattatttttgagaatcctgtaaataaattctgtatttctgcatttattaatgatttaaaatattagacttt

SEQ ID NO: 7931 - DNA, 650 bp, Cricetulus griseus
tggaccgccttaatgtatgcggcacggaacgggcatcctgatgctgtccagcttctgcttgacaaaggatgtgacaggtcacttgtcaacaagtcacatcaaactgcgctggatatcgctgtattttggggttataagcacatagctaacatgttagctaatgcaaaaggtgggaagaagccttggttcctaaccagtgaagtagacgaatgtgaaaattattttagcagaacactactggaccggaggagtgaacaaaaagaaataattgtgactggctgcaagctaaaagagagccacccagccaccatttatatccttttctcagacctaaaccccctcggttactctgggtggcaacaaagagagttcccagcagccggaagtcaggctctgccagctgaaccatgcagatgtaaaggatttcttggcgcaccctgagaagatcaccttggtgttccttggagtagaactcgagatgagaaaggggtggcgtaagaatactgaaggcgtcccagaggaagacgaggatggtctggttgcttggtttgctctcggcatcgaacctgtcgccgctgaagagtttaagcaaagacatgaaaactgttattttctgcaccctccgatgccggctcttttgcagctgaaag

SEQ ID NO: 7932 - DNA, 650 bp, Cricetulus griseus
taaaggatgttgtaatcagaaacaagtcaagaaagcaaagctgctccgagggaaacatgctgtcctctgaagatgggatactacccaagcccaagaagagtcatgctggtctttcccccttatccaggaagatttcatcctcaaagaacaatgaggacaccagcagagagtccaaccactctacccaggtgttacctgtactcaagtactctgggcacaattccagactttgtgcttcctccacttcccagtcagccagtgactccctcctgactgctgtgagcctgtgactggtctgcacaggagcactcagctacctcaagggaaccgacctgctaatgagcctgagcctctacccgcctccactttgcccctcatcagagtattttttgaagtggttctattgtagatgcgggcatctggagggctggaggggtggtggtgatggggagaaggtgaggaaggttccacctctgtcacctcactgcctggctggcacctcatatctcagtagagaagccagtggcggccaagcagccttataaagcagggtttggtttctaaaaaaaaaaaaaaaaaaaaaaaaaaaaaaaaaaaaaaaaaaaaaaaaaaaaaaaaaaaaaaaaaaaaaaaaaaaaaaaaaaaaaaaa

SEQ ID NO: 7933 - DNA, 650 bp, Cricetulus griseus
  modified_base (524)..(524): a, c, t, g, unknown or other
tgggcgatggaggcggcaccagcccgagagtgacgcgccgcgggcaggaacttctggcgccaccctgtctggacaccgagtcgctccgtaagagccgacccccgccgcgggaggcctgcagccctcgagatgcctcactcccaatggcaggtccctgtggcctgtgtgccaggactcggtcagcacagcattgccttttctccaagaaaagaaaaggggccactggggtccccttcaccagccactcaggccctggggccttgctgggagctgatggtcatagggatgtcagactccctaaatatggcaaggaatcccaagagcacacagtgccccaacccggaatgagaaagtggaccccaggttcaagggggtgactttggagtttcagatacagccggattctagcctccagattgtacccacctacagcttgcctggccgaagttgtttacaaaagccccctgcaagcccttccaaggcccttgtcagcccaggaggcagcgaggccctcgggccccggngctgtgcttcttgtagaacccagaggactccactctggagagatgctgaagatgggacccctctctgcaatgcctgtggcatcaggtacaagaaatatggcacccgctgttccagttgctggctgg

SEQ ID NO: 7934 - DNA, 649 bp, Cricetulus griseus
ttgctcttaattccccatgaagattctgaagcattcatcatcattgaggatgtgaagtaaagtatatttttgtagcaaaccacaggtgtgtatggaaagactgaatcccacacagtagcccaagtctacccagcctctcaaaggactgctgggaaagtgttcatctcaccagctgtgacagaatgttgatgtgaagggggaagaatgatagaagacttcatctccattttggaaacatatttttaaaagagaggcaggggattatgttcataaaagaagatatgaattggttaaatactgtaaataggtggcaatattgctagagctgggactctggtgtagcttctattctattttagtccctatttggacactgttgaaattaataagaggtcaaatgtttctaacctttcctctctaaacctagagtcatatgctttttgacttaccatagattcaagcaatagatttgaagtctgtaattattaaactgggacacaggctgcattctcaagacattcacctaattagccactctgtgtgttttacattactcagtgtaaacatcctcagaaaaaagacttctttcctgaatgtaaaagacagtcttccaaaggatagaaattttaaattaaaaagaaaagccatc

SEQ ID NO: 7935 - DNA, 649 bp, Cricetulus griseus
  modified_base (60)..(60): a, c, t, g, unknown or other
  modified_base (612)..(612): a, c, t, g, unknown or other
ggtggtgtgtgctggctccagcaggacagagaggccacctgcagcctggtgttgaaaacngatgtcagccgggaagagtgctgtgctacgaacaacatcaacacagcctggtccaacttcactcacccaggcaataaaatcagcctgctgggcttcctgggcctcgtccactgcctcccatgcaaagattcctgcgatggagtggagtgcggccccagcaaggcgtgccgcatggtggggggccgtccacactgtgagtgcgcaccagactgcgaggggcttcccgcgggcttgcaggtctgcggctctgacggcgccacctaccgggacgagtgcgagctgcgcgccgcgcgctgccgcgggcacccggacctgcgtgtaatgtaccgaggccgctgccaaaagtcctgcgctcacgtggtgtgcccgcgcccccagtcgtgcgttgtggaccagactggcagcgcgcactgcgtggtgtgtcgcgccgcgccctgcccggtgccttccagccccggccaggaactctgtggcaacaacaacgttacctatatctcctcgtgtcacctgcgccaggccacctgcttcctgggcccgctccattggggttcnccacccgggcatctgcacaggtgctccaaaagtacca

SEQ ID NO: 7936 - DNA, 649 bp, Cricetulus griseus
caagatggcggcgcggaacgttccgctttctgctgtctgagggagcacgagggactgtgtgccgcggtgttccagttccgcgttgaggcctcgagaaggcagaagcggagccccggcgggtgcgatggccgcggtggtggccaaacgggaagggccgccgttcatcagcgaagcagccgtacgaggcaacgccgcggtccttgattactgccggacctcagtgtcagcgctgtcgggggccacagccggcatcctcggcctcaccggcctctacggcttcatcttctacctgcttgcctccgtcctgctctccctgctcctaattctcaaagcgggaaggaggtggaacaaatattttaagtcacgaagacctctttttacaggaggcctcatcgggggcctcttcacctacgtcctcttctggacgttcctctatggcatggtgcacgtctactgaaatgagggcaggggtgacttaaaagaaaaaaaagattggcaggactcttgccagcaattaacaccgtgtagacttacttagtttttaaattgtttgaattcgctgcttgttctgcactgttgtaatttatatctgaagatagtgagaccctaataatattcttcagattaaatgaagtgtgacaccttatcg

SEQ ID NO: 7937 - DNA, 649 bp, Cricetulus griseus
acttcgtgagcttgagttggaccttcacaagaagcacgtgataaattcttgggcaacacagagagaagaaaaaaaacagcaagaagccagcgaggagcaggagaaaaagcggttgaaacaggtcattgaggagcagctgcagctggagaaagctcgggaggcagagctgcagctactgctgagggaggaggccaaggagatgtgggaaaagagagaagcagagtgggctcgagagcaaagtgctcgggacagactgatgagtgaggttctggcggggaggcagcagcagatacgagaaaagatggagcagaactggcgggcgcaagaggagaccctaaaacacagggagaaactcctccagagtctggaggaggcaaggcagtcaggctcagcgtgcaaaggaggagcgtgaagagctgaagtcagccaggaagcaggagctggaagcccaggttgcagagcgccagctccaggcttgggaagcagcccagcaggtggaggaggaagaggaggaactcaagcgggcagaacagcactccgatgctctgctgcagcaggaggccaagatcatggctgaggagggctaccggcccaagccctacggacacgtcaaaatggcctggggactgacaacgagcacagagaagca

SEQ ID NO: 7938 - DNA, 649 bp, Cricetulus griseus
ggatgaggaggggcgcacaaagaatccaggtctcccggagggagggtgatacccagaaccatgtgtgcggagcggctgggccagttcgtgaccctggctttggtgtttgccacctttggacccggcgcgaaggaccgacgccacgaaccctccggaaggtcctcaagacaggggctcccagcagaaaggccgcctgtccctgcagaacacagcggagatccagcactgtttggtcaatgctggggacgtggggtgtggcgtgtttgagtgttttgagaacaactcttgtgaaatccgaggcttacatgggatttgcatgacttttctgcacaacgctggaaaatttgacgcccaggggaagtcattcatcaaggatgccctgaggtgcaaggcccatgccttgcggcacagatttggttgcatcagcaggaagtgtccggcaatcaaggagatggtcttccagttgcagagggaatgctacctcaagcatgatctgtgctcagcagcacaggggaacatcggtgtgattgtggagatgataaatttcagggaccttctactgcatgagccctatgtggacctcgtgaatttgctgctgacctgtggggaagatgtaaaggaggctagtcacccgaagcatccaggctca

SEQ ID NO: 7939 - DNA, 649 bp, Cricetulus griseus
gtgattcagatggcttccagaggaaagacagagacgagcaaattaaagcagaatttagaagaacaactggataggctgatgcagcaattacaagatctggaggaatgcagagaggagcttgacactgatgaatatgaagaaaccaagaaggaaactttggagcagctgagcgagttccacgactccctgaagaaaatcatgtcgggaaatatgactttggtggatgaactcagtggcatgcagctggctattcaggcagctatcagccaggcctttaaaaacccctgaagtcatcagattgtttgcaaagaaacaaccaggtcaacttcggactaaggttagcagagatggacagagatctgatggtggggaagctggaaagagacctgtacacgcagcagaaggtggagatcctcactgctctcaggaagctcggagagaagctgagggaagatgatgaggccttcctgttagccaacgcaggcgctgcactcagccagtttgagaaagtctccacagaccttggctctggagataaggtccttgctctggcagggtttgaggttgaaaaagccaagaaatgacattgcagcagtttggctccataagccccatcctaactgcacatggtgctttcatcctgaggact

SEQ ID NO: 7940 - DNA, 648 bp, Cricetulus griseus
ctgcttcatcgcaccttactgggctgctcagtcctggctgtcacaaccacaggatgccttgtcttcacctgagcagctctgatgatgtctgcacgtgggctgatggggacaacgggaggtcctcgtagggttcatagggtcactgttcctatttcacaaagtgagagagttgatggcccagtgggaagcgtggtggggaaagggtacctacccagaagtctgatccactgccatttacagcagctagcgccttgtctgctgctacagaggaccgaccagtcacactcaggatctacccacagtgacacagacactggccaggggccttgctccaacaatcggaagcactcgcctctcctcatcttagatgaactgttctgaaatggaggcgatgtcctgttatgtccctctctgtggccaggagagaattgtgggtctccctggggtgctgttgcttgggggtgtgcctatagagacatctctcatctgtcagtacccactgcatcagcaagatgccccatgcagttccaggctgagaccctgcagcttagattcatggctgtcccctccccagctgtggaggggcttctaacacctggaataaaagtgggggttcagttaaggaaggggtggttggggtagcccagg

SEQ ID NO: 7941 - DNA, 648 bp, Cricetulus griseus
gcgggggttcgtggccggagattcccggggagcctgctcggtttgccatcttgggatcccatggctgttcttactgggctctggggcccctttgcccatgtcagcagagcatttggccagcgctgcttcagcacctctaggagcctcgatgcaatccagaagatgactcgggtgcgtgtagtggacaatagtgccctggggaacaccccgtaccatcggcctcctcgctgcatccacgtctataacaagagtggggtgggtaaagtcggcgaccagatcctgctggccatcaggggacagaagaagaaagcgctcattgtgggacatcgcatgcctggctcccgaatgaccccaaggtttgactccaacaatgtggtcctcattgaggacaatgggaaccctgtggggactcgaattaaaacacctatcccaaccagccttcgcaagaaggaaggcgagtattccaaggtgttggccatagctcagaactttgtgtgagcagagcggctctgagccatgcaaccattcccttcacactggtaacagaataaatgttttaatgtgtgttttcttcctaaaaaaaaaaaaaaaaaaaaaaaaaaaaaaaaaaaaaaaaaaaaaaaaaaaaaaaaaaaaaaaaaaaaaaaa

SEQ ID NO: 7942 - DNA, 647 bp, Cricetulus griseus
aaagggaatgacctcattacagtgtgactgcacagaaaagttacagagcagaatttgattttctgcgctcacagctgaatgacatctcatcatttaagaatatctacagatatgcctttgattttgcaagggataaagatcagagaagccttgatattgatactgctaagtctatgttagctctgctgcttgggagaacatggccgctcttttcagtattttatcagtacctggagcaatcaaagtatcgagttatgaacaaagatcagtggtacaatgtattagaattcagcagaacagttcatgccgatcttagtaactacgatgaagatggtgcttggccggttctacttgatgaatttgttgagtggcaaaaaatccgtcaaacatcatagcaagaactgttgtgaagaaaatgcaaatcttgtgaagaaaatacagaaagagggaggatatacaagggtgcattttcactcacgaaagacttctcatagtacttcttttccttttttttaaaggaagttttcttgttacatgtgatgggcactgagccacacgtcttctgagactgaatattgacgtttttgtttcaagtttatgtttttaacatttatttcagaacaataaagattcagatttgtgaaaaa

SEQ ID NO: 7943 - DNA, 647 bp, Cricetulus griseus
ttggccggccgactatagcgggctgagaggctttcgcagagctgtttccaagatgaatgccagaggccttgggtcgcagctgaaggacagtattccagtgacagagctctcagcaagcgggcccttcgagagtcatgaccttctccggaaagggttttcttctgtgaaaaatgaacttttgcccagtcaccctcttgaattatcagaaaaaaatttccagctcaaccaggacaagatgaacttttccaccctgaggaacatccagggtctgtttgctcccctgaagttacagatggagttcaaggccgtgcagcaggttcagcgtcttccattccttccaagctcaaacctgtcactggatattttgaggggcaatgatgagaccattggttttgaggatattcttaatgatccatcacaaagtgaaatgatgggcgagccacacttgatggtggaatataagctgggcttgctgtgatgcaggtgctgctgtgcaggaacacagaagtgcattgtggttgcctttgctacagtctgatgtacacaagattaaagaactgacaggatcacttggatatttggaagtgtttgggtctttagttttgcatttagttgagtcagttgaaagcctagaggtggtttctgag

SEQ ID NO: 7944 - DNA, 647 bp, Cricetulus griseus
gcagcagcagcagcagcagcaactggagccgccaacatgagctgcagagaagggactgacagcagctgtggctgcggtgggcgcgacgagaacaggatcctcaagtgcgtggtggtcggggacggcgcggtggggaagacctgcctgctgatgagctatgccaacgacgccttcccggaggacaaccagctgcgaccactctcctaccccaacaccgatgtgtttctcatctgcttctctgtcgtaaaccctgcctcttaccacaacgtccaggaggagtgggtcccggaactgaaagactgcatgccgcatgtgccttacgtcctcatcgggacccagattgatctccgggatgaccccaaaactttggcacggctcctatacatgaaggagaagccccttacctacgagcatggcgtgaagctggcaaaagcgatcggtgcacagtgctacttggaatgttctgccctgactcagaaaggtctcaaagcagtttttgatgaagctatcctcacaattttccatcccaaagaaaaaaagaaggctgctcagagtgccacggctgctgtgcaatcatctgaagcgcctgacgacccatcctccctgccatccaaggatgtagaaaagcagccagtctctgtcgaccc

SEQ ID NO: 7945 - DNA, 647 bp, Cricetulus griseus
gcggcagcatggacgacgaggaggagacctaccggctgtggaagatccgcaagaccatcatgcagctgtgtcatgaccgtggctacctggtgacccaggatgagctggaccagacacttgaggagttcaaggctcagtttggggacaaacccagtgaaggaagacccaggcgcacagacctgacagtgctggtggcccacaacgatgatcccacagaccagatgtttgtgttcttcccagaggagcccaaggtgggtatcaagaccatcaaggtgtactgccagcgcatgcaggaggagaacatcactcgggcgctgatcgtggtgcagcagggcatgacgccctctgccaagcagtccctggtggacatggcccctaagtatgtgctggagcagttcctacagcaagagctgctcattaacatcacggaacacgagctggtccctgagcatgtggtcatgaccaaggaggaggtgacagagctgctggctagatacaagcttcgtgagagccagctgcctaggatccaggcaggggacccagtggcacgctactttggaatcaaacgaggacaggtcgtgaagatcatccggcccagtgagacagctggccgctacatcacctaccgcctagtgcagtagccccag

SEQ ID NO: 7946 - DNA, 646 bp, Cricetulus griseus
taagccggcactccttaagggcgagccatgttcagctcgagcgccaagatcgtgaagcccaatggcgagaagccagacgagttcgagtctggcatctctcaggcgctgctcgagctggagatgaactccgatctcaaggcgcagcgtgcgggagctgaacatcacggcagccaaggaaattgaagttggtggtggccggaaagccattataatttttgtaccagttcctcagttgaaatcgttccagaaaatccaagtacgactggttcgtgaattggagaaaaagttcagtgggaagcacgtagtcttcattgctcagaggaggattctgcccaagccaactcggaaaagccgcacgaaaaacaagcaaaagcgccccagaagtcgcaccctcactgcagtgcacgatgccattcttgaggacttggtcttcccaagtgagattgtgggcaagaggatccgtgtgaaactggatggcagccggctcataaaggttcacttagacaaagcacagcagaacaatgtagagcacaaggtggaaactttttctggtgtgtataagaagctcacgggcaaggatgtcaattttgaattcccagagtttcagttgtaaaagtaaatgactgaataaatgtcattcatagta

SEQ ID NO: 7947 - DNA, 646 bp, Cricetulus griseus
tgtgtgagtgtgtgagtgtatgtactctgagctgtcatgatcagcatccagctggcctgtgcccctctgcaatatggtcactctttggctcccagaaagcccagccttaggtttgtgtgggaatctgtggctacataggctagtgtgggcaggtggcaggcatggaggcaggaactactgaggaaggagtggctcccttggagctccaggggtccagaatgcccaagcgtggggtggtggtaggactgtttcttaaaggaaacctatttatgtggatgagggcctctggtccccattggttgtgtaaatagcaaagtttattctcctgtggttcatgatagcccaccaatgaatgccatgtttccaggatgagagttctcagctgtctatattcagtcacagtgtcaccacagactggagcttcatctctgtcagatctgggggaaaagagcctaccagttcagaggaagaatattttaccaaataccacatttagctctctgtcctcaatattcagaaaaggattttttaaaacaaggcggaatgaggactgtctgccggctggtttgttctgtataaatatatactagaatgtctttctggatgaagcaactcccacaggccagagcctctttgatcttcttct

SEQ ID NO: 7948 - DNA, 646 bp, Cricetulus griseus
ccatggagcagccgcggaaggcggtggtggtgaccgggtttggcccttttggggagcacactgtgaatgccagctggattgctgttcaggaactggaaaagctgggccttggggacagcgtggacctgcatgtgtatgagatccctgtggaataccagactgtacaaaggctcatccctgcactgtgggagaagcacagtcctcagcttgtggtgcatgttggggtgtcaggcatggccaccacagtgacactggagaagtgtggacacaacaagggctacaagggactggataattgccgattctgccctgggtcacagtgctgtgtggaggacggcccagagagcattgactccatcattgacatggacgctgtgtgcaaaagggtgaccacgctggggctggatgtgtccgttaccatctcccaggatgctggcaggtacctgtgtgacttcacctattacacctcactctaccagggccgcggccgatcggctttcgtccatgtgcccccactgggcaagccctacaatgccgaccagctaggccgggcactccgggccatcatcgaggagatgctgggtgttctggagcaggtggagggggacgtcagctgttgccaccagcactgacaaccacgcacacc

SEQ ID NO: 7949 - DNA, 646 bp, Cricetulus griseus
ggacttccagcagctggcagatgtcgcggagaagtggtgttccagcacgcccttcgagctcatcgccgccgaagagagcgagcgcaggatggacttctatgccgacccgggcgtatccttctacgtgttgtgtcccgacaacggttgcggcgacagttttcacgtgtggagtgagagcgaagactgcctgcccttcttgcagctagcacaggattacatctcttcctgcggcaagaagacactccatgaagtcttggaaaaagtcttcaagtccttcagatctctgctggggctcccagatgcagatgacgacgcatttgaagagtacagtgcagatgtggaggaggagcagaggcggaccaccctctttaggaggagacggtaactcgttaaatcatgaaaacaactagaatccaagcaagtgtcccttagttaggctttgaagccactgatgaaatctaataggaaataacccaggataaaaaaaataatataatgaaatcctgtacttttctaatcttttattctgtagagaatgccaagaaaagtctcccgctgagttaatttattaaaaattataattaaatactccagggaacctacttgcagtgaaatttttaaagtagacatggaagtgggaatctta

SEQ ID NO: 7950 - DNA, 646 bp, Cricetulus griseus
  modified_base (604)..(604): a, c, t, g, unknown or other
  modified_base (613)..(613): a, c, t, g, unknown or other
  modified_base (624)..(624): a, c, t, g, unknown or other
tatggaaactctgcggaggcacgggctcctccctggacaggaggcacaggtacctccacagcagcgtgacagagaaacgaggaaagatttccccatcgagtgagatccagcggctacaggaacagaacgcgggtctgcggaatgctgttgcacagatgaggagagagatggagttgctgagtggccatctcccttctgctcacccagaagagtgcccggatgcaaaccctggtgccaaggctgccggaggcccagccctcccagatcattttctggctctcgaagcagaaattcaaaacctaaagcataaacttgaagtcctggaagagcagcgacaaggtgtcagagagccagtgaagacatccttgcccactggcagctgtgacagaccaggcatgcattgcattagcactcagaaaactcggagacagagtacatctcttgaacttgctggtgacacagctcaaaaagaagctgtggcagaagcccctggagccggtcactgtccagcatgagctccccggtgaagtggaccaggtgcacctggaggttgtggagctgcagaagcaggtggctgagctgaggaagcatgtcaaggtggaanaaaaaaaanaaaaaaaaaanaaaaaaaaaaaaaaaaaaaaaa

SEQ ID NO: 7951 - DNA, 646 bp, Cricetulus griseus
cccagccgggcccgctgcgcgcagccttcgccgccatgtcttccggggcgagcgtgagcgccctgcagcgcctggtggagcagctcaagctggaggccggcgtggagaggatcaaggtctctcaggcagctgcagagcttcagcagtattgcatgcagaatgcctgcaaggatgccctgctgcttggcgttccagctggaagcaatcccttccgggagcccagatcctgtgctttactgtgacgacagggaagaagttcgctggggaagcgcacatggtgatggatgactgccgccacgacccaagaaaacattttcaacagccaactgtgagggaagggatgttttacttactgggtgtttgcattttagaagggaaacgtttattttcaaaaactgagcatttgtcattttcctaacatttttatactctaataaaatttgtttttaagaatttacaattactaaatgaagacaaagtataaaattgggggaatagttgataaacctaaaagaattaatgtcacaagtatgttattcaggtgatgtgcctttgatttaattggggatacttttagaaggaaagtttgtgtttataataatctttgaagaacttggaaataaatttttgcccaatacatcatttt

SEQ ID NO: 7952 - DNA, 645 bp, Cricetulus griseus
actgtccgcctgaaagactggctgtatgatgagaacaagctcttcaggattcttgcactgaggggactatacaatcttgtcagacaccaagagatgagagaagacatcaaaagtacgataccctgcatcgtggatagcttacaggagaaggatgagaggatcgttttgttggccatccagacactgctgcagcttgtcaagacattggacttcaccaccttggccgccataatgaagatcctgtgctccttatttggtgatatgagacgaggcgtccatcatttctccatgactctctttggagcctccataaaggctgtgaaacatacagataagaagtgtgtggagagccacgtcctggaaagcttggtcccactacttctgttttctcaggatgacaatgatgacatagctaaggagagtagacgcgtcctaactttatgtgcccagttcctactgactggatagagaatgagctgagagaactgttacaagatcctgagccctctctgcgcatcgtcgcctcccaggctctgttccgaatccagagggtgaggaatgaatcagaatcccagataagagtttcctggttgaggaagctctttggctgtcttgatacttagaatgcaaaacacatgtcagcag

SEQ ID NO: 7953 - DNA, 645 bp, Cricetulus griseus
  modified_base (243)..(243): a, c, t, g, unknown or other
gaggacgaggaagaggagatagaggaggagcagtttgtcctggtagaattgtcaggaattattgattcagactttctctccaaatgtgagaataaatgcaagattttgggaattgacacagagaagcccatcctgcaagtagacagctatgtgtttgctggggaatatgaagatactcttgggacctgtgttatatttgaagaaggtgttgaacgtgtggatccggaagggactgacaaaacngtgctgaaatacaaatgccacacaatgaagaaactcagcatgacaaggactcttctgacagaaaagaaggaaggcgaagaaaacatagatggtgtagaatggctacaaatgaaggataatgatttctcctatagacccaacatgatttgcagctttctgcatgaaaatgaagatgaagctgtagcgccagcccccgagaaagccgtggagttggaagaccaagaggcccaaatgaaaggcagcacagagcagacacacgagcaggagagagtgcagtacctggaagcaggggaccctggtcctcttggagatgtccctgctgagatgggcagttctgtttccatgggaattcagggtggagattatttctcaaaacagccagtcatgaaacttaaaaaaagt

SEQ ID NO: 7954 - DNA, 644 bp, Cricetulus griseus
gcagcagccatcctccagaaggggtgattgttcgagtcagtaccatgagccataattcccaagccttctacaccaacaatgccggacttcccccaagttatgagacaatcaaagaggagtacggggtgaccgagctgggggaaccccacaactcagctgttgtgagaaccaccgtgatcaacatgcccagagacgttgctgtgcctgaccatgtggtctggtccctgttcaacgcgctcttcatgaacttctgttgcctgggtttcattgcctatgcctactctgtgaagtccagggacaggaagatggtgggcgatgtgattggagcccaggcctacgcctccactgccaagtgcctcaacatcagttccctgatcttcagtgtcctcatggtcattatctgcatcattattgtctccaccacctctgtggcagtcattcaagccttttcacaaagagtgccacattctgggttctagtcctgccctgtgctccacagtccatggctgcccgccccaggctgaggccttcaccctttgtttaccctacgcatatgcaaatgttacttttcatatatatctgtccacagtggatccaataaaagtaatgcacggggtgacaaaaaaaaaaaaaaaaaaaaaaaa

SEQ ID NO: 7955 - DNA, 644 bp, Cricetulus griseus
tgagcagtggaagatcctaaatgagattgatgctggcgtgtgtgaggagatgacatattcagagattgagaaacggtaacccccgaggaatttgcacttcgagatcaagagaagtacctgtatcgctatcctggtgggggagtcataccaggacctggtgcagcgactggagcctgtcatcatggagctggagcgtcagggcaacatcctcgtcatctcccaccaagctgtcatgcgctgcctcctggcctacttcctggataaaggcgcagattacatacatacatacacacacacacacacacatacacacacacacacacacgtgtgtgtgtgtgtgtgtgtgtgtgtgtgtgtgtgtgtgtgtgtgaggccctgggcaccatccccagtactgggggtttgggtggaaatgggctgaacttgggaagcccagtaacagaattttattgcagatttcttaggcacagccctgctgaaagtggggatgtcaatcctttgtagcattttgatttatttcatggtattaataatgaaatattgcattgggtccttttaaagtgtatataattgtatttgaaatgtgtttatgtgcaggcctgtgtagaatgggttaataaagtcattgagtaacttgatactta

SEQ ID NO: 7956 - DNA, 644 bp, Cricetulus griseus
  modified_base (396)..(396): a, c, t, g, unknown or other
ggttacggggcagcgttggtggtggctgtcgctgcagtgggagatgcgagtgcccgactggtcagcggatggctagcagaccagggctgggtgccccttccgcgtcttctggttgtgtttgggtctctgactgggttaggggtactggcagtgggactagtgcccactgcggggacagaggagggtttggggggctcccctgctagctgcggctggagcctacggcctgagcgccgggagttatgcgccactggttttcggtgtgctccgggactggtgggcattggaggtgtggtgcaggctacagggctggtgatgatgctgatgagcctcgggggactccgtgggccctccctgtcaggtttcctaagggtaagacaggagacttcagtaccnctttcctggtgtgcagctctttcatcctctctggcagcttcatctacatggggctgcccagagccctcccaacctgccgtccagtctcacctccagctacccctccccctgaaagaggggagctgctcccagttgcacaggtctccctgctctcggcagggcgcgctgactcctcccgggataccgcttgttgataactttctcatttgagccccttccctaataaaggatttttatctagaaaaaaa

SEQ ID NO: 7957 - DNA, 644 bp, Cricetulus griseus
ccgcatggaagcaaagactcttggaattgcaacacccagaaaacccgtcttatctgtcagtgcaagaaaaattaaggacaatgcagctgattggcataacttaatcctgaaatgggaaagcctcagtgatgccggttttaccaccgcgagcaatattgccaacctaaaagtcagcttgttgagtaaagagaaggttgaattagagagcagcagccccgcttccagtgagaaggaagaaaagacgagtcaggactacagtgaggagcttgaagcactgtgtgagcagctgcaggccaccttggatggcttgactaaaatacaaatgaaaatggaaaagctgtcttcaaccaccaaaggaatttgtgaactagaaaattatcattacagggaagaaagtaaccggccccttctgttccacacatggcccacggctttcttttatgaggtcgcccaccggctgtctgacgcatacaagaaggagctgctcctgaagcacaccattggtgcagagctggcccatacggacgaccgcaacctcagcctgacctacctgtccctgtggctgcaccagccttacatagacagtgacagcagactgcagctggagagcatgctgctcgaaacagggcaccgggccctgtgac

SEQ ID NO: 7958 - DNA, 644 bp, Cricetulus griseus
  modified_base (577)..(577): a, c, t, g, unknown or other
ggaaatttatgctaagttcgtgtctcagaaaattagcaagacccgctggcggccagtgccttctgggagcctgcagaccgcagagaccttcgctacgggctcttgggacaatgaggaaaactgcgtttcactgtggtctattggagattttgggaatttggattctgacggagggtttgaaggagaccatcaattactgtgcgatatcagacatcatggtgatgtcatggatttacagttttttgatcaggaaagaatcgtagctgcttcgtcaacaggatgtgtaacagtgtttcttcatcatccaaataaccagactctgtcagtcaatcagcagtggccagcagctcaccaccatacaggtcctggcagtccttcctatagcagtgcaccatgtacagggattgtgtgcgacaacccagaaattgtcactgttggagaggatggtcgaataaatctcttcagagttgatcataaggaggccgtaagaactatagataatgcggacagcagtacactccatgctgtaacctttcttcgaactcctgagattgttacagtaaaactcaattggacngttaaaaatatgggatttcagacaacaaggaagtgagccctgtacagatattatcactaactggtga

SEQ ID NO: 7959 - DNA, 643 bp, Cricetulus griseus
caagcaagtcaagtgaggcacggctgtccaccaggaaaagcagcagtggagtgagccctgtgcccagccctcccttctctgctggctcaccagtatgctcacatagacgatctcatgtattgaagacttcccataggattctggaggacacctccagtagctccaccagtgacttttcatcacagtggacaaatgaaaaggaaaaccaggcagatcctctgagtaaaggtagttcaaaggtcatgaggacaggtcgggacagctccactaaacttaaagtaggagccagtcgaaagtcctctgagaaaagccagtcaccaaggacatctcaagtgagttcttatgagccatcaaatttgtccgagctagaactcaagggcttagacaacagtgcatcagctgacttccaagaagaggacgatgaccttgggtcactgaatatctccaaacagtgcagagatatttgcgaattagtaataaataaacttccaggatataccgtgtgaaagtatgctgctttagaaaacttaggtttacctgatgagtgctgatactgaagagatgtaatattcatgctaaaccttagtacataacttgcatggtagttgttttagggaatgtagatagtttgtcattgatgttt

SEQ ID NO: 7960 - DNA, 643 bp, Cricetulus griseus
  modified_base (619)..(619): a, c, t, g, unknown or other
ggcggaatggggacggcggccttgggagcggagctgagcgtgagggtcctgctctttgtggccttcctggtgaccgagctgctccctcctttccagagacggatccagcccgaggagctgtggctctaccggaacccgtacgtggaggccgaatacttccccaccgtccccatgtttgtcattgcatttctcactccactgtccctgatcttcctagccaagtttctgaagaaagctgacaccaacgacagcaagcaagcctgcctggctgtgagcctcgccctcgctctgaatggtgtcttcaccaacacagtgaaactgatagtgggcaggccacgtccagatttcttctaccggtgcttccctgatgggctggcccactctgacctgacatgcacaggggatgaggatgtggtgaatgagggccggaagagcttccccagtggacactcctcctttgcatttgctggtctggcctttgcttccttctacctggcaggaaagttacactgctttacaccacaaggccggggaaatcttggaggctctgtgccttcctatcgcctctactcctcgcagctgtaattgcattgtcccgcacgtgtgactacaagcaccnctgcaagatgtactagttgggtcc

SEQ ID NO: 7961 - DNA, 643 bp, Cricetulus griseus
tcaaggaatatacagatgaaatattcaggaaggcttagctcccaacgcctccccctccaattaaagacagttacatgatgttcggcaaccagttccaatgtgatgatcttatcattcgccctttggaaagtcagggcattgaacggcttcatcctatgcaatttgatcacaagaaagaactgagaaaactcaatatgtctatactgattaatttcttggaccttttagatatcttaataaggagccctgggagtataaaacgagaagagaagctagaagatcttaagctgcttttcgtacatgtgcatcatcttataaatgagtatcgaccccaccaagcaagagagaccttgagagtaatgatggaggtccagaaacggcaacgtcttgaaacagctgagaggtttcagaaacacctggaacgagtaattgaaatgatccaaaattgccttgcttctttgccagatgatttaccccattcagaagcagggatgagagttaaaactgagccaatggatactgatgataacagcaattgtactggacaaaatgaacaacaaaagagaaaattcaggtcacaggaggacagattatagagaaagatagctgccttatgtgtcctagttgatgaaatgaatgaaag

SEQ ID NO: 7962 - DNA, 643 bp, Cricetulus griseus
cttggcttctgaaggggaccatggccaacagtgagcgcaccttcattgctatcaagcctgatggggtccagcggggtctggtgggcgagatcatcaagcgttttgaacagaagggattccgacttgttggcctgaaatttatgcaggcttcagaggaccttctcaaagagcactacattgacctgaaggaccgtcccttctttactggcctagtgaaatacatgcattcaggaccagtggttgctatggtctgggaggggttgaatgttgtgaagacaggccgggtgatgcttggagagaccaaccctgcagactctaaacctgggaccattcgaggagacttttgcatccaagttggcaggaacatcattcatggcagcgattctgtggagagtgcagagaaggagatcggcttgtggtttcagcctgaggagctggtggattacaagagctgtgcacaaaactggatctatgagtgacaggagggcacctgcttttcccctctacttacccctattcttacaggcaagggaccagcaactctagatattcctggaacttcctttgacctggaaggaacctctgggagctgtgatttcctctgcagtgttaagtgccactggttgattaaagtgtttcatct

SEQ ID NO: 7963 - DNA, 643 bp, Cricetulus griseus
tcatgtctgtcttccttcgagcagtgccaagatttcagaggccagccacatgggggagacctcttcatcggctgtggtgctgcactgggcagggggattccaacaggtgggtgactagcaaggctcccaccttgcaggagaagccaccaggcacagagacggagaaattccatacaatctaccgattcagagccatcaaaagatttgggtttctatctcgactgaagttggcccagacatttctgactgtgacagccctacccccaggcttgtactggtactcacagggcctcctgagtgtcaagtcactctaccttatgagtggagtctcttgcttcaccctggccatgctgtgttggatgagctacttcttccagaggctggtgggcttcatgtatgtgaatgagtcaggtactgtgcttcgagtggcccacctgtccttctttgggtggcgacaagatacgtattgtgctgtgtcagacataatacccctgtcagaatccaaggaacatgcccaggatctgttggtacgaatccagcaatatggtggcaagaagaccttctatgtcaccctgcgctatggccgaatcctggacagagaacgtttctcacaagtgtttggaaacccaaccacacttaagaa

SEQ ID NO: 7964 - DNA, 643 bp, Cricetulus griseus
  modified_base (636)..(636): a, c, t, g, unknown or other
gctgagcggccaagatgtgtgacttcaccgaggaccagaccgcagaattcaaggaagctttccagctgtttgaccgaactggcgatggcaagatcctgtacagccagtgtggggacgtgatgagggccctgggccagaaccctaccaacgccgaggtgctgaaggtcctggggaaccccaaaagtgatgagatgaatgtgaaggtgctggactttgagcacttcctgcccatgctgcagactgtggccaagaacaaggaccaggggacttatgaggattatgttgaaggccttcgtgtgtttgacaaggaagggaatggtaccgtcatgggtgcagaaatccgtcatgtccttgtcacactgggggagaagatgacagaggaggaggtggagatgctggtggcaggacatgaggacagcaacggttgcatcaactatgaagagcttgtccggatggtgctgaatggctgaggacatttccatattgcaagccggtgccttgcccagagtgaaggctccccttatcacagcacctttgcccatctggtctcttctggatgatgtttgccttcactaaataaaatgctctcttttttgccctccaaaaaaaaaaaaaaaaaaaaaaaaaaaaaaaaanaaaaaaa

SEQ ID NO: 7965 - DNA, 643 bp, Cricetulus griseus
ctggctttggtctcttggcaccatgaggttccggttctgtggcgatctggactgtcccgactgggttctggcagagatcagcacactggccaagatttcctcggtgaagctgcggctgctgtgtagccaggtgctaaaggagctcctggggcaggggattgattatgagaagatcctgaagcttactgctgatgccaagtttgagtctggagatgtgaaggctacagtcgcagtgctgagtttcatcctctccagtgcagccaagcatagtgtggacagtgattccttgtccagtgagctacagcagctggggctgcccagagagcacgccaccagcctctgccgctgttacgaagagaagcaaaaccctctacaggagcaccttcgggcctgcagcctgcgtgtgaacaggctggcccatgtgggctggcgtgtggactacaccctgagctccagcctgctccgttctgtggaggagcccatggtgcacctgcagctagagatcgtgcctgccccgggtgccctggcccaacctatttccatgtccctctcagcagacaagttccaggttctcctggcagaactgaagcaggctcagaccctgatgaccgctttgggctgagatgggtgttcctggcctctg

SEQ ID NO: 7966 - DNA, 643 bp, Cricetulus griseus
  modified_base (589)..(589): a, c, t, g, unknown or other
ggagtgtcgtccttgtctatgaaatgcagttatcacagcagttggacctgtttcctgaatgcagagtgacccttctgttatttaaagatgtaaaaaatgcaggagacttgaaaaaaaaagctatgaatggatctatcaattgctcgttgataaaccccaatgtgatcatcgatccatttcagatacttgtggcagcaaacaaagctgttcatctccacaaactgggaaaaatgaagacaaggactctgtctactgaaattatcttcaacctctccccaaataacaatatttcagaggctttgaagaaatttggtatctcggaaagtgccacttcagttctcattgtttacactgaagagggagagaaacaaataaaccaagaacacctagtatctcaagtggaaggccaacaggttcctttggaatgtcttccagaaataacaaagctctcagaagtcaaaaagatatataaactgtcatcacaagaagagagtatcgggacattattggatggtatcatttgtaggatgtcaacaaaggatgttttataagatgcccaaaacatcaacagaaaaaaaacaaaaaaaanaaaaaaaaattaattcttataaaaaaaaaaaaaaaaaaaaaaaaaaaaaaaaaa

SEQ ID NO: 7967 - DNA, 642 bp, Cricetulus griseus
gttcgagccaatagtttctcttcctgagcaagaaattaaaacactggaggaagatgaagaggaactctttaagatgcgagcaaagctattccggtttgcttcagagaatgacctcccagaatggaaggagcgaggcactggtgatgtcaagctcctgaagcataaggagaaagggaccatccgccttctcatgaggagggataagactctgaagatatgcgccaaccactatatcacaccgatgatggagctgaagccgaatgctggcagtgaccgtgcctgggtctggaatacccatgctgactttgctgatgagtgccccaagcctgagctgctcgccatccgcttcctgaatgctgagaatgcacaaaagttcaaaacaaagtttgaagaatgcaggaaagagattgaagagagagaaaagaaaggaccaggcaaaaatgataacgccgaaaaggtggctgagaagctggaagccctttctgtgaaggaggccagagatgaggctgaagagaaatctgaggagaagcaatgaatcactctgtcctttcctttctttttctttttaaaaatttcccctaccctttaaggtttttattcttgttttgttttacaagggtactttataaagaactgaattcc

SEQ ID NO: 7968 - DNA, 641 bp, Cricetulus griseus
gtagaagacctcaatgctaagtggcagcgttacgatgccagtagggatgaatatgtgaaggggttacatgcacagctaaaagaggcggcaggtccctcatgagcctgagctgatgaagaaggagatttccaggcttaatagacagttggaggagaaaataaaatgactgtgccgaagcaaaacaggaactggcaactgtgaagatggcccgggacactgcgctggagcgagtgcagatgctagagcagcagattcttgcttacaaggatgacttcaaatcagaaagggcagatcgggaacgagctcatagtaggattcaagaactggaagaaaaggtcttttctttgtatgtcccaagcatcccagagacaggacttccaggagccaggaccctgttggattcattcggcgaaaaaactgccaagtacttagagatggatgcactggagcatgtggcacctggtagctggaggactgctcttgggtcccaacaggtggaacttcctgcagagggtgggcatgttcacactgcccacagaggtcagggtgatcttcagtgccctcactgcctgcggtgcttcagcgatgaacaaggcgaggcattcctcaggcacctgtccgagtgctgccaatgagtcaga

SEQ ID NO: 7969 - DNA, 641 bp, Cricetulus griseus
gagtagtcgtcgctgccaccgccgccgcctccgttgttgttgtggtcgcttctccgaagtccgcggctcagagagccggctccgtcgcctcccgccgccatgaagtggatgtttaaggaggaccactctctggaacacagatgcgtggaatccgccaagatcagagcgaagtatcccgaccgagttccggtgattgtggaaaaagtctcaggctctcagattgttgacattgacaaaaggaagtacctggttccatctgacatcactgtggctcagttcatgtggatcatcaggaaaaggatccaacttccttctgagaaggctatcttcctgtttgtggacaagacagtcccacagtccagccttactatgggacagctttacgagaaggaaaaagatgaagatggattcttgtatgtggcctacagtggagagaacacttttggcttctgaggaccagtgctgggctaggtgcaccgttcctgcttgtgtatcttgtaaataactggctgttttcagttactttaccagagcctcttcacatagacctactagtacatttgtaactggatttatttcttaatatattggaagggtttatttccttagattagtaaattatatacagagaaaaaaaaaaa

SEQ ID NO: 7970 - DNA, 640 bp, Cricetulus griseus
ggctttagaaccacccagtgggtctctgtccctgctggaattattttccacactctgcagcgacctcatgagttctgcccagggcttcgtatcctccacctggacatactcccttcagacagacaaccggaaagtggtggtgttccagacccaacctgtggtagagagctttgcattccaagggagccgactacagcgagtggaggtgacctggaagggctcccaccccgaggcgctggaggtgcacatggaccccctaggcccttttggacaaagtgaggagagctaagacccgagtgaagaccagcaaggctgtggtggagcccgaggaccaaacaaagagaaatgaacttcctcagctgcatgtcccggcgctcggggctacctcggtgggtcttgttctgctgtctcttcctatccatccttgtcatgctgtggctgagttgctgtaccctggtcaccacaccctggccagcacctcaagttacagcctctgactgcggagcaacataagggtctcctggtggagtcatactggcctttttaccctacccatctcctgcctatgaggacagccccccgcttaccaagttgaagctagatttgacaacgctgtaatcttcggcctattgccaagtgc

SEQ ID NO: 7971 - DNA, 640 bp, Cricetulus griseus
  modified_base (28)..(28): a, c, t, g, unknown or other
aggaggaccccgggtgggggccgagggngcccccggaggcaggggcatgcgcggcccgcggcatgggcctcggcggtgtttgagggcacgtcgctcgtgaacatgttcgtgcgcggctgctgggtgaacgggatccgcaggctcattgtcagccggcgcggcgacgaggaggagttcttcgagatccgcaccgagtggtccgaccgcagcgtgctctacctgcaccgcagcttcgctgacctgggtcgcctgtgcaagcgcctccgggacgccttccccgaggaccggcccgagctggcgcgcgcgccgctgcggcaaggactgcttgccatcaaggaagcacatgacatagagaccaggctcaatgacctcctctctgccagcatctgagctcctctgccaggctgtgatactgttaccaccaccaagggtgctagaagttccttcccccggtgcactcaatggtagaattgccatcatgaatcagaaaggaagggatgggaggaagagacgcttacagcttggaccacaggaaggtctgggtcctgcgagctcatctcctcactgtgtctactaacgaccaacacttgctaatgtaaataatagtaaattattagaaaattctaaattcttttaacac

SEQ ID NO: 7972 - DNA, 640 bp, Cricetulus griseus
tccccgacacctatggttccagggctccggaggcctctcatgcgcgcccaacagcctggcgctggagggcggcttgggcatgatgaatggccacttggctggcaacgtggacggcatggctttgcctagtcactcggtgccacacctgccctccaacggcggccactcgtatatgggcggctgcggtggttctggagccggagaatacccgcaccacgacagctcagtgcccgcttccccgctgctgccggccggcgccggcggggtcatggagccgcatgccgtctactccagctccgcagcagcttggccgccctcggcctccgcagctctcaacagcggggcctcctacatcaagcaacagcctctgtccccttgtaacccagcggccaaccccctgtctggcagcctctccacacattccctggaccagccatacctgcaccaaaacagtcacaacgggccagcagaactgcaaggaatccctaggtatcactcacagtcgcccagcatgtgtgacagaaaggagtttgtcttctctttcaatgccatggcatcttcctctatgcactctactggtggagggtcctactaccaccagcaggtcacctaccaagacatcaagccatgtgtgatgtga

SEQ ID NO: 7973 - DNA, 640 bp, Cricetulus griseus
attcctcttgtcctaggtactcgatgcaggagatgtatgaggtggtgtccaatgtgcaagagtatcgtgagtttgtgccgtggtgtaaaaagtcacttgtcgtatccagccgcaagggtcacctgaaagcccagctggaggttgggttcccacctgtcctagaacgttatacctctgcagtctcaatggtcaaaccacacatggtcaaggctgtttgcactgatggcaagctcttcaaccacttggagactatttggagattcagtcctggtatccctgcctaccctcgaacctgcactgtagacttctcgatttcctttgaatttcgctctctgctgcactcccagctggcgaccatgttttttgacgaggttgtcaaacagaacgttgctgcctttgagcgccgggcagccaccaagtttggtccagagacagccatcccccgagagctgatgttccatgaagtgcaccagacttgagacaaaggactcttcccctgcctccccctcttcccacccacttcttatttatttggtttggctcttgctcagagagaggtctaagttttacctccctattcttcctaaaccgggctgcatgctggctgacgtgtggaaagatagcagatatggaagtgaga

SEQ ID NO: 7974 - DNA, 640 bp, Cricetulus griseus
ctcggttcccgcggctgagcagggatttaaccgccaccatgtcgagcaaaagggccaagaccaagaccaccaagaagcgccctcagcgcgcaacatccaatgtgtttgccatgtttgaccagtcccagatccaggagttcaaagagaccttcaacatgatcgaccagaaccgggatggcttcattgacaaggaggacttacatgacatgctcgcctcgatggggaaaaatccaactgacgagtacctggatgccatgatgaatgaggccccaggccccatcaacttcaccatgttcctcaccatgtttggagagaagttgaatggcacagatcccgaggatgtcatcagaaatgccttcgcttgctttgacgaggaagccactggcaccatccaggaggattacctgagggagctgctcacaaccatgggcgaccggttcacagatgaggaagtggatgagctgtacagggaggcccccattgacaaaaaggggaacttcaactacatcgagttcacacgcatcctgaagcacggagcgaaagagaaggacgactgaagaacttcagattccagccaaatgttccctgttgccacctggggtatttctgagatttttctcctagaacccattgcatgccc

SEQ ID NO: 7975 - DNA, 639 bp, Cricetulus griseus
  modified_base (612)..(612): a, c, t, g, unknown or other
tccatcagctggtggagaacaccgacgagacctactgcatcgacaacgaggccctgtacgacatctgcttccgcactctcaagctcaccacgccgacctatggggacctcaaccacctcgtctcggccaccatgagcggggtcaccacctgcctccgcttcccaggccagctcaatgccgacctccgcaagttggcggtcaacatggtccccttcccacgtctccacttcttcatgcccaagaacatgatggctgccctgtgactccccgccacgagcagatgctgaacgtgcagaacaagaacagcagctactttgtagagtggatccccaacaacgtcaagaccgccgtctgcgacatcccaccacgcggcctcaagatggccgtcaccttcattggcaacagcacggccatccaggagctcttcaagcgcatctccgagcagttcacggccatgttccgccggaaggccttcctgcactggtacaccggcgagggcatggacgagatggagttcactgaagccgagagcaacatgaacgacctcgtctccgagtaccagcagtaccaggatgccaccgcggaagaggatgtctgtagataaaaaaaaanaaaaaaaaaaaaaaaaaaaaaaaaaaa

SEQ ID NO: 7976 - DNA, 639 bp, Cricetulus griseus
aggtgctggggaagcgctccgttctgccgacagaatggcgggccggggtaaactgatcgcggtgattggagacgaggacacggtgacgggtttcctcctgggcggcataggggagcttaacaagaaccgccaccctaatttcctggtagtagagaaggataccaccgtcaatgagatcgaagacactttcaggcagtttctgaacagggatgacattggcatcattctcatcaaccagtacattgcagagatggtccggcatgcccttgacgcccaccagcggtccatcccggctgtcctggagatcccatccaaggagcatccatacgatgcggccaaggactccatcctgcgcagggccaagggcatgttcaccgccgaagacctgcgctagggctccccaaccctcaaccccctctcactaccaggccctctcccagtttcgccatcctctatttaagtttgaagtcttggtttccagcccctccctttcttttcactgagtggctgctaagctgctggggctctgctgttgagatccaggctggttagggaaagaaagcccaaccatctctctccactacctcctccctgtgctgttacacagtgtcattgttgatattaaagaatattctctcc

SEQ ID NO: 7977 - DNA, 639 bp, Cricetulus griseus
gtcggcggtgcgcgccgagcggggggcgccgcgcggtgcagccacgatggaagggggtgcgtacggagcgggcaaagccgggggcgccttcgacccttacaccctggtgcggcagccacacactatcctgcgcgtcgtgtcttgggttttctccattgtggtctttggctccatcgtgaatgagggctacctcaacaactcagacaaggaggaggagttctgcatctacaaccgaaaccccaatgcctgcagctatggcgtgactgtgggggtgctggccttcctcacttgcctgctctacctggcgctggatgtgtacttcccacagatcagcagtgtcaaggatcgtaagaaggctgtgctgtcagacatcggtgtctctggcttctgggccttcttctggttcgtgggtttctgcttcctggccaaccagtggcaagtctccaagccccaggacaaccctctgaatgaagggacggacgcagcccgggccgccattgccttctctttcttctccattttcacatggagcctgactgcagccttggccgtccgcagactcaaggaccttaccttccaggaggaatacaacacactgttccccgcctcagcacagccatagcccctgaagggcaggga

SEQ ID NO: 7978 - DNA, 639 bp, Cricetulus griseus
tgcctggccctgtctctgtgtttcaaagtctggctatgctatgtagttgtccccagtggccttgtcttgctcaatcagaggtggaaaaagatcacctcccagtcgacctccctcacggcccccaagggatgggctgtgtccagagctatgtgcagagcttgtttccagggcctagagaggcccagctggcctgccttgcagccccagccacaaacccaagcccaaccttgagcatggcggggagtgggtatttggggcagtctagccagggcccccgtctgccccaagctttccaggaactaggcagtgaagtcactggtttcctggggttcctatgagctgcaggtctgggggaaagagccccaagggaacagcagaacaaagctgggctcttccatatgtgcctagctttggccaaggtgctatgaggtatgcagcgccaggcttgcactacccctctttctacaggtgtctcatggtccaccccatctctgggtctacagaactgatgggggggggcagtgagatgtagcatttcattcctcccagtttggttgccctggggtctgggcattctgccttaaggagaataatggggaccattatttttaacctgtacataatatttggtcttttttt

SEQ ID NO: 7979 - DNA, 638 bp, Cricetulus griseus
ggcattgtgagctggggtgatgcctgtggagcccctaacaggcctggagtgtatactctgacttctacctatgcctcctggatccaccacaatgtggccgaactccagcctcgtatggttccccaaactcaggagtcccagccagatggccacctctgcaaccatcatcctgtcttcaacctccagcctggggactgttaaggcccatacctttcctgccactgggcctggccctgggcctcttctgcctttggtttgaacattaagctacttgaccctcaaagaggaccatgcttccaagaccaaaagcacacccagggacatgtgactgttctggagcacagtgcaccaacttgatctttgagcccatccttctgcatttgctctttggaattataatctagggccaagaagttacactgtggaatgggccagaaattttagccaactttctctattatctgcagcttattggttaggctcctatggagctcccagaagcctcaactaggaaaatgagccctgacttcaacctgtgtctagtatacaggacagctgcctagctgactgctgcaaaagtctggcttcagggccctacccatcctgcctgatgagcccattactttgtcctcttcctg

SEQ ID NO: 7980 - DNA, 638 bp, Cricetulus griseus
aaaaagccaggcagttctaaattacaattatctgtgcttgactggaatgacatcaagtttcaagacgttagttggagaggcaactttggccaggttctgaaggcacgcatcaagaaggatggcttacggatggacgctgccatcaagaggatgaaagaatatgcctccaaagatgatcacagggacttcgcgggagaactggaggttctttgtaaacttggacaccatccaaacatcatcaatctcttgggagcatgtgaacaccgaggctacttgtacctagctattgagtatgccccgcacggaaacctcctggatttcctgcgcaaaagccgagtgctagagacagacccagcttttgccatcgccaacagcactgcttccacgctgtcctcacagcagcttcttcacttcgctgcagatgtggcccgagggatggactacttgagccaaaaacagttttgttattgtcctagatgtttttgtatatttacctttgtaactgaatgctataaaatgttttgctctgtacacataaaatactgttaataagtctaacaattcccttgagagcacaggaggaaaaagcaagggaaatgtacaaattatattggaatgtagattactacccaagaggc

SEQ ID NO: 7981 - DNA, 638 bp, Cricetulus griseus
ctgcagatctttaagaattagaaatggcttccaaaagagctctggtcatcctggccaaaggtgcagaggagatggagacggtgattcccgtggatgtcatgcgacgagctgggattaaagtcactattgcaggcctggctgggaaagaccccgtgcagtgtagccgtgatgtaatgatttgtcctgacaccagtcttgaagatgcaaaaaagcagggaccatacgacgtggtggttcttccaggaggcaatctgggtgcacagaatttatctgagtcagctgtggtgaaggagatcttgaaggagcaggaaagcaggaagggcctcatagctgccatctgtgcaggtcctaccgctctgttggctcatgaaatcggttttggaagcaaggtcacaacacacccaggggctaaggacaaaatgataaatggtggtcactacagctacacagaaagccgtgtggaaagggatggcctgatcctcaccagccaagggcctgggaccagcttcgagtttgcgctggccattgtggaggcactcagtggcaaggagatggctgacaaagtgaaggcaccgcttctcctcaaggactagagcccaaaccctggatcccaagattgaggcaggccattggaagcc

SEQ ID NO: 7982 - DNA, 638 bp, Cricetulus griseus
catgagcgtggcgggtggctttcgccgccgtgcgcgactgtcacgcctcgtgtccttcagtgcgagccaccggctgcacagcccatctctgagtgatgaagagaacttgaaagtgtttgggaaatgcaacaatccgaatggccatggacacaactataaaagttgtggtgacagtacatggagaggttgatcctgttacaggaatggttatgaatttgactgacctcaaagaatacatggaggaggccatcatgaagccacttgatcacaagaacctggatctggatgtgccctactttgcaggtgttgtaagcacaacagaaaatgtagctgtctatatctgggaaagcctccagaaacttcttcctacaggagttctttacaaagtaaaagtttatgaaactgacaacaacattgtagtatataagggagaatagagattagggttaatattagagaaaggcttaattgcttttaaaaaagctctttgtccctttagaatatccagcagtcaccacatacttgtgtttccacgttgtactctagaatgtctgagtgttaaaataactgtaagatccacatctaaatgtaatttaaaaaatcaaaacttacagcatatcctgatttattttggtgag

SEQ ID NO: 7983 - DNA, 638 bp, Cricetulus griseus
gagaaggtgaagatggcggcggccggggctgcggtcctgggagcccggtggctgcggagggcgacccgcggcgtggtgcctctgggggcacggacagccttccacatgaccaaggacatgctgcccgggccgtatcccaggaccccggaagagcgggccgccgccgccaagaagtacaatctgcgcgtggaggactacgagccgtacccggacgacggcacggggcacggtgactacccgaagctccctgaccgatcccagcaggagagggatccatggtatgagtgggaccactcagacctgaggttgaactggggtgaaacgatgcactgggacctagacatgtatatcaggaaccgtgtggatacatcccctacacctgtttcttggcatgtcatgtgtaaacatctcttcggcttcgtggccttcatggctttcatgttctgggttgggcgcgttttcccttcctaccagcctgtggggccgaagcaatacccttacaacaatctgtacctggaacgaggcggtgatcctaccaaagaacccgagcaggtggttcactatgagatctgaggaggccacgtgggcttttgtgccctcattcctagagggttaaccttaatgaaaccactaataaa

SEQ ID NO: 7984 - DNA, 638 bp, Cricetulus griseus
gccgagtttgggtgcagcctgcggaacgtctcctgccaagcacagatgagcatcctagtgtggccgccaccactgctgctgcttctggcggcccttgtggctccagccaccgccgccaccacctaccgacccgactggaaccgtcttcgaggcctggccaggggacgggtggagacctgtggaggatgacagttgaatcgcctaaaggaggtgaaggcctttgtcacccaggacatcccactgtaccacaacctggtgatgaagcacctccctggggcagatccggaactcgtgcttttaagtcgaaattaccaggaactagagcgcatcccactcagcgaaatgacccgcgacgagatcaatatgttggtacaggagctcggcttctatcgcaagtcggcgccggacgcgcaggtgccccccaagcacctgtgggcgcctgctaagcctcccgaggacgcttcagagcacgccgacctcgtaacccgtaaccacagtggagctgggacccccctgccagcgatctggagacagaatgaagctctcagtatcccgggagcatctcccttgctgagggctgacaccagcctccaaaagcaacggaagtggggtcttcttccttctaaacaaaaaaaaaa

SEQ ID NO: 7985 - DNA, 637 bp, Cricetulus griseus
ggcgactctgtgcctcgcggacgaaaatcaactaaacatgggcaaaggagatcctaagaagccgagaggctaaaatagtcctcatatgcatctttgtagcaaacttgccgagaggaacacaagaagaagcacccggatgcttctgtcaacttctcagagttctcgaagaagtgctcagaaaggtggaagaccatgtctgctaaagaaaggggaaatttgaggacatggcaaaggctgacaaagctcgttatgaaagagaaatgaaaacctacatccccccaaaggggagaccaaaagaagttcaaggaccccaatgcacccaagaggcctccttcggccttcttcttgttctgttctgagtatcgcccaaaaatcaaaggagaacatccaggcttgtccattggtgatgttgcaaagaaactgggagagatgtggaacaacactgctgcagatgacaagcagccctatgaaaagaaggctgccaaactgaaggagaagtatgaaaaggatattgctgcttacagagctaaaggaaaacccgatatgaagaggatgaggaagaggaggaagaagaggaagacgaagatgaagaagaagatgatgatgatgaataagttggttctagcgcagttttttt

SEQ ID NO: 7986 - DNA, 637 bp, Cricetulus griseus
  modified_base (604)..(604): a, c, t, g, unknown or other
ctctgcctcaacatggccaacaaaggtccatcctatggcatgagccgtgaagtacagtccaaaattgagaagaagtatgatgaggagttggaggagcggctagtggagtggattgtaatgcagttaggccctgatgtgggccgcccagatcgtgggcgtctgggcttccaggtgtggctgaagaatggcgtgattctgagcaagctggtgaatagcctgtatcctgaaggatccaagccagtgaaggtgcctgagaatccaccttccatggtcttcaagcagatggaacaggtggctcaattcctgaaggcagctgaggactatggagtcaccaagactgacatgttccagactgttgacctctttgaaggcaaagacatggcagcagtgcagaggactctaatggctttgggcagcttggcggtgaccaagaatgatggacactaccgtggagatcccaactggtttatgaagaaagcccaggagcataagagggagttcacagagagtcaactgcaggaggggaagcacgtcattggccttcagatgggcagcaacagaggggcctcacaggctggcatgacaggctatggacgaccccggnagatcatcagttagaaggggaagccagccctga

SEQ ID NO: 7987 - DNA, 637 bp, Cricetulus griseus
ttcgtcttctggggtacaggcatggcgtaccacggcctcactgtgcctctgatcgtgatgagcgttttctggggcttcgtgggccttctcgtgccctggtttatccccaagggtcctaaccggggagttattatcaccatgttggtgacctgttcaatttgctgctatctcttttggctgattgcaattctggcccagctcaatcctctctttggaccacagttgaaaaatgaaaccatctggtatctgaagtaccactggccttgaggatgaagacatgctccacagtgcccaggccctgagatcagagaaagaatgccttctagatgcaaaaccacctccacacccagaccactttcttcggtagcctactttgggcattatttcgagaaatctgttactgttgtcttggaacccgtggctttgaatatggctcttgccagctcacaacatgagagtcagcgatgtgtttaaaattgctgcaagacaaataagactcggtggagcagtcaggagtccccgcccaagagaagctctacccaagcagatgtacatcaagctctattttcaggatgaatttcttacttctacatctttggaataaaaattaaatttttcttctttctataggaaaaaa

SEQ ID NO: 7988 - DNA, 637 bp, Cricetulus griseus
aggaaaaggaaacttctgagaaaccgaaactgctggagaaagggcggacccacagagctcttcatccttacccctcactgctggttttgcgctgcaccatgaaccacacttctcaagccttcttgactcctaccaacggggggcagcccccaaactatgaaagaatcaaggaagaatatgaggtggctgagctggggggctcccatggctcaacctctgtcagaaccaccgtgatcaacatgcccagagaggtcgctgtgcctgaccatgtggtctggtccctgttcaatacgctcttcttgaatttctgctgcttgggtttcattgcctatgcctactctgtgaagtctagggacaggaagatggtgggcgatgtgactggagcccaggcctacgcctccactgccaagtgcctcaacatcagcgccctggtcctcagcatcctcatggttgtcattaccatcattgctgtcgtctccattatggtttctgctggtcgtctttacatttagtagaggattctggcttttggtcctgacatgtgctgccaccatccacagctgctttgctccttactcctccctatatagaggttaacactcacccatctgtccatcgtggattcaataaagtacac

SEQ ID NO: 7989 - DNA, 636 bp, Cricetulus griseus
atgaagaagttaagacttaaggaactagaaagttcgtcctacaagaagtggatgggttcgaaacgcccaagttacttctagaacagtatcccaccaggccccacattgcagcatgcatgctctatacaatccataatacgtatgatgacattaaaaataaagtggttgcagatttaggatgtggttgtggagtacttagcattggggcttcgatgttaggagcagggttatgtgttggatttgatatagatgaagatgcattggaaatatttaatagaaatgtggaagagtttgagttaacaaatgttgatatgattcagtgtgatgtgtacacattatctaacagaatgtccaagttatttgatacagtaattatgaatcctccctttggaaccaaaaataataaaggtacagatatggcttttctgaagactgctttgggaatggcaagaacagcagtatattctttacacaaatcctcaactagagaacatattcaagaagaaagctgcagaatggaaagtcaaagatagaaattattgcagagcttcgatatgacctgccagcattatacaactttcaataaaaaagaaaatacagtaggacattgaagtggacctaattacgcttttcttt

SEQ ID NO: 7990 - DNA, 636 bp, Cricetulus griseus
  modified_base (175)..(175): a, c, t, g, unknown or other
cagtgcccagtgcagtgtcttcactgacagatgaccttctcaaatactaccagcaagtgacacgggctgtactgggggatgatccacagctgatgaaggtcgccctccaggacctgcagacaaactccaagattgcagcacttctgccttactttgtttatgtggtcagtgggtnaaatctgtaagccatgacctggaacagctgcaccgactactgcaggtggcgcggagcctgatacggaacccacacctgtgcttggggccctatgtccgatccctggtggcagtgtgctctactgtgtcttggagccactggccgcctccatcaaccctttgaatgaccactggactcttcgggatggggctgcccttctactcagccacatcttctggactcatggggaccttgtaagtggcctctatcagcagattctgctctccctgcagaaggtcctgacagaccctgttcggcctctctgttctcactatggggctgtggtagggctgcacgctctaggctggaaggcagtagaacgagtcctgtacccacatctgcccacatactggacaaacctgcaggcggtgctggatgactattccgtatctaatgcccaagtcaaagcagatgggcacaaa

SEQ ID NO: 7991 - DNA, 636 bp, Cricetulus griseus
ctggaagcttttcagactgctccgtggaaggaagtccgtcaatattgtagagcacagaaagaagtttgggccatttcaaaagtttggagagttttgacagacgtgtccttgatccaatataaaactgctgttcaagtgtgtaactccattctttgtccagagagtggaaggaaaaaaaagtcacaggagaagtggctgctggggaagttcatcaaaccaggtgtagagagagagagaattaaggcagctaatagtatcatatctattgttttggtactcgaagcaccttgaccggaaatttaaggtgctcgatttggcagcaggctgagtgttggaaactaacgaacagaatatatccatcatctgtctatctgcaagagattttcttcagtcatttcaaagatgcctcaagcagatctctacattttggaaaaatcaggaccttccattcacaacacatctctgtttcctatactgttacactttcttatcatagaagccatgctgtatgccttactcaacaaaaacttttgccgaggatggccagcatcgggtgctgagcatgaatcgaaatgcaggtgggcaagcacttcaacctgatgatcggcgacacaaggactaggtgggagagagcta

SEQ ID NO: 7992 - DNA, 636 bp, Cricetulus griseus
cggcccttcaagtacgtgtatggccttcgctttgaggtcagaggccagaagaaactggaggtggatggtccctgtgtcatcatttctaatcaccagagtatcctagacatgatgggtctcatggagatactccctaagcgctgtgtgcagatcgccaagcgtgagctgttgttcacggggcctgtgggcctcatcatgtacctcgggggtgtctacttcatcaaccgccagcgcgccagaactgccatgaccctgatggccgacctgggtgacctcatggtcaaggaaaatatcaaagtgtggatctacccagagggtacacgcaacgacaatggggacctgttgccctttaaaaaaggagcgttctacttggccatccaggcccaggtacccatcatccccgtggtgtactcgtctttttcttccttctacaatgtcaagaggaagctctttacctcaggaacaatcagggtacaagtgctggatgctgtccctaccagaggccttacagaagctgatgtcactaagcttgtggacacttgctaccagtccatgaggaacacctttctacaaatttccaagatgccccaggagaactctacaattaaagagcctggggttgtgccagtccagtag

SEQ ID NO: 7993 - DNA, 635 bp, Cricetulus griseus
tcaaaggcatctcacgtctcactctgaatacatgccatatgaacatgaggaataatggaaacacaccatatgattccagttctctcacaagtattcaaggatacatggctgctcacactgttaatggaccttgtgaatgtgaggtatgtttaaaatcctttggtttttcaagtacacttggaatatatcaccaaactcacagtggtgaaaacttctatgactacaaggaatgtggaaaggcttctgtttatcatagttcactttacacacatggaggaactcacactgtaagaaaatgttacgaatgtaaccagtgtggtaaagttctgagttcttccagttcccttcaaaggcatgagagaattcacacaggagaaagaccctataaatgtaaccagtgtgggaaagctctgagttcttccacttcacttcaaagacatgagagaatccacacaggagaaagaccctataaatgtaaccagtgtgggaaagcctttaggcatgaaagaactcacacaggtgaaaagccctatgaatgtgagttcgaggccagcctggttttctccagagcgagtgccaggacaggctccaaagctacacagagaaaccctgtctcgaaaacaacaaaagaacaa

SEQ ID NO: 7994 - DNA, 635 bp, Cricetulus griseus
atccagtcttcttctgtatgcacttcctactgcaccaactctggcggacctagaggatgatgacgaagccaatgaagaccaaccagagaagcctcactttgattgtcgaagtgtgatatttgagctggattcgtgcaatggtaatgggaaggtttgcctcgtctacaaacatgggaaacctggattagctcatgacactgagatctggttcctggacagagcattatattggcattttctcacagatacctttactgcctattaccgcctgctcatcacccacctgggcctgccccagtggcaatattgtccttcaccagctatggcattagcccacaggccaagcaatggttcagtatgtacaaacccatcacctacaacacaggtctgctcacagaagaggctgactcctttgtgaacaagctggaccccagcaaagtgttcaagagcaagaacaagatcttaatcccaaaaaagaaagtgcctgtgcagcctgccagtggcccaaaaggacctgggcctgtagctcctcctacccctaaaccttcctctagctctggaaacccaacccgaaaataagcatcccatcagcctcagataacttttttttttttttttttttgttttttttgttt

SEQ ID NO: 7995 - DNA, 635 bp, Cricetulus griseus
ggaagagcaggaggaaataggagcaggcccagcaggctactcctaccagcccctcaatcaagaccctgaacaggaagaggtggagctggcaccggtgggtgacggagaggatggagctgctgacatccaagaccggatccaggccctggggcttcatttgccagaccccccattagagagtgaggatgaagatgaggagggagctgcagcattgagcagccacagctctatccccatggacccagaacacgtggagctggtgaaaaggacgatggctggagtaagcctgcctgcaccaggggtccctgcctgggctcgggagatatcggatgctcagtgggaagatgtagtacagaaagccctccaagcccggcaggcatcccctgcctggaagtaaccacacggagagctgccccgtctcctccctacattgcaagccgggaccagcacaggactaacacaactctggttttaacacccaccttcccatgtccctttccacatcaaggcaaatcagactctcagagacccactttattcagttctgtacatatggggacattggcccgagcccaaacccaccttagcatgtatcattctgtggagaataaagcaccctatgtacacagccagaa

SEQ ID NO: 7996 - DNA, 634 bp, Cricetulus griseus
gaccttgttgctcagactgagcctgactggatggtgtacttcaggcagtttagccaactcagtccagcagagcaaaatgtggctgctcttcttggagtctccgaaagcttcattggggaagaaggcatcagggcaagccatcagaaagaaggtggacaagaacattgtcaacaggctttatctgtcctttgtcctttattccttgctgaaagagaccaacatttggagtgtgtctgagaagtttaatatgccccggggacacatacaaaacctgctcactggagctgcctccttctcgtcctgtgtgttacatttctgtgaggcaggttacaaaagtgtcatgcacttagccaacgccaatccagaggtgctcgtgcggacaattggccatctgtccaggcgccaggccaagcagattgtgtcctcagcaaagatgctgttgcatgaaaaggcagaggctttgcaagaagaagttgaagaattgctgagattgcctccagacctccctggactggggggtcctaacactgaagaggcatgaagctgtgctcaggacacatctctgtggtagggcattgcctaatatgcctgaggccctggattaaaccctcagtacctccaagaaagaagaaaa

SEQ ID NO: 7997 - DNA, 634 bp, Cricetulus griseus
ggcgtcagggcagttcgtgatggccgcggccggttccgctgccgtgtcaggggcagggaccccagtggcggggcccacaggccgcgacctctttgccgaggggctcctggagttcctacgacccgctgtacagcagctcgactctcacgtgcacgcggtcagagaaagccaggtagagctccgggaacaaattgacaacctagctacagaactttgccggatcaatgaggatcagaaggtggccctggatctggacccctatgttaagaagctgcttaatgccaggcgacgagttgtcttggtcaacaatattttacagaatgcccaggaacggctaaggcggttaaaccacagtgttgccaaggaaacagctcgaaggagagcaatgctggattcaggagtttaccctcctggttctccaagcaaacaataagctgggcccatgacctgagtgtacaagtactgttctccagctgccttgctttggtagacatgcgaagattccaggaaacagtttctgtagacctttggtttgtttgaactgtgtacttacttactcacatagcagcctcaagaaacattcatactgcaggactattgcctatagaatctccattacagcttgtgcttccaa

SEQ ID NO: 7998 - DNA, 634 bp, Cricetulus griseus
  modified_base (191)..(191): a, c, t, g, unknown or other
taaagatggcgaagccctgagtaagttgcaagcaactccacttccgctatttttcttgtgccctggtccaagatggcggacgaggccacccggcgggtcgtgtccgagatcccggtgctgaagactaacgccggaccccgggatcgggaattgtgggtgcagcgactaaaggaggaatatcagtcccttanccggtatgtggagaacaacaagaattcagacaatgattggttccgactggtagttccaataaggagggaacccggtggtttggaaaatgctggtacatccatgacctcctcaaatatgagtttgacatcgagtttgaaattcctatcacatatcctactactgctccagaaattgcagtccctgagctggacggaaagacagcaaagatgtacaggggtggcaaaatatgtctgactgatcatttcaaacctttgtgggccaggaatgtgcccaagtttggactagctcatcttatggccctagggctgggtccttggctggcagtggaaatccctgatctgattcagaagggtgtgatccagcacaaagaaaaatgcaaccaatgaaggatcaagccaccgaggcaggacagagggccttttgataggctgtattcctgttt

SEQ ID NO: 7999 - DNA, 634 bp, Cricetulus griseus
tcccccggcagccgggccgcgtggccatcgtcacgggcggcaccgcgggcatcggcctggagacggcgcggcagctggcggccctggacttccgggtggtcatcgccggaaatgacgaggcgacagcgcaggaagtggtgacgcggatccaggcagagacacagaacgagaaggtgcacttcctgttctgtgacctcgcctccctggcctccgtcaggaagttcgccagcgacttcctgtccctggggttcccgctgcacgtgctcgtgaacaacgcgggcgtgatgctggccccgccccacccgacccccgacggcttcgagccgcacctgggcgtgaacttcctgtcccacttcctgctgacgaggctgctgctgggggccctgtgcgcggcggggtcacggggtcggaggtcgcgtgtcgtcaccgtggcgtcggccacgcactacgtggggcgactggacgtggacgcgctgcgcgccagccccgcccactccgcgcacgcggcctacgcggcgagcaagctggcgctcgtgctgttcgccaggcggctgcagcggctgctggcggcgtcgggcgaccccgtgacctccaacatggccgacccgggcgtggtcgccaccgccctgtaccg

SEQ ID NO: 8000 - DNA, 634 bp, Cricetulus griseus
ggctgtccacgtggggtcggacgggcggcctcctccgcgggtatgaacagttcgcctacgacggcgacgattacatcgccctgaacgaggacctgaggacgtggactgcggcggacacggcggcgcagatcacccggcgcaagttggagcaggctggtgctgcagacagacagagggcctacctggagggcacgtgcgtggagtggctcggcagatacctggagcacgggaaggaccagctgctgcgcacagatcccccaaaggcacatgtgacccatcatcctggacctaaaggtgatgtcaccctgaggtgctgggccctgggcttctaccctgctgtcatcaccctgacctggcagagggaggaggaagaacagactcaggacatggagctggtggagaccagaccttctggggatggaaccttccagaagtgggcagctgtggtggtgccttctggggaggagcagaaatacacatgccatgtgtaccatgaggggctgcctgagcccctcaccctgagatgggagcctcctcctcagtccactgtccccatcatggcagtcattgctgctctggttctccttggagctgtgatcatcattggagctgtggtggtttttgtgaggaagag

SEQ ID NO: 8001 - DNA, 634 bp, Cricetulus griseus
tatgaagatcaaaaattgactttgttggaagctggatgtggggttgggaactgtttgttcccacttttagtaagaagatttgaatatctttgcctatgcctgtgatttttcttccaagggcagttgactatgttaagcaaaatcctttgtataatacagagagatgcaaagtattccagtgtgacctcactaaagatgacctccttgaccatatcccaccagagtctgtggatgcggtcacattgatctttgtgctctcagctattcaccctgagaagatgcaccttgtcttattaaatgtgtacaaggtattaaaaccaggcagaagtgtcttgttccgtgactatgggctgcatgatcatgccatgcttagatttaaagctggaagcaaaactttgggaaaaaaatttttatgtcagacaagatggaaccagatcctatttttttactgatgaattcctggcgaagctctttgtggatgcaggttatgaagaagtggcaaacgaatatgtgtttcgagaaacagtgaacaaaaaagaaggcctgtgtgtgccacgagttttccttcagagcaagttccggaagcctccaaaggacagaccctaccattgactctacttcactttgaagaaaa

SEQ ID NO: 8002 - DNA, 633 bp, Cricetulus griseus
atccgagtgtttttcaaagataatgaagactggtggaggtccgaggatacaaagcagatatacaggcgaagaaaactgaaccaacagcccgaaaagtcaccctgatagagtaaaaagttggaaaatagtgaagaaacaaccagatgaatagaaatgaaaagctaagccaaaatgggttttgcttcagattttggaagaaaagaagtatctactatcttcaccttatgaaaaatctgaagtgaggtttggctagaaaaaaaaaattcaatgtggcctctgggcttaattgttataaaccattgtgagtgttactggtcaaagtattgtatctgtgctattagtaaactgcatcaaaacttatattgctgctgttaggaaaaccaataacaaaacttgaggctgctactcagcaaaacgtgaataaaagtgtgtacattgttagtcttcgactacatgataagtctgtcagtaaaacagttgaccccaacaaggtcaaagcctgtgttaaagttagaaaaacttatttacccaagtagacaattgatgccattgaaataagaagtgagaaaaactgtgttgagcactgaggtgtaaactggtccagatgtgccagtgtgaaacagcttctagtac

SEQ ID NO: 8003 - DNA, 633 bp, Cricetulus griseus
tttcggctcggaggaggccacggtgcaactctcttcggtcgtcccggatccgggttcatccgacaccagccgcctccaccatgccgcccaagttcgaccccaacgagatcaaagtcgtgtacttgaggtgcaccggaggtgaggtcggcgccacgtccgccttggcccccaagatcggtcccctgggtctgtctccaaagaaagttggtgatgacattgccaaggcaaccggtgactggaaaggtctgaggattacagtgaaactgaccatccagaacagacaggcccagattgaggtggtgccctctgcctccgccctgatcattaaagccctcaaggagccgccaagagacaggaagaagcagaagaacattaagcacagtggaaatatcactttcgatgagattgtcggcattgcccgtcagatgaggcaccggtctttagccagagaactttctggaactattaaagagatcttgggcactgcacagtctgtgggctgtaatgtggatggccgccaccctcatgacatcattgatgacatcaacagtggtgtagtggaatgcccagctagttaagaagcaccaagagaaaatatctcaataaaaaacatgtgacaaccagaaaaaaaaa

SEQ ID NO: 8004 - DNA, 633 bp, Cricetulus griseus
ttgcagacatggcggggtctcttggtgggatgttctccgggcagcctgctggtccccagccgcctccgcccgggctcccaggccaggcctcgcttctgcaagcagcgccgggggctccgagaccttctaacagcactttggtggacgagttggagtcgtctttcgaggcttgctttgcctccctggtgagtcaggattatgtcaatggaactgatcaggaagaaattcgaactgggtgttgatcagtgtatccagaagtttttggacattgcaagacagacagaatgttttttcttacaaaaaaggttgcagttgtctgtccagaaaccagatcaagttatcaaagaggatgtatcagaactaaggagtagaactgcagcggaaagatgcgctggtccagaagcacttgacaaagctgaggcactggcagcaggtgctggaggacatcaatgtgcagcacaagaagccagctgaaatccctcagggctccttggcttacttggagcaggcatctgcaaatattcctgcacctctgaagccgacctaagagcactctggcctgggatgcagcctatagtcctgccagacatctttccttaaagacatggcctatggaagaactccattgataat

SEQ ID NO: 8005 - DNA, 633 bp, Cricetulus griseus
acaggctaagaaaattgtggttctgggcccagaggtactggaagtgttccaaggctctcccttcacattgaatgtgcagctgcagcaagatgatggcgaggttgccacaagtgagagtggccggatcctgaagatctcagcaggtgtcagatacgtgcagctcccagaatactctgaggtcagcttttcaagatggatgaagatcacatggaggagcccatcgagacaccatttggattccagtgtattccctatcctctgtccaggcctgatgggactgcagaagagccatcaacctctgcatacctaggggagtatgtggtcatgatctctgatgagaccactccaccattcctgggccacaggctgcccactgccttcaaacaccttcgagtcttggcaaagagggacagccaggggccccacgtccctgaagatcacccggaagctctaaactagaggccactcctggcccatggacataaaggagccaagagcaccctcaagagagggccaccctcccctgaatagaggctcatgctgcctcccccagggagcacaccctctgttcctgaacagcctgggagttgggagctggccctcgtgagctccacagctacccacttcaataaa

SEQ ID NO: 8006 - DNA, 632 bp, Cricetulus griseus
gagcgcagcagaggctcaaacgcaacctccttggtaccagctcccccaaggcccagacgagaagatcaagaaccggttggacccccttgagggacatgcagaagcacctgggaaagaaaaggcacagcagtgaaagccgtccttccagagaggagcggcctcagaaacagcggcccaaagagccaccttccctagaacagctccgggctgagcgtcgtcagcgggaagcagctgagagggctcgagcagaggccctgctggcccgggtacaaggccgagcaacccagcaaggtcaggcagaagttgaagagacagatgaacggaggcggcggtacaactcccagttcaacccccagctggcccggcgcccccgccagcagaaccccactgctgcccattgaactcttggggggagtaggagaggccgcagctgccagccgtcatataaaactatttattcataaatattttccaaaatgaaaataggtttaccaaaaaaagtccctcactggggagggggagggagggggcagctctagcccccaggcccccagggtagggcagagaggaagagaaaacctccctgccctttccctgcttcctggggggggagggtgccccatggccttggg

SEQ ID NO: 8007 - DNA, 632 bp, Cricetulus griseus
  modified_base (18)..(18): a, c, t, g, unknown or other
ttggtctttgtctttggngggtgttcttggagtatcttatgactgggacctgctagggtcattggcattttgcttagctctaaattataaacagatggagctctaccattctctgccattttttagtgatggcgttttgtagtttgtgtcacttcctttccactgtgtgagagcacttctgaggaacaactgcagctgacgccctttgctgtttctgtcaggaggcgtctttcccaggcttttacgttttccttcccagaatttatacagtatttgtttctttcttcagtcatcacgatggttcttctgacgattttgagtgtcacactgaaccctccccagaaactaccagacttgttttctgtactggtgtgttctgtgtcctgtataaacttcattttcttcttggtgtactttaacattgtaatcgtgtgggattccaaaaatgggagaaatcggaagaaaatcaaatagctgttttcccaaacaaatgcagtcttttgatttgtataagcaagcatacatctttagaatcatggtgtcataggaaaagaaatggtcaatgcctattgttatctatacaaattgtgtatggaccaaagcatttgttattttatatattttgtttgttt

SEQ ID NO: 8008 - DNA, 631 bp, Cricetulus griseus
tactttgctgtattttaattaaccttcaacagctattaaaatggaatgtaagttaaattttgaggaaaaggaagcgaatgccctccatgtttcttattggtttattttgtaggagaacagctgtttgtgtttcttggttttgtgtgtgtttgtttatttgtttctttttttttattttttaacataattcccagtcatagactagaagccataaatgcagtgggtgcagtttgttgttagcctcttcaagcttcatcttcaccctttcaagtgtattcagttaaagttagaaggcagccttggaaggcggctgtgaaagctgtagtgtgcattaaagataacatcgatgtccagctctgtggaaaagccattttgtcgaaactgctgtagagattgtgacgctgcatgagtggggagtgtcgaatctgtgcttatagtggttctctcaggtttgtgtatcctaatgttcaatgcactgtgttttataaatagttactaccgttgagtaaaatccatttctatgcactgttccgtgtcattggccttttgtggatgtgcatgttttaaactgcaaaattttaaacatttgtcctctaattgttattcaaataaaataaacttcaccattaca

SEQ ID NO: 8009 - DNA, 631 bp, Cricetulus griseus
gatggcaagagtctgggtctgcgtgggaggtgccgtcttccttctttcctgtctggttttgcattcgtgctacagcggctctctggtttcaaggacatttgctttttacataccatggagaaaggaggatactcttttccggctggatttgggttggcccaagtattcagaatacttcactggttcgacattttctgttgcggttgactccctcaacgggttagtttacgtagctcaaagaggggataacatccccaaggtattagtgttcacagaggatggatatttcctacgagcctggaattacacagttgacacaccccatgctgttaggttcaccccggatgggaagtacttgatcgtggctcagttgaacctcagcaggctgtccattttggtggccccaccatctggaagcatcggagactgttctgtggtcagcaccatccagctggcagatcaggttctgccacatcttctagaagttgacaaaaagaccggagcagtctatgtagcagaaattggggcaaaacaagtgcaaaaatacgttccatggcacagccccctgcctttggggcttagtgcatccttcctgaaggggcttcaagtagcagttcaacgcctcagagtc

SEQ ID NO: 8010 - DNA, 631 bp, Cricetulus griseus
caagacacacccagatgtgaagttgtggatcagcaagctttacaggcctcacagccattccaagcttaaagaagatgagtgagagtttggaaacattagagaattcacgtaactgtcagacattcacgtgtccagtttgctttagggatcaggaaggtgtcagtctggaagcctttaacgaacatgtagatgcatgtcttgatggaccatccaccagtgagaaatcgaaaatgcctccttcctcatatgcttcctcagcagttgctggccagaaggaagatgtgcaccattctatcccactatgtgagcaacgggattgtgaagatggagaggtcacgtcagcagatggtgtagatctggtggtggtggtgcacgcctttaatcccagcacttgggaggcagaggcagaggcaggtggacctctgtgagtttgagaccaccctgatgtacagagtgagttccaccatgacagttccaaagctgtggtgttttggttattgattgtgatttacttatgtaaattatttataaaattcagtgaaactgatttaatgtattaaaaagtgatattattgtatttattatctgaaatttatttttattgttttccacattaaataataaattattt

SEQ ID NO: 8011 - DNA, 630 bp, Cricetulus griseus
ggatcccttcgctgcctacccactgaaatgttccggctccaaagcaaaagtatttgccgtgttgctgtctatggttctgtgcaccgtgatgcttttcctcctacaattaaagttcctgaaaccgagaatcaacagcttctattcctttgaagtgaaagatgccaaaggaaagatcgtgtctctggaaaagttcaaaggcaaagcttccctagttgtaaacgtggctagtgactgccggtacaccgacaaaagttacttgaccctcaaggagctgcacaaggagtttgggccctatcacttcaacgtcctggctttcccatgcaatcagtttggagaatcggagcccaggtccagcacggaggtagaatcttttgcaagaagaaactacggagtcacatttcccatcttccacaagattaagattttagggcccgaagcagaacctgcatttagatttcttgttgattcttccaagaaggaaccaatgtggaacttttggaagtatctggtcaaccctgagggacaagttgtgaagttctggaggccagaagagccccttgaagccatcagacctcacgtatcacaaatggttgggcaaatgattcttaaaaagaaagaggacctatgaaa

SEQ ID NO: 8012 - DNA, 630 bp, Cricetulus griseus
gaggcattttttacacttgcacgggatataatgacaaaactacaacagaaaaatagaatgacagcaattcatcaggagcaggtgggccagtgaaaataacagaaaaccggtaccaagaagaccagtttcttccgctgttcattgctatgatgaactcttctgagagactgcagaatacctagagggcccttccctgcttctctgaaagcacaggttacccagcctcagagtcacctcacctggctgctgcggagagcaccatggaactctagacctctcaacacagaatgccaagtggattccagcctcatggcctagcaaaagagcaggctcctttcttcaacatggaagcaaatgatgtggagacacacgcaggacccaactgggtttttccttgttttactgcctgtcctggaagctgctatcttttcttgcacatgagtgtcagcccttttctctggtacagcataatcttaggtgtgtgtgtgtgtgtgtgtgtgtgtgtgtgtgtgtgtgtcgagagagagagagagagagagagagagagagagagagagagagagagagagagagagagagagctagaataaaaactaacaagtttaattatgaaaaaaaaaaaaaaaaaaa

SEQ ID NO: 8013 - DNA, 630 bp, Cricetulus griseus
atggagctggagcagagggaggggaccatggcagccgtgggctttgaagagttctcagcgccaccaggctcagagcttgctctgcctcccctgtttggaggccacatcctggagagtgagctggagacagaagtggagtttgtgtccggtggtctgggtggttcaggactccgggagcgggatgaagaggaagaggcagcccggggtcgcaggcgtcgccaacgggaactgaatagaagaaagtaccaagctctaggtcggcgctgccgggagatcgagcaggtgaacgagcgcgtcttgaacaggctccaccaggtgcagaggataactcggagactccagcaggagcgcaggttcctcatgagggtgctggactcctacggggacgactacagggccagccagttcaccatcgtgttggaggatgacggcagccaaggcacagatgtccccaccccaggcaatgctgagaatgagcctccagagaaagaggggctttctcctccccaaaggacacccgtacccctagaccccagcagcccggcccctggcgaggggcccagtgggcggaagagacggcgggtaccacgggtgggagcctcgttaaccccagaactggccccagtgcag

SEQ ID NO: 8014 - DNA, 630 bp, Cricetulus griseus
gtctttccggacctggccgagcaggaggcgccatcatgggtgttgacattcgacacaacaaggaccgaaaggttcggcgcaaggagcctaagagccaggacatctacctgcggctgctagtcaagctgtacaggtttctggccagaagaaccaactccaccttcaatcaggttgtgctgaaaaggttgtttatgagtcgcactaaccggccacctctgtccctgtcccggatgatccgaaaaatgaagcttcctggccgagagaacaagacagctgtggttgtggggactgtcacagatgatgtgcggattctcgaagtgcccaagctgaaggtgtgtgcacttcgggtgagcagccgggcccgaagtcgaatcctgaaggctggaggcaagatcctcacgtttgaccagttagctctggagtctcccaagggccgtggcactgtgctcttgtctggtcctcggaagggccgagaggtataccggcattttggcaaggccccaggaacaccacacagccataccaaaccctatgtccgctccaagggccggaagttcgaacgtgccagaggcagaagggccagccgcggctataaaaactaaccctggatcttactgttaataaaaaaaa

SEQ ID NO: 8015 - DNA, 629 bp, Cricetulus griseus
tgatgtatcgtctgacttcattcatgctgccacgggccttggttcaggccatacgcacaggacatctcatagcagtgcagtggcagcaacttataagtatgtgaatgaacaggagcttgagatggacatgaagtccgtgactgaccgcgcagctcggactctgttgtggacagaacttatccgaggactgggcatgaccctgagctacctctttcgggagcctgccaccatcaactacccatttgagaagggaccactgagtccacgcttccgtggggaacacgcattgcgccgctacccatctggggaagaacgctgcatcgcctgcaaactctgtgaggctgtctgtcctgcacaggccatcaccattgaggctgagccaagagctgatggcagccgccggactacacgctatgacattgacatgaccaagtgtatctactgtggtttctgccaggaggcctgccctgttgacgcaatcgtggagggccccaactttgagttctccactgagacacatgaggagttgctgtacaacaaggagaagctgctcaacaatggggacaaatgggaggctgagatttccgccaacatccaggctgactacctgtaccggtgacctggccact

SEQ ID NO: 8016 - DNA, 629 bp, Cricetulus griseus
tgtacccatggccacctgcaaggaggtgaatgtgtccggcttcgaggagttcgaccaggctgtgaaggagcacaagggcaagacaatttttgcctacttcagcggctctaaggatgcagaagggaagagctggtgcccggactgcgtggaagctgagccagtggttcgagaggggctgaagagtgttactgaagactgcgtgttcatctactgccaagtaggagacaaatcttactggaaagacccaaataatgacttcagacaacaactgcaagtaactgcagtgcctacactacttaaatatggaacccctacaaaaaacttgtggaatctgagtgctctcaggccaacctcgtggaaatgatattctctgaagattaagatttaatgatagcactttgtgatggtagaccatgcttttaatcccagcactcgggaggcagaggcaggtggatctaggcgagttcaagaccagcatggtctacaaatgcgagtcccaggacagccacaaacacacaaagaaaccctgtctccaaaaaccaaaccaaacaagatttgatgatcacaattgtgtgttgatttcctggtttgcttaaaagaagccacatacttgctttgaattgatcagt

SEQ ID NO: 8017 - DNA, 628 bp, Cricetulus griseus
caaggagaatcggcaccggaagcgtagccacagccgctctcgaagccgggatcgtaaacgcaggagccgaagccgagatcggcggaaccgtgaccagcgcagtgcctctcgggacaggcgaaggcgaagcaaacctttgaccagaggcgctaactgaggtcttgtgtctcatgaacatggtgctgcctgaggaactgctggacgacgaggagtatgaggagattgtggaagacgttcgagacgagtgcagcaagtatgggctggtcaagtccatcgagatcccccggcccgtggacggcgttgaggtgcccggctgtgggaagatctttgtggagttcacctcggtgtttgactgccagaaagccatgcagggcctgaccggccgcaagttcgccaacagagtggtggtcacgaagtactgtgaccctgattcttatcaccgccgggacttctggtagaggtgggcgtgggggagggtgggggcagggctgggctggggactttctccccacctgtcccccccctccctttctcccctctctgaagatgatgggcagaggagtgacagccgaatgacagccggcagcaactggaatggcagcaatctctgtggcattttcatatttgc

SEQ ID NO: 8018 - DNA, 627 bp, Cricetulus griseus
ttaacttttttttctttttcttccaaggccttcttgccacgcatgctggagctgcagaacggccatatcgtgtgcctcaattctgtgcttgcactgtcggccatccctggagccatcgactactgcacatcgaaagcatccgccttcgccttcatggagagcctgaccttggggctgctggactgtcctggtgtcagtgccaccaccgtgctgccctttcacaccagcactgagatgttccagggcatgcgagtcaggtttcccaacctcttcccaccgctgaagccagagacagtagcccggaggacggtggaagctgtacaacaaaaccaggccctcctcctgctcccatggaccatgaatatcctcgtcatcttgaaaagcatactcccacaggctgcactggaggagatccacaggttctcagggacatatacctgcatgaacacctttaagggaaggacatagaggaagaggcacctgaggagccatggagcctgagaggagccacgatacctgggcacacacccgtgtgcctgtgcattggcccatctgctgggtgagcaggactgttcctgtccccggggaagattctgcggctccctaggtcaactccaggacctttgt

SEQ ID NO: 8019 - DNA, 627 bp, Cricetulus griseus
acactggccatccccaagaagctacaacaagctgtggggagagtcattgtcaatgccacaacatgtactgtaacatgtggccttggcgtacaaggaagagaccgtctgtgaggtgggtcctgatggagtgaggaggaagtgcaggtcccagcgtttggagtgtctgaccaactggatctgtgggatgctccatttcaccattgtccatggggaagagtttgagctgagctgtctcagctcagacatcctagaggtggggcaagaagctttccgctttacctggaagcttgcgtcggggcatcatctctactaatgatgaagtttttaaacccttccgagccaactctcactttctgcgatttaaacccgcctatgagtatgactctgggacataccgatgtgatgtgcagctgctgaaaaacctgaaatttgtcaagaggctctattttggattgagggtccttcctccaaatttggtaaacctgaatttccatcagtccctcactgaggaccagaagttagtagatgagggctgggaaattaatctagacaaccattccaagccttacctcccttaactttttttttgttttgttcaataaaacaaattcaaagggaaaaaaaaaa

SEQ ID NO: 8020 - DNA, 627 bp, Cricetulus griseus
cagaagctaaaagcagcggggaatcttgagagagagagtatttggttgtgacctgggggagcaccttctgaattctgggtttgaagtgccccaggttcttcaaagctgcacagcattcatcgagaggtatggcattgtggatggcatatatcggctctctggagttgcctccaatatccagagacttcgtcatgaatttgattctgagcatgtccccgacctgacgaaagaaccttatgttcaagacatccattctgtgggctccctctgtaagctgtacttccgggaactcccaaaccctctgctcacctaccagctgtatgagaaattctctgatgccgtttcagcagcaacagatgaagaacggttgataaaaatccatgatgtcatccagcagcctacccccaccacactacagaacactggagttcctgatgaggcacttgtctcttctagcggactaccacagcattgggtcagggggccttcctgcccacagagttgtccttgccacatcctgacacacagatccacgcagaatgagccctgggagcaatagagttgaagcagcctctgctggacagtggactgttctattttttcaataaccaaaaagatttaaggaaa

SEQ ID NO: 8021 - DNA, 626 bp, Cricetulus griseus
  modified_base (207)..(207): a, c, t, g, unknown or other
ctgtgatgtgtgatatctttttattctctgaggcaaatggctgctaagagatttcctaataaccctcatgttcagtactctgcagtgaccagctttgtgtttcttcgtttctttgctgtagcgatactatcacctcatacttttcatttgcgacctcattatccagatacacagacaaataggacattaactctcatctcaaaaccntacagactttgggaaactggggaatctatccagaagaagtctcgttccaaaagtcagtcatgtgtgaatttctcaaaaagacaatccagcaaataaaaagcatcatagagaagctagatgagcctcatgagaaatacagaaagaaaagatcaagtagtgcaaaatatggaagcaaggaaaatccaattgttgggaaaatatcatagtttggccaactgatggagaactggaaaatattctttttcatggagttttttaattcacccaattttgttcagagttatgtaagagcagacattgactttgatgacacctgctttcacattgtatttaatatttaatgggtttggaatttaactgtttgggaattctgatatcgatgagtttattactagagaatttgaaacccaagatttcct

SEQ ID NO: 8022 - DNA, 626 bp, Cricetulus griseus
ggtagcctgccctcgcctcgcgtctccgcaccggtcttcgtctatcgacctcggtgtcccttccttccgtggcggtttggttctcatccttggacccgcacgtttaggaactcaagcctgggacaatggtgtgcattccttgtgtcgtcatcccagttctgctctggatcttcaaaagttcctggagccgtacatataccccgttgtcagtcgtatatggcctaagaaagccgtgcaagaatccaatggtaaaaatataggcaaagtagactgcaagggtgcagataccaatggattacctacaaaaggagcaacagagatctctgataaaaagaaagactagtgtggttttcctgaaagcccttggctgttttgaaatggacccgataatatgaagcaccttctttgtctcttgatttttttttctctgagaccaggagtctagataagcagtttagctatctacttgatactgatcaggaagtacatgacatttatatttaaagtataagtagttatatttaatgacctcatcctgagtttctttttcattaaagtagcttttgtttctattattccattttactaatataaataaatagaaggtttgtgtgagcagacactca

SEQ ID NO: 8023 - DNA, 626 bp, Cricetulus griseus
gcttgtcaacgacaagcccacaaattcaaagatcacttctttcaagaagcccaagttttgtgatgtctgtgcccggatgattgtgactcaataacaagtttgggctccgctgtaagaactgcaaaaccaacatccatgaacattgccaatcctatgtggagatgcagaggtgcttcggcaagatcccacctggtttccgtcgcgcctatagctccccactctacagcaaccaacagtatgctgaaggatgatctggatttcccgccgggggagaagatcacagtcattgacgactccaatgaggagtggtggcgggggaaaatcggagagaaggtgggattcttccctccaaactttatcatccgggtccgggctggagaacgtgtgcaccgtgtaaccagatcctttgtggggaaccgcgagatcgggcagatcacactgaagaaagatcagatcgtggtgcagaaaggagacgaagctggcggctacgtcaaggtctataccggccgcaaggtggggctgtttcccgccgacttcctggaggagatttaggtgttggcacctgctggcgggagacacctacgcctggtcctgggcgggcccagtgcgggctggggagggaaggg

SEQ ID NO: 8024 - DNA, 625 bp, Cricetulus griseus
attagaagtggaggaggaattttagaagaaagacccttatcacagtgtcgaggaaatagcagaaatgaactgatttgctctgaagatggcactgatgcaaaatttaactctaaaagcagcaggaggaaccgtgtagtcctccctaaatgcgacactggctgtgcagaggctttgtttggactcaagaacattggtttcccatcccaagacttattttcatttttaaagcacaagatcacaacaaaagaagaatggcataaattcatccagcttctcacagaattgcacatgcaaaacatagatctattatatagtaatcttgagttcatcctgccattgccagttactgtcattccagaagtaaaagatgcttacaacttcccagtcgactacagaagcgagtgccagataatcaggtatgtttaaaattgcttcatactaaatatatttgtataataatacaatattcaggtacattttctgatgaattgtatttttaattcaaaaggatcctagttttatactttcttaaagtgtaggtgcatacctgttcacaaatgtgtgtgaagatgtggttgtttttatctcttgtttaacctatcttttcttgtaattaattagcaaa

SEQ ID NO: 8025 - DNA, 625 bp, Cricetulus griseus
ctgccggcggcctgcgcgccagacgccgccatgatcatcccggtgcgctgcttcacctgcgggaagatcgtcggcaacaaatgggaagcctacctggggctgctgcaggccgagtacaccgagggggatgccctggatgctctgggcctgaagcgctattgctgccgccgcatgctgctagcacacgtggacctgattgaaaagctgcttaactatgctcccctggagaagtgaagtctggagtttaccctcctcctctgctggccatggacaatcttaatcatgctgaattcaaactgaggtgttggggaggtgggtgcattgcctggctttggccctgtggcctacatcccctcacccctggaagaaacagttcagtaaagacgttagcaagaaacaacaggtctaactttatataagaccctcaacatcatgtctatgctgtctttgaggttacctggcctggatccagtctttttccccaggactgttctccttcccctcacccgacttgggagtccagtcttatgggagcccactgccttctcgtttctctgggccttgccctgtttgatccactaggtaaccctacagtacaatcttgcactcattgccctagggcctc

SEQ ID NO: 8026 - DNA, 624 bp, Cricetulus griseus
gtcgcagacggagaaatggatgccagagacaagcaagtgctccgctctctgcgtctggagctgggtgcggaggtcttggtggagggactggtcctgcagtacctctaccaggaaggaattttgacagaaaaccatgttcaagaaatcaaagcccaaaccacaggcctccggaaaacaatgctgctgttggatatcctgccttccaggggccccaaagcgtttgataccttcctagattccctccaggagtttccctgggtaagagagaagctggagaaggcaagagatgaagccacaactgagctccctacaggtgactgggtggctggaatcccttcgcacatcctcaacagctctccgtcagaccggcagattaaccagctggcccagaagctaggacccgagtgggagcccatggtgctgtctctgggactgtcccagactgacatctaccgctgcaaggccaaccatccccacaacgtgcagtcacaggtggtggaagcatttgtccgctggcgccagcgctatgggaagcaggccaccttcctaagtttgcacaagggcctccaggctgtggaagcagacccctcgctgctccagcacatgctggagtgatcctacccc

SEQ ID NO: 8027 - DNA, 624 bp, Cricetulus griseus
agtagagatgagtataaaatccagtcgtttgatgcagagacccagcagctgctgaagactgcactcaaagatccaggcaccgtggacttggagaaagtggccaatgtgattgtggaccattccctgcaggactgtgtgttcagcaaggaagcaggacaagcaggccagagtgtcttccgccgcgggctccttgaccggctgcagcgggagtatcaggcccgggagcagctgcgagcccgctcactgcagagctgggtctgctatgtcacctttatctgcaacatctttgactacctgagggtgaacaatatgcccatgctggccctggttaaccctgtctatgactgtctcttccagctggcccagcctgagagtttgagccgggaagaggaggtggactgcctggtgctacagctgcaccgcgttggggagcagctggagaagatgaacgggcagcgcatggatgagctctttgtcctgatccgggatggcttcctgctcccgttaggcctcagctccctggggcggctgctgctgctggaaatgatcgagttccgggcagccggctggaagaccactcctgctgcccataagtattattatagtgaggtttccgactgagcc

SEQ ID NO: 8028 - DNA, 624 bp, Cricetulus griseus
atgacctctaggaagaaagtgttgctgaaggtcatcatcctgggagattctggtgttggaaagacatccctcatgaaccagtatgtgaataagaagtttagtaaccaatacaaagccacaataggagcagactttctgaccaaggaggtgatggttgacgacagacttgtcaccatgcagatctgggacacagctggtcaagaacggttccagtctcttggtgtggccttctacagaggtgcagattgctgtgttctggtgtttgatgtgactgcccctaacacattcaaaacccttgacagctggagagacgagtttcttatccaagccagcccccgggatcctgagaactttccttttgttgtattgggaaacaagattgaccttgaaaacagacaagtggccacaaagagggcacaggcttggtgctacagcaaaaacaacattccctactttgagaccagtgccaaggaagccatcaatgtggagcaggccttccagacaattgctcggaatgcccttaaacaggaaacagaagtggagctatacaatgaattccctgaacccatcaaactggacaagaatgaccgggtcaaggcctctgcagagagctgcagttgttga

SEQ ID NO: 8029 - DNA, 623 bp, Cricetulus griseus
cttttcatgttgttcctggcattttctgtcacatgtttgtctttgaacaaggctttccctcttgtcttccgttctcatgcataattctcagaagaccataattcatgtggagacacactacccagtattgtttgatgcgttttatttgaaaaaccttcagtgcaggaaactgtaattgtgctatatgtttgtgtatataatttcattctgtagttgccagaatgttgacatatggtacatttgattttcattttttacatatgtagttttcttccttcacagtcaaaacatttattttttcaggttgggtacagggaattaagcttgtgggctacaaaatccatgtgtatgtatgtatctgtccatttggagatagtcaagagcaatacaacagtgccaaagactacacacagcaccattctttcgcgtggccattttcagggttagggtttgcacaagctgcagggcagatttgcagagtaccttgttctggcaaatttaacccatttgtaaacagatacaaattttatttcttatatcatttataaggtggtttgatgtactgggaagattttttattacagagactgtatattgatatataataaatgaacttttcaaat

SEQ ID NO: 8030 - DNA, 623 bp, Cricetulus griseus
agagggtgactcgactgtacaaggatcagaaaggactccagcacctggtgtctagcgatgaaagaccaaaacgggggagcagtgccttctggtctaggaggagaacctgtgtaaaatttgcatggactcacccattgactgtgttctgctggagtgtggccacatggtaacctgtaccaagtgtggcaaacgaatgaatgaatgtcctatctgccggcagtatgtcatccgagcagtgcacgtcttccggtcctgagggctagcattggcttcttcagtgccttacaggacatagctcaaagtgtctgggctcagggttgttaatttttttttttttttttttttgatttcgccaagatttcagttcatacttagttttaaaagacagacagctgactggtttatcggttggaatagctggttctaaactaataagctgtaaagaattaatagtctatattgtacaaatttgttaaaatcttttggatgtgaatgtgttgctccaagtggcttatattaagatttttctcacctgggtgttaaaaagcaaacccaaatgtgtattttttgttacagagctctgctttataattttgtaataaagtttaaatacaaaaaaaaaa

SEQ ID NO: 8031 - DNA, 622 bp, Cricetulus griseus
agaaccatggctgaagtgcacgtgatcgggcagatcctaggggccaccggtttctctgaaagcagcctcttctgcaagtggggcatccacacaggggctgcgtggaagctcttgtcaggtgtgcgggagggccaaacgcaggtagacacacctcagataggggatatggcttactggtcccaccccatcgacctgcactttgccaccaaaggtctccaaggttggcctcgactgcatctccaggtgtggtcccaggacagctttggccgctgccagcttgctggctatggcttttgccatgtgcccagcagcccaggcacccaccagctggactgtcccacctggaggcccctgggcagttggcgggaacagctggcacgggccttcgtgggtggtgggccacagctgctgcacgcagacaccatctacagcggggctgaccgctatcgcctgcacacggccgcgggcggcacagtgcatcttgccatcggcctgctattgcgccactttgatcgctatggtgtggagtgttgagggacttcatggactgtcaaggccaggaactcctctgaggccatgctccactgaattactggctagttagtgtgtgggttccagggac

SEQ ID NO: 8032 - DNA, 621 bp, Cricetulus griseus
agttacagctgaactcctccaccttccaactcagtcaggctcatccatctcctgcttccctctcctcacccaacccacccccttcagtccctctcttgagcaaggtggttgggctgttgtggggacaggtgacccaagcaggctcctagttctggagagttgggcgagtgttataaccttttggcctctccatcagttcagctttcccccaaagcatggtttggtaccagtcttctcatttccttctagagcctgagaccaatgcttaagtttgggggacacagtcaccatccccctggtactgatgtggacaaaacagctcattaacggggtcttgcaaggggctctgtatgtacccagggtactggccccaacccccaattctagccatagacaaacccaatgatggggcttctccactgggctcctgtagtcctcaagtccctggcctccaccttaccaggtgccacttctcagaaggccactgcccaggcccccaggccgccccttcgtggccagagactggttaaagccccccagtgcctccttgtgcatagaacttcctctgaaattacaaataaaaaaagactttcttctgaaaaaaaaaaaaaaaaaaaaaaa

SEQ ID NO: 8033 - DNA, 621 bp, Cricetulus griseus
gcggcgggcgactaggcgcgttgtgtgtgcggcagttccaccatgtcgaaggtgtcctttaaaatcacgctgacgtcggacccgcggctaccgtataaagttctcagtgttcctgaaagtacgcctttcacagcagtgttaaagtttgcagcagaagaatttaaagttcctgcagcaacaagtgcgattattactaatgatggaataggaataaaccctgcacagactgctggaaatgttttcctgaaacatggctcagaactgcgaatcattcctagagaccgagttggaagttgctaatgtctgcttcttggaatacagaacctttcagaataaatactggtatttgttgttgctgtatggttgaaatcagacattcatgatacaatgaaagcaccaagaatcaatgagacaaggaaagttgactcttgtcccttcttgttcattttgttcatgggaagaaagaatgcctttgagtggagggtaccaaccataggtcacatagtaggtgactgctacttcaccagaagaagagagggtacttctgtgacaaatggactgtgctttaaaacaaaaccaaacaaaaaacctaagttcaatccctgagacctgcatggtgga

SEQ ID NO: 8034 - DNA, 620 bp, Cricetulus griseus
ggattgccagaagataaaggcgtggacctctacgtcctggagaaggccttcctcagcacccacccccacaccgaggctgtgtttgaagcctgcctgaagagctatggtgcttcatccaggaagtccagtccagtgctgaagaagttagatgaagtgcgcctgagagggagaaagcgctccatggtggggtagcagagttgctgactgtttcccagtgaggatgctgtgggcggggccggacctcaggctgtgttgtccttgttaagtggcctggcacagtggtgctgtgccactgtcacctgggttccactgttctcggaagcttaatgtacataaggcctgttggggcagaactgggtgagtaggccaggctggcctggctgctcttccagaagacctgggttcaattcccagcacccacatgacagcacataactgtctgtaactccagttccaggaaatctgacaccttcacacgctgggcagtggtgttgcactcctttaatccccagcactcgggaggcagaggcaggtggatctctgtgagttcaagaccagcctggtctacaagagcgagttgctacaggacagccagaggtgttccacagagaaaccctgtc

SEQ ID NO: 8035 - DNA, 619 bp, Cricetulus griseus
tgccgcggcaccccgccgcactaccagttcctgctggacctgggcgtgcggcacctggtgtccctaacggagcgcggccccctcacagcgacagctgtccgggcctcacgctgcaccgaatccacatccctgacttttgcccgccggccccggaacagatcgaccaatttgtgaagatcgtggacgaggccaacgcccgcggagaggctgtcggagtgcactgtgccctgggctttggccgcaccggcaccatgctggcctgctacctggtgaaggagcagggcttggatgcaggggatgccattgctgagattcggcgcctgcggccgggatccattgagacctatgaacaagagaaagctgtctttcagttctaccagcgaacaaaataaggaactcgacagctccccctgtctgctgctgcttgtggaaaatgtggccagggaggatggaaagtggacttaagttctacagccttcagctccctttgcctcctattggacagaagtagtatttccccgaagccataacctgattgacaggatggctgagaccccatgaatataagttaataactaataagaactcatttgcactgcatggcgttacacagcactcc

SEQ ID NO: 8036 - DNA, 619 bp, Cricetulus griseus
  modified_base (604)..(604): a, c, t, g, unknown or other
cacagccccaggccctcagcccatctgagcccggagaaagctgccgcctccgacctccaatcacctggctcctgagcggactgtggaagccccagtacctctttctccccagatgacttcccaggccaccccctcaaggatgaccccgctgccactttgggatcccattcacgaggctaatgcaagacctcagctggtggggcccagctgtgggtcaggcgcatctttgtccggcaggacactgtgtcatccttcctggcctatgtatgatgactggggcagggtccctacctcagggcatccagaagaagcacaagtgtccaaggatacagggctcccagtgacaggctatgaagatgtctttctcttggaccctctgctaccctgtgggcagcgtgttcccctgtacctgtccaagcccctcagcaggcagtgggcactcggaagctgctgctcccaccccccatcatgtcctcgtctgtgcgcccctcctcatcccaggcctgctcttccacctggctcagtgaggcagagatgatcgccctgactggcctgctgcagatgagccagggagagctgagacctaactccttggcaagccctntgacctctaccagct

SEQ ID NO: 8037 - DNA, 618 bp, Cricetulus griseus
gaaggaggccattgtattatggatgagctggtcaaacctgacttcaagattctgaactaccttactagtttttcaggaattacaaagaagattcttaacccagtgacaaccaaactcaaagatgtacagaagctgttaagaaaactacttcctcctgatgctgtgttagtgggccattccctagactcggatctcagagtattaatatgagtgttttagaatgcctggactcagtgggtcagaaactccttttcctgacccgggatatagatgaactttcttcttctagaaactgtcaaactattaggtgctcttcaaataaaagaggtgcttgagcaagctagagtggaagtccctttgtttcccttcaacaatccgtgcagttctctttttaagcccttttcacctatccttgctgaagagatgaaagaaaaagaaatgaagacgaaaatggacagagatgtcaactgtctatgctgggccatttatcaaaaaattgtaacattgaggctgtgaagaagatgtttaacagcttgggcccagtcgaatcaataactcttgttcttgaaacttacctaaaacttaaaaaaaaaaaaaaaaaaaaaaaaaaaaaaaaaa

SEQ ID NO: 8038 - DNA, 618 bp, Cricetulus griseus
aatttcgacatggctgaggtgagccatggtaatgaggctgtgggaaaggggcctgagggttcatctccggaatctgtgccagttgatacgaccgtctccagggtgaaactcctcgacaccatcgtggacacttttctccagaaactagtcgccgccaggagctacgagagattcaccaactgttacaaacacttccaccagttggatcctgaggtgacaaagtgggtctatgacaagtttgtggctcagttacagacatccatccgggaggagatctcagaaataaaagaggaagggaacctagaagctgtcttgaactccctggataagattgtagaagaaggcaaagcccatggagaaccagcctggcgacccagtggaatcccagagaaagacctgtgcagtgtcatggcaccctacttcctgcagcaacggaacaccctgtgccaccgtgtgcagaagcaggaggccaagaaccaggaactagccgatgctgttctggctgggcgcaggcaggtggaggaaatgcagcagcaggttcaggccctccggcaggcatggcaggctcttcacaaagagcagacggaactgctgtcagtgctgagggcacctgagtga

SEQ ID NO: 8039 - DNA, 618 bp, Cricetulus griseus
gaaaatcagaaagacctagatgaagaagaggatgaggaagtaaggagatatattatggagaagattatagaggctaacaagctcctacagaatcaagagccagtgaatgacaaaagggagcgaaaactcaagttcaaagacaaattagttgatttagaagtcccaccattggaagacagtgacacttgtaaagctttcttagaaaacgaaaataatgtgtctggaaaactgtcacagttatgcatttctggtgaactggggcaagagaatgtggtcttgtcagttcctgatggcagctgtgaagaaaacgataggaagatactggtagagagagatgggaagtttgaacttatgaatttacaagacattgagagagaagaaaagagagcaggtcatagaaatgcggagagttcagcgagcaaagcagattgaagatatgaatagcagagtgaatagagacccacaacaagcttttcgattatggctgaagaaaaagcatgaagagcagatgaaagaaaggaagacagaggagctcaggaagcaagaggagtgtttgttctttctgagaggaaccgagggccgagagaggccttaaacatggctcagaagaaaacagat

SEQ ID NO: 8040 - DNA, 618 bp, Cricetulus griseus
ctaagatgaccaaaataaagtccgttccggaggagtctgaggcgcaggcggagggctgcagcgaggagcgcacgtacgaggagctgctggtcaacctgaaccccatcgcgcagccgctggcgtcccgccgcctgacgcgcaagctctacaagtgcatcaagaaggccgtgaagcagaagcagattcggcgtggggtgaaggaggttcagaaatttgtcaacaaaggcgagaaaggaatcatggttttggcaggagacacattgccaattgaggtatactgccatctaccagttatgtgcgaggaccagaatttgccctatgtctacattccctctaagacggacttgggtgcagctacaggctctaagcgtcccacctgtgtgatcatggtgaagccccatgaggaatatcaggagatctatgacaagtgcctggaggaggtgcaggctctgccaacacctctgtgagagacttgagctgcagcctattccaggagctgctgggctggctgcaggcggctgcccaccctaacaacatctccccaatttcctgacatgggacttctccccaggcagttctaacagctgttcttggaggtaaagccagcatctttccatc

SEQ ID NO: 8041 - DNA, 618 bp, Cricetulus griseus
gagggctgctcctagacatgcacctgcagctcagcctccagcagcagctgcaccatctgcagttggctcccctgctgctgcacccaggcagccaggcctgatggcccagatggcaaccactgcagctggtgtggctgtgggctctgcggtgggtcacaccctgggtcatgccatcactgggggcttcagtgggggtggcagtgctgagcctgcaagacctgacatcacttaccaggagccccagggaacccagctgctggaccagcagcgagggccatgctctcttgagatcaaacagtttctggaatgtgcccagaaccagagtgacgtcaggctttgcgaggtttcaatgaggtgttgcgacagtgcagtgccagttacacaattctggatcaagtgtttgcagtcacaccctgttctgtctgagactgtgttgcgcctcctcctcccatttccaacaacatatctttgtgaaaaagggttttccagtttgttggttatcaagtctaaatacagacgtagactcgctgtggaaaatgatcttcgttgtgctctagcaaagactaccccgagaatttctgatctagtgagaaagaagcagtctcaaccttcacactg

SEQ ID NO: 8042 - DNA, 617 bp, Cricetulus griseus
gtgggcaagaccagcatcatcaagcgctatgtgcaccagctcttctcccagaactaccgggccacccgatcggggtggacttcgccctcaaggtcctcaactgggacagcaggacgctagtgcgcctgcaactgtgggacatcgcggggcaggagcggtttgggaacatgacccgagtgtactacaaggaagctcttggagcatttgttgtctttgatctctcaagaggttccacatttgaggcagtcttaaaatggaaaagtgatctggatagtaaggtccatctccccaatggcagccccattcctgctgtcctcctagctaacaaatgtgaccagaagaaggatggcgcccaaagtccttcccagatggaccaattctgtaaagaccatggcttcattggatggtttgaaacctctgccaaggataatataaacatcgacgaggccacccggttcctagtggaaaacatccttgcaaaccagcagaactttcccagtgaagaaaacgacatggacaaaattaaactgactgatgagcccctcccaacaaaggccaggtcccagtgctgctgatgtgttctgcactggctgcactttctccttggtcctgcgtgt

SEQ ID NO: 8043 - DNA, 617 bp, Cricetulus griseus
tgtaagcgacctgagataacctgtgaagatggttcgctactctctcgacccagaaaaccctacaaaatcatgcaagtcaagaggctcaaatctccgggttcactttaagaatacccgtgaaactgcccaggccatcaagggtatgcatatccgaaaagccaccaaatacctgaaagatgtcacattgaagaagcaatgtgtgccattccggcgatacaatggaggagtcggcaggtgcgcccaggccaaacagtggggctggacacagggtcggtggccgaaaaagagtgctgaatttttgctgcacatgcttaaaaacgcagagagtaatgctgagcttaagggtctagatgtagattctctggtcattgaacacatccaggtgaacaaagcacctaagatgcgccgccgaacttacagagctcacggccggattaacccatacatgagctccccctgccacatcgaaatgatcctcacggaaaaggaacagattgttccaaagccagaagaggaggttgcacagaagaaaaagatatcccagaagaaactgaagaaacaaaaacttatggcacgggaataaattcagcataaaataaatgcagataaagtgaaag

SEQ ID NO: 8044 - DNA, 616 bp, Cricetulus griseus
gctcattgcactctgcttttaccgtttgccaccatgccctgctccgaagacgctgccgccgggtccatcagcaagagggctcgggccgaggatggcgtttctctgcgcttcgtgcggctctcggagcacgccacggctcccacgcgcgggtccgcccgcgctgcgggctacgacctgtacagtgcctatgaatacacaataccacctatggagaaagccattgtgaaaacagacattcagatagctgttccttctgggtgttatggaagagtagctccacgctctggcttggcagtaaagcacttcatagatgtaggagccggtgtcatagatgaagattatagagggaatgttggtgttgtgctgtttaactttggaaaagagaagtttgaagtaaaaaaaggtgatcgaattgcacagctcatttgtgaacggattttttatccggacttagaagaagttcaaacactggatgacactgcaaggggctcaggaggtttcggctccactggaaagaattaaaactgcttgaagtattttgctgtttcaacactgtaaagagaagtctttagttttggttagtgttttgtattctaggatgcaggaaagaggacct

SEQ ID NO: 8045 - DNA, 615 bp, Cricetulus griseus
  modified_base (594)..(594): a, c, t, g, unknown or other
atgcagcctagccttcaggtgagccaagcaaagttacatagtttggtgaagcccagtgtagactttgtctgccagatgaagtttccttctggcaattacccttcatgtttggatgactccagagacctgcttgtccactggtgccacggtgcccctggggtcatctacatgctcatccaggcctacaaggtgttcaaagaggaacagtatcttcgtgatgcctaccgctgtgctgatgtggtctggcagtatggactgctgaagaagggctatgggttgtgccatggtgctgcagggaatgcctatgccttcctggcactctacaacctcacacaagatgtgaagtacctgtacagggcctgcaagtttgctgaatggtgcttagattatggagaccatggatgcaggacaccggaccacccccttctccctctttgaagggatggctggaacaatctatttcttggctgacctgttagttcccacaaaggccaggttccctgcatttgagctctgaaagggcagcatggcccctgcagcatgaccctccgtgtgtcccagcctgggctaagtgcttccgttgctcttgaaggngcataatgaaactgtgtactt

SEQ ID NO: 8046 - DNA, 615 bp, Cricetulus griseus
gactgagccggaccatagatatgtcggagcggcgaacgaggtccggaggggccgcgcagcggcctggacccaagactccatttattaagtcttcgaagaaggtcccagcggaaatctggctcagatctcccaaacaatctttcctgaaatatggccgaagacacctcaagcggctccggtcagaaaggctatcatcttgaagaagatcgtggctcatgcagtagaggtcccagctgtccacacacttcgaaggagtcctaggatctcttttatcttggaaaaagaaaacaaccctcctctcaaggtacccacaaaggaggacctcttcaagacctgtagtgtccctggtacccccaccagcaccccagtgctgtatactcagaatgttgagtctaactctgaggaaagagaactggacaccagagacttggaaatgtcccagaaagtcaggcgatcatacagtcggcttgagaggctcaatgctgcctcaacctccacccctggccgccgatccttctttggctttgagggacttgaagacttgccccaagtctcacctgtcgtgagttcaaagttaattgagatccccaaagtatcttcgaagcccttgattcc

SEQ ID NO: 8047 - DNA, 615 bp, Cricetulus griseus
ggtgagtgtgtgctgcgggctgccgctccggcttggggcttcccgcgtcgctctcaccctggtcggcggctctaatccgtctcttttcgaatgtaggtggaaccgccgccaagatgcagattttcgtgaagacccttacggggaaaacgatcacgctcgaggttgaaccctcggacactatagaaaatgtaaaggccaagatccaggataaggaaggaattcctcctgaccagcagaggctgatctttgctggtaagcaactggaagatggccgtactttgtctgactacaacatccaaaaggagtccacccttcatcttgtgttgagacttcgtggtggtgctaagaagaggaagaagaagtcctacaccactcccaagaagaataagcataagagaaagaaggttaagttggctgtgctgaagtactataaggtggatgaaaatggcaaaattagtcgccttcgtcgagagtgtccatctgatgagtgtggtgctggagttttcatggctagccattttgacagacattactgtggcaagtgttgtctgacttactgcttcaacaaaccagaagacaagtagttgtgtatgaataaataaaaagacaggaact

SEQ ID NO: 8048 - DNA, 615 bp, Cricetulus griseus
gagcagtgcctacgtggaggagcttccacgctgcgactccgcggacctgcctcctgacgcccgcacgaccccgctgacagcgagcagccgtctcccgactcttcctcctgaggatctcagaaccaaaggcagaactgcttccctgcgaaggagctgggcactgcagccatgaagtatatgttgagcctctatctgctgggggttatattgacgctgctgtccatcttcgttaggctgatggaatcactggagggcttgctggaaaacccattgcctggcagcccctggatcgtcagaggtcagctagccaacacagagcctcccaaaggccttccagaccatccatctagaggagtgcaataaaacctccctcctcttccatgggagctgttggatagcagttagggattgtgggttggctgtaagaaaagaggttggaatatccagtgtccaggtcccaattatgcattgagttcttcctccaatgtagttctaatgtgtttgtatataatgtctaaagacggctgtgggatgataagacctgctcagggtgtgagagatccagccactgtgtggcttcaatgtaatttttctaatgcaataaatgtgaatata

SEQ ID NO: 8049 - DNA, 615 bp, Cricetulus griseus
ggcgctacgtggggacacggctgcggtggctgcgggactggctagaaactactaaagttcctgtaggatcaagtaggattttgtaagaacataatggatggagaggagaaaacctatggtggctgtgaaggccctgatgccatgtatgtcaagttaataatcttctgatggccatgaatttattgtaaaaaaaagaacatgcattaacatcaggaacaataaaaggccatgttgagtggaccagggcagtttgctgagaatgaaaccaacgaggtcaaatttttagagagatcccttcgcacgtgctatcgaaagtctgcatgtatttcacctacaaggtccgctacactaacagctccaccgagattcctgaattcccaattgcacctgaaattgcactggaactgctgatggctgcgaacttcctagattgttaaataaaataaattataataaactgttaatttttttcagtatttaatacctgtagttcagttagtaattttttcacatatagcatgttgcctgtatgaaattgaaccctaaagttcattgctgagcagattccttctgtcatttgcataacagagttgaaatttgtttgctacatcaaca

SEQ ID NO: 8050 - DNA, 614 bp, Cricetulus griseus
cttttctttttttttttcctttttttttattttcttttttttttctttttttcttttttctaattaattagctcatgaataatattgcagtgtgtcttgtcagctgtaggtggcaaagatccccttataaaaaggaaactgagttttcaaaatgggccatgggagcacaagctgaagctttagtgccttctacaatgtgtggtatactgttttctagggttttatatgtgctagtcattctcaattcatatgaatctagatggccgtattctgttcacaaccatgggaagttggtgtgtgtgtgtgtgtgtgtgtgtgtgtgtgtgtgtgtgtgtgtgtgtgtgttttctttttgtcacttgtgtacattaaactttggaagatgctttactatgtaaagtatagatggccatttaatagtttagccacatatggttggctggtaaacagcttattctgatacagaaatgattgggcacctgtggaaagattgtgaaggagtgtgtctcgcttcaaccgatgtcttatttatgatatgtaagtagaatagagcaaatgtttgaatctttgttattttttagtaccatttctcttaataaagttcagtattttag

SEQ ID NO: 8051 - DNA, 614 bp, Cricetulus griseus
cgtaccgcggcgcgggggtggggacaggacgccgcatcggaagggggtgccggggccaggaggccagacactcagcccgggccctctccgcgtcgcctcgacctcaagaggacgacaaacaagcgccaactcagtgcccagcgggcccacgccagactctcgctcacaggcgctgggcccaagcccggaggcccagtaggcgccaccggaggagccccgcagacgccatgctaaaagccaaaatggctgccccgaggatgcccgcagcgcgctgcctgtgaggagggagccggccgctccagcgaacagtgctcgttcattgaatataaggattttaaactcatctatcggcaatatgcagctctcttcattgtagtcggagttaatgacactgagaatgagatggctgtttatgaattcatacacaattttgtggaagtttttagatgaagtacttcagcagagtgagtcgaactagatataatgtttaattggataaagtccacatcattttggatgagatgctttaaatggctgcatcgtggaaactaacagagcaagaatccttgcccctttgctgattcttgacaagatgtcagaaagctgatgacgac

SEQ ID NO: 8052 - DNA, 613 bp, Cricetulus griseus
aaaagggcttttgtaagccgagagaagagatggtgctgagcgggaagtataagtctggggaacagattcttcgccttgccaacgagaggtttgctgttccagagatcctctttaacccttctgacattggaattcaggagatggggatcccggaagctatcgtctattcaattcaaaacctacctgaagaaatgcagccactgggaaggtggaaaattgatatctgaaaatgatgactttgaagatatggtggttacaagagaagattatagaagaaaatggacatagtgtctgtgaaagagtaaatttgatatttaagaaacattttggaatgaaagtcttgggaagcttgatttcaaagtttccttgaaaggaggttaaggacctgactttcacttgtcatagttaagaaaaaatctcacaactaacataaatagtctgagtcatggctgatgttcacaggcttctaacgtgggttttactgtctagtgtaattaagcccatgtttcatttagtagttagactactataccaatacttacactgtttctgagaatacattgtctgtcatgagaaagtgagagtaaatgtttaatttttcatgcttgaaaac

SEQ ID NO: 8053 - DNA, 613 bp, Cricetulus griseus
atggcgcggcatgtgttcctcaccgggcctccaggggttggcaaaacaaccttgatccagaaagccagtgaggtcctgcagtcctctggagtgccccatagatggattttacacacaagaagtcaggcaaggagggaggagaataggatttgatgtcgtcaccctgtctggcgctcggggacctctgtccagagttgggtcacagcctccacctggaaagcctgagtgccgagtggggcagtatgtggtggacctggcttcttttgagcagttggcactacctgtcctaagaaatgcaggtcccagccatggccccgggcacagtgtgtgcatcattgatgagattgggaagatggaactgttcagtcagcccttcattcaggcagtccgtcagacgctatccacaccaggcactgttgtccttggcaccatcccagtccccaaagggaagccactggccctggtggaggagatcaggaacaggcctgatgtgaaggtgttcagtgtcaccaaggagaacagaaatagcctcttgccggatattgtgacctgtgtgcagagcagcaggacctgaagcagtccctgacaaggtccagctctgcctgctggtcac

SEQ ID NO: 8054 - DNA, 612 bp, Cricetulus griseus
ctcgcagcagtctctttccttcctgccggcggcgcgcgctctgagatgacagacgacttggtgactgacgcgcgggccgccgcaccgggcatagggacgccgcggcctctgcctcagccccggggccgcaaggttgcagcacgggaagccgccgtgccgagcctgcgtggacttcaagtcgtggatgcggacccagcagaagcgggacatcaagtttagggaggactgtccgcaggatcgggaggaattgggtcgccacacctgggcttttctccacacgctggccgcctattacccggacatgcccaccccagaacaacagcgagatatggcccagttcatacatatattttccaagttttacccctgcaaggagtgtgcggaagacataaggaagaggataggcaggaaccagccagacacaagcactcgagtctccttcagccagtggctgtgccgcctgcacaatgaggtgaatcggaagctgggcaagcctgattttgactgttcaaaggtagatgagcgatggcgtgacggctggaaggacggctcctgtgactagaagattgtgagcagagcatgtgggacatctagccagggtccatgggcaac

SEQ ID NO: 8055 - DNA, 612 bp, Cricetulus griseus
gaccctgaggaatgtcagaagcagctgaagaagaagcagaagaaccgactggctgcccagcgcagccggcagaagcacaccaacaaggcagatgccctgcaccagcagcacgagtccttggagaaacacaaccatgcccttcggaaggagatccaggtcttgcaggctgagctggcacggtggggccggacactgcatctgcacgaacgcctgtgccgagtggactgtggctcctgttctgctctgctgccttctagatgcccagtccaggcagagcaactctcaggacaacctgaatcccatggataccctagctctcaggaacagctgggcctgctccagactcctggctcctctcccccagcccatcaactctctccaggtccatgtgtacatgagtctcttggcctcctcccttccccactgccctcactgtcctttgaccctctcatggcgagggcccctctagcccagctgtcccccagccctgtactgtctgcatcatcccctggttccagcctgccagggtctttctctaagttggatgacctcataaaaaaaaaaaaaaaaaaaaaaaaaaaaaaaaaaaaaaaaaaaaaaaaaaaaaaaaaa

SEQ ID NO: 8056 - DNA, 612 bp, Cricetulus griseus
aaactttatcattctttaaaaccttttgcatttccgtttttgcctctcttccagtttattttccacataacagtagtttcagtttttaaaatatctgatgatgtcactcccctgcttagagcactagcttcctgttacacctcatctgaaattcaaatccttacacccactttacaagatctggctcttacttcccttggatctccataaacggtgatttctaaggaggcaagcagctaactccagttaaaccctacctttcggcaatttctaaattgttcttacagcatacagtttaattagtgtttgtactcttttgggtttttcaggtgttttattttctatacactgatttgttgtttgttttaaactgtctgaagacatacacgtgtgagacaacttccttcgcatcctcacggtgcccagcgtatttgaggcctatgctagttgaggtgctcaattaacgtttgctgtgtgaaccagggggtttgaagacttgctgccagattctgcctttggtcagtgtaggatgcatacatttgagtggtagactcttcacacgtcccactgccaagattttgtattgccatcgggtgccaaataaatgttgat

SEQ ID NO: 8057 - DNA, 612 bp, Cricetulus griseus
ccgagccaatggccgggcccggtccggtgacgtcacggccaatggctgggcagcgcgggactttcaagtgtctggccccgccccgcccaggggaggacggcgtctataaaggcggccgactgcggcccgcagcaggtccccgtcgctccgggtctctgtgctccgctctctgtccaccatggctcgcaccaagcagacggcccgcaagtccaccggcggcaaggccccgcgcaagcagctggctaccaaggctgcccgcaagagcgcgccggccacgggcggcgtcaagaagcctcaccgctaccggcccggcaccgtggcgctgcgcgagatccggcgctaccagaaatccaccgagctgctgatccgcaagctgccgttccagcgcctggtgcgcgagatcgcgcaggactttaagaccgacctgcgcttccagagctcggccgtcatggcgctgcaggaggcgagcgaggcctacctggtggggctgttccttctggagaaaaaaaaaaaaaaaaaaaaaaaaaaaaaaaaaaaaaaaaaaaaaaaaaaaaaaaaaaaaaaaaaaaaaaaaaaaaaaaaaaaaaaaaaaaaaaaaaaaaaaaaaaaaaa

SEQ ID NO: 8058 - DNA, 612 bp, Cricetulus griseus
gcggcgggcggcctccggctcgggaacgcccgccagccgctatggagaagcggggaccatacatggtgacgcgcgcaccttctattcaggctaagcttcagaagcaccgggacctggccaaggccgttctacggagaaagggcatgctggggccttgccgaaccgccccgattcttcagggaaaaggtcagtgaagtttaacaagggctatactgctcttagccagagtccagatgaaaacctggtgtcccttgactctgcagagcaggtgaaccaggatgtgagccggcagctgctgcaggatggctatcacctggatgagattccagatgatgaggacctggacctcattccccctaagcctattgcctcttccacatgctcttgctgctggtgctgtcttgggaatcttcctgtaccctccagtagtcatatccctccaggatggtttttttttttttttggttttttcgagacagggtttctctgtgtagtttggaggactatcctggcactcactctggagaccaggctggcctcgaactcacagagatccaccagcctctgcctcctgagtgctgggattaaaggcgagcaccaccaacgcccggc

SEQ ID NO: 8059 - DNA, 612 bp, Cricetulus griseus
gcaactgaacagagcatccaagtcaccgaccttgtgcccgcttatgccttacgctagccaacctgaaccgcgtggtttattacatctgtgacactgtcctctgggtgaagagtgtgggtcttacctctggagtcaacagagagaaatggcaaatgtgggcgacccgccactactactatttcctcctgctgagcctggtccgggatctgtatgaaatcctgctgcagatggaacgagtggcaagtgacagagcaaaagagagagaggtcatcccagggctctcctgggtacagcgtggtccatgaagacaccgactggctccagtcctttctccgactcctattccactctctgaggcagcatcctcctttgctcctagacacagtgaagaacttctgtgacatcctcatccctttgaaccagctcgggatctacaagtccaatcttggtgtcgtaggacttggaggtcttgtgtcctccgtggcgggtctcatcactgtaatgtatcctcagttgaaactgaagacccgctaggttttgggggcctaataggtaacagcttagttggaacaaaattctgtttttgtcacaagggttttactgtgcttaatt

SEQ ID NO: 8060 - DNA, 611 bp, Cricetulus griseus
tgccttggcccctcacccccgaaaatgtatgcctgctccaagttcatctctacccgctccttgatcaggagcacctctctcaggagcacctctcagctgctgagtcgtcccctgtctgcagtggagttgaatcgaccacagacatggacggatgagggcctcagcagcttggcagcccctcgtcctccaacttcactcatccctagccgcagcttccaaaccagcgtcatttccagagacatcgacacagccgccaagttcattggggctggggctgctacagttggggtggctggctctggggctgggattgggactgtttttgggagcctcatcattggttatgccaggaacccttctctgaagcaacagctcttctcctacgcgattctgggctttgccctctcagaggccatggggctcttttgcctaatggtggcctttctcatcctcttcgccatgtgaagcagctgtctccacttccacctcccatagttctttcgtgtcccgtctgccctgtgtgttccttttcctgtacctccccaggaagtctggggaaagtgcttggctcagggtttgacagagagaagacaaataaatactgtattaat

SEQ ID NO: 8061 - DNA, 611 bp, Cricetulus griseus
cctccatggagtgggacactcaggtggtgtcagggtcttcccctctaggtcctccggagactgaggtggagacgtcaccggtcgacctgcggctgcctgcgtggctggaaccggagaggtgcgccgtgttccactgcgcgcattgccacgcggtgctcgccgtacaccggtgcatctcgcctgggacctgtcgaggtccctcgggaccgtggccttctccagagtcacgaacaatgtcgttttattagagccctgtctcgttggcattgaaggttctctcaaatgcagcacatacaatctactcttctgtaattcctgtggggttcctgttggtttccatctgtattccacccatgctgctctggctgccttgagaggtcacttctgcctttcctgtgataaaatggtgtgctatctacttaaaaacaaaggaatagtaagtgcatctgagatggatattcacaatgtgcctctaccagaaaagattgcagagctagaaagagaagataatgactaatgcacgctcgattaaattcactgataaagattctgaaggacgtgactcctgaccattctaaccaagaaaacgtattaaataaaagttaattaat

SEQ ID NO: 8062 - DNA, 610 bp, Cricetulus griseus
  modified_base (503)..(503): a, c, t, g, unknown or other
agcctgatggtactagcaaggagtgtgtgttcatcgagaaggttctggaaaacaactacacggccctgatgtcagccaagtactcaggctggtacgtgggcttcaccaaaaaggggaggcctcgcaagggtcccaagacccgggagaaccagcaagatgtgcacttcatgaagcgttaccccaagggacagacagagctacagaagcccttcaagtacaccaccgtcaccaagcgttcccggcggatccgccccactcaccccggctaggtccggccacactcacccctagagaactacatcagaggaatatttttacacgaaaaataaggaagaatctctatttttgtacattgtgtttaaaagaagacaaaaactgaacctaaagtacttgggagcgggaggggtggtaggattctaccgttgaccagaaccccatgacaaaggactcacgaaaaggggactgctgtcaactcacaggtgcttgcctctctctagggggtnacaattcaaaactcatcccagaggaggatttgaatgagaaaactgacgctgcgagaaaccaagtcctttccccaaaggttctgaaagcaaacaacaacaacaacaaa

SEQ ID NO: 8063 - DNA, 610 bp, Cricetulus griseus
gaggcacagaccgcacaggcccctcggactctgggtccatcacctcctgccccatcacccactccaacaccaacagtccccattgccactctgaaccagcctccgccacttcttcgtccgacactgcctgcggcgcccgctcttcaccggcaacctcctccgctgcagcagcaggctcggttcatccaaacccggccaactctgaaccagcctcccccgcctctcatcccgtcctgctaactctctgccaccccgcctaaacccaagaccagtgcctgaccacggttggcggtcaacagccaccgtcactcattgggactccagacagattcacagtccccactgcacttgtggcagtgccctagagcacagtgggcgtgacaccgcagggagcctctgtttagcctcctttccagtgttcaccagtgggatctcatgggaggaaaaggattctatattccaagggtttgtctattttgactgtatttattttgttgaggtttcttactttcctgcctcttcatactcaaagctgttagtacaaaatattgacttaagaattgtaaaaaaaacaaaacaaaaaaaaaaaaaaaaaaaaaaaaaaaaaaaa

SEQ ID NO: 8064 - DNA, 610 bp, Cricetulus griseus
gaagagacttccgctgttctttccgcgcggcgtttcgttctgtctgaggtgggctgttctcggatcgcggcgaggccggcgcaccgcagccatgacagaggctgatgtaaatccgaaggcctatcccctggcagatgctcacctcaccaagaagctgctggaccttgttcagcagtcctgtaactataagcagcttcggaaaggagccaatgaagcaaccaaaaccctcaacaggggcatctctgagttcattgtgatggcagcagacgctgagcccttggagatcatcctgcacctcccactgctgtgtgaagacaagaatgtcccctatgtatttgtgcgctccaagcaggccctaggacgggcctgtggggtatccagacctgtcatcgcctgttctgttaccatcaaagaaggctctcagttaaagcagcagatccagtccattcagcagtccattgagaggctcttggtgtaggcctgtggcctctgccctttcctgtctgttcccaccctacttgtgtatcatattgtctgttagcatgtaaggttttcagccactttctattatagacaggtgagaggcagaatgtcactgtttacacaggaa

SEQ ID NO: 8065 - DNA, 610 bp, Cricetulus griseus
taagctgtccctttttgtccttctgatcaaggactactgattgcacagaaaacatgtttacttgtagcagctgcagttgatctagagcaaggaagaaaagctacaaaacttccgaacagaccaggttgctgagaatgtcacttgaacagacccggaaatgcaaaattgtctggaatctcctgaaacaaacaggagactttgcaggtgatgactgtgaagcattgcttctgttgtatgagtttgaagttaaaaccaaaacaagtgatccatcactgtacaacttcctggattcggtatggaaaatgcctgatctagaaagcagaacacttgaaacaatggcattactagctatggataagcctgcatggcattggaattccttggccaccttggctccctcaaaataaactatgaagctaaggtgaatcttctaaatgccaacctcatggaagcattaaataaagggttggagttaaggtctgcagagatggctgagcggttaaaagcactggctggccctccagaggacccaggttcaactaccaacacccaaacaacagctcacaaccacctgtaactccagtttcagggaatctaacactctccactg

SEQ ID NO: 8066 - DNA, 610 bp, Cricetulus griseus
gccccagtctgtttgcgtggccaggcaacgccgacctcacccatatccgcgacgagattccgaaggaaattgcatttctactattcggaatcccactaggaaaaaagggtgagaaataaagtcgccgcctccagttccgcgccaggcactctctcagtatcgatggctctgcagaggacctggtccttgcttctgctcctggtgctgaccctgctggggttagggcttgtgcagccctcctatggccagaatcaaatgtaccaacggttccttcgacagcatgttagccctcaggagacaggtggcaatgacaactactgcaacttgatgatgcagagacggaagatgacttctcgtcagtgcaaacacttcaacaccttcatccacgaagacatctggaacattcgtggcatctgcagtacctccaatatccagtgcaagaatggcaggatgaactgtcatgagggtgtaatgaaggtcacagactgcagagagacagggagctctaggtttcccaactgtagatacagggcaagtgcaagcactaggcgagttgtcattgcctgtgagggtaacccagaggtccctgtgcactttgacagatagatgc

SEQ ID NO: 8067 - DNA, 609 bp, Cricetulus griseus
gctaagatgctgctcgacttgtctgaggagcataaggagcacctggcgttcttaccgcaagtggacatcgcagtggtcgccgagttcgggaggatcgcggtggagttcctcagacgcggatctaacccgaagatctacgaaggcgccgccagaaaactcaatgtgagcagtgacactatccagcatggtgtggaaggattaacatatctcctcactgagagctccaagctcatgatttctgaacttgatttccaagactctgtttttgttctgggattctctgaagaactgaataaattactgcttcagctttacctggacaacagaaaggagatcagaactattctgaatgagttggcacctcgacttcccagttaccatagtcttgaatggcgcctagatatacaacttgcaagcagaagtctccggcaacagattaaaccagcagtgactgtaaagctgaacctcaacaagaatggcgaccacagtacccattttttgcagacagacccagctaccctgcttcatttggttcagcagctggagcaagcgttggaggaaatgaaaacaaaccactgcaggagagtagtccgaagcatcaagtagctc

SEQ ID NO: 8068 - DNA, 609 bp, Cricetulus griseus
  modified_base (601)..(601): a, c, t, g, unknown or other
gtgaaatcttgaggcagttcaccatccaagaaaggcaaaagccaccagaaccagcatgaggcacactttgtggtggagctgtgccagtacttcctgtgccaggagtacctgccctcccagatcaccatcctcaccacctacactgggcagctcttctgcttgcgcaaactcatgcctgccaagacatttgctggcatcaaagtccacgtggtggacaagtaccaaggggaagaaaatgacatcatcctcctctcgctagttcggagcaacccggagggcaaggtgggcttcctccagatccccaaccgcatctgcgtagccttgtcccgggccaagaagggcatgtactgcattggaaacatgcagatgcttgccaaggtgcccttgtggagcaagatcatccacacccttcgagagaacaaccaaataggcccgtcccttcgcctctgttgccagaaccaccctgacacccacaccctggtatccaaagcttccgatttccaaaaagtgccggaaggaggctgcagcctgccctgtgagttccggttggcctgtgggcatgtgtgtacacgttaataaaactagtgactgataaaaaaanaaaaaaaa

SEQ ID NO: 8069 - DNA, 609 bp, Cricetulus griseus
cagacatggccaagtccaagaaccacaccacacacaaccagtccaggaagtggcacagaaatggcatcaagaaacctcgatcacaaagatacgaatctcttaagggggtcgaccccaagtttctgaggaacatgcgctttgccaagaaacacaacaagaaaggcctgaagaagatgcaggcaaacaatgcgaaggccatgagtgcacgcgcagaggccatcaaggaccttgtgaagcccaagttggtgaagcccaagatgccgaagggccccagccgcaaactcagccgccttgctttcattgctcaccccaagcttgggaagcggattagaagctacatggccaagggtcgcaggctctgccaaccaaagcccaaggttcaaaccaaggcagaggcctcggctccagccaaggccccggcttcagctcctgctcaggttcccaaaggtgcccaggcccccaaaggtgcccaggcccctgtgaagaccccatagaaaaggtttcttccagtgtgaagacagatggactggtgtgacacgcctacacgctatctgcaggtgatcatgccctgtgccgtttttacaaataaacttgaagcaagacctagtt

SEQ ID NO: 8070 - DNA, 608 bp, Cricetulus griseus
aacgtgcagccgggtcgcccgggagacaggggaagccgtttcataccctgcggagtcccgggctagcttattgttctgcagtgctttctcagtacattggggaaattatggatcatcacattcccatgcatgcattacctgaagaaatccaaaagatgtctcctgaagaaacagtttgtaaatactgtggtgtcagctatctaattcttcatgaatttaaggctatgaaagaaaaactgaaagcaatggaagaagaaatgaaattgtatcaaggaagtcttgaacgagaaaggagactccaagaaaagctgcagtctcttagccaggagcttgacaagtataaaactgactgtgaatccaaaaatgaaaggttggaatatatgttttctgtctcttatttagtttagaagaaaacagatttgggtggcctggtggtgcatgcctatattgccagcagtcaggaagctgaggctgggggcattgtgagtaaaggccagctgtatggtttttctatatcctctactgtgcctttctttacctttattataaataaacctgttatgtttataacttggtatcttgtagtagatgatatttaaaataaataa

SEQ ID NO: 8071 - DNA, 608 bp, Cricetulus griseus
gcagagctggctgctccaatacacaggactcatcactgtgtatcgttagtcttctcacaccgcctcccacaaaggaccagatcgcaccaccacattttggtcgaagaagactctggtaacaaaggagagctgctctcagaaagacgagccatacagaatgcaagagaagagcattctgaggtgcagtgacaatagtgaggttgtcaaccatgtcattcccaacgggaaatcggaagacagcattaagggactgcagcctgaagacgtcaatctgttggtggcatgcagagaagagggcaacccggtcgcttccctgggccactcagaggcagaaacaccagtagacgcctattccaatgggcaggcagctctcatgggtgggatatcaaaaatagttgctgtgcaaaagttagtagtcttcttcaagaagagaacaattccttttctaataataccctgtgaaattgcttcattcatccctttatttttaagccaaatgtcagcaaaatactgctgcttttatctaaataattttgatatgtaagtattaatgcattttagaagatgtctgcattgagaaatgttttcccagcgtactgcctgtgaaa

SEQ ID NO: 8072 - DNA, 608 bp, Cricetulus griseus
ggccaccgggacagaccaagtggtgggatttggcctcgtcgctgttagcctgatcatcttcacctactacaccacttgggtgattcttttgcccttcattgacagccagcatgtcatccacaaatacttcctgcctcgtgcctacgctgtcctcatcccgctggccacgggcctcctgctgctcctatttgtgggattgtttatcacctatgtgatgctgaagagccgaagactgaccaagaaggctcagtgagggtccagcagggatgaggataccagccttctccatatctcctccagggaagggaccaagtgtcacatcctgatacagtcagcctgactgctgcagtcctctttaggaggtggggctgcttacagctcaactctgacaaactggacgccctctcctctcttattcatccttctggaagccaagaggaacgtgggttgggaaacctctccctcatggcttcgggctcagggcctgaacattgctggttggtcctgtccacctcacagtcaaagctctctgccactcccacaaggttctgctctcttgccttgtttttcctcctgtcatgtgctgatagatgctgcaggcctccccg

SEQ ID NO: 8073 - DNA, 607 bp, Cricetulus griseus
gcgtcccgcaggtcctgcatgcccaatatgggatgtatgtttggccctgtgctgtagtcctggcccaatacctgtggtttcacagaagatctctaccaggcaaagctgtcttagagattggagctggagtgagccttccagggattttggctgccaaatgtggtgctaaagtaatactatccgacaactcagagctgccccactgtttggacatctgcaggcaaagctgccaactgaaccacctgtcccaggtacaggttgtggggctgacgtggggccacatcactaaggacctcctgtctttgccaccacaagacatcattcttgcatctgatgtgttcttcgaaccagaagactttgaaagcattttagccacagtatacttcctgatgcagaggaaccccaaagttcagttttggtctacctaccaggtcagaagtgctgactggtcacttgaaggcttgctctacaagtgggacatgaaatgtgtccacgttcctctgaagtcttttgaggcaaacaaggaaaacatagcagggtctaccctcccaggaagacacactatcgagatgctggtggtctccttgtcgaagaacagcttctgaat

SEQ ID NO: 8074 - DNA, 607 bp, Cricetulus griseus
cctgaaaatcggccggggcggccccgagcctcccttttccggtggcggcgccgcgcggtgaggagctcgcgtggagaagagtcgcagccatgccgtccaagggtccgctgcagtccgtgcaggtcttcggacgcaagaagacggccacggccgtggcgcactgcaaacgcgggaacgggctcatcaaggtgaacggacgccccctggagatgatcgagccgcgcacgctgcagtacaagttactggagcccgttctgctgctgggcaaggagcggtttgctggagtggatatccgggtccgtgtgaagggtggtggtcatgtggcccagatttatgctatccgacagtccatctccaaagccctggtggcttattatcagaagtatgtggacgaggcctccaagaaggagatcaaagatatcctcatccagtatgatcgaaccctgcttgtagctgatcctcgtcgctgtgagtccaagaaattcggaggtcctggcgcccgtgctcgataccagaaatcctaccgatgagcccatctcaaggatcagggttacctttgtaataaacatcccagaagctttaaagttaaaaaaaaaaaaaaaaaaaa

SEQ ID NO: 8075 - DNA, 607 bp, Cricetulus griseus
agggaagaaatccagcctcactgaagacattcaagcaaaaggcgggacagttgcttttccagagcagaaaggaaactcatgcatcagaaaaggtgattaataaatatactgaaagaatatggctgcacagataccagaatctgaccagataaaacagtttaaggagttcctgggaacttacaatagacttacagaaagctgctttttggactgtgttaaagacttcacaacaagagaggtgaaacctgaagaggttacctgttcagaacattgcttacagaaatatttaaaaatgacacagagaatatccatgagatttcaggaatatcatattcagcagaatgaagccctggcagccaaagcaggactcctgggccagccccggtagagaagtccccaggcacagacttgcactgagagattgccagcagctgttgcactggaagtgagggttcacctgggagaacccctgaagcacagccgaagtggtggtggtaaaccatctgttgtaactgcctgaccaatggaaaccactggagaaacaaaatcactcttcaccagaaagaatccaaacagaaggccttgctgttgagtgaaaatggtaaga

SEQ ID NO: 8076 - DNA, 607 bp, Cricetulus griseus
ggagcagcgctcgcgccgcgccatggctgggctgctggggctgcttggcccggcgggaagagtgggcgcccggctacggctccgggcccctgggctcctgggagccaccacctcctgtgcttcagggcactgggccttggccttgtcccgcccagggccggacaccccggctgctgcacacggcccgcagggactgccttagtcgccaggaacccaacagagccactgagccaggaggcagtgtcaacagcacagagaaaaagctaagcaaatcacagcagctgaagaaggtcttccaagaatacggggctgtgggcgtgtcgctgcacattgggatctccctggtctccttggggatatttttacacagtggtttccagtggcgtcgacatgtctgcactcctgcttaagcttggtctttaaagagtcgctggtgcaatccaaaatggcagcaggcaccagcacattcgtggtggcctatgccatccacaagctgtttgcacctgtgaggatcagcgtcaccttggtctctgtgcccttccttgtcaggtacttccgcagagtgggcctctttaaacctccagcttaattaacttttttttttaat

SEQ ID NO: 8077 - DNA, 606 bp, Cricetulus griseus
tgcgtggtcacccacctgactctgcgttctcaagaaagcaacttcctctccactctgaaagagaaaccagctagagctgggtaccagtagaaagaaagcatgggtagagggtgggaggcagcctgtgtcagaggaagacaaaccagccatccaggcccccagaacctcagctcctgcagagtcctgggcagcaccctaggaatggggactcagccttccccagccatggggactctaaaggatcctttcttgtgcccccaaatctcttccaagtcagggttagaggtgggtgggttaggtcatgctggcaatacttgaaacgggtttattaatgctgggtattttgcacaattttatagacctcttttttacatagctttttttaaaatagaagttaacacgttgctatctgtgtagtgccaagtcaagggatttcagaagactaggtgatttaatacatttattacagcagatctagctgtgagtgctgtgtgtgtcccagcccccaggtcaggctcccagctgtgacctgccccaacaggctgaagttaggtgtggtgggttgggtgacaggtctggggagcagctgctcttctgcaagccaca

SEQ ID NO: 8078 - DNA, 606 bp, Cricetulus griseus
caggtgtgacccagttagctgacagtaacagagttccagaaagtagagtgtatcatctagtagtcggaaaagagatttccgaaaaagaaaaccaggagtctgtgttagaagcagtgatggatccgtgcttttctgcaaaaagaaggaaaatgttcctcaaatcgtcagatcaagaagaaacagaagtgaattttacacaaaaactgatagatttggaacacatgctttttgagagacataagcaagaagaacaggacagattgttagcattacagcttcagaaagaggtggacaaagaaccgatgacgctaaaccgacagaaaggatccccaaatcagtaccaattgcgcacatcttcaccaccagacaggctgctgagtaaacagaggaagaattccaaagataggaactccgaaaaagccaaactaattcagaaacatcaaaaatctcggtggcgcacgcctttaatcccagtactcgggaggcagaggcaggcagatctctgtgagtttgaggccagcctggtttccagagcaagtgccaggataggggtccaaagctacacagagaaaccttcgtctacaaaaaaaccaaaaaaaaaaaaaa

SEQ ID NO: 8079 - DNA, 606 bp, Cricetulus griseus
gaagaaacggcggccgggagggggctacgggatcatggggcttctgaccattctgaagaagatgaagcagaaagagcgagagctgcggctgctcatgcttggcttggacaatgctggcaaaaccaccatcctcaagaagttcaatggggaagacgtggacaccatctccccaacactgggcttcaacatcaaaaccctggagcaccggggattcaaactgaacatctgggatgtgggtggccagaagtctctacgctcctactggcggaactactttgagagcacagatggcctcatctgggtagtggacagcgccgaccgccagcgcatgcaggactgtcagcgtgagctgcagagcctgctggtggaggagcgcctggctggagcaaccctcctcatcttcgcaaacaagcaggacctgcctggagcactgtcctctaacgctattcaggaggccctggacctggcctccatccgcagccatcactggcgcatccagggctgcagtgctgtcaccggagaggacctgctgcctggcatcgactggctccttgatgacatttccagtcgtgtctttactgctgactgagcttcttcagtgtcccc

SEQ ID NO: 8080 - DNA, 606 bp, Cricetulus griseus
cactcaggatttctacctcagacaacaacacggccaacactcctcaggattacagtgggaacatgaagtccttcccatccaggagcccttcccagggtgatgaagattctgctctgattctaacacacgacaatttgaaaagctcagatcccgacctgtcagtgaatagtgatcaggagtctggggtggaggatttgagctgccgatctccaagtggtggtgagcatgctcccagcgaagacagtggcaaagacagggactcggacgaagctgtgtttctcactgcctgaggcttccctttggagttccaaagtaaaagacacagaagcacttccaaattaaagggacagtgcaattcataacaaaaaaaatatctcaagaaatggcacgttccatcaagaaccataaaatacagctatgaaaataaaaaataaaaagaatacagtctgtcagtagccagttcttttatcaaatcataatgaagactgttcagcattcctgaggctcatgttagactatgaaaattatagtcaccatcaagaaacaaaccatcatcatctaaggtggtccatacatgtcttccctggcatagcatgtctctactta

SEQ ID NO: 8081 - DNA, 606 bp, Cricetulus griseus
ggatgccgtggagcagcggcagcggcagctcctggacaccatcgccgcctgcgaggagatgctgcggcagctgggccgccggcgtccggagccggctggcggcgggaacggttcagccaagtccggagcgccgccccagccagctgtatccgccagaggtggccttccaaaggatgctggcgatggagctgcggagccttgaccatttcctatccgggcaccctgacttctgtccctttctagggccggtggctggactctgaccaactcccttcactaaaggggccagtcttcagtggcagttgctggtacttggccctcagcctgggatggcatctctactggcagctgggtccactcccacgttgtcctggctgaaggcagtactgttttgaaatgtagccaacgaatatccagtcttgaggactcggattccggcaggccagcagtgctggccagagtggtctggcctgctttgggggttccaggtggtattacatgttcatttcatgctttgggggctctctgccccacaaaacacttaagcagagtcttgattaaaaggaaacctgcagactcctaaaaaaaaaaaaaaaaaaaaaaaaa

SEQ ID NO: 8082 - DNA, 605 bp, Cricetulus griseus
  modified_base (365)..(365): a, c, t, g, unknown or other
  modified_base (595)..(595): a, c, t, g, unknown or other
tccttaaggaaacaccttcctgagtttctttaaaggtttatgggacttgtcttccacatgaaccagggaaacccattcaagctcaaggccctggtggacaagtggcctgactttaatacagtgattgtccgtcctcaagagatggcagatgaccttgatccccataccaacacttaccaactctattctaaggatcctaagaactgtttggaattcctcggcacaccagaggctatcaactggaaacaacatctgcagatccaaagttcacaatccaacctgaatgaagtgataatgagccttgcagctgctaagctggtcaaagtcaagagaacacagtgcattctctacatgatgccccaaanagcaaaaaactggttaccttttctgatggcggatacagagatagagaaaatacatattgtaatgaacgataaaggtgtgggcactgtttgggttctggggaagcagtgtgaatgaccaacagtataccacagtcccccaccctcatactgcctttcagatacagcagatgaagcatggccagacctctccactcagccaccgactttgtttagttcttcacatctgggtnccagtgacac

SEQ ID NO: 8083 - DNA, 605 bp, Cricetulus griseus
  modified_base (449)..(449): a, c, t, g, unknown or other
acacatactggagagaaaccctatgaatgtaatcagtgtggtaaagcctttgctcggcacagtcatcttcaaaggcataaaagaacacatactggagagaaagcctatgagtgtaatcagtgtggtaaagcctttgctcggcacagtcatcttcaaatgcataaaaggacgcatactggagagaaaccctatgaatgtaatcagtgtggtaaagcctttgcttggcacagtcatcttcaaaggcataaaagatcacatactggggagaaaccctatgaatgtaattagtgtggtaaagtcttttctcaccacagaagtcttcaaatacataaaatgacacataatggatagataccataggaaagtaatcagtgtggtgaatctttttcacagcacagtaaaagaacacatactggagagaaaccttatgaatgcaatcagtgtgtaancttctgcacgctagtcttcaaatgcaacaaaaggacacatactggagagaaaccttatgattgtaatcagtgtggtaaacctttctcatcacagtactcttcaaagtgcataaaagaacacatactggaaaatcatactgcagagaaaacctataa

SEQ ID NO: 8084 - DNA, 605 bp, Cricetulus griseus
cagtgtggtaaagcctttgcacataagagttatctccgaatgcataaaagaatacattctggagagaaaccttatgaatgcagtgaatgtggtaaaacctttgcatatcatagttatctccgaatacataaaagaacgcatactggagagaaaccctacgaatgtaatcaatgtggtaaagcctttgcacgtcacactagtctccaaatacataaaaaaacacatactggggagaaaccatatgcatgtaatcagtgtgataaaacctttgcacatcacaattatctccgaatacatgaaagaacacatactggagagaaaccctatgaatgtactcaatgtggtaaaacctttgcacatcacagtagccttcaaatacataaaagaacacatgcgacaggaaaccctgtgaatacaagcactgtggttaaacctttgcatgtaacagtagtcttcgaatacataaaagaacacatactggagagaaaccctatgaatgtaagcaatgtggtaaagcctttgcatgtaacagtaatcttcagatgcataaaagaacacataatggagagaaaccctatgaatgtaatcaatgtggtaaagccttt

SEQ ID NO: 8085 - DNA, 605 bp, Cricetulus griseus
gtgcagatgaagcggagaatcttagattgtggtaactctttctgcaattctgaggaccctacaacctttaaattttaaggctccctttcaaaacttcagggaaaaactggaaaggttgtgagggctcaaaagcaccttggccatggtggccttttctgggtgtcaaaaaaagcgccttactttcttgtaaaggtacaaatgttagagagccaagaagattgtccagactatgggctgggtgaggctccttttctggagaaacatgcacccataacaagagaaaaaaggtaactttccttgaagaagtcaccgagtattatataagtggtgatgaggatcgaaagggaccatgggaagaatttgcaagggatggatgcaggttccagaaacggattcaagaaacagaagatgccattggctactgcttgacatttgagcacagggaacgaatgttcaatagactgcaggaacatgtttcagaagacacactattgctcatcaatgttaagactagtgaacagtctgcagccctggcccacacactctcttgcttgagtaggtttcctaatctgtaaattgtaataaatatatttgcaattactaaa

SEQ ID NO: 8086 - DNA, 604 bp, Cricetulus griseus
  modified_base (599)..(599): a, c, t, g, unknown or other
gcctgccaatatggcggtgtgcatcgcggtgatcgccaaggagaattatcctttgtacatccgaagcactcccacagagaatgagctcaagttccactacatggtgcacacgtccctggatgtggtagatgagaagatctctgccatgggaaaagcactggtggaccagagggagctgtacctgggcctactctacccaactgaggactacaaggtatacggctatgtgaccaattccaaggtgaaatttgtcatggtggtggattcctccaatacagcccttcgagacaatgagatccgcagtatgttccggaagctgcataactcctacacagatgtgatgtgtaaccccttctacaacccgggagaccgcatccagtcaagggcctttgagaacatggtaacttcgatgatgatccaggtctgctgagctggacctctcccctagtcacctggaagagagaagcctgtattcacccctgtttgatgattatttattctctttcctctccttgaatgtaaaccgtgggcagggctgtgtgccctgtgcctttctactaaagcgctcacacgatgagaaaaaaaaaaaaaaaaaaaanaaaaa

SEQ ID NO: 8087 - DNA, 604 bp, Cricetulus griseus
gtcctcgcccgggacctcggagcccggggactacgacagcgcctgcgtgttctgccgcatcgcggcgggaaggaacccgacacggagctcttgcactgcgagaatgaagacctaatttgcttcaaagatatcaaaccagcggcacttcatcattatcttgtggtgccaaagaagcatattagaaattgcaaggagctaaacagagatcacatagaaatggttgagagcatggtagctgttggaaaagccattcttgagagaaataatttcactgactttacagatgtgagaatgggtttccatatgccaccattctgttcgatttctcatctacaccttcatgtcatagcaccagtcaaacagtttggcttcttatcaaagttgatttacagaccagattcttactggtttgtcacagttgattattggcttgaaaagttaagaaaataaaaatgtgaaccatggaaaagttccttaacctgactcaggatgagctattattttgctcactttgaagtttgattgcagtctgaaggttttctgggtatacacaacactaccactgagtagccttacattattacatttcagatctattttctga

SEQ ID NO: 8088 - DNA, 604 bp, Cricetulus griseus
  modified_base (21)..(21): a, c, t, g, unknown or other
  modified_base (27)..(27): a, c, t, g, unknown or other
  modified_base (593)..(593): a, c, t, g, unknown or other
cttttttttttctttttcttntatttntttgaggaaaacgaggagtcgggcatcgtagactttgtggaggtgacagttggagaagaggatgccatctcagagaaatgggacagctggagtcagagagtagcggaaggcacagcgggacagggcccgactccgactccgacagcgcccccgcggaggccggccatgcctagacagggcacttggtctgaacttctgcactgacaaagaggaagctctgtctttgaagaaagaagaaagccccgccccagcggctgccccgcctcttgctatactggaaccgatttatacaatgtgggaattttgttaccttttttagtcgagggcaactcccttttcagcacttccgagcggtaaggtgtttgctttttttcattattattatttttttccctcccccaggaaggagggctaaccacatagctatttatcgtctttttcttcttttcactttattgatgagggggagggaatatttagtgctagtgccacagtatctactggattttaggttaggaagaatttctttttcttttttaaggtagtttgacatacttttttttttnttttagttagt

SEQ ID NO: 8089 - DNA, 603 bp, Cricetulus griseus
aaatctgactcttccattgaacaaagagttggtagaaaaagtaacaaatgaatataatgaatcattgctctacagtcccgaagaaccaaaaatacttttcagtattcgagagccaatagcaaacagagttttctcaagcagccgtcaacgttgtttctcatcaaaagtttgtgtccgttctcgatgttgggatgcctgcatggttgtggatggaggaacttcttttgaatttaacgatggagcaattgcttcaatgatgatcaataaagaagatgagcttcgaactgtgattctagaacagtgaaggatttcctcagtagtttaactttttttttttttttaaatgaatatatttaggattgatttaccacagatctattaatatgtactactagctagtaactagctgtgtgaattgttcataagctacatttggaaaagtattaaaattactgactacgtttgcagtctaacttctgctctgttgcaggaagggtttatttgtaatagatgaatggcaaaggatgttggagtatcagaactgtcttcttaatgggttaacctttaatgaccactgtatgcaaataaaattaaaccattgtc

SEQ ID NO: 8090 - DNA, 603 bp, Cricetulus griseus
agccggcaacatggcggcggtcggagcgggccgtctgaggagggcggcttccgcgctgctgctccggagcccgcgactgcccgcccgggagctgtcggccccagcccggctctatcacaaaaaggttgtagatcattatgagaatcctaggaatgtggggtcccttgacaaaacatccaaaaacgtcgggaccggattggtgggtgcgccggcgtgtggtgacgtcatgaaactgcagatccaggtggatgagaaggggaagattgtggatgccagatttaaaacatttggctgcggctccgccatcgcctccagctccctagccacggagtgggtaaagggaaagacggtggaagaagctttgaccatcaaaaacacggacatcgccaaggagctctgcctcccgcccgtgaaactgcactgctccatgctggcagaagacgccatcaaagctgccctagccgattacaaactgaaacaagaacccaagaagggagagccagagaagcagtgagccctggagaagctccagcgggtcacagctgcctcctgccaccctgcaccacatcaacgctacgagaaacgcacactgttcaccattgc

SEQ ID NO: 8091 - DNA, 602 bp, Cricetulus griseus
cctgaggaagaaaggcagccgggccatgttctgcctgccagtttggagtccgacagtttgaagaagaacagttgggggttcttgtttactgggatcattggtgggacactggtgacattgtatgctgtggctacgccatttatcacaccagccctccggaaagtgtgtttgccatttgtgcctgcaacttccaagcagattgaaaatgtcgtgaagatgttgcgacacagaagaggctccctggtggacattggcagtggcgatggacgcattgtgatcgcagctgcaaaggaagggttcccagctgtgggctatgaactgaacccctggctggtttggtattccagataccgtgcctggaaggaaggtgtgcatggctctgccaagttttatgtctcagatctgtggaaggtcaccttcacacagtactccaatgttgtcatttttggtgtgccccagatgatgccacagctggagaagaaacttgagcaggaacttgaggatgatgctagagttatcgcctgccggttcccttttccacactggaccccagaccacattactggagaggggattgacaccgtatgggcgtatgacatgag

SEQ ID NO: 8092 - DNA, 602 bp, Cricetulus griseus
atcgccatgcctgccgacatcagccagtggtccgggccgctgagcctgcaggaggtggacgagcgtccccagcacgcgctgcgggtcgcctacgccggggtggaggtggacgagctgggcaaagtgctgacgcccacccaggttaagaataggcccagcagcatttcatgggatggtcttgacccagggaaactctacaccctggtcctcacagaccctgacgctcccagcaggaaggaccccaaattcagggagtggcaccattttctggtggtcaacatgaagggcaatgacattagcagtggcaaggttctctcagattacgtgggctctgggcctcccagtggcacaggcctccaccgctacgtctggctggtgtatgagcaggacaaaccactgaactgtgatgaacccatcctcagcaacaggtcaggagatcaccgtggcaagttcaaagtggcagccttccgcaagaagtatcacctgggagcccccgtggcgggcacctgttaccaggcagagtgggacgactatgtgcccaagctgtatgagcagctctccgggaagtagggggctaggatagaagtttagggtgatttccc

SEQ ID NO: 8093 - DNA, 601 bp, Cricetulus griseus
acatagggcgtattaagcaacatgtttcttcgcaatgtccagttgcaatagcaaaagagcagagctggctcagtctgacttcctgaaacgaaggaagactctactggactcgcttctactccaagagaaaatcgacgaacaccttcatactacagaccttctcacccgagttggagaagcacatcgtggcctcccaaggctttcagatgatcccaggatcatctgggagagactgacagggaaaattcagacgggaagctctggctttggaaaggcagattcaaagcaggtgtaacttgactgtacaagtactcaaccacttctcaacccacttatccaaccagataggaggctctgactgctaatgaaggtatataatgtgtcctggcaggggatggtgactattaatgattaatattaacaatgtgatgttcatacatgttcccttttcgtatttgagtaattgccatcttttacagaggtaaatttcgaaaccaatgtaaggggaatatatatatatatatatatatatatatatatatatatatatatatgtatgtatgtgtgtgtgtgtgtgcttctctaaataaaaaaaaaaaaa

SEQ ID NO: 8094 - DNA, 601 bp, Cricetulus griseus
agatctgaccctgcgagatcctctgccctcggccgcgatgaccagcctaccagctacaccttctcctggagaactgatgaccacaccagttcttcaggtccaggagaccctgtccccacaagctgaagaggccagcacagcactcattgcagtcgttatcaccgtggtgttcctcaccctgctctctgtggtgaccttgatcttcttttacctgtacaagaacaaaggcagctacgtcacctatgagcctgcagaaggcgagcccagcaccatcctccagatggagagtgactcagccaagggcagagagaaggaagagtacttcatctaatgatccccagactggaggggccaattcttggctccagtgctaacatattgactctgtaattagggaacgtttgctctgaagccagtgagtggcattgagtgagatggcaaatccactcacatcccaggacacagtccccaaataccagcatcagcgactccagggtccagggacacagagaaagccgcttatgacacctatagccgggccttggtaaggacagtgctcacacctggccaacaacatggggccgtgcctgagttggaagtg

SEQ ID NO: 8095 - DNA, 601 bp, Cricetulus griseus
gagccgaggcggtggtccacacccgcccggggaggaagatgtcaaacgtacgagtatctaacgggagcccgagcctggagaggatggacgccagacaagcggacgcaccccaacgccctccgcctgcagaaacctcttcggcccggtcaatcacgaagagctcacccgggacttggagaagcactgccgagatatggaagaagcgagtcagcgcaagtggaatttcgactttcagaatcacaagcccctggaaggcagataccagtggcaggaggtggacaagggcagcttgccggagttctactacagacccccgcgcccccccaacggcgcctcgcaaggtgccggcgcaggagagccaggatgtcagcgggagccgccaggcggtgccttcaattgggtcccaggcaaactctgaggaccggcatttggtggagcaaatgcctgatccgacggacagtccagcggggttagcggagcagtgcccagggatgaggaagcgacctgctgcagacgattcttcttcgcaaaacaaaagggccaacagaacagaaggaaccaaactgagtgggggtggttaacttttttttttagttggaat

SEQ ID NO: 8096 - DNA, 601 bp, Cricetulus griseus
ggttaaacctgatcaagatgacaacctcccaaaagcaccgtgacttcgtggcagagcccatgggggaaaagccagtggggagcctggccgggattggtgaagtcctgggcaagaagctggaggaaaggggctttgacaaggcttatgtggtccttggccagtttctggtgctaaagaaagatgaagacctcttcagagaatggctgaaggacacgtgtggtgccaatgccaagcagtcccgggactgttttgggtgccttcgagaatggtgtgatgccttcttgtaatgtactctggggactcctcagccccccagccacaatattgagtctccagagtctgaagccgggtggggctcctccctgtcctccgtgaagggaaagattactgttgtcacactcacctcctatgtactccagggtcttttgggagttctctcccctcagcgtttcaacctttttaggattcttgcccttgcatgcctttctcctctccccctgcagttccatggcaacagttaactttccccaatggattcctagcccttttctccctccattcacgatctgttggatgtcctttggcttcttttttttttttg

SEQ ID NO: 8097 - DNA, 601 bp, Cricetulus griseus
agacacaagcgagctcgcactcgctgcggtatttctccaccatcgtctcccggcccggcctcggggagccccggttcatctatgtcggctacgtggacgacaggcagatcgtgcgctacgacagcgacgccgagaatccgaggatggagccgcgggcgccgtggatggagcgggaggggccggggtattgggaaaggtgatgcaccctgaggtgctgggccctgggcttctacccctgatgtcatcacccctggcagagggaggaggaagaacagactcaggacatggagctggtggagaccagacccttctgggggatggaaccttccagaagtgggcatctctggtggtgcccttctgggggaggagcatgaggggctgcctgagcccctcaccctgagatgggagcctcctcctcagtccactgtcccatcatggcagtcattgctgctctggttctccttggagctgtgatcattggagctgtggtgttttttgtgaggaagaggagaaactcaggtggaaaaggagggaactatgctccagctccaggcagggacagttcccagagctcagatgtgtctctctcagtattgtaaag

SEQ ID NO: 8098 - DNA, 601 bp, Cricetulus griseus
tttcagcatggcggccggcgctgctgctgctctagccttcttgaatcaagagagccgagcccgggccgggggtgtgggcggcctgcgggtcccggctcccgtcacgatggacagtttcttcttcggttgtgagctctccggccacacccgctccttcactttcaaggttgaggaagaggaggacacggaacacatgctggcgttgaacatgctgtgccttaccgagggggccaaggaagagtgtaatgtggtggaagttgtggcccgggatcatgacaaccaggagattgcagttcctgtggccaacctgaggttatcttgccagcccatgctcagtctggatgatttccagctccaaccacctgtaaccttccgcctgaagtcgggttctgggcctgtgcgcatcactggccggcatcggattgtttgtataaacaatgatctttctgaagaaagtgaggatgatgagagtgaagagggggaagtcaagctgtgtggcatccttcctgccagaaagcacagggacaggccctagccctctccggttagccgcttgctacaggcatcatgcaccgtatgttcctggacaagtttcaagaat

SEQ ID NO: 8099 - DNA, 601 bp, Cricetulus griseus
catcaactcctggcccttcctactggggaagatccgggggatcatcaatgaactccagggcaaggccctcaaggtgtttgaggcggagcagtttggatgtccgcagcgtgcccaaaggatgaacacagccttcacacccttcctgcaccagagaaacggcaacgctgcccgctctctgacctccttgaccagtgacgacaacctgtgggcgtgtctgcacacttcctttgcctggctcctgaaggcatgtggtagccggctcactgaaaagctgttggagggtgcacccacagaggacaccctggtccagatggagaagcttgctgacttagaggaagagtcagaaagttgggacaattctgaggccgaagaggaggagaaagctgctgctgtgccagagggtgcggaagggcagttgttgtggaggttcacacagccacacgctcaaacctccatccggcaggatgtgaggacgacctgtccctcagcaagtacgagtttgtggtgaccagtgggagccctgtggctgcagacagagttgggcccactatcctaaataagattgaagcagctctgaccaaccagaacctgtcagtggatg

SEQ ID NO: 8100 - DNA, 601 bp, Cricetulus griseus
ttcaggtttgtttgtttgtccaccctgagttttagcagggagatttgttgtagtttctcctcagacaggcccctcccatgcccactgtcttaagggaacacctgggcttccaggagccagggccaacttcttggtcctcctactacagtggtacttgggtcttgaggagggtatccagtttgcttgaatgttaattgcacttaggccttgtaattctagttaagtgcagggcccagccaagggtgttgtagagagtttgcttacgctagccggcatcagatgttgcgtagcgctagcacatctgaagcttttggggttgattagaatcagtttcttggtttctgtcattgtgcccagaggcaccacctcacctacgtgccctattctcccacaaggcccattagggaccatagtgaccacaagtctggccagcctctggctactgggagagatgaagtcttgtgagtgttgtttgtttggagggtgcccgggaagtgggggtcgtggggtccctgagctggggactccgtgtgggtcacctacctcctggtttccacccaaagtcctgccttgaatgccagcgagtttccttctgttgtga

SEQ ID NO: 8101 - DNA, 600 bp, Cricetulus griseus
gacttagaaaggtacagtggtaatctttgtcatggctcagttgacaactgcattccattgaaaagctggcccctgtaagatacgatcctcatttcctatctcatgttttcgtgccttttaaggagatatttttattgttttgtgttacagaactataatatggtgttcaaagtgtttgtaggcttatttgtcataaaaagggtcatttctctgtcactttatttccttttatatagctgaagaatatgtaaacagtaatgttgtacttttataaaggtttgtctagttacctacttcaaatatattcttactcagacatcattgaagtaaacttgtcagatattctgagtattgtaaacagtagcctttttgatggaattcactacggttttgggtgtcaactcgtgccatattcacagttcctttttttttgttttgttttgttttgttgtgtttttcaagacagggtttctctgtgtagctttggagcctgtcctggaactcattctatagaccaggctggccttgaactcacagagatccgcctgcctctgcctcccgagtgctgggattaaaggtgagggccaccacctcccggct

SEQ ID NO: 8102 - DNA, 600 bp, Cricetulus griseus
tacgacggcgacgattacatcgccctgaacgaggacctgaggacgtggactgcggcggacacggcggcgcagatcacccggcgcaagttggagcaggctggtgctgcagacagacagagggcctacctggagggcacgtgcgtggagtggctcggcagatacctggagcacgggaaggaccagctgctgcgcacagatcccccaaaggcacatgtgacccatcatcctggacctaaaggtgatgtcaccctgaggtgctgggccctgggcttctaccctgctgacatcaccctgacctggcagagggaggaggaagaacagactcaggacatggagctggtggagaccagaccttctggggatggaaccttccagaagtgggcagctgtggtggtgccttctggggaggagcagaaatacacatgccatgtgcaccatgaggggctgcctgagcccctcaccctgagatgggagcctcctccagtccactgtccccatcatggcagtcattgctgctctgggtctcattggagctgtgaccatcattggagctgtggtgttctttgtgaggaagaggagaaactcaggtggaaaaggagg

SEQ ID NO: 8103 - DNA, 599 bp, Cricetulus griseus
gagcagcatacagtctgctgtgcccaaggctggagctggagctgtggtacccaagccctcccatctccccagaaaccgggccgagtatgtggttgccaagctggatgacctcatcaactgggcacgccggagctccttgtggcctatgaccttcggcttggcgtgctgtgctgtggagatgatgcacatggctgctccgcgctacgacatggaccgctttggtgtggtgttccgtgccagcccacgtcaggccgatgtgatgattgtagctggcacgcttaccaacaagatggcccctgcactccgcaaggtgtatgaccagatgcctgaacctcgctatgtggtttccatggggagttgtgccaacggtggtggctactatcactactcctactcagtagtgcgaggctgcgaccgcattgtgccagtggacatctatgtaccaggctgtccacccacggccgaggcgctactctatggcatcttacagctgcaacggaagatcaagcgtgagcagaagttgaagatctggtaccgcaggtagagctgccgggccaaacaccacagccccagaatcccaatgtgaataaacccatcct

SEQ ID NO: 8104 - DNA, 599 bp, Cricetulus griseus
gggatcattggggtttacattggtcctagtggacgcggctgtgggcatcatgcagctgaccgtgaaggcgctccagggccgggagtgcagcctacaggtgccggaggacgagctagtgtctacactgaagcatctggtctcggataagctgaacgtccctgtgcgccagcaacgtctgctgttcaagggcaaggccctaacagatgagaaacgactgtcagattacaacattgggcccaattctaaactcaacctagtcgttaaacctttggagaaggtgctgctggaagaagggtctgcccacagactggtcgactccccacccccacccctctggcagctgatctccaaagtcctggcccgtcacttcagtgtagcagataccagcagggtcctggaacaactacagagggattatgacagatctctgagccgcctaacactggatgacattgaacgtttggccagccgctttctacaccctgaagtaactgagtctatggaaaaagggttctccaaatagcatttctgggagtggggggagaaatcccaggtcaggccacagctgcatgttgcattaaatgtgttctcatgtcgca

SEQ ID NO: 8105 - DNA, 599 bp, Cricetulus griseus
ggactcaaaattgatatttgcaaccatcaaggtgccacccccttagttctggcaaagcgccggggcgtgaataaagatgtcatccgattgctggagtctttggaggagcaggaggtgaaaggctttaacagaggcacgcactcgaagctggagaccatgcagacggcggagagcgaaagcgccatggagagccactccctgctcaatcccaacctccagcaaggagaaggagtcctgtccagcttccggaccacgtggcaggagtttgtggaggacctgggcttctggagggtcttgctcttgatcttggtcattgctttgctatctctgggcatcgcctactatgtgagcggggtgttgcccttcgtggacaaccagcctgagctggtgcattgagggctcatggcgataaggcaaggaagggcctgtcagtattgcttttcggttcttagactgtctcttagcgcagagcagcaagggctgctttcgttttggatttttacttgccgtgaccctttgagaagaatgatgtgttcctttgaacttcgtcctgtggttggttatactgcgtccggatgctgcctctgatgcagcctgtg

SEQ ID NO: 8106 - DNA, 599 bp, Cricetulus griseus
acaatggagctctccgagtatgtgcagagaggcttccagaggctggcggatcccggctcctttgactccaacgccttcgcgcttctcctccgggcggctttccagagcctgctggacgcccgggcggacgaggccgcgctagatcaccctggcttgaaacatatcgacccagtggttttaaagcattgtcatgcagcagctgcaacttacatcctggaggcaggaaagcaccgagttgacagatctactctaaagcacctacctagaagactgtaaaatttgaccaagatcggatagaaatattttgtacagagtatcagaataataagaattctcttgaaatcctactgggaagtataggcagatctctccctcatataactgatgtgtcttggcgcttggaatatcagataaagactaatcaacttcataagatgtaccaacctggatatttggtgaccttaaatgtagagaacagtgattcccagtcctacccagagattagttttagctgcaacatggaacagttacaggacttggtgggaaaacttaaggatgcctcaaaaagcctggaaagagcaactcagttgtaacttggg

SEQ ID NO: 8107 - DNA, 598 bp, Cricetulus griseus
ccttttcctctttacttttaatgctattttaaaatgtcgtaactaaaatgtttaggtagtgtctatattctgaatactttctcatactttagtatattgaatttgtactgtgaattttttttttttttttgttctatgtgcctaagtgaaagaaactgttgagtgtattatgaaatgatcaatacttcaattggaaaaatcttttcacctctagggaagtttcatctttgtatattgataaaatggtgaccagttttaagtttctaaactaaagaggcttactcaatgagtctagagtgatgctaattcattgacacttactgtgagcatgtttctcattctgtggcttagagtaatttatgatttaatgtctttgttataaaggaagatctataagttagatggaaattctcaaagtatgcatctatttcatgtgattaatgtcacaaaatcatggggtaatttgaattgttatttcagtgttgcttttgtaaatttaaaaatttcatattttgtaaaggtttttttttcttactgttgtaaacttcagttagatcaccgcaactaaactattatttatccctgtataatattattt

SEQ ID NO: 8108 - DNA, 598 bp, Cricetulus griseus
ttctgagcagatcctactctcctcgttcgtgcgcctcgctcgctctttccggcaaccatgtctgacaaacccgatatggctgagatcgagaaattcgataagtcgaaattgaagaagacagaaacgcaagagaaaaatcctctgccttcaaaagaaacgattgaacaggagaagcaagctggcgaatcgtaatgaggcgagcgccgccaatatgcactgtacattccacaagcattgccttcttattttacttcttttagctgtttaactttgtaagatgcaaagaggttggatcaagtttaaatgactgtgctgcccctttcacatcaaagaatcagaactactgaccaggaaggcctcccctgcctctcccacccatctgtcggtctggctggcagggagggaaagaacttgcatgttggtgaaagaaaaagctgggtgggaggtggtgaaatacagaaaaaaattcaagatggtccaaggtgtcctgcaggatgtaaaatgcagtttgatcagagtgccatttttttttgttcaaatgattttaattattggaatgcacaattttttaatatgcaaataaaagttttaaaacctg

SEQ ID NO: 8109 - DNA, 598 bp, Cricetulus griseus
tacgttgtaccagagagtatttttcccctgggcttggcaaccttttttcccttcttgatatttatcacctctgatggctgaagaatgtagacagtataatgatcctgctgtcgccaaaatctatacaccaaggtgaacaggtgtttgccttatcagttttaaagttttactttcagttataggtgaattagctttttctcagatgttaaaactttgaatgtccttttaatgattttgtttatattacagtagtatttatttttagtggtaagacttgtattgtcatgttagcaaacgcagctccaactcacaggacattgactgcggtttcttttgaaccaatgtgcaaggaatgtcaaaacaaaacacctctagcttttctttttctgtacatactcatgtctcccaatcccaaacatttctcactgagaggggacatgtatgcaaacctcatctttctccttcattaatgatgatcttcagattaaaccctttggtgctaggagctgacattttccaaagcagactatgaagtgcaaggatcaaagcctttcttgcaacaagcaggagggcatctgctccaaggagtggtcatgga

SEQ ID NO: 8110 - DNA, 598 bp, Cricetulus griseus
cggccggggagcccggagcccttgtccgcgaggtgcatagcctctccgaatacttcagtctactcactcgcgcgcgcagagacgcggatccaccgcccggggtcgcttcccgccccgctgatggccaccccgcgtccccccggccgaggtcctgtctcccagtgacgtcttcatcgcggtcaagactaccagaaagtttcaccgcgcgcgtctcgacctgttgttcgagacctggatctcgcgccataaggagatgacattcatcttcactgatggggaggacggagctctggccaagctcacaggcaatgtggtactcaccaactgttctgcggcccatagccgccaggctctgtcctgcaagatggctgtggagtatgaccatttcattgaatctgggaagaagtggttctgccatgtggatgatgacaacttacgtcaacctcagggcgctgctgcggctgctagccagctaatccccacacccaagacgttttacatcgggcaaaccccagtctggaccggcccatccaggccacagaacggatcagcgagcacaaggtgcgacctgtccactttgcagcaaaaaaaaaaaaaa

SEQ ID NO: 8111 - DNA, 597 bp, Cricetulus griseus
gctggtggggcacggaggatgcgcttctgcagaagctggcggagtcgatgctccaagaacactgtgcgtctgagctgagggtccacttggccaattccctcccctttgccctccactgtgaaccggccccgaattgacctgattgtgtttgtaattaaccttcacagcaaatacagcctccggaaggtggaggagtgtctgagccacgtggacagcagcttcttcctggggaaagtatgtttcctcgccacaggggctggacgggagagccactgcagcattcaccagaacacagttataaaactggcccgtacctaccgaagccctttgctcttctgtgacttagaggtgggaagctttcgagccaccatggcacaacgcctggtacgcatgctgcagatctgtgctggtcacgtgccaggtatctcagcggtgaacctgctgtccttgctgaggtgctccgacagtaccccatccaaggagctgtgagcgacgctgccctccccacatttggctcaggctccagaagcagtcactgttggtgaaaaccagtcagggcctgacaggccctggaggcagcctccacactacaggact

SEQ ID NO: 8112 - DNA, 597 bp, Cricetulus griseus
tggctgccatctactacaagctttattccctctttgaaggtatggctggtgctgttcactttctctctgatatcttggtaccagagacgtcacggtttccagcatttgaacttggctttttgcagaaagattaaaaaggtgcaaaaggacaactaacatacccattggaccaaaagccacctgactgattagtgcctgacacagaacttactgaaaatcctaaaagaggaagaaaaataaaagggcaaaaatctccacaagccccttttgttgcaaagacccccaaattagagcatgagtgatagaaactacatcatcagcattttgtgacagcgtttcccttaacggtgaaataagaactcttcatatctaggctccccgtagtgtgcatgtttcttggtgcttgtctataggtgtaaactgactaaatagaaaagccacactttcacttgaactcttagctgagcatgtgtgactgtttaaggcgacagccccacatttttgatatagtatctaaagtagagtgtcatctctatcaacagagaaacagttgtattacatgtctgaaacatcagctagcaaatctagataccctgt

SEQ ID NO: 8113 - DNA, 597 bp, Cricetulus griseus
gaatctgaagaacggaagtggcaaggacagtctcatgcttgcttgttatgcggggcacctagatgttgtgaaatacctccgaagacatggagcttcttgggatgctagagaccttggaggctgctcagctctgcactgggctgcagatggaggccactgccctgtgattgattggatgataaaggatggctgtgaggtggatgttgtagacactggttccggatggacaccactcatgagagtctactgctatgacaggagccagaaggtagaatgtaatctccttactagaagaaaggaaaaaaagctgccaaggaagtcctctgtccactgactgaagcaccacccgtctgagagaccaaccgaatgaaatcgaaaaccctgactggtgggctggacatgtgacatgcggtgtctctgaggccaagacgtttattatttagttgaagattcacagtgacttttatgtaacaggcaactcttcccacattgaaatacatagaaaaaccaaaaaaaaaaaaaaaaaaaaaaaaaaaaaaaaaaaaaaaaaaaaaaaaaaaaaaaaaaaaaaaaaaaaaaaaaaaaaaaaaaaaaaaa

SEQ ID NO: 8114 - DNA, 596 bp, Cricetulus griseus
atgtacgtggtgggggtcatcacaggctacaccaggcttcggaagaaggcttttgccaaccccgaggacgccctgagacatggaggcctccagtactacaggagtgatcccaacgtggagcgctgcctcagagcccaccgcaacgacatggagactatctaccccttcctcttcctgggcttcgtctactccttcctgggacctgaacctttgatcgcctggatacatttccttgttgtcctcacgagccgtgtggtacacacggtggcctacctgggcaagatgaacccgagagtccgctctggagcctatgtcctggcccagttcgcctgtgtctccatggctctgcagatcctctgggaagtggcccaccatctgtgatgagtggctgaagcctcttcagctattacattgtcgacagaagccatcgaggctgaacctggggacttggtgtcccttctagaacagggatggactctggtcctgggcctcctaagtgctgggatggcagacatgcaccccaccatgatgataatggactaaacctttgaaactgtaagccagacccaattaaatgttttcctttataaaaaaaa

SEQ ID NO: 8115 - DNA, 596 bp, Cricetulus griseus
gccaagatggcggtcgcggcgttgcgagcagctgtgcgggacgcggggcgctgcgtccgatggagctacgggccgcggcagctgagccaaacccaggggtctcatgaaaaccccagctttctggagtctgaggatgaataccaatttgtggagcgcctgtttccccctaccaaaatcccacagccaccaaagcatgaacattatcccactcccagtggctggcagcctcccagagatccccctcctagcttgccctactttgttcgtcgatcccggatgcataatatccctgtctacaaggacatcacacatggcaaccgacagatgactgtgatccggaaggtagaaggggacatctgggctctacagaaggatgtggaagaatttctgagcccacagctgggaaagacacctgtcacccaggttaatgaggtgacaggtactcttcgaatcaagggctactttgatgagcagcttaaagcctggcttcttgagaaaggcttctgaggcctgatgatcagcctctgtggcagtgccctctacaaactggcgtccagagaggaagtggatttggagtctccggaatgggattcaaa

SEQ ID NO: 8116 - DNA, 595 bp, Cricetulus griseus
  modified_base (545)..(545): a, c, t, g, unknown or other
ggcgggcggcgcgggcgaggttgtgcttggcctgtccgagcagagcgtagccatctcgcgctgcgccgggacgcgccttcccgccctgctggacgagcagcaggtgaacgtcctgctctacgacatgaacggctgctactcccgcctcaaggaactggtgcccaccttgcctcagaaccgcaaagtgagcaaggtggagatcctgcagcacgttatcgactacatcagggacctgcagctggagctgaactcggaatccgaagtcgggacagctggaggccgggggctgccggttcgggctccgctcagcaccctgaatggcgagatcagtgccttggcggccgaggcagcatgcgttccagccgacgatcgcatcttgtgtcgctgaagcggcgcactgaggaccagatggactccagcccttcaggaggcaagaggaataaagtgctcgcggttccccgggagagcccgggaaagactcttgtcgcggccaccttggatctggtcacggggctcagaggcttgaccagcagaggctcgccctntccacctttcagcccccagagacttggggaggggtagttaaccaaccccg

SEQ ID NO: 8117 - DNA, 595 bp, Cricetulus griseus
gtcttgaggacaagctggtgttccttaaactcttctgctagcttactttgctttttaaagtgacttgggtgggtgggcacaaaacctggggacagtatagacactacgatgaattcaagctgcattctgtcataaaaccacaggcaggcacctcttccccgtgacgctgctatgtcttatttattcagggtgtttctaccacaaagtctttggcttgtcttctctggatctcctttcaagattggtttctgaatattccagaaattcctcttctactcctcggggtgggtctctccctttcaggccaggtgccaagtagaagggtctgcctttggcacttgtgtgattgagcgctcagaatgcgtggctgcagtcatcaagatgtgtcatagtcagcttgtgaggtgcccaggcctgtacttcaggtcacgggagttgttgctcatggtggacagtgggactggattgtaagaaaaatgttatttaatctttgtttcctattttgatacttgaatgacccccttttgttttactgtacataaagttgttagcctgtctgattttctttgaattataaacaccttgtggtaccaaa

SEQ ID NO: 8118 - DNA, 595 bp, Cricetulus griseus
gttggagctgaacctggaggatgaggaaggctgggctcctggggctattttggatgttccttgtctcagaagtccaagctgccgttgatcccgctgaagaaaggtatgacctggttgagggacagaccttgacagtgggctgtcccttcaacatcatgaagtacgccaggagccggaaggcttggcagaagctgcaggatggaaaggagcctttgacactggtggtcacagagaggtcgcctacaaatcccagtgaagtccgcatggggaagtacacactgaaagatgaccctgatgaggccatgttacatgtccaaatgactgaccttcgggtgacagactctgggttgtatcgctgtgtcatttaccatcctcccaactgaccctgttctgctcttccatcccgtccgcctggtggtgaccaaggattcctcaagtctgctcacctctgacatcattcctactacaagaaccactgaagatcctggcctttttaccacaaaatatatgcgcagagacatgactgtgacccaacccttacctaagtccacaactgttgtctcttctcctgaccctggagtcaccttcacaaatg

SEQ ID NO: 8119 - DNA, 595 bp, Cricetulus griseus
  modified_base (588)..(588): a, c, t, g, unknown or other
cgggcttgggctctgcctagggttcaggttctggctccggctcaggaagtggcttcctagttgacatggaatgggaataccagccagcaggtgaaagcgatggtgtcttcttcaactataggccttttgagaggatgctccacgagaacaaccaagagcaaccagaagattttattatatgaaaatggccatttctgtttccccatctcaacacagaacaatgtattcagtatacttttgtaccacacttagatggtgagtcttgggataaagagttttatagaaaattttaaatgcctggaaaagactcttaagtcctgttaccctttcctcatgaattcttaaggaattacactttaatgctgttattgttctagttaaaaaaatatgcagcattaatatgcatgttggatcaacatgagaagaaataacacacacaccccaccatcattactacaacaacttttaaaagtcatgctgttttttaaaaaatccaatttgaaaggagaaaattaatgaacaatatttcatacctacagtgttcaggaactctctcacattgtgaattacggaaatactccttttatnattaaaa

SEQ ID NO: 8120 - DNA, 595 bp, Cricetulus griseus
tgcagggacgagttgcttcctgaaggatctgtgtgcattgttcaaaacacaatcagaaaagtatctgcagctagatggcccacatcttcgtgtatggcactctgaaacgaggccagcccaaccacaaagtcatgctggaccagtcacatggctctgcagtgttccaaggcagaggctgcacagttgagtccttcccactggtgattgccggagagcacaacataccatggctgctgcacgtgccaggcaagggccatcgtgtggaaggtgagatctacaaggtggatgaacagatgttgcgattcctggatgactttgaaggctgaccccaccatgtaccagcgcacagccctgcaggtgcaggtgcttgagtgggagggtgctggtggccctgtggacagcctccagtgctttgtgtatagtacagccacctatgtacctgagtggctgcatctcccctaccataaaagctacgattccgagggcccacatgggctgccctacaacccccgggaaaacaggtgaggggctcgtgccccagatgctaacacgatagagggagcccaggggctgcctagcacaggcaaagctttcc

SEQ ID NO: 8121 - DNA, 594 bp, Cricetulus griseus
ggtccttctctagggcggtcgcgcaggcagcggctgtgtgaagccgggctcagtcaacatgtactacaagtttagcggcttcacgcagaagttggctggagcttgggcctcggaagcctatagtccgcaggggttaaagccagtggtttccacagaagcaccccctatcatatttgccacaccgactaaactgacctccagtgtgacagcatatgactatgctgggaagaacaaagttccagagctacagaaattcttccagaaggctgacggcgtgcccatccacctgaaacgaggccttcccgaccaaatgctttaccggaccaccatggcgctgactgtgggagggaccatctactgcctgattgccctctacatggcttcccagcccaaaaataagtgaattagcctttggaggactcttcgtggcacaaaccctttgattttccacttggatggtctacgtaacatttttgcaaactaaaggaaaagataagaacacaagcgctttgtttgtttgtgaaatgcagatggcctgtcagatgtcagcgggtttgtcagttaatacactgttgcaggaaatgacactgagcc

SEQ ID NO: 8122 - DNA, 594 bp, Cricetulus griseus
ggatgcggcgccggctcggaactgctctgctgcagccatggctgctggtgtcccctgcgctctggtcactagctgctccgccactttcaccggagaccggttggttgcaatatatcctcggaacagaagatgctgttgtagaagcgatgtccaccgatgccgtgaggttttacccctggaccattgataacaagtactattcagcagagatcaatctgtgtgtggtgccaagcaagttcctagtcactgctgagattgctggatattcaagaattagcaaatcttaccactggaggaggagatctggagaacttcgagaggctcttttcaaagttaaaggaaatgaaagataaggctgctacgcttcctcatgagcaaagaaagttacatgcagaaaaggtagccaaagccttctggatggcaataggaggagacagagatgagatcgaaggcctttcttcggatgaagagcactaaattcttcctgctaggttagactgatactgatgccagcactgtgcactcaaagtgcttcccatctcaaccaggttctgctccgccaagattgccattattgtgctggccacctggact

SEQ ID NO: 8123 - DNA, 594 bp, Cricetulus griseus
cagccttcagtgggagactttgaagtccggagtcttgtgggctgtggtcactttgctgaagtgcaggtggttagagagaaggcaactggggatgtctatgccttgaaaatcatgaagaagaaggctttgctggcccaggagcaggtttcatttttcgaggaggagcggaacatattatctcggagcacgagcccttggatcccccaattacagtatgcctttcaggacaaaaataacctttacctggttatggaatatcagcctggaggggagtttactgtcacttctgaatcgatatgaggaccaattagacgaaaacatgattcagttttacctttgctgagctgattttggctgttcacagtgtgcatcagatggggatatgtgcatcgagacatcaagccggagaacatcctcatcgaccggacaggacacatcaagctggtggattttggatcagccacctgaaggccccagccaccctcgagagccaagcacaccccaccgataccgagacagagaccgagagggccgggcagagctgcgcagggacaagtccccaggtcgtcccctggagcgggagaagtccccagg

SEQ ID NO: 8124 - DNA, 593 bp, Cricetulus griseus
tctaggtcccaaagagaacagctttaatatccttttcctactaatggggaaagtgtaggtttggttaaaatgtcatgtttgtagttttttcaaaaacctttataattacagagggccttcttcatactgctggtgttggaagagccaacatctaccacaggggcagtggtggtgcacacctttaatcccagcacttgggaggcagaggcagatggatctctgtgagttcgaggccagcctggtctacagagcaaattccaggacagccaaagctacacagagaaaccctgtctcaaaaaaaaaaaaaaaaaaagtggtacacttttagtttcttaaggctttgtcttaactgtgacattactactttttagtttaaaacagaacagtatttcccatcttttgcctgcaggcagggaaaagtgtacagtatttattttgttcctgtttttactctgaatttgtaagtctttaagtagcttatattattattataggggaagacaagtgacttgcttaaagttgtatttagaattcttacttcctaatttctgtattttaaatatgaaattaaaattgtattacttctgttttga

SEQ ID NO: 8125 - DNA, 593 bp, Cricetulus griseus
catctccgtgcacggcctggccccgagcagcccgtcacgctgcgcgcggccctgcgagacgagaaaggcgcgctcttccgcgcccacgcgcgctaccgcgccgacgcccagggcggcctggacctggcgcgcgcgccctcgctgggcggcagcttcgccgggatcgagcccatggggctgctctgggccctggagcccgaacggccattctggcgcctgatcaagcgcgacgtgcagacgcccttcgtggtggagctggaggtgctggacggccacgagcccgacggcgggcggctgctggcgcgcgcggtgcacgagcgtcacttcatggctcccggggtgcggcgcgtgcccgtgcgcgagggccgtgtgcgcgccacgctcttcctgcctccaggaaatggaccctttccaggaattgtggacctttttggagttggaggtggccttctggagtaccgagctagtctgctggctgggaagggctttgctgtcatggctttggcttattataactacgatgacctccccaagggcatggatatctttcacctggagtactttgaagaagccgtgaactacctgctcagtca

SEQ ID NO: 8126 - DNA, 593 bp, Cricetulus griseus
ctgggtgctgtgcctgtgtatcgtggttcaccctctgtgagggactggatgcccaataaccactccatcatcctaattgatgactttgagtcccctcaaaagctggcagaatttattgactttctggacaagaatgatgaagagtatatgaaatacttggcatataagcaaccagggggcatcaccaatcagtttcttctggatagcctggagcacagggagtggggagtgaacgatcctatgtcacctaactacctcaatggctttgagtgtttcgtctgtgaccatgaactggctcggctggaagctgagaaggcacatgcatcctctcctggggacattcctgtccccgagcctcacattgcccagccctcacacatgaactgtccaatgcctactcctggctttggcaaagtcgaagagattcctgagaatgacagctggaaggaaatgtggctacaagattattggcaaggtctctatcagggggaagctctcactgccatgatccacaacaatgaaacacagcagaggaaattttgggattatgtacatcagatcttcatgaagaggaataaacatctctaactgcc

SEQ ID NO: 8127 - DNA, 593 bp, Cricetulus griseus
ggagccgaggagggcatgtctcaggccccggaagcgcggccgagcccaccctcagtgtaccacgagcggcagcggctagagctgtgcgcggtccacgctctcaacaacgtcctccaacaacagctctttagccaggaagctgcagatgaaatttgcaagaggctggccccagactcccggctgaaccctcatcgcagcctcctgggcaccggcaattatgatgtcaacgtgatcatggctgccctgcaaggcctgggcctggccgctgtgtggtgggacaggaggagaccgctgtcccagctggccctgccccaggtgctaggcctgatcctgaacctaccctctcctgtgtcgctgggactgctggccctgccattgcgccgccggcactgggtggccctgcgccaagtggatggcatctactataacctggactcaaagcttcgggcacctgaagccctagggggtgaggatggtgtcagagccttcctgacagctgccctggcccaaggcctgtgcgaggtgctattggtggtgaccaaggaggtagaggagactggctgctggctgcacacaagctgacccactgcctg

SEQ ID NO: 8128 - DNA, 593 bp, Cricetulus griseus
  modified_base (481)..(481): a, c, t, g, unknown or other
aaagtggtctgtgtctctctggaagacgagaggagatgacataggaagggaaggtccgtttacctgtgaacaaggccattcattgagcacgagacactttttcattttggggcagggaggtgaactaatactcaggagcctccccaatagctgtcctgcccacacttggaagagttgtagggtctgtccccacccccagctgctctgaggagtgttcaagggtggggaaaagaggggctggagcattacagctaaaggtggggcaggaccccatctcccaggcatcatcaggaaggaaaagggctttggggtcaggtggcagctactccccccaccaagagattcaggatcacaggtttctaccccaacatctctgaactcaggtctagccaccccaaacttccaaaccccactttgtgatatgtgaagctacttatttcttatctttcttggaggctgtgtcagaaatttccagcccctntctgcctgtgtgactcccaccccactcccaccagttgtataaaagtcaaataatgaaggagctggagaagactgcttcagctggtcctggggtggggtctttaggttttctc

SEQ ID NO: 8129 - DNA, 592 bp, Cricetulus griseus
cccttgcatgaggtgggctggtccacaccatctcgggaaagcatagactctctgtgcagtttaaatgcatcaaatctttctcagccttccagtaaggattcggattcagaggaatcggattgtaacagtaaatcacttgataatcaaggaaatcagaacttcgagcaactgttacctcccttttcaaagacagacacacttgcaagaaacaaggtacctgggctgtgtaggtctagttctacggactctctctctacaaccaagatcaagcccctggtgcctgccagagtcagtggcctgagcaagaagccaggaagtgtccagaagagaaaacaccatgatgctgagaacaagccagggctgcagataaagatcagtgaactctaggaaaaactttagggtttaaaaaaagattctgaaaagcttccgtcctgtaagaagcccctgtccccagtcaaggataacatccagctcactccagagtcagaagacgagctctttaacaagcccgagtgtgcgcgcgctcagaagagcaatattccactgagtgaggaccactgcctgcaggaaacctttaatcccagccaacagg

SEQ ID NO: 8130 - DNA, 592 bp, Cricetulus griseus
atttattattatcatattgataatgtggattccttagccactttggggagccagtctctcccggagcctttcttagtggtgcccacagtcacagcccaggggccattgtttgcatgactgacagtactggttcattgccaacacctgagtctttctgtttttaccacaggaaactgtaccattaaaagcagcacatatatatatatatatatatatatatatatatatatatatatatattcatatatatatatatatatatatatatatatatatatacacacacacacacacacacgtcagcaggggggagcattcttcagtaactcttcactctgggttttaaaggacttctctggattgcctaggatccagttttagtgaaccctcttccaaagagatgcagataagctgggtgatttgttttgctttgcaaaaaagagaggattttattcatagttccctttacagttccatcacagtatttttttaaataactcaggtgttatgagaagaaatagaaacttaaataacttatgtagactgtaaatgttttattgtaagattctataaataaagctatattctgtaa

SEQ ID NO: 8131 - DNA, 592 bp, Cricetulus griseus
aggaggagaggctgaagctgtcccccagcccatcttcccgtgtcaccatctctcgggccacctcaagcagcagcagcagtggggttggcatgtcagtgggccggggccgcagcaagcgccggcggctggagacggaggagacccaaggctcgcgcagcagtggctcaggctccagcacgggaagcggctcccgcctggcccagcaggccccggtcccggctgtcgtgagcattgacgaggtggacctggagggcaggttcgtgcgcctcaagaacgcctcggacaaggaccagtctttggggaactggaggatcaagagactaggtcccggagggtgaggacatcgcctataagttcacgcccaagtatgtcttgcgcgccggccagacggtcacggtgtgggcatctggcgcaggggtcatccacagtcccccatcaaccctcgtgtggaaaagccagagcagctggggctgtggggagagctcccgcactgttctggtcaacgccgatggagaggaggtggctgtgcaggctgtgaaacagacatccgtccaggtgagcgagaatggggaggaggaggaggaggaagagg

SEQ ID NO: 8132 - DNA, 591 bp, Cricetulus griseus
gaggctgtgccaggatacacgtgcactgggtatagaagccaggctaagtcgttccgagtagaaggcgctgtgaatcatgtcttcacccagagctcacccttggaaggctgtcagcccagagcattcagggtcagactcggagaccagtgcttttcctgtacagagccagaagcactggcaggaaagctgaacaggcggttcctcgaagcatcttcctgtcatcctgtcaaaatcatcaatgagaaactcattactgaattgagcaaaaaatttcctttaaaaagactgaagtgttcctttcctttgttgtcagagggaggcaccagtgtcctccctccagggacttgtgaccctcagcctgccttttgggttagcctccatggagataaatcatattctgagtccctgactggagaaatgacacaagaaatggaagatgttctcctgtcattttcagaacttgcccttcccaagagtcctgggagagacagctgcaaagcagctcaagaaggaacccgggagcaggccaagctttgcctcagatcttctcttctggctcatgtcgagactgtcatccagtcaccagacttc

SEQ ID NO: 8133 - DNA, 591 bp, Cricetulus griseus
cgtccggtatccgaagtgtcccgcgttcgtcatgtcggcctcggtggtgtcggtcatctcgcggttcctggaggagtacttgagctccactccccagcggctgaagttgctggacgcctatctcctttatatactgctgaccggggcgctgcagttcggctactgtctcctcgtgggcaccttccccttcaactcgttcctctccggcttcatctcctgtgtgggcagcttcatcctagcggtttgcttgagaatacagatcaacccccagaacaaggcggatttccaaggcatctctccagagcgagcctttgctgatttcctctttgccagcactatcctgcaccttgtcgtcatgaacttcgttggctgaactgctcccatttccttagttgtggagttggagattggcagaacgttcactctttgacatcccctggataagaattcttgagatgacagcttgttggacattgatgattcagatctgtgctttgctgtggccctgactgggtgtgaaatggggagtccagacgacccccctttactctgtcagaccagcttcacaatgtgtgtctgttaacacggaat

SEQ ID NO: 8134 - DNA, 591 bp, Cricetulus griseus
ggccgcagtgccagcccggacctggggagctccgcacgaggccccggaagatcgtgtttgctgacgagctaggcgcccgggccccgggccccggacagaagccttccaaagctctggggccccgccccagcccagtgcctgactatgagcttaagtacccgccagtgagcagcgcgagggaccggagtcgctatgccgccgtgttccaggaccagcacgcagagttctcggagctccagcaccacgtgggcgtcacgcaggccaagctccagcagctggaggccctgctgaagtcactgcccccaccacgaagccagaaggaggctcacgtggcagctcgggtccggagagagtttgagaagaagcgggcggatcctggcttcctggataagcaggctcgctgtcactacctgaagggcaaactgaggcacctcaaggcccagatccgaaaattcgatgatcaaggggacagtgatagccaggattcagtctacttctgagtgtcctggagacggtggtggcttctcctcctcccatggggaaccagtcctgttgagagtcccagagaataaacatggattaggcacctac

SEQ ID NO: 8135 - DNA, 591 bp, Cricetulus griseus
tttgttattgatgttagaggaaaaatccctcccattttcatgtgcagcagagatctctaggactcatctctgtccaggcccttccctgagcacttagcgctgagactgagccagctgtgggtcaggtggaaagaccctcttagggacagaccctagtggttagtccaagagaaatgatcctgtccaaggctgagtcataaacccaagcttgagtgacagctgaaggacatggacatcattctgctggatgaactattaggagccttgcccagatctacttataaccaatccagtacctcagacaaagcattcggggccgtcaccactaccatgtctaggagcccattttctaggcattgtgaattagtaagtaacttgtcactttccagactgagaaatgctggaaaccatttagaacatttgtaaagttaacgtggaaagactgtataaatgtttaatatgaatatagtggtcttgggagtaaggcaagctgttgaatggttcaattgtgcatttctcattttgatgtgtcatgtatgttaatatgatgaaataaaatcagaactggtacctgtttaaaaaaaaaaaaaa

SEQ ID NO: 8136 - DNA, 591 bp, Cricetulus griseus
  modified_base (275)..(275): a, c, t, g, unknown or other
ggcgccatgtctggccgcgaaggtggcaaaaagaagcccctgaaacagcccaagaagcaggccaaggagatggacgaggaggataaagctttcaagcagaaacaaaaagaggagcagaagaaactcgaggagctaaaagccaaggccgcggggaagggacccctggccacaggtggaattaagaaatctggcaaaaagtaagctgttcctcttatcttccatgatggtgaccctcctccatccctatttaaacatctggataccctgccatacanctttgccacctacagctaggatgaagtgttatcctggagcctgttaaacatctggattccctactataacatctttgccacctgcagctagaatgaagtgctatcttgaatgaagcctattgtacattgtaataaacttttgtaaaaaaaataaacaagtaaaatgaataatacaatggctctttgtcctagtgttcagcaattcctacctcagctgtgaatttaaacccagtctggaatcctaccagagcctgctgtttcatctttgttgtactctgaattctgtatcactttgaattaaacaactcattaaaag

SEQ ID NO: 8137 - DNA, 591 bp, Cricetulus griseus
ccgcgcgatgaaaagcgcgtttgtgactgttgggaccaccagtttcgacgagctcgtcgcctgtgtggtcgctaacgacagcctccagatcctcaagagtcttggttacaaccgacttgtcctccaaattggtagaggcacagtggtccctgaatcattcagtagtgattcattcactctggatgtttacaggtataaggattctttgaaagaagaccttcagcaagcagatcttgtcatcagccacgcaggtgcaggaagctgtttggagagtctggaaaaaggcaagccacttgtggtagttgtaaatgaaaagttaatgaacaatcatcaattcgaattggcaaagcagttgcacaaagaaggacatcttttctattgtacctgcagcacgcttcctgggctgttacagtcaatggatttatcaacactgaaatgttatcctcctggccagccagaaaaattttctgcatttttggataaagttgttggattacaaaaataaactcttaacactttaaaatacccctaaatccagttcatgaaatgtgattaaatcaaaataagtttatggcatgtatttgtagaaca

SEQ ID NO: 8138 - DNA, 590 bp, Cricetulus griseus
gcggcgggacgggccctggagatgagccgtggcgccacgggctggtgctgtctcgtgctctggctgcccgcgtgcgtcgcggtccacggcttgcacatccatgactacttatacttccaagtgctgagtcctggggacattcgatacatcttcacagccacgcctgccaaggactttggtggtatatttcacacgaggtatgagcagattcaccttgttcctgctgaacctccggaggcctgtggggaactcagtaacggcttcttcatccaggaccagatcgctctggtggaaaggggctacatgatccgacgctctctggaacagcatgggctaccatgggccatcatctctatcccagtcaatgtcaccagtatccctacctttgagctgctgcaacctccctggactttctggtagaaaagctgaccccaagttccagctacaggtgattcactggcaagaggaaacctaatattctgccatttggagtttggagagagactctgaggacaagtggagccagggaggggacagggaagccacaccactggctttcccttccttagggcctataaggacatctcatg

SEQ ID NO: 8139 - DNA, 590 bp, Cricetulus griseus
tgtagtaaaaggtgtgggaattataattaggatcatgtgtcccaacacagaaccccttccctggtgaccttgaatccctatcaggtggtgagcagagggttcctctgctgacactgttgaggggtgggaaagagtctgtggtccccagcccttctatcagtgtttgaaatgtatccataggtagccattgatttcacataggagacaaaaggaagataggccatgtattctccttaatgttttttcacgatctcttttgtggtccttcaggcagcttccttggtgtcctctccgcacctgtgggcagggcaggcctgtaactgcaggcaacatggcagtgcatcacctgatgatgggtggtgccctctgcctggcagcttcctccgaaatgctttctcctctgagcttgtgtcttcagtactccggcagcctgcaaaggtggcttgcaacacattagtatttgttgcctgctcttctgcaactgtcttgactcctccaagaacttgatttctttgactgcagagagaattaataatggtttcccaggaatttgcttacttttgtatcctgtgtttctagcattgggatta

SEQ ID NO: 8140 - DNA, 590 bp, Cricetulus griseus
atggcgccgcccgccggcgggaccgcagcggctgcagaccctacttcccctgcggtgcttctggctgtgcgcgccgcggtgagacctctgggcgctgggcacgacaccgaggcgcagctacggatgctgcagctgagcgcggaccctgagcggcctgggcgcttccggctggggctgttgggcaccgggccaggggcggtcagtttagaatggcccttggagtctgtttgctatacagtccgaggccctaaccaacacgagcttcaacctccaccgggagggcctggaaccttcaaagtgcacttcctcaactctcaggaagcacagcagtgggctctgcccatgtctcactgcagatccatccacactgctccattgcagccctccaggaacaggtgttctcagagttcggttttcccaccagctgtgcagcgctgggtcattggacggtgcctatgtgtgcctgaacgaagccttgcttcctatggggtctctcaagatggggaccctgcttttctctacttgctctcagctccccgagaagcttcaggacatagtcctcaactctccaagatggatgggaaattagg

SEQ ID NO: 8141 - DNA, 590 bp, Cricetulus griseus
gctggagcagctagccatcctgggggctgtgctacttgtcacactcagcagcgccacacctggaatttctggccgggctgactttgctgagaaactcaagatgactgtgaagattctgctcatggacatgcatctgccttccttccatctggaggatgctctgacttccattggggagaaagtgtgcctggaggtgagcagctgcctctccctgtgtggatcctctccattctctatcaacaaggagactgtgctcaagggccagattcaggccctggccagtcctgacgaccccattcgcaggattgtggagtcccgaatttttaccttcttggagacataccttgcgtctggtcatcagaagctattggctacagtgccagggggattgggtcccattcagaaagagctggaagaagttgcggtgaaatttgtgcgcctggtcaactataacaagatggtgttctgccctttactacgatgcaatcctcagtaagctcctcctccgatcctgaggtgcacagctgtctgcagcacgctccttatctcctcacgaacccgctcctcgcccaggccagctagggatacac

SEQ ID NO: 8142 - DNA, 589 bp, Cricetulus griseus
gctgcgttggcacaggaaacacagcagagatgggaacacatatagccctgctttggaaaagagttatttgaacactaagaagagcaggcgtctttgtttattctcaggacctttttgtaacagggctacattctgcaaactgctcacaagagaagactacatgtcttaacagattcagccgctgaatcctccaatccgggcctgttttagcgatggcagccaggcctgagagtgaggacggctttatatacctcttccttagtcacgcaagttcacgtttctgtggtggggtgaaggccctagcagaggttccgaacccacacagcgtgtgcgttcggaactgtattccgcaggtagcaggatttccttttcccgtttgctgtgacactgtgtgtgatggcaacacttctgcaagttccagatgtttgcacattatgatttatgcattatcagaagttactgctgccttgaatgaaaaacgttctgtgaaattttttgcaaaagctttactagttttttttttattgtgaaattttgtaaaggcaggaaatggattaagacgagcatgctaaatatatttttcaaaaaa

SEQ ID NO: 8143 - DNA, 589 bp, Cricetulus griseus
ggtcaacgtggtcttcgtggaccgctctggtcggcggatccccgtgaggggcagagtcggggacaatgttcttcacctggcccagcgccacggggtggacctggaaggggcctgcgaagcctccctggcatgttccacctgccatgtgtatgtgagcgaggcccacctggacctcctgcctcctcctgaggagagggaggacgacatgttggacatggccccgctgctccaggagaactcgagactgggctgccagattgtgctgacccctgagctggaaggagtcgagtttgctcttcccaaggtcaccaggaacttctacgtggatggccacatccccaagccccactgagaggaggccaccggaccaaccagggccactgaactgaaaaaagccatgctcccggccccagagcacagactggccaggaatgagaagctggaagcactgtgtgagaccagagccactgctggagacagccagtgtccgggtcctggaggggtgggtctccatcttgggtgtgacggtccaccagggagaatcggactataaattagggatggactcacaccagagctgcaataaaaa

SEQ ID NO: 8144 - DNA, 589 bp, Cricetulus griseus
gactctcggggccccagcacccctgcagacagaattggctttgcgccatccccagccgggccctatgcagggctcttgcccatgaacctctacactcacagtgtcaatgggctggtgctatccctgttgggtgaggagcctcttctcagagacactgcagccatcgaggaggtgtaccacagcagcctagcatccctgaacgggctggaagtccacctgaaggagacactacccagagacgaggcctgccccacaagcagcacatacagcttcgtgcattatgaccgaatccagagcatgctcacagccaacctgtctctagtggccgctccccaggaccgtcgctttctgcaggccatcaatcttgtacactccgactttgcccagctgcctacgctctatgagatgaccgtcaggaatgcctctacagctgtgtatgcctgctgcaaccctgcccaggagacctacttccagcagctgacacccaccacccgcagctccggcttcccaaaccctcaggattgtgccttcagccttgcaggcaaagccaagaggaagctgctgaagcatggagtgaacctgctgtgag

SEQ ID NO: 8145 - DNA, 588 bp, Cricetulus griseus
  modified_base (565)..(565): a, c, t, g, unknown or other
ctttggttttaccgcctgcaacctcactgtgcccgccccgcaccatgccccatccctaggtccagtcgggcccatcgcagggggcagcactcgggggcatctcaggcacttgggtggggaccaaggagatgccctcatagacccttcccttgccttcttcctccccggtccgggttccattcttttcaccagcacccatcgcccaaggggtaccaaggggggcaaggggtgtccggtccaagcccaccccgcctcgccttccgcaaaactgtgagcaaaaagcaatagaagcctcgcccccgcccccggcccaccccgccccacaccatttgccgtctgcagtctccccctcccagtcccaagacctaatccctgcctcctcccctgacccctccactgcaccactcaaggccggggcgtgacccccaacctgtcccttctgtggtttctgtgtggtcagcccttccagcgccgacccgggatggggaccggcccccactggccctcccctccccatggactctttctgcttgacaatgtagcaacccctgccctcctctcaaanaaaaaaaaaaaaaaaaaaaaaaa

SEQ ID NO: 8146 - DNA, 588 bp, Cricetulus griseus
  modified_base (544)..(544): a, c, t, g, unknown or other
ggggactcgtgggggatgttagcttgcctatgcacggtgctgtggcacctccctgcagtgccagctcttaatcgcacaggagatccagggcctggcccctccattcagaaaacttatgacctcacccgctacctggagcaccaactccgcagcttggctgggacctatctgaactacctggggcccccttccaatgagcctgacttcaatcctcctcggttgggggtcgagaaaccctgcccagggccgactgtcaacttggaagtgtggcgaagcctcaatgacaaactgcggctgacccagaactatgaggcctacagccacctcctgtgttacttgcgtggcctcaaccgtcaagctgccacagcagaactacgacgcagcctggcccatttctgtaccagtctccagggcctgctgggcagcattgcaggtgtcatggcagctcttggttacccactgccccagcctctgccagggactgagccagcctgggcccctggccctgcccacagtgacttcctccagaagatggatgacttcnggctgctgaaggagctgcagacctggctgtgcgttcagccaagg

SEQ ID NO: 8147 - DNA, 588 bp, Cricetulus griseus
gaagagctgcggagcctcgaggagctgccctctccacagtgggcatacccatgtacagagtgggccacttgagagcgacagcccccacggctggcaaggaaccaagcctgtgggtatctgagagcaccttctcgaaagaagtacagggaggtgagcttcagaatatcctggagagcaggtgacagaggaacaattcacagacgaacagggcaacattgtcaccaagaagatcattcgcaaagtcgtccggcaggtagattcctctggcgccatcgacacgcagcaacacgaggaggtgttcctttagtctcgtattcgcatgaatgactggctgtagacgcatgacctacagtcttcagtcctgcctctagcgactatggatctctgtgggaatcaggacaaaggccgcaagaagaagggagaggagtgagggagagcaagcaagccccaaagagcacatgggtgcagacatgaataagggctctactgtggctgggatgattggttaaagtttgtttgcttcttttttgttttgttttgattttgacttcaacctcatttgtaagaaactcacatgatcattctgga

SEQ ID NO: 8148 - DNA, 587 bp, Cricetulus griseus
ttctttaagcctgtcagtttccaaatcactatttgccagcattgagggagaagacaagtagacatgaaaatactttcttaagagatcatgtaactatataactgtgaatttaaattttgagggggggtcatttcaatctgctgtctcatataagaaatatttttaaaaaaatctgtaactgctttagtgttaacagggtacaaggtgtttttgtcatgtattgtatttcaaaggttctcatcagttgtgactgtattgtactgtatgaaaagaagtcagaaattgccttgtattgtttataatggaccataacacagtactaatgcagttttcatgttccaagtttttcagtgatgcatgttcacagttaggtcctaaactcctgtggtgctatctcctccatgattcaatggtgcttttgtggtatgctaactgcacacatgctgaacaaagcttaaaattcaaaacttccctcccttcctctgtttatattaagtgaaataaaaataacttgaattttcgtctcaaagtatcactgacaatccaataaactggtttatatgtagtaaaaaaaaaaaaaaaaaaaa

SEQ ID NO: 8149 - DNA, 587 bp, Cricetulus griseus
ctgggagccattctgtataaacccgattcctgcctctcagggaccttcggcagggaggtgtccggcaagcccatggcagctggttccgtctctcctttgtctacaaccactatctctttttcgcttgtaccctggtggtgctgctggccatcgtcctgtaccttctgcgaatccacagaattcaccgccgacaaactcgagcctcagctccattggaccttgctgtggatcgaacaagtggtgccaatgatgggggtgcaggtggagccgtgagcctggagcagacagggaaactgctggaccttaggattgctgctcttgctgaagcaagtgtttgtattgggcagctggaatcacggttgaaagctaacttggatagactgatacaaatccagagacattccagcaagtgcagttgcccctgctttctctgtaacagagatacccttatgtggagatccacagccttgaatagggacccaagatctctggggttcagtggaccatgatctcaaggcaaccaaaatgatgcagcttccttgcttccttgacattactttttttttttttttttttttttgatgatg

SEQ ID NO: 8150 - DNA, 587 bp, Cricetulus griseus
accacagggtccagcaacagcagacctggtgtcccagtggaggagagccctgggcagaacccaggagtgtaaccgcttgccaggcagccccgagctggaaatggacaagtgtgtggggagctggggagagctaatcaggagcttcatgccagcctgtcccccacctattctggccacgttttagatggccattataagatgtgggtcctgggcctcctgagtgctggagccttcagctggccctgccttcccttaggagatgggattggcatggtggtcctccagtagaagcctgtttctagggggatgaaaggaacagcatcatctctagtccccagggcccagctttacaatgccatattttcattaatgcactccaatttttgctttatttttcgaggcagattttcttgtagcccaggggtgtcttgaaactggctctgtagaccaggctggccttgaattcatagattcacctgcctctacctcccaaccactgagattaaaggcctgtgccaccactgcccaaaaaaacaaaaaaaaaaaaaaaaaaaaaaaaaaaaaaaaaaaaaaaaaaaaaaaaaaaa

SEQ ID NO: 8151 - DNA, 587 bp, Cricetulus griseus
aaggaaactttgatggaaaatttgaggcactggatcttgcagaattgactaaaaagcaaccatggtggcgtaagttgtttgggcaggaatctgggccatcagctgaaaagtatagtgtagcaacccagctgttaattggaggtgttactggatggtgcactggtttcatattccagaaagttggaaaattggctgcaacagctgtaggaggtggattctttctacttcagctggcaaaccatactgggtacatcaaagttgactggcaacgagtagagaaagacatgaagaaagccaaagagcagttgaagatttgtaagaatgaccaaataccaactgaggtcaagagcaaagctgaggaggttgtgtcatttgtaaagaagaatgttctagtgactggaggattttttggaggctttttacttggcatggcatcctaaaaaaatcacaactttacttcattgtttcttttttcttgccagcagcttcaacactcaaacataaaacaattgacactcctcttcctcctcttctcctgtgccttcttccctgttatggcaaatctgaatggcttccataggccttct

SEQ ID NO: 8152 - DNA, 587 bp, Cricetulus griseus
accagactatataatggcatgtcgagggtcaagacgacccacaaggcacatgagagctacaggaatgtttcccgggagcagttcacaatgttcctgtcccacttgttaaaggggagcttcgaggagaaggggcatatggttatgaaaatgatcttagccacagaggctcctgtgacggtcagagaagtccagaagttcacagaggaactggtggcctctctggtacatgtgctaacccaccagcatgagcttcgaggctgggctgggaggaactccagggagtcccctaccagtgtgcagatgatgactgcccagctgctctcagagatgaagtttcaagatggccacaagtgtctggggcctcagtgcctggaccaggtctgcaacaaaaccatgattgaggactgggtgttccatgcccctcacgtgggcacgtttctcagtgtggtcatccatcggggcctggaagtgtggggctcggcgatctttcttactaggagacattaggtcaagaacaagaagagcatccttgactcggatcccgcagcccaatccatgttggagatcagtggacggggtcgtcacag

SEQ ID NO: 8153 - DNA, 587 bp, Cricetulus griseus
cttgattgtgtccttggcccacaatgccattgtctatacaaccaagggcatcactcggtgcctcctgaatgaaacgacaaacagtaagaatgagaaggagcttgtgctgagcacagagggaatcaacctgcccgagatgtttaagtactccgaggtgctggacctgcgccgtctctactccaacgacatccatgccatggccaacacttacggcatcgaggctgcactgcgggttattgagaaggagattaaggacgtgtttgctgtgtatggcattgcagttgatcctcgccatctctctctggttgctgactatatgtgctttgagggtgtttataagccactcaatcgctttgggatccagtcaagttcctcccctttgcagcagatgacatttgaaaccagtttccagtttctcaaacaggccactatgatgggatcccatgatgaactgaagtcaccttcagcctgcctcgtggtggggaaagtcgtcaaaggcgggacaggcctgtttgagctcaagcagcccctaagatagcagctgttagaagtaaaaaataaaaaaaaaaaaaaaaaaaaaaaaaaaa

SEQ ID NO: 8154 - DNA, 587 bp, Cricetulus griseus
  modified_base (123)..(123): a, c, t, g, unknown or other
cttcggattctactgtagcaacccagaacagattaatgaaattcaccatcaaagtttgccacaggaagttgcaaggcactgcatggttcaggccaggttattggcatatcgaactgaggatcntaaaacaggagttggagctgtcatttgggcagaagggaaatctagaagctgtgatggaactggagctatgtacttcataggatgtggttacaatgcttttcccgttggctctgagtatgctgacttcccccacatggatgacaagcataaggacagagaaatacggaaattcagatacatcatccatgccgagcagaatgctttgacatttaggtgtcaagatataaagccagaagaacgcagcatgatttttgtgacaaaatgcccttgtgatgaatgtgtgcctttaattaaaggtgcaggcataaagcagatctatgctggggatgtggacgttggaaaaaagaaagcagacatctcttacatgaagtttggggagcttgagggtgttcgcaaatttacatggcagttgaatccatctgaagcttatagtcttgaccaaaatgagcctgaaaggagagaaa

SEQ ID NO: 8155 - DNA, 587 bp, Cricetulus griseus
ggtatcccagcatggccccttgaggtgaaccatgaatgtctgcaggacacttactactaactacccagagtcacatcttgccaggtgacctgtcctccacctgccctcagcttgcccacccctgcctgggaaagtgctgcagctgccacggacaccatgtagtagggccggctgcggcgcccagtgagctgcaatggttttgtacacgactccctttcctaatagctgtctgtccgccctccatgctgtgtcctggggcccctcatcttcccatgttactggctggtggaccggctggtagcctccttcatacccaccacctatgagaagcgccagagggcagatgacccttgctgcctgcagactgttctgtttctgtattgtatcctcatgggacattaggggttttatatggtaagatacctaaggttttggtaaaacattatcaaatatatatccagacgattcttcccaagaagaaaacaaatctttatgcctgattaaaatgaaaatgttgaaaagaggtggattttcctttatggtgctgaaaggaaggatgaagaatgacgagaaataaaactgtgagg

SEQ ID NO: 8156 - DNA, 587 bp, Cricetulus griseus
gtgcacatgactcgaggagaggggtggctttggtttcactctgaggggagactcgcctgtccttcatcgctgctgttgttcctggggtcaggctgagtctgctggcctgaaggaaggggactacatcgtgtctgtgaatgggcggccttgcaagtggtggaagcacgtggaagtggtggcacagctgaggggcgtgggcgagggaggcgtgagcctgcaggtcgtgtccatgctgcccagccctgagccacgtagcacgggaccccgacgagcagcactgctgtggagccagaaagagtgtggttttgagacagcgatgcctgcacgtgcccgcccctggcccatccttggctggggccgcaagaccaaacaaagcaagaccgggtgccaccctgactcctgcacaaacagcaactgtgtcacctgcccctgagctggacacccggtacccctgtgtgcccagggtggctgtggaggccctcttcctatgtacatcaccctataaccagctccaactagccaggagtgcctagtgcattctgtcctctattctggggatcgttaggctgtccctgccttgcttagag

SEQ ID NO: 8157 - DNA, 586 bp, Cricetulus griseus
ggagcacaccatggtattcctcacgacgcggctctggcttcggaaccgcatcacagaccgcttttggcgggttcaggaggtgctgaaacatgctcggcatttcaagggaaggaagaatcgctgctatcggctggccgtcagggcggtgaccagagccttcgttaagtgtacgcaggcccgcagactgaagaagcggaacctgaggaccctctggattaatcgaattacagcagcctcccaggaacatggcttacagtacccagcattcattgccaacttaattaagtgccaggtggagctcaacaggaaggtacttgtggacctggccatctatgaaccaaagacttttaaatctttggcagctttggctaagaggaggcagcaagaaggatttgctgcagctttgggggatggaaaggagcctgagggcatcttttccagagtggtgcagtaccactgaaggcttcagtgctgtggagattgttataaacaagataggagcagaaggattgtctggtcaccagtaagtctgatttgtatttatttatattttagcaacaggcctgagagaaaaggtttttactca

SEQ ID NO: 8158 - DNA, 586 bp, Cricetulus griseus
tgaaaataaccgaggaagcatcccagcccttgaaaccagtggggaaaacagttcttcccacaaaacaggtggagcaaagccagggcctagtaagaaacctcttcatggaaggaggaagaggtatgtgctcagtgtcagcaatactatctacaacgtcgagcagagaattaaccacttcctgaagctccagcatgagcgaaggcaggagatgtataaggaatattctcatcagtttttgactttggttgtgatgtggaatatagatgtagaccaagtcaagaagcatgcagaaaatctctctaatatacttgaggagcaacaaaagctttttcaacaatttcaagttattcataaggagaaaatagaagaatttaaagagctatgtaatcgacacttgaagagtctacaggctattaagagttgtcgccgaaaagctattatcgaggaagccagaaaacaaatggacgtcctggagaggaaacttactacagaaactgtaaagctgcaggaagaaaaggctagtgttagatcatctcttctatccctgctattctcataacaccttgaagaaagacgctcaaacacc

SEQ ID NO: 8159 - DNA, 586 bp, Cricetulus griseus
aatacataaaaggacacatactggagagaaaccctatgaatgtaatcagtgtgggaaatcctttgtcctgcacagtcatcttcagagacataaaaggacacatacgggagagaaaccctatgaatgcaatcagtgtggaaaagcctttgctcagcacagtaaccttaatgtgcaataaaaaagacaacattctggagagaaaccctatgaatgcaatcagtgtggtaaagccttttctcaatcacagtactcttcgaaaaacacaaaatggacacatactggagagaaaccttatgattgtaatcagtgtggtaaaacctttgccaggcagtggtggtgcatgcctttagttcccagcactcgggaggcagaggcagggggatctctgtgaaaaagttcaaggtcagcctggtttacatgcacaccagaagagggcaccagatctcataacggatggttgtgagccaccatgtggttgctgggaattgaactaaggacctctggaagagagtcattgattgctcttaacctctgagccatctcctccagccacacaaaaaaaaaaaaaaaaaaaaaaaaaaaaaaa

SEQ ID NO: 8160 - DNA, 585 bp, Cricetulus griseus
gatcctccaggacggccatggcagagccacagcccgcgcccagcggcctcacggatgaggccgccatcagctgctgctccgacccggaccccagcaccaaggacttcctaatgcagcaaacgatgctgagaattaaggatcctaagaagtccctggatttttatacgagggttcttggactgacgctacttcaaaagtttgattttccttcgatgaaattttccctctatttcttggcttacgaggataagaatgacatccctaaagacaagagtgaaagaacagcatggacgttctccaggaaagccacccttgagttgacacacaactggggcactgaagatgatgagacccaaagttaccacaacagcaactcagaccctaggggatttggtcacattgggattgctgtccctgatgtctacagtgcctgtaaacgatttgaagagctgggagtcaagtttgtgaagaaacctgatgatggtaaaatgaaaggtctggcattcattcaagaccctgacggctactggattgaaattctgaatcctaacaaaatagcagagattatttagctctgtgagaatg

SEQ ID NO: 8161 - DNA, 585 bp, Cricetulus griseus
cagagatggtggatttctttattctattctttataaaagcgaccattgtcttgagcatcatgcatctcagtggaataaaggacatctctaagtttgccatgcattatataatagaagaaatagatgaagacacatcaatggaagacttgcagaaaattgatgattgtggcacttatatacaggttgttagtttgtttctatgagataatttgcatttggggaggcggggggagctactccaggaaagttcctgctagggcttcgagttgtgacatgtgatacatcggtactaattgctccaagtcgggttttagtgattccttcctcaaatgttagcatcacaacgtccaccatacgagctttgatcaagaatttttctattgcttcttttttccctgctttcatcacactgctgttttttcagcacaatcgaacagcctatgacattgtggcaggaaccattgtggtaaaaagaaatggggtcagatgatgccccagagccctgaattccactctttggaataataatgacaagactaaattatgtatcaaggccatcagtatctctaggttacattaattgat

SEQ ID NO: 8162 - DNA, 585 bp, Cricetulus griseus
gggggacgccgctgtgggcaagacgtcactggtccagcgctactcccaggacagcttcagcaagcactacaagtccaccgtgggagtggactttgctctgaaggttctccagtggtctgactcagagatggtgcgccttcaactgtgggatattgcagggcaggagcggttcacctctatgacaagactatactatcgagatgcttctgcctgtgttattatgttcgacgtcaccaatgccactactttcagcaacagccaaagatggaaacaggatctggacagcaagctcacattacccagtggagatccagtgccctgcctgctcttggccaacaagagtgatctgtccccttgggcagtgagccgggaccagattgaccggttcagtaaagagaacggtttcataggctggacggaaacatcagtcaaggagaacagaaatattaatgaggccatgagagtcctcgttgaaaagatgatgaacaattccagagaagatataatatctttgtctacccaagggaactacatcaatctccaagccaagtcctcctctggctggacatgctgctagttctgttt

SEQ ID NO: 8163 - DNA, 585 bp, Cricetulus griseus
actggagagaaatcatacaagtgtgaggagtgtggcaaatgtttttacttatcttcatctcttcggcgacatcaaacaatgcatagtaaagacaaaccctatgagtgtaaagagtgtggcagatgtttttactcattagtatcccttagacgacataaaaaaatccactccgaatataatccttatacgtgtgtacaatgtggcaaacggttttcctattctaggcatcttcaagaacatcaaacagtccataccggagagaaaccatacaagtgtcaagaatgtcacaaagcctttcataatcactcagcccttaagagacacaaggcggttcatacaggagagaaactctacaagtgtggagagtgtggtaaagtcttttcctattcttcagaccttaaaagacatcaaaatattcattctgaagacaatccacacaagtgtgggggaatgtggcaaagcctttgttaatctttataaccttactcgacacaagacagttcatactggagagaaattctacaaaagtaaaagatttacacatctttagcctttaaaggaagtcaaataattcattctgaataa

SEQ ID NO: 8164 - DNA, 585 bp, Cricetulus griseus
ggcgtgaagacccctctgtggaaaaaggaggtggaggagcccgaggccagggaggaggagctggaggacgagtcgtcgtcgtcgtcgtcatcgtcggaggtggagaggcctgaccccgagagcgcggcggaggtcgaggaggacgcccgtgatgcggaggagcgagaggcccgctcggtgtcctactgccctctgcgccaggagtcaagcagccagcaggtggcgctgctgcgacgctcggacagcagcttctggggaggaagcggggtgccccggaagaaccgtgtgtgttggagacgcggcggcgaccaccgcgccgagggggctgtgcgcgctgcgagatcctttttctgcaagaaatgcaagagcctgcatagccacccgacctacatagagcactgtattctggagcaccctgacccgggtagtgcggaggccgctgggagttctgagctcatccactcccagcctctgcgcccgcaatgctccaaactcttctatctctagtgtgttccacagaactgtccttttaagccgccgtccttagcgcctccttccggtaagaaggcccactgttgtttcacg

SEQ ID NO: 8165 - DNA, 585 bp, Cricetulus griseus
cgaagggagaggcctgtgggggaaccgagggcacccgaaagccccagaaggctctgcggtctggggagtctggggacttgatctccagcgcaagacgggcggggcccagcgctctctgggacgtccccgcccgcagagctcttcctgggcgcttgaaggctgcctacccagcaccccagcgcctcctccctccccgaagaacccaccttggcctgatcaggctccctggtgagaactgagaatcggactcacttgatgtctcctggaagcagagcagaatgctcttgtccttgtcgagtctcatttcgtccatgtcccccgtgcacggttcaatggtagattcgctgtccctcagcagggacttgaaagactcccttaccccagacttgtctctcctaccccctcccaaaagccacctggaaggagcacatactacctagaagtaagaagaggagcctcagaagaaacaaagttctatttataattttctatgtgttgtgtttgtagtcttgtcttagctatggacgtgaaatcttcggtaataatattaatattattaataatgattatgatgatgataataat

SEQ ID NO: 8166 - DNA, 584 bp, Cricetulus griseus
gcttcgctgtcggagacgcagagccagtccggacttgcgggacaaagggtgacgccgagagccctagttatggcgtcgccggagcccagcccggccgcccggagccccgcggcgccgccggggcagcaggagggagccggagacggtgcggacccggagcccgctgccctgagccccgcggccccggagctccccggcacgcccgcacctttggacgcggcgctgcaggccgaggccgccccgcggcccggtgcctctcggcccggccccgagacgtttcgccagcgcttccggcagttccgctaccaggacgcggcgggtccccgggaagccttccggcagctgcgggagctgtcccgccagtggctgcggcctgacatccgcactaaggagcagatcgtggagatgctggtgcaggagcagctgcaggccatcctgcccgaggcggcccgggcccggcggctgcggcgccgcgccgatgtgcgcatcactggctgagcagcggagccaggagctccttggactgatactctgccttaccctgagttaatgaaagttaaaatttgacagacaaaaaaaaaaaa

SEQ ID NO: 8167 - DNA, 584 bp, Cricetulus griseus
agggagggcccctcaagccctggctgcaggaagcagtcacgtgtgggccctttattagaccctgccatataagctcagggcacaagtggccagcaactctttaggcaaggatcagcaagcaaaggcatgctgactgtaatgctgctgagctgtgccctgctgctggcattgcctcccacgctgggggtccagatgcgcttggcacccctggaaggcatcagaaggcctgaccaggccctgttcccagaattcccaggtctaagtctgaatggcccgaagaggacaactgcagacagaacagaagaggctttgctgcagaaggcagaagcgttggcggaggtgctagatgcacagaatcgcgagactcgttctccgcgtcgctgtgtacggctgcacgagtcctgtctgggacagcaagtaccttgctgcgatccgtgcgccacgtgctactgccgcttcttcaatgccttttgctactgccgcaagctgggtactgccacgaatctctgcagccgcacctaatcaatggatgttgggcaaaggcagagtcgcgaataaaggacgggaccaacaaaaaaaaaaaa

SEQ ID NO: 8168 - DNA, 584 bp, Cricetulus griseus
gccgaggacgccaggggcagggtcgcgtctgccgcggtcatgccgggaatagtggagttgcccactctggaagagctgaaagtggaggaggtgaaggtcagctcagccgtccttaaagctgctgcccatcactatggggctcagtgtgataaggccaataaggagtttatgctctgccgctgggaagagaaggaccccaggcgctgtcttcaggagggcaagctggtcaacagctgtgcgctggacttcttcaggcagataaagcgtcactgtgcagagcctttcacagagtactggacttgccttgattattccaaccttcagctgtttcgttactgccgcaaacagcaggccaaatttgaccagtgtgtgctggacaatctgggctgggtgcggcctgaccttggggaagctgtccaaggtcactaaagtgaaaactgagcgtcctttaccagtgaacccttatcactcaagagcaaggccagagcccaaaccctgtgatagaaggggatctgaagcctgccaagcatggcagccgattatttttttcttggaacgtgtaaggatgggtctatggcccacac

SEQ ID NO: 8169 - DNA, 584 bp, Cricetulus griseus
acgcatgcgccatccctttgcatggtgagcctcctgattctagctgccgcagcggcaactgtggtgatcttgctgctagtcgtgagactatgggcggtcattcggccccttcacgtcgtttcccgagagtctctcacacccttgatagtagctggatccggtggacataccactgagattctgaggctggttggaagcttgtccggggcttactcacctaggcactatgtcatcgctgactctgatgaaatgagtgccaagaaaattgaatcttttgaatggtgctgtgtaatggaccaggaacatgtgttcccatctgtgtgtctgccctgctccttgggatacttggaataaagaaagtgatcattgtctacgttgagagcatctgccgagtggaaactttatccctgtctgggaagattctcttccacctctctgattacttcattgtgcagtggccggctctcaaggagaagtaccccaaatctgtgtaccttgggcgaattgtttgacaaatggcaacttcagagtcttgagaattttaacaaattaccaaataatgtttactataatatctgtcttta

SEQ ID NO: 8170 - DNA, 583 bp, Cricetulus griseus
tgcaatgtgatcgcgtccttccattttttgcccgtcgctttgagtatgaagacccttacctcactgaaattttgaaaaaagcagaagaacttttggaagaactttctggcttcattcctgaggttttggaacatgtttccggtgctcctgcacatcccagggctggctgataaggtcttcccacaccagaaggtgttttctgccatgttgaagaagctgttggctgagcacaagatgacttgggatcctgcccagccaccccgagacctgactgatgccttcctggatgaggtggaaaaagccaaagggaatcctgagagcagcttcaatgatgggaacctgctcatggtggtggctgacctgttcatggcggggatggtgacctcttcaaccacactgtcctgggccctgctcctcatgatcctgcacccggatgtgcagagccacgtccaacaggagattgatgatgtcatagggcaggagcggcatccagagatggcagaccaggcccacatgccctacaccaatgctgtcattcatgaggtgcagcgctttagggacattgccccattgggttttccac

SEQ ID NO: 8171 - DNA, 583 bp, Cricetulus griseus
ctccgatgtcagcgtctcttacttaagcactgccactttatttccccatttaaatgtgcccgtggttttatcagcctggtaacttaagagtccagatgtctaggataaaatggctgtcattctataaactgttcaccattctttaaggcttatatttacctcaggaaacttattctagtatgttctcaccaattgaaatctcaagtgataaatacttctttacacctacacactggtacctaattctgtcttagttcagtgagccataggtcaggcagctagatggttgtgtctatcacacagtgtggtgcccggctgtctggtaaaggctcttggtgggaggactgttactgtaaagttgggcagtttgggttagctccctgcactgattatgctgtgcacattctttcccttgactgtgaatgctcttacaaggtaatttacatatttgctttctgttgaaatgactgaaagtgtaaaatctaccagttgtttatgtcttgtatacagagtgtcatatgtatttaagttgtgtatttttatagagtaaagtcaaatagcaaaaaaaaaaaaaaaaaaaaaa

SEQ ID NO: 8172 - DNA, 583 bp, Cricetulus griseus
gtgccgtgggggaagacgtgcttgctgatcagctacacgaccaacgccttcccgggagagtatatccccacagtttttcgacaactactcagccaacgtgatggtggatgggaagccagtcaacttggggctgtgggatactgctggccaggaagactacgataggctacggccactctcctatcctcaaaccgatgtctttctgatctgcttctccctggtgagcccggcctcctttgagaacgtccgcgccaagtggtacccagaggtgcggcaccactgcccccacacacccatacttctggtgggcaccaagctggacctccgtgatgacaaggacaccattgaacggcttcgggacaagaagctggcacccatcacctatccgcagggtctggctatggcccgagagattggttctgtcaagtacctggagtgctcagctctgacccagagaggtctgaagacagtgtttgatgaggcaagtccgggcagtgctctgcccacctccagtgaaaaagccaggcaagaagtgcactgtcttctagacgccccgcctgaccagcccggctgagagcctggc

SEQ ID NO: 8173 - DNA, 583 bp, Cricetulus griseus
ctcggttctgacacctgcttctcagtgacatagatgctgatggtccctgcaaagaaaagagttagaatagaggagagccctaaaaaatgcatcttcccaactaagtcctgttacctacaagccaatccccagccaaagaaggtgtgcttgattcatttccatggagtcactagtgagagacactttgatgacccgatgggcaggatgggagacggctgccaaccctcctggtccttcctttgctcctggggccctttcattgtcctcgtttacacatctgccaaggggtggagtagtacttcgttttacaggtaaatttcaaggcacaatcagttttagggaagtgcttcaagaccttggcgacatgacagtgctaaattcccgctgaatttggtctctgttgccaggtgctctttaccgaatgagcgcgctcgcagggtgaaattcaggcataatttgcccaggcctgctgtcttgagtacaaatgtgaatgatgggactgactgcttgctgccaaactggaaatgttttgtggggatttactggcatggtatcattcctaggaaaaagaaaaaaaaaaaaa

SEQ ID NO: 8174 - DNA, 583 bp, Cricetulus griseus
tgcgggccgagctcaagagccatcaacccagagctgtcttctgcagagcccagcatgggtttcctgaccgccgttacgcaaggcctggtgcggggagcggataggatgagcaagtggacaagcaagcggggaccacgcaccttcgtcaagagccggggtgccaagagaaccggcatctatacctctaatggaaagtttgtgcagataaaggaaatggtcccagaatttgtcgtcccggacttgactggcttcaagctcaagccttatgttaattaccgagctcctgcaggcatagacacacccctgaccgccaaagaactcttcctgcaaacagctgcacctgctattgaaaaagactttaatagaagggacttttgatgctgacaacttggagaaatatggctttgagcccacacaggaaggcaagctcttccagttgtatcctaaaaatttcccacgctagaaaacagtgacagtgaccaaaagtttgcctacaaagtggagataatgcaagccttggattctgagtgtctcgaagagtaggcgcttccttgtgcatttctattaaaggcctttagtatct

SEQ ID NO: 8175 - DNA, 583 bp, Cricetulus griseus
cgccccgcccggcgcgcgcctcactgggccgagctgctcgggacaccgccggagctgctcccgccgccatccccgccgggccaaaggaagcgagccgggccggagctggcgggcgcgcggccccgggggccgccatggaccacaagcccctgttgcaggagcgcccgcccgcctacaacctggaggccggccagggcgactacgagtgcggcccgcacggctacggggccatccccaccgcgcccccgccgccgccttacccctacctcgtcacaggggatcccccaccagccacccccgggtctatagcatccacagtcgaacggtcacccggtatcctgccaactccatcgtcgtggtcggaggctgcccggtctgcagggttggtgtcctggagtactgcttcacctgcctgggcatcttcttggccatcgtcctgtttccttttgggttcatctgctgctttgcattgaggaagcgaagatgccccaactgtggagcagtctttagttaaagggacacacacccggttttcctacattcagctatcttttctaatgtaaatgttgtgtacaatagtttt

SEQ ID NO: 8176 - DNA, 583 bp, Cricetulus griseus
gaagacctgatcaaatacctggatcctgaatatatcgatcgcattgccatacctgatgcctcaaagttgcagttcatcttagcagaggaacagttcatcctttcccaggcagcactcttgcaacaagtggatgccttggtgcccatgctggacagtgcttctataaaagctgttcctgagcatgctgcccgcctgcagcgcttggcccagatccacatccagcagcaggaccagtgtatggagatcagtgaggagtccaaggctctcctggaggaatataacaagactacaatgcttctctccaagcaattcgtgcagtgggatgaactactctgccagctagaggctgccaagcaagtgaagccagcagaagaatgacagttgcttactgtgccaggccagggaaaggggggcagctccagggccctgtgccaccctgtctttgtgaggcagagacagctttgtatttattcaattcaaagactacctgtctgctcagttgggctctgaggtcagagatcaggttaccttagagtcatgatttgcactcccatcagtgtatttattccaatgacaataaact

SEQ ID NO: 8177 - DNA, 583 bp, Cricetulus griseus
  modified_base (570)..(570): a, c, t, g, unknown or other
cgcggctccccgctgcgcctgcgtgatcctgtcgcgccccacgcgcgggctcgcgctcgggctcccgcccggcctctgtcccgcagcccccggcccgtcccgccgcggcccaggccgccgcgcgtggcgccagcaccatgctcttctactcctttttcaaatcccttgtgggcaaggatgtggtcgtggaactcaagaatgacctgagcatctgtggaaccctccactctgtggaccagtacctcaatatcaaactcaccgacatcagcgtcacggaccctgagaagtaccctcacatgttgtcagtcaagaactgcttcatcaggggctcggtggtccggtacgtgcagctgccggcagacgaggtggacacgcagctgctgcaggatgcagccaggaaggaagcccttcagcagaaacagtgatgccctctccccctcctcccgttccgttcccattggtgacccctaacgtgatgtccagctgaggacaaggacacccccggcaagtgcttcaggtgttttcgtttgttaatgattttttttttttctttgatgcagctgaaaaaanaaaaaaaaaaaaa

SEQ ID NO: 8178 - DNA, 582 bp, Cricetulus griseus
agcggcagcggcgaccacagcgggagaagcagcactttagccgcctgcagccccaacctggaaggaagatgctaattaaagtgaagacgctgactggaaaggagattgaaattgacattgaacccacagacaaggtggagcgaatcaaagagcgtgtggaagagaaagagggaatccccccacaacagcagcggctcatctacagtggcaaacaaatgaatgatgagaagacagcagctgattacaagattctaggtggctcggtcctccacctagtgttggctcttagaggaggaggtggtcttgggcaatgatgaacctcggttccacttcacctccttgccctgtcgctcataatgaagcatcacacgtcctctcactctctgggacaccagaactactgccccctcccttcggatgcccaactcttgtgtgtctactggtgggagaatgtgaggaccccacgggtgcggtgttactggcccaaattggccattactggctattgagttttagtttgtcagtcctgtgtgcttccctctcttatggctatgtccttggttgtcaataaaatatttcctg

SEQ ID NO: 8179 - DNA, 582 bp, Cricetulus griseus
ggcaggcaagcaggccgggaagcagcagggtgggaggcgtagcggggaccgcagcttcagcagcggcctcggtggctatggcccggatcaaggtgggagatgccatcccctcagtggaggtgtttgaaagggagcctggcaagaaggtgaacctggcggagctgttcaaaggcaagaaaggtgtgctgtttggagttcctggggcatttacacctggctgttctaagacccacctgcctgggtttgtggagcaagccgaggctctgaaggccaagggagtgcaggtgttggcatgtctgagtgttaatgatgtctttgtgactgaagagtggggtcgagcccacaaggcagaaggcaaggttcggctcctggctgaccccactggggcctttgggaaggagacagacttactactagatgattctttggtgtctctctttgggaatcgccggctgaagaggttctccatggtgatagacaatggcgtagtgaaggcactgaatgtggagccagatggcacaggcctcacctgcagcctggcccccaacactcatctcacaactctgaggctctggccggatg

SEQ ID NO: 8180 - DNA, 582 bp, Cricetulus griseus
gcgtggtgcataaggaagcccgggagtcggccgctctcttttcctcaggctgccgggaagatggcggacattcagaccgagcgtgcttaccaaaagcagccgacaatctttcaaaacaagaagcgtgttcttctgggagaaactggcaaggaaaaactccctcggtactacaaaaacatcggtctaggcttcaagactcccaaggaggccatcgagggcacctacatagacaagaaatgccccttcactggtaacgtctccatccgaggtcggatcctgtctggggttgtgaccaagatgaagatgcagcggaccattgtcatccgtcgggattacctccattacatccgaaagtacaatcgctttgagaagcgccacaagaacatgtctgtgcacctgtccccgtgcttcagggatgtacagattggcgacattgtcaccgtgggagagtgcaggcccctgagcaagaccgtgcgcttcaatgtactcaaggtcactaaggctgctggcaccaagaagcagtttcagaagttctgagaggactctagctaactccctggaacaaataaagttattttccaa

SEQ ID NO: 8181 - DNA, 582 bp, Cricetulus griseus
gttcatgcggggatggtgacctcttcaaccacactgtcctgggccctgctgctcatgatcctgtacccggatgtgcagagccgtgtccaaaaggaaaattgatgaagtcatagggcaggagcggtgtccagagatggcagaccaggcccacatgccctacaccaatgctgtcattcatgaggtgcagcgctttagtgacatcctcccactgggggtgcctcacaagacatctcgagacattgaagtacagggttttgttatccctaaggggacgaccctcatcaccaacctgtcctcggtgctgaaggatgagactgtctgggagaagcccctcctcttccattgggggagcccctggcccgccatggagctcttcctcttcttcacctgcctcctgcagcgctttagcttctcggtgcctgatggacagccgaaagcccagtgaccatggggtctttgcaatgcccgttgccccctcccccctaccagctctgtgctgtactgcgccagcagggtcactaattccagtcctgctctgttgctaggactgaaccctgcacaataaactagtcttgtggctgc

SEQ ID NO: 8182 - DNA, 582 bp, Cricetulus griseus
cgagcaggccaagctatgcctgggcccccactaggtcccatcttggggcagcgaggcgtctctatcaaccagttctgcaaagagttcaacgagaagacaaaggacatcaaagaaggcattcccctgcctacaaagatttttgtgaagcctgacaggacatttgagcttaagattgggcaacccactatttcctacttcttgaaggcagcagctgggattgagaagggggcccgacaaacagggaaagaggtagcaggcctggtgagtttgaagcacatatatgagattgcctgtgtcaaagctaaggatgatgcttttgccctgcaagatgtgcccctgtcttctgttgtccgttccatcattggctctgcccgttccctgggcattcgtgtggtgaaagacctcagtgcagaagaactggcagctttccagaaggaacgagccgtggttttggctgcacagaaagaggcagatttggcagcccaggcagcagctgccaagaagtgatcccagccttccacactctgggattttgaaagaagagccgagaagagagcctaccgagaaagctgaaccaaagga

SEQ ID NO: 8183 - DNA, 582 bp, Cricetulus griseus
caggagacagaggtccggcttttctagggactctgttagttggtgaccacaatgaaaaatggaaaccaagatgatccggtacctggcactcttcacaggcgcaagagctccaaagaatggctggaaccacagtcgctttcttttatggaggctttagctaaagaagatattgatgcagctgttcaatcaatattatatagagaaaattatgtaatgaaggaactagataagtatttgtatcatcacgacttcttacatgcaagaagaaaagagatgttgtataaaaaatgggttgagcatgtggcagatcctctacagaaaaaaattacagaaaaagtttgttcacataagaagattaaaaagaggagacgacaagaattagaaaactttttgaggcatgtaaataagaagaaaactgcatttatagagcattatgatccaaaagagtatgatcctttttatatggacaagaaggaccccaattttctgaaggttatcatgccaccatttcgtgatcctttgaaaaaagcaacaatatgacaaggatgatgaaaagagaactcttcttcagtgtgagactgg

SEQ ID NO: 8184 - DNA, 582 bp, Cricetulus griseus
gtgtgggggttatccgtgcattagcttcaatgtcttgatggttcataagcgaagccacactggtgaacgcccgttccagtgtaatcagtgcggggcatcttttactcagaaaggtaacctcctccgccacattaagctgcacacaggggaaaaacctttcaagtgccacctctgcaactacgcatgccaaaggagagatgcgctcacgggacacctgaggacgcactctgtggagaagccctacaagtgtgaattctgtggaaggagctacaagcagagaagttccctggaggagcacaaggagcgatgccgcacgtttcttcagaattctgacctgggggatgccacaagtgtggaggcaagacacatcaaagcggagatgggaagtgaaagagcgctcgttctggacagattagcaagcaatgtggcaaaacgaaagagttcaatgcctcagaagttcattggtgagaagcgtcactgctttgatgtcaactacaatcccagctacatgtacgagaaggagagtgagataatgcagacccgaatgatggaccaagccatcaataatgccatcagctatct

SEQ ID NO: 8185 - DNA, 581 bp, Cricetulus griseus
tccatcatgtcgcaagatcaaggtgaaaaggagaaccccatgcgggaacttcgcatccgcaagctctgcctcaatatctgtgttggggagagcggagataggctgaccagggcggccaaggtgttggagcagctcacgggccagacaccggtgttttccaaagccagatacaccgtcaggtcctttggcatcaggagaaatgaaaagattgccgtccactgcactgtccgtggagccaaggcagaagaaattctggagaaaggtctgaaggtgcgggagtatgaattacggaaaaataacttctcagacaccggaaactttggctttgggattcaggaacacattgatctgggcatcaagtatgacccgagcattgggatctatggcctggacttctatgtggtgctgggtaggccaggtttcagcatcgcagacaagaagcgcaggacaggctgcattggggccaaacacagaatcagcaaagaggaggccatgcgctggttccagcagaagtatgatgggatcatccttcctggcaaataaattttattcaaaaggccaataaaaatttttctcagaaa

SEQ ID NO: 8186 - DNA, 581 bp, Cricetulus griseus
  modified_base (72)..(72): a, c, t, g, unknown or other
gtgaacacggaaatcaaggatgctgtggttgtccctgtgccacagacaggttcaaattcactgcacctgcanagggcgctccgcctgaagttataccagtctgatggaactagaagggaacttcacagaagaatctttacagccccagccactacaaacagaaatgtttctgctctggtggcttccctggtcttctccgttcccctactgacttgtttgtcctgacttggagtaaaaaaggaaatgaggagagaatatcaagtgaccaggatcccaagaagcagagcctgcagtgggtcatggaaagatgtcttagggagtgagttcaaaaggaatcagttggcaaaaacaacacttggtacaaacaaggctgaaagtgacgaaaggaccagacagacatgagatcctctttcaagcagtgcagagggaatcccagaacagacttcaaatgcagtgtatgcttctttggagggttctgtaccattagccttctccactggaaatgacacacaacttttgttgttgttgttgttgttgttgttgttgttgttgttgttcagtaaacaaaaaaaaaaaaaaaa

SEQ ID NO: 8187 - DNA, 581 bp, Cricetulus griseus
ctatgagcgacagttcctccggacgactgcaaaggctttgccggagggtgcctgccacctcagctgcttgcagattgcctccttcttgctctccaagcagagccgcctgacaggtcccagtgggctgagcaactaccacctgaagactgccctgctgcacctcctgctatcccggccggctgctgactggaaggccagccagctggatgtgcgtctgcaggacctcttctgcttcctggagaggagcctactggagaaaaagctccatcacttctttgtgggcaaccgcaaggtgcctgaggcgatgggactcccagaggtcgtgcggagagcggagcctataaacctcttccggcccttcgtcctgcagaggactctttaccacagcacagtggactcattctatgaaatgcttaagaatgccccgacactcgtcagcgaatattccctccatgtctcttcagaccgtgcaagcccaccaccaaaaccaggcctgcttctgaagcggcaggctcttggggtttcttgctgccttatttatattaaaggaagaattaaattctcgtaaaaaaaaaaaaaaa

SEQ ID NO: 8188 - DNA, 581 bp, Cricetulus griseus
  modified_base (294)..(294): a, c, t, g, unknown or other
aaatgattgcgtagatggcgctgggtgcttgcctctccctcgagggtggcaaaggtgatgttcgtcctcatttgtgtagccactttgcttgtgatccttggaattatcctagcaacagcattgtcatagcaaccacacctcaagagctctttgtcctcagagaatccgaccacacctgcaacagagtcagtgtcctgtccttccacttgtaatctcagaccccgggggctagtgccgagagtatgtgcaggacaccaaagcctagtggactccactgactgctgactgtgtctntgggtgctcactctgtcacaacctcattggttggatttgatgtagctgtgctgattcagaacaccaagtgtgagagatcctgaactatttagaaaccaccaacccctacagtggtgagtatcactcattcacctcctcacacctcccagcctgacaccccatgtgctgagagctactgcaggaggctgggctgtgtgtcctggtctagagctagcctgtagtggggacactcctgcctagaaactcctacatcctgcctggaagctcccacttcctgcctgaaagct

SEQ ID NO: 8189 - DNA, 581 bp, Cricetulus griseus
ggagacttccagctcccacggcctgctacagctggccgtaccatttcctgcgcaagttcggctctgacaagggcgtgttctcttttgaagctggccgccgttgtaactcgggtgagggcctttttgccttcagcagtccacgtgccccagacatatgcggagctgtggctgccgccattgcccgccacgcgggaccggcgttccagaactggccatgtccccaccctgccccctgcctcgggccctttccctaccctccctagagccccctggagagcttcaggaggtggccccgggagtttgagctagccacttccagaaagctgcctaggactgaccctgggcctcaaagcctgccactgctgctcagcccctcacaagatggaacagtatctggtctgtatgcgtctgtgtccaagcagaccagcaggcccgcagccagtgggaattacctctatgagaacctgtgcatgctggagaccagtcctgagctgtccaatggggctcccgagtcccaagagggccctcttggtggccacagccccctggccagccccatctaccacaacaacgaggacctg

SEQ ID NO: 8190 - DNA, 580 bp, Cricetulus griseus
ccacagggtcctttggacctgggttttcacacatgcaggggatgatgagcgatcaagcccctagaatgggactagcattacctggcatgggaggccccgggccagtaggaactccagacattcctcttggtacatctccatccatgccaggccacaacccaatgagaccaccagccttttctccagcaaggcatcgaggtgggaaccgtcatcaccggatgatgtcaccagcacaatctacaatgcccggccaggccgcgctgatgaccaatccagctgctgctgtggccattgggcatgggtggatttagccaaggacctggcaacccaggaaacatgatgttttaagctgctacgattggatgtgccgatccttgtcaacatgagattccaggccctgcgagctgctctgatggagttccaggagtcctcactgttggtcatgcaataggagaagagcgacccggggctgctgtgggggaatagggaaccgagaatgtatggatttaccggaaaacaaattattcatttaatcagcaggtgtgtttttttaagatttattttttaaaaattatttttg

SEQ ID NO: 8191 - DNA, 580 bp, Cricetulus griseus
cggcggcggcggcggccggctggcccgggaacgcggcacggagcgcagggatgcggcgtccagcccggtctcaagattctgccctccaagacagtcttgccatgattggataggacccccagataaatactcaaaccttcgtccagttctttttcatgttcctgaaaacgagtcccccttggaacaaaggctcagagaattgagacaagaaactcaagaatggaaccagcagttctgggcaaaccagaatttgacttttaataaggaaaaagaagaattcatttactcaagactgcaagctaaaggcttgggcctgcgaaccgagtcaggtcaaagagcaacactggatgcagaggagatggctgacttttataaggagtttctgagtaagaatttccagaagcacatgtcttataaccgagactggtacaagcgtaattttgccatcacgttcttcatggggaaagtggcgctcgagaggatgtggaacaagctcagacagaagcaaaagagacaagcagttaggagacttaaacttaaactaaataaataaataaataaataaataaagttaattaat

SEQ ID NO: 8192 - DNA, 580 bp, Cricetulus griseus
  modified_base (277)..(277): a, c, t, g, unknown or other
aggtgagcatagctaccccaaagcagaaacccaaaactccattctgcttcgttatcaatgccctgtctcagagatactttcttcaagccaatgaccagaaagatctgaaggactgggttgaagctttgaaccaagccagcaagattaccgtacccaaggcgggggccgtacccatggccactgaagttctcagaaacctaactgctcctcccaacccagacaagaagcctcagatggcctacaagactgagatcatcgggggatggtggtgcaaacncccatcagccagaatggtgggatgggcaggaagggactggagccgagggtctcacgccttcctgcggaggtctcagtcattaagagtggctactgtgtgaagcaagggaatgtgaggtaagagttggaaacgtcgcttctttgccctcgatgacttttaccatctgctacttcaagtgtgagcaggacagagagcctctgcgtactatactgctcaaagatgttctcaagactcacgagtgtctcgtcaagtctggtgatctcttaatgagggacaacctgtttgaaatcataaccacctcca

SEQ ID NO: 8193 - DNA, 579 bp, Cricetulus griseus
ttgcaggcgctggtcaccgagttccaggagaccgagagccaagacgccaagcagcaagtcctcgccaacctcgccaacttcgcctatgacccgagcaactaccagtatctgcggcaactgcaagtcctagacttgttcctcgattcgctgtccgaagagaacgaaaccctagtgaagtttgccattgggggcctctgcaacctgtgcccagacaaggccaacaaggagcacatcctacaggccgggggcctctcgctcatcaccaactgtctgtccagtcctgacgaggagaccgtgttatctgctgtcaccacactcatttacttgagctcatccggtgctggctcccacccggagctcacctccttgcccgtggtccagtgcatgctgcgcttttcgatttcagccaacacaaggctccggaacctggcccagatcttcctagaggacttctgctccccgagcctggtggctgaggcccaaagccaacaggctcattctgccctgggaatcccactgccaaagactaagttagtcccacagcagccctgatccaagaagacctcaagaccctgccac

SEQ ID NO: 8194 - DNA, 579 bp, Cricetulus griseus
ccgccaggttttgcctgagcccgccagcgtccgggatggagagctcagatgaagccgcggacagtaagcagcgtgtccacttgcgccctgactcgctgcgtgctgccgcaccggctacgctgcacctcctgccctgcgaggttcaggtgagccggccagctccggtggaacgcttcttcacgcccgcggtgcgccacggtgtagacgggctgcaggtatcgtttcggggtcgcggcttgcggggcgaggaggtggctgtgccgccaggtttttcgggattcgtgatggtgacggaggagatgggagagggactgatagggaagctgaacttctcgggggacgcggaagacaaaacggaagagacccaggaaccgctggagcgcgatttcgaccgctttatgggagctaccggcagctttagccacttcactttgtggggtctggaaacggtccctggcccggatgccaaagtgcacaaggccctaggttggcccagcctcgctgcagcgattcacgcacaggtgcctgaggactgagagccacatcatgaaaatgaaagtcacagatcccttcacacca

SEQ ID NO: 8195 - DNA, 578 bp, Cricetulus griseus
agaaactgcactggcattttataaagctaagaatcctactgacaaaccaataattggaatttctacatacaatgttgtaccatttgaagctggacagtatttcaataaaatacagtgcttctgctttgaagagcaaaggcttaatccacaggaagaagtagatatgccagtgtttttctacattgatcctgaatttgcagaagatccaagaatggtgaatgttgatctcatcactctttcttacactttttttgaagcaaaggaagggcacaagttgccagttccgggctataattgaagtagcttccaagacttgcttcagatttgtgatttttggaaaatcatgtattgtgctttctcagaagagaaatattctacagtaatgtatattgaaaccttgtatttaaatggttctcctttctttccaacttcaacttcatttacccaatttaagactgagagaataggttcaaaactcagttctagtaaagaaaagatgctgctgtcttgtgatggtacttaagggcaggaaaagaacatttgctctgtgttaagtaatagagcaggaatgttgttca

SEQ ID NO: 8196 - DNA, 577 bp, Cricetulus griseus
  modified_base (560)..(560): a, c, t, g, unknown or other
ctctccaagttcttggttatggagtatctggcccatcctggtacactcagcttggctgctggagttgcttgtggcatgtgcttgggctggggcctccggggccaccttgggatgctcccccagaactcaacaagggagaaaagtaaagacacagagatggggaccgaagcaagcatcctgggggagagtggggagtacaaaatgattcttgtggttcgaactgacctaaagatgggaaaagggaaggttgctgcccagtgttcccatgctgctgtttctgcctacaagcagattcaaaggagaaaccctcaagtgctcaaagagtgggagtactgtggccagcccaaagtggtggtcaaagccccagatgaagacaccctcattgaattactgacccatgcaaaaacgttgggactgactgtaagtttaattcaagatgctggacgtactcagattgaaccaggctctcgaactgtccctgggaattggtccaggaccagtagaactaatcgatgaagttaccggccaaccttaaaaactttactagatgagtcttttgngtgatggtgattctgtc

SEQ ID NO: 8197 - DNA, 577 bp, Cricetulus griseus
tcgtctgcgccccggaagctgcccctgctcgggggtcatgatgggcagcaagatggcttccgccagcagggtcgtgcaggtagttaaaccacatgctccattaataaggttccctgacagaagagacaatcctaaactcagtgcctcagaaactttgagatcttctgggctaccctctcactcgtctataatttcacagcattctaaaggaagtatatccccagatttgctggtgcatccagggccaccagacactgcagaaatactaaaaacattacctcagaaatacagaaggaaacctatatctcaagaagaaatggaatttatccaacgtggaggtccagaatgatcattgtggctgctgtttgtcgtcagacaaaaggattatctttacaataaaggacttccaaaatgtcaagtggaaattgtatattaaacaaccttaataaatatactgcaaaaagaatgaagtatagaaactctagatggccacttgtatctcctctatgtatcttggtcagcttctccacgagctgtcctgcatagctattaaagtcacctttttacatgttagcct

SEQ ID NO: 8198 - DNA, 577 bp, Cricetulus griseus
agcagggcccatggacaccttcagcacgaagagcctggccctgcaggcccagaagaaagtcctcagtaagatggcctccaaggccatggtggccgtatttgtggacgacaccagcagcgagatcctggatgaactgtaccaagccaccaaggagttcacccgcagccggaaggaggcgcagagggtggtgaagaacctggtgaaggtggcggtgaagctgtcggtgctgctgcgggccggtcagctggatagcgatgagctggcccagtttgcgacggttccagggccggatgcgcagtctggccatgacagccctcagcttccaccaggtggacttcaccttcgaccggcgagtgctggccgcggggctgctggagtgcagggatctgctgcatcaggccacaggcacgcacctcactgccaagtcccatggccgcatcaaccacgtcttcggccactttgccaacggcgacttcctggccgcgctgtacagcccagcagaaccctaccggagacacctgcaccgcatctgcgacggcctcgggaggatgctggacgagggcggcatctgacctgg

SEQ ID NO: 8199 - DNA, 577 bp, Cricetulus griseus
gtctacttccagagtccccctggggctgcaggcgaaggcccggggggcgcggatgatgatggcccggtgagacggcaagggaaggtcaccgtcaagtacgaccgcaaggagctacggaagcgcctcaacctggaggagtggatcttagaacagctcacttgtctctacgactgccaggaagaggagattccagagctggagatagatgtggatgaactcttggacatggaaagtgatgatacccgggctgctagagtcaaggagctgttagttgactgttacaaacccactgaggccttcatctctggcctgctggacaagatccggggcatgcagaagctgagcacaccccagaagaagtagggtcctgacccagatgaccatggctcccacaggacaatcgctgcccccaacctcgtagcaacagcaataccggggaccctgcagccaggcctggcgccatgaacagggatccccccgtgcccctgcctaggggcacttcccttgccctcagttttccattttttgggggttttttattgttattaaactgatgggactttttgtgttttttata

SEQ ID NO: 8200 - DNA, 577 bp, Cricetulus griseus
gggatcggaggttctagggcgagcgtctcccgggccgaaggaggaagatggcggtggaatcgcgcgttacccaggaggagattaaagaaggagcccgagaagccgatcgaccgcgagaagacctgccccgctcctgctgcgggtcttcaccaccaacaacggccgccaccacaggatggacgagttcctcccgcgggaacgtgccctcgagcgagctgcagatctacacctggatggatgcaaccttgaaaagaactgactagtttagtaaaggaagtctacccagaagccagaaagaagggcacacacttcaatttttgcaattgtttttatggatcttaaacgacctggatatcgagtttaaggagattggcagcaccatgtctggcaggaagggcactgatgactccatgaccctgcagtcacagaagttccaaataggggattatctggacatagccatcactcctccaaatcgagcacctccttcaggacggatgagaccgtactaaattctattgactttgtaaaaaaaagttaattaatctgttcaatcaaaaaaaaaaaaaaaaaaaaa

SEQ ID NO: 8201 - DNA, 575 bp, Cricetulus griseus
ccttaaccaagaagttgcagttcgtgcacatcagtttggttggtccaagagagttgccaggctcacttatctaagaatatgcggaggcttgtttcagatctgtatgttcgtgacaactgccatcctttcaaagccactgtgttagtctgggtccagcttccaatgtggatcttcatatccgttgccctccggaactttagcacaggggcagcacactcagaaggtgtttctgttcaggagcagttagctgctggtggggtcctgtggtttcctgatctcactgcagtggactccacttggattctgcctgtctccgttggtgtggtcaatttactaatagtggagatttttgctctccaaaagctttcaatgtctcgttttcaaatgtatgttacacactttgtccgagctgtatctgtgctgatgatcccggtggctgcaacagttccttcttctcttgttctctactggctgtgctccagcctcatgggcctctcccagaatctgctgctccgctcccctggattccgacaactttgccggataccaccaaccaagtcggattcagagacccc

SEQ ID NO: 8202 - DNA, 574 bp, Cricetulus griseus
ccctgatccccctggctttggagggcacagatgttggcaaggtgaaggcagcccacggactagccaagattgcggctgtctctaatccagacatcgccttccctggggaaagggtgtatgaagtggtgcggcccctcgtgagtctcctggatacacagagggatgggcttcagaactatgaggctctcctaggtctcaccaacctgtctgggcgcagtgacaaacttaggcagaagattttcaaggagaaggccttgccagacattgagaactacatgtttgaaaccatgaccagctacggcaggcagccactgaatgcatgtgtaacatggtgatcaacaaggaggttcaggagaggttcctggctgatgggaatgaccgtctaaagctggtggtgttgctctgcggagagggaggatggacaaactgacagaatgcagccacccacaaaaaaaaaaaaaaaaaaaaaaaaaaaaaaaaaaaaaaaaaaaaaaaaaaaaaaaaaaaaaaaaaaaaaaaaaaaaaaaaaaaaaaaaaaaaaaaaaaaaaaaaaaaaaaaaaaaaaaaaaaaaaa

SEQ ID NO: 8203 - DNA, 574 bp, Cricetulus griseus
gcagctgcggctgctgcaaactgactgcgcctggagccggtggcacacaggtgctccggaggagcaagaggagtagttagatagctgctaaggctaaagcacaccccagagttttcacctgtggacaaaatagtgcagagccagtcagtgaaagcaaagagaaagccgagtctgaacagtgatcagtcacgtctagagaaaccaaagttgaaaggggagaagtatgtgagagtgtgtgtgtgtgtgtgtgtgtgtgtgtgtgtgtgtgtgtgtgtgtgtgtgtgtgtagcctgagattgaactcagggctttgcaaaagccaggcaagcactctaccattgagctacatcctcaaaccttaatgttcttgattgctttaaagaagcatttcatctgattggctggctcaaagcaggcattggtgatctctgctacagaaagctgctcatggtaggctttctcagcagagatgacaggggcatatgtggccagaggattggcagtcatcttccttgcctgtgatgagctgctcaggtggaagagctggctaccgttcccgacagctaagagtcga

SEQ ID NO: 8204 - DNA, 574 bp, Cricetulus griseus
gggatgtcggtgcgagttgtctcttcctgtgtgaacatggtgcggaccaaagcagactacgttccgggagcctacagaaaagtggtggtttctcgagcccccaggaaggtgcttggctcctccacctttgtcacaaactcttcatcgtgttcgtcgagaaaagctgaaaataaatatgcaggagggaatccagtttgtgtgcgcccaactccaaagtggcaaaaaggcattggagaattcttcaggctgtcccctaaagactctgaaaaagagaaccatgttcctgaagaagcagggtgcagtggcttaggaacagcaaagagaaaaccatgtcctttgcaacctgatcacacagatgaagaaaatgcatagaactatctgaacaatgtcttcagtttacttaggtatactgggatgcaaatttggatagatgtgtttgttcaattggcttgttgaataggcatttagttaaggggggcactaaaatttagccattcaaaagcaactggctataaaggggagaatttttataatctgtaaattataattgcaaaataaaaaaaaaagtgaatta

SEQ ID NO: 8205 - DNA, 574 bp, Cricetulus griseus
gacaacaatatcacctttcttccctttaagatggcacacacatatataaacacttagaggaatttaaaagttacccaagagtagtaataaaaggaagcaggttggaacagatacatagcttagcattcataacagatttaacacaaatctgtaaaaatttaacctaatttttttgcagtggaaaaaaagatactgaaaatggttgcatttgcgtagttaatatagttaatagtcatttgtgacttacatatttcttagttcagcataggtatttcattctcttgttatcattggtggtcactatcctctacagagtcactgaagaattttttctattggactaaaaggaaataaatgaacactgatctaggcatttaacagtgttagcatggtatgtgtattctgaggaattaaatgcaaattcttcaacagcactggcctccttacctctgttagtcatatgaaaccttgttcattcccccaaatactgcaatgttcatatttgtacaatcttccttatcatgacttaagttctgcttttcattaaccatacttgatattagttatagagttt

SEQ ID NO: 8206 - DNA, 574 bp, Cricetulus griseus
tgtcccaccccagattctgcaaactgcagtgtatatttttggtggtggagggaggcatctgcatgagccttcttgtactggagtctctgatgagggtagagggaagatgagagattcgcatccacttcagggtccccactgaagggagcaatctgagttgaatatggtgtttaacctaatgtagtatttaatgaattctagaagcctggctgtgggtggtgatttggtcagcatatcttaggtatataataactttgaagccataacttttaactggtagtggttttattttaattctattttatttttattttattttaaccatctctatgtgacaattacctcttagtctgtttgtttttaaagaaatccctaaaacaaacaaaacaccacaaaaaattactctagaatcaaacgcacatagttcagtcactggaaatgtttgtctttgcacctgagcctgtttccactcagcagtgagttcctcctccccctggggacttggtggcttgtattccatgcacatccccatccctgagcaccctcagcctctcgtgcattgtccacctggttg

SEQ ID NO: 8207 - DNA, 573 bp, Cricetulus griseus
aaaaccgttaaaaaaaaaaaaaaaaaaaaaaaagtccaggttcaattctcagcacccacctggcagctcacacctgtctataactccagttccaggggatttgacactctgacacagacatacatgcaagcaaaacaccaatttacagttacataagagccttaaactggacaaaaggactcttttgactgccttaaaatgtgactagctctcctttccagacatgctagtttctttagggtctgttatttaagtaatgccttactagtgtcctaatgcttctaaagagtagaacttacagggtcttctagagcttttaattttacataatgaatggaaatttaactgttaggtattaaacctgtttgtacattagtaatttaaacatgaaaggaataatccgcctatgctgatgtgtgataaatacatgactgcaacattagtatatttgtggttaaggtttttttggttgttttgtataaccagttatacagaagcaggacttcatgaccataacatgacctcgaaggaccatgttgcatatttaacactgaatgaaaagtaagttgtata

SEQ ID NO: 8208 - DNA, 573 bp, Cricetulus griseus
  modified_base (562)..(562): a, c, t, g, unknown or other
cacacatgcttacacaaagtaatacaaatacaaacattctacacactgactcttaactgggtgaactctatgaaaggaggcccagagtgggtgctttcaccaaaaatttgtctgccctagatggattgggtcatcattagccattagcctttctcccttgcagcttaccatgtttctggaatgaaccgttctagtgtaccctacaacctctccacatcactggtggaaagacatcagtggtacaactggacttggcttcctgagaaagattggtccctggtcctatgcaagagaaaccctaacacaccagagagaattgtggatgggtcttcttaccccctttctacctgcctgtagctctccattttgatcaaatagttcattgcattctgaagtttggggattatgttttctttcctcttcctttcaaatcctttaatgataagaaaacaagtgaagcttgctgcaagctaaaatttttaaatgatgtggaaacgcaaatgataccaagtaagagaatacagatattattaagaatttttttttgcaatgttaaaaaaanaaaaaaaaaaa

SEQ ID NO: 8209 - DNA, 573 bp, Cricetulus griseus
ggcggacgtgcagctccttgcgccccgtttcccgctcccgctctctcctccgcgcgccggcaggatggcccacaagcagatctactactcggacaagtacttcgacgagcactacgagtaccggcatgtcatgctacccagagaacttttccaaacaagtaccaaaaactcatctgatgtctgaagaggagtggaggagacttggtgtccaacagagtctaggttgggttcattacatgattcatgagccagagccgcatattcttctctttagacgacctcttccaaaagacaacaaaaatgaagtgcagctgggatcgcttaatctttttcaaatttaatgtatatgtgtatataaggtagtattcagtgaatacttaaaaactgtacaaatctttcatccatacctgtgcatgagtctgtattcttcacagcaacagagctcagttaatgcaactgcaagtaggttattttaagttgttcgagataaatttccttgtagttttttcttaatataagtagtgcctgttttactttacctgttacttttgttaataaagtttgtatgttgca

SEQ ID NO: 8210 - DNA, 573 bp, Cricetulus griseus
ttgtgaggcgtgtgggagcgccttcagtcaggcctctcaccttcaggaccatcagagactccacaccggggagaagcctttcaaatgcgatacttgcggcaagagcttcagccggaattcccaccttcggtcccatcacagggtgcacacgggagagaaaccctacaaatgcgaggagtgtggcaagagctttatctgtagctccaacctttacattcaccagagagtccacaccggagagaaaccctataagtgcgtggattgtgggaaagaatttagtcgcccttcgagtcttcaggcccaccagggcatacacacgggagagaaatcctacgtgtgcactgtgtgcggtaaaggctataccctgaattccaatcttcaggtccatctgcgagtccacaccggagagaagccctacaaatgtgacgtgtgtgggaaagtcttcagccgctcttcacagctacagtctcatcagagggttcacacaggggagaaaccttacaagtgtgaggtttgtggtaagagctttggttggcggtcaaatcttctaattcatcacagaatccacagcag

SEQ ID NO: 8211 - DNA, 572 bp, Cricetulus griseus
ccggaagagggatttcctgaaacagaagatctggctggaggccttgaaggctggagcatgggccaccattccacttggaggcttggtcagagataaaatacagagggtagaggagaccttggatctctacaggtcttactttgggctggatgatgcctcactggaaaatattgctaaggattttaacgtgtctgtaaatgaaatcaaggcacaccttaagtctttccatttgctaacaagggccaaagacatgtccttagaagaaaaactattgaaatatattgaatatatttcctctgttactggggggccgcttgccacaggaactttactttaggaagactttctatttgaagagtctcttcattgacaccgtgtcaagtgatgccaagactcttctcaataaggaggagttttttatcaaagaaggtggggtcgtgcatgtctgacgacacagaatactgggaagctctaacggagccatgaggcatgtaccttccaactggctttaggcactaacttacggccttactttgaaggagaaaactattttctgtagaaagaccagagga

SEQ ID NO: 8212 - DNA, 571 bp, Cricetulus griseus
caggaattggggaatttgtctgtaaatggttctaagagcagcacagcccaaactggtggcctcctgctcagcaccagtgtgaggtgggctccattgtcacgcttgcacatcgatgttccaaaggatttgaccaagcccacgataaccacgtctgatgagccagacacattgtataaacgcctgtccatcttagtgaaagcccatgacaaggctgtattagacagttacgaatattttgccgtgctcgctgctaaagaacttggcatttctattaatgtacatgagccgccaaggaagattgagcggttcactcttctcaagtcagtgcacattttcaagaagcacagggttcagtatgagatgaggacactctacagatgttttgagttaaaacacttgaccggatgcacagccaatgtctacttggaatatatccagcgaaacttacccgaaggggttgccatggaagtaacaaagacacagatacagcagttgccagaacacatcaagaagccgatgtgggaagcactcactgaggaaaaagaagaaagcaagtcatagcctggggatg

SEQ ID NO: 8213 - DNA, 571 bp, Cricetulus griseus
cccgggtggccgcaccatggagtcgggaaccgaggagtacgagctcaacggcgacctgcgcccgggctcccccggttcccccgacgcctcgccagcccgctggggttggaggaaccggcctatcaatgtaaaccattatgccaacaagaagagtgcggcggagagtatgctggacattgccctgctcatggccaacgcgtcgcagctgaaggccgtggtggaacagggccatgactttgccttcttcgtgccccttgtggttctcatctccatctctctcgtgctgcagattggagtgggtgtgctgctcatcttcttggtcaaatacgatcttaacaacccagccaagcacgccaagctggacttccttaataacctggccacaggactggttttcatcatcgtggtggtcaacatcttcattacggcctttggggtccagaagcctataatggacgtggcaccccggcagtaagacacccagagtccttaaagttatctgactcacagcccagccatccagacccctgcaactgccatggcctcaaggcatctctctccttgtgtgcag

SEQ ID NO: 8214 - DNA, 571 bp, Cricetulus griseus
ccatggcccctagcggaagaaagcggaaggccgcgccggcagagacagtggacaagcgcgagaaactggcggagggcccggcggtggtcattgagcattgcacgagctgacgcgtgtacgggcgccatgctgctgccctgagccaggctctgcagctggaggtcccagagctgcctgtgcaggtgaacccatccaagccgcggaggggcagcttcgaggtgacgcttctgcgcccggacaacagccgtgcggaactctggactggtattaagaagggcccgccacgaaagctaaaatttcctgagcctcaagaggtggttaaagaattgaagaagtatctttcataaggacgttgggcagggagtctccatgctgagctttcattccctggagatgttgaagcatttatgatagtgcatggccaaacctaagctatgtacctgaagccagtttcttcctcaccagaaatgatggtccagttgcgacgaagccctccaacaaggcattgtaaaagtgtttgaattggtttaataaaagttaaataaagtatctgagagcaaaaaaaaaaaaa

SEQ ID NO: 8215 - DNA, 571 bp, Cricetulus griseus
tgtctctcccggatgccgagacttgacacccagcagtctcccatggctccttatcacatccgccagtaccaggacagcgaccacaaaggtactggatttgttcacaaggggcatggaggagcacatcccccaccaccttctgccacgtgctgacgctgccccgaaccattctgctctttcttgggttgccacttgccatggtcctggtgtctggctcctggaggctagcgactgtgtgcatcttctctctgctcctagtgctgcggctccttgccaggcagccctggaaggagtatgtggccaagtgtttgcgcacagacatggctgacatcaccaagtcctacctgtgtgtgtgtggctcaggtttctgggtggctgagtctgggattcaggtggtgggcatagtgggtggtctgccagtcaaggatcccccagtagggaggaagcagctggagctcttacacctgtctgtgtcctcacaacatcgaggacagggaatagcgaaagcactgatcagaactgtcctccagtttgcacgggaccagggctacagtgatgttgtccttgagac

SEQ ID NO: 8216 - DNA, 570 bp, Cricetulus griseus
ggccgtgtctcgtctccttgttgccgggttgtctcctgttcccgggacctccgggcccagcagcatgacgtctgccttggagaactacatcaaccgaaccgtcgccgttatcacttctgatgggagaatgattgtgggaacactaaaaggttttgaccagactattaatttgattttggatgaaagccacgagagggtattcagctcttcacaaggagtggaacaagtggtattaggattatacatcgtgagaggtgacaatgtagcagtcattggagaaattgatgaagagacagactctgcactggacttggggaacatccgagccgaacctctgaactccgtagcacactgaagacacagtgtgtggttagatgtctgtaaatcctgtacagaaactgcgtcttctgaagatgacgtttagatttttttatgagtgtgtaattgtggattttgactttgtgttggtacattgtaatatgtaaatttaaatatttctacatttttattgggaaacattgcctaaattaataaatgcagttgcctgatttatttttctactaaatgata

SEQ ID NO: 8217 - DNA, 570 bp, Cricetulus griseus
cccgggagtcaaagccggttgtcaagccagtcctgtcccgcactcatctgccttttctttttttctctcaacatgacagatgccgctgtgtccttcgccaaggacttcttggcaggtggagtggctgcagccatctccaaatccccaaggaacagggggtccgtgtcttctggcgtggtaacctggccaatgtcatcagatacttccccaccccaggctctcaactgcaaagggaatgcttcccagatcccaagaatacccatatcttcatcagctggatgattgcacagtctgtcactgcacacggttcgtcgacgtatgatgatgcagtctggacgcaaaggaactgatatcatgtatactggcacaattgactgctggaggaagattgctcgtgatgaaggaagcatggcgtgcgaagcaataatattcatctgaccagttttctcttaaagccatttccataatgacaataatgatgggactcaattattattttttatttcagtcactcctgataataaattgaagaaataaaaatatctaagacggaaaaaaaaaaaaaaaaag

SEQ ID NO: 8218 - DNA, 570 bp, Cricetulus griseus
agtagtacgtaatatgaatgaccaagttctcttcgttgacagaagaaagtcacctgtgtttgaggatatgactgatgctgacatatgggctaataaaccccataccagactgataatatatatgtataaagattctgatgcagggggaatggctgtaaccctctctgtggaggatcaaaaaatgtttactctctcctgtaagaacaaagtcatctcctttcaggaaatggatccacctgaatatatcgatgatacaaaaagtgatatcatattctttgagagaggtgttccaggacataacaagatgcaatttgaatcttcactgtacaaaggacactttctagcttgtgaaaaggaggatgatgttttcagactcattttgaaagaaaaggatgaaaatggggataaatctgtaatgttcactgttgctaccttacctcacagttaggtatcaagtatgtttgtgttccagaaagatgattagaatgcatgagccttatgataagccattctgtgttgccatatgaaacacccgaggctgcataaattataaagcaaacaggttcattt

SEQ ID NO: 8219 - DNA, 569 bp, Cricetulus griseus
  modified_base (439)..(439): a, c, t, g, unknown or other
gtttctgcttttgtttttaaactgctgtcaaataggtatgacaaatggtatgttcatatgagggaaacattctacgccaaagttgggatattatattctaaagaacatttgaagtaggagctaatcatattaaatgtgaacttaaaactactggatttgtattaattaaattattgggattaattaaattaattaattaaattattgggattgtggttgaaaatttatagaataaaacctctggggtacagggcaattttttttctttttaactttttgtatttttttaaccagtcaaagtaagcttatcatggccttcctataagaacattggacctaaaagtaggttgcaaaataatttgaaaataatattttgaatgtgaaatatccttgagactccaagttaggtgaggcctcaagtacctcagactgggaaaanccggtgagttatacccagtttctaagaaaatagatgaaaatatgcagaactcgggatctagcttttacttaacaaaattaatagataagtgtaaattattcccccacccccagacagggtttctatgtgt

SEQ ID NO: 8220 - DNA, 569 bp, Cricetulus griseus
  modified_base (560)..(560): a, c, t, g, unknown or other
ggcttgtccaaaggaagctttggaatgaccagttaacatctaagaacttcaagctctggtccagaagcttaggtgaaaataaaagatgttggagatgtcacccaggaagcatttgatcttatgattaaagaaaacccatcttctcagtattggaaagaagtggcagaaaaacggaggaaagctctctatgaagcacttaaagaaaacgagaaacttcataaagaaattgaacagaaggacagtgaaattgcccgcctgaaaaaggagaataaggaattggcagaagtagcagaacacgtacagtacatggcagaggtaattgagaggctgagtcatgaacctctggatagcttcgaatcaccggatagtcaggaatttgattccgaattggaaactgttgaggattctgaagtggaagactcagaaactagcacatgtgctgaagagactgtgtcttcctccactgatgccaaaccatgtacatgaagtgtgaggtacactgccaactttgccctgcactacagctcctggtaaattaactacaacattgtaaaaaaaanaaaaaaaaa

SEQ ID NO: 8221 - DNA, 569 bp, Cricetulus griseus
caggaccatggccaacctcgagcgtaccttcattgccatcaagccagatggcgtacagcgtggcctggtgggcgatatcatcaagcgcttcgagcagaaggggttccgcctggtggccatgaagttccttcgggcttctgaggaacacctgaagcagcactacattgacctgaaagaccgtcctttcttcccagggctggtgaagtacatgaactcagggcctgtggtggccatggtctgggaggggctcaatgtggtaaagacaggtcgaatgatgctgggagagaccaatccagctgattctaagccaggcaccattcgaggggatttttgcattcaggttggcaggaacatcattcatggcagtgattcggtgcaaagtgcagagaaagagatcagtctatggtttaagcctgaagaactgattgactacaagccttgtgctcatgactgggtatatgagtagaggtggataacgctgggtctttttccacattactgatggatccctggacacggctcttcattccacagaataaatggatcatcttttctaaaataataaagac

SEQ ID NO: 8222 - DNA, 569 bp, Cricetulus griseus
gcagtgacgtgacacgcggcatgcggtgaggacgtgcgcgccctcgcttcttcctctttcttgactccatcttcgcggtagcagcttcggcgtccgcggtttagtcgccaacatgcagctctttgtgcgcgcccagggactacacacactcgaggtgaccggccaagagacggtcgctcagatcaaagctcatgtggcctcactggaaggcatttccccggaagatcaagtcgtgcttttggctggctcgccgctggaggatgaggccaccctaggccagtgtggcgtagaggccctgactactctggaagtagctggtcgcatgttgggaggtaaagttcatggttccctagctcgtgctggaaaagtgagaggtcaaactcccaaggtggccaaacaagaaaaaaaaaagaagaagacaggtcgggccaagcggcggatgcagtataaccgtcgctttgttaacgtggtgccaacctttggcaagaagaagggccctaatgctaattcctaagtccttctgtgattcttgcactctaataaagccactttgacccaaaaaaaaaaaa

SEQ ID NO: 8223 - DNA, 569 bp, Cricetulus griseus
gtctgaatctgaatggagaaagtcttggcgttcagcagagtcagggatgggtccattatatgatccatgaaccagaacctcacatcttactcttccggcggccactacccaagaagccaaagaaatgaagctgttgacccacctttcagcctcaagctttacacagctgtccttcctacaccttctgatagcatgattatgttgctttcttatttctcactttgatatttaaaggatgtttgttcaaaacactgtttgaatgtgttggtacctgctttgcttcttgagctgagccaccaatgccacaacctgtcagatgagtgtgacctcaaagacctagtgtgctctttatccagcaggcatatccatacttgccatctctgggaagcatgtgaaaatcagatcatggctgttacagggatagtgtgaatttgctgttgtagtttttactattgggtattgtatttatggtgacttaccgatttatgtttcaatatattggaaactttccattttatatgacaaatctcttctatgttacaagccttgattaaaggaagtttttataa

SEQ ID NO: 8224 - DNA, 568 bp, Cricetulus griseus
cctcaacacctcctttaagcactttattttctttgttcaggagtttaatctgattgataggcgtgaattggcaccacttcaggaattaattgagaagcttggatctaaagacagataaatgtttcttctagaacacagttaccctctcagctctatctactgctagcactctctcattgctgtctggtatggactagtgatactgactataagaaaacaggatcaaagacccattttgttgtctgcagagaaaattgtcccaaaggtaggttggccggaaagcttcagaacaagacctatatagcacagccaagtcagaggtgctgtgtggccacccctgtcctgtcactgtcctttgttgcaaccttatgactaacctgtagtttgttgctgatcttttgctcaagaaagtgattgagtttttccatgtgacagcataatggacataaagaattttcagctgcaacttactagtttctagaacaaatttcttaacacagatcagttttgcttcattttacaaattgaaatgttgttccatttctaatcccagcatttagagcttctg

SEQ ID NO: 8225 - DNA, 568 bp, Cricetulus griseus
gcagtgctaaaatagttcctaaaataagttatgcaagcaaaagttaaggaaaacctcaacaaaactgtacagaactcttctgtgtcaccatcctcatcgtcatcctcttcactatctactggggaaactcagacccaatcttcaagtcgattatcccaggtccccatgtcagctctgaaatctgttacttctgccaactttttctaatgggcctgttttagcaggaactgatggaaatgtgtatccatcagggggtcagccactgctaactactgctgctagtactttaacacccatctctactgggactgattcagttcttcaggacataagtctgacttcagcagccgaaaaaagaaaaaaaaaagttaatgtgtgtctgtgtctgtgtgtgtgtgtgtgtgtgtgtgtgtgtgtgtgtgtgtgtgtgtgtgtgtgtgtgtgtagaaccgaagggtttttttgttttttggtttttttttttttttttactttttttttagattgcgattaataacttttttttttttttttttttttggtagtacagattaacctttaatttaac

SEQ ID NO: 8226 - DNA, 568 bp, Cricetulus griseus
gccgccgtgtccgagcccaccaccgtgccgtttgacgtgaggccaggaggcgtcgtacattccttctcccaagacgtagggcccgggggcaagtttacatgcacgttcacatacgcttcccaaggagggaccaacgagcaatggcagatgagtctggggacgagtgaagacagtcagcacttcacttgtaccatctggaggccccaagggaagtcctacctctacttcacacagttcaaggctgagctgcggggtgctgagattgagtacgccatggcctattccaaagctgcgtttgagagagagagtgatgtcccccttaaaaatgaggaatttgaagtgaccaagacagcagtgtctcacaggcccggggccttcaaggctgagctctccaagctggtgatagtagccaaggcggcacgctcagagctgtgactctcacctgccatgggttgccctgtcccctcctcgggcgcactcgccccaactccttgtctggcacactggttcccacaggagctggtgtgaccctgtttacagctcacactgcagcactctgctgaactct

SEQ ID NO: 8227 - DNA, 568 bp, Cricetulus griseus
ggagtgtccccggtcgcctagctgtgggcggcggggcatggaccctcaggaggccaccggtcaggggtccggcgagccaagtgcgcggcaggtccccaacgcggaggcaagctttgccgcagctgacctttctggtcaggagacagagactgagatggccatggaccgactagccagtggagcccagagcatccctaatgatgacattcctgcccacaatgagggtccgagtttggaagaggatagctttgctgtggaggagaaggaagccaatgaggagctgtatacctgggagctgtcagaaggtccacccatggaacaggctgctgaccttttcagtgaggactgggacttggagctgaaagcagaccaagggaacccttacgatgccgatgacatccaggggagcatttctcaggagattaaaccttgggtgtgctgtgccccacaaggagacatgatgtatgaccccagttggcaccatccaccgccactgataccgcattattctaagatggtctttgaaacaggacaatttgatgatgctgaagattaaacgtgtcacttt

SEQ ID NO: 8228 - DNA, 567 bp, Cricetulus griseus
  modified_base (505)..(505): a, c, t, g, unknown or other
gctgggccatgggcttctaccctgctgtcattgccctgacctggcagagggaggaggaagaacagactcaggacgatggaggctggtggaggaccagaccttctggggatggaaccttccagaagtgggcgatctctggtggtgccttctggggaggagcagaaatacacatgccatgtgtaccatgaggggctgcctgagcccctcaccctgagatgggagcctcctcctcagtccacctttcctcatcatggcagtcattgctgctctggttctccttggagctgtgatcattggagctgtggtgttttttgtgaggaagaggagaaactcaggtggaaaaggagggaactatgctccagctccagcttgaagacagctgcctggcatggacggagtgacagacaatgtgttcagccctctcctgtgacatccacggttgactctctgcagctgtgtctgatgttccctatgattctatgggctcaatgtgaagaattgggancccagcacagcccagccctgcacaccaggaccctgtccctgcactgcctgtgttcccttcca

SEQ ID NO: 8229 - DNA, 567 bp, Cricetulus griseus
gactggcggcgaacgaggacggactgccatgaaggcctcaggcacgcttcgggagtacaaggtggtggggcgctgcttgcccaccccgaagtgccacacaccacctctttatcggatgcgcatcttcgctccaaaccatgtggtggccaagtcgcgattctggtattttgtgtctcagctgaagaaaatgaagaagtcatccggggagatagtttattgcggacaggtgtttgagaaatcaccgcttcgtgtgaagaacttcgggatttggttgcgctatgactccagaagcggcacccacaacatgtacagggagtaccgggacctcaccacagcaggcgctgttacccagtgctatcgagacatgggggcccggcaccgtgcccgtgcgcactcaatacacataatgaaggttgaggagatcgcagccggcaagtgccgaaggccagctgtgaaacaattccatgactcgaagataaagttcccgctgccccaccgtgtgttgcggcgccaacacaagcctcgattcaccaccaagaggcccaatacattcttttagaccacaga

SEQ ID NO: 8230 - DNA, 567 bp, Cricetulus griseus
gcagcacaagctgtcatggcggcccggctgttaagtttgtgtgctcgccgcctttcggtaacagctgcggttcgagggctcccagctgctggcgttcgctgggaatcctccagggctgtaatctccccgtctactgtggagagaaagcggcaacgacagccgaccatgcactggcaggaggacccagaatccgaggacgaaaacgtctacgcgaagaacccagacttccatggttatgaccaggaccctgtggtggacgtctggaatatgcgagttgtcttcttctttggtttttccatcgtcctggtcttgggtaccacctttatggcttatctgcctgactacaggatgcaagagtgggcccgccgggaagctgagagacttgtgaaatatcgagaagccaatggcctccccatcatggaatccaactgttttgatcccagcaagatccagttaccagaagatgagtgatgaattactgagaagggcttaagaagcactactttgtccaccccctgccttttattcttctggttcctccaagcaccttattaaagggattgaaag

SEQ ID NO: 8231 - DNA, 566 bp, Cricetulus griseus
ccacctaccctcccaggtgcagaaatccagctcaacaaaaatgcctggtgggtatggctgtttcacaagactatctgtttatggaggagtcaaaggattctcaatctataatctgcacaatttcaaaagaatgtatgtttgggagaagttaaaggttgatgttatttccatctgggccatggatttggggaatgaagtacttatcattcctgtggatgaactaggtattcacatggagatcttcaatgcctcctacaagaagtacctggaaggggagtgggaagaggagccactcagtacagccacgttccacttctttactaactccatatccccaataccagtggatgccaagagccctccaggagcagcctgtatcctcggcatacgttggactggaagtcataatttctccctctattcactgaacaaaacctgaaggataaaaccgactgtgagaacgtatggccctgtgctgcgcccattacagtgtctcagatcagcagctcttcctcctacctggtcctcgcctgtgaggatggtgtgctcattctgtgggacctggc

SEQ ID NO: 8232 - DNA, 566 bp, Cricetulus griseus
aaaggcagcatggcctaatcagagtagttatgatgaagcaggacatacccctaccagagccacctgaagatggacacaagcggagacagacttagccaagactgtgagctgaacacaagcccaacaccacccttaccacctttgccatttcagaccaaaagaaatgacaagtcccttggttagtgacgatgaagttttccctctgtctccaccagatatatcattcccagcttccctgactgcacagcacttcctgatggaagaagagaggcgggccaaggagctcgagaagctgctcaacacacacatcgatgagctgcagagacacaccgagttcacactcaacaaatacaccaagctcaagcagagcagacacgtatgagctttgcaccttttctgtttgcttcctctccaaaaagaaagaaacagggaagctccacttgcaaagcagatccatgacactgagaactctggttcagtctccaccagtaaatcacctggtaaggcagctagaaacacacacacacacacacacacacacacacacacacacacacacacaccac

SEQ ID NO: 8233 - DNA, 565 bp, Cricetulus griseus
ttccaacttgaccggcggatcttggcctatgtgttcccaggagtgacacgcctctatggcttcacagtatccaacatccctgagaagatcaagcagacatctatcaagtccctagacggctcagtggatgagaagaagcttcgtgagctgacacatcgctatctgactctgacagcccggctggagaagctggggtacagccgcgaagtacacccggtgttcagcgagtttctcatcaatacctacggcatcctgaagcagcgtccggacttgagggccaacccacttcacagcagccccgctgcgctgcgcaagctagtcatcgacattgtgccccccaagttcctgggtgactccctgctactgctgactgcctgtgtgaactctccaaggaggacagcaagccgctcttcgcctggtgagccgctcacctcacccttcctgcaataaacgtgtttattccaaacccggggggccacccaagtcctccagcatggaaagctgtctgcccagctacagtggggagaggcctcctccaggtctgcgcttgccctgtgcacccagc

SEQ ID NO: 8234 - DNA, 565 bp, Cricetulus griseus
agcgggcttgcggcttgctaacagcggatggcgaagaatggcagaggctccggagtctcctggccccgctactcctccggcctcaagcagccgctggctatgctggaactctggacaacgtggtccatgacctggtgcgacgactgaggcgccagcggggacgtggctctgggctacccaacctagttcaggacgtggcgggagagttttacaaatttggcctagaaccccacacccgtttgcatctcttccttttggctttggcaaacgcagctgcatagggagacgcctggcggagcttgagttacaaatggctttggctcagatcttgacccactttgaggtgctccctgagccaggtgctctcccagtcagaccaatgacccggactgtcctggtacctgagaggagcatcaaccttcagtttgtagacagatagtcctatggaaggaagaagttgtcatctctccaaactggacattctttattgggcatgagaggcacactttcccttgaggcctgcttggccgagcaaacctgaggaagcaggacctggcctatgtgt

SEQ ID NO: 8235 - DNA, 565 bp, Cricetulus griseus
ggaacaaaacagaggcaagcccaattgggagcatctaaatgaagatttacatgtactaatcactgtggaagatgctcagaacagagcagaaatcaagctgaagagagcagttgaagaagtgaagaagttactggtacctgcagctgaaggagaagacagcctgttaaatgtggcatatttaagtgtcctgctgcaagaaaggcacttcagtgaatatgtgactagtaaagctcagctacgactgcttctaacagagctcacgagacactgtgacttggggactgtaaacgagaagtgcgtggaaggccagcctgtttgaaatgaatgcaatattggtagattcatatatacagacatactacagttaatttaaaaactactgtgccttaacgtgtttcttaagcttttgtagtaagtgaacgtttgagatccattttgataagcctgctgtaactgaccttatagttgtaaggaactgtaagtgattttgtcacagttgacatacctgtgtgtactgtaggaggccaggacatggcagaggatgtattctagatgtactggatat

SEQ ID NO: 8236 - DNA, 564 bp, Cricetulus griseus
  modified_base (558)..(558): a, c, t, g, unknown or other
ttcgtcgtcttctgggggccgctcgcaggtcacggtgtccagggagctgctgaccgcagggagccaggattcaggaagtatctgggaccagttgcttatcagctctaagcctcatcccaggaagacctctactcttcaaacagttcggatgcagaggagccctttgttagaccaagttcaggcctttctcccacaaatggcccaggcaaatgaaaagctacgtaaggaaatggcagttgctccagttgatcgcttcaatattgaaaatattgatgggacatccggaaacatcatacagatggatgtggccttatttgagatgaatcagtcagattcaaaagaagaggagagctcagaagagagctcacaggatgggtctgagaacagtgcagagtctgaagatgaagactgcaatcccctctgaagtcaccatagacaacataaagcttccacatgcagaaggtggcagaggcaagattgtaggttttagacagtccggcaagtaaaaaaaagaaacagtgagatagaccaaccgtgaaaaaaaaaaaaaaaaaaaanaaaaaa

SEQ ID NO: 8237 - DNA, 564 bp, Cricetulus griseus
acttgcagttgctaagggactttattttgtaacatatcaattataaatattgtatttatctttgaaattttgtacattgctttccccaccttcttttttcacgtctgtattggtgtttgatcctgcccagtgttgcaacacagggaaaagaacagacaccgagaactgtctctttgatctgttttgttaaaatgaatcaatgtccttacatttcatttgtacctaaaccatttgctattgtttagactttccatccctttttttatgttgaggaaaagtcaaattcattgtttatttttatattatttttaagttatctgaacaaatccttttgaaaagaaaagtttgttgtatagtcaaaagaaacggtgccagcggccgtgacaaaccctagtaggttctgtgcatgcggagcggccgtgaggggccacaccgtctggggctgtgtccttattttaatttttaatttttaatttttttgtttagaatgtaaaagaaaaagtacattttagtctgccaacacacacacacacacacacacacacacacacacacacaacaaaa

SEQ ID NO: 8238 - DNA, 563 bp, Cricetulus griseus
ccttctgggacctacccatctttctgcactgcctgtttccccacgtgagttcgtgtgcagccgaagactatgcacttgtaagtgcgatggcacttgccaggcaggtagccgactattatgatgactttcagatttataaggctctggaggcagtgtccagctgtgttcggcaaactaatggtttcatccagaggcatgcaccatggaaattgacctgggaaagccctgaggacgccctctggctgggtactgtgcttcatgtggcctttgaatgtttgcgagtttttggaaccttgcttcagcctgttactccaagcttagccgataagttactgtcaagactgggcgtctctgccgaagagagaggccttagagagctccacttcctacctcgattctatggacactcatgcccctttgaagggagaaagttgggacctgacactgggcttttgtttccaagactggaccaatccaggacttggctagtgaaagctcacaggacctagaaacagttcttactggctgatggtaaaagggcaaatgtattctttttgcatttt

SEQ ID NO: 8239 - DNA, 563 bp, Cricetulus griseus
caagatggatattgtctgggtcatcctggccatcagtgtccccatctcttcctgctccgtcctgttgacagtgtgctgcatgagaaggaggaagaagacagccaaccctgagaacaacctgagctactggaacaatgccatcaccatggactactttaaccgccatgcagtggagctgccaagggagatccagtccctggagacctcagaggaccagctctcagaacccccgctccccagccaatggcgactatccgagacactggggatggtccttgtgaaccccctttctgcccaggaaacactgttcgtgggaaacgatcaagtctctgagatctagatgcagcagcctccgcgttgccactccctattttttgcctctaaaattataaatatacaaatatatatattataaatataaccttttgtgtaaccctgacttaataagaaacattttcagctttttttttcttaagaattgtcaacatcttttttacaagtgtggtttaaaaaaaaatttacagaatgacccatggctttataaaataaaggtatttctaagc

SEQ ID NO: 8240 - DNA, 563 bp, Cricetulus griseus
cgctcgcagccgcagtctcccacggccgcgtctaccgccgcttgggcctcggcccggagtctcgcatccacctgctgcggaacttgctcacgggcctagtgcgccacgaacgcatcgaggcgtcatgggcacgcgtggacgaaatgaggggctacgcggagaagctcatcgactatggaaagctgggcgacaccaacgaacgagccatgcgcatggctgacttctggctcacggagaaggacttaatcccaaagctgtttaaagtactagcgcctcggttccaggatcagaatgggggctacacaagaatgctgcagatcccaaatagtaaggagcaagatcgggccaagatggcagtgattgaatataaagggaattgcctccctcccctgcctgtgcctcgaagagacagcaaccttactctcctaaaccagctgctactgggactgcagcaggacctgcgccataaacaggaagcaaatctccacagctcccacacggctcaagcaccaaagacttaactggagctgtcctggtactcactctgtaggctaggctggcct

SEQ ID NO: 8241 - DNA, 562 bp, Cricetulus griseus
ccccggagctcatggcccaggcgaagatcagcgccaaagcgactgctgttgaacaagagaaagaaatcctcctggagatgatccacagtatccagaacagccaggacatgaggcagattagtgacggagaaagagaggaattaaacctgactgcaaaccgcctgatgggccgaaccctcactgtcgaggtctcagtggaaacaatccgaaatccccagcaggaggaatccttgaagcacgccacgaagattatagacgaggtggtcagtaagttcctggatgatgtgggaactgccaagagccacctaatgtccctctacagcgcgtgttcctctgaagtgccgcctgggccagtggaccagaaatttcaatcgatagtgatcggttgtgctcttgaagatcagaagaaaatcaagagacggctggagacactgctgaggaacattgacaactccgacaaggccatcaaactactagagcactctaaaggagccggtcccaaaactctgcagaacatggacggcaaatttaattagccctcaaacccacgggcccttacaaa

SEQ ID NO: 8242 - DNA, 562 bp, Cricetulus griseus
cagcgaagcctcaggcgagaggtgaaccagcacgatgaggatgggaatgagcttcagaccactcctgagttccgagcctatgtggccaagaagctgggagccatgctggacagctccatcgccatctcagaagtgtggaagaaaccacgcaaggcggaggtgcggcaggtggcagaggaggaggatggcttccgccttttcttcacgtccatccctggaggccatgagaaggaagcttctccgaaaccctgccgaaagcgccagccccccagctccagcagtgaagacagtgacgaggagtggcagcggtgccgagaggcagctgtgtccgcttcagatgttcttcaggagtcagccatacaccgacctgccgaggtacagaaggaggcggagaagaagttgaaaaagaaagccaagaaggaggcggatattaacttggctggagccacaggcctgaagcaggtcaaggaggcagacaccatcaatggggacccaacgtcgcttgggatcaaaaagaagaaaaggaagaacccaagaaaaaaaaaaaaaaaaaaaaaaaaaa

SEQ ID NO: 8243 - DNA, 562 bp, Cricetulus griseus
ccgcggcagccatcttccagtgactcgccaaaatgacgaacacaaagggcaagaggaggggcactcgctacatgttctctaggccttttaggaagcatggagttgttcctttggccacgtacatgcgaatctacaagaagggtgacattgtagacatcaagggaatgggcactgttcaaaaaggaatgccccataaatgttaccatggcaaaacaggaagagtctacaatgtcacccagcatgccgtgggcatcattgtaaacaagcaagttaagggcaagattcttgccaagaggattaatgttcggatcgaacacatcaagcactctaagagcagagacagcttcctgaagcgggtgaaggaaaatgaccagaagaagaaggaagccaaggagaagggcacctgggttcagctgaagcgccagcctgcaccacccagagaggcacactttgtgaggactaacgggaaggagcctgagctgctggagcccatcccatatgaattcatggcctaatgtacaaaaagaaataaaagaccagaacctggactgtaaagggtttt

SEQ ID NO: 8244 - DNA, 562 bp, Cricetulus griseus
cccacgagtcttcaggggcaactcagcaggaaccagttctctggagtactttgttcatcacactctgcccgatgttcttgaaaataaatgtggctacaagttatgcatttatgggagagacctgctgcccggacaagacgcagccaccgtggtggaaagcagtatccagaacagcagaagacacatgtttgtcctggcccccctcatgatgcacagcaaggagtttgcttacgaacaggaggttgccctgcacagtgccctcatccagaacaactccaaggtgattcttattgaaatggagcctctggggtggggccagcccactgcaggttggagatcttcaagattctctccagcatcttgtgaaaatgcaggggaccatcaagtggagggaagaccatgtggccaacaagcagtctctaagccaccaaattctggaagcatgtgaggtaccaaatgcccacctgggaggcagaggcaggtggatctctgtgagtttgaggccagcctggtctacagagcgagttccaggacagccaaagctacacagagaaaccctgtc

SEQ ID NO: 8245 - DNA, 562 bp, Cricetulus griseus
  modified_base (67)..(67): a, c, t, g, unknown or other
  modified_base (79)..(79): a, c, t, g, unknown or other
gaaggatgcgaacgcagcactgctcagtaaactatgaggtgtaccagttactaacagatctcaaagngcagcggaaggngagtgggaagaacaaacatagcgctgggcagcagaacttaaacgccatcacctatgagacattaaaatacatagtcaaaaaacgccaatgtaggaaccagagtcccgagattgttcaagaattcctcacagcaatgaaaagccacaagctgaccaaagctgagaagcttcagctgctaaaccacaggccaatgaccgctgttgagatccagctgatggtagaagagagtgaagagcggctcacggaggagcagattgaagcccttctgcatactgtcactagcattttacctgcaggcccagaggatgaacagagtaaaagcaccagcaatgatgcggtgatggaagaagaagacccagcatagatatgcacagctggccaggttgttcgtgaagttcaaagcctcagcagcctggatgttcagaagattgtttattggttttaccccctctctcaatatgcctgatttcagggttggttggg

SEQ ID NO: 8246 - DNA, 561 bp, Cricetulus griseus
acaggaacctgccggatgtgtctgctaaggactttgagaaggttgatctgacccggttcaagtggatccacattgagggccggaatgcatcggaacaggtgaagatgctgcagcggatagaacagttcaactccaagcagcctctgccccagagagtccgggtgtcagtggagatagagaagccccgggaagagctcttccagctattcggctatggtgaggtggtgtttgtcagcaaagacgtggccaagcacctggggttccagtcagctgcggaggccctgagaggcttgtatggtcgtgtgaagaaaggggcgacactcatctgtgcctgggctgaggagggtgccgatgccctggaccctgagggccagctgctacactcagatgccttcccacctccccgagtagtagacacactgggggctggagataccttcaatgccgctgtcatcttcagcctctctaagggaaacagcatgcaggaggccctgagattcggctgccaggtggctggcaggaagtgtggcctgcaggggtttgatggcattgtgtgagagg

SEQ ID NO: 8247 - DNA, 561 bp, Cricetulus griseus
  modified_base (33)..(33): a, c, t, g, unknown or other
tttttttattttttaacttgttaactttttttnttttttattttatattttataattttcttttactgtggtcttctaaaagaagaaacaattgattggcaccattacatttggatcatggatggccaagggaactgagcgtgtatggtgtctcaggatcacacagagaattaggaaggcgctctgtcctgagatctatctggatctcttaccctgagttcttactctatctgggaggacagtgggccaagcaggctgtcgcattttagctttgatctaaatgccatgcttgcctccaccacggtcccctagaattggtgctcctgctgtgttgctgaggggctagcttggggaaccaactttctaaaggtgaacagcctccacaggagagccgcaggtgaagaatgggaaacgtttccagatgtttctttatgtaaatatggtgccaatgtaaacctgtgttgagactggggagaatggtgctcgtttggggggcggggggcttaggcacttgtgtttttagaaaccatcatgatttagagactccttgctgtgtgtaaa

SEQ ID NO: 8248 - DNA, 561 bp, Cricetulus griseus
aggcaacaactgggctaagggtcactacacggagggagctgagctggttgactctgtcctggacgtggtgcggaaggaggcagagagctgtgactgcctgcagggcttccagctgacccactcgctgggtggaggtaccgggttctggtatgggcaccctgctcatcagcaagatccgagaagaatatcccgaccgaatcatgaataccttcagtgtggtaccctcaccccaaagtgtctgacaccgtggtggagccctacaatgccacccctgtctgtccatcagctggtggagaacaccgacgagacctactgcatcgacaacgaggccctgtacgacatctgcttccgcactctcaagctcaccacgccgacctatggggacctcaaccacctcgtctcggccaccatgagcggggtcaccacctgcctccgcttcccaggccagctcaatgccgacctccgcaagttggcggtcaacatggtccccttcccccacctcggggcctaaaatgtctgccaccttcatcggcaacagcacggcaattcaggagctggttc

SEQ ID NO: 8249 - DNA, 560 bp, Cricetulus griseus
tatttcttgcctgttgctggtcatcttcctggtggagctggttgcaggggtcctggcacacgtatactaccagaggctgagtgacgagctgaggcagcacctgaacagcaccctgactgagcactacgggcagccaagggccgcagagatcacagcctcggtggaccggctgcagcaggatttcaaatgttgtggcagtaacagctcggccgactggcaacacagcacgtacatcttgtctcgggaagcccagggtcgccgggtgcccgacagttgctgcaagacagtggtggcacgctgtggccagcgggcccacccctccaacatctacaaggtggaaggaggctgcatggccaagctggagcagttcctggctgaccacctgctgctcatgggcgcagtgggcatcggggtggcctgtctccagatctgcgggatggttctcacctgctgcttgcaccgaaggctccagcaacacttttattaaaggatgcccctgtagcctgccaagggcccacattcccacatcctgaaccaggcctgcaaagtcagcagctggg

SEQ ID NO: 8250 - DNA, 560 bp, Cricetulus griseus
ggagagtccagaagagaacagtgcctatgaacagttgctgtcacatttggaagaaatcgcagaggaaggcacaaagattgagatcccaggtctggatgtatctgcactgctgccctcgacctcagccgttactaccgatacgaagggtctctaacaacacctccctgcagccaggcgtcatctggactgtgttcaaccagacggtgaagctgagtgctaagcagctcatactctctctcgtttggtgacatcctagccttggtgtttggcattctctttgctgccaccagcgtggccttcctcattcagctgaagaggcagcacaggcacagaagtgagaccaaagatggagttagctacagcccagcagaaatgacagaaactggagcctaataaggagaagccagctggaggattctggaaacctcatcctgttctgcccattatacagtttcttttaacactaaggaatcctttgttttgaagacagggcttctctgtagctttggagcctgtcctggcactcactttgtagcccaggctggcctcgaattcacaga

SEQ ID NO: 8251 - DNA, 559 bp, Cricetulus griseus
gggaaggacagctaaagacaggtctccccacaccgctccaggtgccacatttgcagcttgcctgtctgtctgtcgagaaccttctcccacttcaggcccaggccaaccgtgtgctgctgaaatgggctctgagctggagactgccatggagaccctcatcaacgtgttccatgcccattctggcaaggagggggacaaatataagctgagcaagaaggagctgaaagacctgctacaaaccgaactctccggcttcctggatgtccagaaggatgcagatgctgtggacaaggtaatgaaggaactggatgaaaatggagatggggaagtagacttcaggagtatgtcgtgctggtggctgcgctcacggtggcttgtaacaacttcttctgggagaacagttgagcacttggggctaactggcagtgcccttcacttgcccttataagacttcccctttatccctgctttcttctccttaccccacctatacctcatgtccccatccttgctcagtctcctaccaagggtaccagagtggtggcccaggtctgtcact

SEQ ID NO: 8252 - DNA, 559 bp, Cricetulus griseus
ggcccggttgactgcgcagccatggagagcggcttcggctcggacttcggcggcacgggcagcggaaagctggacccgggggtcatcatggagcaggtgaaagtgcagatcgccgtggccaacgcgcaggagctgctgcagaggatgacggacaagtgtttccggaagtgcatcgggaagcccgggggctccttggataactcggagcagaaatgcatcgccatgtgtatggaccgctacatggatgcctggaacaccgtgtcccgcgcgtacaactctcgactgcagagggaacgagccaacatgtgaccgagacctgtgcctcgggacaccgtgcgcgggccacagatcggaactgttttcccactcgcaagggcagcgcgtatctgacggccccaaagtgtggcagcacggagggctccgagttgaggcctctcccctaggttgctgcgcctagcccagtcccagaaaagtgaggaccggtttgagtaagggcatctgcctgcccccacctgagctgtgacctgagagcaggccaaataaattgctgctgggacag

SEQ ID NO: 8253 - DNA, 559 bp, Cricetulus griseus
gaagttgcggacctcgtgggatctgtgacctgccccaggccgtggaaagaccaggaggctgctctgcacggtgctaggttgacatggatccgcttagagcccagcagctggctgcggagctggaggtggagatgatggctgacatgtacaacagaatgaccagtgcctgccaccggaagtgtgtgcctccccactacaaggaagcagagctgtccaaaggcgaatctgtgtgcctggaccgatgtgtatctaagtacttggatatccatgagaggatgggcaaaaagttgacagaattgtctatgcaggatgaagagctgatgaagagggtacagcagagctctggacctgcatgaggccccacgcagaattcacctggggtgcaccttgccacataccttattaaagtgttccctagtgggtatcatatgtgaaaactgtcatacttaggctctctggagcatctccaggacccctgggtgtggtagagctctcctggctaaagaaggggacttgtcacgctggtttgtgactgtgtatgtgtgtatatgtatatatc

SEQ ID NO: 8254 - DNA, 558 bp, Cricetulus griseus
cccgggaccaaagccgggcgtttggagactgcccggccaggtgtctgtgaattctttaaacctgtgtggtaattcaacagacataactgtggaagggtttctatgtagttctgaacatctgtgatgtaatgaatggtttttgttaaacatgcattctgtaaagtgccatagtctttttatgtgtagcatatttaaatatatatatcacatacacacaagtttgtctgaaagatgtgcaataacaaaggtgtatgttttgtttggggaaactggacatgtttcaaaacagggatgtttctgttttacaaaggagagttagacatatttgccttcacagctagtcattagtccctaacaattttaatgctacgcaaaccttatgtgaagaaaagactggtatgaagtcatgttttcctgggtctaaatgaagaaaatgatcactatatttatgggagactcaatccagcaagccaggcccagtcattgctagtcttctgtgtaaaatgtgaagctgcccattttgcctttttctgtttagcctgataactagtagctgct

SEQ ID NO: 8255 - DNA, 558 bp, Cricetulus griseus
gagaggctgagggtaacactcatcttgcccttagaagcacagggaggtcttatctgcccctgccatccagtggccctggctgggtctgtgttcccaactgtgggtccttctagggtctgagataaatgtcttttctattcttctcttctgggcctccctcccccaacttcctggtccgtctcctcaggttggtgctctcacttcttgaaagctctaggccccgcaggctccctgttggctcctggtactccaagaccagttgagaacaagcaggagatggaggcaggcagcccaggctgcagatgtaagggatgcagggccgggcccagagggctcagcctagaggcttccaatcttggattcttctgcaggcagtcatctgtttgtccatcaccccaggccagagcagtcagaggggcaaagcaccgggcccccagagctcagcttcccctcagcctgggtgacatcacagcatttcagtgtcggtcacattttaaactgatcagcctttgtataatgttttttaaatcatttctaaataaaacagaaatacagtgt

SEQ ID NO: 8256 - DNA, 558 bp, Cricetulus griseus
ggcggcggcggatgcggaggacgaggccggggacgacgacgccgacctcctggacacctcggaccccgcgggcggcggcgagagtgcggccagccccgaggagctggaggacgagggtgcggagggcggcggcgcggcgcgcaggcgggccgccaagacctgcacctaccagggctgccgcgagaccacctgccaggtggccaagcagcgcaagccctggatgtgcaagaagcaccgcaacaagatgtacaaggacaagtacaagaagaagaagagcgaccaggccctgggctccggcggcgcctcggcggccagcacaggcaacgtcaagctggaggaaagtacagacaacatactctccattgtcaagcaaagaacaggatctttcggggatcgccctgcaaggcctactcttttagaacaagtgttaaatcagaaaagactgtcattactgagaagtccagaagttgtccagtttctacagaaacagcagcagctattaaatcagcaagttttggagcaaagacagcagcagtttccaggcgcaccagtgtaagg

SEQ ID NO: 8257 - DNA, 558 bp, Cricetulus griseus
ggcctcagtgactctgtcagccagtactctgatgccttcttggctgccaacacatccctggatgaacgagagcgaaaagtggaagccgaagtccatgccatccaggaacaggtcagtagtcaaggctcacggcttcaggctggccacaggcaggtcctgaaccttcgaggggagctggaaaagctcaaggctggtgtggccaatgtggctggagggttgagccgctgccgggacacagcccaggaactccagcacacagtgggccactttgaccaacgggtggctcaagtggagggagcatatgagaggctgggcttattggctgcccacctgaacaatttgcctactgagcagctgaggtccagggagaacctgtggggtcacatagacaagctgaaccacacgctggcccagcacacacaggacattgcccgtctccgggatgacctgctggactgcagagctcagctggctgaggtgaggccaggacaagccgactaggatggctggacagaatctaaagtccagactcccccaacctgggaatatcatcccaga

SEQ ID NO: 8258 - DNA, 557 bp, Cricetulus griseus
tcctttccggcctccgcctcggaccctgcagccgccgcgatgttgatgcccaaaaagaaccggatcgccatctatgaactcctgtttaaggagggggtgatggtggccaagaaggatgtccacatgcccaaacaccccgagctggcagacaagaacgtgcccaaccttcatgtcatgaaggcgatgcagtcgctgaagtcgcgaggctatgtgaaggagcaatttgcatggaggcatttttactggtatctcaccaacgagggcatccagtatctacgggattacctccacttacctccggagatcgtgcctgccaccctgcgccgtagccgtcctgaaactggcaggcctcggcccaaaggtccagaaggtgagcgacctgcaagattcacaagaggggaggcagacagagacacctacaggaggagtgctgtgccccctggtgccgacaagaaagctgaggcaggagctggctcagccacagaattccagtttagaggaggctttggtcgtggacgtggtcagccgccccagtgaccttgaaatttatttgaatt

SEQ ID NO: 8259 - DNA, 557 bp, Cricetulus griseus
atggaaaccgccggcaccccggaggctacggggacaggcaagtacattgcctcaacacagagacccgacgggacctggcgcaagcaacggagggtcaaagaaggatacgtgccccaagaggaggtcccagtctatgaaaacaagtatgtgaagttttccaagagcaaaccagaacttcctccagggctgagccctgaggccacgacacccgtcaccccatgcagacccgaaggtggtgaagcaggcctctccaagacagccaaacgcaacctgaagcgaaaggagaagaggaggcagcagcaggagaaggaggcggaggccttgagcaggactcttgataaggtgtctctgggagacgccgcccaaacacccagcgccctccaaggctccccaggcctcccctctagctgccccggatgcgtccgactctgctgccaccacagagaaagccaagaagatcaagagcctaaggaagaagctgcggcaggtggaggagctgcagcagcgcatccaggctggcgaggtcagccagcccagcagagagcagctggagaagc

SEQ ID NO: 8260 - DNA, 557 bp, Cricetulus griseus
  modified_base (157)..(157): a, c, t, g, unknown or other
cagagagctgcagctgtgggcatcacccaagtggttatttctcggatcactatggcagcccctggcatgatcatattaccagtcatcatggagcagctggagagactgcgtctgatgaagaaagtcagagtgctgcatgcccctctgcaggtccttntgtgtggctgcttcctcctcttcatggtgccagtggcatgtgggctcttccctcaggaatgcaaattaccagtttcctatttagaaccagagctgcaggacaccatcaaggccaagtatggagaagacgtcctctttgccttactttaataagggtctctaagtgctccgtgcctgcaaggattgatccattccccgtaaagaccagtttttcgctggcagttatgcatacctgtgtccacattcctctttgcaacaaggtctgaaagccaggctggactgggaaatagagggaggatgccctggctgtcctggaactctctgtagaccagactgacctcaaactcatacataaccacctgcctgtgcttcctgagtgctggattaagggtgtacaccac

SEQ ID NO: 8261 - DNA, 557 bp, Cricetulus griseus
ccggcatttgcgaaagtgggggtaccacgggatgtgctgctcttccagcatgaacggggccgcttctttgccatccttggactgttttgcgctggtcagggcatcttctggacctccctggctgttgcagcattgtcccgacctctgatccgggttcctgcagaggctcccaaccggggctacacggacctgcgctctgcactctggcgctacgggctagctattggttgcggcacgatgggagccttggtccttggtgctggttttctctactctctccgatctgtgcgttcagtcatgctccttgcaggagggaagcaggtgatgcttaccacttatgccccctttggctcggggacacgtttcacagttcccttgaaccaggtttcctgcatggcccacagaagtgaagttcctgccatgttgcctctaaagatcaaaggccgacgcttctacttccttttggacaaagctggacacttccccaacactcaactctttgataacactgtgggtgcctatcggagcctatagaaaagtggtttgcccatctcaga

SEQ ID NO: 8262 - DNA, 556 bp, Cricetulus griseus
ggcatggacctctgcagtcatctgcacctctttgtttcttactgtgttgtctgtcattcttctgaattttgaataattaggttatttattgctttatttatgttttttaaagtcacatttcagttttgcctttgaagcagttcccatctgtttcccatgaagttttccatctgctctgagccattaaggcggccccttttaatggtgttaaagatggttttagggcttggaaaagttattgttcattcttaggttcaggccaggactcatctagaaaacattatcttaattccttctctcatatcctaagcagtacattttattaagacattttatgttaaaagtacatcttgtgtccggttctgagattattgtcccataagtgaattagctttcatttaattagtctgggttgtttccatttagccatattaaagaacaagccagtctggaaaaagcagtcccatgatgcatgactttggtatatccatgtgcccttaataatgggaagtgttttgaaacacacggaagaaatgcttgatgtctttagtaataa

SEQ ID NO: 8263 - DNA, 556 bp, Cricetulus griseus
caggagctggagaacatgctaaagccctttggacatgtgatatccaccagaatcctgagagatgctaacggagtcagcaggggcgttggctttgccagaatggagtctacagaaaaatgtgaagtggtaattcaacattttaatggtgctgtgatcacacccaccatggaccaccccatgtcaatgcagccaacaaacatcgtgggccccctaacgcagcagatgaaccatctttcgctggggacagcaggaacgattcaatcccaagacagaattatggtacttcaccagctgttgtgtcagtatatgactgctgctcctatgcaagggacctacattccccagtacacgcctgtgcctccgacagctgtttctattgaaggtgttgttgctgatacctctccccagacggtggccccttcactcccaggacagcagtggtcagcagcaacagttagcagtggacacacccaatgaacacgcacctgcatactctttccaacaatccaaaccatagacaggagtgaggctgtccatctgaacccttacttcaatg

SEQ ID NO: 8264 - DNA, 555 bp, Cricetulus griseus
gacacaacctctcgactccctacgtgcgtgagagtggttcttctcgttgcgccccaggacctggcactgtcggccgttcaacaactaaggcggcaggtcggtgctgtctcgaaccactgaaacctaggggaactctgcgaagcacccttacgctaagtagcgtccaggactgcccagctacaccgaatcccctccccaccccgccgaccagggaacccttgcacaagcagtttctgtctgaggagaacatggccacccacttctcccgactcagcctacataatgaccacccctactgcagtccccctgtgacttttccccaagccctgccaccactcaggagcccttgcccagagctgcttctctggcgctatcccgggagcctgatccctgaggccctcagactgctgaggctgggggatactcccagtccctactaccctgcatccccagctggggatatcatggagctctaagtgctgatggccagtgtccctcctcaccttgttcctgacaacaaagaccagcaacccccagaaaaggatgaggtccttc

SEQ ID NO: 8265 - DNA, 555 bp, Cricetulus griseus
gctcttgtccgccatggagctggccagccccgtctccagctttcagtccgacttggatttctgcccagattgcggctcggtcctgccgctgccaggaactcaggatgctgtcgtctgccctcgctgtggcttctccatagacgtgcgagatttcgaagggaaggctgtaaagacctcagtcgtgttccacaaactgggggcggctatacctacgtctgtggaggaaggacctgaatcccagggaccagtggttgaccggcgatgccctcgatgtggtcatgagggaatggcgtaccacaccagacagatgcgttcagctgatgaagggcagactgtcttctatacctgtgtcaactgcaagtttcaggaaaaggaagattcttgtacctttttttccctggcaactcagcaacaccattcctcctcttggaagtgaagatattggtcctttgttgccttctccttccccgctggtgctttgttctcagcataagatcatccacccccagagcactccttcccttagttgaatttaactaaagttatattttctat

SEQ ID NO: 8266 - DNA, 555 bp, Cricetulus griseus
cgacttccattgggtcaatggggacccatttgacccagacacattcaccatctcggggatgggggagtgcgtctttgtggaacccaccaggctggtgtctacagagtgtctggcgacccggccctgggtgtgcagcaagatggcctacacgtgacttggctctggcaggaggtggccccctctgccccagggtccaagggcagtgtctgttctacctaccacctgcttccagcaggagcccaccaccctctctgaatggaagtagccagccaggtggtctctgccactgtcccctcttgggctccagagctcagaggccctggttccctggcttctcctgtccccaggcaggccctgcggcttagcagttatatctcatgtgctaagtagtgtagacatcttcgcccccatacacacaagcacacgtgtgtacacacgtgtacacacacaaacacaccacacacacacgcaggctctttgtaataggtcacccttccttggctctgcccaggagcttcctcactgcagccctggtgcttctgggcaggaaggggc

SEQ ID NO: 8267 - DNA, 555 bp, Cricetulus griseus
  modified_base (528)..(528): a, c, t, g, unknown or other
catgaagatcaccagggcagaagcacgccaagaagcacctcggcttcttccgcaaccacttcggggtccgcgagcccctaccagatcctcctggacggcaccttctgccaggcggcgctgcggggccgcatccagctgcgggagcagctgccccgctcctgggatccctctcatgttcattattcagaacaccatagtgctagacaagccttctcccaggacagtggcctttgtgaaggccgtggagtcaggccagctggtctcagtgcacgagaaagaaagcatcaagcaactgaaggaggagcaaggcctcgtgaggaaccctgagcggaggaggaggaggaggaaaaagaaggtgggcggccccaatccactcagctgcttgaagaaaagaagaaagcacccgacgtaaagtcccctgcctcagaaaagaagaggaagaggaaagaacccggaacagatcgacccgaagtgccttctgagcagcagggagtggaagcatgatgtgtgccgggcctactctgagcntctctctctctctctctctctctctct

SEQ ID NO: 8268 - DNA, 555 bp, Cricetulus griseus
tgagaactgggctgacccttcctttgggccttgtggaaagcttatcatgccgcctagacctctcaccctggtctacgcagccatgggagtgggcacagctctggctctgctgagctgtgccgccctggtttggcatttctgccttcgtgagcagtgtggctgcccacgacgttagggtacagcccaagcgtcagaagctctctgatgggagtctcaccgactagaaacaactccagtagttaagaacactggttactcttccggaggaccagagttctattaccagcactcacatggcagctcagaaccatgtgtaattccatttccaggggatccaatgtctacttctgacctctgccagcagtaggcactcacatacatgcatatatatatatatatatatatatatagtttgttttgttttgaaacagggtttctctgtgtagctctggctgtcctggaactaactattgtagaccaagctggtctcgaactcacagagatacacctgcctctgcctcccaagtgctgggattaaaggcatgcgccaccacc

SEQ ID NO: 8269 - DNA, 555 bp, Cricetulus griseus
caacaacgtttcccagcctgaagagcaagtacagattgatgctgaagtagattctgctcctcccactggctaccagtatggccaagggtctgacaccacatccaggagctttccagatgacctgcccaggctgcgattcaagtgcccatactgcacacacgtggtgaagcggaaagcagacctcaaacgccacctgcgctgccatacaggagaaaggccgtacccgtgccaagcttgcgggaaacgatttagcaggctagaccatctgagtagccatttccgaacaatccatcaggcatgcaaactatctgcaggaaatgacaaacgtcacgtgactgacctcacgaaatcaaacccaacattaggtaaaagcctgaagtgcgacttttgatctgttattgttttgctttttggttttccaagacaaggtttctctgtataacagctctggaggctgtccaggaactaactcttgtagaccaggctggactcaaacccacagagatccacctgcctctgcctcccgagtgctgggattaaaggcgtgcgccacca

SEQ ID NO: 8270 - DNA, 554 bp, Cricetulus griseus
aaccatggcgtcggctttggctcgcgtcggactgaagccggtcaagctggttcgagttcagttctgcccgtttgagaagaacgtggagtcgacaaggacgtttctccaggcggtgagcagcgagaaagtgcgtgccacaaacctcaactgttcggtggtcgccgacgtgaggcacgacggctccgagccctgcgtggacgtgttattcggagatggctatcggctgattatgcgcagcgctaacctcaccgctcaggaaatgttcactgccttggcctcccacatccgggccagaaacgcagcggcagcatccgcagcggccaacgcagacaagcccggcccagttaatggtacccggcgctgacactgcagaggacataacaaccaaatgttagcttggaacgaaaagactgctgtctaagagaaggctgggcttaatcactcgaaaggttacgcgaaggtcacgaacagactgacacctacccgtgctttgggggcaagataagtaaggttaggtgatggagggtctggacaaatttgaaattttctttctc

SEQ ID NO: 8271 - DNA, 554 bp, Cricetulus griseus
tggggcagccagctcactgatatttccatatgtcgggagatgcccagcctggaagtgatcacactcagtgtcaacagtgtctccaccctggaacctgtacgtggctgccgacgcctgagtgagctgtacctgaggaggaaccgtatccccagcctggacgaactgttctacctaaaggacctaccacacctcagggtgctatggttggccgagaacccgtgctgcggcaccagcccgcacctttaccgcatgactgtgctgcgcaacctaccccacctcgcagaagctagacaaccaagctcaactgagaccagccagggcctgctgagctacacagaggaaacagaagtccagggccagactgctggagaccaaatctccttccttctcacaaaggaagactgtgaggagtcacaagaataggaacatcctgactgccatcttgctgctgctgcgggagctggacacagaggggctagagactgttcagcagactgtgggcagccagctacaggcgctgcacaggctggaaccccaggacggatatggagtga

SEQ ID NO: 8272 - DNA, 554 bp, Cricetulus griseus
cctactttcgacttgggaatctttgcagtcacttttgcaggcctaataatcaaccagccccgggtggccgagccagacagcacgccctcggacaaagctgagtgagcactcgcccccttgacttcatcatggcttctgccggtctgcaaatcttggggatcgtcctgaccctgcttggctgggtcaatgccctggtgtcctgcgctctgcccatgtggaaggtgacagctttcatcggcaacagcattgttgtggcccagatggtatgggaggggctgtggatgtcctgtgtggtccagagcactggccagatgcagtgcaaggtgtatgactcgctactagcactgccccaggacctacaagccgcaagacgccctctgtgtcatcactctccttattgtcctgcttggcttgctggtctacctcgcaggagccaaatgcactacctgtgtggaagacaagaattccaagtctcgactggtgctcatctctgggatcatctttgtcgtctctggcatcctgaccctcattcctgtctgctggacagcccactc

SEQ ID NO: 8273 - DNA, 554 bp, Cricetulus griseus
atttgaaatgccaaattttgcacagaagggttgctgctattgcattccaaactgccatgccctctctaccagtggttgatacagcaaggaggaatatgtattattcagaggagtaaagtgtgacttggatactaaacctgagaaagtaagacttcgtctttagaagctgagagcttcaagttttgcctttaagacccttgtggactcacgagttggtacaattatgagggtattcctgggtgctttttgtataatttactccctcctccccaaacaagtgaggaagaatttgtagaccataattcttctagggccccttttgtaactccatgaggatatcccatctgccacagaatccaggatcccatagttctctagtattacttaccctgagttcttttacataaaaaaatacattatggaagtattaacatgagcttaatatagctggaattgaagtattcactatgtacttatgctggtgttttagtagtttctgtttttgcaactttttagttgactatttttcaacttaacagtgttttggaacatat

SEQ ID NO: 8274 - DNA, 553 bp, Cricetulus griseus
tgaaggtgatccgggcgccatggcgttgtgcgcgcccggggcctacctgacgcaccagcagaaggtgctgcggctgtacaagcgcgcgctgcgccacctcgagtcgtggtgtatccacagggaaaaataccggtactttgcttgtttgctgagagcccgatttgaagagcataagaatgagaaggacatgatgaaggctacacagctgctgcaggaggcggaagaggaattctggcaaaatcagcatcctcagccgtacatcttcccggactctcccgggggcacctcctatgagagatacgaatgctacaaggttccggaatggttcttagattactggcacccttctgagaaagcagtgtatcctgattacttttccaagagggagcagtggaagaaactgaggatggagagctgggaacgggaggttaagcagctgcaggaggagacaccctctgacggtgtcatgactgaagctctgcctcccgccagaaaggaaggtgacttgcccccgctgtggtggcatatcgtgaccagacctcgggaacggccc

SEQ ID NO: 8275 - DNA, 553 bp, Cricetulus griseus
  modified_base (536)..(536): a, c, t, g, unknown or other
cctcccagacctgtgggaccaaccgtcgcactcggaagacagtttaaaaagaagcctaccgcgggctcccaagaggcgaattcatcacagccagaaaggccaacgccctctccagagaaggcttgaggactcgcagacgcaattgtcctttccgggtgcgatttgaagacgagaccctgcaggacacagccctccgctattgggagcgcagccgtgcgttccgacagaatatctttccatgtgaacagactgctttgccttctatgtctgtgtcagagcgggtgcttgggagtgttgggagatggctggagagtctgcccagagccctgcgtcccagggcccaagacactgtagccggctcctcattctggaactgcccccgagtggcagctcaggaaccacagatctacttttctgaggatgccaacatgagcagccgcctacccttcatccacagggccaccgccataaggccacggggaggcctcaggaccttcctagacacccctaacagtgtggagcagggaacactttcngcccagtatgatgatgc

SEQ ID NO: 8276 - DNA, 553 bp, Cricetulus griseus
gtgcttgtgattggtgatgagttcccagaaaggcaacgtggctcggtccaggcctcagaagcaccagaatacgttcaccttcaaaaatgacaagttcgataagagtgttcagaccaagaaaattaatgccaaagttcatgatggagtatgtcagcgctgcaaagaagttcttgagtggcgtgtaaaatacagcaagtacaaaccactgtcaaaacctaagaagtgtgttaaatgtttgcaaaagacagtgaaggactcttaccacattatgtgtaggccatgtgcctgtgaacttgaagtttgtgcaaaatgtgggaagaaagaagacatcattattccgtttaataaagaacctgaaacttcagtaaatactgaaaatcaaggttctaaccgcagaagaagctgcagagggaaggaggacagtgatgaggatctagatgctggcactgactcggatgacgacgatggagactcttaggatgtattatatgacgtatatgtacatgtatatatgtatgtatatatttactagaaccattgaaataaatgtgaa

SEQ ID NO: 8277 - DNA, 553 bp, Cricetulus griseus
gcacgcggctatggcggaatctgagttgcagctggtggcgcagcgcatccgcagtttccccgacttccccatccccggcgtgctgttcagggatatctcgcccctcctgaaggaccccgcctccttccgagcttccatccgcctcctggccagtcaccttaagtccacgcatggcggcaagatcgactacatcgcaggcctagactccaggggattcttgtttggcccctccctagctcaggagctgggcctgggctgtgtgctcatccggaagcgagggaagctgccaggccccacagtgtcagcctcctatgctctcgagtatggcaaggctgaactagaaatccagaaagacgccttagaacctggccagaaagtggttgttgtagatgatctcctggccactggaggaaccatgtgcgctgcctgtgagctgctgggccagctacaggctgaggtggtggagtgtgtgagcctggtggagctgacctcacttaagggcagagagaagctaggatcagtaccattcttctctctcctgcaatatgagtga

SEQ ID NO: 8278 - DNA, 553 bp, Cricetulus griseus
cgctcccgcgcggctgggacaggtgggcgggatgtcccaagctggcggcggttcccgcggtgatgcggggcaagaagacgctgctgctgccggcggccgattcagcttcagcccggagcctacgcttgaggacattcgacgcctccatgcagagtttgctgccgagcgggactgggagcagttccaccagcctcggaacctgctcctagccttggtgggagaagtgggcgagctggcagaactctttcaatggaagtctgatgcagagtctagtcctcaagcctggccaccaaaggaaagagcagctcttcaagaggagcttagtgacgtcctcatctacctggtagcattagcagcccgttgtcatgtggacttacctcaagcagtactctccaaaatggacaccaaccgacaacgttacccagttcatctctcccgaggttccgcccgcaagtacacagacttgccccatcgggaccatctctgaaaatcaggctgtggaggctgtacgaccctacctctgagttgaaaaaccaggcttccacctagaaac

SEQ ID NO: 8279 - DNA, 552 bp, Cricetulus griseus
aacacaaaaacacccccagcaaccaaccaggcatctgaccctgaggaaaaagggaaggctggcagcatcaagaaggctgaggaagaggaggagattgacattgacctgacagctccagagacagagaaggctgcccttgcaattcagggcaagttcaggcgattccagaaaaggaaaaaggattccagttcctgaatggccagccttcccttcattcttctacttcctctctgccctccacagctctggctctcatgtgtcttgtccctttatccctctagcctctcctagaggcaagcttaaccttgatatattctcttctcaggctctcttaagccgtcacagttgtagagacacaaggacacaagaagatttcagttggtagtcactaggctaagggtgggtcagtcccttgcagagaacaaatgacttcgaggtttgacctctctctatccctaatgctaagggcaggatgggagtgccttcagagtgcagtgcctccagaacttggaagacagaggcaggtggatctctgtatgttcaaggccagcc

SEQ ID NO: 8280 - DNA, 552 bp, Cricetulus griseus
gtcggagccgagtggagctagtcaggtgagaggctcacaggtgccgtctcacacgcgaggccggtggaggctggactgtggtggcgaggaccgggcctggtgagggcaacgagagcgcggcccgaggctcagtccctccccttgtccgcaggatgatcacggacgtgcagctcgccatcttcgccaacatgctgggcgtgtcgcttttcttgcttgtggttctctatcactacgtggcagtcaacaatcccaagaagcaggaatgaaagtagcgctctccgccccagggttccaggacatagtctgaggcaagatggagggtgtgaggggccttcacacttcacttcatctctcctacccatcacagcatacaaagcaactacacctggatttttccaaacaacttttattcctcaaagtcttccttaaccctatggaacaagaagctgccactgaatagggcccagtataggggctgctttcttttctactccctcccccaatataaaaatatagatatatatatatatatataaaaaaaaaaaaaaaaaa

SEQ ID NO: 8281 - DNA, 552 bp, Cricetulus griseus
cggtgccagcgctcccgggatggcctcgcaaaaccgcgacccagccgccgccagcgtcgcagccgttcgcaagggagccgagcccagcgggggcgcagcccggggccctgtgggcaagaggctacagcaagagctgatgaccctcatgatgtctggtgacaaagggatttccgccttccctgaatcagacaacctgttcaaatgggtggggaccatccatggagcagccggcacagtatatgaagacctgaggtataaactctcactagagttccccagtggctacccttacaacgcacccaccgtcaagttcctcacaccctgctaccaccccaacgtggacacccagggcaacatctgcctggacatcctcaaggataagtggtccgcactgtatgatgtcaggaccatcctgctgtccatccagagtctgctaggagaacccaacatcgagagccctttgaacacacatgctgctgagctctggaaaaaccccacagcatttaagaagtacctgcaggaaacctattcaaagcaggtctgcagtcaaga

SEQ ID NO: 8282 - DNA, 551 bp, Cricetulus griseus
tgcgcgacgtgggacggccacgccattggcggacgaagagctcgaggcgctgcggaagcagaggctggcggagctgcaggccaagcatggggatcctggtgatgcagcccaacaggaagcaaagcaaagggaaaccgaaatgagaaacagtatcttagcccaagttctggatcagtcagcccgggccaggttaagtaacttagcacttgtgaagcctagaaaaaacaaagcagtggagaactaccttatacagatggcgcggtacggacagctaagcgggaaggtgtctgaacaaggtttaatagaaatacttgagaaagtcagccaacagacagaaaagaaacaacagttaaattcaacagaagaaaagtgatggactccgatgaagatgacgattactaagaggagatgcttaaacagactttcggagcagtgtctagggcaattacaacctttcaatgtttactttgtttattatctatatgtgtcttttaaaaaataaacttgttactcaaactaaagcagtttgggtgtttcagaaccacaggcaa

SEQ ID NO: 8283 - DNA, 551 bp, Cricetulus griseus
tcagaaaagctgtctctgaaactcaaggaagaagaaaggatggtggagatgtttttggactatcaaaatcagctctgtaagcagaataagctcattcaagaaaaaaaagataacctgttaaagatggttgatgaagtaaaaggcaagaagcaagaattggaagtgctgatagcaaatatcaaggaccttaaggaagagtattctaggaagaaggaaaccatttccactgctaacaaagctaatgaagataaactgaaacgcctgcagaaatcagcggacatgtacagagattgccttggactggaaattaggaaggttcctggtgataaattgcagtttatattcactagtattgaccctaagaatcctgagagcccatatatgttttccctaagcctaaatgaagctagagattatgaagtgtctgactgctcacctcatcttgagtgcctagcagaatttcaggagaaagtcaggaagaccaacaatttttcagcgtttcttgctaatgttcggaaagcttttatagctacggtttataattgatgtag

SEQ ID NO: 8284 - DNA, 551 bp, Cricetulus griseus
tccaagatctccgtcactgtgtccaacaagatggcagcgaagagtgccaaggctgccgactaagcctactggagtttcagccgcttaggggccaccccagagatggatgaggatatggcctgggacagtgataatgacagcagcagctctgtcctgccgtatgctggagtcctgaagaagctaggaagggccccacaaggccagtccccagccagcactgactgtcaaagccaaggccaaggcccgaccgtccgctgcatcctgcctgaccctcctgcacctatgacctccccgagaccccctcgtcgacggtggcgtcaaacctgtaaagactgttagccgccttccattcccaggctggagggactccctcccccagatcctggcctgcagctggggcacctccggctccctgccctggccgtctttttccttggtgggtggggcagcagacggtaacagctgttttaatatatttttgtgacttttgcttattatttgagacaggatctcactctatagaccaggctgctggattagaggtgtgcacc

SEQ ID NO: 8285 - DNA, 551 bp, Cricetulus griseus
atctgtttcctgtttggaccatgcctgagtggagctgcttggtgacaggggcaggagggtttctggggcaaaggattgtccacttgctggtgcaggagaaggatctgaaagaggtcagagtcctggacaagatcatcagaccagaaaccagggaggaattcttcaagctgcagacaaagaccaaggtgacagtgctggagggagacattctggatgcccagtacctgaggagagcctgccagggcatctctgttgtcatccacactgctgctgccattgacgtcttgggtaccattcccagacagactatcatagatatcaatctgaagggtacccagaacctgttggaggcctgtgtccaggcttgtgtgccagccttcatctacaccagcacaattgaagttgcggggcccaactcctacaaggacatcgtcctaaatggcaatgaggaagagcaacatgaaactacatggtctcattcatacccatacagcaaaaagatggctgagaaggcagtgctggcagccaatggatccaccctgaaaaatggt

SEQ ID NO: 8286 - DNA, 550 bp, Cricetulus griseus
atgctgcccgctgcactgcttcgccgtccgggtctgcgccgcctggtgctccaggcgcgtgcctacgccgaggccgccgcccccgcccccgccgccgggcccggacagatgtccttcaccttcgcctccccgacgcaggtgttctttgacggtgtcaacgtccggcaggtggatgtgcctacactgaccggagcctttggcatcctggcatcccatgttcccacactgcaggtcctacggcctggcctggtggtggtccatgctgaagatggcaccacaactaagtactttgtgagcagtggctccgtcactgtgaatgcagactcctcagtacagctactggctgaagaagctgtgaccctggacatgctggacctgggggcagcgcgggccaacctggagaaggcgcggtcagaactgtccggcacaacggatgaggcagcacgggctgagatccagatctgcattgaggccaatgaggccctggtgaaggccctggagtaggcggtgcatgtctgtcacccacagggaaactgaggcaggtccaggc

SEQ ID NO: 8287 - DNA, 550 bp, Cricetulus griseus
gcctattgggtattttcttcgcgcaaagttgtatttttccaaattgatgggcccagagactgctgcgaagactgtatttttggttaagaatgtcctttccagacattatgttcatctcgagagatctccatggaaaggacttccagaactcaccaatgagaatggccagtattgccctttcagctgtgagacacaagcatggtcaatggctgctgttcttgaaaccatctatgatttataaatgactcatagatatttagtaagtgtgtgagcacttagtatcattgaatgcaaggtcataatgaaatataagcttaactaattttaagaatctcattcataaccaggcagtggtggctcatacctttaatcccagcactcaggaagcaaaggcaggcagatctctgtgagttcaaggccagcctggtctacagacagagtaataggacagccagggctacacaagtacttttagtttgtttgttttgatttttctctctctctctctctctccccaatctctctgtctctctgtctctactctctctct

SEQ ID NO: 8288 - DNA, 550 bp, Cricetulus griseus
gtttcttcttcttccctgagccgcatgggtgctgtgcctgtgatggtgcctgctcagagtcaggctggctctctcgtgtgatgattcaggcactcattggctaaggctggcatctcaccttcctgtaaaggtcacctgtggcacagaggacagaatcttgggaggatagccacactctagaccttcagtcctctgcccctgcctccctttattgttggaagactgggcctcagtaaaaccaaagtctgggacagaggagaaatccctgcttctccctatgaagccagatgaatgatgctgagattggctgccaaggactctggaggagactgccagtcagtgaggcccctggctctgtgatctgtacaaacacacctatctaatgctgccctttgccttcccagtccagttccctgtattaatataacctgtcctgctggcttggctttaaggttttgttggagcaggggaataggaaagactaatttttaaaaaactaacttgaaaacctagttgtttttgtttttatttgctaaatttcaataaagat

SEQ ID NO: 8289 - DNA, 550 bp, Cricetulus griseus
ctggaattcccctgaacatgtggaataaattccaagaattgcataaaaaacattctgaacagaaaaattcagcgtcaagattacagaacaaaaaaaaagaaaaacgactgcagaaaaggcaagttgaagaatgaaaaagaatctcacagtgagcagtcctcaagtgacacccaatggaaggagcttactcagtattttggagccaatgatagatttgaaccccctgttaagacagaaaaaagttagagaagtcaggccttgaaaagaggatagaccaagctgtggaagaatgggatgttgaaaaggctgaagagctcagcaaccagctagctactcgagagctcggtgtaaaaattgcccaagcaattgcctgccacaagtttgttaaagccaaaaaggaggctgaaaactcacaagctgctacgaaagaagaagaaactggcgtgggggtttgaagcaaagaagagatgggaaactaaaagcaacatgggatatatgtagccttacagagttcttcaggacgtttatgatagactgccatgcttcattt

SEQ ID NO: 8290 - DNA, 549 bp, Cricetulus griseus
aaaaatcttactcctatgtgttggagaggctggagacactgtacagtttgcagagtatatccagaagaacgtgcagctttataagatgcggaatggatacgaattgtcccccacagcagcagctaatttcacacgtcgaaacctggctgactgtctacggagtcggaccccatatcatgtgaacctcctcctggctggctatgatgagcatgaagggccagcactttactatatggactacctggcagccttggccaaggctccttttgcagctcatggctatggtgccttcctgactctcagtatccttgaccgatactacacaccaactatctcacgtgagagggcactggagcttctcaggaagtgtctggatgagctccagaagcgcttcatcttgaacctgcctaccttcagcgttcgggtcattgacaaaaatggcatccataacctggaaaacatcaccttctctaagaagggctcctaacatctcgtccttcctcctattcatcagggtacttttttgataggctccttaattcttttttt

SEQ ID NO: 8291 - DNA, 549 bp, Cricetulus griseus
  modified_base (536)..(536): a, c, t, g, unknown or other
  modified_base (544)..(544): a, c, t, g, unknown or other
cgctcatcaacacctacatttcggtgcccaaggagaacagcacgctcaactgtgccagcttcacggcgggcattgtggaggctgtgctcacgcacagcggcttccctgccaaggttacagcgcactggcacaaggggtccacactcatgatcggctgacctagcttctggctctcagatgagggtggagggttgggtatactggggagatagggcacctatgaaattataattggagcctgcaggctggagaggtgggggcaaggatatgaggttaagagggaccaaggcctggcaaactgtcagtgccatagcccagttggtggagtgccctgggtttgatttttatgccacataaattgggcatagtggtgcaaattgtgtcattccagcacaaggaagttaggggagaaggatcagaagttcaaggccaatcctccactacatagcaagttcaagaccagtctctgggagcactacctcctgagtgctgggattaaaggtgaatgctaaaccaaaaaaaaaaaaaaaaaaaanaaaaaaanaaaaa

SEQ ID NO: 8292 - DNA, 549 bp, Cricetulus griseus
gtgccggtcagggttaggagacgcaggcatgctgcgtcccaaggctttgacgcaggtgctaagccaagccaacaccgggggagtccaaagcaccctgctgctgaataacgagggatccttgctggcctactccggttatggggacacagatgcccgggtcaccgcggccatcgccagtaacatctgggctgcctacgaccggaacgggaaccaagcatttaatgaagacaatctcaaatttatcctcatggactgcatggagggccgtgtagccattactcgggtggccaaccttctgctatgtatgtatgccaaggagactgtaggcttcggaatgctgaaggccaaagcccaggccttggtgcagtacctggaggagcccctcacccaagtagcagcatcataatagagtgatggaagctggagtcagaggacggatggtggatgggaggatcagggccctagagacaccttactggactggttacaggaaggtgggctctggctttagctttttacaaataaatttcaactcttgacaaaaaaaaa

SEQ ID NO: 8293 - DNA, 549 bp, Cricetulus griseus
ggagctgcaggtgaacctggaactggagaaagaccttcgtaagaaagcagagtcatttgcacaagagatgttcatagaacaaaacaagctgaagagacaaagccaccttctgctgcagagcgcccttcctgaccagcagcttttgaaagcattagacgagaactcaaaactcatccagctgctgacaagcacacatttttttttcttgcttcactgtcgttctatattacaggggtctttttgttttgttttgtttttttccctagaggaaattaagtggcagtttctaaaaatacaatgtttcagactaccacagtgaataaatagaaatgtaatcagggatttaaaaaaaaaaaaacaacttaatgcaggttttcaaagttgattgttttcaaaattggtgtttatttaaaataagtggtaatgtacttgaatgcactttttatgataatgattcagtaatggtaattttactattaaagaaagtgaaaggcttagttttgttagcatgactcagcatgtagctgtcaggtgctctgcacctcaggg

SEQ ID NO: 8294 - DNA, 549 bp, Cricetulus griseus
gagccgagcgctgagagcaagggctaaagctggggagattgaaaaatgcagaccaccaaggcactgcggtcgttaacgtccagttctgatccgctcctgtaccaggggtctaatcaggcctttgtctgcctccctcttgagtagaccagaggccccatctaaacagccttcctgcagcagctcccctctccaggtggccagacgggaattccagaccagtgttgtttcccgggacattgacacagctgccaagttcattggtgctggggctgccacagttggtgtggctggatcaggggctggcattggaacagtatttggtagcttgattattggttatgccaggaacccgtctctcaagcaacagctcttctcctatgccattctgggctttgccctgtctgaggccatggggctcttctgtttgatggtcgccttcctcatcctcttcgccatgtgaggctccatggggtcagccagccatccctgctgcttcgactccatgccagtcctggtgctggagtgtgctaagctttaccattaaacaac

SEQ ID NO: 8295 - DNA, 549 bp, Cricetulus griseus
ggcggccagccggtctgggcccccgcgatgtcgcatggatcggggctcattcggaccacgtgcagcagcggcggcgcgccggggccatgccagccctcggagggactgctggacgcggtgtacccgcgcacccagggcgccctgctcaaagtggcgcagatggtcacactgctgattgccttcatctgtgtgcgaagctccgcccctcccatcgactatggcgcctacagcttctttgaggtagtcaccatctgcgacctcataatgattctcatcttttacctggtccatctcttccgcttctaccgtgtgctcacctgcatcagctggcccctgtcggaactcctgcactatgtaatcggcaccctgcttctgctcatcgcctccatcgtggcagcctccaagagttacaaccagaatggcctggtagcgggagcggtctttgggttcctggcaagtttcctctgcctggcaagcttgtggctgtcctacaagatcacttatataacccagacagatgcatctgcctgacaaggccatcgccctctg

SEQ ID NO: 8296 - DNA, 548 bp, Cricetulus griseus
ggcagacttgactgagcagtacaatgaacagtatggagcagtgcgcacgccctatgcgatgggctatggggaatccgtgtattacaatgatgcctatggagcactcgactattataagcgctacagggtccgatcttatgaagctgtggcggcggcagctgcagcttctgcatacaattatgcagagcagaccatgtctcatcttcctcaagtccagagctcagctgtacccagtcacctcaactccacttctgttgatccctatgacagacacctattgcagaactccggctcagctgccacctcagcagccatggctgctgccacctcttccccctattatggaagggacaggagcccactgcgtcggaatacacctgtgctccctgcagttggagagggttacggttatgggccagagagtgagatgtctcaggcttcagcagcaacacgaaattctctgtatgacatggcccggtatgagcgggagcagtatgtggaccgagcacggtactcagccttttaaaaactggaggtaggataattgc

SEQ ID NO: 8297 - DNA, 548 bp, Cricetulus griseus
gaaggctgcaaggctcttccggcgcagcgtggtacatggtggggctgggcgctatgcctgtcgaggcagtggaacctgccaaatggatgccttcatgcggcgcaagtgccagctctgccggctacgcaagtgcaaggaggctggcatgcgggagcagtgtgtgctttctgaagaacagattcggaagaaaaagattcagaagcagcagcagcagcagccatcccagactgagccagcatcaagtagctcagcccgacctgtagcctcccctggtacttctgaagctggtggccaggggctccggggaaggagagggcatccagctgacagcggcgcaagagctgatgatccagcagttggttgctgcgcagctgcagtgcaacaaacgctctttctccgaccagcccaaagtcacgccctggcccttgggtgcagaccctcagtcccgagatgctcgtcagcagcgctttgcccacttcacggagctggccatcatctcagtccaggagattgtggactttgccaagcaggtgccagggttcttgcag

SEQ ID NO: 8298 - DNA, 548 bp, Cricetulus griseus
ggaggatgaagaggaggaagacgaagaatttacaaagtgttttatgctttctaataattgctagtgtttctcacatgctcacgaggtaaatcagtattacaaactatgtcttggggaaaggtctcctgtaggagtgtggcaggtctcttgaaggaaggctgaggaccaactgtggatggtggagcctgacctttcgagttctccagctcagttgctagaatgagttacgttctcatttatataatacagtaagaacactaagcattcttgtgcttgatggaagacataaagcctagaaggaccaaagatgtccttattgacaaagctggcctttgtcacctgattctagtgtcctcactatgttctatttctagtagggggctataatcaaatgacttgtatagattttggttacactgcaaatccctcccctagattagtctgtagaagttagcgacatggcaggcagtggttttcctcactgcagcttgttaccctgactttcatggtttttttttttttttttttttatttttttatttttaatt

SEQ ID NO: 8299 - DNA, 548 bp, Cricetulus griseus
gccgccatggcgcccatgaaaagcctgtggcgaagggaaggcaaaaaaaagaagcaggttttgaagttcacccttgactgcacccaccctgtagaagatgggatcatggacgctgccaatttcgagcagttcctccaggagagaatcaaggtgaacgggaaagctgggaatcttggcggaggggttgtgaccattgaacggagcaagagcaagatcactgtcacatctgaggtgcctttctccaaaaggtatttgaaatatctcaccaagaaatacctgaagaagaacaatcttcgagactggttgcgtgtagtcgccaacagcaaagagagctacgagctgcgctacttccagattaaccaggacgaggaggaggaggaggacgaggattaagacgcattggtctgcaatgttttgtattaattcataaataaaatttaggaacaaaatccgtggtttatcattgtatctctgcagtgtgggttggacaggaaattggaccacagggactggggtttaactggctgctgctcatttgtatatagaca

SEQ ID NO: 8300 - DNA, 548 bp, Cricetulus griseus
  modified_base (481)..(481): a, c, t, g, unknown or other
  modified_base (512)..(512): a, c, t, g, unknown or other
ttttcacagttgagggcagcaaagaaagcaggatgtctgtggatccgatggcctatgaggcccagttctttggcttcacaccacagacttgcttactgaggatctacatagcatttcaagaccacctatttgaagtgatgcaggctgtggaacacgtaatcctaaagaagctggagggcatgccagactctgagattagccctgtccaaattcgtaaatgcacagagaagttcctttgcttcatgaaaggacgttttgataacctttttggcagaatggagcagctgattttgttcccccaaacatccttgcttcctgaagataagtgtcaggagacgcatccttttaatgaagaaaaattccagcttctcaaaaaggaaattgaagagttacaggagaagtataaggttgaattacgcactgagcaggcccttcttgcagaattagaggagcaaaaagctgttaaagccaaactcaaagngaccttgactttcttgatgagcttgaaaacnttggcagagatcatggaactagtaactttagggaga

SEQ ID NO: 8301 - DNA, 547 bp, Cricetulus griseus
ccggaatggcatgatgatgtttttgatgggccctttccggccctttcttacgatccctccacgcagtgctgcctccgggacatactggatggcttctttccctcagagctccagcggctgtatcctgatggagtcccctttaaggtaagcgacctgcgcaatcaggtttacccagaggacgggctgggctcattcccaggtgagggtcgtgtggtgggccggcagaaagttcgcaaggccttggacagggtggaggatacttcaggctccaggatgactgctgaaaaatttctgaacaggcttcccaagtgtgtaattcgactaaggccaggtgattgacatccggggccccatcagggaccaccttgcagaactactccccactgcctgcccggatccaggagatcatagtggagacacctgccttggcttctgagcggcagaggagccaggagtcaccggactcgccagtgcctgcgctctccatgctgcgcatccggtcagagaacggggagcaggccttcctgctgatgatgcggcctgagga

SEQ ID NO: 8302 - DNA, 547 bp, Cricetulus griseus
  modified_base (224)..(224): a, c, t, g, unknown or other
tccacgcacactctctcagtacttgaatggaatggctgttgtagttggggttattttcttatagacttgtatatccgtgtcaaggtgactgagaaggcaggcagtctgtacagtctatctccttcattggcttgcatgaggaaggtgttttaaactataataacatagaattcactcacgttaaacttttacttgttctgtctggtaagtgtatagtagagcancgtttcctctgctcatcaatccagagggaggggagagtaagggaagccatttcatagtgatgagctgtgctacaaagctggctggataacttcccttgagtacaaacttgtcttttttctgtgtggagtctagatggggtaaagaaatatgtttttggaaaacattttcctaaatctcttttatctcccaccaggaatggttcagattaatggatcattttatttctagactggtggtggtggcggtgatgatggagaattctgatatttaatgtctgtgtgtattgttgccacaattgttgattaaagttttctgtatcagg

SEQ ID NO: 8303 - DNA, 547 bp, Cricetulus griseus
  modified_base (44)..(44): a, c, t, g, unknown or other
gatgctgtgagcccagcacgcctcgtgtaccagacgatcccagnaccccaaatcaatatcaccatcctgaaaggtgagaaaggtgaccgaggggatcgaggcctccaggggaaatatggtaaacaggttccacaggtgccaggggccatattggccccaaagggcagaaggggtccatgggagctcctggagaccgctgcaaaagccactatgcagccttctccgtgggccgaaagaagcctctgcacagcagtgactacttccagcccgttgtctttgacacgcagtttgtgaacctctataaacacttcagcatgttcaccggcaagttcttctgctatcaacgtgcacacttggaaccagaaggagacgtacctgcacatcatgaagaaccaggaggaggtggtgatcctgtacgcacaggtgagcgaccgtagcatcatgcagagtcagagcctgatgctggagctgcaggagcaggatgaggtgtgggtgcgtctctttcaaggggagagagagagaacgcctattttcagcgacgagttcg

SEQ ID NO: 8304 - DNA, 546 bp, Cricetulus griseus
gtcacgtagctcaggtccctggcttgggccacatcccgcgtcgcactgtcctctactccccgcttgcagtcccctccgccaccatgccgatgttcaccgtgaacaccaacgttccccgcgcctccgtgccagaggggcttctctccgagctcacccagcagctggcgcaggccaccggcaagccggcccagtacatcgcagtgcacgtggtcccggaccagctcatgacttttagcggctctagcgacccctgcgccctgtgcagcctgcatagtatcggcaagatcggcggcgcgcagaaccgcacctacagcaagctgctgtgcggcctgctggctgatcgcctgcacatcagcccggaccggatctacatcaattattacgacatgagcgcggccaacgtgggctggaacggctccaccttcgcttgagtgccggcctaacttacctgcgccgccgtttcttggagccttgctgcacgcagcgttctgttttcgtccacccctggcgacgcccaccttccgatcgggagaaataaatggttta

SEQ ID NO: 8305 - DNA, 546 bp, Cricetulus griseus
cagtcccagctgttttaggtaaagaagctgtgcccttccctcctgacttgcgttgtcacacttgaatctggggttccagtgccccaggctgcccatccgctagcacactgtaaagaagcctcgacaggggcttctggttcattctcaggggaagcggctcccagattctctgggggtgggctgcggataggtaggctctgagtgccagttggagggtgcttgagccccctcccctccccatcataggtgctcctggggtggggaggtctggggagcagcagttggctgactgggaggtagcaggccattgtgaaactggtttgacacatgcatggtagccagtcttggggtctgccttctgtagccctggaacttggccctgagtgaagccaaggtttctagaagtgtctgctttgcctgcttgagggacatcgcttcaagcatgtcagcagctgtattactagattccaaccaataataagcacagaaaatcgtcatacaagaaaagtacatgtttttgctgctgctgagccacttgtagaggag

SEQ ID NO: 8306 - DNA, 545 bp, Cricetulus griseus
gtggagaagtctggagacgacgttcagaaatggcacctcgcaagggaaaggaaaagaaggaagaacaggtcatcagcctcggacctcaagtggctgaaggagagaatgtatttggtgtctgccacatttttgcatctttcaacgacacctttgtccatgttactgatctttctggcaaggaaactatctgccgggtgactggtggaatgaaggtaaaggctgacagagatgagtcttctccttatgcagccatgttggctgcccaggatgttgcccagaggtgcaaggagctgggcatcactgccctgcatatcaaactccgagctacgggaggaaacaggaccaagacccctggacctggagcccagtcagccctcagagctcttgctcgttcagggatgaagattgggcggattgaggatgtcacccccatcccctctgacagcacccgaaggaagggtggtcgtcgtggtcgccgtctgtgaacaggacttctcaaattattttctgttaataaattgctttgtataagactaaaaaaaaaa

SEQ ID NO: 8307 - DNA, 545 bp, Cricetulus griseus
  modified_base (382)..(382): a, c, t, g, unknown or other
caggtgacctgctttaatgagttagaaatctgtatccatcctgatggagtcatccccgtgctgacttttctcaaggatcacaccaatgcacaattcaaatccttggctgacatgacagcagtagatgtcccaactcggcagaaccgttttgagattgtctacaacctgctgtccctgcgcttcaactctcggatccgtgtgaagacctatgcagatgagctgacacccattgagtctgtggtctctgtgcacaaggcggccaactggtatgagagggaggtctgggacatgtttggagttttctttgttaaccaccctgatctaagaaggatcctgacagactatggcttcgagggacatcctttcggaaagctttcccctntctggctatgttgagctacgttacgacgccctgcctatcgtcagccccctgagagtctcaagcttgaagctggagacaagaagcctgaagccaagtagcttcaaaagcatgtggattctagaggaagaatgacattacctacggttgtctgtgtaaataaact

SEQ ID NO: 8308 - DNA, 544 bp, Cricetulus griseus
gcgggacgcgcagtggacttttgaatctgctgtggaggagaatgtcagcatcaacggacaagcctggcaggaagctgccgaccactgtcttatggtagactctgacatcaaagttcttgaagatgaatttgatgagctcatagtagatgtggcaacaaaacgcaggcagtaccccagaaggatcctggagagcgtcatcaaaaccttgaaagctcagcacgagactctgaagcagtatcgcccggttgtgcatcccttggacctgaaatgtgaccctgacccagcttctcatgtggaaaatctgaaatgtcgcggggacgctatagctaaggaaatcagtgacgccatgaaggtttttttttgttttttggtttgtgttgtggttttgttttgtttgttttccaagacaaggtttctctgtataacagttctggctgtccaggaactcactttgtagaccaggctggactcaaactcagagatccacctgcctctgcctccggagtgctgggattaaaggcatgcaccaccaaagcctggctaa

SEQ ID NO: 8309 - DNA, 544 bp, Cricetulus griseus
ccgcctgcgcaagcgggtggagcagctgagccgggaactggacacgctgcggggcatcttccgccagctgcccgagagctcccctggtcaaggccatgggcaactgcgcgtgaggcgcgcggctgcgggaccggagacgggaacctaagtttctggtcttggggggagaggggatgaaaaggacaccgggaccatcagccttgtgtgtactgtatgtcgccagccgctgttgctgaaggaacttgaagcacaatcgatccatcccagagggactggagttatgacaagcttcccaaatattttgctttatcatccgatatcaacacttgtatctggtctctgtgtcccagcggtgccttgtgcaatgtcaatgtccacgtctatgctaaaccaccattttatttggtccttttgttttgttttggttttgctcagattcttgccaaaatgagactcttcgctagcggctgggggaagaagctcgggccctctttcctttttggtttggggtatttttttttttcttttgtctcccggaggacca

SEQ ID NO: 8310 - DNA, 543 bp, Cricetulus griseus
gtgtgtcagtgggaataaggagtgtggtaggggatttacccaagtatccaccctgtagccctggccaaagaagtccttttcttcccagtgtgctccttgctcttccaatgactgcagaaccttgtcttaggatgtggaaaagatatgtcctgtgctcccagaacatgcctgtcaccttctctttgagattaaccacagctgccaaaagccatgtaccagttgggccttagaaaaaaccatgatgtttacagccctgcctcgggctttggtctttaccttctttgcagggttatcctctcataggactggaattttttgtttaatttttactttttatttaccatgtgctgaatcttcttgtgtgtgtgttttgtttttgtttttttttattaacaaaccctttgcatttttaagtcagtgacatctgtactttcttgcagcacagaaacttttctttgtactacaaaatatatttattataattatagttcttccttgactagtgacactgaaatatgaaatatgaaataaagcaatatatat

SEQ ID NO: 8311 - DNA, 543 bp, Cricetulus griseus
tgtacttccttcctttttgacttctttccgggcgtccaagatgtcgaagcgaggacgtggtgggtcctccggagcgaaattccggatttccctgggtctccccgttggagctgtgatcaactgtgctgacaatacaggtgccaaaaatttgtatatcatctctgtgaagggcatcaagggacgactgaacagacttcctgctgctggcgtgggcgacatggtgatggccacagttaagaaaggcaaacccgaactaaggaaaaaggtccatccagcagtggtaattcgacaacgaaagtcgtatcgaagaaaagatggggtgtttctttattttgaagacaatgcaggggtcatagtaaacaacaaaggcgagatgaaaggctctgctatcacaggtccagttgcaaaagaatgtgcagacttgtggcccaggattgcatccaatgcaggcagcattgcatgattctccagtgtatttgtaaaatatattcaattaaatgggaggcggaggcaggcggatctctgaggccagcctgatctaca

SEQ ID NO: 8312 - DNA, 543 bp, Cricetulus griseus
cacacgttggctctggctttctggcttcagtgtttcaaaagtgaagacaagatgaagaagacccacttgcttctctggggagtcctggccatttttgtcaaggccatccttgtaactggtgacaatgaaaagaccattcttgctgacaacaaatgcatgtgtacccgagttacttccaggatcatcccgtccactgagaatcccaatgaggacattgtggagagaaatatccgaattgtcgttcctttgaacaacagggagaatatctcagatcccacctctccactgagaacgaaatttgtgtaccatttgtctgacctctgtaagaaatgcgatcctgtggaagtggaactggataaccagatcgttactgccagccagagcactatctgcagtgaagacagtgctgttccagagacctgctacacttatgacagaaataagtgttacacaagctatggtcccacttatgtatcgtggtgagaccaaaatggtgccaacagccctgacccctgattcttgttaccctgactagttgagtca

SEQ ID NO: 8313 - DNA, 542 bp, Cricetulus griseus
tggagaaggagttcctatttaatccctatctgactcgcaagcggaggatcgaggtatcgcacgcgctgggactgacagagagacaggtcaaaatctggttccagaaccggagaatgaagtggaaaaaggagaacaacaaagacaagttccccagcagtaaatgcgagcaggaggagctggagaaagagaagctggagctcccttctcttgggggccagggggggaaaaaagaaaaggattttaaacaaggactccctcgccctgcgagggtgagcgactgctgcctgccagagccccctcgcccccgccccatgtaaaaaagcctctttgtgcaatggtctttttcctttgaacgtgcttctttgtaatgaccaaggtaccgatttctgctaagttctcccaacaacatgaaactgcctattcacgccgtaattctttctgtctgggagggctaattatatatttgttgttcctctatactttgttctgttgtctgagcctgaaagggacggaagagtacaataaagtttaacaagcgagaa

SEQ ID NO: 8314 - DNA, 542 bp, Cricetulus griseus
ctctttccttttgcggccatcgctggatcgcagccgccaaaatgaagttcaatcccttcgtgacttctgaccgaagcaagaaccgcaaacggcatttcaatgcaccttctcacatccggaggaagatcatgtcttcccctctttccaaagagctgagacagaagtacaatgttcgatctatgcccattcgaaaggatgatgaagttcaggttgtccgaggacactacaaaggccagcagattggcaaagtggtccaggtgtataggaagaaatacgtcatctacattgaacgagtgcagcgagaaaaagctaatggcacaacggtccatgtgggcatccaccccagcaaggtggttatcaccaggctaaagctggacaaagaccgcaagaagatcctggaaaggaaagccaagtctcgacaagtaggaaaggagaagggcaaatacaaggaagaaacgattgagaagatgcaggagtaggggcccctcatacactgcttccattaaagactagtttaagtaaaaaaaaaaaaaaaaaaaaaa

SEQ ID NO: 8315 - DNA, 542 bp, Cricetulus griseus
  modified_base (476)..(476): a, c, t, g, unknown or other
caagtagcacagctgaaacgttcagacgaggcaaaggaagacatgggtgccctttgccagggggcaccctctgaggatggcaagggacccaaaggcagtgatgaggtcgtggcaccaaagaatcagggtggcagcgccaggaagcaggctggctcagccacctctccttcagctactcacctcacagcgcccagtggcagactcactgccagcagttctgtcaggcaggacagcaccagcaagactgaaccaaactgccccaagaacaaagacagatgccccaagcccacagagatgctgctgggcatgcaggagacgccaatggaggcttattggaaggagagtggggcagtaagccaagtgactgtgcaccctacaaagaggaagaggggtatggacctccccgctccctgcactcctttgtccctcagctgccttcagctaagcactccagaaaacagagagatgtgggggtntgtgtttgtgtgtgtgtgtgtgtgtgtgtgtgtgtgtgtgtgtgtgtgtgtgtgtgtgtgtgtgaa

SEQ ID NO: 8316 - DNA, 542 bp, Cricetulus griseus
caaaaacaaggaaaagaaccaaaagctttacagccgagcacagcggcaccaggataaaaaggagaagattcagcggcataaccgcaagcttggggacctggtggagaagaaaactgttgacttgaggagtcacttactctgcctactacaattgggtagaagaagaagaaaacaacccaacgggcctgacatggagcataacaaccctgcctatactatcagcgccgcactgtgttacgccactcagctggtcagcattgtctcgcacatactcgatgtcaatctgcccaaaaagctgtgcaacagtgagttctgtggggaaaacctcagcaaacagaaactgactcgtgcagtgaggaggctgaatgcaaacatcctttacctgtgttcctctcagcatgtgaatttagatcagttacaaccactgcatacactcaggaaccttgctgcttctgagacttccaagtcagggtaagtcacacacgttttctaaacttttattgtattactgcaataaatcctttaacagtaaaaaaaaaaaa

SEQ ID NO: 8317 - DNA, 542 bp, Cricetulus griseus
ctccatggatctgccttactaccatggccagatgaccaagaaagaatgtgaaaaccctgctccgtcaagggagggtggatggcaactatctgataagagacagcgagtctatgccaggagtcctgtgcctctgcgtctcgtttaaaaagtttgtctatacctaccgaatcttcagggagaaacatggatattacaagatagagactgtggaaggtgctccaaaacagatctttccgaacctagaagaattagtctccaagtatgaaaagccaggtcaaggtctggtgattcacctttcaaacccaatgatgagaagcggcttctgcccaagagggagaaggatgaagttagagatgaatgtttatgagaacactaacgaggactatgtggatatcttgccttgaagacaaggacataggacaaaacaagctaagggagggctgagatggcagagctctcagccaccacctctgcaagtgtctatctaaaatgccaacttctagagggcctctgagaccctcctgacctgggtagcaggatct

SEQ ID NO: 8318 - DNA, 541 bp, Cricetulus griseus
ttgatgcattctttaagaattttaagagggaaagccaaatcctctctgaggaaaccatcaccttgattaaatcccacattcagaaaaatgacctccagggtgcactttctgcaatccacagtgcactgagagacatcgagagcgcccccctgaacattgctgtgacaggagagacagggacagggaagtccaccttcatcaatgctctgatggggatagggcaggaagacgaaggtgcagcccctactggagtgacagagacaaccaaggagagaatgccatacccacacccaaagcttcctcaggtgacaatatgggacctgcctggcactgggtccacttccttcccaccagaaagctacctaaagacaatgaagttttctgagtatgacttctttgttatcatctcagcttcacgcttacaaagaaaatgatgcacaactagcgaaatctctacaggtcttactttgggctggatgatgcctcactggaaaatattgctaaggattttaacgtgtctgtaaatgaaatcaaggcacac

SEQ ID NO: 8319 - DNA, 541 bp, Cricetulus griseus
tcggttgggccgttgccggaactctgttacaaggcggatgtccaggcttttagtcgggccttcaacccagtgtctccctgatggtggctgtgctgggtctggcgggcaatggcctagtcttggccaccccatctggcagccggacgaattacccgatctcccacctccgttcacctgctccagttggccctggctgacctcctattggccctgaccttgccctttgcagcagcaggggctcttcagggctggaatctaggaagtaccacctgccgagccatctcgggtctctactcagcctccttccacgccggcttcctcttcctagcatgtatcagcgcggaccgctatgtggccatcgctcgagctcttccagccgggcggcggccctccacacctggccgtgcgcacttggtctcggtcttcgtgtggctgttgtcgctgctcctggccctgcctgcgctccttttcagccgggcgggccgcgggaaggccagcggcgctgtcggctcatcttccctgaaggcctcacgcagactgt

SEQ ID NO: 8320 - DNA, 541 bp, Cricetulus griseus
  modified_base (530)..(530): a, c, t, g, unknown or other
ttttgctgcgggatcccggagtggggcggatagcgggagggatggaatcgactttggagcagcatttggaggacacaatgaagaatccatccattgttggagtcctgtgcacagattcacaaggacttaatctgggctgtcgtggtaccctgtcagatgagctggagtgatatctgttctagcccagcaagcagctaagctaacctctgaccccactgatattcctgtggtctgtttagaatcagataatgggaacattatgatccagaaacacgatggcatcacagtggcagtgcctgtgtcagttaacttgtaaactattaaagttccagaggctaggccattcacctagtgtccaatgtggacttccttatttatatgacaaccagttaccaaggtattagttaaaaggatcatagttgttttgtttgggctttggtcattttgttctttggagaccatcactgcagtccagtattccagcttatcattgcctggaactgtgtacctgtgctgatggaaaaaaaaanaaaaaaaaaaa

SEQ ID NO: 8321 - DNA, 541 bp, Cricetulus griseus
aagggtatcccgggcgaatctgcaccgaggcagtaactgtggtccctgcagtttcagctacttctccgcgatgttgcccttcgccagaaacgcactaagccgtctccaagttcgaagcattcagcaagtggtagcaaggcagagccaccagaagcggacaccgaatttccatgacaaatatggaaatgctatattagccggtggagctctattctgtatttctacatggacatatacagtaacacaaattggaatagaatggaacctgtctccggttggcagagtcaccccaaaggaatggagagatcagtagtcatgccagctggtataataatcaaggaattgttaaataaaagctatgatgttaaaaaaaaaaaaaaaaaaaaaaaaaaaaaaaaaaaaaaaaaaaaaaaaaaaaaaaaaaaaaaaaaaaaaaaaaaaaaaaaaaaaaaaaaaaaaaaaaaaaaaaaaaaaaaaaaaaaaaaaaaaaaaaaaaaaaaaaaaaaaaaaaaaaaaaaaaaaaaaaaaaaaaaaaaaaaaa

SEQ ID NO: 8322 - DNA, 541 bp, Cricetulus griseus
cccacccgcggaagccgccgcgccgccctcccctccacaggattcggcttttaaaaactgctggagctgtcgcttgctttccgggtccgcgctcttggggtccggcgcttacgtctatttggtggccaggaggcccatgaagcttggaatcccaccgcaaccaggcaacatagcccagatggtcctcggcatcagtattgcctgttggggtgtagttatcctgacagacccgaaagggaaggcctaccgagttgtttgaaagcaccagcagatacttgctgtctccatttcctggctgcacggcagaaagagcaagcattgtgttggtggatattctttgcagatgtggacagagatgcgcttcattttaagacgtgccaagaagactgtgacaacatgaactgccattctttggctctggatgtttacagttttctcctctcaggttataaaggggcaaataaaaacagcaaaataaactattttttaaataaaaaaaaaaaaaaaaaaaaaaaaaaaaaaaaaaaaaaaaaaaaaaaaa

SEQ ID NO: 8323 - DNA, 541 bp, Cricetulus griseus
gaaaagtgaagatgggacattttgaaatggtcaccacgctgctggcagccatgactctaatggacatcttccaggtgaaggcagaagtgttagacatggcagagaattcgtttgatgatgaatacctaaagtgcagcaacaggatggaaatgaagtacattcagcagctgttcaaggaggaaagcgccagccataggctcctggagactgtgtgggacaatgccgggatcttgtgggatgctcggaaggctcagatccccgtccccctgaccttcaagaactcctatggaatagccctgatggcgttcgtgaccgaggctcgagagcagactcctttttaccacacgttcaacagagctgtgaagatggctggccattcccggaaaagttacatctatgactttcccttcaaagcttttcatttttacctgacaagagccctgcacctgctgagaaggccttgcggtgacagctacaaagacgtggtgtacctcacaagtccaggcatttcctttaagtttactaaaaaaaaaaaaaaaaa

SEQ ID NO: 8324 - DNA, 541 bp, Cricetulus griseus
ccaacggccagagttggtagcccagatggacaccagaggagaaggaagcatacatagccatgggtcaacgcatgtttgtaggacctctttgagtgagctttccctgctctctcctcctgttagctcatttcagagagaacttcccaccaagtgctaaagtggctcctgcccccttgatgtcaagcacctactaatctagtacaaaagcataataggagagaaagtttgtattttttttttttaattgtcagaaacttccaagaaaggtaggtgggctataagtattccctctcctcttattactaaagtattaatatttttctgtaattccttacctatttttttccttcatttttaagacatgtttttctcactcggattaaaatgctcctgtctatgtctctcctgtgagtcttgtcagactttgtattctagcctctccactgtgttgttgagcattgtaacctcaaggcacagagtatctgagccttgtataaaagtgattattcatttacctggttgttggatgactgaatattga

SEQ ID NO: 8325 - DNA, 540 bp, Cricetulus griseus
ggaagaggacacgctgaccagcgaactggagccccagctgcggcgccggcgttacgagtacgaccactgggacgcggctatccacggcttcagggagacggagaaatcccgctggtctgatgcaagccaggctatcctgcagcgggtccaggctgctgcctttggccctgaccaaaccctgctacccttggttcacgtgttagacctggaacctcggggctacatcaagccccatgttgacagtgtcaagttctgtggatccaccatcgctggcctttccttgttgtccccaagtgttatgaagctggtgcacacccaggaacctgagcagtggctggaactgttgctggagccaggctccctctatattttaaggggttcagcccgatatgacttctcccatgagatccttcgagatgaagaatcattttttggggagcaccgggtcccccggggccggcgcatctcagtgatttgccgctccctccctgaggggatgggggccaggaaggtcaggagagccacccccagcttgctgac

SEQ ID NO: 8326 - DNA, 540 bp, Cricetulus griseus
gagaaacccttcatatgtaaggagtgtgggaaaaccttcagtggcaagtcaaacctcactgagcatgagaaaattcatattggtgagaaaccctttaaatgtaatgaatgcggaacagcttttggtcagaaaaagtacctcataaagcatcaaaacattcacactggagagaagccctatgaatgcaatgaatgtgggaaagccttctctcagcgaacgtcacttattgtgcatgtgagaattcattcaggtgataagccttatgaatgcaatgtctgtgggaaagccttctctcagagttcatctctaacagtgcatgtgaggagccacaccggtgagaagccctacggttgtaatgaatgtgggaaggccttttctcagttctcaaccctggccctgcatttgagaatacacaccggtaaaaagccttaccagtgcagtgagtgtgggaaagctttcagccagaagtcacaccacatcagacaccagaaaatccatacccattaaaaactctgtggggtatcttcagtatggggaagt

SEQ ID NO: 8327 - DNA, 540 bp, Cricetulus griseus
catcaagacacaatcattttctgtgcctgtgagttaggacaccaagatgtcctgaagaggaaggcaggccctgggcgggctctaggaaaaaaggctatatcccctaactcaaggggcagatgctctgtggcttctaggaaagaattggggggaataaggtcatctctggggtggactccaagtacagtgcagacaaggagactaacctgtgtaccacatgaacccttaggtcaagaggtggcacccattgtcagcctaccccttccagaactttgtgcctgtggagttgggtgttggctttctcctggttccttctcaaggaagacaagtaaattgctctctctggactcaaatcttctggaactgatgatttcacgtggcagctcccaaccaacacctgggtgaggcattgccctgcagctgggcctacaggcattggactctggacctgtagggggttcttggcacctgtgaactggttgcactcagctggcccatccacacctcacctcggccacatcagcgatctggtggaacctc

SEQ ID NO: 8328 - DNA, 540 bp, Cricetulus griseus
acttgaatattttccagaagatctgctaaagaaaatatttaacatccagttcttagccagattagattctcaacttgcaattttaccttcaactctaagtgcaagggtccagtttcgccttatggagttaaatagagcagtctgcttggaatgccccgagtttcagatcccgtggtttcatgatcgcttttgtcgaggacattataacaaagatattgatgtgatgaatggagcacaacagcagatctataaaatgttagcagaagtccttggaggactgaggtgtgtaaaggcttctggtctttctacatattaccacaccgtgggctggagaggtggctcagagattaagagcactggctgtttttccagaggtcctaaattcaatccccagcaaccacatgaatggcgcacaaccatccataatgagatcagggtgccctcttctggcaggcaggcatacatggcaaacaaaacactgtatacataataaataaataaataaataaatattactaaaaaaaaaaaaaaaaaaaaaaa

SEQ ID NO: 8329 - DNA, 540 bp, Cricetulus griseus
aaggaggcctgtgacacgtccttcaacgtgaatcttcgggctgtcatccaggtgtctcagattgtggccaggggcatgatagctcggggagttccaggggccattgtgaatgtctccagccaggcctcccagcgtgcactgaccaaccacagtgtctactgttccacgaagggtgctctggacatgctgaccaagatgatggccctagagttggggccccacaagatccgtgtgaatgccgtaaaccccacagtagtgatgacaccaatgggccggaccaactggggtgacccccacaaggccaaggtcatgctggatcgcatcccactcggcaagtttgccgaggtggagaacgtggtggacgccatcctcttcctgctgagcaacagaagcagcctgaccaccggatgcactttgccggtggatgggggcttcctggctacctgagccccccacaccattactctgctcagccatacgctcagacattgctcccccatccctccaataaacatctgtgcaacctgtgtgccgactctc

SEQ ID NO: 8330 - DNA, 540 bp, Cricetulus griseus
  modified_base (488)..(488): a, c, t, g, unknown or other
tatcaggaccagcttgaagctgaaattgaagaaacctatgcaaattttataaagcacaacgatggcaaaaatatcttctatgctgctcgtacccctgccacactgtttgcagttatgtttgctatgtatataatctcaggactaactggcttcataggcctaaactctatagccgttttatgtaaccttgtcatggggctagcactgacgtccctttgtacgtgggcatatgttaagtactctggggagttcagagaaattggaacaatgattgatcagattgctgaaacactctgggaacaggtattgaagcccctgggtgataatttgatggaggaaacataaggcagtctgtaacaaactctatcaaagcaggcctgactgaccaggtgtctcatcatgcccgattaaagacagactgacagttcatctcctcatggactccactctccctttttcatgcttgctgtacttaattcttttttttntttttatcccgtcgtgtgtgtgtgtgtgtgtgtgtgtgtgtgtgtgtagaga

SEQ ID NO: 8331 - DNA, 540 bp, Cricetulus griseus
atggcatctgaggcagagccccgcctcctgggcatgtttgagtgccagctctgtgccttgacagctccttacagctacgtgggacagaagcccccagacacccatgctgttgttctcctggaggaaagctacatcatgaaggatcccttctcctcagacaaagccaggtttctggtccttggctcacggtgcagtgtgtgtggcaaactggtgtgtgtgggcccggactgcagcctgttctactccaagagggtctgcctcccctgtgttcaggagaatatcagtgctttccctcaggaaatacagcaggatgtggaaaagagaaaaggggcctccaagaagccctccagccatccctgactggcaggcacacagcctcctgtgcagcgttgggctgactcagccagggttccggctgggagatgtgtatctggcctcccctgaactgtggagtacctgcagccctgggaaccaaggagctggccaagcctgaggacagacagcaggagtggatccagctgcagctccaggactggcctc

SEQ ID NO: 8332 - DNA, 540 bp, Cricetulus griseus
ggagctgctcggaagctcggccgccgggaggaggccgtggccacgcttcctggcggttacccaggggttccttcgaagaaccatgaagtcgtcctctgttgtgctaaccctagcctccctggtgttcctgatgtgtgtccccaggtcacagacctgtaacaaagctctctgtgctagcgatgtgagcaagtgcctcattcaggagctctgccagtgccggcctggagaaggaagctgcccctgctgtaaggagtgcatgctgtgcctggggaccctgtgggacgagtgctgcgactgtgtcgggatgtgtaaccctcggaattacagcgacacgcctcctacttcaaagagcacggtggaggagctgcatgagcccatcccttccctgttcagagccctcacagagggggacacccagctgaactggaacatcgtctccttccctgtggcagaggagttgtcccaccatgaaaatctagtttcctttttagaaactgtgaaccagccacaccaccaaaacgtgtctgttcccagtaacaa

SEQ ID NO: 8333 - DNA, 539 bp, Cricetulus griseus
gtgaggatgacccggcccctggagcaggcagtagctgccatcgtgtgcacccttaccaggagtatgctgggcgctgtggggacaagtacaagatctgtcagtcggagctcaaggagctgctgcagaaggagctgcccacttggaccccgagtgagttccgggagtgtgactacaataaattcatgagtgttctggataccaacaaggactgcgaggtggactttggggagtacgtgcgcgcgcttgccagcctctgtctctactgccacgagtacttcaaagactgcccccctgagcccccttgccccccagtagcctctgatccagaagggtatgccattctggaaggtcagggtctgctctagtgctccgtctttgtccctgaggtgatcctgagtgtgtagccacacccttcctaccctctctgtggtatcctttcagtcggggcttgccaggtccctgatgtgctaaccctggctactcatgcacagtagaagctttcctagggatgtcaaagtagtgaggggtggaacagtagc

SEQ ID NO: 8334 - DNA, 539 bp, Cricetulus griseus
atgggtgtgaggaatgcggcatgagcttcagtcagcggtcaaacctgcatatccaccagcgtgtccacacgggagagaggccctacaagtgtggggagtgcggaaagggcttcagccagagctcgaacctccacatccaccgctgtatccacacgggggagaagccctaccaatgctgtgagtgtgggaagggcttcagccagagctcagacctgcgaatccacctcagggtgcacactggagagaagccctacccctgtggcaagtgtgggaagggcttcagccagagactaccaaactcctcattcatcagagagtgcacactggagagaagccctatgagtgcagcaagtgtgggaagggcttcagccagagttccaacctccacatccaccagcgggttcacgggaaggaccttcactgacattggctggctcagcactgcagaatacttttatgtaaagataaatacttttcatggctgagggcacaggccagtggtagagtgcctgcctcaaatgtataaagccctgggtttg

SEQ ID NO: 8335 - DNA, 539 bp, Cricetulus griseus
tgctgaacccagccagatgcagattccaaaagaaacgaaagctgaagatgaggacattgttcttacccctgatggggaccaggggagtttctgacttttgaagttccacttaatgactcgggatctgcaggggcttggtgtcagtgtcaaaggggaccgttccaaagagaaccatgcagatttgggaatcttcgtgaagtccattattaatggtgggagctgcatccaaagatggaaggctaagagtgaatgaccagctgatagctgtgaatggagagtctctgctgggcaaagccaaccaggaagccatggagactcttcggaggtccatcgtccaccgtggcatgatccagctcatcgtggccaggaggatcagcaatgcaatgagcttcggtctcctgggagccctgctgcacctgagctgcccattgaacagagttggatgaccgagagcgcaggatctcacactccctctacagcgggattgagggcctggaagagtctcccaccaggaatgctgcactcagcagaataatggg

SEQ ID NO: 8336 - DNA, 539 bp, Cricetulus griseus
ccctggccgcgcccgccttccaccgtgcgctcaaccggcagctgagcagcggagtctcggagatccggcagacggccgatcgctggcgcgtgtccctggacgtcaaccacttcgctccggaggagctcacggtcaagaccaaggaaggcgtggtggagatcaccggcaagcacgaagaaaggcaggacgaacatggctacatctcccggtgctttacccggaaatacacgctgcctcccggtgtggaccccaccctggtgtcctcttccctgtcccctgagggcacacttaccgtggaggctccgctgcccaaaacagccacacaatccgcggagatcaccattccggtcactttcgaggcccgcgcccaaattgggggccaggaagctgggaagtcggaacagtctggagccaagtagaagccatcagcctgctgcatccccaacagccatcactcgccacccctctctatcagtctttatgctcttttgatacatacacgtacctgctgtttttctcaaataaaagttggaagacta

SEQ ID NO: 8337 - DNA, 539 bp, Cricetulus griseus
gtttcctccctcgttttctctttgctgccagacctccgccatcatgggtcgcatgcacgctcccggaaagggcctgtcccagtcggcgctgccctaccgccgtagcgtccccacgtggctgaagctgacgtctgacgacgtgaaggaacaaatttacaaactggccaagaaaggcctgactccctctcagataggtgtgatcctaagggactcacatggtgtggcccaggtccgttttgtgactggtaataaaatcttaagaatccttaagtctaagggccttgcccctgatctccctgaggatctctaccatttgattaagaaagctgttgctgtccgaaagcatcttgagaggaacagaaaggataaggatgctaagttccgcctgattctgatagagagcagaattcaccggctggctcgttactataagactaagcgggtcctcccacccaattggaaatatgagtcatccacagcctctgctctagtggcataaattctcttgtgtacacaaaaaaaaaaatcactttgagtaa

SEQ ID NO: 8338 - DNA, 538 bp, Cricetulus griseus
gtggcgtctttctcccgcgcctacacagatagaagttccgtgtcgggccggcagcggcggcggcggcgtctctcaggtttgaacgcggagcgggtagcgtcgggtctgcggcctgatctggaagcctagagcggagcggcgagatgacggaccggtacaccatccacagccagctggagcatctgcagtccaagtacatcggtacgggccacgccgacaccaccaagtgggaatggcttgtgaaccagcaccgggactcctactgctcctacatgggtcacttcgacctcctcaactacttcgccatcgccgagaacgagagcaaggcccgcgtgcgcttcaacctgatggagaagatgctgcagcccagcgggccgccggcggacaagcccgaggagaactgaggcgagcgcttcccaggctcccccgccggccagcggtgggccggtcctccttgctcgggcttcttcatcgtctgtcacgcctggcctgcttacctgtggacgattccgaacaagtcaccgagagactgtccggg

SEQ ID NO: 8339 - DNA, 538 bp, Cricetulus griseus
gttgaggggaggtgggctgtgcctacagagacatgaggctgagccgggtcctgacaatactgtccatttgcctgagtgccctggccacagccaagggggccgaaggcaaacggaagctgcagattggagtgaagaaacgcgtggaccactgtcccatcaagtctagaaagggggatgtcttgcacatgcactacacggggaagctagaagatgggacggagtttgacagcagtttaccacagaaccagccctttgtttcacccttggcactggccaggtcatcaagggctgggaccaggggctgctggggatgtgtgaaggggaaaagcggaagctggtgatcccgtctgagctggggtatggagagcgaggagcccccccaaagatcccaggtggagcaaccctggtgtttgaggtggagctgctcaagattgagcgacgttcagaactgtagcaggctgcaaacaaaaaaacctttaaaaaccccaaaaaaaaaaaaaaaaaaaaaaaaaaaaaaaaaaaaaaaaaaaaaaaaaaa

SEQ ID NO: 8340 - DNA, 538 bp, Cricetulus griseus
ctgaaactgcagaaaatgggagaagaagctgaaggagagcgactgattgacgacgccctgagaaaagctcctgatcaagcggatgtactgcaaaaggcatcccagttttaccagaaaaagggtaacctagatagagctaacacacttcttgtaagagcactaagatccacagaaaacaagactcccctctacaccctggtcatgtgccgttacagggaaaggctgaagcaattacagaaaaccggaaatgctggctccagtgacagcctagagaagatggaagaactgagacaattaaccatggagtacatgcgccaggctcttcagaggaagcaaaagtcgtctgaactcctactcagacctcatcgattacccagaagtaaaacgatgctgtcagttggtcttcggcaaggagagccccagtgctgaagaacaacagctctaccagagctattgcaacctccaggaatatcaccagcggtctgaaggccttgctgccctgtgtgtgtgtgtgtgtgtgtgtgtgtgtgtgtgtgtg

SEQ ID NO: 8341 - DNA, 537 bp, Cricetulus griseus
cggcggcggcggcggtgccagcctggacctgctccgctccctgccgcgagtgagcctggccaacctgaagcccagcgctgactccagaaaacgggaacgacgtccaagagataggagaagaggtaggaaatgtggcagaggccataaaggagaaagacagagaggaactcggccccggctgggctttgagggagggcagactcccttttacatccgaatcccaaagtatggattcaatgaaggacatagttttagacatcagtatcagcctttgagtctcaggagactgcaatatctcattgatttagggcgagttgatccaacacaacctattgacttaactcagcttgtcaatggaagaggtgtgaccatccaaccacataaaagggattatggggtccagctggttgaagagggtgctgatacttttcaagcaaaagtgaatattgaggtgcagttggcttcagaattagccattgctgcgattgaaagaaatggtggtgttgttactacagccttctatgacccaagaagtct

SEQ ID NO: 8342 - DNA, 537 bp, Cricetulus griseus
gctgttgaagaagcaactcccaagtgtgaagaaactagctcagaggaagacgctggagcgggaggttccagccccaagacctcgaaggtaacacagaaatcaccttcaagaagaatgtctgacgtgccagaaggcgtcataagggtccacgctccacttctgtccaaagtgtcaatggccattcagctcaacagtcagaccaaagccaaagacatcctggcgaaatttcagtatgagaacagtcatagttcatctgaatgcattaagatgcagaaccaaaggttatatgaagtcggaggaaacataggacagcactgtttggatcccgatgcatatatattggatgtgtatcacgtaaatccccatgcagaatgggtgattaagcactagacaagtctctaagatatgcccattcatgtgtgtgtctgacttgcctagaagaaagaactgtaaatcgggggatataacactccccttgacaggcattttcaactattttccataaatatgtcacttaataaagagtaatgtgacata

SEQ ID NO: 8343 - DNA, 537 bp, Cricetulus griseus
aggagaaggaagtgctggagtttcctcgagtcaggaatgcctctctttgggagtatattcagtccaaagaagacccctcctcggaagtctgcctctctctccaatctgcattctttagatcggtcaacgcgggaattggagctgggccttgactatggaactcccaccatgaacctagcagggcaaaacttgaagtttgaaaatggccagtgggtagcagacacagtgattagtgggggcgtggatcggagggagactcagcgcctgcgcaaacggaaccagcagttggaagaagagaataatcttttgcggctcaaagtggacatcctgctggacatgctttcagagaccactgctgagtcccacttaaaggataaagaactggatgagctgaagattatcaaccgcaggaggaagtgacgcgcctgtgaacactccctagggtatcagagagagttccactgacccactgacagggaggaggagatggcagagccctttgatttttagtcagattagcaagctcccaaggtccac

SEQ ID NO: 8344 - DNA, 537 bp, Cricetulus griseus
tctgggaagtcatggcgtcgctcaacagtgaaactgtggtctgcgtgatctgtctggagaagcccaaataccgctgcccggcctgccgcgtgccctactgctctgtcacttgtttccagaagcacaaagagcagtgcaacccggaaacccgtcctgctgagaacagaagaacagtggctccggtgaatatagggtctgaggaaagcaaagatgatgactcctctatagctgacttcctcaacagtgacgaggaagaagacagagtgtctctgcagaatttaaagagtttaggtgaatctgcaactttaagaagtttactgctcaacccacacctgagacagctgatggttaaccttgatcagggtgacaacaaagcaaagctgatgaaagcctgcatgcaggagcctttgtttgtggagtttgcagactgttgtttaagaatcgtggaaccatcccagaaaagggattcttgaaactggatgtgctctttgctcaagctgcccactactcctcctaggaggaggttgtttgcaaggc

SEQ ID NO: 8345 - DNA, 536 bp, Cricetulus griseus
tcacagttaagtgttggtacccaagaggctgaaagcatcaccgagaagaccaagttgggaaggaatgttcgggagactgagactagctgcccaaaaggattatatcttgggggtaaattttgctgtcaaccatgccagcctggtgaacgaaaacatttggactgtacagtcagtggtggtaaaccaagctgccttccctgcacggaagggaaggaatacatggacaaggacactattctgataaatgcagaagatgtgcactgtgtgatgaagggcacggtttagaagtggaaacaaactgcaccttgacccagaataccaaagtgcaggtgcaaacacaacttctattgcaacgcttctgtctgcgaacactgtgatccttgcactgtgtgtgaacatggaacccttgaggagtgcacaccaaacagacaataccaaatgcaagcaagaaagttccagacaccatttcctatggttgttcatcatccctgtttggtaatagtatttgtgcttatatataaaagtattggaaaaga

SEQ ID NO: 8346 - DNA, 536 bp, Cricetulus griseus
tggagattccctgtgtgagcaagaagctggtgtgtggagaccaaggtctaggagccatggctgaggtggagaccatttgtgggataaaagtgaaagaagtgctcttccagcgtggtggcatctagcagcgttgactgggatttttgtcgtcatatccctgcacccagtgactccaacctgagctgatgaagaaggacatcagcccagtatgaagagcctgtgttagctgaggagggctaggcaaacatgctcctactggaaggacaattgaatgactgaggacaattcccctcctgcctgggaattgctcttagagataccatggcttttactgggcatggtggctcatgtctgtaacactagcattcagaaggcaaaggaggattgccacaactttgcagttggcttgggctacatagtgagccaagcctgtgaatgtgacagcctatttcaaaaccaaagcaacaagaagaaacaccatagttcaagatccctggcatagcaaataatgtatgtcaaaaaaaaaaaaaaaaaaa

SEQ ID NO: 8347 - DNA, 536 bp, Cricetulus griseus
gcgaaaggggcggagcccccgccacgccctgctccgccctcactcccacctgccacgcaggcgcagatgaatggcactctagaccatcccccgcccgcagcgcgcaaacccaccgtgcccgcaccctgcccgcgcctcccattgcgcaagacctaccgcgagaacttgggcgacccaggggccgccgccgagggtgcacagggccggccgcggggtgcgagcagccccgaccccactgcctgccaaggtggacgaggccaccagtgggctgatccgcgagctggctgcggtggaggacgaactgtaccagcgtgttctcaagggcggcccaccacccccagaaacccccagcctccaccaccagccagggccccaccgaacccagctgggaagcacccgcgctccccccggccaaacgacgcaagtccgagtccccctgatgtggaccaggccagcttctctagtgacagcccgcaggacgatacgctcacagagcatttgcagagtgccattgatagcatccttaacctgcagca

SEQ ID NO: 8348 - DNA, 536 bp, Cricetulus griseus
  modified_base (475)..(475): a, c, t, g, unknown or other
cagaagagcagtgagagattctgatagtggtctagagaaaatggctgttggtcatcatatacatgaccgagctcatgtcattaaaaagtccaagaacaacaggacaggagatgaagaggtcaatcaagagttcatcaatatgaatgaatgtgatgctcattcttttgataatgagtggaaaagtgaagttttgaagttcaagcctagtggacgaaacactagaattcgaagtgtgggtcatgataattcagggccacgagaactcaaaaggagagagaaaattcatcgaagttcagcccttgagaatggaagacgacaaaaacgtttttgtggacaaactcaatgtcaaaggatcacctgggaaaatcaaccaaaaaataaatagccatgcatttcatttgtttagttggttgttttaacaaaagagtcatggtgctaggtaataacataatacaaaagaccaaatctgttgttnaattgatactgtacttagctaactttcttctagaatcttaatgttctcgttacgttttagc

SEQ ID NO: 8349 - DNA, 535 bp, Cricetulus griseus
aaagcagaacccagtccaactactagacatggcagctcgagtccctgcctttgccttggagacggtgtccagctgggagctggaagcctggtatgaggatctgcaggaggtgctgtcctcagatgaaaatgggggtccctatatctcatcccttggaaatgaagagggggagtcaaaaaccttcactaccctagactccgcatccctagcttggctgactgaggagccagggccagcagaggtcacaagcagctcccagagcccccaatctccagattccagtcagagctctatggctcaggaggaagaggaagatcaaggaagaactaggaaacggaaacagagtggtcagtgcccagcccgggctgggaagcaacgcatgaaggagaaagaacaggagaacgagaggaaagtagcacagctagctgaagagaacgaacggctcaagcaggaaatcgagcgcctgaccagggaggtagaggccactcgccgggctctgattgaccgcatggtaaatctgcaacaagtatgaaca

SEQ ID NO: 8350 - DNA, 535 bp, Cricetulus griseus
gagttatgtccccaccgtgtttgagaactacaccgcaagcttccgagatcgacaagcgccgcattgagctcaacatgtgggatacttcaggttcttcttactacgacaacgtccggcctctggcctacccggactctgatgctgtgctcatctgctttgacattagccggccagagaccctggatagtgtcctcaagaagtggcaaggagagactcaggagttttgccccaatgccaaggtggtgctggttggctgcaaactggacatgaggaccgacctggccacgctgagggagctatccaagcagagacttatccctgttacgcatgagcagggcactgtgctggccaagcaggtgggggctgtgtcctacgttgagtgttcctcccgatcttctgagcgcagtgtcagggatgtcttccacgtggccacagtggcttctcttggccgtggccataggcagctgcgccgtactgactctcgccggggactacagagactccactcagctgtccggaaggccagaccggggaa

SEQ ID NO: 8351 - DNA, 535 bp, Cricetulus griseus
cctacgagtgtaaagagtagtgggaaaacgttacattgagagtgcatacctcatcaggcatcagaggattcacactggtgagaagccctattgttgtaaccagtgtcgtaaactcttcaggaacatcgctggacttatccggcaccagaggactcatactggcgaaagaccttacgagtgtaatcagtgtggtaaggctttcagggatagctcctgtctgaccaagcaccagagaattcacaccaaggagactccgtaccagtgtctgaaatgtggaaagtccttcaggcagaacactcacctggttgtacaccagcgacttcataacagggagggtcccagccagtgtccccagtgtgggaaaatgtttagaaggagctggtgtcttgtccgacatcagagaacacaccttgaagagcagcccgtggaaacgtaacgaacttgggtcatactcttcttgagtgaacgtatacacacacacacacacacacacacacacacacacacaccagtctgttgagtacatgatgttcgg

SEQ ID NO: 8352 - DNA, 535 bp, Cricetulus griseus
gtggtggcagagtcaacgtcgaactatgcttcgtggtgttctgggaaaggcctttcgacttgctggctataccattcagtatgggtgtatagcacattgtgcttttgaatacgttggtggtattgtaatgtgttctggaccatcaatggaacccacaattcaaaattcagatattgtctttgcagaaaatcttagccgacatttttatggtatccaaagaggtgacattgtaattgcaaaaagcccatgtgatccaaaatcaaatatttgtaaaagagtaattggtttggaaggagacaaaatcctcaacactggtacatcagatatctttaaaaaccgtagttatgtgccaacaggtcatgtttggttagaaggtgataacttacagaattctacagactccaggtactacgggcctataccatatggactaatacgaggacggatcttcttcaagatttggcctttcagtgattttggatttcttcgtgacagcccaaacggcgacagattttctgatgattagcaagcattt

SEQ ID NO: 8353 - DNA, 534 bp, Cricetulus griseus
ccagctcttttcagcagcgcctgtcttacaccacgctcagcgacttggccctggcgctgctcgacggcacggtgttcgagatcgtgcaggggcttcttgagatccagcacctcaccgagaagagcctgtacaaccagcgactgcggctgcagaacgaacaccgagtgctcaggcaggctctcaggcagaagcacctggaagcccagcagacttgccggccccacaacttgccagtgctccaggcaactcagcagcacgagctggaggccatggaacatcgaatccgagaggagcagcaggcaatggaccgcaagattgttctggaactggaccggaaggttgctgaccagcagagcacactggagaaggcaggggtagctggtttctacgtgaccacgaatcctcaggagctgacactgcagatgaacctattggaactcatcaggaaactgcagcagaggggctggcaagtgggaaaggcagccttgtgactaagtggggggtccctgctgtcctccattgcctaggatggct

SEQ ID NO: 8354 - DNA, 534 bp, Cricetulus griseus
agacactgtgcagaaaacgaaatcctcaggcatctgctggaaaatctttttaagatattctgccttggtggtgtgaagggagacctcctgattgacattggctctggtcccaccatctatcagcttctgtctgcctgtgagtccttcaaggagatcattgtcagtgactacacagaccagaacctttgggagctgcagaagtggctgaagaaggagccgggggcctttgactggtctccagtagtcacctatgtgtgtgatcttgaagggaacagaaccaagggacctgagaaggaggagaagttgaggcgggcaatcaaacaggtgctgaagtgtgatgtgacgcagagccaacctctgggtgcggtctctctgcctcctgctgactgcctgctcagcaccctgtgcctggacgctgcctgccctgaccttccccacctactgcactgccctcaggaacctgggcagcctgctcaagccgagggggccttcctggtgagtgggtggatgcccttaagagtagctactacatga

SEQ ID NO: 8355 - DNA, 534 bp, Cricetulus griseus
cagaaggcagctggttgtgtcgctcctgtgtcctgggcatttatccacagtgtattttatgtcccaagaaaggtggagccatgaagaccaccaggacaggaactagatgggctcatgtcagctgtgccttatggattccagaggtcagcattgcttgtcctgagagaatgggaaccctattacaaaaatctcccatattccacctagccggtgggccttagtttgcagcctgtgcaagctgaagacaggggcttgtattcagtgctctgtacagaaggacattctttgacaaagaagccaagagttccagtcctgctcagagagctccatctgcagagttctatcgtgggcaatcattagggaagcctctggcccttcaggctgccctccatggacaggcttctattggtaatgggaagagtcagcccaggcttgccagttccaatggactggagggcaactggtctgggaatgtgtcccagaaagatgattcagatgagatgttctgtgaccaggaatccatgctcagctccc

SEQ ID NO: 8356 - DNA, 534 bp, Cricetulus griseus
aagcatggtgtgcaggtctgtggccatgtcttattctcctgccttttcttgagagagtttgatggttcagaagtgaatgaaggactatcccaagaagaaacagcacgatgcctcccacaggccactccaagaccccaaaataaccattctggaccctgccaatcccagataccagctgtgctaccagctgccgcagtagaagtaatccaacacttgtctacctgggctgaaagcttggtgagagacccaccccaaccctagccattcttggcctccacctacataggtggatgcctgcccaactcacgaccctcccagcagtgcctcctgaaaccaagaagggactttccatgtggtgccttatcaccttcctcgccctgagacccattcttccttataaccagagcctgcactgcttctgaagtcctatttataaattacataaatattgttcatctgaccccaaatgaagtagctggtcagatagccctttctaatcctatgtgttgagcttatgtaaaaaaaaaaaaaaaa

SEQ ID NO: 8357 - DNA, 533 bp, Cricetulus griseus
ggatccggacgcgagcgaattggaggtcggcagggagcgattgctacagccatgccggactcttgggacaaggatgtgtaccctgagcccccgcgccgcacgccggctccctcgccacaaacctcgctccccaaccccatcacctactttatgaaggccttcgatctcgtcgtggaccggcccgtgaccctcgtgagagagtttattgagcaacagcatgccaagaaccgaacttattactatcaccggcagtaccgacgtgtgccagacatcacagaatgcaaagaggatgatatcctgtgtatctttgaagctgagatgcaatggagaagggactacaaagttgaccaagaaattgtacaacatcatccaggagaggcttaaagcctgtcagcagagagaaggagagaacgcaaagcagaattgtgccaaggaaatggagcagttcacccaggtggctaaagcctaccatgaccgctattatgacttgggagcctattattctgccagaaagtgcctggcaaagcagaagc

SEQ ID NO: 8358 - DNA, 532 bp, Cricetulus griseus
ctggtctcagtgcaacgatacacctgtgaagtttgctcggtttccagtcactggtttgatagaaggtcgttcctacatattccgcgttcgagctgtgaataaaactggaataggcctgccatctcgagtttctgagcccgtggctgctctggatccagctgagaaagctagacttaaaagtcgtccttcagcaccctggactggacagatcattgtcactgaagaggaacctacagagggtgtcattcctggcccccccacagacctctctgtcactgaggccacccggagctacgtagtgctgagctggaaaccccctggccagcgaggtcacgagggcattatgtactttgtagaaaagtgtgacgtggggacagaaaactggcaacgtgtcaacacagaactcccagtaaagtctcctcgcttttgctctgtttcgacttggtggagggaatcttaccgcttccgtgtccgatgctcaaattcagcaggagtcggtgaaccatcagaggcatcagaagtgactgtcgta

SEQ ID NO: 8359 - DNA, 532 bp, Cricetulus griseus
tcctcgctcatctccatcaatgccgacaatgggcagctgttcgcgctcagggcgctggactatgagaccctgcagaatttcgagttccgcgtgggcgccacagaccaaggttcgcctgcgctcagcagccaggcgctggtgcgcgtgctcgtgctggacgccaatgacaatgctcccttcgtgctctacccactgcagaacgcgtctgctccctgcacagagctgctgcccagggcggcagagccaggctacctggtcaccaaggtggtggcagtggaccgcgactctggccagaatgcctggctgtctttccagctgctcaaggccacggagccagggctgttcaccgtgtgggctcacaatggcgaggtgcgcacctccaggctgctgagtgagcgcgatgctcccaagcacaggctgctgctggtggtcaaggacaatggcgactcctcctaggtctgccactcgtcactcttcaagtgcgtggtggtggatggcttaaaacaaaacaaaaacaaaaacaaaaaaaaaa

SEQ ID NO: 8360 - DNA, 532 bp, Cricetulus griseus
ggatttcgtacgaccctgctcgcttcccgaggtacctgcctgaggcctactgcctgtgccgcggctgcctgaccgggctcttcggtgaggaggacttccgcttccgcagtgcccctgtctactcccctgcggtagtgctgcgccgcacggcggcctgcgccggggccgctcagtctacgccgaacattatgtcaccattccggtgggctgcacctgcgtgcccgagcccgacaaggcctcggacagcgccaactccagcatggacaagcctgcccactgtttcttaaaggacagctacataagctttaaatatatttgtatttttcagagtagacactacatacctaaggctattttgaatagaggcagaaactattttcatattagtaatttagctcaagcatgttatttttaaaacttccttgacatacaagcgaattataaacatccgctttcctctaataggattctttccaccgtaattgtggtgtgcagatgaacttttaggtgatattgtgccctgtctctgagt

SEQ ID NO: 8361 - DNA, 531 bp, Cricetulus griseus
gatttggtggccggacatggctacagaaagagacttgttcgtgtcagaaactctggacatcttcaagggatcataatagttgaaaaacacagataagtgaacagtactttccggaagtccagaagtttactgtgctcgaccttgggatggtgttgctcccggtggccagccagttggaagcatcctgcctcattaaccagctggttcaagagcaaaaccagggagcccagcaggaaccctttcctcaggaagaagcggtgtgcgctctccgagccgtcccttgttcagactgtgcagcagatccccggggttggcaaagtcaaggctccacttctgctgcagaagtttccaacgatccagcaactgagcaacgcttccgtccaagaactggaggaggtcgtgggacccgcggtggcacagcaaatccacagcttcttcgccggacctcactgaccccagccctgctgcagccagcctctcctcctttagactgccaaccacagcgtctgctcttcatacttaaaaaggaag

SEQ ID NO: 8362 - DNA, 531 bp, Cricetulus griseus
gctgccatggcgcggaatgtgttgtaccccctctaccagctgggtggtccccagctccgtgtgttccgaaccaacttcttcatccagctggtgcggcctggtactgcccagcctgaagatactgtgcaattccgaatccctatggagatgaccagggtggaccttcggaattaccttgagcaaatttacaatgttcctgtggctgctgtgcgcacgcgggtgcagcatggctccaacaggaggagggaccacaagagtgtaaggatcaagaagccagactacaaagtagcctacgtgcagctggcccatgggcagaccttcaccttcccagatctttttccagagaaagaccccagtcctgcagaccctctggaagaggagcctcagctgcagaggcagagcagccgaccctcggtgccctggtatcccttcttggtttggcctatgacctgtgtgctaacagggactgggccacagaccctagtgagcacagtggttctgacaagcccaaaataaaaatcctttgtagga

SEQ ID NO: 8363 - DNA, 531 bp, Cricetulus griseus
  modified_base (14)..(14): a, c, t, g, unknown or other
  modified_base (519)..(519): a, c, t, g, unknown or other
ctcaccttccgccncttcgagttggccgattcccgagaccggctcggagctacgcgacgcctcgtccggcaacctgctccgcgccttcgacggtgcccacccgccaccgcctgggcctctgcgtctgcgcactgctgcactattgctcaccttccgcagcgatgcgcgaggccacgctcaaggcttcgcgctcacctaccgcgggctacaggacacagtggaggacagcgcatctgctaaggattcggccgagactactgcaggagaccccgatggtgccaacgtgagctgcagccctaagccgggagctgcgcaggcttccataggggcccgagtcttctccactgtgatggccatctccgtgctgctgctgttgatcctgtcgctgctgcgtttgctgcgtcgacggagctgcctgctggctccaggaaaagggtctctggcacagagaaaccctgtctcaagaaaaacaaaacaaaacaaaaacaaaaacaaaacaaacctattttgttaacaaanaaaaaaaaaaaa

SEQ ID NO: 8364 - DNA, 531 bp, Cricetulus griseus
  modified_base (281)..(281): a, c, t, g, unknown or other
ccaccccagagcagcttccctttgtctgacatctcttgtatgcagccactcctcaactgtagtaaaacatttgatgtaattgtgattgatccaccatggcagaacaaatcggttaaaagaagtaacaggtacagttgtttatcaccacagcagataaagcaaatgcctgtccctaagctggcggctgctgactgtcttattgttacttgggtgaccaacagacagaaccagatcagaagttgatcgtcagcgtgccctgcattcttcactcacacaagccncctcttgccgaagttttactgaaagactacatcaagccaggtgggcagtgtttagaattgtttgctcgaaatttacagccaggttggatgagttggggcaacgaggtcctcaagtttcagcatgtggattatttccttgctctgcagtctggacgctgactgtaaaagttgggctgcatttccccagttccatcagacccatttctccttgtatcactcagtgtggttagatgtgtgaacttttacacca

SEQ ID NO: 8365 - DNA, 531 bp, Cricetulus griseus
tccaagatggtggcggccgtgtgtgcgtctcggatgtctgggctgctgagccgggccctcccgcgggtgggacggcccatgtcgagtggcgcccacggcgaggagggttcagctcgcatgtggaaggctctcacctacttcgtggcgctgcctggggtgggagtgagcatgctcaacgtcttcctgaagtcgcgacacgcggagcacgagagacccgagttcgtcgcctacccgcacctccgcatcaggaccaagcccttcccctggggagatggtaaccataccctctttcacaaccctcatgtgaacccacttccgactggctatgaagatgagtaaagagaacctggactatcccccaggcaacaagggaccacagcactggtttggaccattactctgtgtgtggaccacgaaagcacatggggcgctaagctcatctgtccttgtatcaaattggtgaccgttacaccaatcttccaccatccctttgcttgtaagaggagatggcttgaataaataacttaaact

SEQ ID NO: 8366 - DNA, 531 bp, Cricetulus griseus
tcctcctacccaacatggcgcagtcgattaacatcacggagctgaatttgccacaactggaaatgctcaagaaccagctggaccaggaagtggagtttctgtccacgtctattgctcagctcaaggtggtgcagaccaagtacgtggaagccaaggactgtctgaacgtgctgaacaagagcaacgagggaaaagaattactggttccgctgacgagttctatgtatgtccctgggaagttacatgatgtggaacatgtgctcattgatgtgggcactgggtactatgtggagaagacagctgaggatgccaaggacttcttcaaaaggaagatagacttccttaccaagcagatggagaagatccagccagccgttcaggagaagcacgccatgaaacaagctgtcatggaaacgatgagccagaagatccagcagctcacagccctgggggcgactcaggcgactgccaaggcatgaggatatgttgcagaaagagcagagaggaacctgttcaagggcctaggacttt

SEQ ID NO: 8367 - DNA, 530 bp, Cricetulus griseus
gtcggcccggccgccgtcaggcctcgccgctgcccgggacggactccccggcggctcacagccgcggaggcgggacgacgggggaccgtgggccagcagtctggtagctcgatccccctggaagagagactgtaagcagactagaagaacgcgttcggttccgggacaccggtttgcagctggaaatggggaatggactgtcagaccagacttccatcctgtccagtctgccgtcctttcagtcccttcatgtcgtgattctgggtctggactgcgctgggaagacaacagttctatacaggctgcagttcaatgaatttgtaaatacggtgcctaccaaaggatttaacacggagaaaattaaggtaaccttgggcaattccaaaacagtcacttttcacttctgggatgtaggtggtcaagagaaattaaggccactgtggaagtcatatacccgatgcacagatggcattgtgtttgtggtggactctgtcgatgtcgagagaatggaagaagccaaaactgaactt

SEQ ID NO: 8368 - DNA, 530 bp, Cricetulus griseus
ttttcgccaagatggcgccgaaagcgaagaaggaagctcctgcccctcccaaagccgaagccaaagcgaaggccttgaaagccaagaaggcagtgctgaaaggcgtccacagccacaaaaagaagaagatccgcacgtcacccaccttccggcggcccaagaccctgcggctccggaggcagcccaaatacccgcgaaagagcgcgcccaggagaaacaagcttgaccactatgccattatcaaattccccctgaccactgagtcagccatgaagaagatagaagacaacaacacacttgtgttcattgtggacgtcaaggccaacaagcaccagatcaaacaggctgtgaagaagctctatgacattgatgtggccaaagtcaacaccctcataaggcctgacggagagaagaaggcatacgttcgcttggctcctgattatgatgctctggatgttgccaacaaaattgggatcatctaaactgaatccagctggctaattccaaatatactcttttttcaccataaa

SEQ ID NO: 8369 - DNA, 530 bp, Cricetulus griseus
gaggccgccgcgcgtctcctcgcgaagcatggcgacgaaggccgtgtgcgtgctgaagggcgacggcccggtgcagggcaccatccacttcgagcagaagggaagtggtgaaccagttgtggtctcaggacagataacaggactgactgaaggccagcatgggttccatgtgcatcagtttggggataatacacaaggctgtaccagtgcaggtcctcattttaatcctcactccaagaaacatggcggaccctcggatcaagagaggcatgttggagacctgggcaatgtgactgccgggaaggatggtgtggccaatgtgtccattgaagatcatgtgatctcactctcgggagagcattctatcatcggccgaacaatggtggtccatgagaagcaagatgacttgggcaaaggcggaaatgatgaaagtacaaagactggaaatgctggaagccgcttggcttgtggtgtgatcgggattgcccagtaaacattccctgtgtgactgagtctcaaactcatctgct

SEQ ID NO: 8370 - DNA, 530 bp, Cricetulus griseus
gcttcccctgtcccagccagcctttggctctgagcagaatcgcagagaccttcagaaagcactgttgtcaggattcttcctcaaggtggcccaagacatagatggcactggaaattacctgcttctcactcataagcatgtagcccagctgtcttcatgctgcagttaccgaaatcgcagggctccagctcagccacctgcctgggtactgtaccacagcttctccatatccaaagacaactgcctgtgcatcgtctctgagattcaacctcagatgctggtggagctagcccctccctacttcctgagtaacttgcccccccagtcgagagcagagacttcctgaaccagctaagagaaggaccagcagtttttttttttttttttttttttggttttgagacagggtttctctgtgtagctttggagcatatcctggcactcgctctatagaccaggttagcctcaaactcacagagatccacctgcctctgcctcccaagtgctgggattaaaggcatgtgccacca

SEQ ID NO: 8371 - DNA, 530 bp, Cricetulus griseus
agtttgtgccaagctggaatgctgtccaaatttatttagttcctgtgttgatttctgaaaactagcccagagaactgttctattcacaccaaaccaaatacacctattattatggaaaaagaaagaagatcattaaaccccccattggggaaagcagcattgaaaccccgcatccaaaaccagccaggagaaggaaacgacggaaatctgtctttgtgcagaagagacggattttttttaattttgaataatagaaaaggtaaacatcatgcctgtcattcagaatgcaagctaacataatctgtgtaagcagtcactaacggcgggagccctttatctttcactctccactttgaaaagtttgtattgctatttggttcatatcttgtctttgttttagtgcataaaagagaaaagaatcagtgtctttacttttgaaatttaaaggacaaagggcatgctctctcagtttgttgtaagattgtattctgtatatatgtttccatgtacataaatgaaatatatatcag

SEQ ID NO: 8372 - DNA, 529 bp, Cricetulus griseus
agtgcttccaggtgggagtgaggtgaccccggctgccaaaaggagagtgaggaggagcagctatgggggcgcacctggcccggcgctatttgggggacgcctcggtggagcctgaccccctgcagatgcccagtttcccgccggactacggcttcccggagcgcaaggagcgcgtaatggtggctacacaacaggagatgaacaatgcccagctgacactgcagcaacgtgactactgcgcccactacctcatcaggctgctcaagtgcaagcgcgacagcttccccaacttcctggcttgcaagcatgagcggcatgactgggactactgcgagcacatggactacgtgaagcgaatgaaggagtttgaacgtgaacggaggctgctccagaggaagaaacggagggaagagaaggcggaacgggtatcccggggccagggagaaggagaggtgggccctgaggtggccctctagggtcacccaccacctgtggacctatcagtggaataaaaactctgagtcaactg

SEQ ID NO: 8373 - DNA, 529 bp, Cricetulus griseus
tacagtgttgataactggtcctttcacattctatttgtcaatacctacataggttacaaaaaaagggttgagaatgctgccagtttacacttgtctctccataaccaaagaatgttctgtcttgtgactgaatttaatgtcctcccatggaaatggaaaaaaaacctgtgctataaaatttataacaaatgatagcacttgactccatacaatttaaagctagtctagtggatgctttgtcttaaacataagaatgtgttgctcagcattggccacattctggggttctcctgttcatggaaatcatggaatcagatttggagttaacttagaaaatgctcctgcgaatatctgagaagccattgaacaattcttaaatcccacttgagattctaggtgatccagtgcttatgtagccgagggaatgttgtcaaagacccaggttctccccaccccttccggggttcttatggttgccttttgttctcatagttgtttcttaaatgagttcaatatggtttgttgtgcc

SEQ ID NO: 8374 - DNA, 528 bp, Cricetulus griseus
gcaccctgtgcagatgtgtgctatctgggcatttccttcttctgtgagccttgcagcccctggatggcctgctgtgctgtgggcagggcatgtgcatggtggtatacatgggaaggggcggcttttcaagttttgtcagataactatttttcttaagtatgtttcctacttaaatgactgacaagtgtgcatttcctatgtttgtttatactttgattacaaaaactattttttttaccttgctacattgttttcatacttttgttgttggattatgtttaggaactttttcataggttcagatgtcttaagtatgcagccgtttacgtgactgtgccattccaaagtgcatcaaaactgtcattcccttctagtgtcttctcaggtttttttttttgttttgttttgtctttagaaaacttgtgaatgaaaatgaacccaagtgtttcatgagaagatgagccatttctatcatgcattccgatgtcatggcagaaatttgaagattaaaaaataagaataacaaaa

SEQ ID NO: 8375 - DNA, 528 bp, Cricetulus griseus
ctatactggtatattaatgaagaggatgaaaaagcagaaggattcatcagtctgcctgaatttaaaattgatagagccagtgaatgccgcaagaaatatgcattcaaagcctgccatcctaaaatcaaaagcttttattttgctgctgaacatcttgatgacatgaacaggtggcttaatagaattaacatgctgactgcagggtatgcagagagagagaggattaagacaagaacaaagattactggagtgagagtgaacaaagaagaagcagatactccatacaacaaccgaaacaagacacgccctcctcccccctatgatacatacccacggcctccctctatgagttgcgccagtccttatgtggaagcaaagcacagccggctgtcctccacagagacctctcagtctcagtcttcacatgaggagtttcgccaggaagttactgggggcagtgctgtgtcccccattcgcaagaccgccagtcagcgccgctcctacacacacacacacacacacacacac

SEQ ID NO: 8376 - DNA, 528 bp, Cricetulus griseus
agctcccgctttccgcgcggcggtcgctgagtttcatctttccgtggcctctgcggcgcccgagcccgcaatgtcgggccccaacggggacctaggcatgccggcggatgcgggcgcggaaggcgagaatgacagcttcggggaagcagagtatgctgccatcaactccatgttggatcagatcaattcttgtctggaccacctggaggagaagaacgaccacctccatgcccgcctccaggaattgctggagtccaaccgacagacacgactggaattccagcaacagcttggggaggcccccagtgatgccagcccctaggtcgccaggacgccccccaaaccgggcccccacccttgcctctctaggccatgttcctggcctgggtagatgctacctggcttagactccatctcaggtactggccttcagatcccccagtgggtctaccagcctggaccacggccccactgcccatcatcccttctggagccaggcgtcggtcctacaactcattcacttgtctg

SEQ ID NO: 8377 - DNA, 527 bp, Cricetulus griseus
  modified_base (519)..(519): a, c, t, g, unknown or other
gatgtgtcaccagtggcggctggcctcatcggggcctctgtgctggtggtgtgtgtttctgtgactgtctttgtgtggacatgctgccaccagcaggcagagaagaagcacaagaccccgccatacaagtttattcacatgctgaaaggcattagcatctacccagagaccctcagcaacaagaagaaaatcatcaaagtccggagagacaaagatggtctccggagggagagtgcacgagggaacctgttagtaaatgcggcagagtctggcctgctgagccaagaaaaggaccccagaggggccgggcggtggtggcgcacacctttaatcccagcactcgggaggcagaggcaggaggatctctgtgagttcgaggccagcctggtctccagagcgagtgccaggacaggctccaaagctacacagagaaaccctgtctcaaaaaaccaaaaaaaaaaaaaaaaaaaaaaaaaaaaaaaaaaaagaagaaactgatctgagtaaataggaaaaaanaaaaaaaa

SEQ ID NO: 8378 - DNA, 526 bp, Cricetulus griseus
  modified_base (515)..(515): a, c, t, g, unknown or other
gagcagaaggcggccccggccggggagaacccgctggtgttcctgtgcgcgcgctgtcgccggccgctgggcgactctctgacctgggtgaccagccaggaggacaacaactgcatcctcttgcgctgtgtctcctcgaatgtgtctgtggataaagaacagaagctgtccaagtgcaaagatgaagacgggtgcattcttgagactctgtcctgtacaggctgctccctcagccttggctatgtgtacaaatgcactcccaagaacctagactacaagagggacttgttctgcctcagtgtcgaagccattgaaagttacactttagggtcctctgaaaagcaaatcgtgccggaagacaaggagcttttcaatcttgaaagcagagttgagatagagaagtctataaagcagatagaagatgtcctgaaagccttggaaatgaaggtgtgggaggtggagtcaaagctgtcctatgctggccgctgcagctgaagctgtgctcccgtatgtgnatgcatgtata

SEQ ID NO: 8379 - DNA, 526 bp, Cricetulus griseus
gcgcgaaggcgcgaatatgaaccctttaactaaggtgaagctgatcaacgaactgaatgagcgagaggctcaactcggggtggcggaaaaggtgtcttggcactcggaatacaaggacagcgcctggatctttcttggagggcttccttatgaactgacagaaggagacatcatctgtgtgttctcacaatatggggagattgtcaacattaatcttgtgagagacaagaagacgggcaagtccaagggattctgtttcctgtgctacgaagatcagaggagcacagttctggctgttgacaatttcaatggaattaagatcaaaggaagaactatccgtgtggaccatgtgtcaaactaccgggctcctcaggaatcagaagacatggatgaagtgaccagagagctccaggagaagggctgtggtgctaaaacacctccatcaagttctactgaggtgtctgaagatgaagatgtcaagcccaccataaagcacaaaaaagaacaaaaaagaagaaaaagaaaa

SEQ ID NO: 8380 - DNA, 525 bp, Cricetulus griseus
tggacatggcggtcgccggcagctggcagcctccccggccctgcgaggtctaccgctctgagtgggagctctgccgcagcgccaggcacatcctacaccactactacgtccacggcgagcggccggactgcaggcagtggctgcgcgacctggccagctgccgcgaatgggaggagagccgcagccccgaggcccagcgatccctctgtgagagtgagcaggcacgggtccaggctgcacagaagcacaccctggtatggaccttgaggcagaggccccctgcagactggaacctccctctaccacaggagaaggacaagtgatgagtgacaagcaaccgcaaccctgcccttgacctggacttggactagcttccacctgacctggaacacagaggaaggcatttcctgctctaactgcctattgcccacaggctaacctggtctatagagcgagtgccaggatatgtctccaaagctacacagagaaacctgtctcaaaaccaaaaaagaaaaaaaaaaaaaa

SEQ ID NO: 8381 - DNA, 524 bp, Cricetulus griseus
cacaggcaagactttggagaaggcagagcagggtgatggctaccttgccaccaacaaccagctcctcccagcaacccctaaacccagaggatgaagatgacatcctggatgagtatgaccagtacagcctggcccatccttatatcgtcgggggaggccggaaaggtcgtaccaagagagaagctgccgccaataccaaccgccctagccctggtgggcatgagaggaagctgctgaccaagttccagaactctgaaaggaaaaaggcctggcgctgaggcagagctggagatgaggccagaccacagacatcacacccagcaatggaaacaggacaaccacacccagcaatggatacaggacaaccacacccagcaatggattaggaccttggagagattaggagatacaggcaaagacagagacctgtttgactctttcctacctaagtgaggttctagagaagggacaccaaaaaagcccttctagatccagcaaaagggcacgatcggagcaacaatcag

SEQ ID NO: 8382 - DNA, 524 bp, Cricetulus griseus
ctctttctcttcaacgaggcggccgagcggcagacgctaacatgcagatctttgtgaagaccctgacgggcaagaccatcactcttgaggtcgagcccagtgacaccatcgagaatgtcaaggccaagatccaagataaggaaggcattccacctgaccaacagagactgatatttgccggcaagcagctggaggatggccgcaccctgtcagactacaacatccagaaagagtccaccttgcacctggtgcttcgccttcgtggtggcatcatcgagccatcccttcgtcagcttgcccagaagtacaactgtgacaagatgatctgccgcaagtgctacgcacgcctgcacccccgtgcggtcaactgtcgcaagaagaagtgtggccacaccaacaacctgcgccccaagaagaaggtcaaataaagctttggccataccaggcccatgaccctgggaccaaataaagtccccttccatcgactggagcagcaaaaaaaaaaaaaaaaaaaaaaaaaaaaa

SEQ ID NO: 8383 - DNA, 524 bp, Cricetulus griseus
gccgccgagtgtgccgccgccatgtctctggtgatccccgagaagttccagcacatcctgcgcgtcctcaacaccaacatcgatgggcggcgcaagatcgccttcgccatcactgccatcaagggtgtgggccggagatatgcccacgtggtgttgagaaaagcggacattgacctcaccaagagggctggagagctcacggaggacgaggtggagcgcgtcatcaccatcatgcagaacccacgacagtacaagatcccagactggttcttgaacagacagaaggacgtgaaggacggaaagtacagccaggttctggccaatggtctggacaacaagctgcgagaggacctggagcgactgaagaagatcagagcccacagggggctgcgccacttttggggtcttcgtgtccgaggtcagcacaccaagaccactggccgccggggccgcactgtgggtgtatccaagaagaaatgagtcgctgggccttcactgttaataaatagtttatatgcctgtga

SEQ ID NO: 8384 - DNA, 524 bp, Cricetulus griseus
gctctctctgggctgggatgcccgcgccatcctggtttccgtgctgtggcccggctggcgggcgggatggaggagccgcaggccgtcgcgggcgcggacgtgtcgcttcacaacttcagcgcgaggctgttggagcagctcgtccacttccacgtcatgcggctgacagactcgcttttcctgtgggtgggggcaacgccgcatctacgcaacctcgcagtggccatgtgcagccgctacgatcccatccctgtgtgcacctccctttttggagacacttctgacacaacctccactggccttgcccagcgtttagccaggaagaccagtaaacaggtgtttgtcagctacaacctctccaacacagacagtaacttcacgttactagtagaaaacaggatcaaggaagaaatggagacgtttccagagaagttctgagtggcagaaggaagagtgtgtaacttgtgtataaactacatttaaataaacaggttgtcctcaaaaaaaaaaaaaaaaaaaaaaaa

SEQ ID NO: 8385 - DNA, 524 bp, Cricetulus griseus
  modified_base (496)..(496): a, c, t, g, unknown or other
gcctggttccatcacttctacgacatggatctccagaaggtgctgtcccggatggttctgttcctgctttttctttatctgtcaccgctgggaagtcactcccaccccctgggcagtcccagccagtctccggagcaatccaagatgcagacactgctgaacctgctgagggaaaaggcagaggcggtggctcgggggcagctcctgaaggaccaaggcgtcacaaaagcacctccccaaagcacccttgggtctcaagacagcaccctccaggtcctacagaaacttcgaaactccaagaagatgcataattcgggctgctttgggcagaggatagaccggatcggctcagtcagtcgtctgggctgcaacgtgctgaagcggtattaggatgagctcccagttgcagacaccgcccggctcctgactccaccaagggctccttccccaaccctgggacccccttttgaagtgatcctatttatttatttatttntatttattttatttttgttttttatttt

SEQ ID NO: 8386 - DNA, 523 bp, Cricetulus griseus
  modified_base (517)..(517): a, c, t, g, unknown or other
ctgccttttgaggtgactgagggcgcaagtatggcggcgtcgaaggtgaagcaggacatgcccccgccagggggctacggccccatcgactacaagcggaacctgccccgccggggcctgtcgggctacagcatgtttgctgtgggcatcgggaccttgttttttggctactggagaatgatgaagtggaaccgtgagcgcaggcgcctgcagatcgaggatttggaggctcgaatcgccctcatgccgctcttccaggcagagaaggaccggagaaccctgcaaattcttcgggagaacctggaggaggaggccatcatcatgaaagatgtgcctgactggaaggtgggtgagtctgtcttccacaccacgcgctgggtgccgcctctcaactccgagttgtatgggctgcgcacccaggaggagttggacaacgccaattcggcttcacctggtatacgtagggccccagcgatatccacaataaagaacagtacaaaaataaaaaaaaaaaaanaaaaaa

SEQ ID NO: 8387 - DNA, 523 bp, Cricetulus griseus
cagtttcgctcaggtcctgctgccttctgctgctcctgggggctctgcccgcatgggcagcccatgatgaccccatcgagaaggtcatagaagggttcagccgcgggctgagcaatgcagagagagaggtgggcaaggccctcgaaggcatcaataatggaatcacccaagccggaagggaagtggagagggtttttgatggacttagcaacatggggagccaggccggcaagatcaacagtggcgtcggacacacagaaaaggaaacagagaagttaatccacgggtcaaccacgccgctggacagggcgctcatcaaggcgggtacacaggccagcacggaggggcaggggccgcaaccactacagtagtatctggggcctcggtcaacaagccatttatcaacttcccagctctgtggaggagtatcgccgccatcatgccctaaactgatgccctggggagatttctgggtgtccttaaagggactgctttgagctttgtgaataaacacgaacacact

SEQ ID NO: 8388 - DNA, 523 bp, Cricetulus griseus
cagtccctcggatccccacagaggagccaatctgacagaggcctctgtcggcagaaccagagatggcatcagtggatttcaagacctatgtggaccaggcctgcagagctgcagaggagtttgtcaatgtctactacactaccatggataaacggcggcggctgctatcccgcctgtacatgggcactgccactttagtatggaatggaaatgctgtttcaggacaagaatccttgaatgaattttttgagatgttgccttccagtgagttccagatcaatgtggtagactgccagcctgtccatgatgaagctacaccaagccagaccacagttcttgtggtgatctgtggatcagtgaagtttgagggcaacaaacagcgggacttcaaccagaacttcatcttgactgcccaggcttcacccactaacacagtgtggaagatagcaagtgactgcttccgattccaggactgggccagctagtggggtgagaaaggcttcttggctttggcccagctctg

SEQ ID NO: 8389 - DNA, 523 bp, Cricetulus griseus
gataactgcgcagacgcagccatcgcttccttttccaagaagccaccgaaatggcggaagttgagcagaagaagaagcggacgttccgcaagttcacctaccgcggcgtggacctggaccagctgctggacatgtcctacgagcagctgatgcagctgtacagcgcccggcagaggcgacggctaaaccgcggcctgcggcggaagcagcactcattactgaagcgcctgagaaaggccaagaaggaggcgccgcccatggagaagcccgaggtggtgaagacccacctgagggacatgatcatcctgccagagatggtgggcagcatggtcggtgtgtacaatgggaagacattcaaccaggtcgagataaaaccagagatgatcggccactacctgggcgagttctcaatcacctacaagccggtgaagcatggccggcctggcatcggtgccacccactcctcccggttcatccccctcaagtaactgtggccaataaagactggtgtatagtacctgga

SEQ ID NO: 8390 - DNA, 522 bp, Cricetulus griseus
  modified_base (146)..(146): a, c, t, g, unknown or other
cagaactgctggtggaggcagggtcgtctgcagctacaggcagatcgccatcaagagcatatccgagccagagattcattaattcagctttggcagcacatctcgaattggatggttttgagcgtggacctttagtgatagacagnttaaaaatttcatgaacttgtgagagagagacaggaaagagaagctaaaactgccagccagctcttgaacgaccttacagaaaaagaaactctgaagcagaatcagattgatgagataagggacaagaagagtggactgggaggaatgattgagctgaaaacagaactcctcactaagaagcagagcgagctgaggaatgtgaagaacgagctgcagcagctagagggctcatcagacaggatcctggagctggaccaggagctcacaaaagctgaacgtgaactaaacaaggctgagaaaaatagcataaataaagaaatgggaaccatgaggcaagatattgacacacagaagatacaggaaaggtggctacag

SEQ ID NO: 8391 - DNA, 522 bp, Cricetulus griseus
tcgccggcggaactgcttggccgcgttgccggcgctggccacggcgctggccctgctgctcgcctggctgctgctgcggcgtggggcggggccacccacggaggagcccgaggaagaggatggagcggccttctcctttaagtacagccctgggcagctgaggggaagccagtacaagaagatgatgaccaaagaagaactggaggaggagcagagagctcagaaagaacagctggctgccatcttccagctcatgaaagacaacaaggagacgtttggggagatgtctgactgcgacatgcaggaccagctccgcctgtacgacatgtaggcctgtcgcccagcaagacctgacccagagcaccctgacagccctgagggttttcgagacagggtttctctgtgaagtccaggctgtccaggaactagctctgtagaccaggctggtctcgaactcagagatccacctgcctctgcctccggagtgctggggattaaaggcatgcaccaccaaagcctggc

SEQ ID NO: 8392 - DNA, 522 bp, Cricetulus griseus
ggatccgcttccatccgatcctacagaaactcgtgtggttcctccccgcgacagccaaaatggtgaagctgatcgagagcaaggaagcttttcaggaggccctggcggctgcgggagacaaacttgtagttgtggacttctcagccacatggtgtggaccatgcaaaatgatcaagcccttctttcattccctctgtgaaaaatattccagtgtcgtgttccttgaagtagatgtggatgactgccaggatgttgctgcagagtgtgaagtcaaatgcatgccaaccttccagttttataaaaagggtcaaaaggtgggtgaattctcaggcgctaacaaggaaaagcttgaagcctctattactgagtttgcctaatcatggcctggaaaacataaccagccaccagctgtttaaagcctgtaactttttaatttcaaaaaatatgaagtgtggagaacctgtacccaactgccatctgattataaatgacaataaaatattaattctaaccttttaaaaa

SEQ ID NO: 8393 - DNA, 522 bp, Cricetulus griseus
ggcagttgctgaagacagagctgggatccttcttcacagagtacctgcagaaccagctgctcacaaagggcatggtgatccttcgtgacaagatacgcttctacgagggacagaagctgctagattcgctggcggagacctggggatttcttctttagtgacgtgctacccacgctgcaggcaatcttctaccctgtgcagggcaaggagccgtcagtgcgccagcttgccctgctgcacttccggaacaccatcaccctcagtgtgaaattggaggacgcgctggcccgctctcacgctcgcgtccccctgccatcgcacagatgctgctggtactgcagggggtacatgagtccagaggtgtgaccgaagactacctgcgcctggagacactgatccagaaggtggtgtcaccgtacctaggcacctatggcctctactccagcgaaggtgtatgtgtatagtgtgagtgtgtgtgtgtgtgtgtgtgtgtgtgtgtgtgtgtgtgtgtgtgtgagagag

SEQ ID NO: 8394 - DNA, 521 bp, Cricetulus griseus
ttgggtaaaagctgcaaggtgttagcagcctcatttcagctgcaactcctcagtcctgttcgaactctatccctctgtcccagcaaccatggccagcccgctgcgcaccccgctgctcctgctagccatcctggctgtggcctcggctgcgaacaccaagcaaggtccgcgcctcttgggaggcctgcaggaggccaaagtcgaggaagagggcgtgaagcaagctttggacttcgccatcagcgagtacaacaagggcagcaatgatgcgtaccacagccgcgccctagaggtagtgagagcccgtaagcagatggtggctggaataaactactatttggatgtgatggtaggccgaaccacatgtaccaagtcccagccaaacctgacagattgtcctttccatgaccagccccatctgatgaggaagacactctgctccttccagatctacactgtgccctggcaaggcacacagaccctgacaaaatccagctgcaaaagtgcctaagggttgagtc

SEQ ID NO: 8395 - DNA, 521 bp, Cricetulus griseus
agagatgatgttggctaatcctccttgttcctcctctagtgccccgtgtctgtgaaggacttcccttcccacccgcactacactgagggcgagttggtaactagttgaaattcctgtcttgatccctggccccctaggctgctcagagctacagtgccctaaggtgccattggcctctgactggccttttgactcttaacagctgggtgtttccaatccttcctgtgtttccattgccttaaccacaaattgtggtgcttttttgtatagtatatgtataaatcacaaagttgaatcctggctatttttaagacaaaagtctgttaaacttttttattgtaaagaatatttattatgcgaatctctattattttatgatatttattgcaaaagactgttgaaatgtactcatgtctgaatataacatatcactacttcatgaaaaacaaggtgactcgaagaaagtacataaagtacatatatgttaactacaatgcagaaaatatattaattaatgaaac

SEQ ID NO: 8396 - DNA, 521 bp, Cricetulus griseus
atcaaagaacctgaatgaacacattcgtttgtctgcctgtgtgccggctacttcgtggatgcccaccaccatcacagagtgtctccacaccttctgacaaaagttgtattgtgaagtacctgcagaccagcaagtactgccccatgtgcaacatcaagatccacgagacgcagccgctgctcaacctcaagctggatcgggtcatgcaggacatagtgtataagctagtaccaggcttgcaagacagtgaagagaaacggattcgggaattctatcagtcccgaggcttggacagagtcacccagcccagtggggaagagccagccctgagcaaccttggcctccctttcagcagttttgaccactctaaagcccactattatcgctatgatgagcagctgagcctatgcctggagcggctgagttctggcaaagacaagaataaaaatgtccttcagaacaaatatttgaaataaatacttctaaactgacaaaaaaaaaaaaaaaaaaaaaaaaaaaaa

SEQ ID NO: 8397 - DNA, 520 bp, Cricetulus griseus
tccaggatttgcattttgccatgtcttctgaagaagggaagctcttcgtgggagggctcaacttcaacaccgatgagcaggcacttgaagaccacttcagcagctttgggcctatctctgaggtggttgttgtcaaggaccgggagactcaaagatcccggggttttggcttcatcaccttcaccaacccagagcatgcctcagatgccatgagagccatgaatggagagtccctggatgggcgccagatccgtgtggaccatgcaggcaagtctgcccggggaagcagagggggtgcctttggggcccatgggcgtggtcgaagctactctagaggtggtggagaccagggctatggaagcggaagatatgacagtcgacctggaggatatatggatatggatatgggcggtccagagactatagtggcagaagccagggtggttatgaccgctactcaggaggaaattacagagacaattatgacaactgagatggggcatgcacacataatgtagat

SEQ ID NO: 8398 - DNA, 520 bp, Cricetulus griseus
ttcaatatgctgagacgaaaaccaactcgcctggagctcaagctcgatgacattgaagagtttgagagcattcgaaaggacttggagacccgtaagaagcagaaggaagatgtggaaggtgtaggaaccagtgatggagaaggggccgcagggctcagcagcgaccccaagagccgggaacaaatgattaacgatcgaattggttataaaccccaacctaagcccaacaaccgcacatctcagtttggaaactttgagttttagagatggattctctagcatgccagacctctggaatggaataaaatgatggcagaaatacagaacagatttagagaattaagtgtgtacaaccaagcagaatgttttctgtctcctgcagggagaaataatgtctgcatgaagttactgctgttcaacttttctgataagatagaagccaaattctggcttgtttctggaaaattggactgtggaaagcttacctgatttttgtttttaaaaataaatatatttttgg

SEQ ID NO: 8399 - DNA, 520 bp, Cricetulus griseus
cagggtgttcacactggtaataaaccccataaatgtgaggaatgtgggaaagcctttagcaggaactcaggtcttattcaacaccagagaatacatacaggagagaaaccttacaggtgtgaaaaatgtgacaaaagttttagtcaacaacgcagccttgtcaaccatatgaatgtgatgcttgtggtgaagcctttaactgtcagatttctctaattcagcatcaaaaattgcatattatgtggatgcaataaaaatagagacactcatatacctgagtttgagactagctacccaagtgcagttttagtatggccccaatgtgggtcaaatttactgataaagcaatttctcattggccttcttcaagtagttctaaaggtcctatgaatagtggacagtgtctgtgggagactgaattatgattactctgttttcatagccacagagatttattgattaagcctctaacctttcagtggagttgacttggcaaagcataggagaaatgttatgaagg

SEQ ID NO: 8400 - DNA, 519 bp, Cricetulus griseus
tccacaaggagaggggtgtggccatgatgaggctgatcctgggtttcgtgtggcctctgctcactctcagtatctgctataccttcctcctgatacggacctggagtcgcagggccacacgctccaccaagacgctgaaggtggtggtggccgtggttacctgcttctttgtcttctggctgccctaccaggtaacggcgataatgatggcttggctgcccccttcctcgcccaccttcctgaacgtccacaggctgaactccttgtgcgtgtccctggcttacatcaactgctgtgtcaaccctatcatctatgtcgtggctggccagggcttccaagggcggctacgcaggtcactccccggcatcatccggaacgccctctcagaggactccatggtcaggggaccaggccaaagtctttcacccgtttccacgatggacacctcgacccagaaggtccgatctaccctctatcaaatgccatggcacaccgtgttggaggtcagaggacaacctg

SEQ ID NO: 8401 - DNA, 519 bp, Cricetulus griseus
gttgatatgcatgtggtcaaggctagagatgggaatgactatagcttgggactaactccaacaggagtcctgtttttgaaggagaaccaaaattggcttgttcttctggcccaagataaccagattggattttaagaagaataaattaaccctagtggttgtggaggatgatgatcagggtaaagaacaagagcatacctttgtctttagactagatcatccaaaagcctgtaaacacttatggaaatgtgcagtggagcatcatgccttcttccgtctccgaggacctgtccaaaagagttctcatcgatcaggattcattcgactaggatcacgatttagatacagtggaaaaacagagtatcagaccacaaaaactaacaaagccagaagatcgacctcctttgaaagaaggcccagcaagcgatactcccggcggaccctacaaatgaaagcaagcacaacaaaacctgatgatcttggtgttcattagctctacttctagcagtgaccgctgcc

SEQ ID NO: 8402 - DNA, 519 bp, Cricetulus griseus
gatgaacttaaggtccagaccagcaccctcagtcaacagctggctgagacggaagcagagagagaccgtgcaacctcaagggctaggcagctgcagaaggcggtagctgagagcgaggaagcttggcgcagtgcagacaggcggctgagcgggccaagcagagctggcactgcaggaagagagtgtacggcgtagcaagcgggagtgcagggccacactggaccagatggcagcactggagaggagcctgcaggccaccgagaatttgtaggcacaggtggtagccctggagcagaaccacaatccagtccagctggaggcagatgagcagcacctggagctacaacaggaggttgagcgcctgcgcagtgcccaggtgcagacggagcgcacactggaggcacgggagcgggcccaccgccagcgagtgtcgggattggaggagcaggtgaccatgctgaaggcacagctgcagaaggagcttcgaaggagctcagcatccatctcctcaccctctgg

SEQ ID NO: 8403 - DNA, 518 bp, Cricetulus griseus
gtctggaggctcatcactaccttcctcttctttgggcccctgggattcggcttcttcttcaacatgctcttcgtgttccgctactgtcgcatgctggaggagggttccttccggggtcgcaaggccgacttcgtcttcatgtttctcttcggtggtgttctcatgactctgttgggattcctgggcagcctcttttcctgggacaggccctcatggccatgctggtttatgtatggagccggcgcacgcctcatgtgagggtcctgccctgggccctcatgggcttctcgatgctgctgggcaactcggtcctcacagacctgctagggattattgtgggtcacatctactacttcctagaagatgtctttcccaaccagcctggaggcaagagactgctgctgacccccaactttctgaagctactactggatgaccctcaggaggaccccaattatctgccccttccagaagagcaaccagagccctaactgcagcttcaggagcagtaagcccac

SEQ ID NO: 8404 - DNA, 518 bp, Cricetulus griseus
gcgtacagacacccgcgccggctttggctcccctttttctctgccggaggcacagattggacccacgggcggggcgtgatggtggtcggtaccggaacctccttggcgctgtcctccctcctgtctctgctgctcttcgctggcatgcagatatacagccgccagctggcctccaccgagtggctcactattcaggggggcctgctgggctcaggccttttcgtcttctccctgactgccttcaataatctcgagaatctggtctttggtaaaggtttccaagcaaagatcttccctgagattctcatctgcttgctgttggcactctttgcatctggcctcatccaccgagtctgtgtcaccacctgcttcatcttctccatggttggcctgtactatatcaacaagatatcctccactctgtaccaggtgacagcaccagtcctcacaccagccaaggtcactggcaagggcaagaagaggaactaatcctgaatgattaataaagttgattcttt

SEQ ID NO: 8405 - DNA, 517 bp, Cricetulus griseus
  modified_base (508)..(508): a, c, t, g, unknown or other
gcggcggcggcgcgagtcatggctggacaagctttcaaaaagtttctaccgctctttgacagagtattggttgaaaggagtgccgccgaaactgtgaccaaaggtggcattatgcttccagaaaagtctcaaggaaaagtattgcaagcaacagtagtggctgtgggatcaggctcgaaaggaaagggtggagagattcagccggtcagtgtgaaagttggagacaaagttcttctcccagaatatggaggcaccaaagtagttctagacgacaaggattatttcttatttagagatgctgacattcttggaaaatatacggactgaaatcactgttgaaatggtatcacatgaagctgcccattccgccgacattctgaactattcatcatgtaaataatttctgtgccttcccttttataataaactgatgatgcctaaactgacatccattgtctctgaaggtttagtatcaatgtacttaaaagactgtgacagtcaaaaaaanaaaaaaaaa

SEQ ID NO: 8406 - DNA, 517 bp, Cricetulus griseus
cagggcgccggccgcgtgccctgccgcgaaaatcgagcatctggagcgtctggcgctggtgaacttcggcagccgcgaggcggtggcccggctggagaaagccatcgccttcgctgaccagctgcacgccgtggacaccgacggagtggagcccctggagtccgtactagaagacagatgtgtctacttgagatctgacaatgtagcagaaggcaactgtactgaagaactactacgaaattcccatcatgttgtggaggagtattttgtggcccccccaggtaatatttctttgccagacttggtaaacaagaccccttctcctacagcagagtagctattctgggaaaggggaaccatatcaagatggtggactcccaagggtggtcatttgctactgtgaattctagtgtaaactggacatttatggtttcttgctaactgtcctgacaactggaaaacacccagctaatagaacaccacaagcctgcttccaaggaaatggatcaagtactca

SEQ ID NO: 8407 - DNA, 517 bp, Cricetulus griseus
cgcgaggccaacaaaaagatcgagaagccagctgcagaaaacaagacatgctggcagacacgcctttaatcccagcactcgggaggcagaggcaggcggatctctgtgagttcgaggccagcctggtctacagagtgagttccaggacagcctccaaagccacagagaaaccctgtctacgaaaaaccaaaaaaaaaaacttgtgctcacacacacacacacacacacacacacacacacacacacgtgaggtcctgcacattgactctgtacttttgagcatacagcttcatgatctataagaaattgagagccactccatagagggacagagaaaatccaccttttaggtacacacacagcctcaagtgtgtaccaaagctgctgggtcctccctggggaagcaagggctgtgtgttgtgcatgcgagtgacagtgtcagttatatttatatacttgtacagatgcaacctttgattatacatatatttgataaaacaaaaagacgaatttgttg

SEQ ID NO: 8408 - DNA, 517 bp, Cricetulus griseus
ctgtgagagtgaatctttcaagatggacctcatcttagacgtgaacattcagatttacccagtggacttgggtgacaagttccgattggtcatagctagtactttgtatgaagatggtaccttggatgatggtgaatacaaccccacagatgacaggccttccagggcggaccagtttgagtatgtcatgtatgggaaagtatacaggattgagggggatgagacctcaaccgaagcggcgacacgtctctctgcctatgtgtcctatgggggcctgctcatgaggcttcagggtgatgccaacaacttgcatggatttgaggtggattccagggtgtatctgctgatgaagaaactggccttctgaacctcgtgggaaaccagccctgctgcttagtcattcaagtcatggacactgttcgaacctgagtagaagctggcgttgctgacctgtgaaaggaactggctctgtgtccactctggatacagcttcagtttgtctgaattcagtggaaaa

SEQ ID NO: 8409 - DNA, 516 bp, Cricetulus griseus
gctgaccctgaaagctatccgcaagggggattccatgatgacctgtgagcaggcccagcttctggtccaacctggcgcggctcatctagcactggcgcttcccgaagctggccgcgtggtaacctgcgaggtggacacggagcccccggagctgggacggcccctgtggaagcaggccgaagtggaacagaagatcgaccttcgactgcagcccgccctgcagactttggatgagctcctagcggcgggcgaggccggaaccttcgatgtagcggtggtggacgccgacaaggagaactgtaccgcctactacgagcgctgtctacagctgctacgccccggaggcatgctcgccgtgctcagagtgctgtggcgcggagaggtgctacagcctaaacccaaggacaaggctgcggagtgcgtgcggaacctgaatgagcgcatcctgcgggacgccagggtgtacatcagcctcctgcccttgggtgatgggctctccttggccttcaagatcta

SEQ ID NO: 8410 - DNA, 516 bp, Cricetulus griseus
catccaaagtcttgtaggttagacaaatggcagggaagagagcatccagatgttattcaaaagcaagagtgactcataaagagaatgtgatgagttcatatgcttctagtgaattatattcttgcttgttctttgtttaagattgtaacatgtgtcatttactgagatctgccatcaatttttgttcttttgtttcaggaagataaaatgaattacctgcgccatccaaatgtttgatgggagatgtatcagtgaggcattgacatttctactgttatgttatcatcttccaaacaaaaccacttttgtttttttggaagtttatttaagttattatagacttacatatactcttacattatttaattaattaacttttttggttttaattttctagtctacttggcaaattaaacaaaacaaggaggaatcatagttaaaacataccaagttctccatgcagagtaaagctatcaaacaagatgtagttccacatgtaaattaattagatgttga

SEQ ID NO: 8411 - DNA, 516 bp, Cricetulus griseus
ctccgccggggtcggtgaaggatcccaagatggccgggcgtaaacttgccctaaaaaccattgattgggtgtcttttgtggagatcatacctcgaaaccaaaagacaattgcaaactccctgaagtcttggaatgagaccctccacaccaggttggctaatctgcctgagaaaccaccagcgattgactgggcttattacaagaccagagtggccaaggctggcttggtggatgattttgaaaagaagtacaatgccctgaagattccagtgcctgaggataaatacacagccctggtggacaatgaggaaagggaggatgtgaagaactgtgctgcgttcctgtctgaatcccaggacaggatccaggaatatgagaagcagctggagaagattaagaacatcatcccctttgatcagatgaccattgatgacttgaatgaagtcttcccagaaaccaagctggacaagaagaagtacccctactggcctcaccagcccatcgaggacctgtgaa

SEQ ID NO: 8412 - DNA, 516 bp, Cricetulus griseus
ctagaacggaaggaacagtaaagaaaaagagaagaaagaacaagaactaaggaagaaatttaagctaacaggccccattcaagttatccatcatgcaaaagcatgttgtgatgtcaaaggagggaagaatgaactgagcttcaagcaaggggaagacattgaaataatccgaatcaccgacaacccagaaggaaaatggctgggcagaactgccagggggtcatatggttacattaaaacaactgctgtcgagattgactatgattctctgaaacggaagcagaacactctcaatgctgttccatcgaaacttgttgaagatgaccaagaagtctatgatgatgtggctgagcaggatgctcctaacagccatggtcagagtggaagcggaggtatgttcccaccaccaccagatgatgacatttatgatgggatagaagaggaagatgctggtgatggatccatgctgcaggttgaagagaagaccagcacgtggtcctgggggattttgaagat

SEQ ID NO: 8413 - DNA, 516 bp, Cricetulus griseus
  modified_base (495)..(495): a, c, t, g, unknown or other
gccatcaggtattctggaacggctgctggctcagtttaattccagttttgaccagccaggattttggagactattagaatcttgaggacagagattatggattgtgccaaactgggcactgaccttttttacttttcatcatgcatgttttatcaaggggttgggtgggtctcctccctcaggattctgattgaacaggtgaaattccttcatttttgttttgttaatggtatgcttgctattatggcccatatgtaaatgttactctggatacatatttatatgccatgttacttagtgacactattcaaacatttgtatgtgtatttgtgaagtgtctgcatcagtcatttaaaaagtatttcagcctaagttttcccgagaggtatgttgaataaagtcttaaaagtccagcatgagtcacagccaacttagttttggggcagaggagtgagagtcgagttctgatgtcagaccagatgagacaaaaaaaanaaaaaaaaaaaaaaaaaaaaa

SEQ ID NO: 8414 - DNA, 515 bp, Cricetulus griseus
ccgcaggcgcagcaggcggcgcgcgagtcaacacggccacgctgtgccgcatcgggcaggagacggtgcaggacatcgtgtaccgcaccatggagatcttccagctgctcaggaacatgcagctgccaaatggtgtcacctaccatactgggacttaccaagaccggttaacaaagctacaggaccatcttcgccaactttctattctcttcaggaagctaagattggtctatgacaagtgcaatgagagctgtggtggaatgggccccattcccgttgagcaacttattccgtacgtggatgaagatggctctaagaacgacgaccgggctggcccacctcgttttgctactgaggagagacgagaaattgcagaagtaaataaaaaactcaaacagaagaatcaacagctgaagcagattatggatcaattacggaatctcatctgggatataaatgccatgctggcaatgaggaactaaactgatgctgaaatcttgttctactcgtgtgat

SEQ ID NO: 8415 - DNA, 515 bp, Cricetulus griseus
caggctggaactaacatctggacatgtggaaccctaatgctgggcctaacccatatccaccccaagccttgtgcccaggagttcccaatcctgcctgtccaccacctatcaaccctgcctttcctcctggcccctgtcctccaggaataccccagggaaacccagctttccctccatgtcgccccccttaccctgtaccacaaccagggtgtccaggataccaaccctcagggccccaccctcccccgtacccaccacctgctcctggcatgtgccctgtgaatcctttggctcctggaatggtaggcccagggatggtgatagacaagaagacacggaagaaaatgaagaaggctcataaaaagattcacaaacaacacaagcatggaaagcattcctcctcttcctcctcctcctccagcagtgactctgactgaatgcagggcctggaccctcctcccctcgtctcaccagctctcccatcaagcttcagctgtcaccttgtactgagggag

SEQ ID NO: 8416 - DNA, 515 bp, Cricetulus griseus
aaacctctctattcagcacttcctctctctgggtctgctctcaactgtcaccatggaataccccttagaagaggccctggatatgatggtgtctaccttccacaaatactcaggcaaagagggtgataagttcaagctcaacaagtctgagctgaaggagctgctgaccagggagctgcctagctttttggggaaaaagagagatgaagcaggattccagaagctgatgagcaacctggacagcaacagggataacgaagtagacttccaggagtactgcgtcttcctgtcctgcattgccatgatgtgcaatgaattctttgaaggctgcccagataaacagccccggaagaagtgaagactctgcagatgaagtgtgggggcgtggtcttcgggaggagggggctcttcccttttggctctgagcatagtgccttactctggcttcttcatacatatgcacaatgctgagcgagttcaataaaaggtcttgaaatactaaaaaaaaaaaaaaa

SEQ ID NO: 8417 - DNA, 514 bp, Cricetulus griseus
caggtgctgtatttgatgatagcaccagaaaagtgctggtcgtacaagatcgaaataaactgaaaaatatgtggaagtttccaggaggcctgtcagaacccggagaagatattggtgacacagcagtccgagaggttttcgaagagactggtgtgaagtcagaattcaggtccctgctgagcatccggcagcaacacaggaaccctgaagccttcgggaagtcggatatgtaccttatctgccgcctgcagccacgttccttcactatcaacttctgccagcaggaatgcttgaagtgtgaatggatggatctagaaaaacttgccaagactgaaaacaccacccctatcaccagcagggtggctaggctattgctgtatggacatagggaagggtttgataaaattgacctcagtatggaggaactcccagcagtgtacacaggcctgttctacaaactctatcacaggggactgccagagagttacagaaccacaatgggagtagattgaat

SEQ ID NO: 8418 - DNA, 514 bp, Cricetulus griseus
tcaccatgaaggtcgagctgtgcagtttcagtgggtacaagatctacccggggcacgggcggcgctacgccaggaccgacgggaaggttttccagtttcttaatgcaaaatgcgagtccgcattcctttccaaaaggaatcctcggcagataaactggactgtcctctacagaagaaaacacaaaaaaggacagtcggaagaaattcaaaagaaaagaacccgccgggcagttaaattccagcgtgccatcactggtgcatcccttgctgatatcatggccaagaggaatcagaaaccagaagtcaggaaagctcagcgagagcaggctatccgggctgccaaggaagcaaaaaaggctaagcaggcatccaagaagacagcaatggctgctgccaaggcccctacaaaagcagcccctaaacaaaagattgtgaagcctgtgaaggtctctgctccccgagttggtggaaaacgctaacttggtagatcagagtttcaaataaagttctatct

SEQ ID NO: 8419 - DNA, 514 bp, Cricetulus griseus
  modified_base (463)..(463): a, c, t, g, unknown or other
  modified_base (468)..(468): a, c, t, g, unknown or other
gtcatggcggcgctgtgtgggtcccatgccggggctcctgggagccgattcctgagagcgcttctcttcttcaagccctttcgaaatgcaagcacggagagtggctccgagagcacgacccctgactcctccgctcctcgggagcgctcagcaggcttcgcgagcgccctggagcgactctcggagctgcggcggaaggcggagctcggacgggagtctccaaaaaaatgtggaatcctttgcctccatgctgagacactctccactgacacagatggggcctgccaaggacaaactggtcattggacggatctttcatattgtggaggatgatctctacatagatttttggtggcaagtttcactgtgtgtgtaaaaagaccagaggtggatggcgggaagtaccagaggggcaccagggttcgctgcggctcctggatcttgagctaacatctaggttccngggtncgaccacagatacaactctactggaaggccgagttctcttaggact

SEQ ID NO: 8420 - DNA, 514 bp, Cricetulus griseus
tggacaagaggagcagtgtgattgctgccctgctctttgcagtgcacccgatccacacggaagcagtaacaggggttgtaggaagagctgagctcttgtcatctgtcttttttctagctgcatttttgtcatatactaaatcaaaaggaccagataattccatagtgtggaccccgattgcattgacagtgcttttagtggctgttgcaacattgtgtaaagaacaaggaatcacagttattggaatttgttgtgtatatgaagtatttgttgcccaagggtatactttgccattattatgtacagctgctggacagtttctccgtggaaagggtagtattcccttttctatgctgcagacactaataaaactcattgtcttgatgttcagtacattattacttgtcgtgattagagtccaagttattcagtcccaacttccagtgtttacaaggtttgataatccagcggctgtaagcccaacccctacacgacagctgactttaactacctc

SEQ ID NO: 8421 - DNA, 514 bp, Cricetulus griseus
  modified_base (454)..(454): a, c, t, g, unknown or other
ggacccatgacggacttctggttaaccaaacagaactgtttgtgccgtccctcaatgtggatggacagcctatttttgccaacatcacactaccagtgtataccctgaaagagcggtgccttcaggttgtacgaagcctggtcaagcctgagaactacaggaggctggacatcgtcaggtcgctctatgaagatttggaagaccacccaaatgtgcggaaggacatacagcggctgacccaagagcactttgaaaatcagcccctgggagaggagcctgaaggagtccattgagattagtggtcctgaattccagctttgatggttctgagtcttaacccacacataggacaggtcactttctttccattttacaatgtttcattctcggagtaaaatatactccattttgtaaaaagtaaagtttaaactaaacatcactggactttgtggtncttaaggataaacattgagttttctgaaaagctgacctttagtacaataaacggtgctaa

SEQ ID NO: 8422 - DNA, 514 bp, Cricetulus griseus
cggtccaatatggcgttgtcggcgtccgtccgccggctgggggtcgggatgctgtcgtgcagccgggagctgccttgcgcctggcgcgccctgcacacctccgcggtctgcgccaagaaccgggcggctcgagtccgcgtggccaagggggacaagccggtgagctacgaggaggctcacgccccgcaccacatcgcgcacagaaagggctggctgtcgctgcatacaggtaacctggatggagaagaccatgctgcagagagaacactggaagatgttttccttcgaaaattcatgctgggcacctttccaggctgcctggctgaccagatcgttctgaagcgccgggccaaccaagtgggcatctgtgccgtggtcctgaggcagctgccagcacacaaattctactttcttgtgggctacagtgagactctgttgtcacacttttacaagtgtcctgtgcgactccaccttcagactgtgccctccaaggttgtgtacaagtacataataa

SEQ ID NO: 8423 - DNA, 514 bp, Cricetulus griseus
  modified_base (494)..(494): a, c, t, g, unknown or other
ccagatgcggacacggaggacactaaggggacacctggccaagatctatgccatgcactgggcactgactctaagctgctggtaagtgcctcacaggatgggaagctgatcgtctgggacacttacaccaccaacaaggtgcatgccatcccactgcgctcctcctgggtcatgacctgtgcctatgcaccctcagggaactttgtggcatgtggggggctggacaacatgtgttccatctacagtctcaaatcccgtgagggcaacgttaaggtcagccgggaactctctgctcacacaggttatctctcctgttgtcgcttcctggatgacaacaacattgtcgaccagctctggggacaccacgtgtgccttggtgggacattgagacggggcagcagaagacggtgttgtgggacacactggtgactgcatgagcctagccgtgtctccagactacaactctgtacctcgtaaaaaagaaaaaaaaaaanaaaaaaaaaaaaaaaaaaaa

SEQ ID NO: 8424 - DNA, 514 bp, Cricetulus griseus
  modified_base (496)..(496): a, c, t, g, unknown or other
aagttcttcagcagtttcttcatccaaggtgttagacaaacctagccagctaactgagaaggaacttgctgaggctgcaagcaagtgggctaatgaaaagccggagaagggagatgaaaataacttgactgagatttccgagtttgagacgggatccatggcacccttatttatcgaccagacagaagaaccagagtcaaacacaacagatggcacagaattgtatgaagacagccagattagcagtcgttctaaagctattgcatcaaaaaccaaagaaattgagcaggtttaccgacaagactgtgaaactttcgggatggtggtgaagatgctgattgaaaaagacccttcattagaaaaatctatacagtttgcattgaggcagaatttacacgaaataggtgagcgatgtgttgaagaactcaaacatttcattactgagtatgataattctactcaagattttggagaccctttttagaagaattttttnttttgttagttatcataa

SEQ ID NO: 8425 - DNA, 514 bp, Cricetulus griseus
  modified_base (492)..(492): a, c, t, g, unknown or other
ccatgacaggggccgggatcgacaggcacctcttctgcctttatatcgtttccaagtacttaggggttagctctcctttcctggctgaggtacttgcagaaccctggagcctctccacaagccagattcctcagtaccagatccgcatgtttgatccgaatcagtaccctaatcatctgggtgctggaggtggctttggccctgtggcagatgatggttatggggtttcttacatgatcgcaggtgaaaatactatgttcttccatgtttccagcaagttctcaagttctgagacgaatgctcagcgctttggaaaccatatccgccaagcactgtcggacatcgctgatcttttcaaagttcccaagactgaaagctgaggacaggagaaagaccagctacccttttgtccccacctggtggaggaagaggcctgtggccagttcataggcagtaaggggtggcgtgcacacgtgcccagttctgaaaacngctctggtggcaggagctcccc

SEQ ID NO: 8426 - DNA, 513 bp, Cricetulus griseus
gggtgcaattaaaaggacttatccagtgaagaagtcgcaaggcccaggcgttccaccccaactccagaacttacaagcaagaagcctccagatgatacactggcccttgctcctctctttggtccaccattagaatcagcttttgatgaacagaagacagaagttcttttagatcagcctgtgtaaaaggaaagcaattcatatttaaagtttaagtatattaaattatatccaagagtgcagaggatggtgaaattttacctgaccccactccccttctctgcagtttagcaaatgtggagattgttaaaccatcagattcaagccaacatgattttaaagtttcgagactttctgtagctgaactggttaatacttttgcacaattgctcagagcagaggggcccttctcatccagcaaccaggaataccccatttcctctttactcacaagaatcaaaacaaagaaaaaaatttacaaactaaaatttaaaaaaaaaaaaaaaaaaaaaa

SEQ ID NO: 8427 - DNA, 513 bp, Cricetulus griseus
cggagcaggagctgcagcggcggcgggagcagaagcggcggcggcacgacgcgcagcagttgcagcagctcaagcacttggagtccttttacgagaaacctcctcctgggtttataaaggaggatgagacaaagccagaagactgtataccagatgtgccgggcaatgaacatgccagggagtttctggctcatgcaccaactaaaggactttggatgcctcttgggagagaggtcaaagttatgcaaggttggcgttgcaaaaggtatggccatcgaacaggcgacaaagaatgccctttctttatcaaaggcaaccagaagttagaacagttccgagttgcacacgaggatcccatgtatgacatcattcgagagaataaaagacatgagaaggatgtaaggatccagcagttaaaaacagttactggaggactccacctcagatgaaagacgagagcagctccagctcctcaggcaaaagagaagcgcaaagaaaaaagaagaagaaaag

SEQ ID NO: 8428 - DNA, 512 bp, Cricetulus griseus
cgcagttccgggatggtgggcggcggtgaaggcggtggccgggtcgggcttctagagaacgccaaccccctcatctatgagcgctcgggggagcggccagtgacggcgggcgaggaggacgaacaggtgcccgacagcatcgacgcccgcgagatcttcgatcttattcgctccattaatgacccggagcatccactgacgctagaggaattaaatgtagtagaacaagttcggattcaggttagcgaccctgagagcacggtggccgtggctttcacacccaccattccacactgcagcatggccacacttataggcctttctatcaaagtcaagcttcttcgatcccttccccagcgtttcaagatggatgtgcacattacacccgggacccatgcctcggaacatgcagtgaacaacagcttgcagataaggaacgagtggcagctgcgagcctggcttttgaccaccagcctgcacacaggtgtcctggcctcagctccaccaagggc

SEQ ID NO: 8429 - DNA, 512 bp, Cricetulus griseus
gacaaaaacgtgtgtgccatggcaaccccgctttatgattcacatgtgcccatcaacaaagcagcattttgcccgtgaatatgattgctatggcgatagctattttgttgatacagatttggatcaactgaaagaagtgtttttaggaattaagaaagcaggtgagcatcagactccggaagagatggcccctgtgattgctgacctagaatatcgttattcttgggaccactctcctctctgtatgtttcgacactgcactgtttatctggacctgtatgctgttattaatgactcgagttccaaaatcaaagcaacgaggttagatgtgacagcacttgagctgcggtttcatggagccaaggtagtgtcccacttatctgagggggtatctcatgtaatcatcggggaagatcagagccgagtttcggacttcaaagttttcagaagaactcttaagaagaagtttaagatccttcaagaacgttgggtgactgattcagtagacaagg

SEQ ID NO: 8430 - DNA, 512 bp, Cricetulus griseus
ctttccgcgccgtcaccatggtgcgcatgaatgtcctggccgatgctctgaagagcatcaacaatgctgagaagagaggcaaacgccaggtcctcatcaggccctgctccaaagtcatcgttcgattcctaactgtgatgatgaagcatggttacattggtgaatttgaaatcatcgatgaccacagagctgggaaaattgtcgtgaacctcacaggcaggttgaacaagtgtggagtgatcagccctagatttgatgtgcagctcaaagacctagaaaagtggcagaacaatctgctcccgtcccgtcaatttggcttcattgtactgacaacctcagctggcatcatggaccatgaagaagcaagaagaaaacacacaggagggaaaatccttggtttctttttctagagatgtaaaacgtaaataaaaagcctccatagactgttcaggatcagtccttttgaacctttacagcagaatagcaaacggctgtcctgactggtgacactt

SEQ ID NO: 8431 - DNA, 512 bp, Cricetulus griseus
tgtgtgtgtgtgtgtgtatacatacatatatatatatatgtacatacagacacatatacatggacatatatgcatacacatatttgctactgactggcttccttctctggcttcctgctgtgccgtgtccaccagatcctagactactccacttgcaaagttaatttaaatccctttatggatggacacagagactgctggcatgggagggggccctacgaattggtctctgcctatccaggagcacccacgtcctctcccctaaatcttgcagcaagtgagtcagaaagtgcacaacattcatttcagcgtgattatcataatccgtgtcagaacgaaaatgacacttgtgatgatgttttgacaccttcccaatgtctgtccccaccctcccccacctggagtagctcaagtctcttttgaagcagagaagctgctgctgtctaactccttccattaaattaagaagtactgacctcctaatatttaagtgtttactatctgctgtaaag

SEQ ID NO: 8432 - DNA, 511 bp, Cricetulus griseus
gtggcgccggcaagatgggcaagtgtcgtggtctccgtactgccaggaagctccgcagtcaccggcgggaccagaaatggcatgacaaacaatacaagaaagcccacttgggcacagccctgaaggccaatcctttcggaggtgcctctcatgcgaagggaattgtactggaaaaagtaggggttgaggccaaacagccaaattctgctatccggaagtgtgtcagggttcagctcatcaagaacggcaagaagatcacagctttcgtgcccaatgatggctgcttgaacttcatcgaggaaaacgatgaagttctggttgctgggtttggtcgaaaaggtcatgccgtaggtgatattcctggagtgcgctttaaggttgttaaagtagccaacgtgtcccttttggccctgtacaaggcaagaaggagagaccaagatcctaaattttgacagtggaaacacagtaataaattttcatattctaaaaaaaaaaaaaaaaaaaaaaaaaa

SEQ ID NO: 8433 - DNA, 511 bp, Cricetulus griseus
cgttgaaggaaggcagtatggcacattacatggagccaaaattggatctgagattgggtgctaccgtggttttgctcttgcatggaaatgtctcctacacagtagtactggcgagaaagacagtaggaagatgaaggtggtggaggcgctgattgcactgctgcaacacttcccctatggtgaccccacttacgagaggctccatgaagacctggacagaatcagagggaaattcagacagctgtgctcactgctcaatgtgcaaccagatttcaaggtgacggcagaaggctccggacttgcgttttgaggactcagaagagcagatgtctgcacattaagtgtcagagtgattaaaggcgagcctgagtggtgctcattgttctgtgggaggaccagtgtggtctcttccctcttcttgggtggctggccgaggtctgtctgccctgccttctgcacagggtcctggcagtaccctcaagagactgcttgctgctggccagagtgagtg

SEQ ID NO: 8434 - DNA, 511 bp, Cricetulus griseus
ggaacttccggctggtgtggccatcttgacttcctgaccttgggctggtccttgtctggtcgctccgcgccgtcatgtctgtcctgacgccgctgctgttgaggggcctgactggctcggcccggcgcctcatggtgcctcgcgctcaggtccactcgaagccgccgcgggagcagctcggtgtcggggaaatcgccattgggctcacttcctgcttcatctgttgcctcctgcctgcgggctgggttctgtcacacctggagagctacaagaagcgggactgaaaggagctgccctcccttcatcctgtgactagaccactcttgccagcccatcttgatcatgtttcctgcattcctgactggccttccctgggatcatgccattcaattccagtcacctcttctgcaatcatggcctctcgatgtcttcatggtgacaactgggaccacattattgcttctgcttggcgggtcccccttgtaacaataaagtttatttaaaccttgct

SEQ ID NO: 8435 - DNA, 511 bp, Cricetulus griseus
ctgcagcctctttctcacctggtagagaaatctcagaaggttcacaagatgtgtgatgcctttgtgggaacctggaaactggtctccagtgaaaacttcgatgattacatgaaagaagtgggagtgggctttgccaccagaaaggtggccggcatggccaaacccaacatgatcatcagtgtgaacggagatgtgatcaccatccgatcagagagcacattcaaaaacactgagatttccttcaaactggaccaggaatttgaggaaatcaccgcagatgacaggaaagtgaagagcgtcataaccctagatggcggggccctggtacaggtgcagaagtgggatgggaagtctaccaccataaagagaaagcgagagggtgacaagctggtggtggaatgtgtcatgaaaggtgtcacctctaccagaacttatgaaagggcatgagccaagggaagtggccctggactgaaatttgcatcgaactctacaatactcaattggatgtatt

SEQ ID NO: 8436 - DNA, 510 bp, Cricetulus griseus
agagggccactccaaggcccccacaggcacgacacactgggcagctggacttcttcaagcgttggcggagttatgtagaaggttttggggaccccatgaaggagttctggcttggacttgataaactacacaatctcaccactggcacccctactcgatatgaggtgagggcagatttgcagactgtcaacgaatcagcctacgccgtatatgatttcttccaagtggcatccagcaaagagcggtacaagctgtcagtcgggaagtacagaggcacggcaggggatgcccttacctaccacaatggctggaagttcacaacttttgacagagacaatgatattgccctcagcaactgtgcactgacacatcatggtggctggtggtataagaactgtcatttggcaacccgaatggcaaatacggagagaccaggcacagtgagggagtgaactgggagccatggaaaggacatgagttctccattccttatgtggagctgaaaatccg

SEQ ID NO: 8437 - DNA, 510 bp, Cricetulus griseus
cctgttggctcctactttcatggagactccatgacccctgtctctctcctggctgaccccacgttcatcagagcctggatgggtggggttggagactacaagttgggggaattatgggcccacggtggcagtgcagcagacagcccaggagaagggctgcgagcaagtcctctggctgtacgggccagaccaccagctcactgaagtgggcaccatgaacatcttcatctactggactcatgaggatggggtactggagctagcaactccccactggatggcatcatcctgcctggtgtggttcgacaaagcctgctggacctggctaggacttggggtgagttccgggtagtggagcgcaaggttaccatgagggaattgaagcgggcactggaggagcgccgggtgcgggaagtctttggctcaggaaccgcttgtcaggtctgcccagtgcatcaaatcctgtatgaaggcaagtaaaagccaaagaacaaaaaaaaaaaaaaaaaa

SEQ ID NO: 8438 - DNA, 510 bp, Cricetulus griseus
caagatggcagtcgcggcgctgctccggggcgcggctgcggggcgtggaagcccggcctggagctggcggcagagctggatcccgaagtgctgctcggtccgtggctccggccttctcggcggcaaccccaaaggacggcgcagcttggacctgcttccggctagacgagcgcgccttagtgcgcgtgcgcggtccggacgctgcacccttcctgttgggactattgaccaatgagctgcccgctttccggtcctccaaccggcgcggctcagccctctgaccttgtttacccttggaggaaggtactctgtgtgcctgcaaagttgttgggccaggaatgctggctttgtgttctcttgaaacacatctcagggtgggaattgttgggttgtgtgcagggtggggaggttggatcccttgtactgggatatgtgttctgtgagccacagggacagcatgtccactgtcccaagggctcttctcactcctcaaagtgagctgctgtgttt

SEQ ID NO: 8439 - DNA, 510 bp, Cricetulus griseus
ctttcatgagagaagcggtaactacctctggcatggtcacctacgactcaaaggacacatggacagaaagtttgttccttttcgaaagttacagtttggtcgttatcctggagcttttgacaggccagagttacagcaagttactattgatggactagatgtgcttattccaaaagacccaggacactttctagaagaagtaccacactccagatttatcgagtgcaggtataaagaagctcgggcattccttcagcagtaccttgacgataatagtgtggacgctatggcctttcggaagagggcaaaggaattacttcagctagcagccaaaacattaaatgaactgggagtgcccttctggctgagcagtggaacttgtctaggatggtatcgacaatgcagtattattccttatagcaaagacgtcgacctaggaatttttattcaagattacaaacctgatattattttggcatttcaaaatgcaggacttccactcaaacacaa

SEQ ID NO: 8440 - DNA, 510 bp, Cricetulus griseus
gagcatctacctggcccttaaagcttccagatggttcctatgccctcaatggtgaatacacactgatgccctcccccacagatgtggtactttctggggcagtcagcttgcgctatagtggagccacggcagcctcagagacactgtctggacacggcccgctggcccagcccttgacactgcaagtcctagtggctggcaacccacagaatgcacgtctgcggtacagctttttcgttccacggccggttccttcaacaccacgccctccttcccaagactggctgcaccgccgggcacagattctggagatcatccggaagcgtccctgggcaggcaggaaataacctcactgtcccggctgccctgttgggggtgccggggcctcggactcatctgagagaatgagggggcttctgcagctgcctcatgctaaaacacagtcgggaagtgctgtagagggtgagacctgccctgtctctctgcccgtcacaagagaaatggggggaa

SEQ ID NO: 8441 - DNA, 510 bp, Cricetulus griseus
tcaaaagggaagctgggaaccttgactaaagccacagcctcagaccagaagagtagtggaggcaaggacagctgacaagtggctgtctcagccgtggcctatggctgcccagtccccaacatgtctgtcctgaagcatctttgttcttcgtggccttagatgccttctcactatctcaggtgcccagaagggcaacttccgacctccacctgccttgggacacagaaaagccctaggacagtccaataggaaaggagttcctggctctgtactcacatgtgtcatggggaccctgagctccttgttagctccatgaggggcctctctcggaagctcctgtatccccttgggctgccaaggaggccctggtcctagtccaagtactgtgggagcccctcactttgtctcctcagccactaagggcccaggccaggcatgttgaggaaagaatcctgactccagaacggaaaccttagggcccatcccatggtctctgatgtttcaataaag

SEQ ID NO: 8442 - DNA, 510 bp, Cricetulus griseus
ggagttggtagaagcctgcatctcactctgacataggagcctctctggttctctgctgaggtcgctggccctcactgttgccccagtgaccactacttgactcatgagttctgcccctccactctgtgccctccccaagggcacctgcatgcaccgcgagtgggcagccagcctagccatcagggcaagagcccctctgccatgcgctttgtgcctccaaaactctctcaccttggctgggggcctcaggaccagccatccttggtggagcacccctaccccagctgaaccaaacccaaatgcctgaggcctcgctgggtttgacaacataaaaatccatatatttttcaccactggcatttagtccaactttgcatcccctctgttccatgtcttgctgtctgggccttcttgttgtgtctcgtgttttggtggacttgggcagggctaggactatggtccactctgttcctgctgctggagaagccattgtgaagcatccaggtctgt

SEQ ID NO: 8443 - DNA, 510 bp, Cricetulus griseus
ggaactcgctgagcgtcggcgcctcggagctgctggatcggtccgagatggcagaggtggaggaaacactcaagagacttcagagccagaaaggagtgcaaggaatcatcgtggtgaacacagaaggcattcccatcaagagcaccatggacaaccccactactacacagtatgccaacctcatgcacaacttcatcttgaaggcacggagcactgtgcgtgaaattgacccccaaaatgacctaaccttccttcgaattcgctccaagaaaaatgaaattatggttgcaccagataaagactatttcctgattgtgattcagaatccaaccgaataagccactatctcagcttcctgtgtcattccttaatttaaggtcccccaagagtaatagtgttaatcatgtcagtgggcacatggtggttgcctaagagcccatgtagactatgccattgatcaagggtatctctgtccaccccaacaaggagtgtctctggtgatccagtcag

SEQ ID NO: 8444 - DNA, 510 bp, Cricetulus griseus
gtgccttgcccagctctgcagctgcccttgtgggtcccagccgatctgctgaccagccctcgtgccaccccctcgggagccaggtcttcctccagcctcttagctccaccaccgtggtgcccagggaccctgtgcctgctccattgccagatactgttcctcctactctggaggatgccagtgaggtcaaaacccacctggtatgttctagtgaacaggggacaggctttgagcagagcccggagaacacagacacccccgaggacagctccagaccatgcctgtggagctccaactctttgtttgagggaatggagctggtggcttgccccagcctgccctgccccagctcccaggatctccagccaggttcacagaaggtgaccacaaaaccttctgtttcagagccatcagcttttgcatttttaaacatgtgactctctgggcccagctgttcagagtcccctggtcctcatattgaggccctcaggtactcatggcctcatgtcc

SEQ ID NO: 8445 - DNA, 509 bp, Cricetulus griseus
cagcctctcccaagaaggacgctggagttcagacagatgatttaaatttaggaattttcaatgatgcactaccatgctgtggatcactaacagagagggacattagaaactcttctctagagatttctgcagaatttaatggacagatcagcactaaaaaagacaagcaagaactaagtatggataaaggcactaatttagacaaagaaacagctggcataataaccagtgtaatcagtatcgaagaccagagaaacaaacaaaacttatgaagaaatgtcctaaaaggcctgcttggaatataaataagcctctcaaaagatatgttcctgcatcagcaaagtaccctgtccatctccagagggagaaagaagaaaaaaaaggtaagaaggcagatggagctgcttcacctaatagaaaaaacaccgtgagaacctctcccaaaatagacatacttcaccagaagttgcttcatctcatcgagaaactgagtcagacatcaggttgca

SEQ ID NO: 8446 - DNA, 509 bp, Cricetulus griseus
caacatgaggtgtaagacatgtggggaatacatctacaagggaagaagttcaatgcccgcaaagaaaccgtccagaacgaggcctacctgggtctgcctatcttccgcttctatatcaagtgcacgcgctgcttggccgagatcaccttcaagacagacccggagaacacagactacaccatggagcatggggccacgcgaaatttccaggctgagaagctcctggaggaggaggaaaagcgtgtgcagaaggagcgcgaggacgaggagctgaacaaccccatgaaggtcctagagaaccgcacgaaagactcgaagctggagatggaggtgctagaaaacctgcaggagctgaaggacctgaaccagcggcaggcgcatgtggacttcgaggccatgctgctgcagcaccgcctgtcacaggagcagcggcgaacaagcagcaggaggaggaagatgagcgagagaagaccaagaggaaggcagaggcggtgggcagcaagggcaca

SEQ ID NO: 8447 - DNA, 508 bp, Cricetulus griseus
gcatcatggtccaccttacaacctttctcagcagagcataccatgggggccacctaaccatccgccttgctttgggtggctgcgccaaccggcccttttaccgcattgtggctgctcacaacaagtgccccagggatggccgctttgtggagcagttaggctcctacgatccactgcccaacagtaatggagaaaaactggttgccctcaacctggaccggatccggcattggattggctgtggggctcacctctctaagcctatggagaaacttctgggtctttctgggttttaccccctgcatccgatgatgatcacaaatgctgagagacttcgaaggaagagagctcgagaagtcctcttagcatctcagaaaacagaatcggagcctggagaaacagaagcaagctgacttcagtgtacacagttgtggctgcaaggtcaagggccttcacaactcttgcatagaactttttgttgggtttgaggatcaataaatggagtttt

SEQ ID NO: 8448 - DNA, 508 bp, Cricetulus griseus
cggaagtgcatctgcttgtctcgggcgagatggcttcaaggttacttcgcggagtgggagctctggcggcgcaggccctgagggctcgtgggccccatggcgcggttgcgacacgctcctttgcttctggaggtggtgttcctactgatgaggagcaggctacagggctggagagggagatcatgatagcagcagagaagggactggatccatacaatatgctacctccaaaagcggcttcaggcaccaaggaagatcctaatttagtcccttccatcaccaacaagcgaatagtgggctgcatctgtgaagaggacaactgcactgtcatctggttttggctgcacaaaggcgaggtccagcgatgccccagctgtggaacccattataagctggtgccccaccaactggtccactgagcctctgtgttaacttttcagaatgtgatggaaagtttatctctaataaagactagccattgtattggctacctaaccaaaaaaaaaaa

SEQ ID NO: 8449 - DNA, 508 bp, Cricetulus griseus
aacatgagtcttcagaagcagttgaatctacaaagagaagctctgcattttaggcaaagagcccaagaagaattacttgttcagagacagacagccttgcagcagcaaatcgaaaaacacagagagactgtgaaagatttcttgaatgttagtcaggcaaggatgtccacaggtgagaatgacttgaaaatgcaaagcgtgtacatctctgggtccaattgtgaagccagatgataaggctgaaacacaagagatttctcaggagccattatcttcagtaactgtttctactggaagcttaagttatgaaatcaccgatttgagccttacagatccagttccagctgtggaccttgattttccagaattggaacatgtatttccacacttgcaccgtcagctctttaaacccttagaaccatatctggattttgacttatcgttatcctctgggatttctcaagacaacagagacttttatgagagctccgaatctccatctagaaaa

SEQ ID NO: 8450 - DNA, 507 bp, Cricetulus griseus
agcagcaagaggcagtagctcaggaggatggtcccactcctccaaggccttccttgcagtcagacccaagaccacttgatcacaaagaccccttggagcaagtggctgtgttagcatctttgggaatcttctcttttcttggcctggctgttggagccctggcactggggctctggctgaggctgagacggggtggcaaggatggacctcaaaaacctgggttcttggcaccaatgattccagtggacaagcttccaggcattccaaacctgcagaagacccaggaggacttcagctgattccacctgtaaccctgtcaggctgggtggctaaatggacagacagaaaggcatagggcagtggatccctatggatggaagtctcagttggaagtttgaagcctttttctttgagcccctatattccagaattggctgccagctgaatgctgtctggacttttgatgtcatccttgaggtggaagtccacctgaggaatgtgtataga

SEQ ID NO: 8451 - DNA, 506 bp, Cricetulus griseus
gaaaaacctggaagtgtaatggtagaacataaaacctgtactgcttctgtttcggtgcaaaaatgtagttgccaatacgctgaagtgtgtggcccacaaattgaacactttaacctcgatgtcctgtacccatgctatcatgtggattcttaactgaggagaaactaacttgtcccttctgaaatgcttctttaatctgcactctcttctttcttcctggtagtgccattactagtgttcttcttatcattttcccctctgctgaagataataaacattcatttgagacacctggatacttctgcggacactgatgacacaaagtggagctcaactgtcctttcttctgttcttttcttttaatacttgaactctgactttgctagacatagaaggctcaatggtggaatgttagcgcaatggagattgacagtgtgtgaaggttagaggcaaatgcataggtgtgtagaataaatacttgttatcttgaaaaaaaaaaaaaaaaa

SEQ ID NO: 8452 - DNA, 506 bp, Cricetulus griseus
gcccaagagagagagagagagagagtgagagagagagagagagagagagcgtgagcatctgtaaaatgtcatcaaggatgaagatctccaggctggtgttgcgagctccggttcccagactttgtaatctaaggcttgttgtctcccaggactgccatcattacatttaaatttctttgggggattatttaatgaaaaacatgctgttttattttaaactgaaagtctattctgggtagttgtactttgggaaaaaaatgttatcatttaatttcctttctgtaagttaaaactaatgaagtgtggtcctgccagagcagacagagaaacattctggacatggtggtcagcctctgagtggttataccatttaggggtgctctcgattgtgcaaacgtggcacccacttgtcttgagagagacaatgtagccttgaagcagatgcttcccatcaacctggctttgtctcatgtgaaacaaagacttcaaattccacatcgtagaga

SEQ ID NO: 8453 - DNA, 506 bp, Cricetulus griseus
ccacttgatcacaaagaccccttggagcaagtggctgtgttagcatctttgggaatcttctcttttcttggcctggctgttggagccctggcactggggctctggctgaggctgagacggggtggcaaggatggacctcaaaaacctgggttcttggcaccaatgattccagtggacaagcttccaggcattccaaacctgcagaagacccaggaggacttcagctgattccacctgtaaccctgtcaggctgggtggctaaatggacagacagaaaggcatagggcagtggatccctatggatggaagtctcagttggaagtttgaagcctttttctttgagcccctatattccagaattggctgccagctgaatgctgtctggacttttgatgtcatccttgaggtggaagtccacctgaggaatgtgtatagatttgcattgtctgtgtccatctgtgactgtgtgtgtgagatagggaacatacattctctgtatgtgtgta

SEQ ID NO: 8454 - DNA, 506 bp, Cricetulus griseus
gatcaggacaaaattcattttgaaaggtctaacagctaccggtttcagccacgttcttcagtttatgtattatggaactatagaactgagtatgaatactgttcatgaaattcttcaggctgcaatgtatgttcagctaatagaagtggtgaagttctgctgttcttttctgttagccaaaatctgacttagaaaattgtgcagaaattatgagactcttagatgatttcggtgttaacatcgagggagtcagggagaagctggacgcctttctgctagacaactttgtgccactcatgtccaggcctgacttcctgtcctatctgagctttgagaagctcatgtcttacctggataatgatcatctgagcaggtttccagaaatagagctgtacgaggctgtgcagtcttggctgcgacatgatagacgacgatggagacatacagatactatcattcagaacatcaggttttgtttgatgactccatccagcgtttttgagaag

SEQ ID NO: 8455 - DNA, 506 bp, Cricetulus griseus
gccgccacggccattcatcttctgacccggtgtacccgtgtgggatttgtacaaatgaagtgaatgacgatcaggacgccatcctgtgtgaggcctcttgtcagaaatggtttcaccgcatctgcacccggaatgaccgaaacagcctatgggctcctgacggccgaggcctccgcggtgtggggctgtgacacctgcatggctgacaaggatgtccagctaatgcgcactagagaggccttcggtccaccggccgtgagcggtgacgcctaaccacggctgtcacctaatgtggttcatttctctgtgtagaacagagatttggtgacataggattttaatgtttgacattttggaaatggcacatacagaaatattacatcttagttcttactgacgtgacgtttcattttattgttttgttttttgtcttaaatgagattaatgtgtgtgtgtgggggggtgctgtagagatacttataaataaatgttcattgttatttatc

SEQ ID NO: 8456 - DNA, 506 bp, Cricetulus griseus
gcggaagtgtccttccttcctttctgctgggaaccggctgcttgctgtcgaaatgggcaagttcatgaaacccgggaaagtggtgctggtcctggctggacgctactccggacgcaaagccgtcatcgtgaagaacattgacgatggcacttcagaccgcccttacagccatgccctggtggctggaattgaccgatatccccgaaaagtgacagctgccatgggcaagaagaaaatcgccaagcgatcaaaaatcaagtcttttgtgaaagtttataactacaatcacctcatgcccacaaggtactctgtggacatccccttggacaaaactgttgtcaacaaggatgtcttcagagacccagccctgaaacgcaaggcgaggcgagaagccaaggtcaaatttgaggaacgatacaagacagggaagaacaaatggtttttccagaagcttcgcttttaggtatatttttgtttccatcattaaaaagttaaaaaaaaaaaaa

SEQ ID NO: 8457 - DNA, 506 bp, Cricetulus griseus
tgcggttcaagcacaggtaccttctgtgcgagctggtgtcggaggacgcgcgctgccgcctgagcctggacgaccgcgtgcttggcggcctcgtccgcgacacgatcgcccgggtgcacgggaccttcggcgcagccgcctgttcggtgggctttgcagttcgatacctcaatgcctacactggagtagtgctactgcgatgccgaaaggatttctaccagcttgtgtggtcagctctccctttcattacatatctggagaacaaaggacaccgatatccgtgttttttcaacacgttacacgtgggaggtactattagaacctgtcagaaattcctgattcagtacaaccggagacagctgttgatcctgttgcagaattgcactgatgaaggggagcgggaagccattaggaagtctgtctcaagaagctgtttactggagaaagagtctgcggaagagctttcagacagtgctggtgaggaggctgtggaaatagtggagtga

SEQ ID NO: 8458 - DNA, 506 bp, Cricetulus griseus
cagttgtttcctttgctccaagacttgttcacatctgtcagaaacctgacacatgggcatactgcaacagtccttaatagagtggctgcattggttcccagtgtcctgaagccgcctgtcagaactctaacgtactgcagcacacggaaaggcaagaggaagacagtaaaatcggtcgtccatcggttccttcgacttcattctggcctttggctaaggagaaaagctggctataagaaaaattatggaaaaagtcaacggcaagaaaaaagcgcttaagggaatttgtgttctgcaacaagacccagagtaaactcctggataaaatgaccacgtctttctggaagaggcgcaactggtatgctgatgatccttacctgatgtaccatgatcgaacgaacctgagagtatagttcagagctttcataggctcccaactatggaatgtggatctttgtgtacatgatatccttgcagaagtgagtatgtggtaaactgtacaactg

SEQ ID NO: 8459 - DNA, 505 bp, Cricetulus griseus
ttctatgagcccatcgtcaagaagaactatgataacatcttgagtgtcagcgctattgtgttagcaaacctctgtgtctcctatattatgacaagtcaaaacgaggaagctgaggagctgatgaggaagattgaaaaggaggaagaacaactctcgtatggtgatccagacaagaaaatctaccacctttgcattgtgaatctggtgataggaacactttattgtgccaaaggaaactatgactttggcatctctcgggttatcaaaagcctggagccttaccataagaagctgggaactgacacgtggtattatgccaaaagatgcttcctgtccttgctagaaaacatgtcaaagcatacaatcatgctgagggacactgtcattgaagaatgtgtccagttcctagagcactgtgaactttatggtagaaacatccctgctgtcatagaacagcccttggaggaagagaggatgcacacgtgggaagaatacagtcacgtat

SEQ ID NO: 8460 - DNA, 505 bp, Cricetulus griseus
gcatggaccctggaatctctgaacaagatgatgagaagaagaagcacacttctgtctgtgttggcagagaggatgacatcagaaagttagaaagaatgactgctgttgtccatgacagagaagtggtcattttctaccacaaaggggagtatcatgctatggacattcgctgctaccatgctggaggacccttacacttgggagaaattgaggatttcaatggacagtcatgtatagtttgcccctggcataaatacaaaatcactttggcaacaggagaaggattataccagtctataaaccccaaagacccatcagcaagaccccagtggtgctccaaaggagtaaagcaaaggattcacactgtgacggtggataatggcaatatttatgtgacactttctgaggaaccttttaaatgtgactctgatttttatgccactggagaattcaaagtaattcagagttcttcctgataaaaaatatatggcagacaaaaaaaaaa

SEQ ID NO: 8461 - DNA, 505 bp, Cricetulus griseus
caaaaaaaacaattaatacttggaatacaaaggaaggaggcaaagcaaagcatttaagaattattgaagaaaagcgggtaccttccaatgcttcatgggaacaaagctatgaaaatgatcattaatgatcctcggtacagtgctttagcaaagctgagtgagaaaaagcaggcctttaatgcctataaagtccagaccgagaaagaggaaaaagaagaagcaagatcaaaatacaaggaagctaaggaatcctttcagcgttttcttgaaaatcatgagaaaatgacttccacaaccagatacaaaaagccgaacagatgtttggggagatggaggtttggaatgctatatcagagcgtgatcgtcttgaaatctatgaagattgttttgttcttcctctacaaaaaaaaaaaggaacattaaaatattacatgcaaaaagcaccagcaacccatgataagactgctttgtgcactactgaactggttaaagccaatgtaatctt

SEQ ID NO: 8462 - DNA, 505 bp, Cricetulus griseus
ggagaccccggccagttggcaggattcctgatgcagatggacaggttcatgatctttcaagcgtcccgcttccccggcgaagcagagagagtggccttcctggtgtcccgactgactggggaggcggagaagtgggccatcccccacatgcagcccgacagccctttgcgaaacaactaccagggctttctggctgagctgcgcagaacctacaaatccccgctgaggcactcaaggcgcgcacgaaatccggaagacttctgcatccaatagggctgttcgggagcgctgatttagggtcttctgccagggctgagtattttctgacttgaggaggacagcagcatcatgcttcagttgcatctttcgattctagcacattgagcatcttttttacaccaagtgattgcatttcctcttttgtcagactgccgatgtcctttgctccactgatgggcctgaccagtttgtaagagctccgtatgcaattaaagatactaatctg

SEQ ID NO: 8463 - DNA, 504 bp, Cricetulus griseus
aactaaacttcaaaacactctgatccagtatcatagcattgaagaagataagtggcgagttgccaagaaaatgaaagatgtaacagtttggagaaaaccctcagaagagtttagtgggtatctctacaaagcccaaggtgttatggatgatgttgtcaatagtgtaatagaccacatacgcccagggccgtggcgcttggattgggaccggttaatgacttcactggatattttggagcactttgaagagaattgctgtgtgatgcgttacaccactgctggtcaacttttgaatattatttccccaagagagtttgttgatttctcctatactgtgggctatgaagaaggacttttatcctgtggagtaagtcttgactggagtgaaacgagaccagaatttgttcgtggctataactatccctgcggctggttttgtgttccagttaaagacaatccaagccagagtcttttaacaggctatattcagacagatctgcgtgg

SEQ ID NO: 8464 - DNA, 504 bp, Cricetulus griseus
gtctcctggagcgcgcgggtcctgaagtatggcagccatcccttctagcggctcgctggtggctacccatgactactatcggcgacgcctgggctcctcctcgtccaacaacagttcctgcggaagtgcagagtaccccggggacgccgtgccccaccccccgggtctccctaaggccgaccctggccactggtggaccagcttttttttcgggaagtccaccctcccattcatgaccacagtgttggagtctcctgagcactcggcagaatccctgcaggcctccagaagcccgaccaccggtgacctggctcctgaaaccatgaagcagcagcagccagtcatccatcctgaccagaccaacacgagcgccccgtcctgacctagcagaaccacagcaaatgcgacttcagcagtgctaggccagagtcccacccatcccaccccaccctgtaaactaggaagactgcagccagcaacagacaccagcaggagctagagaga

SEQ ID NO: 8465 - DNA, 504 bp, Cricetulus griseus
gtggcgccggcaagatgggcaagtgtcgtggtctccgtactgccaggaagctccgcagtcaccggcgggaccagaaatggcatgacaaacaatacaagaaagcccacttgggcacagccctgaaggccaatcctttcggaggtgcctctcatgcgaagggaattgtactggaaaaagtaggggttgaggccaaacagccaaattctgctatccggaagtgtgtcagggttcagctcatcaagaacggcaagaagatcacagctttcgtgcccaatgatggctgcttgaacttcatcgaggaaaacgatgaagttctggttgctgggtttggtcgaaaaggtcatgccgtaggtgatattcctggagtgcgctttaaggttgttaaagtagccaacgtgtcccttttggccctgtacaaaggcaagaaggagagaccaagatcctaaattttgacagtggaaacacagtaataaatttcatattactagaaaaaaaaaaaaaaaa

SEQ ID NO: 8466 - DNA, 504 bp, Cricetulus griseus
tctgcaccggcctttgggccggaggctctcgccccagactgggaaaaccgggaagtctccacagggaccacgatcatggctgtgcagtttaatggaggcgtggttctaggagcagactcgagaacaaccactgggtcctacattgccaatcgggtgactgacaagctgacgcctatccatgaccggatcttctgctgccgctcaggctcagccgctgatacccaagcagtagctgatgctgtcacttaccagctggggttccacagtatcgagctgaatgagcctccgctagtacacacagccgccagtctctttaaggagatgtgttaccgatacagagaagatctgatggcaggaatcatcattgcaggctgggaccctcaagaaggagggcaggtgtactcagttcccagtggggggtatgatggtaaggcagtcgtttgccattggaggctctgggagctcatatatctatggctatgttgatgctacctatcaggaagg

SEQ ID NO: 8467 - DNA, 504 bp, Cricetulus griseus
atatacagaagacaatgtctggaagcttctactttgtaattgttggccaccatgacaatccagtttttgaaatggagtttttgccagctgggaaagcagaacccaaagatgaacatcgccacctgaaccagttcatagctcacgccgctctggacctggttgacgaaaacatgtggctctccaacaacatgtacttgaaaactgtggacaaattcaatgagtggtttgtgtcagcttttgtcactgctggacacatgagattcatcatgcttcatgacatgaggcaagaagatggaatcaagaacttcttcactgatgtctatgacttatacatcaagtttgccatgaatcccttttatgaacccaattctcctattcgatccagtgcatttgagagaaaagttcagtttcttggaaagaacatcttgtaagctaaatgcagaaaacctgagaatcacagtggggtatgctcaggagtatatgcattgtgagtagcttgataaa

SEQ ID NO: 8468 - DNA, 504 bp, Cricetulus griseus
gaggcaccaggatcatctacgaccgaaagttcctgctgcagtgcaagaactcacccattgcccggacacctccctgttgcctccctcagattcccggggtcacaactcgcccaacagtcccaccctccaagctggagttgctgaaggaacagaagcagacagaggaagagataacagatgacgaacaatttgaaatggacatgtaatacaatggaagatgacctgtgtggagttacagaaggatcccttatgccactgttgccaccacctcttctagggtatccaagggccagctggcctcatctaatctggaagagtgaattgttggttctggacttcctttagttctgaggcagctggaccagggatagcagtgggcacttgccaagcccttagctttctctggtctatacatgttcctcccaaaccctggccctccctcagggctggcactggggaacagagtatgtcaccttctggctgcttagtaaacattcaacaaaa

SEQ ID NO: 8469 - DNA, 503 bp, Cricetulus griseus
gccagggaagcctccaggggacacccatgggcaggttggcacgagacggtacatggcccccgaggtgctggagggtgccatcaacttccagagagacgccttcctgcgaatcgacatgtacgccatggggctggtgctgtgggagcttgtttctcgttgcagggctgcagatgggccagtggatgagtacatgctgccctttgaggaggagattggccaacacccgtccctggaggacctgcaagaggtggttgtccacaagaagatgaggcctaccattaaggatcattggctgaaacatccgggcctggcccagctctgtgtgaccattgaggagtgctgggaccacgatgcagaggctcgcctctctgcaggctgcgtggaggagcgggtgtccctcatcaggaggtcggtcaacggcactacctcggactgtctagtctctctggtgacatctgtcaccaatgtggacctgccccctaaagacgtccagcatctaagcc

SEQ ID NO: 8470 - DNA, 503 bp, Cricetulus griseus
gaaggcatcatgtcagacaacgaggacaatttcgacggcgatgactttgatgatgtggaagaggacgaaggactagatgacttggaaaatgcagaggaggagggtcaggagaatgttgagattctaccctctggtgaacgaccacaggccaaccagaagcgcatcaccactccttacatgaccaagtatgagcgagcccgtgtactgggcacccgggcactccagatcgcgatgtgtgcccctgtgatggtggagctggagggggagacagaccctttgctcattgccatgaaggaactcaaggcccggaagatcccaatcatcattcgccgttacctgccagatggaagctatgaagattggggcgtggatgagctcatcatcactgactgagcaaacctaacgctttccaaaaaaaaaaaaaaaaaaaaaaaaaaaaaaaaaaaaaaaaaaaaaaaaaaaaaaaaaaaaaaaaaaaaaaaaaaaaaaaaaaaaaaaaaaaa

SEQ ID NO: 8471 - DNA, 503 bp, Cricetulus griseus
cgtgcagctgccgctcctaccatctctcggttggtttgcgtgtccccttcctgcagcatgagtggtctgcgcgtctacagcacgtcggtcaccggctctcgtgaaatcaagtcccagcagagtgaagtgacccgcatcctagatgggaagcgaatccaatacgagctagtggacatctcccaggacaacgccctgcgagatgagatgcgatccttggcaggcaaccccaaggccaccccaccccagattgtcaacggggaccagtactgtggggactatgaactcttcgtggaggccgtggaacagaacacactgcaagagttcctgaagctggcctgagtaagccctgatgctggctgtcccttgccaggccttggggctacctccctgcctggcgctgtctgatgggtatttgttagttccatcagccagagctctgccaaaggccccgcagtccccgtcctgggagcatcctagagacaattaaatgcccattccactgg

SEQ ID NO: 8472 - DNA, 503 bp, Cricetulus griseus
gagtggaggggctaatcccctcaagaagtcagagctgtgctcgtgggcaggctggctccgcttgttctgctccaaaggattaacatgtccttcaaacgcccttgcccctcacgatacaaccgcaccagctacttctaccctaccacattctcggagagctctgagcacagccatctgctggtgtctccagtgctgggtggcaagtgctgtcataggtgtggtcatcacagacaggtcccagtgaggccccactgtgcactgtgcctatctttaactccagggcagaaaagccacaatgccaccatcctgccacttacagagtggagaaacaggtctggtgacttaggcgtgacctggaggtcctcacagcccattgagccccttgctatctcaatgtcttcagtttggcggtgctagtggggttagctcagactcccaccccgagttacaggaggaggacaggcccttggtaaagctctgatcaacaaaaaaaaaaaaaaaaa

SEQ ID NO: 8473 - DNA, 502 bp, Cricetulus griseus
  modified_base (244)..(244): a, c, t, g, unknown or other
attgctgttcttttttgtacaccattctttatcctacatacatagaaaagggaagaaattctgcagtgaatgaagattcctctgcattttagcatcactttttctactgtagttggcttttgaatgaggatgacaatggaagagatgaagaatgaagctgagaccacttccatggtttctatgcctctctatgcagtcatgtatcctgttgtttaatgagctaagaacgaagttaaatttgtcngcagctcagacgctgagacgccgtctttcaaaagtttcagttgtacacttctgaagacattattttaaagacggcaaggcaataaaatgtgttcataagtgccaaccggctaattcatcaaaccaacttgatacttcagaccttcaaaactgtggcctgaaagttgtatatgttaagagatgtatttctcggtggcagtattaaactgcatttatctgtaaattttaaagtttgactgtataaattatcagtccctcc

SEQ ID NO: 8474 - DNA, 502 bp, Cricetulus griseus
actgtgtagtggtgctggacaacacggccctgaacctgatcgccacagaccgcctgcatatccagaacccatccttctcccagatcaaccagctggtgtccaccatcatgtcagccagcaccaccaccctgcgctaccctggctacatgaacaatgacctcatcggcctcatcgcctccctcattcccacccctcggctccacttcctcatgactggctatacccctctcaccacggaccagtcagtggccagtgtgaggaagacaaccgtcttggatgtcatgaggcgactgctacagcccaagaacgtgatggtgtccacaggccgggaccgtcagaccaaccactgctacatcgccatcctcaacatcatccagggggaggcggaccccacccagagtccaacaagagtctgcagaggatcaggtggccctgtcaaggaagtccccctacctgccctcagcccaccgtgtcagtgggctcatgatggccaaccacacca

SEQ ID NO: 8475 - DNA, 502 bp, Cricetulus griseus
gagggctggttcttctgcaccactttcaggaagcttgtctgggttgtccttcagcctctcttttatagcttttagacccctactcatcaatcccaaaccaattacttctctggaaatctatcaatactgtgataccgagatcatctttgacattatagtttactatgtttttggagttaaatctctagtctacatgttggcagcctccctgcttggcctggggtttgcacccaatttctgggcattttatagccgaacattacatgttcttaaagggacatgaaacatactcatattatgggcctctgaatttactgaccttcaatgtgggctaccataatgaacaccatgacttccctaacattcctggaaaaaacctgcccctggtgaggaaaatagcagctgaatattatgataaactcccccaatacaactcctggatcaaagtactgtatgtattttgtgatggatgacacagtaagtccctattcacggatgaaga

SEQ ID NO: 8476 - DNA, 502 bp, Cricetulus griseus
caggaagcagacgtaagtggtcggtactccccgtcgcgctccgctgtttactctggaaacctctcatctcccatggtccagcatcaccaccaccaccaccaccagggttatgctgggggcacggtgggctcgcctcagtatatccaccactcttatggacaagagcaccagagcctggccctggccacgtataataactccttatcccctctccacgccagccaccaagaagcctgtcgctcccctgcttcagagacgccttctccagcgcagacctttgactggatgaaagtcaaaagaaaccctcccaaaacagggaaagttggagagtatggctatgtgggtcaacccaacgcagtgcgcaccaacttcaccaccaagcagctcacggagctggagaaggagttccacttcaacaagtacctgacacgagcgcgcagggtggagatagccgcgtccctgcagctcaacgagacccaggtgaagatctggttccagaatc

SEQ ID NO: 8477 - DNA, 502 bp, Cricetulus griseus
gccgccgccatgccgtccagactgaggaagacccggaaactccggggccacgtgagccatggccacggtcgcatcggtaaacaccgcaagcatccaggaggccgcgggaatgctggaggcatgcaccaccacaggatcaacttcgacaaataccatccagggtactttgggaaagttggtatgaggcattaccacttaaagaggaaccagagtttctgccccactgtcaacctggataagttgtggacactggtcagtgagcagacacgggtcaatgctgccaagaacaagactggagctgctcccatcatcgacgttgtgcgatcgggctactacaaagttctggggaagggaaagctccctaagcaacctgtcatcgtgaaagccaaatttttcagcagaagagctgaagagaagataaagggtgttggaggtgcctgtgtcctggtggcttgaactacccaggaaggttaattaaatgctaacatttttcaagtggtct

SEQ ID NO: 8478 - DNA, 502 bp, Cricetulus griseus
ctgtggggctcctctccctgttgagtggcagcaaacgaccttcttccctccctctgctcccctcacccccctccccaccccagccactcagcagggctggcatcaagggagatgccagtggtggtttgtgattggcttaagggatggactcgtgattggctgcaggaagaaacctttttaattttaaatcttgaccaacggaaaccttttatttttatttctgactctttatttttttaaaaatttgcgccttcggtagttggcttccccggaagctctccgagctctggtgctttatttaggtcattttttaggatcgtgaagaggcccgattggctgcttaaactggaaaaggattgtgattggctggcttgtgggacatgtcttctctttgattggctgcaggtgttctgctcatatcaccaagttcttctattccgaatgcagaaacagggttagggatattgattgttatatttgaacttaagaaaaaaaaaaaaag

SEQ ID NO: 8479 - DNA, 502 bp, Cricetulus griseus
cagagacagaaacttgttctatttcctcagaatcccacactatggcagccttatttatgctgatggtcatggtgaagtgtggacagactggaataacatgtccaagttttttcagtacgggtggagatgcaccactaatgagaactcatattcacattctactttgataggcaattggaaccaggaaagatatgacctaaagaatattgtaaaacctaaacccttgccttcccagtttggacactactttgaatcaacatatgatacaagctacaacagcaaaaagccacaatcagcccatagatttaagcgagatgctcattggttccctggccatcagcctgagctggatcctcctcactacaaatgcacagaaaagtcaacttatatgagtagctactcaaagccaacaacccagccattactcttggtgcttggtatgatccaatgtgtgtgtgtgtgtgtgtgtgtgtgtgtgtgtgtgtgtgtacgtgtgtgtgtg

SEQ ID NO: 8480 - DNA, 501 bp, Cricetulus griseus
cccctgacacctggcagccgcccaacgtctacctggagaccagcatggggatcatcgtgctggagctgtactggaaacatgctccaaagacctgcaagaactttgcagagttggctcggcggggctactacaacggcaccaaattccacaggatcatcaaagacttcatgatccaaggtggtgacccaacggggacaggtcgcggtggcgcttctatctatggcaaacagtttgaagatgaacttcatccagacctgaagttcactggagctgggattcttgcaatggccaatgcagggccagacaccaatggcagccagttcttcgtgaccctcgcccccacccagtggctggatggcaaacataccatttttggccgagtgtgccagggtatagggatggtgaatcgagtgggcatggtggaaacgaactcccaggaccgccctgtagacgatgtgaagatccttaaggcgtacccttctgggtaggtgtgatgctgtc

SEQ ID NO: 8481 - DNA, 501 bp, Cricetulus griseus
atcccagccagtagagtttccaaatggagcacagatgaggtgtcagaattcattcagagcttgcctgggtgtgaagaacacggaaaggtgtttaaggatgaacaaattgatggagaagcgtttttacttatgacccagacagacattgtagaacttcggcattttgtaaacatttgttggattctctttcatgtacactttctttttttcaatactttcagaaacctttttatataactgaatttcaacctaaaccaaaatccgttgaaacctggctgagttgagcctgggactagtgtcagtcgtgttcgccctgtgccatatttggaattgcagcattagccaagtgtaactttgcgagtcacgatattgcctaactgtgtgtcatcatttgttgggactgaagaactgtaaatactatctttctttgaatccatgttttacttttgcacgcattatgagttgttaaattacttttcaccagcatctttactgttatta

SEQ ID NO: 8482 - DNA, 499 bp, Cricetulus griseus
tgccgggctcctggcgccatgggttcgcctgcactgcacgcaggaccccgtgcccgaggccgtgcgcggcgacatgcagcaactgaaccagctgggcgcgcagcagttctcagccctgacagaagtgcttttccatttcctaacagagcccaaagaggtggagcactttctggctcagctctctgaatttgccaccaccaatcagatcagtcttggccccctcaaaagcatcatgaaaagcctcctcctggttccgaatggtgcactgaagaagggcctcactgccgagcaggtgcgggctgatctcctgactctaggtcttagtgaggagaaagccacttacttttctgaaaagtggaagcagaatgccccaaccttgcacagtgggccataggtcagaccctgatgattaaccagctggttgatatggagtggcgatttggagtgacatctggaagcagtgaattagagaaagtgggaagcatatttttacagttaa

SEQ ID NO: 8483 - DNA, 499 bp, Cricetulus griseus
taagtggagaggcagaccctcattgtatctgcttggggaacaatccttttaatggcaacactgacagcctgagatttggagaagtactaatggctttcagactgggttggaaaacttcaaggagccattggagtttcctgcaggctgtgagcagtgggttccctctgatttcctggaggacagcagggagctgtttggaccctgagatgaaagcctacctggaggagaatactgaagtcaccagcagtggtagccttacccctgaaatccagttacggcttttgacccccaggtgcaagttctggtgggaaagggctgagctgtggccctacagtgatccctactgggcaatctactggccaggtggccaggcccctgtctaggtatcttttggataaccctgatgttgttagaggaaagtctgtcttggatcttgggagcgggatgtggagcaacagcaattgctgctaagatgagtggtgcatcaaagatcttggcc

SEQ ID NO: 8484 - DNA, 499 bp, Cricetulus griseus
ggatttgtgtcctacctgtttctgtgcggcgggaatggcggctcccagtcccgtgagttcagaggcgcctttcaatccgtcccagaccccagtcaccgagggcttcagccccacggtccacagcaacccagagaccttcaaggacaaatttattcgcaagacccgtgagaacccaatggtccccataggctgtctgggaacggcggctgccctctcctatggcctttactgcttccaccgcggccagagccaccgatcccagataatgatgcgcacccggatcgcagcccagggtttcacgatcgctgccctcttgctggggttagcggtatctgctatgaagtctcgagcttgagtgtatggcccggccttgaaagctccctggacatccttataaaacccaggagtaacaaagagccctgtcagacttactcccttcttttctgacagtaccctgtggtcaatgggtgaggaagtggccgaattctgtgattgattt

SEQ ID NO: 8485 - DNA, 499 bp, Cricetulus griseus
tgtaagcagtgtgggaaaagcttcacttcttccaggtcattgaagacgcatgaaaggattcacactggggagaagccctatgagtgtaagcagtgtggcaaaaccttcctttggtcttactcccttcaaagacatgaaaaaacccatagtgatggaaagccccatgtgtgcaaacagtgcgggcaggctttcccttattacagtcatcttcaagtgcatgaaaaaatacacattgatgatgagccttacaattgtaagtactgtgggaaacccttcttcaccttgaccatttgcatagacatgaagtacttcacactatgtgtgtgtgtgtgtgtgtgtgtgtgtgtgtgtgtgtgtgtgtgtgtgtgtacgtacgtatacgatgtgtgtgtgtgcgtgtgtgtgtgtgcgtgtgcgtgtgtgtgtgtgtgtgtgtgtgtgtgtgtaccccacctctgctagcgtgctctctctctctctctctctctctctctctctc

SEQ ID NO: 8486 - DNA, 498 bp, Cricetulus griseus
tttccagtatgacccaggagtgcagtgggacacagagtgtgtggccagcaccctcctccaacacatagatgtcaatggcattgacctggtggtgacttttgatgcagaaggagtcagtggtcacagcaatcatattgctttgtacagagctgtgagagccctgcactcagaaggaaagctgcctaaagggtgctctgtacttactctgaagtctgtgaatgtgctacggaagtatctctaccctctggatctgccctggtctctcctctcaccccacgatgtcctcttccagctcaccagtaaagaagtggcacaggccaagaaagccatgtcctgccaccacagtcagctcctctggttccgccacctctacgtcatcttctccagatacatgagaatcaactcactacagttcctctgaagccaagaagagttttcagatcttcagaacaaaaggcagaaacaaaccaagaagtccctggacctggctttgggctg

SEQ ID NO: 8487 - DNA, 498 bp, Cricetulus griseus
caggcccgcgcgctcctgcagcagtgtctgcacgctcacctgcaagtgcgcccagccgacggggacgccgcggctcagtgggtggagatccagagaggattagtgatctacgtgtgcttcttcaagggagcagacaaagaacttcttcccaagatggttaatacgctgttaaatgtgaaattaagtgaaacagaaaacggcaagcacgtctctatcctggatctgcctggtgacgttcttatcatccctcaagccaccctcgggggcagagtgaaaggaagaagcatgcagtatcactctaactctgggaaggaggaaggcttagaactgtattcccagttcgtgtgtctgtgtgaaaaagcgttagccgccaacaccaagtgtgccgaggcaggggtggtagtggcgcacggcacttatgggaacaggcaagtgttaaagctggacaccaatggaccatacacgcacctaattgagttctgaaagatttgttccaca

SEQ ID NO: 8488 - DNA, 498 bp, Cricetulus griseus
ggaaatcactcttcagcaaataatgtctcagattgctaatgtgaaaaaagatatggtcatcttggagaagagtgagttctcagccctcagaacagaaaatgagaaaataaaacttgaactacatcagctaaaacagcaagtgatggatgaagtcctcaaggtccggacagataccaaattaaacttcaatctagagaagagcagagtaaaagaattgtattcattgaatgagaagaagatgctgcaactcaggacagaaatggtgtctctgcacgcccagcaagacagagccctgacccagacagacaggaagatagaaaccgaggtggctggcctcaagacgatgctggaggcacacaagcttgacacgatcaaatacttagcaaggtctgtgtttacgtgcctaacagtagctcgtgggattttaccgcctgtggatataataaagtgtctatttaaagaaattcccattgtttttgccttaagagtaccagattg

SEQ ID NO: 8489 - DNA, 498 bp, Cricetulus griseus
gctctcgtgtccaggctatgagctctgtaaccactgaacaacttactgaatgaggagacctcagagtgctgagcagggacagccccctcccctctccctggctcagcccaaaggtgacacttgttctggaaggctgactaggagaagtgaggtagagccacctgggagaggacccggctctcctcttgctggtacagccgttgagccacctgcagctgaagggccttttccgccatgtcctccaggcctgttccaggtgccattgtctgagctacagagagagttgagctgctgcacccagtgaacatctacccagcgctgccatgcccttgccaggcacctggcctgctgggaagcctggatatgctgacactgtaggtgcctattcctgcaggccaagaacaccacaacctcagcaacgtgaagagcaagagccccaggttgctgaagccttgcccctcagatgtggcctgactccaaggtctgagctcccaacta

SEQ ID NO: 8490 - DNA, 497 bp, Cricetulus griseus
ggtgtcgcgagagttggcggcgcgcctcctagtgagggctgtcattatggcgagcctgggaagcgaggccgagcgggagcctctcctgggccccggctcgcccggaagcagagaatggccatgtctgcaagagaatgaccagggtgcctgtataccccggtgatccatctggcccagttcctgacagctgctgtgctagttggaatcggctatccagcctgcaatgtcatgtcctatacattatattcaaaagttctaggaccaaaccccacgggtatgtacatgggctggttatctgcttctggaagtgcagcacggattcttgggcctgtgttcatcagccatgtgtacacttacttgggcccacgatgggcattcagccttgtgtgtggaatagtggtgctcaccatttcactcatgggagccgtttacagaagacttattgccttttctgtcagatgtgggaggatccaggaataaactagcagtctctgctg

SEQ ID NO: 8491 - DNA, 497 bp, Cricetulus griseus
caacgaggcggccgagcggcagacgctaacatgcagatctttgtgaagaccctgacgggcaagaccatcactcttgaggtcgagcccagtgacaccatcgagaatgtcaaggccaagatccaagataaggaaggcattccacctgaccaacagagactgatatttgccggcaagcagctggaggatggccgcaccctgtcagactacaacatccagaaagagtccaccttgcacctggtgcttcgccttcgtggtggcatcatcgagccatcccttcgtcagcttgcccagaagtacaactgtgacaagatgatctgccgcaagtgctacgcacgcctgcacccccgtgcggtcaactgtcgcaagaagaagtgtggccacaccaacaacctgcgccccaagaagaaggtcaaataaagctttggccataccaggcccatgaccctgggaccaaataaagtccccttccatcgaacaaaaaaaaaaaaaaaaaaaaa

SEQ ID NO: 8492 - DNA, 496 bp, Cricetulus griseus
ttccggccgccggcttggggacgagtgatggctaaacaccatccagatttgattttctgccgcaagcaggctggtgttgctatcggaagactgtgtgaaaaatgtgatggcaaatgtgtgatttgtgactcctatgtgcgaccctgcaccctggttcgcatatgtgatgagtgtaactatggatcttaccagggccggtgtgtgatctgtggaggccccggagtctccgatgcctactattgtaaagaatgcaccattcaggagaaggatagagacggttgcccaaagattgtcaatttggggagctctaagacagacctgttctatgaacgcaaaaaatatggcttcaagaagaggtgatgggtgagcagctccttctcccccatcaagctgctgcagctgccagaaaagacacctactaccaccagcagaaagggaccgaagcccagcgtgtcaccagaatagcctgctagagctactgtcttggccccctgcc

SEQ ID NO: 8493 - DNA, 496 bp, Cricetulus griseus
aaagaaacagaaaatgattaagcttaagtcttttgaaatctaaaatccttagaggtggtctgaagacattcacagactagaaattagtgtgcttgaagcaaaacctctcttctaatcattagagaacatcacttagcttgcagcagttccattatagaatcaggtctgttcttaagtttacattgtaatcactgtcataacggctattaatggctttagctcccatgttgctttagcctgtgaaaagctcataatccttcaaacttaacataaatgtgctgttataagaatcgcccccttgtgtgccattttaaagaacatttctttgatggcacttggtgtatccactctgttaatgaaccgtgttcaaaggcttttgccttaataatggtaagagatggctttgtctttcagaatattgtctgccttccctcttctgtcttatttccttaaagggacccttctgtagttcaaattttacgagttccaaatttag

SEQ ID NO: 8494 - DNA, 496 bp, Cricetulus griseus
caagaaggagagcaaaatcctctctgaggaaaccatcgccttgattgaatcccacctggagaataagaaccttcccggagccgtttctgcaatcagcgatgctctgagaaacgtcgacagagccccactaaacatcgcggtgacgggagaaacaggggcgggcaaatccagctttatcaatgccctgaaaggagtgtgggatgaaaagaaggcgcagccccgactggggtgacagagacaaccatgaagagaactccatacacacacccaaagcttcccacagtcacaatatgggacctgcctggcattgggtccacttccttcccacttcaaaactacctaacggaaatgaagtttgctgagtacgactttttcgttatcatttcagctacccgcttcaaagacactgatgcacatctggccaaagccatcgccaagatgaatacaaagttctactttgtccgaaccaagatagatcatgacttagataatgaac

SEQ ID NO: 8495 - DNA, 496 bp, Cricetulus griseus
atgcttcgacacttccacacccacccccatacccctcggaggtcagggggagtctgctggcatcaccctaagaagctatgtgcgtgcccaaggccggcctccctgacccaggaccagcgcccagcacggtggcaccagccccctcctgctggacagagccggctggccagcactacttctccagcctggccacagccacctgcccacccacctcaccttctaatggcgctggagcatcgtcgtcatctgggtcatcatcctcggccacatccatgcccccgcgcccactcagtgtgcgcagccgcagcaacagcgcagagcacctgctggaggctgcgtctggagccaccgaagagcccacggaggccacgctgggccgcgctcgtgcagtggagaaccagtactccttttactagcagctgtgcccattacccaccggtgccatgctcatcacagcaggccaagaacacctgtggtctgtcccgcccaacaacag

SEQ ID NO: 8496 - DNA, 496 bp, Cricetulus griseus
gaccgaagccaggtggaggaaggaacgaatcgaacgagagcagtggcttcgggaacaggctcaacagggaaagattgcagctgaagaagaggacattggggaagacagtcaatttatgatgctagccaagaaagttacagccaaagcgctacagaagactgccaatcgtgctgtggttgtgtatcgaagtctgtgcccagtaacccttttgaagccatcagaccaggaaatgctcaccagctgaagactggctccttgctaaaccagcccaaggctgtgcttcagaaactcgctgccctgtcggacctcaaccccagtgctccccggaactcgagaaactttgtctttcatacagtttctcccaccaaggccagaggcgagcaaaggaatcatctaagcctcaggtgagaagaaaggggccatcgttaatgatgtcaccatcacctaaacgactaaagacagataataatagcagtccaggaccaaagcgaagcat

SEQ ID NO: 8497 - DNA, 496 bp, Cricetulus griseus
atgatagcgctggtgtggtcttctccatctctatttcgctgccacccttcttttggcgtcaagccaaagctgaggaggaggtgctgacctgtttggtgaacacggaccacgtcctctatacagtctactccacgggggcgctttctatttacccaccctgctcctcatcgccctctatggccgtatctacgtggaagcccgctctcggattttgaaacagacacccaacaagaccggcaagcgcttgacccgagcccagctgataacagactcgcctggttccacgacctcggtcacctccattaactcccgggctccagacctgcccagcgagtccgggtctccagtgtatgtgaaccaagtcaaagtaagagtctcagacgccctgctggagaagaagaaactcatggccgctagggagcgcaaagccaccaagaccctagggatcattttaggagcctttattgtgtgctggttgcccttcttcatcatctcc

SEQ ID NO: 8498 - DNA, 495 bp, Cricetulus griseus
  modified_base (477)..(477): a, c, t, g, unknown or other
ctggccttggctgatgcacttctgtgtgtgtactttgaaccaatagtatataaataaataaatatatatatatatcccctgacacctgcgagaatcttgaacctgtaagagtgttgccattgttacattcagatctgattcagatctgtattcagtttgtgtttcgtgatgttgttttgttatgttgtttttcttttagaactatatagtgttgagaaagaaatcaaatgtaaatgtctggttttcatataatgtttaaaaaatttaaaaccattgaggaggaggctggtgtctgtcctcgcctcctcccttgtaaattgctgttgtgttgataagctgtgcatggctcgtgtttagcggtcattattgtgtctgtttgtgaaatttttattacgaggaaaatcccgtagatgcacttattgaatatgtaattagggtctaagtcaaggccaggaggcccgaaatgcccattttttnttttttgcagaactaatt

SEQ ID NO: 8499 - DNA, 495 bp, Cricetulus griseus
tcaagaatgtgaggaacatctacttctaaacctggcagtttcgaatttgtgcttcctgatcccctgccattctgggcacacactgccgcacatggggaaagccccggcaatgggacttgtaaagttcttgttggactccactccacaggcttgtacagtgagacgcttttaaacatccttctcctcgtgcaagggtgcaagttgttttcccaagggacgctgtcctccatggtcaggacagtgcccagtggtattgttacaagtatcctgggcatggatcacggctattgcacttactttgcctgaatctgtgttttaccagcttcagatggaaagacagaaacacaagtgtgcctttggcaaacctcactttttgccagttgaagagccattctggaagtattttctgacttcaaagatgaacattttggttcttggttttcctctggtggcttttatcttctgctgtgggcaaatgaggaaaacgcagacctt

SEQ ID NO: 8500 - DNA, 495 bp, Cricetulus griseus
agaacctgctagaccatctggaggagaagatgccattagaagatgaggtcgtgccccctcaggccctgagtgagcagaacgatgaggcaccgggggcagtgctcaactccctccctgaggtgcctccctggactggggaggtcaacccaccgcagagagaaggcagtacccttgggcgcagctcctgggagccctccgatagatctgctctcttgaaaagcaaactgagggctctgctggctgcccctcggagcctacggaggtccagctgcttcgggggtaggatcgacaggattggggcccagagcggactagggtgcaacagcttccggtaccgaagataacagccagggaggaaaagcaagccagatttgctggggcagattgcagaagaccctaagcccctatggtgtgtcatgcagcttggtctcatcgtcactgaggtgtggcgaacacctgctggacgctgctgcttcctgtcttcatctatcacga

SEQ ID NO: 8501 - DNA, 495 bp, Cricetulus griseus
attataaacaagtaataaaaatacaaaggagaattcagacactctgaccacctgcaagcttgtcaggaagcagctgagtgtaagcctcagcgataccttgtgtaaactagcaggccaactgttgtcaggtgactactgccatcatgccatgatggaggcggtcggctatttgtataggtcacttgatttaagggcaacttacctggggtcttcccatgcttcaatccagggaatactgcaccttctaagggaaatccagaggttccggagcaggaggtgcaggtctcaaggcatgcgccagctacaccccgaaagttctaggaatggttctttattatgggaaaacttgtctaaattaaactgccgaagcgctcagagctctgacactgtgaacactgcaatgtgtatgaatataaggaagttccagagagctaaaagcacagtgctttcacctcctccagtttcagataaaccaaaatatgctcctggcaaagg

SEQ ID NO: 8502 - DNA, 494 bp, Cricetulus griseus
agaccagtagttattgatggtagcaatgtggcaatgagccatggaaacaaagaagtattctcctgccgaggaataaaattggcagtggattggtttttggaaagaggccacaaagatattacagtttttgttcctgcttggagaaaagagcaatcccgaccagatgctcttatcacagaccaggaaattctacggaaactagagaaggaaaaaatcctggtattcacaccatcacggcgtgtccagggcagacgagtggtgtgctatgacgaccggttcatcgtgaagctggcttttgaatctgatggtataattgtgtccaatgataactacagagatttggcaaatgagaaaccagaatggaagaagttacatagatgaacggttgttaatgtattcccttgtcaatgacaagttcatgccccctgatgaccctcttggaagacatggcccaagtctggacaatttctgaggaagaaaccattgttcctgag

SEQ ID NO: 8503 - DNA, 494 bp, Cricetulus griseus
tttttaggacttatttacacagaatcataactattgaaactgaccatttggaaactgaagtttctgcttacttcgtttgttaccatcattggttggaatataagtctatgttttcttgtgcattctttattatttcaagaaaagtactactcatgagaattctcttccaaaatcatgtttcttgtatttttgatgaaggagaaatactgtaatgatcactgtttacactatgtacactttaggccagccctttgtagcgttatataaaactgaaggccttttgtgctttcggtttgtataaaaaagctttgagattaaaggaaaaaaatttttacactgtggttataaatttcaagttttcttaaagcttttgtagacttgtaacaaagtctttaaattttagttgaatttttgtaaattgttttgtatattttatttaatgtactcctaacaactgatgtatctggctttaaaacatcagaatcagtttgttg

SEQ ID NO: 8504 - DNA, 494 bp, Cricetulus griseus
tcccgagccagccaacaagaagcctgcactgtcagcaccatgaatgccagcgctgtcctccttttctgcctcatcctgctgagtctgagtgggactcaaggaatccctttatcaagaacagtccgctgctcctgcatcaaaattgatgaccgacctgtaaaaccgagggccttgggaaaactggaaattattcctgcaagtcaatcctgcccacgggttgagatcattgtcacaatgaaaaggactgaagagaagagatgtctgaatccagagtctgaggccatcaagaatttattgaaagcagttagccaaagaaggtctaaaagagcctcttaaccagagggaagccgatcacagcagtgctgtggctgacagtaaggcagtggagagcccaatctctccatcacttctttactcagcctatggccagccctaattgtccccgggttccccctgaaaggtgatcaaccatggtcacatcagctgctattcct

SEQ ID NO: 8505 - DNA, 494 bp, Cricetulus griseus
ctagaatggaagcgttatccatgtcaccagctgacttatatggtatttctgatgtcaacatgctatctaatcgcccctgtgaatgtgatgacaaccagcaatgataacatgggggacactgataatccaagacttatgagcatcaatcttgaaaatgcctcatgtaactcaaggttagaccaaagagacctgagacaactacatcagatgtcttctgccaatatgtcagcaggcaccagttctaaattctgtttttgttgggcacagttcagatgcatttgatagatcaaacttcaattgtgtagaaaacggcctagataaatgagcctggaccatacaaatgatgcaaatagtcataattttgttccgagcagtcaatattcaagtattgacactctgcaaagtgagcaattgagtgattcctttgcatatggttttcttaaatgtaacctgtaggatttaaattttttttttttttctattttattttattt

SEQ ID NO: 8506 - DNA, 494 bp, Cricetulus griseus
aagagatggaacttatatactgggaaaaaatacaccaagtttgatggacagccacccacaccacgggacaaactctcctgctgggtgtataaggacagattaatatattttggtggttatgggtacaggaggcacagtgaacttcaagactgttttgatgtccatgatgcatcttgggaagagcagatattctgggggtggcacaatgatgtccatgtgtttgacacaaagacaaggacttggtctcaaccagaattaaaggtggagttccgccacagccacgagccgcgcattcatgtgcagttctgggaaataaggggtatatctttggcggacgcgttttgcaaactaggatgaatgacttacactatctaaacttagatacctggacttggtctggaaggatttctgttaatggagaaagccccaaacatcggtcatggcacacgctgacagcaatagctagacgataagcttttcctatttggtggact

SEQ ID NO: 8507 - DNA, 494 bp, Cricetulus griseus
cccaggccattattcccattgctgatcagctatacaatgactacagcagcccctccacctggcaggtgttggagggggctgagactaccctgaaggggtgtcgtaagcggggtctgaggctggctgtgatctccaattttgaccgacgactagaggatatactagtaggccttggccttcgggaacattttgattttgttttgacttctgaggctgcgggctgtcctaaaccagacccacgaatttttcataaggcattgcaacttgcttgtgtagaacctgcagtagcagctcatgttggggatagttacccctgtgattaccagggggctcgggctgtgggcatgcacagcttcctggtggtaggctcagagcctttagactcctcagtcagagactctgtacccaaagaacatattctgccctccctgtcccatctcctgcctgcccttgaccttttggagcctcaagcccctgtgtcataagtctgatga

SEQ ID NO: 8508 - DNA, 493 bp, Cricetulus griseus
ccagtgcagatgatgtgtcggaagacacttttcacctcgcctatgtgaatgaagtacaggcacaggtgttggtgatgccctatgagggcatggagctgagcatggtggtcctgctcccagatgatggtgtggacctcagcaagctggaaaacagtctcacttttgagaagttaacagcctggaccagaccagactttatgaagagcactgatgttgaggttttccttccaaaatttaaactgcaagaggattatgacatggagtccgtgtttcagcagttggggatggtggatgtcttccacagggacaaggctgacttgtcgggaatgtctccagagagagacctgtgcgtgtccaagtttgtccacaagagtgttgtggaggagcaagccagtgtgcagcattcctctgtggcctctgcatcaggtcctgcctccaggttctgccctgctcgagttccagttctgacttccttcagtaatgaatagtgatg

SEQ ID NO: 8509 - DNA, 493 bp, Cricetulus griseus
ggtatctctcctgctttcctctgtgttttggtacctagtgagaatcattactgacaacaaagatggacctatacagaagtacttgctcatcttcggagtgttgctctctgtctgtatccaagaactgttcaggcttgcatattacagactgttaaaaaagccagtgagggtttgaaaagcataaaccctgaggagacaacaccctcaatgcgactgttggcctatgtttctggcttgggctttggaatcatgagcggagtgttttcctttgtgaacaccctgtctgactccttggggccaggcacagtgggcattcatggggattctccacagttcttccttaattcagctttcatgacactggttatcatactgctgcatgtgttctggggcattgtgttttttgatggctgtgagaagaaaaagtggtacatcctccttatagttctcctgactcacctgctggtatcaacccagaccttcctaagtcctt

SEQ ID NO: 8510 - DNA, 493 bp, Cricetulus griseus
ttccgtcacctcacatttgccataattaactttttttactaagaatttatgtggctttgtgtcttcttggagcagtttcaatatacaacaatgtaacaatgtactttcaaataaccagattcaaaacatgaagatcacttttgatatgaattaaatgtggacaaacaaaaccccttatgtgataagatatggggggaaatacattctttacagagaagccaaggaaggagttttttcaatcaaatttcttctaacaaaagacaatggaatatttatgtacagtatctggaattcattttctacctttcctaatatgtgggttcagtacgggaattgattgtatcatttctgtaaaggtgaagaaatgttttataagcaacaggtaacttgtgaatgaaagaaataatttactagaaacgcttgatgataattgacatttaggtatattgttatatatgaatgattgtatttatgtatttatttgttcaaaatt

SEQ ID NO: 8511 - DNA, 493 bp, Cricetulus griseus
tgtagccatggcggccatgagcctgctgcagcgggcttcggtctccgcgttgacagcgctgtctggccgccgtgctggcactagactcggagtcggaagttttctcacacggacctttccgaagattgtcgctcctgtgcggcacagtggggaccatggcaagagactgtttgtcatcaagtcttcttcatactatgacgatcgctttttaaagttactgagattctacattttgttgactgggattccagttgtaattggcataacgatggtgaatatatttattggtgaagctgaacttgcagaaatcccagaaggctacatcccagaacactgggagtattacaagcatccaatatcaagatggattgcccgaactttctatgattgccccgaaaagaattatagaaaaaaccataggctatcctccagattgaatctgaaaaggctagaattacggaagaaggagcttgaagttcgaagactgatgcgt

SEQ ID NO: 8512 - DNA, 493 bp, Cricetulus griseus
  modified_base (266)..(266): a, c, t, g, unknown or other
tagtccgaaggacagatgagccaggcgtttttattcttgaccttctggaaggggggctggcagcgcaggacggcaggctcaacagcaatgaccgggtactggccatcaacggacacgacctgaagcatgggaccccagagctcgctgcccagatcattcaggccagcggagagagggtgaatttgacaattgccagacccgggaaggcccagcccagcaatggcacccgtgaagcaggagcacacagcatcagcttaacttttttnttttttactgtgtacaaacaatcgcctgtgaagcaatttgatactgaagtgcaattgatatgaaacaatgtttcctgctccccaaaacaattttgtaatcaaccttgctactttttaaagactttgtaaaacttgtcatttctttggggagtggccattcaacaatatctcaactgccactttgttatacataaaatatgtccaacctagtggtctggtgaatattt

SEQ ID NO: 8513 - DNA, 493 bp, Cricetulus griseus
atcttggccatgcagttgactgtgctcatcttccgtctgcctttctgtagcagtaaggaaatcagcctgttctactgcgatgtccctccctgtcatgaggctggcctgtgcagacacccatgtccacgaggccactctgtttgtggtcagtgtcatcgtcctcaccattcccctttcctcctcatcactctgtcctatgtcttcatcctggatgccatcctgaagatccgctccagctggaggggaggcacaaagccttctccacctgcccccctcccacgtgactgtggtcctcctgcagtatggctgcacgagtctcatctacttgtgtcccagctccagttattctcctgagcggggtcaagtagtttctgtggtttacacattcatcacccctatgctgaaccccttgatctatagcatgcggaacagagaactcaaggatgctttgaggaaggcggtcaggaggttcctcctgcttgaaaaacaatga

SEQ ID NO: 8514 - DNA, 493 bp, Cricetulus griseus
aggctgcgcggcgagcacagagcggatgctgagggcgcagttggcccggtgcacggtccccatggccacgcgcgcctgtgcgtcgcgggacagcgcgggatcggcggccggagggccagtggaggccgctatccgcgccaagttggagcaagccctgagccccgaggtactggagctgcgcaacgagagcggcggccacgccgtcccagcaggcagcgagacgcatttccgtgtggcggtggtgagctctcggttcgaggggatgagccctctgcaacggcaccggctggttcacgcggcgctgtcggaggagctggctgggccggtacacgcgctggccatccaggcgaagacccccgcccagtggagggagaacccacagctggacacgagccccccctgccctaggtggaagcaagaaactcgagggacttcctgatacccagactgggaaacagcgatcagaatgggccaaattagaataaacctacta

SEQ ID NO: 8515 - DNA, 492 bp, Cricetulus griseus
aatggcgaggtgcgcacctccaggctgctgagtgagcgcgatgctcccaagcacaggctgctgctggtggtcaaggacaatggcgatcctcctaggtctgccactgtcactcttcaagtgctggtggtggatggcttctctcagccctacctgcctctgcctgaggtggtgcgcgaccctgagcgcagcaatgagaacttactcacgctgtacttggtcattgccctggcatctgtgtcttcgctcttcctcttgtctgtgctgctgttcgtgggtgtgaggctgtgcaggagggccagggcggcctctctgagtggctgctctgtgcccgagggacactttcctggacacctggtggatttcagcggtgaggggaccctgtcccagagctaccagtatgaggtgtgtttgaggggagactctgggactggtgagttctaacttcttcaaacccatggtacccaacttgttgcttcaggatcctgggagaga

SEQ ID NO: 8516 - DNA, 492 bp, Cricetulus griseus
gaactcattcactgtggactgcagcaaagcaggcaccaacatgatgatggtgggtggtgcacgggcccaagacaccctgtgaagaaggtctatgtgaagcacatgggaaaccgggtatacaacgtcacctacactgtcaaggaaaagagactacatcctcattgtcaaatggggtgacgaaagtgtccccggaagccccttcaaggtcaatgtgccctgaatcccagaagtgcctcccccagcccagggcccccacttcctgccaaactcacacccacacaaatgtgccatatccctatgcacactcacagaatcagacacgaaaacacctgccttaggtgtgaagtgagtggcacaacctcccaccccaccgtgcacttgaggggtggagggccttttatctgtctgggatcagtgtccctcagatgtgacctgagggcagactggagtcagactcagggcagagactgtgatataaggggttagacaggg

SEQ ID NO: 8517 - DNA, 492 bp, Cricetulus griseus
ggtgctgcactcgggacatctacagggctggaggcggcgacgctgcagaagctagcgcttcggcggaagaaagtgctgggaaccgaggagatggagctgtacgagcttgcactggctgcaggcgccgccatcgaccctgatgtgttcaagatcctggtggacttgctgaatctgaacgtggctcccctggccgtcttccagatactgaagtccatgtgtgccgggcagcggttggcgagcgatccccaggactccgtatccatatctctgtccacaacagagactagaggaagaaacaggggtggtcccactcttggcagtgtgcccatagtggcagaacgtggaagccgtgaaggacccatccagaggatgccacgccagcccagtgctactaggctgcccaaggcaggacctgggaaaagtaactcccggagcagtacataggccagaacagacactgcactctttttttactattaaaaaatttaattt

SEQ ID NO: 8518 - DNA, 492 bp, Cricetulus griseus
cacatgctccaagaagagatctccccctcctacacgaccaccaccaccatcacagcgcctccctccggaagcctgcagaatggacgggagaagcagaagacggtgcccctctacctggaagaagacatccgccctgaaatgaaagaagatatacacgaccccagctaccaggatgaggaggggcccccgcccaagctggagtacgtctggagaaacatcatcctcatggccctgctgcacttgggggccctgtatgggatcacactggttccgtcctgcaagatctacacctgcctcttcgggattatgtactatgtcatcagtgccttgggcatcaccgccggggcgcaccgcctgtggagccaccgaacttacaaggctcggctcgcccctgacgggtcttcctcatcattgccaacaccatggcttttcagtaatgacgtgtatgaatgggcacacacacacacacacacacacacacacacacacact

SEQ ID NO: 8519 - DNA, 492 bp, Cricetulus griseus
gggccaaggactcaacacactgtgggatccaagtactccaatgctgttggcatcactgactgccaactcatgtaataaggttcttctgacttcacatgacaatagttagaatcctactgtgatgaccatattttaaaaacaacattatatttactaagtcaaaagctaattttcattcatttccaccattttattacatgaatataaggtgatggtttaacaatgagaacatatggtttgcatttcattatatgtatgtaatatgtaggagaaccaaactcaataggcgactgagtgttactacatgaacactggattgtattgccttttgtcagtaagttcctccatttaataaatactgaagaacacaaataaaaaaaaaaaaaaaaaaaaaaaaaaaaaaaaaaaaaaaaaaaaaaaaaaaaaaaaaaaaaaaaaaaaaaaaaaaaaaaaaaaaaaaaaaaaaaaaaaaaaaaaaaaaaaaaaaaaaaa

SEQ ID NO: 8520 - DNA, 491 bp, Cricetulus griseus
ccatccagcagatgccatctgtcatctaagctggtcattactaataaacaaggagactgtctcctgacagccagcactgtgtgtaatcactcaggaaccagcggatctgcaaagacctacaatcaaacgcaaatctccattttccttttacaaaagtctaccctcacctccaggataaacatattaaaaacaatataaaaaatgttgaaaatcatgtactaatgaagtctcattgtatattagattacaatagaatggaaagaaacatttagctagtaatgtatctggaaactctgaatgtcctatgtgagtattagattttgatagcatgctttaaagactgatgaatataaaagcagaagttttgagtttcttgctgctttcaaaactgtcctagttgagcgatacaaatgatcacaacttttctaaatcattaaactatttggtttggtggagtgaggcatggaacagtctggcatcctctgatttgt

SEQ ID NO: 8521 - DNA, 491 bp, Cricetulus griseus
acactatctcttgctgtgttagctttgttgctatcggtgtttagtggtgtgtttcctgctgatccaagtctgtccctggacttactacgtgtattgcttgctgccagtacccatatggtatgcagttctaagagaatatcaagttattcaagacctggttgcatcactgttgacttttcctccgagccatttcgtggcccacttacttgtctttatcttgggaattgaagtactggtgttaagtttcttctaccgctacatgctgacagctggactgattgtgtttgcgggttggccatttctcactcagccgtggacccaagcaaagatcacctacctgagttgggctctcttctctttgcttctggcagtgttcccactgatgcctgttgtgggtagaaagccagatctccctctagtaataggtgcaggcttgctggttcttctgttggccctggctattgtaacagttctcacaaaaagaaaaatta

SEQ ID NO: 8522 - DNA, 491 bp, Cricetulus griseus
tcctatttggaatctctactggcatccatggcgtggtcaggagcaggcacactggtggtttcactcttctctaagattacagcttcagcagccatggtcaaagctggaggggcagtctctggcaccattctagctggtacacaggggctcaatctgttagcccagactgccctgggctctggagcatctgcacttggaagccaaggctactgttgctgtgcttggtggagccatgactgtagctgctgtgccccctgtgctaagtgctgtgggcttcactgggccaggaattgttgcctcctctctagcagctaagatgatgtccttgtcagctattgcgaatgggggcggagttgcggctggtggcttggtggccactctgcagtcagtgggagctgctggactttccatgcaatctcaagtcctcttgggctctgcaggaactgcccttgttgctagtgtgatgggcatctgtgggagttccaaccctt

SEQ ID NO: 8523 - DNA, 491 bp, Cricetulus griseus
gagaaagaagagattctttttctgaaaatgagaagcaaagaacccgaaatcaggacagtgaaagtgttagaagaaaacatcgctccaagtcaagggaaaggagtagaaaacactcaggccataaaagcgatgatgacaggtatcagaatggtgccgagagacggtgggaaaaatctaccagatactctgaacattctagagaatcaaagagaaatcaggaccggaggagagaaaagtctccaacaagacaaaaataattctaatgacaactgagtatgccttacattcacttgcgaagtctttttttacatggatggattttatagagaattcttgtataaagtacctgtttgtatctgtaaattttaagatgttttctttttgacatgttttataattgacacatctcaaggtctgtaaaatcatcaagaaaagggtctcaacagaggggtaagtcttatgttttgtgaataaaaagaaacaaatgctca

SEQ ID NO: 8524 - DNA, 491 bp, Cricetulus griseus
  modified_base (312)..(312): a, c, t, g, unknown or other
cagagtatgaagcccagtgcaatcacgtggtaataaacgagatcactcaggaggaggagcgcatcccgtttactacctgtggaaagtgtatccggatcacgctgtgtgcaagtgctgtcttattttggatcctgctcatcatcgcgtctgtgatcggcatcatcgtctacaggctgtcggtgttcattgtgttctctacaaccctccccaagaaccccaatgggaccgacccaatccagaaatacctgacaccacagatggccacatccatcacagcttctatcatcagcttcatcatcatcatgatcctanaacactatctatgagagaggtcagtgctgggtgaagaagggaggacctgcctcacactgtttgggatggggcctctgctgactagattggtgtgaaatgcctgggtgcccaggagtcaatccaaggaaagtgaacgggtttagagactgtcttctcagggccatggttttaaatgccca

SEQ ID NO: 8525 - DNA, 491 bp, Cricetulus griseus
atgtttgtcctcatcatgaactgcccctcatgatctttgccaactggagaggcttctctggtggcatgaaggacatgtatgagcagatgctgaagtttggagcctacatcgtggatggcctccggcagtacaagcaaccaattcttatctacatcccaccctatgctgagctacgtgggggctcgtgggttgtcctcgactccaccatcaaccccctgtgcatagagatgtacgctgacaaggagagcagggggggcgttctggagccagagggcactgtggagattaagttccgcaagaaagatctggtgaagaccatgagacggttagacccagtgtgcaagaagctcgtgggacaggctggggacagcccagctccctgacaaggaccgcaaggagctggagggccagctgaaggcccgagaggacctgctgttccccatcctaccaccaggtggcagtgcaatttgccgactgcatgacacacccgg

SEQ ID NO: 8526 - DNA, 490 bp, Cricetulus griseus
gaacatgctgttttggacacttagatgcaaatgccctgttgtttgttttaatgccaaggactttgtgagaacagtactacagttctttggtgaagatgatagttggaaacatgttgcaggttttgtaggactagatcccagagttgctgcatggctaatagatcctagtgacactgcaccttcatttgaagatttagtagcaaaacacctagaaaagtccatcatagtcaaaccaagcagcacatttggtgatacttcaggaaatattgtgaatcagaatgtgtgtttgaacctgaggatactctacgacctcacgatggatctctgttccaagttgaaggcttatggcttatggcaactattttgtactttggagcttcctttgataccaatttggcagtgatggaaaaccataagattccagttgaacaaagaagaaatagagaggactcggcactccttggggctcgcctcaaagaactggagcaag

SEQ ID NO: 8527 - DNA, 490 bp, Cricetulus griseus
ctgaatacaacccaacacaaggtgtgaggatcctagagtttgagaacccacatgtcaccagcaacaacaaaaggcacaggctgtgaatttgagctctgggattgtggtggtgactctaagtttgagtcctgctggccagccctgatgaaggatgctcatggagtggtgatcgtcttcaatgctgacatcccaagccacctaaaggaaatcgaaatgtggtattcctgctttgtccagcagcagttcctccaagacagtcactgcatgcttgtggcccaccacaaaccgggctctggaggagacaagggcagcctggctttgtctcccccttgaacaagctgaagctggtgcactcgaacctggaggaagaccccgaggaggtccgggtggaattcatcaagtatttaaaaagcatcatcagctccttgtcggagagcagagaccgggaggagatgctcatcatcacctagtgtccccgtgcagccgcctc

SEQ ID NO: 8528 - DNA, 490 bp, Cricetulus griseus
ggcgggacatggaaaagaaaatggagttgctgcaggtcctgaggcgcggactgcaccaggtcaccggccacggcggcctgcggggcttcctaaaggttttcttcagggcaaatgatgtaaagcttggtaccttggtgggagaagacaaatacggaaacaaatactatgaggacaacaagcaattttttggccgtcaccgatgggtcatctataccacagaaatgaatggcaaaaacacattctgggatgtggatggaagcatggtgcctcctgaatggcaccgttggcttcactgcatgactgacgaccctccaacaacaaagccacctattgctcataaattcatctgggcaaaccacaaattcaacgtgagtggcactccagagcaatatgttccttattccaccacgagaaagaagattcatgaatgggtcccaccttctacaccttacaagtgacaacagtggaagacagttctagcacatgcagg

SEQ ID NO: 8529 - DNA, 490 bp, Cricetulus griseus
ttccttgagtttcgatgcccaggagttccctcgggtcttgaatctttggaagagacaccagacccacggctaattaagacacatctgcctctgtccttgctccctcagagtctgctggatcagaagatcaaggtgatctacgttgcccgaaatccaaaggatgtggctgtctcctattataacttctacaacatggccaaggtgcaccctgatccaaatacctgggatatcttcctggagaacttcatggctgggaaagtgtcctatgggtcgtggtaccagcacgtgaaggagtggtgggaactgacacaaactcaccctgttctctatctcttctatgaagacatgaaggagaatcccaaaagggagatcaagaaggtactagagtttttgggacgctctctgcctgaggagactgtggagctgaaaaaaaaaaaaaaaaaaaaaaaaaaaaaaaaaaaaaaaaaaaaaaaaaaaaaaaaaaaaaaaa

SEQ ID NO: 8530 - DNA, 490 bp, Cricetulus griseus
ttcggttcgtgcggtggatgtggtgatcccggacgccggctctctcgttttcatcgggtagacacctccactgcaaagatggtcaacgtacctaaaacccgaaggactttctgtaagaaatgtggcaagcatcagcctcacaaagtgacccagtataagaagggcaaggattccctgtatgcccaaggaaagcggcgctacgatcggaagcagagtggttacggtgggcagacaaagccaattttccgaaagaaggccaaaaccaccaagaagattgtgctgaggcttgagtgtgtggagcccaactgcagatcgaagaggatgctggccattaagaggtgcaagcattttgaactgggaggagataagaagagaaagggccaagtgatccagttctaaaacttgtgtcttccaagaggaaaattcggaagcagtagaaaaatgaccttttagaaaataagttattgttcctgattaaccaaaaaaaaaa

SEQ ID NO: 8531 - DNA, 490 bp, Cricetulus griseus
cttatccaatctattcatattgatgctactttatacactgacagtgactttcatcccagttgcaaagttactgcaatgaattgctttctgctggaattacgagttattttacacgagtacagtaatgagcgtctaagtgaaacagtaagaaacgtgatcttcctagcaaacagcagtctgtcttctaacaagaatataacagaatatggctgcaaggagtgtgaggaactggaggagaaagacatcaaggaatttttgcagagttttatacggattgtacaaatgttcatcaacacttcttgactgcggttgatcctcttctgggtttctgttattcgcacacctctgctgtgcggaggcagcacagttctgtgtgtttgagatctgctgggaaaacaaagctgcctaagtggaagcccatgagcctcttggatcagatgaactctcagagatgacgggataaaaggagctcttctcagatttggttttt

SEQ ID NO: 8532 - DNA, 490 bp, Cricetulus griseus
ctggccacacagctggactcagccttcatccggaaggagccctttggcctggttgctcatcattgtgccctggaattatcccttgaacctgacgctcgtgccactggtggggggccgattgctgcagggaactgtgtggtactcaagccctcagagaccagcaaggccattgagaagatcctggctgaggtcctcccccgctatctggaccagagctgctttgctgtggtgctgggtgggcctcaggagaccgggcagctgctggaacacaggtttgactacatcttctacacagggaatgcttatgtaggaaagatcgtgatggccgctgctgccaaacacctgacacccatcaccctggagctggggggtaagaacccctgctatgtggatgacaactgcaacgccccctccaaaaaaacaaaaaaaaaaaaaaaaaaaaaaaaaaaaaaaaaaaaaaaaaaaaaaaaaaaaaaaaaaaaaaaaaaaa

SEQ ID NO: 8533 - DNA, 490 bp, Cricetulus griseus
gggctcggcagcatgtcggcggcgttgctgcggcgcggcctggagcttctggccgcatcggaggcctctcgtgccgcccccggccaggccaagacgagcggagctccggtgaagcggacccggagggcgagggcaaaggcctcccaggccctgaaactacggaactcagcgaagggaaaggtgcctaagtccgcgctagctgagtaccagaaacgacagtgtcaagaccacctcaaagcaaacctgaagtttatgaccagcgtgagaagcaccgtgccagagtctgtgacccagcagattctgcagcagagcccagggccgcaaaagcttgtgaccgggtatgaccaagacaaagaagaagaaaaaagaaggctgaaaggcactgtgttcactgaagaagacttccagaaattccagtagggaatatttttggcagcttaggacttcctgaggaatagtggggacaaaaaagctctatcctccttgactg

SEQ ID NO: 8534 - DNA, 489 bp, Cricetulus griseus
  modified_base (481)..(481): a, c, t, g, unknown or other
gggcgatgctgtggacgctggccagagcgttggctcttcggagacccggccgaggcagggccggctggagggggctgtggaccggccgcccgcagtcagatactgataatatgaagccactggagggtgtgagaattctggatctaacaagagtactggcaggaccttttgctacgatgaatttaggcgaccttggagcagaagttattaaggtggaaagaccaggagctggtgatgacacacgaacttggggacctccttttgtgaacacagaaagtacatattttcttagtgttaatcgaaataaaaaaagtataagctgttaatatcaaggatccaagagggtgagaatcatcaaagagcttgcagccatttgtgatgtatttgtggaaaactatagtccctggcaaaactttctgagatgggccttgggtatgaagatatagacaagattgaaaataacccaaaccctaaaaaaaanaaaaaaaa

SEQ ID NO: 8535 - DNA, 489 bp, Cricetulus griseus
ctgtgtccgctgttcttcggcatcagcatgccgggtccgacgcccagtggcaccaacgtgggctcctcagggcgctctcccagcaaagcggtggccgcgcgggcggcgggatccacggtccggcagagaaaaaatgccagctgcgggacgcggagtgcaggccgcaccacctctgcagggaccgggggaatgtggcgattctacactgaagattcccctgggctcaaagttggccctgttccagtgttggtgatgagtcttttgttcatcgcttctgtatttatgttgcacatttggggcaagtacacacgctcatagatttggctgcatccatctgtcatctgaagaagaagaaggaaaagacccaacatatcttggaccaaaaagtgtagtgatttcctgttcacgtgtattattttacagagaacttaacaagaattgactttgagaaatgttttttctatgtctaataaactttggaattgattt

SEQ ID NO: 8536 - DNA, 489 bp, Cricetulus griseus
caaagaaatacagattaattctgtgactgaattatgtgcagaggttacctgacaaaaacaatcacgtagggatgcaaaactagtcccaaagatggtctccctgctccagtaaacatcatttggctgtttaaagaagatggacaatttccaccctcacactggactgtgtcttagtgcttttcggacatctgaaggccgacccagtgtacagatgaaaacatgtgatgcccatgataaaaatcagatctggagatttgagaaatagatgagcagaagagcatttcttttggggagtggacagtaccttctggaaattccaagtgcccggtgatgattgtatttttcccagaagtcacccagtggctggctgtgaggacactggagagccatggttcatttggggatatcgatctgaaactgggagcacggagcactgttgctcgggatttcaaagtgccttccttctttcctcgtgggttgctttattta

SEQ ID NO: 8537 - DNA, 489 bp, Cricetulus griseus
tcggccatggcgagatgctgagcttggatgaaagcagtttcccgccctggagctcaacaaaccggcggctgtctgtaaagaactccttctgcaggaagaatggcttgtacaccaggtcccctcccaggcccagtccgggcagcctacactactctgatgaagatgtcaccaagtacaatgacctcatcccggctgagagcagcagcctgacagagaaaccctcagaaatctctgactcccagggaagtgacagtgagtatgaagtggacacaaaccctcagaaagcccactccttcgtcaaccactacatcagtgaccccacatattacaattcttggcggcgccagcagaaaggcatctctcgggcccaggcctacagctacacagagagtgattctggtgaacctgaccacgtcactgtccccaatagcaacagcacccagcagggcagccttttccggcctaaggccagccggactccaacgcccc

SEQ ID NO: 8538 - DNA, 488 bp, Cricetulus griseus
ccacagcgccccctctcggccctaggcttcccagccggccgtctaccctcagtaccaggtatcactagaacagagaggcacacacagcctctggtgcaacaatgagccaagtggagtttgaaatggcctgcgcttctctcaagcagctgaagggtcctgtgagcgatcaggagaaactgctggtgtacagcttctacaaacaggccacccagggcgactgtaacatccccgtccctccagccatagatgtgagagcaaaggccaaatgggaagcgtggaatgtgaacaaagggatgtccaagatggatgctatgaggatctatattgccaaagtggaggagctaaagaaaaacgaggctggctaaggacattttggcagacacaaggaaatagcagtggctccactggtggggaatgggtttaagaactcctgatggctgaaacatactgaaaagggtagcaaggttagcggagacatcaataaatca

SEQ ID NO: 8539 - DNA, 488 bp, Cricetulus griseus
cttatacagtatgacaaattttatatacatgaagtacaagacctgatagacattaaggaatgactatatcaactgggtccaacagcaagcctatggagtgttggcagatatccctgtgacaatttgtacatatccatttgtatttgatgcccaagcaaaaactactctgttacaaacagatgcagtcttacagatgcagatggctattgaccaggcccacaggcagaatgtctcctctctttttctcccggtgattgagtctgtgaatccctgcttaattctagaatgaattacaagctatggttattgggaatacaaattatgactggaaagaactggagaagaatacagaatacaaaggggattattgggcagaacatcccacgaattaaaaattttctgggaagtatttcatgaattaaccactaggaaaaaaaaaattttctaaataaaatagtgtcatctgtagaaaaaaaaaaaaaaaaaaa

SEQ ID NO: 8540 - DNA, 488 bp, Cricetulus griseus
gttttaccccaatcatgcatccacacaagtgcttctcttgacatttctcaaagatgggagaagaagaataatattgtttacccaccacaactgcctggtgaacctcggagaccagcagaaatttaccattgtaggagacaaataaaatacagcaaagacaagatgtggtatctggcaaaattgatacgaggcatgtccatcgatcaggctctggctcagttggagttcaatgataagaagggggctcagataattaaagaggtactcttagaagcacaagacatggcagtgagagaacacaatgtggaattcagatccaacttatatgtagctgagtctacctcaggtagaggccagtgcctgaagcgtctccgttaccatggccgaggtcgctttggtatcatggagaaggtctattgccactattttgtgaagctggtggaaggacccccacccccacccgaagcacgcaagacaacattcgacca

SEQ ID NO: 8541 - DNA, 488 bp, Cricetulus griseus
ttattaatagagataagtggatatgcttcttttaaatttctgagctgaaaaataaaattgtaggcaaaataatggagttttaagctaaagatggagcatgatctctgtatatagcacatgtgaatacatgaaaagctaatggaatattatttttttaatgacctatcagaaagtagaatttaaaacccagggttgttataatttttccaatgttgaatgtgttttgaagttggtaatactttctgaaagtctcagagtctactgttcaatgtgatgcactgatcaagttctgttgcagcatttccataccctcatgaataacgtcactgcttccatgatactgtttacagtgagacttggtttagtcctcttaaatgctgtagcaaactgtggttcgagcaccctgtgggaggggatggggggaggggcagactgagcagatcctagaccagtgtaaagaatgtgtatgtgtatataaataatttatc

SEQ ID NO: 8542 - DNA, 488 bp, Cricetulus griseus
cttcatccagagttcccagctcaccctacaccaacgtgttcacactggggagaagccttatgaatgtggtctctgtgggaaggccttcagccggagatcagccctcactcagcatcaacggattcacatggcagagaacccacgggaatttgagtgtggcccagattttgtttatgactctagccatctgcccactggagagagacatggcagggccttcagccacagtgcaaaacttgttctccagtggacaattcgaagtgatgaaaaatcccggggatgtaatgaatgtgggaaaactttcagcacttcctcacaatccatggaatatcagaaaattcaagctggggagaagccctataaacgccaggaatgtggtaaagctggtagtggagtgtcatcccattctcaacatcatgtaactcgagttggagagaaaccacaattgaatgatggatctgaaagatacttaattcatatacaaaaag

SEQ ID NO: 8543 - DNA, 488 bp, Cricetulus griseus
ccctgcctgccctgaggtctcttgaggtctcagggacaaaccagttgccagatcaactcttccctaacttggacaagttcccgagcctgagagaactgtctgtgagactagatggttcaccagatgtgctgtccgtcatccctggagacctcccaaacttccaccacatggagaagttatccatccaaacttccacagagtctgacctctccaaactggttaaattgattcagaactctccaaatcttcatgttttccacctgaaatgtgatttctttttcggattttgagtctctcatgactgtgcttgcttcctgcaaggaactcagagagatggagttttctggacgatgctttgaaaccaggccatttgtcactattttgccaaattttgtttcactgaagatattgaatcttgagtgtcaacaatttccagataaagaaacatcagaaaagtttgcacaggctctgggttctctcaggaacct

SEQ ID NO: 8544 - DNA, 487 bp, Cricetulus griseus
aggatgccgcgtggaagccgaagccgctcttcccgggtggcccctccggccagccgggcccctcagatgagggctgctcctagacatgcacctgcagctcagcctccagcagcagctgcaccatctgcagttggctcccctgctgctgcacccaggcagccaggcctgatggcccagatggcaaccactgcagctggtgtggctgtgggctctgcggtgggtcacaccctgggtcatgccatcactgggggcttcagtgggggtggcagtgctgagcctgcaagacctgacatcacttaccaggagccccagggaacccagctgctggaccagcagcgagggccatgctctcttgagatcaaacagtttctggaatgtgcccagaaccagagtgacgtcaggctttgcgagggtttcaatgaggtgttgcgacagtgcagaattgcaaatggtttaatctaatcaagaagttcaaactgaagaaatg

SEQ ID NO: 8545 - DNA, 487 bp, Cricetulus griseus
gagcctcgaccggccgatcacgcgccccgactcgtgcccccagcccgctcgtcgcgcccccgggagccccccttgccctcactgcacacccgggcccaggctctgcaggcacgtccgaggcacaggcaacggtctccggccgtcgaaagcccgcctccgccctccgggagtggaagctgctcgggccgctgcagagacccacaacccagctgcgagcgaaggtgtccagcctgtcccacaagatccgctctgggggcgcacggcgcgcggaggctgcctgcgccctgcgctcggaggtggaggcggtgtctctaagcgttccccaagaagtggcagaggctgtcatctgccctgcctatgagccagccgactacagcaatctccgggagactgacatttagagaccgagccccaggttgggggatgtgctggggccagggatggggtgcattttgggatgctgcctttggatccaggactctaacca

SEQ ID NO: 8546 - DNA, 487 bp, Cricetulus griseus
atagtttggagtcagtcaagacagtcattgcagaacccaaagaggagaaaaactgatttgatgaattgctccaggtgtactatgatgccatcaagttcaaaggagagaaagatggagcccttctcatagcggtttgtcgtggcaaagtgagcgagggtctggatttctcagatgataatgcccgtgctgtcgtaacagtaggaattccttttccaaatgtgaaagatcttcaggttgaattgaaacgacaatacaatgaccaccactcaaaattaagaggccttttgcctggccgtcaatggtatgaaattcaagcatacagagccctaaatcaggctctaggcaggtgtattcgacacaaaaatgattggggagctcttattctggtggacgatcgtttcaacagcaatccaaaccgctatatatcaggactttctaaatgggtgaggcaacagattcagcaccactcaacctttgcaagtgccct

SEQ ID NO: 8547 - DNA, 487 bp, Cricetulus griseus
gccacattggccagggcacctgcgagctgagctcatgccacacggtagcagcgagggtgttttctggatggagtatagtgactttatcaggtactttgactccgtggacatctgcaaggtacactcggattggcaggaggctcggggttcagggatgtttcccaagcactgccagtggaccagtgggtgtgacggcactcacagtgctggagcgtgcctcactggagtttgccctttttcaggagggcagcaggcgctcggattcagtagacagccacctcctggatctgtgcatactggtgttccggggccaacttttggcactggtggccgcctgagcctgggccgcctcttggcccacagcaaaacgtgctgttaaagaaagtttgtgaactgtgatgtcatgctggagcctggcgagtatgctgtggtgtcgctgtgccttcaaaccactggaaccctgctccaccagggccccctgcccagg

SEQ ID NO: 8548 - DNA, 487 bp, Cricetulus griseus
atttggatggaaaacatgtggtatttggtcaagtaattaaaggactaggtgtagcaaggatgcttgtgaagatgtcaaattggcagggagcaattgacagttgtttggaggctcttgaaaatggacccatcaaatactaaaagcactataccgaaaagacacaaggatggcaaggattaaaagaatatgatcaagcactggctgatcttaagaaagcgcaggagatagccccaggagataaagctatccaggcagaattgcttaaagtgaaacaaatgataaaggcacagaaagataaagagaaggcggtatatgcaaaaatgtttgcttaaagagaattaaattctgcttaaattttacacattgattatataaaggataatgtaagttactgtctacatatgatatgtttcccttgattcattgtcatcattgtttacatagaagtactgacataggtttcttcttaataaagtgttatgaaata

SEQ ID NO: 8549 - DNA, 487 bp, Cricetulus griseus
gaggaggcccagacccaaattggggctaagggctcaagctctcaggactctgccatggaggaagaagaacaaggtgggaacgcatccagtccagctttaccttcggaagaaaacggcaccagctagactccattttgaggccacttgcagcagactatgagaggcttccttttcaaccatgttggggttcttagaactcaagatatggctggaccaaccaataggaaactgccccagcttctcccaacagggggcaggacccccactaccagcccagggcccaggagctgcctctcgcctcttagcagagagtggaagtttcccacccagtttggaggattgcccgttccaccctgcctgaggagaccattcctcacccggctgacaagctgctgacgtggtctctccaaatctcagctgagcctgacgtccctgtcggagggttggggctgcacttatttagttgggggagacgagctcactctcc

SEQ ID NO: 8550 - DNA, 486 bp, Cricetulus griseus
taaggcccaaggccaccgtggggcgtcctgcttgtcaatgatcccacttcctcttggagatctggggagatgggtgccctggtagctgtctagctgctcctaaggctgagcttccctatctttcactcagagcggaacaccctctcagccttgccaagaaccacccaactctgagactttgcaccccaccaggagctggttatgggtgttcagcctgggtctcttgtgttctctctggctgctgggctaatgactaccatgtcctgccctgttcggtcccacgatggtctgcagcacctcccggtgagaccctcctgacccctctgtaagtcagtgtcctaaagccgggctgtggcctgggtcttcctcctggccttcctcccacctctggatctgttgtgcacattcgaatggaggaaaggccggggtccttggagaacagagccaatgtttgggtggtctttggtgcccctctcccagtcccca

SEQ ID NO: 8551 - DNA, 486 bp, Cricetulus griseus
gtagccatggctgctcgtgtcctttccgcctgtgtccgtcgcctgcctgtggcgttcgcgccgctgctccggcttcccacgctggccttggcccggccgctcagcaccactctctgctctgagggaacccggaggaagctcgggactctgcagcctgtcttggcgctcacacaggtgcctggaagggtcacacacttgtgccgccagtacagtgatgcaccccctttgacgttagagggaatcaaggacagagtgctgtatgtcttgaaactctatgacaagatagacccagaaaagctctcagtaaattctcattttatgaaggacctgggcttagacagtttggaccaagtggagattattatggccatggaagacgaatttgggtttgaaattcctgatatagatgcagagaagttaatgtgtccacaagaaattgtagactacattgcagataagaaggatgtatatgaataaagtatcaga

SEQ ID NO: 8552 - DNA, 486 bp, Cricetulus griseus
agcagcgcaggagacaatggcaggctcagcgttggcgactcgggctcggctcggtgcctggggcgtgagggtcctacagacccgaggcttcggctcggactcgtcggggagcacggagtctggcgctggcgccatccgagaagcccggtggggccttcggaaagagagagaagtccgaagaggatcgctacttccgagagaagactaaagaacaactagctgccttgaagaaacaccatgaagatgagatccagtaccacgagcaggagatagagcgtctgcagaaacaaattgagcggcataagaagaagatgaaaaacctgaaaaataatgattaaaatgcatgcagtcagacacacacagaatggtcggtgtcattccccatttctgtagagatgtagttcattctgagtgattaaatattttggtccgtgtgctactaacagataataaattgtcaccaagaaataaacaaaaaaaaaaaaa

SEQ ID NO: 8553 - DNA, 485 bp, Cricetulus griseus
ttgcctccaggccaacccccagaccaaccctcccgtcccccttggggccctcctacctcagcctggggaaggcatccgggctgctcatgccatcttgggagggttgcacctgaccctggactgggctgttcgaggtctgctgttgttaaagactcggctgtgactcaggactgaaagccaccaccgacatcgtcttttaaaagccacatgttatttatttatttattttggtacttggggcgggggcaagatgatcaggggcatgccacacccacacttcctgaccacccagctagatacactccctccaggagacctgggtaaggggagccaggcgttggtagcgcatgcctttaatcccagcactcgggaggcagaggcagggggactctctgtgagttcgaggccagcctggtctccagagtgagtgccaggataggctccaaagctacacagagaaacactgtctacaaaaaaacaacaaa

SEQ ID NO: 8554 - DNA, 485 bp, Cricetulus griseus
ctcctcatccatcacagtggtagttttttattttattttttaaaagtttaggtgcctttgcggatgacctcattttgatgttttaaaaaaaactgattttttaatatgtggacgctgcaaaaaatgtgtttaaagtatcttttttaagatgaattaaggactattagcccggacttcgacacagagtttgtaaataaaggtgtctgtgcagatttccccacgtttatttgtataaaattcctcaacttttcagacttttttgtaaccccccagttgtgaaaactgcaacttagcagtgacctcagaaacccgttcgttttatttttttccctttgaaaatttttctcagttaaattaagctactgatttgaatttctttttatcttgtcctaaagtctttgttcttgaaatgcaaggtatttgggggttatttattaagaaagcaacatactcttaatgttgattttacaatatgaagagattat

SEQ ID NO: 8555 - DNA, 485 bp, Cricetulus griseus
tgggcctgggctttggtttgggcatgagtttgaacccaggttttggcttaagcctttgcctgggcctgggtacaggcctgagcatcagattgagccagagccttgaaatgccccagatgccatcctttgattcagtgcaccaggagtcaactaacagcattgctgcggagaacagttctgtgggatctatcatggaagtgaccgatgagaaccttgagcagatctcagatgtaatcgtcaataaatatgggaaagacaattgggagtggacaagataaacatcagacaacagaaacctgagaaaacccagtaggacagccataacccagttaggaggaatgaaaagaagaaggagaacgaagaaagaatctgtggttcactgttttgttaatgttcgcatttcttggaaggccatggaattttaatgctgacatctttccaaagttcatcacatccaaattcatatccaaagataatgccttttc

SEQ ID NO: 8556 - DNA, 485 bp, Cricetulus griseus
acaagggccgtccagcttgatggagctgcccaaactgaggctgtccggagtggccagactgtcgtcatgttccagccccacgctgcggtcagtgttgggcagtggagcaaatggaagagtccctgtgttgagacccttgaagtgtgctggggtccacaagaagacagacacgcagaaggacatcaaacctcacctgaaacagtatcacctgcccacgatcaacaggaaagggggcgaatactgaacagcacaccatctggtcaccctcttggaaagcgagggcaggcgccatgggcaggcttaggactctgcagctgagagtggatggggcacagcatgacgtgtgctggtggtcgtcaccatgcttggtggcccaggacagctgcctagcggtcctctgtacccatagcctggagccgcgtgtgtttacaaccccaaagcagctgtactgaatgttccagtttaatatatttgtaaaaccacct

SEQ ID NO: 8557 - DNA, 485 bp, Cricetulus griseus
caggagattgatgatgtcatagggcaggtgcggcatccagagatggcagaccaggcccgcatgccctacaccaatgctgttattcatgaggtgcagcgctttggggatattgccccattgggttttccacacatgacatcccgtgacattgaagtacaaggattcctcatccccaaggggacgatcctcatccccaacctgtcctcagtgctgaaggatgagactgtctgggagaaacccctcctcttccatcctgaacacttccttgatgcccagggccgctttgtgaagcatgaggccttcatgccattctcagcaggccgcagagcatgcctgggggagcccctggcccgcatggagctcttcctcttcttcacctgcctcctgcagcgctttagcttctcggtgcctgatggacagccgcagcccagtgaccatggggtctttgcaatgcccgttgccccctccccctaccagctctgtgc

SEQ ID NO: 8558 - DNA, 485 bp, Cricetulus griseus
catggctgagtctccgctccgggaaccggtgctggacgccaaaaggtcacctgccagcttattagatttttctagttggaaactgggcgatggctgtgagctctgaccaatgtagatcgctcaaatatccatatgtggcggtgatgctcaaagtggcagaccattctggccaagtaaacagcaagtccatcgaaatgacaattccacagtttcagaatttctacagacaattcaaggaaattgctgctgtaattgaaacggtgtgagaactgattcgtgattctaaagtaatggactctaccatgcagaaaagaactacatatggatcaaaggatatttatacaatgaaaattgcacttctggggcaggagagatggctcagaggttaggagcactggttgctcttccagagggcccaggttcaggttcagttcccagcacccacgtggcagctcacaactgtctgtaactccaattccaaggga

SEQ ID NO: 8559 - DNA, 485 bp, Cricetulus griseus
ggatcgaaaactggaaagagccaaccaagaactaattcctattgaggattttattacccctttgaggttcttggataagtcaagaaagcgacctcaggaggagcattcttttgaggagagtgagcaaagagctcttctgctgaagaggtgggcactatacaagaagcaggagcatgaggcagagagggacgccatcagagccatgctggaagcccagcaagaagctcttcaagaactgaagcttgagtctccagagctctacgaagaggccataaagcgggaccccagcctgttcccctttgagaaagaagggccacatcacacaccaccaatctctaactaccaggcccctgaaggaaggtacaatgacatcaccaaggtgtatgcacaagtagaatccaaaagatagaactgaaaactgctgtcgtcggaagatctggccctaggagtcagagtgacagagctgaagtctactttccacagac

SEQ ID NO: 8560 - DNA, 485 bp, Cricetulus griseus
gctaaagcaacaaacctgttatttttcaaggaccagaaggtctaacgtgaagccatgaagtacctgctaatctccctggccctatggctgggcatggtgggcatacatgggacagagctcgagctcagtgagacacagcgcaggggcctgcaggtggccctggaggagttccacaaacacccacctgtgcagtgggccttccaagagatcggtgtggacaacgctaacgacatggtcttcctggcacctttgtgaggttggaatttaagctccagcagaccagctgtttcaagaaggactggaaaaaccccgagtgtaaaatcaaagcaaatgggagaaagcggaaatgcctggcgtgcatcaaattggaccccaggggtaaagttctgggccggatggtccactgcccaatactgaagcaaggacttcaggaggagcctcaggagtcccagtgcaataggataacacaggctggcgaggacccc

SEQ ID NO: 8561 - DNA, 484 bp, Cricetulus griseus
ataactatgccaggggcgaccactggcccttcggagacattgcctgccgcctcgtgcgcttcctcttctatgccaacctacacggtagcatcctgttcctcacctgcattagcttccagcgctacctgggtatctgtcaccccctggcaccctggcacaagcgtgggggtcgccgtgctgcctgggtggtatgtggagtcgtgtggctggttgtgacagctcagtgcctgcccacagcaatctttgcggccacaggcatccagcgcaaccgcactgtctgctatgacctgagcccacccattctgtccgcccgctatctgccctatggcatggctctcacggtcatcggcttcttgctgcccttcacagcttttactggcctgctactgccgcatcggcccgccgcctgtcgccgccaggaaaataaaagtctttttgtcggttggaaaaaaaaaaaaaaaaaaaaaaaaaaaaaaaaaaaaaa

SEQ ID NO: 8562 - DNA, 484 bp, Cricetulus griseus
catggtcttctccacgtcccctaccagagatagcctgagcttcgaggacttcctggacctcctgagtgtcttcagcgatacagcaaccccagacatcaagtcacactatgccttccgcatctttgactttgatgatgatggaaccctggacagagaagacctgagtcagctggtgaactgcctcacaggagagggcgaggacactaggctcagtgcttctgagatgaagcagctcatcgacaatatcctggaagagtcggacattgacagggacggaaccatcaacctctccgagttccagcatgttatttctcgttcaccagactttgccagctcctttaagattgtcctgtgacggcttctgagcaccaacatcctgtccaaaaccttcccactgctgagaggtggccaaagtcacgcctgcggtgtcgagggccagcgctggcccagcctggagagggcactgcagagtctggcctcctgg

SEQ ID NO: 8563 - DNA, 484 bp, Cricetulus griseus
aaggacaaatgatgagaagaaaaccacagagccacgtccccagctgcctggagcagagctgagcccttcggcccacagggccaggagacctgagactgtgctacctgatggagggagtccccatggggactttaggacatggctcagccctgcaccacaccccaaaatgcttcctcagctgtcctcggtttcccttcagacagtggtcttattcttccatctgtgtatgtcacaggatcctctcagggctgaccaccaatgtgatatcctgccaagtatggttgtcacaccacagagccctggacagctttccacagtgactcagcctgccatagacctgagtcttcataccagaacccatcagtgaaaccatgccaaagcaaaacgtcagccctttctgtgcacagacgaacaccagcttgtttctctttgtctgtgttcttttctttgaacaaaactggaatacagagtaggaagtgagaaa

SEQ ID NO: 8564 - DNA, 483 bp, Cricetulus griseus
ttgtactgatggttgaaatagaattgatggaatccacaaatactaagctgtggccattgaagctgactttggaggtggcagattggtttatcttgcttagtttcattttagaaatcattctaatgtggatgttcagcttttctctcttctggaataatgcctggaatgtctttgactttgttgttaccatgtcgtctctgcttcctgagtttgtggtgttgatgggtgtctcggggaactctgtgtggcttcagctgctgaggatctcccgggtgctgagatctctcaaactgtttgcacgatttcgtcaaattaaagttattatattggctcttgccagggccctgaagagcatgacgttcctcttgatgttgctgcttatcttcttctactatttttgctgtaactggtgtctacttctttgaagtactattcccgttcaacttattgagaacctggagtacaacatgttcttctcgagac

SEQ ID NO: 8565 - DNA, 482 bp, Cricetulus griseus
ccaggttcccatcagtgtgcccaaggatttcttcggtgtgattcttaaaaaaggaagcttaaatgccatgcgcttcctcaccgctgtgagcatggaacaaccagagatgctggagaaggtgtcgagagaattatggatgcgcatttggtctcgagatgaagatatcacagagtcccagagcatcctggctgctgcagagaaggcaggaatggccacagagcaagcccaaaagtttctggggaaaatgactacagcacaggtgaaggacaagctcaaggagactactgaggcagcctgcaaatacggggcctttgggctgcctttcactgttgcccacgtggatggtaaaacacacatgttctttggctctgaccgcatggagttgctagcctacctgctgggagagaagtggatgggccctgtgcccccaaccaaaaggtgccagactttaaacttgcctcaggaagtaaacttcatttctc

SEQ ID NO: 8566 - DNA, 482 bp, Cricetulus griseus
aggggttgtgctgggccgtgggggtggtgccatcggccaaatgcttctgcccttccgcctgggcctaggaggccccattggttcaggtcaccaattcttcccctggatacacattggtgacctggcaggaattctgattcatgcccttgaagcaaaccacgtccaaggagtcctgaatggagtggccccagcatctaccactaccaatgctgaatttgcccaggccttgggtgctgccctgggccgcccagccttcatacctgtcccccagccattgtggtacaagcagtcttggaagaagagagcgtgccaccatgctgttggaaggccaagaaagtggtcccacggcggacgctggccactggctaccagtattccttcccagagttgggggctgccttgaaagatattgtagcctaaatagagaagggccccaaggcaggagctgaggcctgttcctcatacagagaattggttcaggt

SEQ ID NO: 8567 - DNA, 482 bp, Cricetulus griseus
ctgccccccacactgcaatgtgggcgcttttagggatagttttaggcattcctggcctattctgatgtcatgactcaaacagaaatcccacaattccaattctttccttaatcagaaagctacacaggcagagcacgcattcccctcacaaactgccaccgcccgtacccacttctaggggaactggcgtgtgggaatggtgctcaaacacaggcctcatgcgtacactctcaagactggtaattctgtgttttgttgacccttcttagacactcaccacacctctgctccctccatcccacctatctcatctctggaagaacccggggattcacatatgctgggaaagcgttctgccactgagctacaccccagccctttccttctcttccttccttccttcctctctctctctctctctctctctctttctttctttctttcttcttcttcttcttcttctctctctctctctctctctc

SEQ ID NO: 8568 - DNA, 482 bp, Cricetulus griseus
  modified_base (33)..(33): a, c, t, g, unknown or other
tgtgtgtatgaattgtatgtatgtgtgtgtgtntatatatatatatatacacacacaaacacacacatacatatatatatatatacatacacacacatatatatatatatatatatatatatatatatatttagtcagagtcttccctggctccacaatgccccttcccttggttgactttcccttgccaatccctgcctccctggcccttctagcttgtgccctctcttctttgctctgaccccttcatggccattcttcacagcctggctcccctgcccccctgcttagaggctaaggctctcaggactctcttgactgtgttgtgggggaaagtgaacacatctaaaaaatctgctatttacttcacttttaaaaaggtattttttcctcagtctgaattttgatgtgttaattatagaaaaattggaaaaaatgcaataaaaggtgataaaatgtctgagtgctttatcctgagattg

SEQ ID NO: 8569 - DNA, 482 bp, Cricetulus griseus
tggcaaaaggttttactctttcccacaacttcaggatcaccaaagactccattctggagtgaaaccatacaaatgtgaagagtgtgggaaaacattttctactctttcataccttccttggcacaaattgcgccattctggggagaaatcttacaaatgtgatgtatgtggcaaaatgttttattctactttagaccttaaaaaacaccacaaaatccatacatataagtgtggggaatgtcactatacgtttacaagttactcagctcttactgaacaccagagagttcatactggagagaaaccccacatatgtgaacagtgtggaaaaatcttttctaggcttgatagcctcaatcagcaccagattgttcatactggagagaaaccctataaatgtgaaaagtgtggcaaaagttttttccgatcctcgtcccttagaagacataaagggactcattcctaataggaatttaacaagt

SEQ ID NO: 8570 - DNA, 482 bp, Cricetulus griseus
gcagccccaacctcaaccgaagcgtcgccgctaccgaatctccttcactccgctgcaactgcgggagctggaggcctgtttccagcgcatccagtaccccgacgtgcttgctcgaatgaatcttgcccaacgcctcggtttacctgaatccagagtgcagatctggtttcagaacagaagggccaagtggagacaacttcatcgggcacatatatacagaaacatgattccagtggccatgagtccccctgtgggcgtatacatggatgatcattatggccccatccctattgtggaggttatttggaaatatcaccctgtgctgccacaaccaatggatcctcatattttgcctcttccaccccagcccccaccactattcaggatgcctgtaccacctaggccaccccctccacctccatttccctggccacctatgccacctgatggtcatatgccacatgtagctatgggatataacc

SEQ ID NO: 8571 - DNA, 482 bp, Cricetulus griseus
  modified_base (6)..(6): a, c, t, g, unknown or other
  modified_base (465)..(465): a, c, t, g, unknown or other
gtagcngaacctcaagtgtgagcagtcagtgtagcatgaacatgaactggctcggagctagcccttccctcgaaagaacctgaagcaccacccagctatgcagaagtagtaactgaggaacaaagacgaaataatctcgccccagggaatgcttgcgatggttttgaaagagctcttcagggaccactgtttgcatatatccaggagtttcggttcttgcctccacctctttattcagagattgatccaaaccctgatcagtcatccgaggacagaccatcttgcccctctcgttgaaggaacacttgattgactcgagttgatatgggtttcgaactgtatctcttccggctgaggacagagaagtatcttggagacacgtttttcagaggaagtggaattgcttttgcccagaaaatggcaaatacatgaaacaaccagtgatcatgctttattttttttttntttgttaagttaaagta

SEQ ID NO: 8572 - DNA, 481 bp, Cricetulus griseus
aggatttggccgatgaacttgccctattgatgctgatgcagacaaaactgaaaggagagacaatggatcttctgcatggcagtcttttcttcaacactccaaaaaattgtctctggaaaagattacaatgtatctgccaactccaaattagttatcatcacagctggtgcaaggcagaaggggggagaaacacgccttgacctggtccagcgtaatgttgttatcatgaaatccatcattcccggcatagtccaaaacagtcctgactgtaaaatactgattgtctcaaacccagtggatattttgacttatgtggcatggaagataagtgggctccctgcaactcgggtaattggaagtggctgtaacctagactctgcccgtttccgttacctaattggagagaagttgggtgtccaccctacaagttgccatggctggattcttggagaacatggtgactctagtgtgcccttatgga

SEQ ID NO: 8573 - DNA, 481 bp, Cricetulus griseus
atggatacagtctcttgaagcataccactgtcatagaaagagaatggcgcttgattgaaatcatttgtgtggatcgtatgggtattttgtgaaacaatactgacctttcagaaaaaagggcaactacttttatatgctaaagtacttcacaactttctgggaaactttatttaggtagaaatggtcatcttattattttttaaaacaatgtattttaataatttcacaatttatatacggtttgtgacatgaatatgaaagtcattagtgttatatcaaggatattttgaaaatgtaattctatgatatatatcatttgaagtttatttttcacacctaaagaataacatgattttttttttttctagagagtttctctgtgtagccctggctaccctggaacttgctctgtagaccaggctgccctgaaacttagagatccaactgcctctgcctgcaaagtgctgggattaaaggcgtg

SEQ ID NO: 8574 - DNA, 481 bp, Cricetulus griseus
ggccaaagccatcgccaagatgaatacaaagttctactttgtccgaaccaagatagatcatgacttagataatgaacggaggagtaaatctaagactttcaacagacatagtgtcttaaagaaaattcgagatgactgttcaaagcatctcaaggaagccctctccagtgagcctcgaatcttcttggtctctaacttcgatgtgtccgactttgacttcccagagctggagaccaccctattgggtgagctcccagcccacaagcgccacatcttcatgctgtccttgcacagtgttactgagtctgccattgaccggaagagggatttcctgaaacagaagatctggctggaggccttgaaggctggagcatgggccaccattccacttggaggcttggtcagagataaaatacagagggtagaggagaccttggatctctacaggtcttactttgggctggatgatgcctcactggaa

SEQ ID NO: 8575 - DNA, 481 bp, Cricetulus griseus
tgcacaacgtgccaatcagcgtgctcatccggcctctgccatccgtgctggacccggccaaggtgcagagcctcgtggacacgatcctggaggaccctgacagagtgccccccatcgatgtcctctggatccaaaggggcccgagggtggtgactactactactccttccggggctgccaccgctatgccgcctaccagcagctccagagagagaccattcctgccaagctcgtgcagtccaccctttcagacctgagggtgtacctgggcgcatccactccagacttgcagtagaaacctccgggtcaccccaccccctgcacaccagtgtcatcttccagagcccagaagacacacatggcccccagtgaaactgtagcagggatatgttctctttatatctaaggagagaggtctgcctcttggtgcctctatactagcccccagtcatggcatggtgtctccaagagctgggtaccc

SEQ ID NO: 8576 - DNA, 481 bp, Cricetulus griseus
caacattaacgagctcccggagaacattctgctggagctcgttcacccacgtccccgcccgccagctactgcgtaactgccggctggtctgcagcctctggcgagacctcattgatgtggtgactctgtggaagcgcaaaagcctgcaagagggcttcatcaccaaagactgggaccagcccgtggaggactggaagatcttctacttcctgcgcagcctgcagaggaatctccttaggaacccgtgtgccgaagaggacatgaactcatggcagatagactccaacgagggggatgagtggaaggtggagagtctccctggggagcatggcaagaactttcctgactccagggtcaagaagtattttgtcacctctttcggcatgtgcctcaagtcccagatgatagaccttaaggctgagggctattgggaggagctgatggacaccttccggcctgagattgtggttaaggactggtt

SEQ ID NO: 8577 - DNA, 481 bp, Cricetulus griseus
gttgagtggaatggagcctggagtgacagagccaaggagtgggatgacgtgagtgcggatgtccagacacacctgcttcggaagaaggaagatggggagttctggatgtcctatgacgacttcatgagcaacttcacactcctggagatctgcaacctgactccagatgcactgtcaccccgggaacacagaagcagctggcacacaaccttctacgagggcagctggagaagggggagcacggccggaggctgcaggaacaaccacgacacattctggagcaaccctcagtttaagatctctctcccggagggcgacgacccggagaacgggtctgagcaaagcgaggtggtctgtacctgcctggtggccctgatgcagaagaactggaggcatgcccggtcccaggggagccagctgctcaccataggcttcgtcatcttctcggttccaaaggagttcagaacctccaggacatcca

SEQ ID NO: 8578 - DNA, 481 bp, Cricetulus griseus
ggccacgctgctcctgtcgctgctgtggatgcccgcgctgctgccggcggcttcccgccttctcctgctcccccgggcctggctgtcaatggcttctgcaagccctccgccccagtcctccccggcctcgggctccggctacgtcccagggtcagtttctgcggccttcgtcacttgtcccaacgagaaagtcgccagggagatcgccagggccgtggtagagaagcgcctggcagcctgcgtcaacctcgtcccgcagatctcctccatctacgaatggaaaggaaagatcgaggaagacagtgaggtgctgatgatgattaaaacccagagctccctggtccctgctctgacagagttcgttcggtctgtgcacccttacgaagttgctgaggtgattgccttgcctgtggagcacgggaaaccccccatacctgcattgggtgcgccaggttacagagtcagtttcagattctggcac

SEQ ID NO: 8579 - DNA, 481 bp, Cricetulus griseus
gttgggaaatcttctctcgtccatcttctatgccacaatcaagtgctgggaaatccatcatggactgtgggctgctcggtggatatcagagttcatgactacaaagaaggaaccccagaagagaagacctactatatagaattatgggatgttggaggctctgtgggcagtgccagcagtgtgaaaagcacaagagcagtgttctacaactctgtaaatggtattattttagtacatgacttaacaaataagaagtcatctcaaaacttatatcgatggtcattggaagttctcaacagagatttggttccaactggagtcctggtgacaaatggggattatgaccgagaacaatttgctgataatcaaatcccactgttggtaatagggactaaactggaccagattcatgaaaccaagcgccatgaagttttcaattaggactgctttctggctgagcttcaatgctgaagagtattaa

SEQ ID NO: 8580 - DNA, 480 bp, Cricetulus griseus
atttggagacagtttagacagcagctctgtattcttttggccgaaacctgaacagtagaagtagccaatcataagaccttctgaagaacacatttgaatgtcccactggactaactttctttttcgtacgtatttagtgtagaagtgctgtattccacagggtttaagtcggtgagattgggagatctctcttttttaattcagaaagcacaatcagtctttcctttgaaaatctatataaagtacaacttttagcatgattattttcctaaataaaaagacaaataattacttattttatgttgattacgggcatgaagcaaaaggttttctttggggaaaatgcagtctgtggggctgtgctcggttcattgtactgtgctctcgggcaccctgcctgttggaaggtggcttcagctgtgtggtgtaaaaaaaaagtccagataaaaaaaaaaaaaaaaaaaaaaaaaaaaaaaaaaa

SEQ ID NO: 8581 - DNA, 480 bp, Cricetulus griseus
tcttcacttcgcttcagtcatggcctgtggtctggtcgcaagcaacctgaatctcaaacctggggagtgtctcaaagttcggggcgaggtggcccctgacgccaagagctttgtgctgaacctggggaaagacagcaacaacctgtgcctgcacttcaacccccgtttcaacgcccatggggacgccaacactatcgtgtgcaacagcaaggataacggagcctgggggactgagcaccgggagcctgccttccccttccagcctggaagcactgtggaggtatgcatcacctttgaccaggctgacctgaccatcaagctgccagatgggcatgagttcaagttccctaaccgtctcaacatggaggccatcaactacatggcggcagacggcgacttcaagatcaagtgtgtggcctttgagtgaagtcaacaagcccctaggcctcaataaaggcagctgcctctgttccccaaaat

SEQ ID NO: 8582 - DNA, 480 bp, Cricetulus griseus
agtgggcgccggaggctggcagccgtctggaaccttggtcgccttcgaaacagcatcctgtctagtgacaaaaatggccagtcagtcccagggtatccagcagctcctgcaagcggagaagcgggccgcggagaaggtggccgatgccaggaagaggaaggcccggagactgaagcaggcaaaggaggaggctcaaatggaggtggagcagtaccgcagggagcgtgagcaggagtttcacagcaagcagcaggcggccatgggctctcaggggaacctgtctgctgaagtggagcaggccaccagacgtcaggtccagggcatgcagagctcccagcagagaaaccgggagcgtgtcctggctcagcttcttggcatggtctgtgacgtcaggccccaggtcccaccccaactatcgggtcaccgtctaggaccacttcttagagacatgtcctagaggctgactcctctgccaactcc

SEQ ID NO: 8583 - DNA, 479 bp, Cricetulus griseus
gagctcggaggagaacggtgtcggttccggcggtcgtcgtggtggtttttcgtacgtataattggggtcttgaggtcagacctcacgtggaaccggcatcaatatgatgagcggacggccgggccgggagccctttaaattcctgccggatgagtcccggggtctgccccccccaagctcaacgacccgcggcttgtctacacgggcttcctgggctactgcgctggcctgctgaataacgcgttgaaggggaggcctgtgttgaaagcaggtttgcatcgacaacttctatatgttacttccttttattttgttggatatttttttttaaaacgtcaggagtattggtatgctgtgagggaccatgacatgtttgggtatatgaaattacatccagaagattttcctgaaaaagagaagaaaacttacggtgaaattcttgaagtattccatccagtacgttgaagtcttcaaaggct

SEQ ID NO: 8584 - DNA, 479 bp, Cricetulus griseus
tatccttaatggactgaatgtgggaaatacacgtgtgtgtgtgtgtgtgtgtgtgtgtgtacatacatacaagacagggttcctccgttgaacagcaaaactaaatacttacctaggaaatgtattcatagtccaacatgatgtacttctaaccctacaagtactccaggtagctatacaatccaccaggtaagaatcagtgcacattacaagaacttactgttcttttctattctttcagtaaatcagggccagctgatatgtagcccatgtatatgtgaatggaataagataaaccccatggtctccttacacagaattgcaattgacttttttttccagataccaagggccagcctcagagcccttggagttcatgtggcagaatatactttttctataagcaatgcttgaagatgctgcaaatgaccctctgatgatttgggaagaggagtcagaatcggcgtaaatagctccct

SEQ ID NO: 8585 - DNA, 479 bp, Cricetulus griseus
cgccgccgaggtgcgcggaggcggaggcccggtgcgttcaagattcggcctcgcccgtagtccaccgccatggccgaggaaggcattgctgctggaggtgtaatggacgtcaacaccgcgcttcaggaggtgctgaagaccgccctcatccacgatggcctggcgcgcggcatccgcgaggccgccaaagccctagacaagcgccaagcccatctctgtgtgctcgcatccaattgtgatgagcccatgtatgtcaagttggtggaggccctttgtgctgaacaccagatcaatctaattaaggttgatgacaacaagaaactaggggaatgggtaggcctctgtaaaattgatcgagaggggaagccacggaaagtggttggctgcagttgtgtagtggttaaggactatggcaaagaatctcaggccaaggatgtcatcgaagagtacttcaagtgcaagaaatgaataaattttgg

SEQ ID NO: 8586 - DNA, 479 bp, Cricetulus griseus
ggggaacttgagctgggagaggcagagcagcggtgctgcttgtccaggagctgcgagcagggagccgcctccaaggccaaggaccccagccagactggagcagccctttggagtaaattcggttctggaaaaaaggttgccatgtcttagtcaattgacttgaagcattccagcactggctgtttttaatgtgccttctgaccccaaacactgggatacagtttgagggtctcagttacagcctgtttattccaataaaagagaccaaagagttcatcagacatgattggctgctatcacaactgtgtgattaaggacatattaatcacacagtttccatggccccagtggtcaagcctgtcactctcatcttcgtttgaagtttggagtaaatttgcacttttcgatcctgtggtcactaagggacctagttctttcccattttgctgtatcaataaggaacttgtaggaaaaaaaaa

SEQ ID NO: 8587 - DNA, 479 bp, Cricetulus griseus
ggctcaaagactctgaggaaaatgaagtttccctgcctctccttccggcagccctatgctggtttaatcttaaatggagtcaagactcttgagacacgttggcgtcccctcctcagtaaccatcagaaatgtaccatcgccatccacattgctcacagggactgggaagatgacgcctggcaagaagtgctgatagagaggttgggaatgaccctgacacagattcagaccttactacaggaaggagagaaatatggcagaggtgtgatagcaggacttattgacattggagagactttgcagtgtccagaaaccttaactgccgatgaggttgtggaactggaaaatcaagctgtgctaaccaacctgcagcagaaatacctgactccaatttcaaaccccagatggttactggagcccatacctagaaaaggtgggaaggatatattccaggtagatatcccagagcatctgatccc

SEQ ID NO: 8588 - DNA, 479 bp, Cricetulus griseus
  modified_base (196)..(196): a, c, t, g, unknown or other
tttcacagaaggattgaagagcctgacagaattatttgccaaagagaatcatgaattaagaatagcaggaggagcagtaagggatttactaaatggggtgaagcctcaagatgtggatttcgccaccactgccacccctactcagatgaaggagatgttccagtcagctggcgttcgcatgataaacaacaaaggngagaagcatgggacgatcactgccaggcttcatgaagaaaatttgaagttactacactccggattgatgtcaccactgatggaagacatgctgaagtagaattcacagcagtggtctgtgccaccgttccctgtgagtggacatgacatcaggaaagtgggcatttcttcagggaaggaaattggggccctgttacagcagttgcgtgaacagtggaagaaaagtggttaccaaatggaaaaagatgaacttctaagttatataaagaagacctaaaatgagc

SEQ ID NO: 8589 - DNA, 479 bp, Cricetulus griseus
tctggccgcattttgatcaggaataacagtgaccaggatgaagtggagaccgaggccgagctgagccgccggctggagatcgtcttgtgctactgttctttggcgctggggcctgtccccagtgccaggcctttgccccagtcctcaaagacttcttcgtgcgactcactgatgagttctacgtgcttcgggcagcacagctggccctggtctatgtgtcccaggatcccacggaggagcaacaggacctgttcctcagggacatgcctgagaagtggctcttcctgccgttccatgatgacctgaggagggacctcggtcgccagttctccgtgcgccgcctgcctgctgtcgtggtgctcaagccgggcggggacgtgctgacgagcgatgccacggacgagatccagcgcctgggaccctcctgcttcgccaactggcaggaggctgctgggtttaaaggcatgcaccaccgccac

SEQ ID NO: 8590 - DNA, 479 bp, Cricetulus griseus
tgttgaagaaaaccaagctttatttcacactaagattatcttactgtctgtatgagctaataagttcaattgtatcacatgaaagtgtatgttgaagcaatataagaaaattcaattacaattatataagacctaaggttaaaacattgaattttcaagaaattttgtagtgccaatatttattgagccacatttatacagtgtcaaaagtccttttaaaactatcagaaagctatgtcataaagtctcctgtaatgtcttgcttaataacactcttttgaagcagtaatactgaggccacttatatgatatgaaaattctgatattcattttcagtatccaagcatttatattttattagttaatggtttcctaattaatatattaagccttctaagcactcagtgctgtattaactatggtcttatgttttgaactaaaaacatttcacattaattttacataaatatgcttttaat

SEQ ID NO: 8591 - DNA, 478 bp, Cricetulus griseus
ttctttttccctcaccctggacattgtccagggtattgaaaatgctgagatcctgcaggccgtgacatccagtaagggtgatgcgtttgagctgactgtgtcctgccaaggcgggctacccaaggaagcctgtatggacatttcatcaccagggtgccagccccctgcccagaggctgtgccagcctgtgccaccaagtccagactgccagctggtcctacaccaagctctgaaaggtggctccgggacctattgcctcaatgtgtctttggctgatgccaatagcctggcagtagccagcacccaaattgttgttcctggtcaagaaggtggcctggggcaggctcccttgcttgtaggtgtcttactggtgttgatggctgtggtccttgcatctctgatgtataggcgcaggcttgggaagcaggggcctgtttcccaaacgccgaacggccagcacccactggctgcgcctgcc

SEQ ID NO: 8592 - DNA, 478 bp, Cricetulus griseus
  modified_base (307)..(307): a, c, t, g, unknown or other
  modified_base (457)..(457): a, c, t, g, unknown or other
ctgtccttccgcctgagcactgagaattccatccaagttgtggaactcccggggactgtgcatgagcatctcctggaaggcctgaggcctgacagtgtctatctggtccggattactgctggcacccgtgtgggactgggagagtcatcggtgtggacctcacacaggacacccaaagccacaagtggtgaaagcccctaagtcccctgaacttcatttggaacccctgaattgtactaccatctccgtgaggtggctgcaagacaccgaggacccagccaccattcagggctacaagctgttttanaaagaggaagggcagcaggagaacggacctattttccagacactggtgacctgctgtatacactcagcggcttggtgtgtgtacattgtgtgtgtgcatgtggaaacaaaaaagaagaaagaaaaaaaaaaagtagaagtaaaaaaaaanaaaaaaaaaaaaaaaaaaaaa

SEQ ID NO: 8593 - DNA, 478 bp, Cricetulus griseus
ggagcggggcagccctgagggtgcctgttctgtgggtcatgagggctgtgtggatgtgccaatgcctaccaaaggagcccctgagcaggtgtgtggtgctgctgctgatggccggctgctgctcaggctctgatcctgcctgattcaaactcggtaacttccctgtgactgcctgcaggggggctggcctcaacccaccctttgctcaggaaatgaagccactgggtccccaaagctgttgtgccccactctctgtctgtggggtacccagttgcctccctctcaaccttagctgtctcctgtctctgaacctggaaagcaaggaacaggactgttcacttgtcctactgggcagtttccacgttttaagatatatacatagggagatatttaaatttttagagccaaaacttatacattaaaatgattccaagcccttcccactgctctacctggtgtctggccctgtggtgtgtgc

SEQ ID NO: 8594 - DNA, 478 bp, Cricetulus griseus
ggacaagggcatgctgggcggcggcagtgacgcgggcctggccaccgccgcggcgcgggggcaggtggagacggtgcggcagctcctggaagccggcgtagatcccaacgccgtcaaccgcttcgggaggcgcccgatccaggtcatgatgatgggcagcacccaggtagcagagctgctgctgctgcacggagcggaacccaactgcgcagaccccaacactctcaccagacctgtgcacgatgcggctcgagaaggcttcctggacacactggtggtgctgcacagggcaggggcgcggctggatgtgcgtgacacctggggccgcctgccggtggacctggctgaagagatgggtcaccatgatattgcaatatatctgcatgctgccactggagactgatggcaggttccctcagccttccgtcaggacttttttttaatcccagcaccatctaggcagactgcaagcacgaag

SEQ ID NO: 8595 - DNA, 478 bp, Cricetulus griseus
cgcgcgcgcaccgccgcccaccccgccgtcgccgtcgcccctcggaaagccagcggctcccgccatgtcttcgcctccagaagggaagctggagaccaaagccggacacccgcccgccgtgaaggctggtggaatgcggattgtgcagaaacacccacatacgggagacgggaaggaagagaaggacaaagacgagcaagaatgggaaagcaccagcccacctaaaccaacagtgttcatctctggtgttatggctcggggtgacaaagactttcccccggcggctgcacaggtggcccaccagaaaccacatgcttccatggacaaacatgtttctccaagaacacagcatatccagcagccccgcaagtgacctgcgcacagacccggtcactgaatgtgacatgttttcttaaatgaatttcttaatcattgacattgagaatatgttgattataataaagctcctgcattctgc

SEQ ID NO: 8596 - DNA, 477 bp, Cricetulus griseus
ttcaacactgccagctctcttggacagtaaccctttcaccgctggggcagagctgccaggtcctggtgcagagctggaggccatgccacctggactcaggcctaccctgggtgtgttccaggcagctctagaactgaccagccagtgtgagctgcaccctgaccttgtgtcccagacttttggctacttgttcttcttctccaatgcatctcttctcaactcattgatggaacgaggtcaaggccgacctttctatcaatggtctcgagccgtccaaattagaaccaacttggatctcgttttggattggctgcagggggctgggctgggtgacattgccaccgagttcttccggaaactctccattgctgtgaacctgctatgtgtgccccgcacctccctgctcaaggcttcatggagcagcctgaggactgactacccaaccctgacccctgctcagctccaccatctcctcag

SEQ ID NO: 8597 - DNA, 477 bp, Cricetulus griseus
ggcagtgtcctccctggacatccgcctgggtatcctcaggcggctttcacctgactacacccaagcctgggccgaggctgtctttatacatgaaggttacaatcatggtgccggttttgacaatgatatagcactgatcaaactcaagaacaaagttacaatcaatagaagagtcattcctgtttgcctgccaagaaaagaagcagcatccttgatgagaacaaatggccttggaactgtggctggctgggggttaacccagagtgggtttcttgctagaaaccttgcgtttgtggacatcccaattgttgaccatcaaaaatgtacttctgcatatgaaaagaagctctacccaggagggagagtaactgctaacatgctctgtgctggcctagaaactggtggcaaggacagctgcagaggtgacagtggaggggcattagtgtttctagacaatgaaacacagcgatggtttgt

SEQ ID NO: 8598 - DNA, 477 bp, Cricetulus griseus
gaacaggacagagtctcctcagctccactgcgtcctcacagcaattatgtggcctgtagcttcgcagttggagctggcttcctgtccttcctcagctgcttggtcttccttgccctagacgcccgtgagagccgtatcacaggcacccgctttaagacagccttccagctcttggacttcatcctagctgtcctctgggcaggtgtctggtttgtggccttctgcttcctagcccgccagtggcagcattcgaagttcaagcatttcctcttggggaacagcagcgccaaggcagccattgcctttgctttcttctccgtccctgtctggatattccaggcctacctggccttccaggacctccgagatgaggctccagtcccttacaagcgctccctggatgaaggtggtgtggtgctgaacactctctccccatcatccaccaccagccctgccaatcctcctaccacaggcccc

SEQ ID NO: 8599 - DNA, 477 bp, Cricetulus griseus
tgctgctgctgactcgggtgctgctccccagatccctgggactggagtggtttcccgaactctatcctggttacgttggtctaggagtgttgccaagtgggcctcagcattggaactcagtggctcagatgcctcttcctgccacttcccagggtgcaagtgtctcaaaagttccttggtggggacgaagttcggctgatagcaggagttcggaacccctggcgcttacaacttccagcatccctctaatgaggctcttgggagctgcgcacaaaggctgggtcaagtgcaacaccaccataaagaagagcggtgtcgggggcctcacgatgctcttcgccggctacttcatcctgtgctgtaactggagcttcaagcatctgaagctacagcgttggcgcaagtaatgctgaatacgtctgggagccacagagggtgaatcacaaaaaaaaaaaaaaaaaaaaaaaaaaaaaaaaa

SEQ ID NO: 8600 - DNA, 477 bp, Cricetulus griseus
  modified_base (446)..(446): a, c, t, g, unknown or other
aagaagaggagggagatggacgatgggctggcagaggggggtcctcagagatccaacacatatgtgatcaagctgtttgaccggagtgtggatctggcccagttcagtgagaacacgccattgtaccccatctgccgtgcctggatgcgtaacagcccctcagtgcgagagcgagagcgggagcgctcgcccagctcaccactgccccctctgcccgaggacgaggagggttcagaggtcattaacagcaaaagtcgtgatgtgtacaagctgcctccacccacagcccctggaccacttggagatgcctgcagatcccgaatcccatccccactgcagcctgagacccagggtacccccgatgatgaaccctccgagcctgaaccgtctccctccacactccatctaccgcaacatgcaacgttggaaacgcatacgccagaggnggaaggaggcttctcatcggaaccagcttcg

SEQ ID NO: 8601 - DNA, 477 bp, Cricetulus griseus
tccggctccggctttgctcagggtgtcagcattgaagccatgagtgagaataaaatggcgtcctctgaatttggttctgggcctgtggaaaaagctgccaaaccattgccatttaaggatcccaactttgtgcactctggccacggtggtgcagtagctggcaagaagaatagaacctggaagaacctcaaacagatcctcgctgctgaaagggcattgccatggcaactgaatgatcctaactactttagtattgatgctcctccatcttttaagccagctaagaagtattcggatgtttcgggccttcttgccaattacacagaccctcagagcaaactgcggttcagcaccattgaagagttttcctacattcgaaggctgccctctgacgtggtcacaggctacctggccctgaggaaggccacgagcatcgttccctgatcctgagaagtggggatgtagtaggaatggcct

SEQ ID NO: 8602 - DNA, 477 bp, Cricetulus griseus
cttaagcacagtcatcagtgtggccagtaagtttgcccagcttcagtatctgtggaaggtccaggactcaggagctgtgagcgcgctgacctggggcctctcttcctacacctgtgcaacaagaataataacaactttaatgaccaccaatgatttgacaattctcatccgttttgtggtcatgttggctttaaacatatgggtaacaataacagtattgcgctatcggaagcctgtcaccaaagccgaatgatggatacattctttccacacacaatggacttcaagtaactgaaccagggatgcaacgttgctttccactgctacatttaaagtcttttactagtcaatcatttcagaaattttaaatcaggtttgttagagttgaaaagcctcttatctggatatgggaagtgcaaacctacaatcctagcacttgggagttcaaggtagcctgggctatacagcagactcaga

SEQ ID NO: 8603 - DNA, 476 bp, Cricetulus griseus
cctacgaggtggctgccatctcttttgcggcatcatggctgccctccgccctctggtgaaacccaagatcgtcaaaaagaggaccaagaagttcatccggcaccagtcagaccgatatgtcaaaattaagagaaactggcggaaacccagaggtattgacaacagagttcggagaagattcaagggccagatcctgatgcccaacattggttacgggagcaacaagaaaacgaagcacatgctgcctagcggcttccggaagtttctggttcacaatgtcaaggagctggaagtgctgctgatgtgcaacaaatcttactgtgctgagattgctcacaatgtttcctccaagaaccgaaaagccattgtagaaagagcagcacagctggccatcagaatcaccaatcccaatgccaggcttcgcagcgaagaaaatgagtagatggctggtgtgcatgttttatgtttaaataaaa

SEQ ID NO: 8604 - DNA, 476 bp, Cricetulus griseus
gaaggtgagccagagccaagatggctgtcctctctaaggaatatggattcgtgctcctcactggcgctgccagctttgtcatggtgctccacctagcaatcaacgtgagcaaagcccgcaagaagtacaaggtggagtacccggtcatgtacagcacagaccctgagaatgggcatatcttcaactgcatccagcgagcccaccagaacacgttggaagtgtaccctcccttcctatttttcctaaccgtgggaggtgtttaccacccgcgcatagcttctggcttgggcctggcctggattgttgggcgagttctctacgcatatggctactacacgggagatcctagcaagcggaatcgaggatccgtggggtctattgccctccttgccttgatgggcacaactgtgtgctctgctttccagcatctcggctgggttagacccggcttgggcagggggcccaaatcctgccac

SEQ ID NO: 8605 - DNA, 476 bp, Cricetulus griseus
ggccgcgggcgcggcgtcctcggccaacctgaacgcggtgagggagaccatggacgttctgcttgtagatttcaaggattttgaatactggtttagatatggaaacactgtctatttgtgtacggctttgtgaacaaggaatcaatccagaggctttatcatccgttattaaggagcttcgaaagggtactgaagcactaaaggctgctgaaaatacaagctgattgacggggaagtcctgagcagatatttcaagctctgcaagaaaatttgaagattgcattgtagtcaagatgtacaatgataatcctgctttctgcatagaaaatgttttcttttaaaaagaattataaacccgtgactgtgtaagccagtgggaagtggcttaaggagaactagtgggcatgtttacgtcacagctatcttgttgttaacggtcccaagtccatggcgttgctatgctcttatttatgtat

SEQ ID NO: 8606 - DNA, 476 bp, Cricetulus griseus
cgacggagctgctggcgcgcgcgggcatcactctgtgcgtcaacgtctcccgccagcagcccgggccgcgcgctcccggggtggccgagctgcgcgttcccgtgttcgatgaccctgccgaagacctgctgacgcacctggagcccacctgcgccgccatggaggctgcggtgcgcggcggcggcgcctgcctggtgtactgcaagaacggccgcagccgctcggccgccgtctgcaccgcctacctcatgcgccacggcggccacagcctggagcgcgccttccaggtatggtgaagagcgctcgcccggtagccgagcccaatctgggtttctgggctcagctgcagaagtatgagcagacactccaggcccaggccctcctgcccggggacccggctgagcccgagtaagccgcgccgttcagctgctggggtggccagacgtctacactgaaaggtgttccttccctctttt

SEQ ID NO: 8607 - DNA, 475 bp, Cricetulus griseus
tttctttgtgtttgctgcttttcctcctccgctcatgtaatgcactccctgaaccaagaaatcaaagcattctcccggaataatctcaggaagcagtgcaccagggtgaccacgctaactggaaagaaaattatagaaagctggaaagatgccacagttcatgttgtggaagcagagcccagcggtggggtggttgtggctatgtgcaggaccttagcttggacctgcaagttggcgttattaagccctggttgcttctggggtcgcaggatgctgctcacgatctggagctcctgagaaagcacaaggtgactcatattctcaatgttgcatatggagtttgaaaatgctttcctcagtgagtttacatataagaccatttctatattggatgtgcctgaaaccaatatctgtcttattttccagaatgttttgagtttattgagctaagcaaaactgaaggatggcgtggttc

SEQ ID NO: 8608 - DNA, 475 bp, Cricetulus griseus
tgactcctggtacctgggtgtcaccttgtacctaggcccgaggacagctgtttcccatggtgctgttggtcctcttgctgctgggggaggccttgcatttgcagcttcagtgaagcccagcaggggcagggctggcccctgctcctcaaccaacccccagagaggtgccggcaccctaactgtggtgttttctaactgtccctttttttatatttaactcaggatagtgctgagatttcatacacattttctgggtttttgtaaggcaaatgaattcactatagctcaggggcattactggctaaatgcccctgaggcctggctggcccctctcttgacccctgcctgccttttctctgcaggctggtcctgtggccaccagtgggggagtgctggccacacccctggccttgtgaagccttgaggcacagaatctactggactagattccttgggtggagagttcaataaagtg

SEQ ID NO: 8609 - DNA, 475 bp, Cricetulus griseus
ctcacgcagctgcaggacgcggtgaactcgcttgcagatcagttttgtaacgccattggagtattacagcaatgtggtcctcctgcctcttttagtaacattcaaacagcaattaataaagaccaacccgccaaatcccacagaagagtatgcccagctttttgcagcactgattgcacgaacagcgaaagatattgatgttttgatagattccttacccagcgaagagtcgacagctgctttacaggctgctagcttatataagctagaagaagaaaatcatgaagctgctacatgtctggaggatgttgtttatcggggagacatgcttctggaaaagatccaaagtgcgcttgccgacattgcacagtcacaactgaagaccagaagtgtcacccgtagccagtcgcttccagattcctagcaacaacagaaacaggtgactgagaaaataactggttgaagggcactaaga

SEQ ID NO: 8610 - DNA, 475 bp, Cricetulus griseus
agcgcaacctctcctatggcagtgacaatgactctgcgcagccaatgaggcgaaggaaagctcataacagtggtgaagactcagacctaaagcagaggaggagatcacgctcacggtgtaacacaagcagcggtagtgaatcagaaaattctaacagagagcaccgtaaaaagagaaacagaataaggcaggagaatgacatggtggattcagcgcctcagtgggaagccgtcttaaggcgacagaaggaaaaaacccaagtggatcctaacaacaggcgatccagacacagatctcgttcaagaagtcctgatgtccaagccaaagaagagctatggaagcacatccagaaggaactcgtggacccatcggggctgtcagaagagcagctgaaggagatcccatacactaaagtggagactcagggtgacccagtccgcatcaggcattcgcattctccacggagttacaggca

SEQ ID NO: 8611 - DNA, 475 bp, Cricetulus griseus
caggttcggcgtttggtggaggaggtaacagatgacaagactctgcccaaactggaaagaaagcggcaacaggtagagcaggcaccccacagcagcccaggggccaaactggtgaagctggcagacaaactatacaatttgagggacctgaatcgctgcacccctcaaggatggtcagaacagcgagtccaggaatacttcgagtgggcagcacaggtggtgaaggggcttcaaggaacgaaccagcaactggaagaggcactaaagcagctgttcgaggagcgagggctgactctttgagcggtgtttggtgacatgcatggctccagcaaggcccagcaaaatgggattcttactgttgctttcagagccaaacccatctctcacattccttcacccaacgcatacattaccaggctaaaaacgtctgcatttctactcagctgagccccaaatatggaaatcaggtataccc

SEQ ID NO: 8612 - DNA, 475 bp, Cricetulus griseus
ggatgcctggagtcactgtaaaagacgttaaccagcaggagttcgtcagagccctggcagccttcctcaaaaagtccgggaagctgaaagtccccgaatgggtggacacagtcaagctggccaaacataaagagcttgccccctatgatgagaactggttctacacacgagctgcttccacagcacggcacctgtacctccgcggtggtgccggggtcggctccatgaccaagatctacggaggacggcagagaaacggtgtcagacccagccacttcagcagaggctccaagagtgtggcccgccgcgtcctccaagccctggaggggctgaagatggtggaaaaggaccaagatgggggccgcaagctaacacctcagggacagagagatctggacagaattgccggacaggtggcagctgccaacaagaagcattagaacaaaggatgctgggttaataaattgcctcattc

SEQ ID NO: 8613 - DNA, 475 bp, Cricetulus griseus
cgtgaacatgggaaagcaaaagaaaacaaggaaatatgcgacgatgaagcgaatgcttagtctcagagatgagagacttaaagaaaaggatagattaaagcctaaaaaggaagaaaagaaagatcccagtgcgctgaaggaaagagaagtcccccaacatccttcctgcttgttcttccagtacaatacacaactgggtccaccttaccacatccttgttgataccaacttcatcaacttttccattaaagccaaactggacttagtgcagtcaatgatggactgtctgtatgccaaatgtatcccttgtataactgattgtgtgatggctgaaattgagaattgggacagaagtatcgagtagcactaaggattgccaaggatccacgatttgaccgactgccgtgcacacacaaaggacctatgctgatgactgcttggtacagagagtcactcagcacaagtgttacattgt

SEQ ID NO: 8614 - DNA, 474 bp, Cricetulus griseus
cgactggcgttctatggcgtccgcctcggcccagcccgcggccctgagcgcagagcaggccaaggtggtcttagcggaggtgattcaagcgttctcggccccagagaatgcggtgcgcatggacgaggctagagacaatgcgtgcaacgatatggggaagatgctgcagttcgtgcttccagtagccacacagatccagcaggaggttattaaagcctatggctttagttgcgacggggaaggtgtccttaagtttgcccgcctagtcaagtcttacgaagcccaggatcctgagatcgccagcctgtccggcaagctaaaggccctgttcctgccacccatgacactgccaccccatgggccagcttccggaagcagtgtggccgcctcctgagatttgttcttgtctgtgtaccactgctagggaagaagaccctgtgttccagaggataataaatgtgcttgtgaactaaa

SEQ ID NO: 8615 - DNA, 474 bp, Cricetulus griseus
cggcgctcctgctcccatcgcttcttccttcttcttccgagtgcctgagcagcggcgtcccggggagcggtcggcgaggcgctcgcgagcgaagggcgctgtggccgggagaagcactcagcatggccgagaacagggagccccgcggcgccgtcgaggccgagctggaccccgtggagtacaccctccggaagcgacttccccaccgcctgccccggaggcccaatgacatttatgtcaacatgaagacggactttaaggcccagcttgcccgctgccaaaagctgctggacggaggcagcagggggcagagcgcctgcgccgagatctacatccacggcttgggtctggccattaaccgcgccatcaacatcgccctgcagctgcaggcgggcagctttgggtccctgcaggtggctgccaacacctccaccgtggagctggtggatgagctaggaaccagagtattgactc

SEQ ID NO: 8616 - DNA, 474 bp, Cricetulus griseus
  modified_base (122)..(122): a, c, t, g, unknown or other
cttattagatggctgcccgtactgtgcaatggactcacgcacatggtgtttcagaagacttgagatgccaatgatgtttaaaaactgtgcacctgacggagaactaaggaagacaatttcangtttcatccggatccagaggtgcgtaagattagacagcagctccacttggcaaacagccattacatgatggtgtccaagaaaaaatggtctgtgataaacaaattcacaactatttccccaaaggtagatggttctttgaaaagtttcacaacccttgcagaaaacaccaatgcccaacatgatgattctaagtccaagagacatgggtcttctcagtaccacgtggcaggagtgccccaacaagcatgtatctgtgctgtaataaaagggtcctttggattggacagaagagatggtagcaaacgccatcagtcatagtggatggcagtgtaaaagatgatccaaatgacc

SEQ ID NO: 8617 - DNA, 473 bp, Cricetulus griseus
ttgggatgctgcagctcgtggttggtcgcagcggttcggcccctgctagattcctgtctagttccacgatgcctaagaaagccgggacgatgagcaagggtaaaaaccaaaccaaggaacctgaaacaccacctcctcctgctgggcctgtgacaactgatcctaaaggttgtgtcaccattgccatccatgccaaaccgggctccaaacagaatgctgtgacagatctgaccactgaggctgtcggtgtggcgattgcggcccctccatctgagggagaagcaaatgcggagctctgtcggtatctttccaaggtcttagagctcaggaagagtgatgtggttctggataagggtggtaaatcgtcgggaaaaggtggtgaagctcttggcctctacaactccagaagaggtcttggagaaactgaaaaaggaagctgaaaaaaataaaggcaagaaatggcgaaacagctg

SEQ ID NO: 8618 - DNA, 473 bp, Cricetulus griseus
  modified_base (304)..(304): a, c, t, g, unknown or other
  modified_base (323)..(323): a, c, t, g, unknown or other
gaactctgaatgatagccacctgcttcgagaggatgtggagttccggcccttgaccttgatgacactagtgggacctgggacttatgggacagcagggaacagtgaggtgcagcgaatgccagtccgggtgcttgacacagacaccatcacccaagtcaaggagaaggtgttagatcaagtctacaagggaactcccttctcccagaggccttcagtacactccctagaccttgagtggcgctcaggcctagctggtcatctaaccctgtcagatgaggacttgacctccgtgactcaaaaccnctagggaagagactcaacnccctgcaacactattccaggccattcttagtgtgaatcggcccgtgcctattgctgttaagtacctatttgacttcctaggaattgagctggcagagaaacatggcatagaggatccagagacctgcacatttggaagacaaacagccta

SEQ ID NO: 8619 - DNA, 473 bp, Cricetulus griseus
actttttttttttcttttttttctttttttttttttttggtggaagggcccctccacctacttctccctggttttgacagtgttagtgtctgtgaaaagacaatattctctctaaagcaataagggggtgatgggccagggggaaatgtcttgctgctgctggccccccaactccccttccctcttgccattatggtggcattggaggaagggggagagactcctgttgtgactgaatgtagtaacctaccctgcccctgccacagccaatgcaggggaaggggggtacttgtctcttcctaccccttcccccagctaaagagactttgaacttggggcccatgagcctggagaggccttaaccctgtgaggaagtgtagggggagccctctcccatcccatcccctctgagagtggtcaatgtttacaagccctgagcccctagcccagggctcagataccccacccccatc

SEQ ID NO: 8620 - DNA, 473 bp, Cricetulus griseus
gaatgaagtaaactacgtgaacaccttcagaaaaggagggcagttgtcaccagtgtgtaatggaggcatcatgacaccaccgaagagtactgagaaaccaccattaaaacactgaagttaacaacaaattggaattgagcaaatactggatagaggttcatacacatgagtaagttacaggaaagtagtgctgtggctatccttgcctagctttatgtttggaaaactgtcagtctatttttaagccctatattatgagatgaggaccgtgtcaacatggtaaaacttatgtgacctaaaattctattttctatggcagaaaaaatattaaatgtatactgactcctagaaatctatttatttaaacttactgtatatacaatagctacttatacattaaatattttaagttagcctttgaaaaggaaatttgggcccaaaagtcagtttcattagaacaaaagtgataccag

SEQ ID NO: 8621 - DNA, 473 bp, Cricetulus griseus
gaggacatggggctggaggagcatccatcctgacattctgggatgctagaatgtataaaatggctgttggatttatgttggcgcatccttatggattcacacgagtaatgtcaagttaccgttgggcaagaaacttccagaatggaaaagatgtgaatgactggattggaccacctaataacaatggagtcacaaaagaagtgaccattaatcccgacaccacttgtggcaatgactgggcctgtgaacatcgatggcgtcaaataaggaacatggttgccttcagaaatgtagtcagtggccagcctttctcaaactggtgggataatggcagcaaccaagtagcttttggcagaggaaacagaggattcattgtctttaacaatgatgactggtctttgtcaacaaccttacagactggtcttcctgctggcacatactgtgatgtcatttctggagacaaggttgaatgg

SEQ ID NO: 8622 - DNA, 472 bp, Cricetulus griseus
accccactgcacgacgctgtgaggctgaatcgctataagatgattcggctcttaatgaccttcggggcagacctcaacaccaagaactgtgctgggaagacccccatggacctggtactgcactggcagaatggaaccaaagcaatattcgacagcctgaaagagaatggctacaaaacctctcgcatagctacattctaaggaaggagactatctgcaggagctgttcacaggcatttccaaagcactgcttaacagaagagcaagcagctatatccagcttttgtctgccagagggtagggagaaagacttacagacgctgcaagaaagcgctgggttataggtgtcaaaactctccttcagtgttgctcactattgtatttattcctatttattatttatttatttcctaacattgatattcaggctttcacgagcattttttggggggagtaaaacttaatctgtatg

SEQ ID NO: 8623 - DNA, 472 bp, Cricetulus griseus
cttaaagaagagcttaattttgttactgtggatgaagttggagatgaagaggatggagacaacgattcaaaagttgttttagcacaaggcaaaattgacctccatacagataaaaaaggaaatagaaagaggagagctgtggacacaaagaagacaaaacttgaatctttctcccaagtaggtccaggaagtgagactgttacaaaagatcagaaaaccatgattgaaagacctacagcagttgaagaagctgatttaaagaatttggaacctgatgaaaaacgacaagaagaccgaagattcttctgtaggcaaatcagtgacacctgatgtgccaggagatttggactttcttgttccgaaggctggatttttctgtccaatctgctccctgttctattcagatgaaaaagcaatggcaaatcactgcaagagcaaacgtcataagcaaaatacagagaagttcatggcc

SEQ ID NO: 8624 - DNA, 472 bp, Cricetulus griseus
aagatacaaaaactccttaatcgagaagcaagaaatcatacactgagttttaaagaagcaaagctgttgagaaagtacaaagactccgcaagtgtgctgctggttacctgtagaacatgcaacagaacaatgaaacaccatgggaagagtagaagtttcctgtccgccttgaagagtaatactgccactgctacaaacaaagccaacctgaaaacaccacagagaaagactccaggctccacaaacccaagtcataatgtgtctagttccaaaggcaagagcccctccttgaccatcagaacacctgcatctggacagtcaacacccatttgctcctcaaggaacgggagcaaaagaaaaaaacacttctctcaactaaaagcgctgcttagtcagaacgcatctgagaagagcccaaagctggacttcaggcacttcctttcctctctgtgaaaagacaggcctttgaaag

SEQ ID NO: 8625 - DNA, 472 bp, Cricetulus griseus
tcgacttttggcgttcagtagtcgcggttggtgggcagcaactgaaccaagatgttgcggaatctgctggccctccgtcaggttacccagaggaccatcagcactacttcacgacggcattttgaaaacaaggttccagagaaacaaaagctgtttcaggaggataatggaatcccagtgcatctgaaaggcggggcatctgatgctctcctctacagactcacaatggctctgacacttggtggaacagtgtacgccatctatcagttagctatggcttcatttcccaagaagcagaactgacttcatcatcccagccttcccatggttcagttgcattcagcgctcgacggaccaggaatctgatgagtaactgagctcttcttaggggatcaatatttattgatgtgtactaactgccaccaataaagcagtctttaccatgctttgtctcccttttcacttgaaataa

SEQ ID NO: 8626 - DNA, 471 bp, Cricetulus griseus
ccgaccatggccgagcttggtgaagcagacgaagcggagttacagcgcctggtggccgcggagcagcagaaggcgcagttcactgcgcaggtgcatcacttcatggaactatgttgggataagtgtgtggagaagccaggaaatcggctagactcccgcactgaaaactgcctctctagctgtgtggaccgcttcattgacaccactcttgctatcaccggtcggtttgcccagatcgtacagaaaggagggcagtaggccatacctcaggaatgacagaagatccaaaagacttgttactaggcagattgaatggccagtggagagttgtcaacatgttgagttagcatcaggcagctaccaagtctgttggtgctaaaaagtacagatcaaatgtccaaaagtgaaatttatttattggaattcagtaattccaggttgtatcacaccggttaataaatgtgacgtctc

SEQ ID NO: 8627 - DNA, 471 bp, Cricetulus griseus
ctggccaagaaggtgtctagccggtgcctttggagccagggtttaactactgccaaggcatttactgctggcacattgggcagcccaacgaagccctgagatttctgaacaaagcccgaaaggacagcacctggggtcagattgccacctgccacatggtacagatctgcctgaaccctgacgacgagatagtcggtggagaggtctttgagagcctggtgactgatagcaactctgccagccggaaagagtcccagcagcacggagtacgcactgcagagaagctcctgcgggaattctaccctcactcggactccgggcagacccagctgcggctgctgcagagcctctgtctgctggccaccagggagaaggcaaacgtagagaccggccctgggtgcctttatcgagatggcccagaccgagaaggacagccatccctgccttgctggccatggcacaggcctacat

SEQ ID NO: 8628 - DNA, 471 bp, Cricetulus griseus
cagggttctctgtgtagcctgagaatagattatctgaaatttccccggagtcgttcaataaatttaacggcaatactgtgattttattagaaactgagaagtctccaagcaaggttaaaggacaaaaggaagagaaaggcaaaaatatagatgcttcatcaagtaactcggctaggcctggcggagacaacaacgtggagtctctgagtgactctttgtatgatagtttctcctcttgtgcaagtcaaggctccaatgaggcctagaggagcacccctcagtgcgacctgaacacggtgcactaggaaaatgatagagaattctcaatgtttgcacttttttgagtatttgtataaaagctgtaaattctgggggaagagaaattatatttgtagggggagaaagatagcaataaaaagagttggcgccatgctcttgaaatgatgtattaagttttagaagttgataata

SEQ ID NO: 8629 - DNA, 470 bp, Cricetulus griseus
ggccactggaggagagcagggtgcagcgcctgcaggctttggagagagagccgcaatgttccggatcgagggtctcgcgccgaagctggatcccgaggagatgaaacggaagatgcgcgaggatgtgatctcctccattcggaacttcctcatctacgtggccctgctgcgagtcacgccatatatcttaaagaagttggacagcatatgaagattgggatcacatggatgcatggcatgaagaacctggtgacagtttctcctcctgtctgcagatgaattggcccagaaaggtgtaagactgattaaatggacataaaaactactctacttgttaagaacaaagttgggccttgggaactgaccttcatagctgaaatataaaactgtttgggaagtgcagaaagatagtcttgtggtctggtgtgtcccttgggcctgtgagagccacctctgtgagtgttgatgga

SEQ ID NO: 8630 - DNA, 470 bp, Cricetulus griseus
ctcatcttggatctttggggggatgaaggagcccctcacatgcaggccttgcacttcagtttcgctttgggtgccttcctggctcccctgctggctaaattggcctggggaacatcagcatccactcagaaccacacagagcctgactttgaccttctaatgctcaacggatcctctgaagccacctcagactctctgtttgcagtacctgaggacatgaacctgctgtgggcatatgcttccattggcacgtatgttttagtggtgtctgtctttctgtttggtctgttttgtaaaaaaagctcaaggcaggaaaaagccacagtatctgctcaggaagctcgaagagctaaatatcactgggccctgctctgtctcctcttcatcttcttcttttttatgttggagccgaggtgacctatggctcgtatgtattctccttcgccaccacccatcgttggcatgaaaga

SEQ ID NO: 8631 - DNA, 470 bp, Cricetulus griseus
tcctgacatgggactagaggacgaacagaagatgcttaccggatccggagaccccaaagaggaagaagaggaggaagaattagtggaccccctaacaacagtgagagagcaatgtgagcagttggagaagtgtgtaaaggcccgggagcggctagagctttgtgatagtcgtgtgtcttcccgatcacagacagaagaggattgtacagaggagctctttgacttcttgcatgcacgtgaccactgtgtggcccacaaactctttaataggttgaagtaactgcacagatcatccacctcagccttgtcacagggcatcaggagaagttccttgtagttttgaaccatttgtttctaatgtgtattctggagaacttcaatgattatggcaagtagcttctcttccatgtaattagcaattccatctgaataaactgatctgaacaaaaaacaaaataaaaaaagaaaaa

SEQ ID NO: 8632 - DNA, 470 bp, Cricetulus griseus
tgctctgaacttaagtactctttgtcatggaccgcacagtagtgctcattaccggctgctcctccggaatcggcctgcacttggctgttcgtctggcttccgacccatcccagagcttcaaagtgtatgccacactgagggacctgaaggcacagggaccactgttggaggcagcccgggctcgaggatgcccgcctggctccctgcagacattggaactggatgtcagagattcagaatccgtggccgctgcccaggcatgtgtgaccgagggtcgcgtggatgtgctggtgtgtaatgccggacggggcctgttcgggccactggaggcgcatgagctggatgcggttggcgccgtgctggatgtgaatgtggtcgggacggttcggatgctgcaggcctttctgccagacatgaagaggcgccactccgggcgtgtgctagtgactgcgagtgtaggaggtttgatg

SEQ ID NO: 8633 - DNA, 470 bp, Cricetulus griseus
gtgtttggtacccgctgccatgccgaagcggagctgcccgttcggggacgcttccccgctgcagctcaaggtccatgtgggcccgagagagctgagccgcggggtgttcgcccagcgctactcgcgggaggtcttcgaaagaaccaagcagctccttttccaaggggcccaggcctgtagagaccacatatggggtgaaagatgtcccatcatccacctgccggagtcactgaagcctggcctggtgggggcccctcaagctgcaaggggacagatgctgattggacctgatggccgactgatacggtgcccagctcaggcctcagaagctggtctgcctgggacagctcccatcgcttgctcatcctgtgtgagatctgcagatgggaaggcggtctgcagccagtgcgaccgtgccctgtgtggacaatgtatatacacctgctggggctggcggtgcccttggcctg

SEQ ID NO: 8634 - DNA, 469 bp, Cricetulus griseus
taaaaagtattgaggaattagcaagaaaaatctccttttggagcacagcttggaaaccaaaaggcaaaccgttttagataagtatgaattacttatacaaatgaagtctacctttgaaaagaagatgcaaagacaacatgaactcagtgagagttgtagtgcaagtgccctacaggcaagattgaaagtagctgcacatgaagctgaggaagagtctgataatattgccgaggatttcttggagggaaaaactgaaatagatgattttctcagtagcttcaaggaaaagagaacaatttgccactgtagaagagctaaagaagagaagcttcaccaggtgattgcaatgcacagccaatttcatgctcctctatagattttccagaaaacatgaatcaagaaagaaatagggaacccaaaattaagacacattgtttatatttattttaacacaaatttctgaaatgcc

SEQ ID NO: 8635 - DNA, 469 bp, Cricetulus griseus
ctcaagaccacctttcctctcaagaaggaagagcaaatccaggagctaattgaggcagcaggctggagtccagacatcaacaatgtagaaatgttcaactaccgaacattgtttaccgaggatgaggaggggcaaagcgagccattcgtgcagaagctgtgggaacagtatgacagtgaaaaggaagcatacttacaagaattgaaggaggatctgggccaggagctcactgatgaggtgagcctatcgaagatgcgtgtggccctgatgaacatcgatcccagcttggacaagcagacactgtgtacttacctgagccaggcctttcagctccctgtggcagaactgccattggaggatgaagagaagcaggaggaaattgtggtaaaacttgagactgcacttgaacagcttcggatagcagacaccaaaacgtgtaggacttcgagagccagaaccagcaagctag

SEQ ID NO: 8636 - DNA, 469 bp, Cricetulus griseus
attgacaggatcgagtacaatgtggaacacgccgtggactacgtggaaagggctgtgtctgacaccaagaaggccgtcaagtaccagagcaaagcgcgcaggaagaagatcatgatcatcatttgctgtgtgattctgggcattgtcatcgcctccaccatcgggggcatctttggatagacaccagccccaaccacctctccactctggatgggtctccttgaggaggcccctggctgctgcgcctagctgggttgccctccctacccctgccttctggctgggagcccttttcctcccatcccacactgctccctctctgccatgaggctcccgttcccaccaccctgccccaagccgtgtccgtgtgcatgatcttgtgacagtgtgtgtctgtacaggaggcagagaggggagcaggatcaggatcaaaccaggaggggctggggacagggtcagtgtgggcaag

SEQ ID NO: 8637 - DNA, 469 bp, Cricetulus griseus
agaatacccactcctcagcaccaatgcctccaccttcagtggtgatactgaattccactctaatacacagcaacagaaaatcaaaacctgagtggccacgagatagtcacaacactagccctggacaaacaagccaggacagtagtcagccaaacaagatgcagacatccacacaggatccacctcaaacccgactggaagacttctttgtctatccagctgagcaaccccaaagtggtacaattgaaaaatctaatccatgtgcaaaggaagataataacaagtctggagaagacactttcaaagaaatctttcagtctaattcaccagaagaatctgaatttacagtgcaagctcctgggtctcccctagttgcctcgtctttattagctcccagcagtggtctttcagtcccaaccttccctccagggctttactgcaaaacaagcatggggcaacaaaagccaac

SEQ ID NO: 8638 - DNA, 469 bp, Cricetulus griseus
cctgtgtgcctggtgtctggtagaggaaaggagatggcacttcaaagacatgaaaccttatattacatggtcttggatgtttttaagcataataagctacctggatttcggtactttccttttaagttaaaataatctgtatttctaattgcatatttaattttgtcaaccaacattgagaaatgttcatgagttgaatctgtaaatgtaatttgcaaccaaatgaagtatttatttttaaaagaaaaggtgaaggaaccaatattgacttgtacataatgaaaatatgtgtgtatatattttttccttctttgacactacttgatcattatgtcaagtgtatttttgtacataatatatattggttagaaaattttttagtattgtctattgaaagaaattctatctctgtgatagattatatttatcctaatctattgatatttgatttgttttaagagtacagaac

SEQ ID NO: 8639 - DNA, 468 bp, Cricetulus griseus
  modified_base (453)..(453): a, c, t, g, unknown or other
  modified_base (457)..(457): a, c, t, g, unknown or other
  modified_base (461)..(461): a, c, t, g, unknown or other
actccacgcccgagaatccattttgggtagaaaccctacgagtgtgatgactgtggtaaagcctttcgagtccgccaacagcttacatttcatcagagaattcatactggcgagaagccctatggatgtaagcagtgtgggatggcttttcggcagactgcacaccttagcagacatcagaggcttcattctggtgacaaaccgtatgagtgtaaggagtgtggggaagcgttcacctatggcccagaccttagagcacaccaaaagactcacagcggtgagaagccatacgcctgtaaggagtgcggcaaggccttcagggtacggggacagctgactctccatcagaggatccacactggggagaagccctatgcgtgtaaagaatgtgggagggccttcaggcagtacgcacacctcactcgacaccagaagcttaaataataatataanaaanaaanaaaaaaa

SEQ ID NO: 8640 - DNA, 468 bp, Cricetulus griseus
ggtagaagggcagtcacgcctttgtggagaacaggtcgctgtggagtggctcaagccagacctgaagcagcacttccgccaacagcttgcgggcccctcactgcggttcttacgcccagagggcagccaagtagcccagagcagggacaggctagggtcccaaggggctcgggctgctctgcagctgctgtgtcaacgaatgaagttgggcagcccaatgttccttaccaagtgtttaggtacagggcctgctggctggcatcgcttttggtaccaggttgtaatccctggacacccagtgccttttagtggccttatttgggttgtgctggcctctgattggcaggatgggcatgaggtggccaaggatgctgtgtctgcacagttgctggaaatactgagtgagtctaggaccagcttgtggtctcctagggctgaagcaggtactatagttaagcagtaaacccc

SEQ ID NO: 8641 - DNA, 468 bp, Cricetulus griseus
ccaggtctccgaggcgacatagatccacatctccttccccttctcgaactgaaagaaagaagagacgaggagaagaaagaaactaaagaaacaaagagcaaagaacgtcagattactgaggaagatttggagggtaaaacaagaggaagaaatagaaatgatgaaattaatgggatttgcctcctttgactccacaaaagggaagaaggtggatggctctgtaaatgcctatgccataaatgtgtctcagaagaggaagtacaggcagtacatgaatcgaaaaggcggattcaacagacctctggattttattgcatgagacttgaggtgttggaggatttcctcccccttcatctgggtcagagagtattttatattttgtatttaatacacctcaaaacaggatcttggttcttccttcttataaagtaagaaagtcttatttatgacacccagtgtacttacttt

SEQ ID NO: 8642 - DNA, 468 bp, Cricetulus griseus
atgacgacttcttaggggcagcagagtgctccctaggtcagattgtgtccagccagactttgactctacccttgatgttgaagccgggaagcctgccgggcagggaaccattactgtttcagctcaggagttaaaggacaaccgggtagtaaccatggaggtagaagctagaaacctagacaagaaggacttcctaggaaaatctgatccgttcttggagttcttccgccaaggtgatgggaagtggcacctgacttaccgatctgaggtaatcaagaacaacctgaaccctacatggaagcgcttctcggttcctcttcagcatttctgcggtggggacctgggcacacccatccaggtgcgctgctcggactatgacagtgacgggtcacatgatctcattggtaccttccacaccaccttggcccaacttcaagcagtcccggctgaatttgaatgtatccaccc

SEQ ID NO: 8643 - DNA, 468 bp, Cricetulus griseus
gtcagctcacactgcctgcgagcggcagctttctatgttcgaggactcttctccttcttcaggccgctacaatgaagccaagcgatttcttcgagaaactctaaagatgtcgaatgcagaggacctgaaccgcctcacagcctgctcccttgtactgctgggccacatcttctatgtgctggggaatcacagggagagtaataacatggtggtgcctgccatgcagctggccagcaagatcccagacatgtctgtgcagctgtggtcatcagccctcctgagagatctaaacaaggcgtgtgggaatgccatggatgcccatgaggccgcacagatgcaccagaacttctcacagcagctgctgcaggaccacattgaggcctgcagcctcccagagcacaacctcattacgtggacagatggcccacccatttaattaactttttttttttttttttgcttcgtagg

SEQ ID NO: 8644 - DNA, 468 bp, Cricetulus griseus
aggaaaatggattggcaccagggggcttttcaagtctagcaagtcaagagacccctgatccaagaaaggaagcttgacgttgttgctcagcgacttgtattacggacagcataaaggagatgggcagccagagcagaagactcacacgatcttcaagtgccccagctgtttgaaagcgctaaaaaacgtcaagtttatgaaccacaccaaacatcacgtggaacttgagaggcaggggaacgacggctgggagagccacaccacctgcctacattgctaccggcagttcacctcccccttccagctggagtgccacgtcgaccgcgtgcacaccgctcccaaccccgccacagtctgcaaaatctgtgacttgtcgtttgaaacagatcaagttctcctacagcacatgaaggacaaccacaagcccggggaaatgccctatgtgtgccaggtctgtaagtacaggtc

SEQ ID NO: 8645 - DNA, 468 bp, Cricetulus griseus
  modified_base (35)..(35): a, c, t, g, unknown or other
  modified_base (101)..(101): a, c, t, g, unknown or other
  modified_base (113)..(113): a, c, t, g, unknown or other
  modified_base (125)..(125): a, c, t, g, unknown or other
  modified_base (130)..(130): a, c, t, g, unknown or other
agcaacgccatcctgcgctacattgccgcaagcanaacctgtgtggagagacagaggaggagaggattcgtgtggacattgtggagaaccaggctatgganaccgcatgcagntcatcatgctcngttanaaccctgactttgagaagcagaagccagagttcttgaagaccatccctgagaagatgaagatgtactctgagttcctgggcaagcggccatggtttgcaggggacaaggtcacctatgtggatttcctcgcttatgatgtccttgatcagtatcaaatgtttgagcccaagtgcctggatcccttcccaaacctgaaggacttcttggcccgctttgagggcctgaagaagatctctgcctacatgaagactagccgcttcctcccaagccctttgttttcaaagatggcacagtggagtaacaagtaggcccctgctgctgtgaaaaaaaaaaaaaa

SEQ ID NO: 8646 - DNA, 468 bp, Cricetulus griseus
ctacgaggagacattctgtttcactaaatccaaacatgctgaagttaaaatgtcccctaaagaaaagattaaagaaaagattttagagctcatctctcgaacagtttctgcatttgcaaacactgaagggggatatttgttcattggtttggatggaaagaaacaacaaataattggttttgaagcagatgagagtgatcttgggcacctagagagtgaaatagaggagtgcatccggcagctgcctgtcattcacttctgtgaggagcaggagaagataaagtacacatgcaaattcatcccagtccacagacagggaactgtgtgttcatatgtctgtgcgctcagagtggagagattctgctgtgctgtgtttgctgcagagcccaattcttggcgcgtggaaggcagctgtgtgaagaggtttaccacagaggaatgggtggaatgcagcagcagtattcttgg

SEQ ID NO: 8647 - DNA, 467 bp, Cricetulus griseus
cccgggccatggaggccctgcggagggcccacgaggtcgtgttgcggctactgctgtgccggtcctgggccttgggcgccgcctcccgcccgaagccccgcgcctcggaagtgctgacgctgcacctggtgcagcggcgcctgccgcactggacctccttctgcgtgccctacagcgcggtccacaacgaccagttcggcctgtctcacttcaactggccggtgccgggcgccaactaccacgtcctgcgcaccggctgcttccccttcatcaagtaccactgctccaaggcgccttggcaggacctggcccctcagaaccgcttcttcacggcgctcaaggtcatcaacctgggtattccaactttgttatatggacttggctcctggttatttgccagagtcacagagactgttcataccagttatggaccaataacatctatttctaataagaagatagaaggt

SEQ ID NO: 8648 - DNA, 467 bp, Cricetulus griseus
gcgtttgaaacatggcggacgacgtagatcagcaacagactaccaataccgtagaggagcccctggatctcatcaggctcagtttggatgagcgaatttatgtgaagatgagaaacgaccgagagcttcgaggcagattacatgcttatgatcaacatttaaatatgatcctgggagacgtagaagaaactgtgacgacgatagagattgatgaagagacatatgaagagatatataaatcaacaaaacggaacatccccatgctcttcgtccggggagatggtgttgttctagttgcccctccgttgagagtcggctgagacagaaaatggtcctgtgtaggaaaatggagactttgcctcttgagatgtacagaacactcacagagagaagctcatgtgtattctgatagtcagaaatgacccgaggactccctccaccctcaaagagttcatttgcgagtaact

SEQ ID NO: 8649 - DNA, 467 bp, Cricetulus griseus
gcctgcaggttggagtacgacgccgctcggcgggaggtggccgtcctgtcggacgacatcgacccccgggccttggtggaggtggacgcgcccctcaggtttgacttgagtatcgagtcatcaggatcaggctctgtaacggtgcagaatattgaatgtgactgctgtagaattgacactgcccaggggaccagcatcctgcagtctgtgaagagccaaaaattcatgttcaaacaaaaggaggcaatgtgaactgtctgggaacaatttatggaaatatagatattcatgcatcacgtcaaagtactgtgaccgtagataaacttcagggaagttgtgttaatatatctacagaagatggtatgctaaagtcaagtatctttatacagagtcttcatttctgtacttctggatgtctaaggcctcaagtcatcaaggtgccatagatgttatgtcagccagctggg

SEQ ID NO: 8650 - DNA, 467 bp, Cricetulus griseus
cgaagagagtgctgaactagaagaaagccctcccttgggctcagaaccctctgcccagtgtgattcacagtaagaaaccgaggtcacagcagaagcagcctcaccccaaggctgatctgtaaaattccatagttgcttttgtatttttagcagccttagaccttctttctagaatttaatataccttaaagaatttggcttttactaatagatgtttgggtggggtttgatattttacatgtcttaatagttttctaccctctaagatcaggctgtgtaaagagcttaaacaggattaactttgggtttaaattttcctttttagaaattgagttatctgtgcaacctgtatctctttgacttctgctctgcctttctcttctttgttatgtgtaagactggactattgagtttgatgtgaactcatttaaataaaattagaataatcttaaaaaaaaaaaaaaaaa

SEQ ID NO: 8651 - DNA, 467 bp, Cricetulus griseus
gaggctgcagtggtcgtcgccactctccgagcttcatcatgccgcctaaggatgacaagaagaagaaagatgccgggaagtcggcaaagaaagataaagacccagtaaataagtctggaggcaaggccaaaaagaagaagtggtccaaaggcaaagttcgggacaagctcaacaatctagtcctgtttgacaaagctacatacgacaaactctgtaaggaagtgcccaattataagcttattactccagctgtggtctctgagagactgaagattcgaggttccttggccagggcagcccttcaggagctacttagtaaagggcttatcaagctggtttcaaagcacagagcccaagtaatttacaccagaaacacaaagggtggagatgccccagctgctggtgaagatgcataaacaggttcaatcagctgtgcatttggaaaaataaactttattaaatacaaa

SEQ ID NO: 8652 - DNA, 466 bp, Cricetulus griseus
  modified_base (53)..(53): a, c, t, g, unknown or other
  modified_base (75)..(75): a, c, t, g, unknown or other
gggatgagcacatcacagtgaggtgaagcgaaaaagtcctgatgaacagtganaggcctgatgagaaccacagtnagccatctcaccaagatgtcatcaaggtaaaggaagaattcacagatcccacttacgacatgttttacatgagccagtatggactgtacaatggcgggggggccagcatggctgccttgcatgaaagttttacatcgtctctgaattatggaagccctcaaaaattctcccctgaaggtgacctgtgttctagtccagaccccaaaatctgttatgtgtgcaagaagagcttcaaaagctcctacagtgtaaagcttcactacaggaacgttcacttaaaagagatgcatgtctgcacagtggccggctgcaatgctgccttcccctctcgacgaagcagagacagacacagtgccaacataaacctgcaccgtaaactgttgaccaaaga

SEQ ID NO: 8653 - DNA, 465 bp, Cricetulus griseus
acccccccacccacacacacacacacacacacacacacacttctatgaaagtatctgctaacatgaaaagcaaaaactttgtgccattgataccaagtaaatggacaaagttgaaagtaaataaggcctgtgatgtgataaaacagttttggtgctcaagtattccctttttcgtagtgtatctctgcacccttacaacacactagccttgttctatagagtatgctgcaggaaggacctctgacagcagcatgtgagctcaggcagttagaggtgaatttgagaactaagctgaatcctctaacagatcacaaaccaacagacactgcagcaaatctagtaagcactttctagaggtttgcagcttgaaacttttccagggtagaccttttcctttatgctgcaacagcactcaaccctgagccatactctgtcctcaccagcatctagtatgtttctatctgt

SEQ ID NO: 8654 - DNA, 465 bp, Cricetulus griseus
cagagttccagccatcatttcatcaagctgataatgttcgtggaacccgccaccatgggctggtggagaggcccgcccggaaccgcttccacccccttcaccgaaggtctggggagaagccagggagacaatttgatggaaatacttttgcagccaattactcttcccagcccctggcagagggagttccaggatagccagggctacacacagaaaccctgtctcagaaacaaataaacaaaaccagcacaatctgctctctgcattgtgccgatggttcccagcatttccactgctccaggatggggccatcccagtaactaatcagacttcctgccatgccctaactcccggtcctttgttaagcaatattgaaagattggactttgtataaagtagcttccaagttttataatgcatcattttacatctttcgtaattaaaagcagcacaatatggttagta

SEQ ID NO: 8655 - DNA, 465 bp, Cricetulus griseus
ggagctatatattgaagataatgtctggaagcttctactttgtaattgttggcccaccatgataatccagtttttgaaatggaatttttgccacctgggaaagcagaatccaaagatgatcaccgccatctgaaccagttcatagcccatgctgctcttgaccttgtggatgaaaacatgtggctttctaataacatgtacttaaaaaactgtggacaaattcaatgaatggtttgtatcggcatttgtcactgcagggcatatgagatttattatgcttcatgatgtgaggcaagaagatggaataaagaacttctttactgatgtctatgatttgtatataaagttttcgatgaatccattttatgaacccaattctccaatacgatcaagtgcatttgacagaaaagttcagtttcttggaaagaaacaccttttaagctaaatggagaaaaactctgaaat

SEQ ID NO: 8656 - DNA, 465 bp, Cricetulus griseus
actacacaaaagtgacctacagccaggaggatgtggacaagttgttacgccttacacattacaatatctgcaacaaccaggaacggttgcgggaagccctgcagcaggctgtgcagcggcggagacagcgcaaacagtgcaggcctgagtgatggctgagataccctggcggggttcctacctgggaacctttaccctccactccttcccttttgctctgagttgaagacaagtatcaccaagtgctgctccagagcctctttgggaccctgatgtccaggtccagttccacaaagatacgtgtctggaatccccagaggtgacactaagcctgtcagcagtcctgtgtcacatagtctaggccgtaaactagcaagcagaggctagggccatcatcataatatataaataaataaataaataaataattattttaaaaagtaaaaaaaaaaaaaaaaaaaaaaa

SEQ ID NO: 8657 - DNA, 465 bp, Cricetulus griseus
acagcagcaggcagcactctcccctactacagctccagctgtatccagtgtcagtaaacaggagaccatcatgagacatcatacacttcggcaggctcctcagcctcagagcagcctccagcgtggtatacccacatctgcccgttccatgctttcaaactttgcacaggcaccccagttgtctgtgccaggtggcctccttggtatgccaggtgtcaacattgcatatttgaacactggcatcggaggacataaagcccccagtttggcagaccggcagcgtgaataccttttagacatgatccctccccggtctatatctcagtccatcagtggacagaaataacgcctgttccacttgtactgcccatccttgaatcctttacccatttctcctattgcccccaacttccgtcgcatgcagtgcctgtactggtgcctaccatacacggaaagcaaaaaccg

SEQ ID NO: 8658 - DNA, 465 bp, Cricetulus griseus
cctgactacaattctcatttgtgccaggacctcggtggaccagctgcccctacacctgcaggcttgccgatggatacaatattccacagcatcccggtgctatccccttgtaccatcccactggtggtgcccatcctatccagtaccagcctggcaaatatcctatgacgaatcagcctgctccggtaatgtggatgccagggccaactcctatgcccagctgccctcctggtctggaatatttagctcagttggacaacatacatgttcttcagcattttgagcctctggaattgataacagggtttgaaactaataatagatatgatatcaaaaacaacatagaccagatggtatacattgttactgaagacacagatgactacaccaggaatgcctatcggaacctccgacccttcgtgctccgggtcactgactgcctgggccgagagatcatgaccatgc

SEQ ID NO: 8659 - DNA, 465 bp, Cricetulus griseus
ccaccgcagaggggacagtggcggtgcgggcccgcggggccgggaatcgtcatgctgcgggctacgtggcgcgctctgagctcccttcgtgcccaggcagcggcacagtctccagggtctgcgctgcggagcggaggaagcgccagtctgccctcggcacgctgcggcctgcagcctccgagtctcctgcatgccgcccgtgcctacgccgttgggaaaccagcccagcacagccaagatgatgagccacccccttctacactcatcaaagaatacaagagcatcatccccagcatggagaaggttgatgatgttgtgaaaagaatcttgtctttggaaatggccgaccagaaagagaagttaaaaatcaaagcaaagaacaattgaatgagcaagattgcggaaaaccctgaggattccagaaccttggaggctcgagttgttgccttgactgtcaggatccgc

SEQ ID NO: 8660 - DNA, 465 bp, Cricetulus griseus
cccagagccctgtaaagttggtatttgctactaaaggatccccagaatctccaatactgtaacaaacagtggtccaactgtaaaggccacttgaacttttttatttaaagattgtggaagtaatccagaagtggagagtatgggggaagccacaaaatttcctttaactgagatccattttcgtagcaagacagcaattttgaatactttgcgtgcatgcatacctcatcagtgattgtacataccttgcctacactcctagagacagctgtgttcactttcttctctgtgccttgactaaggctattcgaccctagatttctgaagcacagccaagataaattacattccttatttgtaactgtaaattacctttattgtgtgtactatttttactgtaataaatgaaatttaggaaacgaaaaaaaaaaaaaaaaaaaaaaaaaaaaaaaaaaaaaaaaaaaa

SEQ ID NO: 8661 - DNA, 464 bp, Cricetulus griseus
tcaaaggatggtgatggcttttgagcagacactcaaaaaggattggtacagcattttgggggcagacccatctgcaaatgtgtcagacctaaaacaaaagtatcagaaactcgtattactgtatcatccagataaacaaagtacagatgtgccagcaggaaccatggaggaatgtatgcagaagttcattgaaattgatcaagcatggaaaattctagggaatgaagaaaccaaaaaaatgtatgaccttcagcggcatgaagctgaactaagaagtatggggccagtagatgcacaggtgtaccttgaagaaatgtcctggaacaaagatgatgagtctttctctctgacctgccgatgtggtggaaaatacactgtctccaaggatgaagtagaagaagtgaacctggtttcctgtgatacgtgctccctgattgtagaactccttcatcagtgatgaactg

SEQ ID NO: 8662 - DNA, 464 bp, Cricetulus griseus
cgtcaactacgagccactgggcttggagggctgacatgtggagcatcggagtcatcacctacattctcctggagtggggcgtcccgttccttgggagaccaagcaggagaccctcacaaacatctcggcggtgaactacgactttgatgaggaatacttcagcagcaccagcgagctagccaaggacttcatccgaaggctgctggtcaaagaccccaagaggaggatgaccatcgcgcagagtctggagcactcttggatcaaggtgcgcaggcgcgaggacggcgcccggaagccggagcggaggcggctgcgtgcggcacgcctgcgcgaatacagcctcaagtcacattcgagcatgccgcgcaacacgagctacgccagcttcgagcgcttctcgcgcgtgctggaggacgtggcggcggccgagcaggggctgcgcgagctgcagcggggccggcgcc

SEQ ID NO: 8663 - DNA, 464 bp, Cricetulus griseus
gagctgctgtacagtggcctcccagaagaactccagtgaggacacgtggagatgctcactcatcactgaccatgtggaggctgtgatcaccatccaagtggcccagatggttatcggattcctagtgcctctgctggccatgagtttctgctaccttgtcatcatccgcaccctgctccaggcacgaaactttattgcctatgacgtcacctacagcctggcctgtgtccgctgctgcatcaaccctttcttgtatgccttcattggcgtcaagttccgcagtgacctcttcaagctcttcaaggacttgggctgcctcagtcaggaacagctccgacagtggtcttcctgccggcatgtgaggcatacttccatgagcacggaggctgagactaccaccaccttctccccatagagggctcccctgatggactacaaggaactctcccagggccctaaggtgg

SEQ ID NO: 8664 - DNA, 464 bp, Cricetulus griseus
gtgacagctgtgagaagaggtcagacagcgctcagaccttttaacaccagcggacacacacaggtgagaagccctatcagtgtcaagcatgtgggaaaagcttcagccagagtgctgcactcgttaaacaccagcggacacacacggggcgagaagccatatgcatgcccagagtgtggggaatgctttagacagagctcacatcttagtcggcatcagagaacccatgccagcgagaagtactataaatcgtgaggaatgtggggagatcttccacatctccagcctttttagacaccagagactgcacaaaggggagagaccgtataaatgtgaggactgccaaaagagcttcaagcagcgctcagacctcttcaagcatcagagggttcacacgggagagaagccctatgtgtgttttgtctgtgggaaaagcttcagtcagagtgcaaccctcattaaac

SEQ ID NO: 8665 - DNA, 464 bp, Cricetulus griseus
ctcatcttcctcctcctcttcctgtccatggggaactcaggggactgggatcccagctcgttcctgtcagctcataagctctcaggcctctggaattccccacactccagcggggctgtgccaggcggctcgcttggggagtcctcctgccatccctggtgaggctttccctgtctcggggcaccaccagcactcagacctcactgcctccccctaacaccaccatggacagagacgaggggtcccccacctggcgtccctgagaatgggctcgtgagaagactcaacactgtgcccaacctgtctcgggtgatctgggtgaagacacccaagccaggcaaccctaactctgagcagagctcaaaaggaagtccctagctgcaagcaggagctgtctgagcctgtggccacagggtgggaagccaagaaagagcaagagacagggaagtcaagtgaagaagact

SEQ ID NO: 8666 - DNA, 463 bp, Cricetulus griseus
atggagcagtcatatcccatggtggtgcttggcaacaaaatcgatctggaagacaggaaggtacccaggaggtggcccatggatggtgtaaagagaaggacatgccttactttgaagttagtgccaagaatgatatcaatgtggtacaagcctttgaggttctggccagccgggctctgttgaggtaccaaggcaccgtagagaatcaccttgtggaatccatcaagctctcgccaggccagccaaagagcagatgctgctgattcctgggctcgtccttctgactctcacggcagctgtgcaggccactcgttccaagctcaacccaccccagcatgcccctaggaggctgcagcaggagagaacgtcacaggcaaatcctggccccagagaaagcacaggagtctcggtggctccagctctcctgcctcctctcccctgacacagtcctgctcccctctgc

SEQ ID NO: 8667 - DNA, 463 bp, Cricetulus griseus
gcaccagagaacacactcaggagagaggccctatgtttgccatgactgtggaaagactttctctcagaaatcagcactcaatgatcaccagaaaatccacacaggtgtcaaaactctacaagtgcagcgagtgtgggaaatgcttctgccgcaagtctacgctcacaacccacatgaggacacacacgggcgagaagccctacgagtgcaatgagtgtgggaagttcttctcgaggttgtcatacctaactgtccattacagaacccactcgggagagaagccctatgagtgtacagactgcgggaaaaccttctatctgaactcagccctcatgagacatcagagagtgcacaccggagagaaaccttatgaatgtaacgagtgtgggaaactattctcacagctgtcgtacctcaccgtgcatcacagaactcattcaggagtgaaaccctacgaatgtag

SEQ ID NO: 8668 - DNA, 463 bp, Cricetulus griseus
cttgtgctagatgggcgggactcggaaggccacctgtcctcacaggaagagaaagtcggggaggcccccaccctccaggaaccataagtcttgcaccaggatggaggtccaccagtccctgctgctcttgctggccctggatacactgtgggcaggcaacacatcggagacccacatcattgggggtcgagaggcagccccacattcccgcccatacatggcctctttacagaaaagccggatcccatgtgtgtgggggggtcctcgtgcatccaaaagtgggtgttgactgctgcccactgcctgcctgagtcgctacagcagctaaaagctggtgctcggcctgcaccacctccaaagaccttcgagacccaaaggcctcaccttccacatcaaggcagccatcaagcaccctggttacaaccgcaaccttgaaaatgacctggcgctgctaaagctggat

SEQ ID NO: 8669 - DNA, 463 bp, Cricetulus griseus
tccggtgtttagagattctaagatgcctgagccagccaagtccgctcccgccccgaagaagggctccaagaaggccgtgaccaaggcccagaagaaggacggcaagaagcgcaagcgcagccgcaaggagagctactcggtgtacgtgtacaaggtgctgaagcaggttcacccggacaccggcatctcctccaaggccatgggcatcatgaactcgttcgtcaacgacatcttcgagcgcatcgcgggcgaggcttctcgcctggcgcattacaacaagcgctcgaccatcacgtcccgggagatccagacggctgtgcgcttgctgctgcccggggagctggccaagcatgcggtgtccgagggcaccaaagccgtcaccaagtacaccagctccaagtgaaaaggacgtcccacgaggagtagacctgatgatgtctttctaccactcatcagtgctgga

SEQ ID NO: 8670 - DNA, 463 bp, Cricetulus griseus
ggttaacgtgtctcttttacttttaagtattggggccgtgccggcacgggaccggtcgctcccgactgcacaacaaaccgactttcagccagaccatcgtgctgctcaacttgtaccgcaatccgcagaacacagcgcagaccgccgacggatcgcactgtcacgtgagcgacgtggaggtgcaggaacactatgataacttctttgaggaggtgttcacggagctgcaggagaagtacggagagattgaggagatgaacgtgtgtgacaaccttggggaccacctcgtgggcaatgtctatgttaagttccgccgggaggaggatgcagagcgggctgtggccgaactcaataaccgctggttcaacgggcaggccgtgcacgccgagctgtcgcctgtcaccgacttccgggagtcgtgctgccgtcagtatgagatgggggaatgtacccgaggcggctt

SEQ ID NO: 8671 - DNA, 463 bp, Cricetulus griseus
actcacgtacaccaccttgtgaagccagcatttgaggagtctgcctgccgaccaagaagtatgctgatgtgatccatcccccgacggagttgacaatatggttgccatcaactcgttcagcacatccaggacattctcaatggtgacctgtgcaagcggcatagaggagggcccgaatggggcgcaactacaagaggaccttccctcgagccaggagatcaccctgggggtggttggccactggcaagcgctcacacttggagtctagcagcaggccccactgagaccagcatacgtagattccccacagacccatgattaagggtctgggcctgggggcaaccacttgcccttaaaagcagtcaggggattcttctcaatgtgatctagggtggcagcatttaggaccaaagccttccttgcttggaagggcagattcatgctgacagagcattccggtgtc

SEQ ID NO: 8672 - DNA, 463 bp, Cricetulus griseus
cagaaggcgatcaaggacaagtatcctccagtcaatcgaaagtacgaatacttggaccatacagctgatgtccagttacatgcatggggagatactctggaggaagcatttgaacagtgtgccatggccatgtttggttacatgacagatactggaactgtggaaccccttcaaacagtagaagtagaaacccaaggagatgacctgcagtctctactgttccactttttggatgagtggctttacaagttcagtgctgatgaatacttcataccccgggaagtgaaagtacttaatattgatacaaaaaaacttacaagttacggtcaattgggtgggagaagaattttcattgtccaagcatcctcagggaacagaagtacaaaaacaataacatactcagcaatgcaggtctacaatgaagagaagccagaagtgttgtgatcattgacatttaagatac

SEQ ID NO: 8673 - DNA, 463 bp, Cricetulus griseus
acagccaccatcctcaaccctcgagacaaatactgtaaaggggaccagctagacatcttaatagaagctagggactacctaagaaacaagaagaagtatggtggggacttcctgagggccaggatgtcctccccagccctgaaggctggtgcttctggaaaggtgacagacttcaacaatggcacctaccttgtcagtttcactctgttctgggaaggccaggtggccctgtctatcctactcattcatcccagcgaaggggtggcagccctctggagagcaaggaaccaaggctatgacagaattgccttcaagggtaatttgttaatggcaccacccaggtcttaactgagtgtggcctgaccctaaattcaagggatattttcaaaggaccttcatgtgggtttcattgatgcctgggacatgaccattgcatgtgggcagctaatattctccacccacc

SEQ ID NO: 8674 - DNA, 463 bp, Cricetulus griseus
ctgtcccaagccctccaggctgtgttcagctgctgctggcggaggcggaacgaaccgtggtgttgcaatacctacgtgcgctgatgcagggccgcctagtgtgccgcagtgcagacgagcgtacccaagcggctgagcgcctcacgacgctacccaacttaaggagcttttcctgggtttgggcctggaggagagcgctcactgcgcgccggtgctgctcgcgctgagggaactgctcaacctccacgaccccacgctgcttggcctcgaggtggcaggcctgaggcaaaaaattttcccgacgtgagcgaggatcatgtctccgccctcttggacctgcgcggggacgtgtcccgagagcatcgccaggcagcactcagctccctgcaggctggcccaccgccctcaccttccactggccgccgagcactcttcagtctcgtgccgacgcctacgccctccc

SEQ ID NO: 8675 - DNA, 463 bp, Cricetulus griseus
atggcgggccggcctgctgttgcagcgtcaggcaagtggctggatggctttcgaaagtggtattacaacgctgcaggattcaacaagctgggtcttatgagagatgatgtaatgcatgagactgaagatgtgaaagaagccataagaaggcttcctgagaatctttataacgacagaatgtttcgaatcaagagagccctggacctgtccatgaggcatcagatcttgcctaaggagcagtggacaaaatatgaggaggacaaattctaccttgaaccctatctcaaagaggttatccgggaaaggaagagaaagaggaatgggacaaagaagtgaccttgttgttgagatctgtggatgtgcctggtctcagcatattttaagaagttgtttcaacccgaatcacaatctaagagttatttgctttgcagatgcctcactttaaataaatgtctattgtaac

SEQ ID NO: 8676 - DNA, 463 bp, Cricetulus griseus
  modified_base (197)..(197): a, c, t, g, unknown or other
aactccaacctccacaaacaactcaaggcctccaagtatcaagaatttttactctcactgtaatgtattgtctgcctgccagcttctgagaatatttttcccagtatctctaggccttctttagaagtctgtcctccacagtgcatctggttacctcaagttgctgtttgttaagattatgaaagctcacaggggtntttgtggaatcatttgctgagtcatttcctcaaatcatattccattgtatcagttaacatagttttaaatgtatgtattataaatatctgtaaccaaatcatttgaaggcttgataaatttttaacaaagtttggtacatttttttatgtaaagttactagtaatgctttactaagtagtgcaatgaatttttatttttaatccctgtgcccaattttggagttgagagggttgttggtaataaatgtatgatgtaacacttaaaa

SEQ ID NO: 8677 - DNA, 463 bp, Cricetulus griseus
atgatcaagcagcctctccctgtgaagccttgttatctcaatatcttggaaaatggacaacctttaagtagcactacccagaaggactcccttactactgctgattcatctaaagagcctgaccctatgccattacccttaactgcaagtgaaactgtagtgcctagagtcaaggaagtgaaatctgctcaggagactcccgagagctctctggctggaagtcctgatactgaatctccagtgttagtgaatgactatgaggcagagtctggaaacataagtcaaaagtccgatgaagaagattttgtgaaagttgaggatttgccactcaaactgaccgtctattcagaggcagagctaaggaagaaaatggtagaagaagaacagaaaaaccatttatctgatgaaatatgtgaaatgcagactgaagaattacgctggaattctcagatactgaaagaac

SEQ ID NO: 8678 - DNA, 462 bp, Cricetulus griseus
cacaagtgtaagttctgtgaatatgaaacagctgaacaaggcttattgaatcgccacctattggcagtccacagcaagaactttcctcaaattagtgcagagtgctggcaaaggtttccgtcacccatcagagctcaaaaagcacatgcgaatccataccggggagaagccctatgaatgccagtactgcgaatacaggtccgcagattcttctaacttgaaaacacatgtaaaaactaagcatagtaaagagatgccattcaagtgtgacatttgtcttatgactttctcagataccaaagaggtgcaacaacatgctcttatccatcaagagagcaaaacacaccagtgtttgcattgcgaccacaagagttcgaactcaagtgatttgaaacgacacataatttcagttcacacaaaggactatcctcataagtgtgatatgtgtgataaaggttttca

SEQ ID NO: 8679 - DNA, 462 bp, Cricetulus griseus
  modified_base (434)..(434): a, c, t, g, unknown or other
cttgtccacagcaaggccctttatctgtggcaccgcctgcagctgcatcccgctgtgggtagagaggacatgtctgtggctgggctatgcaaactctctcattaacccttttatatatgccttcttcaaccgggacctgaggaccacctaccgcagcctactccagtgccagtacaggaatatcaaccggaagctctctgcagcaggcattcacgaggccctgaaacttgctgagaggcctgagaaatccgagtttgtgctgtaagacaaaactctgaccactgtagagataaaggtcacgatacatgatccagagtggaatgcaggagatgaaatagtgcaaaacagatggaaacaacgaaaccattggctgagacttcaaaatggaacatggcttctgtcttcttggcatggctgaaatataacgaggggtnatctgtgtacaagtgtagtttggggaga

SEQ ID NO: 8680 - DNA, 462 bp, Cricetulus griseus
aaaaaaaaaacccttacacaagaagagacgggatctccagaagaccatggacatgatggagtcacagacactgctgctgaccctgctgtctgtgaagatggaaaacaacctgactctgctggaggagaaggctgagaaggacttggcagccatgtgccgcgagaaggagaagctacaggggcaggtgctagagctgcggcgccagctgctgctccagcagaaacatgaggagctggctgccgccctggatgcccagatggagctgctgggccctttccaggcggtggcagagcgcttcaaggaacaatacaagacactggccacagccctggataacactagacatgagctgcctgtgcaggccatccacatgcagggaagcgggcaggagctcctagatgatctgcagccagccctgaggaccaccctgcagctcctgggcgagcttggcatctgctcccc

SEQ ID NO: 8681 - DNA, 462 bp, Cricetulus griseus
ccccacgggaaggaccccacgccctccatgctgggcctctgcggctccctggcttccatccccagctgcaagtccctggccagcttcaaatccaacgaatgcttggtgagcgacagccccgagggcagcccggcacttagccccagctgaggagcagcacgggcaatgcctgccccacctgccaggggccacggacaacggtcacctgagtcccccaacccaggcaacccttcaaggatgctgaccatctagccgagggtctctagggaaagacaacccaagcctctttcctgcttcagcttcccaccaaggaggcaggagctgcattggcaagtggtggcaccaggaggaaggggcacccaggtcacaagtagccagtcccctgggaaggctgctccattctggtggccctgaagtctgccaataaataaccagttgctgaaaaaaaaaaaaaaaaaaaaa

SEQ ID NO: 8682 - DNA, 462 bp, Cricetulus griseus
cggactgacgagtcggcacggctgtcccgagcgccatgtcgggttcctcgagcgtcgccgccatgaagaaggtggttcagcagctccggctggaggccgggctcaaccgcgtgaaggtttctcaggcagctgcagacttgaaacagttctgtctgcagaatgcccaacatgaccctctgctgaccggagtgtcttcaagtacaaatcccttcagaccccagaaagtctgctcctttttgtaatcatgtatcttaaggtttctcaaaccacttttcatgaaccagcgactgttgaagagaattacatctgaagtctgtacaaaagcctgtaacacgtgccataacacacaatcttctacttgtcagttcttaacatctacctctctgaatcttcatggatttctgtctcacaaggttgaactattttatatacactggctgtagcatacaataaaacagcata

SEQ ID NO: 8683 - DNA, 462 bp, Cricetulus griseus
ggagcgcgagaggctgtgcagcggcggaagtgtctccagaggaagatgcttcccttgtcgctgctcaagacggcgcagaatcaccccatgctggtggagctgaagaatggggagacatacaatgggcacctggtgagctgtgacaactggatgaacatcaaccttcgagaggtgatctgtacatcgagggacggtgacaagttctggcgaatgcctgagtgctatatccgtggcagcaccatcaagtacctgcgcatccctgatgagatcattgacatggtgcgggaggaggccgccaagggccgagggcgagggggaccacagcagcagaagcagcagaaaggccgaggcatgggcggcgctggccgaggtgtgtttggtggccggggccggggtggcatcccaggtgcgggccgaggtcaaacggagaagaagcctgggcggcaagcaggcaagcagtga

SEQ ID NO: 8684 - DNA, 462 bp, Cricetulus griseus
tcggagcggaagagaaatggcgtctgctacgcgcgccatccagaggctgcgcaactgggcgtctgggcatgacctgcaggcgaagctgcagctgcgctaccaggagatcgccaagcggacgcagcctcctcctaagctccccgtgggccccagtcacaaactgtccaacaattactactgcactcgtgatggccgccgggaagttgtgcctccctcagtcattatgtcttcacagaaggccctggtgtcgggcaagacagctgagagctcagctgtggctgacactgggaagaaagcagtgacgcctggtcctccaatgaagaggtgggagctgtccaaagaccagccatacctgtgacactgctccagactgctttgccgggtcctcatggccacctgactgcttttcctccttggattcctctggggagagtgtgacctaatttgtaacaaatatacaga

SEQ ID NO: 8685 - DNA, 461 bp, Cricetulus griseus
aagaaagaagagatgaaggctctgcagggccagttatcagcactgagagagacccatgctgaagcccaggagaaagaggatgacattgtgaagctcaagaatcaagaccctcaaggaaggaaagctgccccacctgacactccggaaatcccagattaaccactttttggataatctttgcatcttttgtggggagaggaatgagtccttcacagaagagggcctggacctccactactggaagcactgcctcatgctgacgagatgcgaccactgcaggcaggtggttgagatatccagcctgacagaacacctgctgacagaatgtgaacaaaagggatggggtttgggaagtgccaccgctgcaaggaggctgttcccaaggaggagcttcccaggcacctcaaaacccaaggagtgccaaccctgaccaaatcggagaaggtggcaaaccgatgtcc

SEQ ID NO: 8686 - DNA, 461 bp, Cricetulus griseus
ggtgctgtcagccattcggtgaccgtcccctcgggggcgtccagcccatcagaagactcttgcctgctggaactccagggctctgtgcgctctgtggattatgtgctcttccgctccatccagcgcagccgagcaggctactgccttagcctggactgcggcctgcgtggcccctttgaagacagtcccttgccacggcgacccccgcgggctgcccgttcctactcctgctcagcccctgaagccccacccccactgggtgccccacagctgctcgcagttgccaccggttggagggctggcctccctgggtggggccttgcttccccgagctgaggcgacgggtccccagaggaggcagccgctcagctgccaccccctcctgcccgagccccagctcgacgcttcagtgatagctcaggttccctcaccccaccggggcaccggcctcctcaccggac

SEQ ID NO: 8687 - DNA, 461 bp, Cricetulus griseus
cagaccatgtttctcctcactccagtgttggtagcagttgtctgcatcttgattgtatgggtctttaaaaatgccgacagaaacctggagataaagaaggaggagactcaagctcgcccctgggtggatgaagacttgaaagacagcactgatttcctccacgaggaagaagatgctgacgaatggcaagagtcagaggagactgtggagcatatcccgttctctcacacccggtacccagagcaggagatgaagacgagatctcaggaattctatgaactccttaataagagacgctctgtcaggtttatcagcagcgagcaaaatcccaatggaagtcattgctaacgtcatcaaagcagcaggaacagctccaagtggggcccacactgagccctggaccttcgtggtggtgaaggacccagatgtgaagcataagatccgagagatcatcgaggagg

SEQ ID NO: 8688 - DNA, 461 bp, Cricetulus griseus
gaggaggcaacagctgcagagctcccggctgatgacaccgggggtgagaagtccacagctcccccagcccagggctgtggggattgctcccagcactgcgcctcttcaggggcacgccgccgacaccgccgggcatctctgggcccggcgtctgccacccacaccttccactgcagccagtgtcagcgcagctttagctctgccaaccggctgatggctcatggccgggcccacgtgggtggtacccacgagtgtactgcctgctccaaggtcttcaagaaggcggcctctctggagcagcaccagcggctacaccgcggggaagcccgctacctctgtgtggactgtggccgtggctttggcactgagctcacactggtggcccatcggcgagcccacactgccaacccattgcaccgctgccgctgtggtaagaccttcagcaacatgaccaagttcct

SEQ ID NO: 8689 - DNA, 461 bp, Cricetulus griseus
aggccttcacagagcttcaagccaaagttattgatactcaacagaaagtgaagcttgcagacatacagattgaacagctaaacagaacgaaaaagcatgcacaccttacagacacagagatcatgacgctggtagatgagactaacatgtatgaaggtgtaggaagaatgtttattctacaatccaaggaagtaattcacaaccagctgttagaaaaacagaaagtagcagaagaaaaaattaaagagctggagcagaaaaagtcctacctggagcggagtgttaaggaagctgaggacaacatccgagagatgctgatggcacgaagggcgcagtaggagctgctggagagttctcccctcctgactccctccatcctgtcaggcaggcaggggctgtgcagggtgctggcctccctctgcccctcacgccccacagtctctccaacaccttgacgcccc

SEQ ID NO: 8690 - DNA, 461 bp, Cricetulus griseus
ctttgcacagaagagtagtcttcaaagtcatgaaagaattcatactggagagaaaccctatgcatgtaatcaatgtggtaaagcctttgttcagaagagtagtcttcataggcatgaaataattcatactgataagaaaccctatgaatgtaatcagtgtggtaaagcctttgcagcaaagaagaatcttcttggtcatgaaagaaatcatactggagagaggccttatgaatgcaatcagtgtgctaaatcctttgcactgaagaagtatcttctcagccatgaaagaattcatactggagagaattcaaatgcataaaacaacacatactggagagaaagcctatgagtgtaatcagtgtggtaaagcctttgctcggcacagtcatcttcaaatgcaataaaaggacgcatactggagagaaaccctatgaatgtaatcagtgtggtaaagcctttgc

SEQ ID NO: 8691 - DNA, 460 bp, Cricetulus griseus
  modified_base (455)..(455): a, c, t, g, unknown or other
gcttggttggggctgcgccgcgcctgaggcaggaagatggtggccgccaagaagacgaaaaagtccctggagtccatcaactcgaggctccagctggtgatgaagagcgggaagtacgtcctgggctacaaacagacgctcaagatgatcaggcagggtaaagccaagctggtcatcctcgccaacaactgcccggccctgaggaaatctgaaatagagtactatgccatgttggctaagaccggggttcatcactacagtggcaataacattgaattgggcacagcatgtgggaaatactacagagtatgcacattggctatcattgacccaggtgactctgatattattagaagcatgccagaacagactggtgagaagtagtaaaccagaaacgccttcctttaataaaaccaccagagactaacttttaaaaaaaaaaaaaaaaaaaaaanaaaaa

SEQ ID NO: 8692 - DNA, 460 bp, Cricetulus griseus
aggtttcatccccctgcagccatgggacgaaggaagtctaaacggaagccaccccccaagaagaagatgacaggcaccctggagacccagttcacttgccccttctgcaaccacgagaagtcctgtgacgtgaaaatggaccgtgctcgaaacactggagttatctcctgtaccgtgtgcctagaggaattccagacacccatcacatatctgtcagaaccagtggatgtgtacagcgattggatagacgcctgtgaagcagctaatcagtagcaatatcaaggaactgccccctcagcagtactgacccgggtaccagtccagagacattccagggcaatgacagccctccctccgtgtatggactggattcgaatgagtggatgtgtgtggggctgcggaggtggctgtaagtttgtatcagaaaaaaaaaaaaaaaaaaaaaaaaaaaaaaaaaaaa

SEQ ID NO: 8693 - DNA, 460 bp, Cricetulus griseus
tcgggagactcaagaggagctgggcctagaggtgcccaaggagcatgtgtggggtgccctgcagcctgtgtatgaccggggaaaggcaaccatagtccctgtgcttgccaacgtgggcccactggatctgcagagcctcaggcccaaccccgaggaggtggatgaggtatttgaactgtctctggcccacctgctgcagacacagaaccaagggtataccaacttctgccagggtggccacttccgctacacaatgcctgtcttcttgcgtggaccacaccgtgtctggggcctcacagctgtcatcactgaattcaccctgaagttgctggcccctggcatttatcagccctacctagctattcaagaggtgcctaggagttgaggcttggcctttaaagtgcctctgccttcatctgagcaggctactccagagctaaattaaaaagagtctttgaca

SEQ ID NO: 8694 - DNA, 459 bp, Cricetulus griseus
gatcgtgtcatcaatcactgcctccctcgaggtttggatggggccctgaatgtggacttaacggaattccagaccaacctcggtgccataccctcgcatccacttcccactggccacctacgccccagtcatctcagctgagaaggcataccatgagcagctgtcagtggcagagatcaccaatgcctgcttcgagccagccaaccaaatggtcaagtgtgaccctcgccatggcaaatacatggcctgctgcatgttgtaccggggggatgtggtcccaaaagatgtcaacgcggctattgctaccatcaagaccaagcgcactatccaatttgtggattggtgcccaactggatttaaggtgggtattaactaccagccccccaccgtggtccctgggggagacctggccaaagtgcagagggctgtgtgcatgctgagcaacaccaccgccatcgc

SEQ ID NO: 8695 - DNA, 459 bp, Cricetulus griseus
gagatgggagcttcgcgtgagccgcgccgtgaggaacttcaacctggagaaccgcgcggagcgagagatcagcaggaccaagccctccacggctcccaagcacccgtccacgcgcgacctcctgcgcgagcagctgagtcagcacccagaaatcaaagaagaagtttctaggaaagataacacgctgttgtcattgctaaaagacgtatatgtggagtccaaagatccggtgtcttccctaccggtaaaaagatgttgaaatatggcaagaaccaaaggaattcagactgccgataggacatcacgtggataagaatgttgtgaacattcccaaaggcaagatttctgttgtagaagcattgacacttctcaataatcataaactttctccagaaatgtggactgctgagaaaattgcccaagagtaccatttagaactgaaagatgtaaattcccttc

SEQ ID NO: 8696 - DNA, 459 bp, Cricetulus griseus
tcaggctgcccaggcagggcgggagaggccctcaaggaagcgggcaggtgggctgccagttcttggaaaggctcattaatgaaaacccccaagcctgacaacctgggggaaggctcactggccccatgtatagctgataagggccaggagattccacaactcaggtagttcccccgcccccctggagttctgtggtcaccattaatcatttcctctaactgtgtatataagagctcttttgcagtgagcccagtactcagagagaaaggctaaggtcccgaggaggatgtggctgcagatcttacttttccttggcattgtggtctgtagcttttcaacacccacttcccctcacccgccccctttgttaccccggcctttggaagcatgtagatgccattaaagaagtcctgagcttcctgattaacaacctgtcatggagaatgaagatgtagaagt

SEQ ID NO: 8697 - DNA, 459 bp, Cricetulus griseus
taagcactacccagcagtggacgtgatctggccagaggaagaagtaccattgaatggaacgctgaccttatcctgtactgcctgcagccgcttcccctacttcagcatcctctactggctgggcaatggttccttcattgagcacctaccaggccggctgagagagggtcacacaagtcgggaacacaggaatacaagcacctggctacagagagccctggtgctggaggaactgagccccacgttacgaagcaccaatttctcctgtttgtttgtggaccctggacaggtggcccagtatcacatcgttctggcccagctctgggatgggttgaagacagttccatccccttctcaagaaatcctctccagccacagcccagccacccacatcagcagggccaggggttaccatgaagccagccaaagcatgactggagcctggttctcatctacctg

SEQ ID NO: 8698 - DNA, 459 bp, Cricetulus griseus
agtaccaggctcatggatatgccttctcgggcgtagaagaactgctctactcactgggggaggccacctttgtcaacatgacccagcgttcagtggccgagtccctgctccaggtgggggtcacacagcgctttattgatgatgttgtctctgctgtcctacgggccagctatggccagtcagcatcaatgcctgcctttgctggagccatgtcactagctggggctcagggcaacctgtggtccgtggaagggggcaacaagctggtttgttctggtttgctgaagctcgccaaggccagtgtgattcatgccacagtgacttctgtgaccctgcacgctacagaagggaaagccctgtaccaagtggcgtatgagagtgacaagggcaacagctctgagttttacgacatcgtggtcatcgccacacccctgcacctggacaacagcagcaacaaca

SEQ ID NO: 8699 - DNA, 459 bp, Cricetulus griseus
gatgatggccggaatctctcctgtgaggccactctggaggttcagggccagcgacttctcaaaaccaccaagatccagcttcatgtgttgtacaagcctcggtttgaggaatccagctgccctggcaaccagatatggatagaagggatggatcagatgcttgcctgcatcccccagggaaaccccacaccagctctggtgtgtatctggaatgggatggttatcgaccttgatgttccgcagaaggccacccagaaccatactggaacctactgctgcacagccactaaccagctaggctctgtcagcaaagatattgctgtcattgtccaagggctgcacgaagggatcacgtcctccaccattttcatcatcgtcatttccaccctgggcatggctgtgatcaccatagcactgtatctgaactaccagccctgcaaaagaaacaggaggaaacgg

SEQ ID NO: 8700 - DNA, 458 bp, Cricetulus griseus
tagtgcaggctgccacctggtggctggactcctgttttcctggcaggcactgtgagcctctcgccatccatctgggccatcttttacaacactcatctcaacaagaagtttgagccagtctttacctttgactatgcagtgtttgtcactattgctagctcaggtggtctgtttatgactgctcttcttctgttcatttggtattgtgcatgcaaatctttgtcctctcctttctggcaaccactttactctcatcctcccagtatgcacacttactcacagccctattcatcacgttcccgcctctctgccattgaaatgacatcccagtagtttcacatagcacttaacagagatataattaattgttaaaagtatgtgtcatagcctcacagtcccctgcgtaaagagcctttttggacctgtatacatttttccttcgttcttgactagtcagt

SEQ ID NO: 8701 - DNA, 458 bp, Cricetulus griseus
tgtgtgtgtgtgtgtgtgtgtgtgtgtgtgtgtgtgtacgtgtgtgtgtacatgtgtgtgtacatgtgtgtaggacacatacactcccaccatcctggccacacctcagtctaggacttgttagctcgtagttcagccccagcattgacctcttcattgcctggaagccagcagatactgcctgggacacctaatgtattccctcttgcctgtccttccctcaatccctctctcccaccctcttccttcctgggaccatgctactggaatcactgcgtctgatttatttctgtgggagacctgtagcctgtgcccactacttggtccttgagatgaaggccaaggacatggagactgtcttgagtaggttgactcctttcccattgggtgctgcctgaggaaaggagttgcccttgatgactcttaagggagaaccagagtcttgagtacctgcagct

SEQ ID NO: 8702 - DNA, 458 bp, Cricetulus griseus
caaggaagaagaagaagatggtgtcagtctgtcctctgagttaagtgacatcttgaaaacagctgtacacacacaatcatcattaggaaaactcagaatctgatgctgaagaaaatcaagagaaactggctctcgatctccgcttatcaagtactcgggcagcttctatgcctgaattactggaacagctttggaaagccagagctgagaaaaagaaactacgtaaaacgttacgggaatttgaagaagcgttttatcaacaaaatggaaggaatgcccagaaagaggatcgtgtcccagtgcttgaggaatataaggaatacaagaaaattaaagccaagcttagacttcttgaagttcttatcagcaaacaagactcttcaaaatccatataaaatatgttccctgaaaattgacatcataaagtcagttgtgttccttgaaggttcatcatgtgt

SEQ ID NO: 8703 - DNA, 457 bp, Cricetulus griseus
agaaaagtttcgagccaccatgcttgaagattccattcatgttgtcatcaacggcttctttcctggaatcacggtgaaatcaatcctgaattctataactgaagatgtcctcaatcatatgggcacttttccagagtgttctggatcagcgagactggataataaacaaatttaaagaagattcttctttagaactcttccttcttatccacaatttggatagccagatgttgagaggagacaatagccagcaaatccttggacagttgtcgtctttgtgtaacgtgcaccttctagcatctattgatcacctccatgctcctctcatgtgggatcatgcaaagcagagtctttataattggcttttggtatgaaactactacatacagtccttatactgaagaaacatcctatgagaattcccttctggttaaacagtctggatctctcccgctta

SEQ ID NO: 8704 - DNA, 457 bp, Cricetulus griseus
ccgccgacgcgcgtggcccgggacaccgagggccggggccatgcgtgcgccgtgaggggcgggcgtccggacttggcgagctgatgcggactcgcttttgagcggctggggacgagagaagcagccccaaaatggaggattttactaccaggacctacgggaccaggcatctctttgagtagtattactgcctgcatacttatctactggtatcgacaaggagacttagaaccgaaatttagaaacctaatttactatatcttattttctatcatcatgttatgtatatgtgcgaacttatacttccatgatgtgggaaggtgaagttgccgacaagaagtacttaccaggacactatctgtgtgaatgaactgctgggaacaagtatgctgaagaatctctgcagaagtctggtacatgatttttttttttttgtttttgttttttttcttgctta

SEQ ID NO: 8705 - DNA, 457 bp, Cricetulus griseus
gaggaggatcatcgctcacccctaccccgcctctcggactgccggtccctagaaaccccagcttcacctctcgctgggactggagttccagaatgaaaagcaaaaaggcatccttgcggcgtctggcagtgacaccgaggatgaagacagcatggatgttcccctggacctttcctcttcagcagcctctggcaagagacggaggagaggcaatctgcccaaggagtctgtccagattcttcgggactggctgtacgagcacagatacaacgcgtatccctcagagcaagaaaaagcgctgctgtcccagcagacacacctatctacactgcaggtctgtaactggttcatcaacgcccgccgcaggctcctccctgaccatgctgagaaaggatggcaaagatccaaaccagttcacgatctccgccgtggggccaaggatttccgaagctagctc

SEQ ID NO: 8706 - DNA, 457 bp, Cricetulus griseus
catgggtcagcctgccaaggttttacagctcttcagaacactgcacaggacaagacaacaagttttttaaaaacgataagagagcgctacaagaagccagagtaaagataaacgaagaattcaaaaaacataaaaatgaggcctccccggagaaaatagaagagatgttgaaaatgggttctgatgttgaactgttactcagaacatgtgttattcaaggtattcacactgaccgcaacacattgaaactggtccccaggaacgatcttctaacagaaaacgtgccgtactgtgatgcgccaatttttttttttttggttttttcgtaaacagggtttctctgtatagctttggagcctatcctggtactcgctctggagaccaggctggcctcaaactcacagagatctgcctgcctctgcgtcccaagtactgggattaaaggcatgtgccacca

SEQ ID NO: 8707 - DNA, 457 bp, Cricetulus griseus
ggagcccgcgggccgcagctgttgggacgagccgctgggcatctccgtgcacggcctggcccccgagcagcccgtcacgctgcgcgcggccctgcgagacgagaaaggcgcgctcttccgcgcccacgcgcgctaccgcgccgacgaccacggcggcctggacctggcgcgcgcgcccgcgctgggcggcagcttcgccgggatcgagcccatggggctgctctgggctctggagcccgaacggccattctggcgcctgatcaagcgcgacgtgcagacgcccttcgtggtggagctggaggtgctggacggccacgagcccgaggcgggcggctgctgacgcgcgcggtgcacgagcgtcacttcatggctcccggggtgcggcgcgtgccgtgcgcgagggccgtgtgcgcgccacgctcttcctgcctccacagaaggtggcgtcctgtcagag

SEQ ID NO: 8708 - DNA, 456 bp, Cricetulus griseus
gtttgctttcagcaagaaaaggttctaggtttaagaagattgcttatccactaggattagcctcattaggagcaactgtttgttacccggctcaatcggtaataattgcaaagataactgggaaaaaggcatataccacaagccagcaaatttatcaagccattaagtcattgtggacaaaaagcagtgaaaaagaatcactcccagaaccaaaggaagaaactaaggtaggaaggcctgatgaaatatatgccaaaacacctgacttgaacactcagtgtcttttccagaagaacttgcctctgcaacaaagatgaaatcggaatccactgcaggcacgacacagtttatacctgaccccaagctcctggatcatggacagtctcatccagaagataaagatatgtacagcactagaagctgaagtagatggcagtgggagcctacataagagaa

SEQ ID NO: 8709 - DNA, 456 bp, Cricetulus griseus
atcttgcacgtgacacaagctcgactagcttccagcttaccaatggccgtgatgcctttcttgacagcgaccctgacttatgtaaattttctaagttaccctttgagtacaggtgatctgaactgtgagacctgtgccatgacccggggcgcactagttggttttggtatgggtggcgtataccctatccttttggctatacctatgaatgggggcctagctgccaggtatgaatcaagccctctaccacggagaggaaacatcttaaattactggattacagtttctaagcctgtctgtagaaagatggtatttcccattctacttcagactgtgtttgcagcctaccttgggtctagacaatatagactcctcataaaggcccttcagctacctgaacctggcttagaaattcattgatttgaagcaaatatgtacaacaaaaataaaataggt

SEQ ID NO: 8710 - DNA, 456 bp, Cricetulus griseus
tgagtggcatcgccagaagaacttcatgaacattttggaaaagtggttactgaaagtccttgaagaccagcaaaacataaggctcatcagggaacttctccagaccctctacacatccttgtgcatgctggtccagagagttggcaagtctgtcctggtgggtaacattaacacgtgggtgtaccggatggagaccataactacactggcagcagcagctgagcggcatccagatcaccaggcctgccttcaagggcctcacgttcaccgacctgcccgtgtgcttgcaactgaacatcatgcagagattgagcgatgggcgggacctggtcagcctgggccaggcagccgcagacctgcatgtgctcagtgaggaccggctgttgtggaagcgactttgccagtaccacttctcagagcggcagatccgcaagcgactgatcttgtctgacaaag

SEQ ID NO: 8711 - DNA, 456 bp, Cricetulus griseus
ggtgcagctgcccacagagaccctccagcagctgctggaactgcacaggacctgtgagagtgaagccatggaaatcttcaggaagcattctttcaaggatgaggaccaaccattccagaaggaattgaagaccctactaagtgcaaagtgggatgagatctgtaagaagaatgtggaagcctctgaaaaccactgttcaaccctacttcagaatatttttaagcctctggaacaagaagtggcacagggggtctatgctacaccaggaggccacaatctctttcttcagaagatggaaaagctagaaggcccagtaccatcagcagccaaggaagggaacacaggctgaggaagtgctgcagaaatattgaaggccaaagaacaactgaagcaaaacaattctacaaacagacaaggctctcacagccaaggagaatgagaggaaagcggaagaag

SEQ ID NO: 8712 - DNA, 456 bp, Cricetulus griseus
gaagccctatgaatataatcaaggtgttaaagattttgcatgtcacagttatcttcaagtgcccaaaattcatactggaaagaaaccatatgaatgtcatcaatgtggaaaagcctttgcacgtcccagtgaacgtaaaatacatgaaagaaaacatactggagagaaaccatatgaatgtaaccaatgtggtaaaacctttgcatatcacagttagtcttcaaagacatcaaagaaaacatacaggagagaaaacctatgaatgtaatcaatgtggtaaagcctttgcacatcacagttatcttcaaaggcataaaagaagacacactggagagaaaccctatgaatgtaatcaatgtggtaaagtctttgcacacaacagtaatcttcaaaggcataaaaggacacatactggagagaaaccctatgaaagtaatcagtgtggtgaatcttttt

SEQ ID NO: 8713 - DNA, 455 bp, Cricetulus griseus
gtgccctcggcccgcgctgggcacacgccgcgccccgtggagcgcgggccccccggtgcggctcttcacggaggaggagctggcccgctacagcggcgaggaggaggaccagcccatctacttggcggtgaagggagtggtctttgatgtcacctctggaaaggagttttatggtcgaggagccccctataatgccttgaccgggaaggacgccaccagaggtgtggccaagatgtcactggatcctgcagacctcactcatgacactacgggtctcacagctaaggagctggaggccctggatgacgtcttcagcaaggtgtacaaagccaagtaccccattgttggctacacagcccgcaggatcctccacgaggatggcagccccaacctggacttcaagcctgaagaccaaccccactttgacataaaggatgagttctgacgtctagctg

SEQ ID NO: 8714 - DNA, 455 bp, Cricetulus griseus
cgccatgtctgcgcatctgcagtggatggtggttcggaactgctccagcttcctcatcaagaggaacaagcagacctacagcaccgaacccaataatctgaaggcccgcaactccttccgctacaatgggctgatccaccgcaagacagtgggcgtggagcccgcggccgacggcaaaggggtcgtggtggtcatgaaacgcagatccggtcagcgaaaaccagccacgtcgtacgtaaggaccaccatcaacaagaatgcacgggccaccctcagcagcatccggcacatgatccggaagaacaagtaccgccccgatctgcgcatggcggccatccgcagggccagtgccatcctgcgaagccagaagcccgtggtggtgaagagaaagcgcacccgtcccaccaagagctcctgagcccccaccccagaagcaataaagagtccgctgactt

SEQ ID NO: 8715 - DNA, 455 bp, Cricetulus griseus
gaacctgcctgcctgcacagcagcaaaggcttaaattttactaaattaaaagtgaaaatttaatcctgatatgatggtacatgccattaatcctagtattcaggaagctgaggtggggattgtaagttcaaagctagcttgggctacatagtgctactaatattttgtatacattgaaaatttttattttattttgcttctttgaaggctaaagaattgaaactgagagtaaaaattagcaacttgcagcgttgctgaggtctgtggtctggctgtaacttttgaatgcctactaaggtcagaatttaaaatgctactaaagtaaaagcatgacgaagtgtgctttcagttcaagttagtatttctgatttttcctcctacctcctttggtactccagtctggtttagagggaccaaagagatcccgaggtcagacccagaatacttgatgaaag

SEQ ID NO: 8716 - DNA, 455 bp, Cricetulus griseus
atcaagttccctacaatatcctatccttaaaaccggaagcaatgaacatgaatgacactcttggaatggataaatgaacttcctgtttggcctgcttctgggccctgccagattctctaacatcatgtacgtaagtatagctcctcaaagcgactgacatttattttcattttactttgtttttggtttcgttttttactttccccacctttatgttgtgctattcctgatccacttgacactctctgatgcctgagagattcttgtttgggatttagtttttcagggccgtgtttacagtaaaaaaagcaggcagtcttctagttcctcctctttaaatctctgagattcttcatttcagggttttcaaacgtaagcagtccatcttaaggaagtgtaactgccatggccacaagtctgctagttgcactttgaatgttctagctagggttgtt

SEQ ID NO: 8717 - DNA, 455 bp, Cricetulus griseus
ttttctattgctacatgctgctgctggtgctgccctgcgtggcgctcagcgaggtcagcatgcaaggggagcacatcgcaccgcagaagatgatgttgtacccggtgctcagcctggccactgtcaacgtggtggctgtgctggcccgtgccgccaacatggcgctcttccgagatagccgagtctcggccatcttcgtgggcaagaacgtggtggcactggccaccaaggcctgcacgttcctcgagtaccgtcgccaggttcgcgacttcccaccacctgcgcttgcgcttgagctgcagccacctccttcccagcgcaattcggtgccgccgcctgcaccactgcatggtccgccagtgcgtccccacgggccctcacccactcgtgacgcgttggacacgtgacaggcccccccccgcgggccgcacagacgctggactagctgctgcgcg

SEQ ID NO: 8718 - DNA, 455 bp, Cricetulus griseus
agcagcagcgtgctcctcatgattatctataccaccttctgcgacacgttctccaacccacacatcgacctggataaattcagcctcgtcctcatactattcataatagtctccgttcaactgagtttcatgcttttgaccttcatcttttcaacacggaataactcaggtttcacaccagcggacacagtggctatcatcttctgctccacacacaagtccctcacgttgggaattccaatgctgaagatagtgtttgcaggccatgagcatctctcattaatatctgtgcccttgctcatctaccacccagctcagatccttctgggaatgtgttagtgccaacaataaagtcttggatggtgtcaaggcagaagggagtgaagctgacaaggccaactgtatgacggagaaggagccttcctgaagcggtgtacatatgtacagggctgtac

SEQ ID NO: 8719 - DNA, 455 bp, Cricetulus griseus
aaggctttgtaccagacaggtatcagttcgacccatgtaagccaattaagcccaggcacttggcctacaacacatctccaccactgaaggacaggatccactgtgtggcttatgtcttaaacatcaactctgttaactcactgtctgataaaatggtggcaaagctcaaaagaattcagagagatgtaacagactgtggtataggacaagtagtcttgcttactaatgtggataactgtgatgaagttcttgacgacaattttacaaacatgacagaaagtacgacttctcaaagccaggtaaagaaagtccaaaacatgctcactattcctgtatctaatatcctgatggtcagtaattacacttcagagcaatcaatgcaccctataagggatattctgatctttgctgcactcaggcagatgttgcgggctgcagatgactccttagaagac

SEQ ID NO: 8720 - DNA, 454 bp, Cricetulus griseus
gagagctggcagcatgtctacggagctgggactcgggtttgcgctgcgggccgtgaacgagcgcgtccagcagagtgtgtcacggcggcggcgggatctcccagccatccaaccccggctagtagcggtcagcaaaactaaacctgcagacatggtgattgaggcctatggtcacggccaacgcacttttggagagaactatgttcaagaactactagaaaaggcatcaaaccctaaggttctatcttcatgtcctgagatcaaatggcacttcattggccatttacagaaacagaatgtcaacaaattgatggctgtccccaacctctttatgctggaaacggtagactccatgaagttggcagacaaggtgaacagttcctggcagaagaaaggttctactgaacgactgaaaggttatggtccagattaacaccagtggagaggagagtaa

SEQ ID NO: 8721 - DNA, 454 bp, Cricetulus griseus
gctgcggaggcgatggcagggaaagaattggaacgatgccagcggcaggcggacgaagtgacggaaatcatgctcaccaatttcgacaaggtcctggagcgtgacggcaagctggcagagctggagcagcgctcggaccagctcctggacatgagttcggccttcagcaagacaaccaagactctagcccagaagaagcgctgggagaatattcggtgccggatatacttgggctggcagtggctggtggcctgctcatcatcctgattgtgctgctggttgtctttcttccaacgagcaatggggacagtagtaaaccataggcctagtatgcattaagagcactagctgctctcccagaagacgcaggttcagttcccagcaaccacatggtgactcacaactgtctgtaactgcagttccaggggatctgacaccttcacacacacacaca

SEQ ID NO: 8722 - DNA, 454 bp, Cricetulus griseus
caggcctgagagcaagaactggaccagtgcccttgatgacaaggctcaagcacataggatccacattgaccctgagtcccaggatggcagtccagtgaccagcaggcggtcctcagtctctgggattgggctggatgacaacagatcaggcctgggatctccatatggtcagccacctcgccttccagtccctcacaatggcagcagcaatgatatcaccctgccagcccagatgagcactctgcatgtgtctccacctcccagtgctgacacagccagggttcttcctcggaaccgggactgcagggtggacctgggttcagaggtctacaagatgttaagggaaccagcagagccagtggcctcagaacccaagcagtctggatccttccgctacttgcaaggcatgctagaggctagcgaaggtggggagcggcctgggtctggtggtccc

SEQ ID NO: 8723 - DNA, 454 bp, Cricetulus griseus
gagcccccaagtgtctccagagacttgcaggagctagcaaaggaagctgtgtttgctgttagactccttccagagtaactcaaaggtggtttccttcatgaagtccccggtgggtcggtacctgggacaggcatcctttcctggctctcaccatgctgatatttgttagcatgtcagccatcccctgttggcttcttcctgctcatcgtggtgctcacctctctgggtgctcttatgggggccatattgctggaaggactggtcatctctgtgtgcggcctctcactgctctgcatcctctgtggcttgggcttcgtatcacttgaccatgttcaggaatagccatgatgtcctatgtggtggtgtcatgcctcatgagctattggttttctcccaggcccctgacacagcaaaatgccaacactgactgtcagctggctatgaagtccacgga

SEQ ID NO: 8724 - DNA, 454 bp, Cricetulus griseus
gttctctagacggcttccaacaagatgaccctgaatggcggcaacggagggagccgtggcgcaggcagggagcgcgaccgccgtcgaggcagcacaccctggggtccggcacccccactgcaccgcaggagcatgcccgtggatgagcgagaccttcaggcggcgctagccccgggctccctagcagcgactacagcgggaactcggacacaggggcagaggctggactggcccgaaggctcctccgactcgctcagttcaggaggcagcagctcagaggagggcgtttacaaggtgctgctgcttggggcgcctggtgtgggcaagagcgctctggcgcgcatctttggtggtatagaggacgggcctgacgcagaagccgcagggcacacatatgatcgttctatcactgtggatggagaagaggcatcactcatggtctatgacatttggg

SEQ ID NO: 8725 - DNA, 453 bp, Cricetulus griseus
tgagactttggtgggaacaattggaaaaagtttgccaagaagagggaccgagccaattacgaagaagatgaaaatggaaatataaaacccattaaaacaaagaagatgttcttaaagccccaagattaaaatggatgcctaggatacagcagctgcctgtgagcacaccatagtttgaagtcatccttgtggtgtctgtatggttaatactccaatgtttacctgtaaagaaatgattaattttgaaaatatgctgttcttgagacagatgtgtaatggatgttatacatccttttaatgatattcttgagggtcttcaaatgtgtgggcacatgccgctccctagatttttgacctgactttgatttgtgtgtatgtccacacagtcaggacacatatgaacagctctctagttattgtcctggaatgactgttagaaactaattattgcct

SEQ ID NO: 8726 - DNA, 453 bp, Cricetulus griseus
cttccgagggagctaaggccgcgttggggtgaggccctcacttcatccggcgactagcaccgtgccggcagtccgcaacatggcctccgtctctgagctcgcctgcatctactccgccctcatcctccacgacgacgaggtgacagtcacggaggataagatcaatgccctcattaaagcagctggtgtcaatgttgaacctttctggcctggcctgtttgcaaaggccttggccaatgtcaacattgggagcctcatctgcaatgtaggggctggtggacctgctccagcagctggagctgcaccagcaggtggtcctgccccctctaccgctgctgccccagctgaggagaagaaagtagaagcaaagaaagaagaatctgaggagtctgatgatgacatgggctttggtctttttgactaagcctctttcttgttaacatgtccaataaa

SEQ ID NO: 8727 - DNA, 453 bp, Cricetulus griseus
attcagccggcggtgcgaggagacggaccttccaccctagaccatggccaagttcgtccgtaacttcgcggagaaggccccggcgctagtaagcgctgccgtgacttactcgaagcctcgattggccacattttggtactacgccaaggttgaactggttcccccaacccctgctgaaatccctgcagctattcagagtgtgaaaaaaataattcaaagtgctaaaactggtagcttcaaacagcttacagttaaggaagctgtgctaaatggtttggtcgccactgaggtgtggatgtggttttatatcggagagatcataggcaaacgtggcatcgttggctatgatgtttgaagactgatctttaacatctgattttatttgagttttttatttgaggtgttcttggaccacatgtgatgagactgctatcttaataaaatactagctgt

SEQ ID NO: 8728 - DNA, 453 bp, Cricetulus griseus
ccctgcgtatctgggaggcctgctgggcccactaccagacggactacttccacctgttcatctgtgtggccatcgtggccatctatggggatgatgtcatcgagccagccagctggccacagaccagatgctcctgcactttgggaatctggccatgcacatgaatggagaactggtgctcaggaaggccaggagtctcctgtacccagttccgcctcttaccacggatcccctgcagcctacatgacctgtgtaagctgtgtgggacaggcatgtgggacagtgggtacatgccagctgtggagtgtgccggccaccacccgggctcagagaactgtccctatggggcacaatggagatgccatcacccaagcccccaagagaaggcaagaagggcccaaaggcacctcgggaggcctttggtttccgcagatagaaaacttctgcccttga

SEQ ID NO: 8729 - DNA, 453 bp, Cricetulus griseus
catgtctgcgccgcctgctctccagatccgggaggcgaacgcgcacctggcggccgtgcaccgtcgcgtggcggagctggagacccggctgctggcggcagagcgcacggtgcgcgcgcaggccgagcgcctggccctccacgaccagcagctgcgcagcgctctggaggagctgggccgcaccaaggaccgggagatttccaccctccagaagcagctcctgagctctgagaccatcgtccgcaacctgcaggcccaagtggaccagaaggaccagatgatccagcagctgcagccccaggctgacctgctacgggacatcactcgatggcgaccacccctggctgccctgctggctgccctggaggaggctgagcgactgggccccttgccggccagtgaccagggacagctacttcctgatgggccgggtccacccctgggcaacagcat

SEQ ID NO: 8730 - DNA, 452 bp, Cricetulus griseus
gccttgtttacagctctttcctgctcctgcatcctgccaggctccactgccagccacagggttcctttctccctgcacttttgcctgcggatctcccttcttgcctcttgatccccctaaccctgcactcggaaaacctctctgcacttctggaagccttcctgaacatctaaattgtactctgcacctctgcatctctcccagcccactgcacttcttcctgcctctggactcctctgaacattaacccccacctcctaactgtcattgtcttggcatctaactcattcttttcttccttccttaacaccttgctccccttgccacatccctgactcctctgccttctcatctccctgctaccatcttcaccttcctgcaccacttattctgtaaaaagctgcagtacttaggtcaggctgctttctattttaaaaaaaaaaaaaaaagtt

SEQ ID NO: 8731 - DNA, 452 bp, Cricetulus griseus
gtcacaaccggcgggacgcacgaagcaggatgggctgcaggcacagccgacccagccgctgcaagcgcgcggaaaaggtggaagacagacagacagaattggagacactggacaaagagggaaggatcctggaaggaaggcatgaggaggcttggcaagccctgcagacatcatgtgcattcgagaaagacacttctggtatctccgtccaagaggccaaagccccattgcagaactcctgtgcaatgccagccttatcacaggaggccatccaggcccagatgaacgaggtggaagggtccatccttagccgactgtataagaaacacatccaggattatgggagccctggcccattctgggagcaagagctggagagtttgcaccatgttattgagatgaagaatgagcgaattcacgagttggagaagcagctcctcctcctggagatg

SEQ ID NO: 8732 - DNA, 452 bp, Cricetulus griseus
atttgtacaaacgagagctgctgaggcttgctgtgtcttgtgccagtggctccccactggacttcatgagaagcttcatgctcaaggatatgctatacctggctggcctctcttgggacctggtgcaggcaggcagcatagagcgctgctggctgctgggtcttcgggctgcctttgagcctgggcagctgccagcccaccaggtagaggaggctgctgaacacagcagggtgctcagtgacctcacacatctggcaactctggtttacaagcgcttggcacctgaagaggtggcagagtggctgcacctggatgatgatggaggtctccctgagggctgcagagaggaggtggtccctgcaactcctccatccccagccagcctgccctctacgcagtgggggctgggagaggaggaggagttgacctcaaaaaaaaaaaaaaaaaaaaaa

SEQ ID NO: 8733 - DNA, 452 bp, Cricetulus griseus
gagccagggcgcagtccagctccccgcagcccgagggaggggcccgttgtgcccacacccggccaggttcgaccatgctgtcccgcctgctcaaagaacaccaggccaagcagaatgaacgcaaggagctgcaggagaagaggcggcgagaggccatcaccgcagccacctgcctgaccgaagctttggtggatcacctcaatgtgggtgtggcccaggcctacatgaaccagagaaagctggaccatgaggtgaagaccctacaggtccaggccgcccagtttgccaagcagacaggccagtggattggaatggtggagaacttcaaccaggcacttaaggaaattggggatgtggagaactgggctcggagcatcgagctggacatgcgcaccattgccactgcactggagtatgtctacaaagggcagctgcagtctgcgccatcctag

SEQ ID NO: 8734 - DNA, 452 bp, Cricetulus griseus
tgtccttctcttccatcccgggaatcctggcgtgtggagctgtgggttcctactctgtggtgctggctattgacagttacatcttctccagcctctcctacatgactctgaatgtcctcaggagagcactcaacacagacttccgagcggctttcattggagtgcctttccagactaaagacttccttgtcctggccgtgtgggggatgttggctgtcagtggaattacgctgcaaattcgaagagaaagaggacaggcgcctttccctccccatccctacaagctgtggaagcaagagagagaaagaagagtgacaaacattctggaccccagccaccatatccctcccctgagagagcggctgtatggccgattgactcagatcagagagctctttcagaaggaacagccagctggagagcgcacacccctgctgctgtagaaggctgag

SEQ ID NO: 8735 - DNA, 452 bp, Cricetulus griseus
  modified_base (433)..(433): a, c, t, g, unknown or other
tctgcatccccttggtgctgatcttgggctgttatggattaattgttagagctttgatttacaaagacctggacaactcccctctcagaaggaaatccatttacctggtaataattgttctgacagtgtttgctgtgtcttacatccctttccatgtgatgaaaacgatgaatttgcgggcacggctggatttccagaccccagaaatgtgtgctttcaatgacagggtttatgcgacttaccaggtgacacggggtctagcaagtctcaacagctgtgtggaccccattctttatttcttggctggagatactttcagaaggagattgtcccgagccaccaggaaagcttccaggaggagtgaggccaatttacaatccaagagtgaagaaatgaactctcaatattttatctgagttcaagcagaacgganacacaagcttgtgaaggca

SEQ ID NO: 8736 - DNA, 452 bp, Cricetulus griseus
gaaggagttcagctttcccagcagagtgccaaggacttctttcatgtcttgaatcttaataagaaatgtgacacctcaaagtatagagtgctggttgtgtctgtatgtcctcagtctctgccttattttgctgctaaattcaacctcagtgtcactgatgcatctagaagactctgtggcttcctcaaaagtcttggggtgcactatgtatttgacaccacaatcgccgcggatttcagcatcctggagagtcagaaggagtttgtacgccgatatcaccggcacagtgaggagcagcgcgaactgcccatgttgacctctgcctgtcctggttgggtcagatatgctgagcgggtactgggccgcccagttattccccatctctgcactgccaagtcccccagcagatcatgggctccttggtgaaggattactttgctagacagcagaat

SEQ ID NO: 8737 - DNA, 452 bp, Cricetulus griseus
tgtggaggacacctcgacggggccaccggctctctcccgcggatgacgagctgtaccagcggacgcgcatctctctgctccaaaacgagttccctcaggctgtgtacatcgacagctacaacagcagaggcttcacgatcaacggaaaccgcgtgcttggcccgtgcgcgctgctcccgcagacggtggtccagtggaatgtgggatcccatcgggatatcaccgaagagagcttctcccttttctggatgctggagcctagaatagagattgttgtggtgggcactggaaacaagactgagcggcttcacccccaagtgctacaggccatgaggcagcgaggcatcgctgtggaggtgcaggatacgcccaatgcctgtgccactttcaacttcctgtgccacgaaggtcgagtgacaggagccgcccttattcccccctcctggagagac

SEQ ID NO: 8738 - DNA, 451 bp, Cricetulus griseus
  modified_base (413)..(413): a, c, t, g, unknown or other
agatatgtgttgctaatacccatctctactggcacccaaaacgtggatacattcgtctcattcaaatggcagtagccttggttcacattagacatgtttcatgtaatctgtatcctggcatacctgttatattttgtggagactttaatagtacaccgtcaacaggaatgtatcattttgtcatcaatggcaacattactgaggatcatgaagactgggcttccaatggggaagaggaaagatgcaacatgtctctcacacaccttttcaaactgaaaagtgcttgtggtgaacctgcttacacaaattatgttggcggctttcacggatgtctagattacattttcattgacttaaatgctttagaagttgaacaagtgattccgttacctagtcatgaagaagttccaccncaggccttactagtgtttctcattccttccgatcacat

SEQ ID NO: 8739 - DNA, 451 bp, Cricetulus griseus
gtggtggagccctacaactccatcctgaccacgcacacgacgctagaacactcagactgtgctttcatggtggacaacgaagccatctatgacatctgccgcaggaacctagacatcgagcgccccacctataccaacctcaaccgcctcatcagccagattgtgtcctcaatcactgcctctctccgctttgatggagccctcaatgtggatctcaccgagttccaaaccaacctggtaccctatcccagaattcacttcccgttggtcacttacgcacccatcatttctgctgagaaagcctaccatgagcagctatctgtggcagagatcaccagttcctgttttgagcccaacagccagatggtgaagtgtgacccacgtcatggcaaatacatggcttgctgcatgctctatcgaggtgacgtggtacccaaggatgtcaatgtcg

SEQ ID NO: 8740 - DNA, 451 bp, Cricetulus griseus
ttccggccattcatacgcctagtcggtgagtctttggagctcgaattccgtgtccagtaggaccagagggaggctgcgccgctaggatgaagctcgtgagatttttgatgaaattgagtcatgaaactgtaaccatcgaattgaagaatggaacacaagtccatggaacaatcacaggtgtagatgtcagcatgaatacacatcttaaagctgtgaaaatgaccctgaagaacagagaacctgtacagttggaaacattgagtatccgaggaaataacatccgatattttattctaccagacagcttacctctggatacattacttgtggatgttgagcctaaggtgaaatctaaagaaaagggaagctgttgcaggaagaggtcgaggccgaggcagaggaagaggacgtggtcgcggcagaggacgaggaggtcctaggcgataatgtc

SEQ ID NO: 8741 - DNA, 451 bp, Cricetulus griseus
  modified_base (443)..(443): a, c, t, g, unknown or other
gttgtaggtgtacccaagacaggcctggttataattgtcctatgcatcatcttcatagaggacaattgtgtcagtgaggaggtgttctgggatgtgttgaatagcctagggctgtatgctggcttggatcatttcatatttggggagcccaggagtctcatcacagaggattttgtgcaggaagggtatgtggagtacaggcaggtgcccaacagctgtcctcctcgctatgagttcctgtggggcccgagggcctatgcagaaaccaccaagatgaaagtcttggaattttatgccagcattgttaagcaggatcctagatcctaccctgagaagtatgcagaggctttgagggagcagcaagagcgggcctaggccagagaacgcccagtcgtgtaaaaaaaaaaaaaaaaaaaaaaaaaaaaaaaaaaaaaaaaaaaaanaaaaaaaa

SEQ ID NO: 8742 - DNA, 451 bp, Cricetulus griseus
gctgtgctgcggtgtcccagagtggggctctggagggcgagatggctgattggactcgcgcaccgagctctggtgctgtggaggagattctagaccgagagaacaagcggatggctgatagcctggcctccaaggttaccaaggctcaaatcgctggccttggacatcgatagggacacagaagaccagaaccgatacctagatggcatggactcagacttcaccagtgtgactggcctactcacagggagtgtgaagcgtttttccacaatggcacggtctgggcgagacaaccggaagcttctgtgtggtatggccatggtcttaattgtggccttcttcatcctctatcacctcttatcgaggacaaggacgtgagccaatgggagccaagggcagccaggctctcctacacctggtatcctggtttcctgaggacctgattacaaaa

SEQ ID NO: 8743 - DNA, 450 bp, Cricetulus griseus
agtgctgacgcccacccaggttaagaataggcccagcagcatttcatgggatggtcttgacccagggaaactctacaccctggtcctcacagaccctgacgctcccagcaggaaggaccccaaattcaggggagtggcaccattttctggtggtcaacatgaagggcaatgacattagcagtggcaaggttctctcagattacgtgggctctgggcctcccagtggcacaggcctccaccgctacgtctggctggtgtatgagcaggacaaaccactgaactgtgatgaacccatcctcagcaacaggtcaggagatcaccgtggcaagttcaaagtggcagccttccgcaagaagtatcacctgggagcccccgtggcgggcacctgttaccaggcagagtgggacgactatgtgcccaagctgtatgagcagctctccgggaaatagg

SEQ ID NO: 8744 - DNA, 450 bp, Cricetulus griseus
caacgaccaggctcgtggccagttcaacaacagtggatcgaagggagaaggcacggggtgctgggagctggccaggcagagagctgtgcgccaggcttgggcccgggagcagcaaagactacgggaaggggaggaaggcctgcgggcctggacagagggggagaggcagcaggtgctgaacacagggcgggtgcaaggctatgatggcttctttgtgacctctgttgagcagtacccagaactgtcggacagcgcaagagctgggagctcactggaggactcctttgtggttttgtctgcctagagaccattgtcattagcactcacaggaggctctgggagatggggggtgggagccaaatgcttccttttgagctgggcttcttagaaatgggacttttatgggttacatttacattaagtgtggaaaatgaattctgagtctaagct

SEQ ID NO: 8745 - DNA, 450 bp, Cricetulus griseus
ggttcctctccccaccgtggccgcggcgcgggaaggccagcgagcggctgcgatggctgacgagattgccaaggctcaagtggccacgcccggcggcgacacgatcttcggcaagatcatccgcaaagaaatccccgccaagatcatcttcgaggacgaccggtgtcttgcttttcatgacatttcccctcaagcaccaacacatttcctggtgatacccaagaagcatatatcccagatttctgtagcagaagacgatgacgaaagtcttctaggacatttaatgattgttggcaagaaatgtgctgcggatctgggcctgaaccggggctatcggatggtggtggaatgaaggtgcagacggaggacagtctgtctaccatattcatctccatgttctcgggggtcggcaggatgaattggcctcctggttaagcaggttggggataa

SEQ ID NO: 8746 - DNA, 450 bp, Cricetulus griseus
ctgggactcacatttggagctgcagccaggcggaactgtgttgatgatacctacccccagtggtcacaagtgctgtaatgagtgccaaccaggcaatggtatggtgaggcgctgtgatggcaccagggacactgtatgccacccatgtgaacctggcttctacaatgaggcagtcaattatgaaaactgcaagcagtgtacacagtgcaaccaacgaagtgggagtgagctgaagcagaattgcacacctactcaggatactgtctgccaatgcagaccaggcacccagccccgggaagacagcagccacaagcttggagttgactgtgttccctgccctcctggccacttttctccaggcaacaaccaggtctgcaagccctggaccaattgcaccttatctgggaagcagacccggcacccagccagtaccagcttggatgcagtctg

SEQ ID NO: 8747 - DNA, 450 bp, Cricetulus griseus
gctccaagatggcgactcccatgcatcggctgatagctcggagacaagctgaagccaataagcaacatgtaagatgtcagaaatgcttggaatttggacattggacttatgagtgcaaaggaaaagaaagtacctccacaggccttcaagaacagcagagctgaagaaagctttaaaagaaaagaaaatagattgttgcagcaaagcatgggagagactaatatagagagaaaagccaagaagaagaggtctaaaagtgtcacgagttccagtacctctagcagtgacagttcggccagtgagtcttcatcagagagcgagacatctgcctcatcctcctccgaagacagtgactcggatgacagcctctctagctcctcctcttaacttttttttttaagttttaagtctactgcctatgaaatgaatgccttatgtgggtatgtgtta

SEQ ID NO: 8748 - DNA, 450 bp, Cricetulus griseus
aaactttctcagtgctggtgttccatgtgtaaattgcattttgttcaaattttgggatgtactacattttttccccatttgttccttacttaccatagtaaagttacagataggatgtaattatatgtattcttcctaaaactgtatcatttctaaagctacctactgacttgactccaaccatcaaaaataaaaatgactcttatttttgtggaatcatacacacacacacacacacacacacacacacacacacacacacacacagagagagagagagagagaagaagaagaagaagaagaaagaaagaaaaatttttcttgtgtgtattcatttttgctaaacatctgtatccggtaaaatactcttgacaaattgcataccatgattttatgtcattctcctagatctgccttatatacatttcaataaaagtattatttaatgtt

SEQ ID NO: 8749 - DNA, 450 bp, Cricetulus griseus
atcctggagaagctaaaccagcagatcccacccagacccttcacctacctcaataccaccaccagtgccacacacagcacagccaccatcctcaaccctcgagacaaatactgtaaaggggaccagctagacatcttaatagaagctagggactacctaagaaacaagaagaagtatggtggggacttcctgagggccaggatgtcctccccagccctgaaggctggtgcttctggaaaggtgacagacttcaacaatggcacctaccttgtcagtttcactctgttctgggaaggccaggtggccctgtctatcctactcattcatcccagcgaaggggtggcagccctctggagagcaaggaaccaaggctatgacagaattgccttcaagggttaaatttgttaatggcaccacccaggtcttaactgagtgtggcctgaccctaaa

SEQ ID NO: 8750 - DNA, 450 bp, Cricetulus griseus
  modified_base (332)..(332): a, c, t, g, unknown or other
catgaggatgaccagcacagactactctctctcagatttgtctcaaagtagcagccatgcccagtgcttttccaatgccagctaccacacactggcgtgcggggtgcctgccaccagccaggccagcactctggacaggaacagccccaccaagctgagtaacaagtcccttgacagagacacagcaggctggaccccctacagctatgtgaacgtgttagactcccatttccagatcagtgccctggaggccaggtaccccgcccgaggacttctacattgaacttagacacctcagccgccacaatgagccacactcaccaggcacttgnggactggacagacgtcagaacacatacattatggacaaaggcttcaaagattacatagaaagaatctacatgcagttctagtacttgttccttgaacagaataaaaatatatatgaag

SEQ ID NO: 8751 - DNA, 450 bp, Cricetulus griseus
aaagtgctctaatattagcatcttatgtctacagagagactatggtgtgagcctgtcccagacgagtctaatattagagtccatgaataggtcggtggcagccttgaaaatgtttccatggctactagtcttcaagatagtactttataattagccaccacccagtataaagtaaacttaaatggtgggagagtccttgcctgaacataatcaaggagatttagcacttacctgtgcttataagaaggcctcttttttgaggaaaaaaaatctaacaagataaacttttcatttatgttgtgaaaaaataaacggatcacttgaaccggtgctgggaattgaaccttggtcccctggaagagcactgggtaatcttaactgctgatccatctctccagcctcatcattaaaagtctatttctaccaagtaaaaaaaaaaaaaaaaaaaaa

SEQ ID NO: 8752 - DNA, 449 bp, Cricetulus griseus
ggatgcaattcagtgtggccatgttgacatagccaagctgctccttgaaaaacacaaggcttgctcttcagctgaagatagcctgggggcccaggccctccaccgggcagcagtcactgggcagaatgaagccatacgattcctggtgtcctgtcttggcgttgatatagatgtgagagcaaagacaacgcagctcacagctcttcattatgcagccaaggaaggacagacgagcacagttcaaactactgttatcccccgggtggccaaccatcaactctaaagaatgaaagaaaaccgaatcagccctcgcatctggcctgtgcaggtcagcatgtggcttgcaccaggttcctcctgcagtcaggactgaaggattctgaagacctaacgggcaccctggcccagcaactcacaaagtgtatagacatccttcaggtacttgacca

SEQ ID NO: 8753 - DNA, 449 bp, Cricetulus griseus
  modified_base (441)..(441): a, c, t, g, unknown or other
gaggttgggtacatatggtagtgcccacaaggaggaggactcactttgggcccagatttgcaagtcgcttcctttgcctgcatttgtatctaagactccgaggcccgcaggcctcttctccgctgttgctctctgtaccagggttaaggtttggaagaccccttcccagagcgttctgaatttgcatacagttgtgtgggagaaaggatgttgttcttgtttcttgtttttgttttcagtgggagaatggctggcttgagtaaagcctccttccctcctgtaaggtttttgcaactagcatgtgatttacgtggaacccaacaatgcggggagccccacccttcaaacgtcaaagatcctctccgatcacccacatgggtggttatgacagcatggttcccagcgtggacatgactcttaagttaatttgtcagcaaaaanaaaaaaaa

SEQ ID NO: 8754 - DNA, 449 bp, Cricetulus griseus
  modified_base (395)..(395): a, c, t, g, unknown or other
gcggggacatgagtgttcctgtgccaccgcccccggacgggctcctgaccgggacctccgacagcctggaggccggcgagcccacgctgggtttgagtgatgcttctccagatgaaggactgatagaggacttcactgtggaggacaaagctgtggagcaactggtgggaggcctgctgtcccactacttaccagatctgcagaggtcgaagcaagccctgcaggaactcacgaaaaggaatttgaaagagaaaagcagctgacagccaagccagccaaaaggacttgagagccgagctgtgggtgtctgttgccctgccatactccctgggtccccagtgttgttcagagagagggtgcggatggtgccttatgccttctctctatctctttcngtgtgtgtgtgtgtgtgcacctgcctctaccttaagagtgctgggatcaaaggc

SEQ ID NO: 8755 - DNA, 449 bp, Cricetulus griseus
ctgctgtcccacgggtccaacccccgcttggtcgatgacgatggcatgaccagtctacataaggctgcagagaagggtcacgaggacatttgctctctcctgttacaacacagcccagccctgaaggctgtccgggatcacaaagcacgcctagcatgtgacctgctgccctgcaacagtggcctgcgggacctgttggccagctgaggctccacctcctgtctctggctgcccttgaagggtacacagactagctctccacacccctgccttgctcagcatcatgctgttggatggaaccagggccaaaatgcctgtaagagcccctgtctggccagtggggagggcttgggagggctttgaaggctgtgagcctggacaggtgatcgtgtaagttagtccttgttgaaatagctatccatttggaagaaaataagcttatatcttga

SEQ ID NO: 8756 - DNA, 449 bp, Cricetulus griseus
gcaatcattcatttaattgcaacaagtagacaagccgaagaacaaccccaatctctttatgacaatgaagtaaatatatccatcccagtaaaatatgaagtcggactacagtttcacagttcttcgagtgaacaccacatctcaattggagccaatgagactatccctgaactcatcaattccactagtgacattggaaatgaaatcaatgtcttctacatgatcaggaaaaggggccatttcccaatgccagaacttcagctgtcaatctctttccccaacttgacatcagatggttatcctgtactctacccaactggatggtcgtcttctgatcatgtgaactgtgaaccccggagccttgaggacccttttggtatcaactctgggaagaaaatgaaaatatcaaagtctgaggatctcaaaagaggcacaatccaggattgcag

SEQ ID NO: 8757 - DNA, 449 bp, Cricetulus griseus
  modified_base (394)..(394): a, c, t, g, unknown or other
  modified_base (428)..(428): a, c, t, g, unknown or other
gaggacgcttgaacgaaagttggaagcgaagatgatcaaagaggagagtgacttccatgacctggaatctgtggtccagcaagttgaacagaacctcgaactgatgaccaaacgggctgtaaaagcagaaaatcatgtcatgaagctgaaacaggatataagtttgctccagacacagctctccagtttcaaacgagagaatgaagccttgcggtcccgccagggtgccagccttgcagtggtgaaacaaaacaccgatgtggccttgcagaacctccatgttgttatgaacagtgcacatgcatccataaagcagctggtgtctggagcagagacccttaacctcgttgctgaaatcctgaagtctatcgacagaattactagaaattaaagntgaggcgactcttgagaaccactagctgccaccngttcccaccacctctgccacc

SEQ ID NO: 8758 - DNA, 449 bp, Cricetulus griseus
gacgacatggcggcgtccttgttgggctcgctgctgcggactttccggcaggcagtccctccatcaacatcaagtcaagttcgaggttactatgtagactggaaaatgttgcgtgatgtgaagagacgaaaaatggcttatgaatatgcagatgagagacttcggatcaattcactcagaaagaataccattttgccaaaagaccttcaggacatggctagtgaagaaattgctgctcttccacgggatagctgtcctgtgagaatcagaaaccgatgtgttatgacatcccgtccacgtgctgtaaagcgccgttggaggcttagtcgcattgtcttccgcctacttagctgaccatggactactttctggagttcagcgagcaatatggtaaatcagtttcagaacctactcagctgcccgggaagtcaattctggcaaagagactt

SEQ ID NO: 8759 - DNA, 448 bp, Cricetulus griseus
cgactatgtatatgacatttactatatggagatggcccctccaggatggattgagaacattctgtctgtgcagccctacagccaggagtgggagctggtgaatgatgatcagcaaccagaagatacgtatgaagatgaagatgatgaaaacagtgaaaataattggcgcaatgagtatccagatgaagaaagcagtgatgaagatgaagattctagagactctaatgaatacaacagcctcagcgaggaggaaagaggcagcagacaattgatgtggagcaagtaccctttggatgtacagaaggagtttggctatgataaccccatgatctggattcagattgataaataaaataaagaaaacctccataaaaaaaaaaaaaaaaaaaaaaaaaaaaaaaaaaaaaaaaaaaaaaaaaaaaaaaaaaaaaaaaaaaaaaaaaaaaaa

SEQ ID NO: 8760 - DNA, 448 bp, Cricetulus griseus
cctcgagagctctccatcctgcgcggcgtgcggcacccgcacatcgtgcacgtcttcgagttcatcgaggtgtgcaacgggaagctgtacatcgtgatggaggcggcggccaccgacctgctgcaggccgtgcagcgcaacgggcgcatcccggggtcgcaggcgcgcgagctcttctcgcagatcgcgggcgccgtgcgctacctgcacgaccaccacctggtgcaccgcgacctcaagtgcgagaacgtgctgctgagccccgacgagcgccgcgtcaagctcacggacttcggcttcggccgccaggcgcacggctacccggacctgagcaccacctactgcggctcggccgcctacgcgtcaccggaggtgcctccctgggcactcccctacgaccccaagagtacgacgtgtggagcctgggcgtcgtgctctacgtcatggt

SEQ ID NO: 8761 - DNA, 448 bp, Cricetulus griseus
ttcctgtatctgtgtggattccaagagcctgatagcattttggtccttcagagctgctctgggaagcagttaccatcccataaggccatgcttttcgtgcctcagagagatcctggtcgagaactgtgggatggtcctcggtctggctcggatggagcaatagccctaactggagtggacgaagcctatactctggaagaatttcaacacctaatccctaaactgaaagctgagacgagcatggtttggtatgactggatgaagccttctcatgcacagcttcactctgactacatgcagcatctgactgaagccaaagccaggagcaagaacaaggttcggagtgttcagcagctgatacagcgcctccggctaattaaatctcctgcagagattaagagaatgcagattgctgggaaactgacatcagaggctttcatagagacca

SEQ ID NO: 8762 - DNA, 448 bp, Cricetulus griseus
ggcgccgagtgcgacctctaccgggacacatgggtgcgctacctgggctatgctaatgaagtgggggaggctttccgctccttggtgcctacagctgtggtgtggctgagctatggcgtgtcgagctcctacgtggctggctgatgccatagacaaaggcaagaaggcaggagaggagccaagccctgaagaaggccgcagcaccagagtggccctggctgtggtagacaccttcgtgtggcagtctctggcctccgtagccatcccaggcttcactattaaccgtctgtgtgctgcctccctctatggcctgcgtactatgacccgctggcccctgactgtccgcaaatggaccaccaccacacttgggctgctggccatccccgtcatcgtccaccccattgacaggtcagtagacttcctcctggattccagccttcgtaaactg

SEQ ID NO: 8763 - DNA, 448 bp, Cricetulus griseus
  modified_base (29)..(29): a, c, t, g, unknown or other
tgaacacttgggaaagtgaagaggtacgngtggaaggcacatctgaagacagagatcatgcctattacaacgcaatgccacggaaactgccacctgcaggtggcatttcagatgtgaggatcagggttcaagctacagaccaaatggcctactgccctattcggtgtgagaagctgtgctacttgcccgtgaactctaagtgccgcggtgtgtatgagaactgtacgggacagcgtgggtcaataggtattccccaccagagagggatgcacggtgatgctgcattgatgaagcatgcctgccgagtggatctatttgacgacccttgctatgtcaatacccaggctcttcagagtagagagagagagagagagagagagagagagagagagagagagagagagagagagagagagaggaggaggaggaggagagaggaggaggagag

SEQ ID NO: 8764 - DNA, 447 bp, Cricetulus griseus
gtccctgggacatagcagcagcactggggacaccggcttcagctactcccaggattcagggacggatgtgatgctgctggaagactgcacttctgatgacaaccctcccccacactgcacgtgcccacccaggagaaggagctccgtgacatttgaggacgaagtagaacagagcaaagaggctgccaagaactctattcttcatgtgaaagccgaagtccacaaatctttggacagttacgcagccagcttggctaaagccattgaggccgaagccaaaatcaacttattcggggaggaggctttgccaggggtcttgctcacagcacggactgtcccaggggctagctttggggggcgtcgaggcagcaggactcttttaaatcagaggttaccactgcagagcattgaggaaggggacatcttagctgcagaacagagatgaaa

SEQ ID NO: 8765 - DNA, 447 bp, Cricetulus griseus
  modified_base (40)..(40): a, c, t, g, unknown or other
taaaaacaaaacaaaaaaaagttatttttctttttttttntttttttacacacacacacacacacacacacaaacaaaaaaaaaaattgagccggccatccataaggaatgtttgctttacatgtcacccactgtcatttgtcaaactgcttggccaaacaggagcaggaaagtgtggttttgagaagatggggttgtagaggaagagaggcaattaaatgacacccaaaaacctctcccagatcaaatggaaagcagatcagcaatttgcttctctaggaataggttgactacagagccatacttgaaagtgcttctgcatggtgtcaacattacttgaatgaaattttcatcttgattgacgcacagtgatgtatagttcactttacaaggtagtgcttaacttgttaggttttttttttttttttggtttttttttttcttttt

SEQ ID NO: 8766 - DNA, 447 bp, Cricetulus griseus
  modified_base (326)..(326): a, c, t, g, unknown or other
aaagatggaagacttccaggctgctgaggagactgcatttgttgttgatgaagtgagcaacattgtaaaggaggctatagaaagtgccatcggcggcaatgcctaccagcacagcaaagtcaatcagtggaccacaaatgttgtagagcagactttgagccaactcaccaagctggggaaaccatttaaatacattgtgacctgtgtgatcatgcagaagaatggagctgggttacatactgcgagttcctgcttctgggacagctctacggacgggagctgcacagtccgatgggagaacaagaccatgtactgcatcgtcagtncctttggactgtccatctgacctcctcgccagcctgtagcctgctgtgtctcagcatttctgttcatcttaaccacagctaaataataaattatttaaaattaaaaaaaaaaaaaaaaaaa

SEQ ID NO: 8767 - DNA, 447 bp, Cricetulus griseus
ccaggccagacccctccaccctggttcagcctgggcagcttgggctgagccaccaggaccaatagatttaagctggcatttcagtccaagaaggcttctaagtggatttaggacctgagaggaagaggggcctctgtgggtgctgggtactccagaggtgcccctggtggaagggtgggtcagtggtcctagcaggaagggagacccagcaaggccattcttgctgggttgagtcaaggagctagaacaagggaccaagtggctgtaaaagtctcaagccaatgatggggcttctccactgggctcctgtagtcctcaagtccctggcctccaccttaccaggtgccacttctcagaaggccactgcccaggcccccaggccgccccttcgtggccagagactggttaaagccccccagtgcctccttgtgcatagaacttcctctg

SEQ ID NO: 8768 - DNA, 446 bp, Cricetulus griseus
ccagtattggttggagggcatgctgcggcatgagataggcactcactacctgcgtggtgtgaacaattcacgacagccgtggcacagcactgaaggcagattgcagtatgggcttcggccagccaaccccactgaggagggcctggccagcctgcatagtgtgctgtttcgaaagcaaccattcctgtggcgtgcagccctgctgtactacaccattcaccaggctgcgcacatgtccttccgccagctcttccaggatctggcgcagtatgtgcaggatgaggctgtacgatgggagtactgtgtccgggcaaagagaggacagacagatacctcccggccaggctgcttcagcaaagaccaggtgtacctggatggtattgtgcgcatcctgcggcaccgtcagaccatcgatttcccactgctgacctcactaggcaaggtct

SEQ ID NO: 8769 - DNA, 446 bp, Cricetulus griseus
gggtgggacaccctcagccccgttctctggtacagtggtgtctgcctgactgcctcctgtaaccccaacttgtaagccatcaatcaattttatgttgttatattgccccttgtggggcgggagggggaacctcctggctcttcgacctctttgcctaacattggctgttcttgacttgatgagaagctacaccgcgtgtgggcctccccactcccccagcccggagctgcagaagggttgggagtgtgctaggccaatcagaatatagaaggcagaggactttagggacagggaggtggaattctggctggggaggtgtagggtgggtcctctgcctcccgtggctgcgtggcatgtctgacctccagagctcacgcccccccacttttcctcctcagtgctgacaagatgtcaataaacttattttcacaattaaaaaaaaaaaa

SEQ ID NO: 8770 - DNA, 446 bp, Cricetulus griseus
gcaggccctgacccaggtagatgacctccaactggtgagggtgctggagatgtgtgtggacacgcgtaagaacagcctggggaacttcggagtgcacctccctaacctgatccaactgaagctgaaccacagctgtctgggctccctcagagacctgggtcacttctctgggccacctgcaggtgctgtggctagctcgctgtggcctgactgacttggatggcattggctccttcttggcactgaaggaactttatgtctcctacaacaatatctcagacctgagcccactgtgcctgctggagcagctggaggtgctggacctcgagggcaacgatgtggaggacctggggcagatgcggtacctgcagctgtgcccaaggttggccacgctcacgctggaggggaatctggtgtgcttgaagccagaccctggtccttccaac

SEQ ID NO: 8771 - DNA, 446 bp, Cricetulus griseus
cttgctggaacattgcagtttctctcaggtggtgtttaacagtgtggagaagttctatattcctggaggagatgtcatgtgctattacaccttcacccaacagttcgtccctcgtcgcaaggactggattggcatctttaaagtggggtggaagacaacccgagagtattataccttcatgtgggttgctttgcccagtgacctaaacaaggaatcaaccaagcagcaggaagtccagttcaaagcctactatctgcccaaggatgatgagcattaccagttctgctatgtggatcaaggtggtgtggtccggggagcaagtatccccttccagttccgtccagaaactgaggaggacatagtggttgttaccactaagggaaaggtggaagagatagagcaacacaataaggagcttctacgggaaaaccaggagctgaaagaca

SEQ ID NO: 8772 - DNA, 446 bp, Cricetulus griseus
caggctagtctgtgggatgggcagggtggaagcagctgactgatgaggaggagtgttgtatctgcatggacggccgagctgacctcatcctgccctgtgctcacagtttctgtcagaagtgtattgataaatggagtgatcggcacaggaactgccccatttgtcgcctacagatgactggagcgaatgaatcatgggtggtgtcagatgcacccactgaagatgacatggctaactatattcttaatatggccgatgaggcaggccagcctcacaggccatgactaggggaagacttgttattgtgaactacagatacactgtggtcatagaggaagagtagagggatgtgtggcacacacaggaacatcagttttcccaccctcttatttttgctactctgataatatatcccattcttaaataaactcccatgtcttccatgt

SEQ ID NO: 8773 - DNA, 446 bp, Cricetulus griseus
aaaatgcagcgggagctagtgagtttcccgctgtctcccacggtgcgagtgaagctggtggctgcgggtttccagacggccgaggacgtcctgggggtgaagccctctgagctcagcaaagaagttgggatatctaaagaggaagctttagaaactctacaaattgtaagaagagagagtctcacagacaaacccagatgtgctggtgcatctgtggcaggcaagaagtacaccgcactggaacttcttgagcaggagcacacccagggcttcataatcaccttctgctcagcgctagataacattcttggggtggaatacccctaatgaaaacaacggaagtttgtggtgtaccaggtgttggaaaaacacagttatgtatgcagttggcagtggatgtgcagattccagagtgtttggaggagtggcaggtgaagcagtgttta

SEQ ID NO: 8774 - DNA, 446 bp, Cricetulus griseus
gtctgggagccggagcgcacctctaggatgaacgctcctccggccttcgagtcgttcttgctcttcgagggcgagaagaaaatcaccattaacaaggacacaaaggtgcccaatgcttgcctgttcaccatcaacaaagaagaccacactctggggaacatcatcaaatcccagctgttgaaggacccacaggtgctgtttgctggctacaaagtcccccaccccttggagcacaagatcatcattcgtgtgcagaccactccagactacagtcctcaggaggccttcaccaatgccatcacagacctcatcagtgagctctctctgctggaggaacgattccgggtggccatcaaggacaagcaagaaggaattgagtagcagctaaaaggagcattgcttaatggctggaaggctggtgcacacaccctcaggctcctttcagt

SEQ ID NO: 8775 - DNA, 445 bp, Cricetulus griseus
gcataaaacaagatcaataaggcaggagaattaatactcacctccgagagcagtcgctatcagttccggaatctggcggaatgcctacagaaaattcgagacatgattgcagaggccagccaggtccccaaggagccaaccaaagaagacgcccagctccagagactcaggatagaaaacatgaatcgggagaggctgcgccagaaaagaataaactcttccataaagacgagcaggagggtgactatggactgaagtcaccccacactgccggcaaagactggggtgtcatgcaactctgcagagagctgccacaccaggggaaacttttctcaattaattggagcctttccagaccgttccttaggagggaaggctacaggtcttcggggcagcctcctcagttgtccacctcatgtattactggctgcaataaacttctaag

SEQ ID NO: 8776 - DNA, 445 bp, Cricetulus griseus
ccctgccgagcgcggccaacggagaagtgaagcctgtagtgtccagcacgcctctggtggacttcttgatgcagctggaggattacacacctacgattccagatgcagtgactggttattacctgaaccgtgctggctttgaagcttcagacccacgcataattcggctcatctcacttgctgcccagaaattcatctcagatattgccaacgatgccctacagcactgcaaaatgaagggtacagcctctggcagctcccggagcaagagcaaggaccgcaagtacaccctaaccatggaggacttgacccctgccctcagtgaatatggtatcaatgtagaagaagccgcactacttcacctgagcccaaccctaacccagatgtatttgtcctttccctctcgtcccccacatgacaggcaaaaaaaaaaaaaaaaaaaaaa

SEQ ID NO: 8777 - DNA, 444 bp, Cricetulus griseus
  modified_base (37)..(37): a, c, t, g, unknown or other
ccgattcactgcagtctatgatgctggatcccaggcntatgtgcaatggacagtggcataaagtgactgccaagaagatcaaaaaccgccttgagcttgttgtagatgggaaccaggtggacgcccagagcccaaattcagcatcgacatcagctgatacaaacgacccttgtttttgttggcggtttcccagatggcctcaatcagtttggcctgaccaccaatattcggttccgaggttgcatccgatctctgaggctcaccaaaggcacaggcaagccactggaggttaatttcgccaaagccctggaattgaggggtgttcaacctgtatcgtgcccagctacctaatgaagagaagtacaagcctgagcagggtctatcaagatgagtgtatcaagttaaacaatatactttcctatgcatattaataaaactaatgtg

SEQ ID NO: 8778 - DNA, 444 bp, Cricetulus griseus
gcctcgggagcgctggccgacccggccactgccgctgcagacagacgcgcatccagcatagctgctctgaggctcaaggccaaggagcatgccgcgcagctcacgcagctcaacatcctgccgggcaccagcacgggcaaggaggtgtgctaaaggctgccctccactttcgcaccccttgggcgcgtcccgaaaggtcacctcactcagcatcactcaagaccaaatggaaacagaggaccagcacactcccaagatggcacagacagagcacagccgccttcgcagcagcctggacgctgacaaggcagcttctggcgctaaagggacgtggcacctcttccgctggctgtccacctgcccctgcccctcgcccctcgtcccaaaataaaaaacgaaaatatatgtttaacaaaaaaaaaaaaaaaaaaaaaaaaaaaaaaa

SEQ ID NO: 8779 - DNA, 444 bp, Cricetulus griseus
gagaaagacacaaatctccacggagtaaagatggcagagggtcagaaaagtctgtcactatccaggctcccactggagaacccctgctggcaaatgactctgcccccacaggcgcagaggaagttcaggatgacaactggggagagaccaccacagccatcacaggcacctcagagcacagtatatcccaggaggacattgccaggattagcaaggacatggaggacagtgtggggctggattgcaagcgctatctgggccttactgtcgccgcattccttggacttctcgtgttcctcacccccattgccttcatcctgctaccccgatcctgtggagggaggagctgaaaccctgtggcgccatctgtgagggacttctcatttctgtatcattcaaactgcttatttgctcattggaacctgggcactcttcttccgcaag

SEQ ID NO: 8780 - DNA, 444 bp, Cricetulus griseus
cttcaagaaatcacaatgtcgaccgacacagacctttctctttcttcatatgatgaaggtcaggggtctaagtttattcgaaaaactaaggagacaccatttgtccccattggcatggcagggtttgcggcaatcgttgcgtacgggctatacaaactgaaaaacaggggaaatacgaagatgtccattcacctgatccatatgcgtgtggccgcccagggctttgtggtcggagccctgactcttggtatgggctattccatgtataaggaattctgggccaagcctaagccttagaagacgagctgctgccttggtctgggaagtgcttgcttagttagacgtctcatattgaggttacatgtttgtgtctacaataaataacatggatttagacaacaacacagtattgaatattggcttactttcttgccagctggattt

SEQ ID NO: 8781 - DNA, 443 bp, Cricetulus griseus
gtagtggccacacagtggcaagttgtaggcatgactgtggagcatgtggagtgccaggtggcgttggagaagctcctggtactctaggagatgcagggggtgaggaggctgatgagaagcccccacagttcgtgtgtcgtgagtgtaaagaaactttctccacactgacgttgctacgcaggcacgagcgctcacacccagagctccggccctttccctgcacccagtgtggtaagagcttctcagacagggctgggcttcgtaaacatagccgcacccacagctcagtacgcccctactcctgtccccagtgtcctaaagctttcctgagtgctagtgacctgcgcaaacatgaacgcacccaccctgtgccccttgggacccccatacccctagagcctcttgtggctttactaggaatgccagaagaagggtcagcttga

SEQ ID NO: 8782 - DNA, 443 bp, Cricetulus griseus
ggaccacccagccttctggggctcccccatggctaatggaaagcctggtgatcccaagtcagctcttcacaggggtcctccagggtcaaggggaccaatgattccaccactgctgagcctcccacctcctctccggggcagaggccctattcgaggaggccttggtcctagatgtagagtggccaggcatcccctgtggctccctcatagctacttgaagttcttcttcacctccagtcagtgacatgtgcaccccattcatcatttcccccgtttggggtccagagttgtgattgtcactggagtgcggtgcgtgccgtcttctgatccaggctccagagaccatcgggaccccgtcttgctcccttccactgcctcctggatcttcccctctggcaaatgactgctgaacaggaaacctttggtgctgtttgttgtagcat

SEQ ID NO: 8783 - DNA, 443 bp, Cricetulus griseus
cctccgtggcaaaaaaaaaaaaaaaaaaaatgcatcagtcctggggagtaccacatcatagctgtcccagggccttcctctcccactgccattgtaatcagtgagaaatggttccccgcagtaaagaacttgccagacatttacatttgcacctctgcctcagctactaggaaccctagagagagctcatcgaaaccttcaaactctgatccttggagaaaggtgattttaacccagaatcatgagtgatctgtaaactcaaaaagtgttcttggggaaacaggcaaaaacagaggggctgggtcaactgttaccaagttaaagtgaaagacagtaaactgcttttcctcagtgtttgtcttctctttgctgttttgctatttccttgtggcttagaatgtaaaaccaattgttaagattttgttctgaataaatatttatct

SEQ ID NO: 8784 - DNA, 443 bp, Cricetulus griseus
  modified_base (347)..(347): a, c, t, g, unknown or other
ctctgtgagtcagagtagacaggacttctgcttgcaggaatgctcccgtcaccaggcctgccttgtcaccacgctgcagatccagcctgggggtgtgaggtgcgtgttctatcctgacacacataactgcatgcacagcctacggagccagacctgctggcttctgctccgcgaggaagctgagtacatctaccgcaagtctggaacccccggctcctgtctggtgtagcatctgcaccttctgtacgcattgaccccttcggccagcttcagggtggtcccggtcatcaaggtggcacttcttggaagcaggtctaccagttcctcggcgttccatatgctgcccnccttggacgacaatcgcttcggaccaccagagctcttgaactggacaatagagtatattgtcacacaacaaaaaaaaaaaaaaaaaaaaaaaaaaa

SEQ ID NO: 8785 - DNA, 442 bp, Cricetulus griseus
  modified_base (408)..(408): a, c, t, g, unknown or other
ggaggctgcggaccctggcggggccggacccaaccgcagctccgaggagcgggagggtccggaaccggacggactgcacttcgaccgcgagagggcgcgccgcctgctggaagctgtgtccggtgcgcagccggcggggcgggaggaagtggagtacatgatccagaagaaccagtgtctcttcaccagcacccagtgcaaagtctgctgcgccatgctgatctctgagtcccagaagctggcacactaccagagcaaaaaacatgccaacaaagtgaagagatacctagcaatccatggaatggagacgactaaaaggggaggtgaagagactcgactcagatcagaagagcagcagaagcaaagacaagaaccactgctgccccatctgtaacatgaccttttccncccctgttgtggctcagtcgcactacctggggaa

SEQ ID NO: 8786 - DNA, 442 bp, Cricetulus griseus
gtgaccagagatgaccaccttaacaaggatcgatgtatacgcctagccctggttcacgacatggcagagtgcatcgttggggacatagcaccagcagataacatccccaaagaagaaaagcacaggcgagaagaggaggctatgaagcagataacccagctgctgccagaggaccttgggaaggagctatatgaactctgggaagagtatgagacccagtctagtgcagaagccagattcgtgaagcagctggaccagtgtgaaatgattcttcaggcctcggaatatgaagacatggagaataaacccgggagacttcaagacttctatgattccacagcaggaaaattcagtcaccctgagatactccagcttgtttgtgaactggaggcagagagaaatgccagcatagccacagcttccgcagagccgggctcctgag

SEQ ID NO: 8787 - DNA, 442 bp, Cricetulus griseus
aacaaatgtgaaaaaacctttagccagaactcccatctaactcagcatcagcaaattcatacagaagagaagccctataagtgcattgaatgtgacaaatcctttacccagagcatgcacctaactgaacatcagagtattcacactggagaaaaaccttacaattgtcatgaatgcccaaagactttcagccagagcacatacctcattcagcatcagaagattcattcaggagagaagctttttggatgtgatgactgtggaaaagccttcaggtatcgctctgctctaaccaaacaccagagactgcaccctggtatagctgctctaggaacatcataaatgtagctgctgttttcactttggtttttatagtgatgaatcagagcggggtaaggaacccctattaaaacaacatgtaggcaaagaaaaaaaaaaaaaa

SEQ ID NO: 8788 - DNA, 442 bp, Cricetulus griseus
caaggaggaagggaaccagcgctaccgggaagggaagtaccgagatgctgtgagtcggtaccatcgagctcttctccagctgcgaggtctggatccaagtctgccttccccgatacccaatctaggacctgagggcccagctctcacgccagagcaagaaaacatactgcacaccacccagacagactgctacaacaacctagcggcctgtctcctccagatggagccagtgaactacgaacgagtaagggaatacagtcagaaagtcctagaacgacaacctgaataatgccaaggccttgtatcgggcaggagtagccttcttccatctgcaggactatgaccaggctcggcaccacctgctagatgcaatcaataggcagcctaaagatgccaatgtccggcggtatcttcagttgacacagtcagaactcagcagcta

SEQ ID NO: 8789 - DNA, 441 bp, Cricetulus griseus
tgcagctggtgaactggccacagtagaatgttacaacccaagaatgaacgaatggagctatgttgcgaaaatgagtgaaccccactatggtcatgccggaacagtgtatgggggtctaatgtatatttcaggaggaattactcatgacactttccaaaatgagctcatgtgttttgacccagatacagacaaatggacacagaaggctcctatgactacagtccgaggcctgcactgcatgtgtacagttggagacaagctgtatgtgattggtggcaaccacttcagaggaacaagtgattatgatgatgttctcagctgcgaatattattcaccaactcttgaccagtggactccaattgctgctatgctgagaggtcagagtgatgttggagttgctgtttttgaaaacaaatctatgttgttggtggatattcttgg

SEQ ID NO: 8790 - DNA, 441 bp, Cricetulus griseus
gaggtgtcactgtcagagggtgaagccatcgaggtcattcataagctcctggacggctggtgggtggtcaggaaaggggatgccaccggctacttcccatccatgtatctgcagaaggctggggaggaggtgacccaggcccagaggctgattagaggccgcggggcaccgccgcgcaggtcaaccatccgaaacgtgcagagtatccaccagcgttctcggaagcgcctcagtcaggacgcctaccgccgcaacagtgtccgattcctgcagcagcgccgtcgccccagggagacccgggccgcagagcgcccagggctcaaagaacaatctgccaagtcagcatgccaaggcgcagcctgccggtacccccgacgacccagtgcagacctcatcctgcatcgctgcacagagacgcaccaagcggaagctggcgtccgc

SEQ ID NO: 8791 - DNA, 441 bp, Cricetulus griseus
atgccattcgttgagttggaaacgaacttgccagcaagccgcgtgcccgctgggctagagaaacggctgtgtgcggccaccgcctccatcctggacaagcccgaagaccgcgtgagcgttacgttacgacctggcatgaccatattgatgaacggatccacagagccctgtgtccagcttatgatctcttccatcggtgttgtgggcaccgcagagcagaaccgcaaccacagctcccgcttcttcgagttcctcaccaaggagctggccctggaccaggaccggataatcatccgcttcatccccttggagccctggcagattggaaagaaaggaactgtcatgacgtttctgtgattgaaaccaagaatccagggcatttgctgagcctacccagggcccttctagagaggcctcctggcagagttgtggtccggtaga

SEQ ID NO: 8792 - DNA, 441 bp, Cricetulus griseus
cagatgattgcgttccacgatccagagctgagtaatcatctcaacgagattggcttcattcctgatctctacgccatcccttggtttcttaccatgttcactcatgtatttccactgcacaaaattttccacctctgggatacattattacttggaaattcctctttcccattctgcattggagtagccatccttcagcagctgcgggaccggcttttggctaatggcttcaatgaatgcatccttctcttctctgacttaccagaaattgacattgaacgctgtgtacgagagtcagtcaatctgttttgttggactcctaaaagtgctacatacagacagcatgctcaacctccaaaaccgacttctgaaagcagtgcagtccgaagctcagcaccctacttctctgttgattgtacagatcctccaaagacagacctg

SEQ ID NO: 8793 - DNA, 441 bp, Cricetulus griseus
ggcgacatgtccctggcccagcctcctccgtggcctccccacgtccctctgccgtggcctggccctaggtccccagctctgggccacacaatccatggccaccctcaaccagatgcaccgcttaggccgcccgaaggaacctcctaagcgtttgggtcctaccgaaggccggccacagctgaagggtgtggtgttacgcacattcaccagaaagccaaagaagcccaactctgccaaccgcaagtgctgccgagtgcgcctcagtacaggcaaagaggctgtttgcttcatccccggggagggccacaccctccaggagcaccacgtggtcctcgtggaaggcggtcgcacccaagacctgcctggagttaaactcaaggttttgaggggcaagtatgactgtggccacgtgcaaaagaagaagtgaccataatccatagt

SEQ ID NO: 8794 - DNA, 441 bp, Cricetulus griseus
agggcctacctgcagggcccgtgcattagagtggctgctgaagtacctggattggggaagtcgactctgctgctctcagccccccaaaggcatatgtgacccatcatcctggatataaaggtgatgtcaccctgaggtgctgggccatgggcttctaaccctagctgacatcaccctgacctggcagagggaggaggaagaacagactcaggacatggagctggtggagaccagaccttctggggatggaaccttccagaagtgggcatctctggtggtgccttctggggaggagcagaaatacacatgccatgtgtaccatgaggggctgcctgagcccctcaccctgagatgggagcctcctcctcagtccactgtcttcatcatggcagtcattgctgctctggttctcattggagctgtgatcattggagctgtggt

SEQ ID NO: 8795 - DNA, 441 bp, Cricetulus griseus
cctttcgctgcccgacgccgacgaggtcgcacgcgtgaggcctgtccgcagcagccaacatgcgctacgtcgcctcttacttgcttgccgcccttgggggcaactcctctcctagcgctaaagacattaagaagattctagacagcgtgggcattgaggcggacgatgaccggctcaacaaggttatcagtgagctgaatggaaaaaacattgaggatgtcatcgcccagggtgttggcaagcttgctagtgtgcctgctggtggtgctgtggctgtttctgctgcccctggctctgcagctcctgctgctagttctgcccctgctgcagcagaggagaagaaagacgagaagaaggaagagtccgaagagtcagatgatgacatgggatttggcttgtttgattaaaaccctgctcccctgcaaataaagcctttttatg

SEQ ID NO: 8796 - DNA, 441 bp, Cricetulus griseus
tgccacactgcccctgctgaaccacacccaggacttcctgagaaaataccaaaatcacccaaagactccctgggtgggggcccaacgaggcccttgaaggctggcactggactgatggggtccccttgccaccccagctgttcccagaggacagtgaggatcacccagacttcagctgtgggagtctggaagaaggcaggctcgtggctcgggactgcagctctcccaaaccctgggtctgtgccaggagggtcaagtgacttagtgtcctgtggtagccctgtctggagctgcgttcattgcttttgctttggtggaaccaaagtacctgaagaaatgacttccaggaggcagaaattaccaggctcgtgctttcagaaggctgcacctggcagagctgctcattccatagcagcagttgttttgagacagggtctctct

SEQ ID NO: 8797 - DNA, 440 bp, Cricetulus griseus
ggagaaactggccagtgtgtatgaggctccaggctttttcctgaacttggagcccatccctggggccgtggacgctgtgcgagagatgaacgacatgcaagacaccgaggtcttcatctgcaccagcccactgcggaagtatgaccactgtgtgggcgagaagtaccgctgggtggagcagaacctggggcctcagtttgtggagcggattatcctgactagggacaagacagtggtcgtgggagacctgctcattgatgacaaagacaccattcaaggcctggaggagaccccaagctgggagcacatcttgttcacctgctgccacaatcagcacctggctctgcccccccaccaggagacggctgctttcctggagtgacaactggagggggattatagacagcaagcgagccagcctgtgaacgaccctgaggtgg

SEQ ID NO: 8798 - DNA, 440 bp, Cricetulus griseus
ttgtcccgtgtgagccatggagagtgacttttacctacgttactacgtgggtcacaaaggcaagttcggtcatgagttcctggagtttgaattccgacctgacggaaaacttcgatatgccaacaacagcaattacaaaaatgatgtcatgatcagaaaagaggcatatgtacataaaagtgtgatggaagaattaaagagaattattgatgacagtgaaatcaccaaagaagatgatgctctgtggccccctcctgaccgagtaggccggcaggagcttgaaatcgtcattggtgatgaacactatttcttttacaacataaaaaatcggttcccttattgatgtcaaccagtctaaggatccagaaggcttacgagtattttattatcttgtccaggacttgaaatgtttagtctttagtcttattggattacacttc

SEQ ID NO: 8799 - DNA, 440 bp, Cricetulus griseus
gtgactcagaaaactttgaagccgctgtttacactctggccaagactccctcattgctgatgtttactacattgttgggggtacctcgccccgtgaggggtagtcatcacccggaacagaggtggcccagcggacatttggcctcttgacccgttgaatggagcgtggttccgagttgagacaaattatgatcattggaagcctgtacccaagagggatgaccgaagaacaccagccatcaaagccctaaatgccacagggcaagcacacattagcctggaggccctcttccaggttttatctgtgtttcctgtttataacaactgcacaatctataccacagtgatgagtgctgccgagcctgacaagtacatgactagggtgcggaacccaagctgaaggtgatgattgtccaagagttgcatttaaaagactaagac

SEQ ID NO: 8800 - DNA, 440 bp, Cricetulus griseus
cgcatccttcgggttaggacggtgactgagaagatctactacctgaggctccacgagaaacatccacaggctgtgtttcagttctggatccgcctggtgaaaattttgcagaaaggtctgtctatcaccaccaaagacccgaggatccagttcacacactgcctggtgcccaagatacccaactcctccactgaaataacacctgaaagcagcctgccgtcatcctcccaggccagcgagaccataatgctgctggcagctgagcgggccagtgacagtctcttaggattctcaaaaagacaccagctcacaggagacggacacactgatactaccccagtaaaagacaaatccaacagctgcaagacacccccactgatggcatcgtcaactaatatgcccatgagagctactttgacccacagcctctgggaacaaga

SEQ ID NO: 8801 - DNA, 440 bp, Cricetulus griseus
aggcgggcatctccagatcagccaccatctgcctggctacctgatgatgaagaagcgcgtgcggctggaggaggcttttcgagttcgtcaagcagcgcaggagcatcatctcgcccaacttcagcttcatggggcagctgctgcagttcgagtctcaggtgctcaccacatcctgcgccgccgaggctgctagcccttccgggcccctgcggggagagggggaaaaggccacccccacccccacctcgcagttcgtcttcagcttcccggtgtctgtgggtgtgcactcggcccccagtagcctgccgtacttgcacagcccccatcaccacgtcccccagctgttagggctggtctctgaacaccaagtccagggtcggcccccagccagggatgtgcaagccacatgcgagcagcaagtagggactgaccagtggggg

SEQ ID NO: 8802 - DNA, 440 bp, Cricetulus griseus
gtggaggaggagccggccgagctgcccgagggcacctccttgactgtggacaacaagcgcttcttcttcgatgtgggttccaacaagtacggcgtgtttatgcgagtcagtgaggtgaagcccacctaccgcaactccatcaccgtgccctacaaggtgtgggccaagttcggacacaccttctgcaagtactcggaggagatgaagaagatacaagagaagcagagggagaagcgggccgcttgtgagcagctccaccagcagcagcagcagcagcaggaggagaccaccgctgcgaccctgctactgcagggtgaggaagaaggagaagaagattgatcaaactgaatgaaacacacgcacacacacatacacacacacacacacacacacacacacacacacacagccacacacagagaaaatatactgtaaagaga

SEQ ID NO: 8803 - DNA, 439 bp, Cricetulus griseus
  modified_base (114)..(114): a, c, t, g, unknown or other
ctggacatcaaggtagaaacagtgaatcggagccactcacaatgcattctgaccgggaggatgataccgccagcatatccacggcaactcgggtcatgaaggccatctactcancctttaaggatgatgtggatctgaagcaggacttgcgctgtgacaccattgacacccgggaagagtatgagatgaaggatcccaccaacggttattacaatgtgcgtgcccacgaagatcgcccgtcctccagggcggtgctatatgctgactaccgtgcccctggcccgacacgttttgatggccgtccgtcatcccgcctctcccactccagcggctatgcccagctcaatacatacagccgggcccctgcctctgactatggcacagagcccccaccctctggcccttctgctcctggtggcaccgatacaaccagccagct

SEQ ID NO: 8804 - DNA, 439 bp, Cricetulus griseus
  modified_base (386)..(386): a, c, t, g, unknown or other
aacatcaccatcacagtcaccgacctgggcacacccaggctcacaacccagcacaccataacagtgcaggtgtccgatgtcaacgacaacgcccccgccttcacacaaacctcctacaccctgtttgtccaggagaacaacagccccgccctgcacataggcaccatcagcgccacagactcagactcaggctccaatgcccacatcacctactcgctgctgcccacccacgacccgcagctggccctctcctcgctcatctccatcaatgccgacaatgggcagctgttcgcgctcagggcgctggactatgagaccctgcagaatttcgagttccgcgtgggcgccacagaccaaggttcgcctgcgctcagcagccaggcgcnggtgcgcgtgctcgtgctggacgccaatgacaatgctccttcgtgctctaccc

SEQ ID NO: 8805 - DNA, 439 bp, Cricetulus griseus
cgcgcacgacgatggcggcggcggccgagcaggggctctgctccgtgtacttctgcgggagcatccgcggcgggcgcgaggaccaggcactgtatgcgaagatcgtgtcgcggctgcggcgctatgggaaggtgctcaccgagcacgtggctgctgcagagctggacccgcgcggagaagaggctgctgggggcgacaagctcatccatgagcaagacctggcctggctgcggcaggctgatgtggtcgtggccgaggtgacacagccatccttgggtgttggctatgaactgggctgggcagtagctcttggtaaacaaattctgtgcctattccgaccacagtctggtcgagtgctttccgccatgatccgaggagcagcaaatggctcgaggatccaggtgtgggactacacagccatgtgggtgctgggaactaa

SEQ ID NO: 8806 - DNA, 439 bp, Cricetulus griseus
caaacgggtaaaagctaacattgactttttacagtcaacattcaacttaaacaaggaggacctgctgcttctgatatgtggcccaggagctagaatcctagatctttccaatgactgtaccaaaagaaactacactaatatccgggagaaactgctctctcttggatgcactgatgaggaggtacagaagtttgtcctaagctatctgaacgtgatcttcttgtcagagaaaaagtttaatggtaaaatagactgcctcttagaagaaaaagtcagtatttcacaaataattgaaagtcctagagttttggatgtaagcataaatactttaaaaactcgaatgaaagagttggtatatgctgggtatgacttgagttcatcaaacattgctctcctgtcctggagtcagaaaagatatgaagccaaattgaaaagatta

SEQ ID NO: 8807 - DNA, 439 bp, Cricetulus griseus
  modified_base (400)..(400): a, c, t, g, unknown or other
tgaccaagctggacattcttagatgtcctgagcgagattaaagttggcatctcctacaagctcaacgggaagaggattccttatttccctgctaaccaggagatactgcagaaggtggaggtagagtacgaaacactgcctggatggaaagcagataccactggtgccaggaagtgggaagaccttcccccgcaggcccagagctatgtgcggtttgtggagaatcacttgggtgtggcagtcaaatgggttggcgttgggaagtccagagagtccatgatccagctgttttagacgccaagcagaagccagcaggccacaccatggcccgctgccacgagtgagcagctgcagccaagatcctcagtggtacagccaatgtctttccacaagacaatcngaaaccatttcccatactttattttctatgtacgtcttt

SEQ ID NO: 8808 - DNA, 439 bp, Cricetulus griseus
ctgaagaacagaagcaagaaattaaagatgcctttgagctctttgataccgacaaagaccacgcaatagattatcatgaattaaaggtggcaatgagagccttgggttttgatgtgaaaaaagctgatgtactgaagattcttaaagattatgacagagaagccacaggcaaaatcacctttgaagattttaatgaagttgtgacagactggatattggaaagagacccacatgaagagatactgaaagcatttaaactatttgatgatgatgattcgggtaaaataagcttgaggaatttgcgacgcgttgccagagaattgggtgaaaatatgagtgatgaagaacttcgagctatgatcgaagaatttgataaagatggcgatggagaaataaatcaagaggaattcattgctattatgactggcgacatataaag

SEQ ID NO: 8809 - DNA, 439 bp, Cricetulus griseus
  modified_base (20)..(20): a, c, t, g, unknown or other
caaagacaacaatcctatcntaaagctcatgctgaacgtcaggccatcaacacaacagtccaaggatcagctgctgatatagtaaaaacagccacagttaacattcagaagcaattagagaccttccattcagccttcaaatcccatggtcatcgggaaagcatgctccagcatggccaaacaggattgttgccaaagaaaaaactgaaagggatgttttgtccaatgagaggaggcttctttatccttcaacttcatgatgagcttttatatgaagtggcagaagaggatgttgttcaggtagctcagattgtcaagaaggaaatggaatgtgctgtaaaactttctgtgaagctaaaagtgaaagtgagaatgggtgccagctggggacagctggaggactttgatgtgtgatggtgcaggtaaccaggtccccaga

SEQ ID NO: 8810 - DNA, 439 bp, Cricetulus griseus
cgaggacagactccaactctgacttcttcagcgactctcggtctgtctctcctgctctgagccaggcatctggcagccatgtcactcctcctgttagtggtctctgcccttcacatcctcatcctcatcttgctttttgtggccactttggacaagtcctggtggactctccccgagaaggagtccctaaacctgtggtatgactgcacatggaacaccactgccaaaacgtgggcctgcagtaacgtcagtgagaatggctggctgaaggcagtgcaggtgctcatggtgctctctctcatcctctgctgcctgtccttcatcctcttcatgttccagctctacaccatgcggagaggagggctcttctacgccaccggcctctgccagctttgcaccagtgcagccgtgtctcgtgggcactgatctatgccatcca

SEQ ID NO: 8811 - DNA, 439 bp, Cricetulus griseus
ggaacactcctgccaagatgtctatcggtgtgccgattaaagtcttgcacgaggctgagggccacatcgtaacttgtgagaccaacactggcgaggtgtatcgagggaagctcattgaagcagaggacaacatgaactgccagatgtccaacatcacagtcacctacagagatggcagagtggcacagctggaacaggtatacatacgtggcagcaagatccgatttctgattttgcctgacatgctgaaaaacgcacccatgttaaagagtatgaaaaataagaatcaaggctccggggctggccgaggaaaagctgctatcctgaaggcccaagtggctgccagaggaagaggacgtggaatggggcgtggaaacatcttccaaaagcgaagataaataaatttctgtggaagagaactgtagtccttttttctctt

SEQ ID NO: 8812 - DNA, 439 bp, Cricetulus griseus
ctgaagtggcatagccaagaaggagctgggatctcaaaaccgctccagggtctgaggtacgacaacgtcacaaacgagttggtggtgaacgaaagtgggctctactatgtgattttgcaactgaagctcaggcctgtgttaaaaaacacagaccgcaaggtgcggggtcaggtctctcttgttctgcaactgaatcccccgatagagcgccctgacaacttggccctgactgtggacctattcccttgctccatggagaccaacttagtggaaggctcctggagtcatctgatacccctgaaggctgacgaccgcctcagtgtgaatctgcgagcctatctgtatggagctcaggaggcatacaaagactgggagctctcccagactgctatcaccagctttgtgctcttccttgtgccaactgacaccccacaggaat

SEQ ID NO: 8813 - DNA, 438 bp, Cricetulus griseus
  modified_base (10)..(10): a, c, t, g, unknown or other
tcctgatgcnttaaaggctttctctcccaccagcgggacccaggagtctccgtggctgtcttgagccactgcaccagtggtactctggaaggttcttcagagaaccaaccaagacaacagaagctgtgatcatggccaaataaatcaaggaaaaaaacctacagaaatcaacactgcctttattttttttcctccataaaactgctttctccgtctttttggtgcttcctaattcagtagcttgaccttagagcaagtacagaacctgtgaagccactaacacactgtgttactgtgcaagtcactcgcctcactgagccacctccatttcttcatcttcgaaatgggcatatagtaatacataaccctacctacctcacaggactgttgtgaggatcaaacaaagtaatgtatgtgaaaataaacgataaatgacaa

SEQ ID NO: 8814 - DNA, 438 bp, Cricetulus griseus
gcgtggtgtgtgtgctcgggttgtgcctgaacgtcgtggctctctacatcttcctgtgccgcctcaagacctggaatgcctccaccacgtacatgtttcacctggcggtttctgactctctctacgcagcctccctgccactgctggtttattactatgcccggggtgaccactggccattcagcaccgtgctctgcaaactggtgcgattccttttctacaccaacctctactgcagcatcctcttcctcacctgcatcagcgtgcacaggtgcctgggagtcttgcgtcctctgcactccctgcgctggggccgggcccgctatgcgcgccgagtggctgccgtggtgtgggtcctggtgctggcctgccaggcacctgtgctctactcgtcaccaccagtgtgcggggacccgcgactccacctgtcatgacacc

SEQ ID NO: 8815 - DNA, 438 bp, Cricetulus griseus
gagagacctggccatcagagataacagccttcgcaacccagaaggacctgcagtacattctcagtctttcaagttggtgccttccgtggggatacagaacagtaagttgcttaacaaaacctgctgcctgaatggagggacctgcatcctggggtccttctgtgcctgtccaccttctttctatggacgcaactgtgaacgtgacgtacgaaaagagcactgtgggtctgtcctccacggtaactggctgcccaagaagtgttccctgtgcaggtgttggcatggccagctccactgttttcctcagacctttttacctggctgtgatggtcatgtgatggaccaggatctgccagcatccaggactccaggacaagctccgtctgtgccgaccactttcatgctagctggcatttgcctttttctagaaatgaaagt

SEQ ID NO: 8816 - DNA, 437 bp, Cricetulus griseus
  modified_base (427)..(427): a, c, t, g, unknown or other
tgttggtggcgatgttcccgtcagttggcaggaaccaggccgcgggcctgcgaagccagcgcctcggaacgcaggaaatgggtggaagtatttaaagcgtgtgatgaagacaacaaaggccacttgagccgagaggactttaaggttgctattgtaatgctgtttggatacaaaccctccaagatagaagcagattctgtgatgtcttcagtaaatcccaacagttctggtatatcacttgaggggtttttggatgtcgtaaagaggaagaaggatgcacagctctatcggaatgagataaggcacctcttcacagctttcgacgtgcactatcgtggatttttaactctagaagatttcaaaagggcattcagtcgagtggctcccaagctgccagagagaacggtgttggaggtattcagggaancagatcaaga

SEQ ID NO: 8817 - DNA, 437 bp, Cricetulus griseus
cgacacagtccatcccctcgaccactcctttggctcttcgctgtctacctgcctacgcttcttctagcccagtggtcaattatggcatgccccctggatcaggccatcggccttcttgtggccatcttccacaagtactctggtaaagagggtgacaagcacaccttgagcaagaaggagctgaaggagctgatccagaaggagctcaccattggctctaaactgcaggatgctgagattgcaaggctgatggacgacctggaccgcaacaaggaccaggaagtaaacttccaggagtatgtcgccttcctgggggccttggctttgatctacaatgaagctctcaaataaaatgggaaggtagagatgccctttggaggcctatctcagccaaatccagtggtgggtaattgtacaataaatactttgttttgtta

SEQ ID NO: 8818 - DNA, 437 bp, Cricetulus griseus
aggacttttctgctctgcccgggatggtcttcattgacaaggaggatctccacgacatgttggcctctctggggaagaaccccacggatgagtacctggagggcatgatgagcgaggcaccggggcccatcaacttcaccatgttcctcactatgtttggggaaaagctgaatggcacagaccctgaggacgtaatccgcaatgcctttgcctgctttgacgaggaggcctcagggttcattcatgaggaccacctgcgggagctgctcaccaccatgggtgaccgattcacagacgaggaggtggatgagatgtaccgggaggcgcccattgacaagaagggcaacttcaactacgtggagttcacccgcatcctcaaacacggcgccaaggacaaagacgactaggctgttcttggctgcccaatgcccagaccc

SEQ ID NO: 8819 - DNA, 437 bp, Cricetulus griseus
tctagagatcggcaggatccagatgcgggattatggctgtgtccacccgcttatccattggcacctccgatgccttgtacgagtcggagaagaacacaggggagcccgagaacacctatattctgaggcccgttttccagcaaaggtttagaccctctgtggttaaagactgcatccatgccgtgctcaaggaagaactggcaagtgctgaatattctccagatgaaatgcctcatctcacaaaacatctgtcagaaaccattaaggataaactaaaagaattgggatatgaccggtataaaatggtggtgcaagtagtgattggagaacagaggggtgaaggagtattcatggctgctcgatgcttctgggatgcagacactgacaactacactcatgatgtcttcatttggtagtttggtacaaaaaaaaaaaaa

SEQ ID NO: 8820 - DNA, 437 bp, Cricetulus griseus
tcctgaagctaattggcggccggcggcagcgatccccgggctggcgacgtagaagaagacgcgtctcagctcatctttcctaaagagtttgaaacagccgagactctcctaaactccgaagttcacatgcttctggagcatcgaaaacagcagaatgagagtgcagaggatgagcaggaactttcagaggttttcatgaaaaccctaaactatacagcccgcttcagtcgtttcaaaaacagagagaccattgccagtgttcgtagcttgcttctccagaaaaagctacataagtttgagttggcctgtttagccaatctttgtccagaaactgctgaggagtccaaagctctgattccaagcctggaagggcgttttgaagatgaggaactgcagcagattcttgacgatatccagaccaagcgcagcttccagta

SEQ ID NO: 8821 - DNA, 437 bp, Cricetulus griseus
ctgcggagcaccagctgtctcctgcccgagatgttgcaccaggtctgggcagctgtactctacctctatggccttctcttcaactccatgaaccagtgccctgagcacggtcaactaacgacgctggaggtgggcgagaaagagtccccagagccccacctgggcctgtggtacttcatcgcaggagcggccccccaccaaggaagagctggctactttcgactccgtggacaacattgtcttcaacatggctaccggctcggccccaaggcagctccagcttggtgctgccatccgcacgaaaaatgggatctgcgtgccccggaaatggacataccacttgactgaaggaaaggaagcacagacctcaggactgaaggccgccctgacatgaaaacagacctcttctccagttcatgcccaggaggatcatgctg

SEQ ID NO: 8822 - DNA, 437 bp, Cricetulus griseus
tcctgactcaccgctgttcgctcccgccgaggaacaagtcggtcaggaagccgcgccgcagccatggcttttaaggacaccggaaagacgcccgtggaacccgaggtggcgattcaccgaattcgaatcactctcaccagccgcaacgtgaagtcgctggagaaggtgtgcgccgacttgatcagaggcgccaaggaaaagaatctgaaagtgaagggaccggtgcgcatgcccaccaagactctgagaatcactacaagaaaaacaccttgtggtgaaggttccaagacatgggatcgtttccaaatgaggatccacaagcgactgattgatttgcacagtccttccgagattgttaagcagatcacttccatcagcattgagccaggcgtggaggttgaagtcactattgcagatgcctgagtcatatttaataa

SEQ ID NO: 8823 - DNA, 436 bp, Cricetulus griseus
gatcggcgcctgagctctgctggagatgcaggcagccctggaagttactgctcggtactgcagccgggagttggaacagtatggccaatgtgtggcggccaagcctgagtcctggcatcgggattgtcaccaccttaagatgagcattgctcgctgcacatcctcccaccccatcatccgccagatccgccaggcctgcgctgagccttttgaagcctttgaggagtgccttcgcttgaatgaggcagcagttggcaactgtgccgaacacatgcgccgtttcctgcagtgtgctgagcaggtgcagccgccaagttcacccacaactggagaggcacagccacagccacttcctgcctcctgaagaccctcttggacttcgagaaagtagacatgattgactagcccacttaatgtcctcatctggaagagtgac

SEQ ID NO: 8824 - DNA, 436 bp, Cricetulus griseus
gtgactcagccctcgcctctccccatggctactgctgtgcatctaaaccggtgcagccctttgtgcgaaggagcagtgcccgcagcttacaacatctgtgccgcctagtcatcaaccgcctggtagccgatgtggactgcctaccgctgccccggcgcatggctgactacctccgacagtaccccttccaactctgactgggacgggcattctgccctgcctcacataattacaccctggaggggactcaggacgaagctggacttgggttcctgttattccttcttcagtcatcctggtgcctgcctacatacagctggatcaaaaagtgccagcgagaacaaagcaggtggacgaggggttgtcacacaactcccaggtcaatgcctccaggtcccatatggctctttgtggtgagccatgtgtcagagcagag

SEQ ID NO: 8825 - DNA, 436 bp, Cricetulus griseus
ccgggagcggcgggcgagtcgcgtgtccttgcgcggggagtgaagcgagggatcgactatggtggctcgagtatggtcgctaatgaggttccttatcaagggaagtgtggctgggggagcagtctaccttgtttatgaccaggagctgctgggacccagtgacaagagcgaggctgctctaagaaaggccgaggaggtggtgccaccagcaatgtaccagttcagccagtatgtatgccagcagacgggtttggagatgccacagctcccagcccctccaaagattaactttccgaacttccgtgaatcctggaactcaggcatcatctctgtcatggcagctttgtccgtggcccccagcaaggcccgagagtactccaaggagggctggggattatgtgaaagagcacagcaagtaatggatgccacctgcccc

SEQ ID NO: 8826 - DNA, 436 bp, Cricetulus griseus
aagagcctgggagcactcgcgagatctgaacacccgacccaaaacgctcttaggaagtttaaggcccgaggaggtcccagggccaatggccggagctgggccgaccatgctgctacgagaggagaacggctgttgcagtcggcgtcagagcagctccagcgccggggactctgacggggaacaggaggactcgccggctgcgcgtgcccggcagcagctagaggcgttgctcaacaagaccatgcgcatccgtatgacagatggaaggacactagtcggctgcttcctgtgcaccgatcgcgactgtaatgtcatcctgggctctgcgcaggaattcctcaagccgtctgattcattttctgcggagaaccccgtgtgctgggtctggccatggtaccaggacatcacatcgtttctattgaagtccaaagggaga

SEQ ID NO: 8827 - DNA, 436 bp, Cricetulus griseus
cgccaggctggaggtggcacaccagggaaaagcctcagacagatttcttgtgcaagaagtgatggaggaagagtggaactctttgaagtctgtagagaattgtccagaagccttgtttcagttgggactgccagaggacctagctgtgctgcaggacattgaacaggagctgtgtgatgaaagaaaagtccatcataagcgagtatgagaagagcttgcagtttgatgaaaattgtctcaacagcatgttggctgagtgggaagcaaaccccctcatctgtcctgtgtgtataaagtacaacctgagaataatgaacagtgtggtcatgtgtccatgtggcctgcacatcccattcactctccagagttgacagagcagaagcttcgtgcctattggaggataatgtaaatgagcacagtgcacactcgtccccac

SEQ ID NO: 8828 - DNA, 436 bp, Cricetulus griseus
gtctctatggtggcgccagtgtcgtcggcggcggcgcctgacgagtcctgaggcttccttccggcttggcggcggatccgagtgtggtgcttctgggtgcagcgcgatgtcggagaagaagcagccggtcgatctgggtctccttgaagaggacgacgagttcgaggagtttcccgcggaagactgggccggcttagatgaagatgaagatgcacatgtctgggaggataattgggatgatgacaatgtagaagatgacttctccaatcagctacgtgctgagctagagaagcatggctacaagatggaaacttcatagcatccagaaatgttgcaagaccttaaacatggactgtgtactaaattctaggacagaaacgagcatgggctactttgaagaataaatttattcattatctagctcggtatttatttt

SEQ ID NO: 8829 - DNA, 435 bp, Cricetulus griseus
gttgatgagactgcaatgccaaaagggaacaaggggtcctgggataggaagcgcctctctttccacttttggctttgtgggagctgcacttgaaatcattctgattttctatctcatggtgtcttctgttgttggtttctatagcctcagattttttggaaactttacacccaagaaggatgacacaactatgacaaagatcattgggaattgtgtgtcaatcttagtcttgagctctgctctgcctgtgatgtcaagaacactgggaatcactagatttgatctacttggagactttggaagattttaattggctgggaaatttctatattgtattatcctacaatttactctttgccattgtgacaacattgtgtttggtcagaaaattcacgtcagctgtacgagaagaacaaaaaccttaaaaaaaaaaaa

SEQ ID NO: 8830 - DNA, 435 bp, Cricetulus griseus
ccttctgccacgtgctgacgctgccccgaaccattctgctctttcttgggttgccacttgccatggtcctggtgtctggctcctggaggctagcgactgtgtgcatcttctctctgctcctagtgctgcggctccttgccaggcagccctggaaggagtatgtggccaagtgtttgcgcacagacatggctgacatcaccaagtcctacctgtgtgtgtgtggctcaggtttctgggtggctgagtctgggattcaggtggtgggcatagtgggtggtctgccatcaaggatcccccgtagggaggaagcagctggagctcttacacctgtctgtgtcctcacaacatcgaggacagggaatagcgaaagcactgatcagaactgtcctccagtttgctcgggaccagggctacagtgatgttgtccttgagacc

SEQ ID NO: 8831 - DNA, 434 bp, Cricetulus griseus
tttgacatttgagaatgacacatttccggctggagttcctcttggtcccagtgatttggcctttcctttctggtgaactatagtttacacaccaacggaggtactctggaccttctccatctatttggagtcagtggccatcctgccacagctcttcatgatcagcaagactggcgaggctgagaccatcaccactcactacttgttcttcctggggctgtatcgggcactctatctagccaactggatctggcggtaccagacagagaatttctatgaatcagatctcagtggtgtctggagtagtacaaaccatctattattgtgacttcttctacttgtatgtgaccaaagtccttaaaggaaagaagttaagcctaccaatgccagtctaaagagaaggaccacactataaggcagccagagcaaaccat

SEQ ID NO: 8832 - DNA, 434 bp, Cricetulus griseus
aaggccatgcaccatgcaggtggcactgccctctcagccagcactgccaacccaatcctgtcacactcgagactgaatgacatagtgacagagccactccaggttgctaggtgactaaagggcttgtctcgaggagttgccttgccccatcgagatgcctctttcttggcccctccagggtgtgggcaggagatgtccagctgaatgccactctcttcccttcagctctgctgcagatctatgcctgcctccacctcccataattgcaggccctggaaacaaaccctcaacacaaaatctattctttgtcctggatgaaaaggcctctgagaagggccagcatcaatgtggcctgcctgcttccaggagtactctccaccacctggccacatctgcctcccccaaactcgccttgcaagggaaagctggcaaag

SEQ ID NO: 8833 - DNA, 434 bp, Cricetulus griseus
gacttggacaggaccatgccctccatggggacccgtgaaggatcccagctttggccagcacttccgggtgatggtgctctgcacagtgctcctacaaatgctcctgcaaacgctgtctatggctgtgacttatgtgtacttcactaaccagatgaagcagctgcagaacaaacacttcagaagtggactggattgcctgttagaggaggatgaggattcctggagccccactgaagaggagatccgacactgtctgcagactaagaagcagctgtatcagctcattgaagaggtgactttgagaactgttgaggaaaccatgactacagttcaagaaaagcagctaagtattcctttcccgcccagaagtaggaaacctcagagagtggcagcccacattaccggaatcagtcggagaagcagctcagccttaa

SEQ ID NO: 8834 - DNA, 434 bp, Cricetulus griseus
  modified_base (96)..(96): a, c, t, g, unknown or other
atccaaggcccctttttcgtaattctgcccaggtggctggaggagaaccctgagtttgcagttgctccagactggactgacatagtcaagcagtcnggttttgttcctgagtcaatgtttgaccgacttctcactggacctgtggttcggggagaaggagccagtcggagaggacggaggcccaagagtgagatcgcccgagcagccgctgcagcggctgctgtcgcctctacttcagggatcaaccctctgttggtgaacagcctgtttgctgggatggacctgacaagccttcagaatctccagaacctccagtccctccagctggcagggctcatgggcttccctccaggactggccacagctgccaccaccggaggcgacgcaaagaacccggccgtgctgcccctgatgctgccgggaatggcgggcct

SEQ ID NO: 8835 - DNA, 433 bp, Cricetulus griseus
ctcggtacccatacgtcagctgtcaacgggttgttgctggctcccgcgccgcggtcaggagaatgcctctgcctcaccgactgtgtgcccctcttccacagcaacctggccctatccgtctggaggtcgcgctcaatcaggtggatgtgtggggcgcacaggccggtctggtggtagctgggtactaccacgccaatgctgccttagacgaccagagccctgggcttctggccttgaaaatcgctgggcgaattgcagaattcttccctgatgcagtgcttattatgctggataataagaaattggtgactcggcctcgtgtacctccagtcattgtcctggagaacccaaggtcttcgatgggtgcctaaggacaagaacttagtaatgtggagagactgggaagagtcgagagagagtggtgggagcactg

SEQ ID NO: 8836 - DNA, 433 bp, Cricetulus griseus
  modified_base (97)..(97): a, c, t, g, unknown or other
  modified_base (169)..(169): a, c, t, g, unknown or other
agctgcagtgccaggtgctggctcgggcttcggtcctgactcgggtgtttggaccttgcctcccgccttgatgtcttgctggctcttgccagtgctncccgggactatggctatacaagaccccgttactctccccgaatccatggagtacggatcaagaatggcaggnacccctgatggaactgtgtgcacgaaccttcgtgcccaactccacagactgtggcagcaaccaagggagggtcaaagtcatcactggacccaactcctcagggaaaagcatatacctcaaacaggtaggcttgatcacattcatggccttggtgggcagctttgtgccagcagaggaggctgaaattggggtaatcgatgccatcttcaccagaattcacagctgtgaatccatctccctcggactctccaccttcatgattga

SEQ ID NO: 8837 - DNA, 432 bp, Cricetulus griseus
tcctcagcaacacattctgagggaggagccatccacacccccagaaatagcctggtgttcttcagaaagcagaggtgtagactaattgatgggtgagagaaccacatacgatctgggcctgcatgctgaatgggaagagtgaccattccctttgcatcctgttgtgtgtgctcctgtttggatttacagcagtaatgtcaagtgtaaatctctcaaagccattggaaaaacattcactttagttctctatgaagaggagtaaaacaacactcctgattgtagtgtttaaactttaagagtttatcaaaaatgctggcatgtaggacctaaatttatctatgtcggtcatttcctaaaaatgacattggtttttgaatttggtatgcatttattaaaataaagttttaaaaattacaaaaaaaaaaaaaaaaa

SEQ ID NO: 8838 - DNA, 432 bp, Cricetulus griseus
tttttccggccggtttgctgccccgctgaggtggacaggcgctagtgtaatggcggggagtcttccttgggtggcaagcaggagcctgtggggcctgacgcccttggcgagcttcagaagcttctcgcagggtgtcccgctgctgacccgcgtcaggctcacccttccgccccccagagtggtggatcgctgggacgagaagagggctctgtttggagtatatgacaatatcggaatcctggggaatttcgaaaagcacccaaaagaactgatcaagggcccagtgtggcttcgaggctggagaggaaatgaattacagcgttgtatccgaaagaggagaatggttggaagcagaatgtttgccgatgacctgcacaaccttaacaaacggatcaactatctctacaaacactttaaccggcatgggaagta

SEQ ID NO: 8839 - DNA, 432 bp, Cricetulus griseus
  modified_base (428)..(428): a, c, t, g, unknown or other
ggactggtatccggttgattgcggtttgcagggtccgccatggagtcagagcagatgctggagggacagacgcaggttgcagaaaaccctcactccgagtacggcctcacagacaacgttgagcggatagtcgaaaatgagaagattaatgcagaaaaatcatcaaaacagaaggtggatctgcagtctttgccaacccgtgcctacctggatcagactgttgtgcctatcttactacagggtcttgctgtgcttgcaaaggaaagacctccaaaatcccattgagtttctagcatcttatcttttaaaaaataaggcacagtttgaagatagaaattgattacttgggaagaaagacacacttggttgctactgtagatttacacgattacgaggcagctctcattgccgtgacttccctccccctntgga

SEQ ID NO: 8840 - DNA, 431 bp, Cricetulus griseus
gtggcatctccatcagcagccagtgaaaggaatctgcactgtatttctcagagtattacaccaagccctactgccggtgtggcccgttccttgtgggcctcttcctgagcatgttcatgcattcagatcaccaaacaaacattctcaagacgacggtgcaggccgtgctgggctggactttctctctgctgacactgtttgtagttgttgccctggcatacatagtggacgacacctctccaacctctgccatggctgctgccatctatcaggccctccatcgaaccctgtgggcagctgctgtgggctgggtcatctttgcctgtcaggaaggctatggaggtctggtgaagcatgtgctttcttgtggcatctggcgtctcccggctactatcagttacgcttgctaccttgtgcatcccattgtgatc

SEQ ID NO: 8841 - DNA, 431 bp, Cricetulus griseus
  modified_base (324)..(324): a, c, t, g, unknown or other
ccctgctcctcatgatcctgcacccggatgtgcagagccacgtccaacaggagattgatgatgtcatagggcaggtgcggcatccagagatggcagaccaggcccgcatgccctacaccatgttattcatgaggtgcagcgctttggggatattgccccattgggttttccacacatgacatcccgtgacattgaagtacaaggattcctcatccccaaggggacgatcctcatccccaacctgtcctcagtgctgaaggatgagactgtctgggagaaacccctcctcttccatcctgaacacttccttgatgcccagggccncttttgtgaagcatgaggccttcatgccattccaggccgcagagcatgccgtgggggacgcccccgtggccccgcatggagctcttcctcttcttcacctgcctcct

SEQ ID NO: 8842 - DNA, 431 bp, Cricetulus griseus
tcagcatgagagtaattataacacacaagctacaaactacaaccgtaaagaccaaagcaccgactacgggatatttcagatcaatagccgatactggtgtaatgatggcaaaaccccgagagcagtgaatgcctgtgggataccctgcagtgtgttgctccaggatgacatcactcaagccatggaatgtgcaaagagggttgtcagggatccacaaggcattagagcatgggtggcatggagagaccactgtcaaaaccgagatctcacccagtatattcagggctgtggagtctaaccgctgtgctcttctgcttcagctcattctgtctctgtattgctatagaagtagaaatggaaaaggtcacatgttcttggactcccctttagacaagcacgatttaaacagaaacaggagcaaaatggagact

SEQ ID NO: 8843 - DNA, 431 bp, Cricetulus griseus
cctttgcacaacgtagtagtcttcaaacacataaaagaacacatactggagagaaaccctacgaatgtaatcaatgtggtaaagcctttgcacaactcagtaatctccaaagacataaaagaacacatactggagagaaaccctatgaatgtaatcaatgtggtaaagccttttcacaacacagtcatcttaaaacacataaaagaacacatactggagagaaaccctatgaatgtaatcaatgtggtaaagcctttgcaaaacacaagagtctccgaaaacataaaagaacacataatggagagaaaccctatgaatgtaatcaatgtgataaagcctttgcgcagcacagtcatcttcaaagacatgaaagaaacatactggagagaaaccctaaaatgaatgtaatcaatgtagagaaagactttgca

SEQ ID NO: 8844 - DNA, 431 bp, Cricetulus griseus
tgctcaggaccgcctggacgagatggaccagcagaagtccaagcttcgggacatgctgagtgacgtgcgtcagaaatgccaggatgagacccagatgatctcatcattgaaaacccagattcagtctcaagagtcagacttgaagtcccaggaagacgacctcaaccgggccaagtcagagtggaacagagcatccaagccgggcgtgcccagctggagaccatcctcaagtccctgaagtccacgcaggatgagatcaaccaggcaagaagcaagctatcgcagctgcaggagaaccgcctagaagctcaccggagcctagaacagtatgaaccaggtgtctgatggggtctctggcaccagcctgcctgacctggccaccctgagtgaaggcgtcttgctggcagagaggggcggctttggagccatgg

SEQ ID NO: 8845 - DNA, 430 bp, Cricetulus griseus
gagagagagagagagaggtgtgggacacacacacacacacatgtggtggataataattaacttttttttttttactaaactattgacagtaccagcacttaatattatccagggaagcctcttgggcaaaacctcattacgaattcaacctcaaccgcatgaagttcaggggaaatggtgcactcagcaacatcagtgaccttccttttcttgcagagaactctgcctttccaaaaacggcacatcaaacaaaacaagatggaaaaagggcatgagtcattcatctcctgtagatttaaagataccacaagtccgaggaatggatctttcttgggagtctcgcactggtgatcagtacagctatagctcttttggtaatggggttcacaaacggagagcgcgcttagtaaaaaattagggctattcttcc

SEQ ID NO: 8846 - DNA, 430 bp, Cricetulus griseus
ccttggttcgcccatcagggttctaagaaaatggcagacaagccggacatgggggaaatcgccagcttcgataaggccaagctgaagaagaccgagacgcaggagaagaacaccctgccgaccaaagagaccattgaacaggaaaagaggagtgaaatttcctaaaagcctagactggaggatttctccaccctaccccaccccgtcatctccgagaccccctcgtgatgtggaggaagagccacctgcaagatggacgcgagccacaagctgcactgtgaacccgggcattccgcgccgatgccaccggcccgtgggtctctgaagggggacccccccactaatcggactgccaaattttaccggtttgccctgggatattatagaaaattatttgtatgattgatgaaaataaaacacacctcgtggc

SEQ ID NO: 8847 - DNA, 430 bp, Cricetulus griseus
aaccattaaagaaaaaaaaaaaaaaaaaaaaaaaagtatttttctgtttccaaatcacttctgcctgcctgccttgttgaagctgtgccagaggcgggaaatctcctcttggctggctcgatggttccccagggacccagccaaacccgtggtggcacagaaaacacccatcaagttggagcttattgccgggaaaacctacagatggtgtgtatgtggccgaagcaagaagcaacccttctgtgatggctcccacttcttccagcgcactggcctttccccactcaagttcaaggcccaagagacccgcacagtggccctatgtacctgcaaggccaccaagcgtcctccttattgtgatggtacccacaagagtgagcaagtacagaaagcagaagtgggatccccatctgaggggtactctggctcc

SEQ ID NO: 8848 - DNA, 429 bp, Cricetulus griseus
gctgcaggctctgagccgcttggaaaacattcttgacttcgtctgcaccacctgcctgggagaagatggtcaacgttttgaaaggagtgcttatagaatgcgatcctgccatgaagcagttcttgctgtacttggatgagtccaatgccttggggaagaagttcatcattcaagatattgatgacacacatgtgtttgtcattgcggagctggtcaatgtcctccaggagcgagtaggggaactgatggaccagaatgccttttctcttacccagaagtgaaaatactagctgctgagcacgtgggaattacaaaccacagacatgagagaggccccattcagagtctcctacagtgtgtagacatttcatgagcattttgtgggaaggctgcagggccattgattcagacaaaagccccaactgattt

SEQ ID NO: 8849 - DNA, 429 bp, Cricetulus griseus
gcaagttcttccgccacgagtgctacctcaagcgccatcggctgctgcatggcacggagcggcccttcccgtgccacatctgcggcaagggcttcatcacgctcagcaatctctccaggcacctgaagctgcacaggggcatggactgaggagccagggccccccccccaggccccccagagccagagcagaagaggagggcccttgcctggacaaatggtgccacccagaacccacacaggaccacggcgaagcatctttcagcaaaggggtccaaggacataattgttggggactgaaatctacagagactctctcgaccttgagacccctggaatgcaggcaggctcagatcaactggggacctagggatgaaaaaaaacgggtctccactaacacctctcagcagataacatgtgggcaccccca

SEQ ID NO: 8850 - DNA, 429 bp, Cricetulus griseus
gtcaggggtattttaggagtgaagaattttgacctggggattatctgtgttgacaacaagagtattcagcacattaataggatctacaggaagaaaaacgtcccgaccgatgtgctttctttcccatttcatgagaatctgaaagcaggggactttccccggccagcctcgtcagatgattataatttgggagaaaatgaagattactatgacatcctgacggtgacagccacccatggactctgtcaccttctgggcttcacccacaactccgaggctgagtggcaaaagatgtacaaccaggagaagctggtgctggaggaattgaatcgatacaccggagccaggctgcagcccctgagcaggggcctctactgaagctttgatgccctgagatagagtacaatggtggacagagccctgtccctc

SEQ ID NO: 8851 - DNA, 429 bp, Cricetulus griseus
caagatggcggcggcgttgaccttccgccggctgctggctctcccctagggctgcgcgggcctttcggggtgcgagtgtcgtcgagcggggagaagatcacgcacaccggccaggtttatgatgagaaagactacaggaagattcggtttgtagatcgtcagaaagaggtgaatgaaaactttgccattgatttgatagcagagcagcccgtgaatgaggtggaccatcgggtcattgcctgcgatggaggtggtggtgccttgggccaccccgaaggtgtacataaatttggacaaagagaacgaaaaacggggacgtgtggctactgtagcctgcaattcaagcagcaccgtcactagtgtgggctgtgtcctggtcctctgacgaaaaaaaaaaaaaaaaaaaaaaaagaaaaaaaaaaaaaaaaa

SEQ ID NO: 8852 - DNA, 429 bp, Cricetulus griseus
aaggatgtggcaaagatggcacctgccaatacccctgtgcaggttacagctcccccagaaaggaagatatcggtgtggatggggggatctattcttgcatccttgtctgccttccaagacatgtggatcactgctgcagaatttgaagaagttggacccaatatagtacaccaaagatgcttctgaatagcagacaatatgatgagtaaaacatgttttgagtgtatgcaacagcaaaacactttggatattctgattctggggaacaaaaacatttctgttattgggatagccattttctttttttttaatgtttttggtaattctggaaatagaacctagagtctcacacatgcaaagcactctaccagtaacttatatccccatccctctttttaacttttttaagataggctctcctgctaaatt

SEQ ID NO: 8853 - DNA, 429 bp, Cricetulus griseus
cgccgccgccgccgcgcacgccatgggagccgtgactgacgacgaagtcatacggaagcgtcttctgattgatggagatggtgccggggagtgaccggagaattaatctccttgtgaaaagacttcatcaaatggtgcaactctggatcccaagaggagggatatagccagtaccagcgtatgctgagcaccctgtcccagtgtgagttttcaatgggcaagactttgctggtgtatgatatgaatctcagagaaatggagaattatgaaaaaatatacaaagaaatagaatgtagtattgccggagcacatgaaaaaattgctgaatgtaaaaagcaaattcttcaagcaaaacgaatacgaaaaaatcgacaagaatatgacgctttggcgaaagttattcagcatcatccagacagacatgagaca

SEQ ID NO: 8854 - DNA, 429 bp, Cricetulus griseus
ctgctagacactagccgctgacatgcagtacaccgggagcaaatatgtcgggtcatacgtaaacaggaggatggagggcagtgcggagtacattctccctactgacacaagatatgttgggaacatgaaggacggcatgttccatggagaaggaaccctgttcttccccagtgggagccgattcgatgccacctgggagaaaggattggcagtgaagggcaagtatacctttgctgatgggctacaatatgaggacaaacactggcactactgtcgacaagttatgaccggaggttctacaccgagatctgctacggcctgaaaccctcaggcatctctcggctcaccaatatggacccaccgagaaaaatcccccagctgctatgactgtggagatggcttctataaccccaccaccagggtcatcaa

SEQ ID NO: 8855 - DNA, 428 bp, Cricetulus griseus
  modified_base (417)..(417): a, c, t, g, unknown or other
cacgtcccgggcagcgtccgggaaggagtcagtccggcactgcttggggtgacaatggccttcacgctgtattccctgctgcaggcggccctgctgtgcgtgaacgccatcgccgtgctgcacgaggagcgcttcctcaagaacattggctggggaacagaccagggaattggcggattcggagaggagccaggaattaaatctcaactaatgaaccttattcgatctgtaagaactgtgatgagagtgccgttgataatagtaaactcagttactattgtattgcttttgttatttggctgaacatcattgggaaatcagagactcagaagaaaggccccagaacttactattgccatcgtgactggaatattcatgttttagcaggctcatcttgcagttgacaaaaaaaaaaanaaaaaaaaagt

SEQ ID NO: 8856 - DNA, 428 bp, Cricetulus griseus
  modified_base (411)..(411): a, c, t, g, unknown or other
ttgcctcctgctccgcctgcctgggtggccgccatgggccggaagcggttcatcactgactcctaccctgttgtgaagaagagggaggggccccctgggcacagcaagagggagctggcaccagagctaggagaagacacccagtccctcagccaggaggaagcacagctggagctgctgaggcagtttgacctggcctggcagtatgggccttgcacaggtatcacacggatgcagcgctggcatcgggcagagcagatgggcttgaagccccctctagaggtgcaccaggtgctgaagacacactctgaacgacccccgcttccaattcagcctctggcatctctacccactctgaggttccacccgggtttttcttcccttgacacctcctagccaccaagaacttcnggacagaatccatggcc

SEQ ID NO: 8857 - DNA, 428 bp, Cricetulus griseus
ccaggaggcttcagcggtgagcggcgcagctatggccaagattaaggctcgggacctgcgcggcaagaagaaggaggagctgctaaaacaactggacgatctgaaggtggagctgtcccagcttcgcgtcgccaaggtgactggcggagccgcttccaaactctccaagatacgagtcgtccgaaaatccattgcccgtgtcctcaccgtaattaaccagactcaaaaagaaaacctcaggaaattctacaagggtaagaagtacaagcctctagacctgcgacccaagaagactagagctatgcgccgccggctcaccaaacacgaagagaagctgaagaccaagaagcagcagaggaaggagaggctgtacccgcttcgcaagtatgcggttaaggcctgatgagaaggcaataaagtgcaagact

SEQ ID NO: 8858 - DNA, 427 bp, Cricetulus griseus
aggaggtcgtggcagtgcctccatggtccagaagtgcaaactgtgtgcacgggaaaactccattgaaattttgagcagcaccatcaagtcttacaatgctgaagacaatgagaagttcaagacaatcgtagagtttgagtgtcggggccttgaaccagttgacttccagccccaggctgggtttgctgcggaaggtgtggagtcagggacagtcttcagtgatattaatctgcaagaaaaggactggacagagtatgacgagaaggctcaggagtctgtgggtatctttgaggtgacccatcaatttgtaaagtgctgaactgtcttcctgaaaacttgcccataagaaccgagcggagaaatggtgccctgagcagcaaaacccatggaagcttctcatctctgatctcctagcacctgtaccaag

SEQ ID NO: 8859 - DNA, 427 bp, Cricetulus griseus
cgcctgagaacaccatgcaggccatgcagcaaaagctggaggacttcagagactaccggcgcctgcacaagccgcctaaggtgacaggagaagtgccagctggagatcaacttcaacacgccaatgaagtggagaaccagatcttgactcgggatgccaaaggcatcagccaggagcagatgaatgagttccgggcctccttcaaccactttgaccggaagaagacgggcatgatggacacagatgatttccgcgcctgccttatcctccatgggttacaacatgggagaggcagaatttgcccgcatcatgagcattgtagaccccaacaaaaaaaaaaaaaaaaaaaaaaaaaaaaaaaaaaaaaaaaaaaaaaaaaaaaaaaaaaaaaaaaaaaaaaaaaaaaaaaaaaaaaaaaaaaaaaaaa

SEQ ID NO: 8860 - DNA, 427 bp, Cricetulus griseus
gcactttgaatctggatcaacactgaaaaaattcctggaggagtttctttgtgtcaatgagccctgaagaaagagccaagtacttggagaacaatgacgctattcgagttacgcatgagaccagtgcacatgaaggtcagactgaggcaccaagtatagatgaaaaagtagatcttcattttattgcgttagttcatgtagatgggcatctctatgaattagatggacaagaagttcatggaacgtgaccccgatgagttaagatttaatgcaattgctctctcggcagcatagcttcttgacagaaacaaccaaatactgtattattcgcaaagaaaaaaaaaataaactgctgccataactaactcaaaacttttagtatattttcgtttaactttgactcaacaacaaccaaccaacaaaaaag

SEQ ID NO: 8861 - DNA, 427 bp, Cricetulus griseus
agtttggatactgtcctcaggagaacatgctatggcccatcctgacagtgaaagaacacctgcaagtgtatgcctctgtaaaagggctgaggaagaaggatgctaccattgccatttcaagattagtgaatgcttttaaactacacgaccagctgaatgtcctagtgcagaaactagctgcaggagccactaggaagctgtgttttgtgctgagcatcctgggagattcatctatcctaattctggatgaaccatctacaggcttagatgtgtctgagcagcagcaagtgtggcaggcaatccaggcagctgttaaagacaatgacaggggtgtcctcttgactacccatgacttggctgaggctgaggctctgtgtgaccgagttgctatcatggtgtctggaaggctgagatgcattggttcaat

SEQ ID NO: 8862 - DNA, 426 bp, Cricetulus griseus
cgagcgggttctcatttaacatggaagatgagttctttggagaaaaaagcttccaacattattgtgcagaattcatcaaacattcacaacagataggcgatggttgggaatggaaaaacagccaaggctgctgcagggaccatgggacaccattacccagcaggaacatcctatacttgggcaaccattctttgttctacatccctgcaagacaaatgaattcatgactgctgtgctgaaaaatccacagaaaatcaatagaaatgtcaactacatcacatcatggctgagcatcatggggccagttgttggtctgaatcttcctctgagctatgctaaagcaacatcgcaggatgagtgatttgttgacaagaaagatctcctgctggtccggaagctgcagcatgatggacgccaagagtgtac

SEQ ID NO: 8863 - DNA, 426 bp, Cricetulus griseus
  modified_base (199)..(199): a, c, t, g, unknown or other
caagagtcaaatttcaccagacagcgtttattggatcactgtaatagtaaccatctatttcaaatagttcctgtgaatcttcagctagatgaggaaacacagtatcaaactgctgtagaagagtcttttcaagtaaacatctgatgtgtatacacatctctgcgtccttgtacctacaagtgccatctttaaggggaanacaacatgaagtcaccatttcagtaatttgctgtgcatattaataaaaatataattcagtctactgtattaggttttaattgaaaataagatgggccaccctaactccattctctagacagttactttagcagcatggaaaaggttgtgttttcttgtgtggtgaaaagggattcctgttgtctttttcttctttgtattacatattcttaatgtttccttaagttg

SEQ ID NO: 8864 - DNA, 425 bp, Cricetulus griseus
caaagccagtgccagcaaatgacacagaccaatgctaacttggagagcagattgcaccgagaggaagagctgcggagagaggaagtacagagcctgcaggccgagctctctgccactcaggcagaggtcaaagccctgggcacccaggtggaggaactgaaagacgagttagtgacacagaggcgcaagcttgccgccaacgtcaaggacctcagcaagcagcttcagcaagcacggagaaaattagatcagactgagaatggaaactacgacagagaagtcagcagcatggggagccgctctagctcatcaggctcacttaatgctcgcagcagtgttgaagatcgatctccagagaataccagctcctcagtggctgtggacaacttcccagaagtggacaaggccatgctgattgacaggat

SEQ ID NO: 8865 - DNA, 425 bp, Cricetulus griseus
cacagctggaactcaacaaccctcagatgaaacacagtgatgttcctgggccagaaagcagcatggagagttcacctagggctcaagacagcacctcacctggggagcatgccctaaagtcacagcctaagagcaatgagtatggaccctcaaaagggaaacacaggccttcttccctcaacttggactctgccatgcccatagctgacctcttccgacttgagaatggggcttcatttagttcacctggaatagagatctctgaactaggagacacgaaggtcacctggatgacctcctctcaccgtaaacagcccctgggaactcccaggacacccaggacctggacattgttgcccctgctctgacaggccgccggaactcagctcccgtgagtgtgtctgctgtgagaacactccttcatg

SEQ ID NO: 8866 - DNA, 425 bp, Cricetulus griseus
gggatcctatatgacacatacccactatctgaggagacctggcacactcaccagttcaacttcattaagaagcatgctttccgtttgctgaagcctggtggcatcctcacctactgcaacctcacatcctggggggagctcctgaagtccaagttcacagacatcaccaccatgtttgaggagacacaggtgcctgcgctgcaagaggcgggcttccggagaagaaaacatccgcactgaggtgatggcactggtgccgcccgcggactgccgttactacgccttccctcagatgatcacacccctggtccaccaagcactgagcaactggcccaggggttggaatgaacgagcctatgtcctcttcagtgccttgatggctggagtgtaggctcagcctctcagctatctctgcagtgtgacat

SEQ ID NO: 8867 - DNA, 425 bp, Cricetulus griseus
tgcaccacaaagtgtacgatttgtccaagttctggaagagcatcctggtggggaagaagtgctaagagagcaagccggggtgatgctactgagaactttgaggatgttgggcactctactgatgctcgggaactgtccaaaacctacatcatcggggaactccatccggatgacagatcaaagatagccaagcctgcggaaactctgatcactactgttgactctaattccagttggtggaccaactgggtgatcccagccatctcagccctggctgtagccctgatgtatcgcctctacatggcagaagactaacctgcctcttgaaaccaaggatgggaaagactgccccagagaagggagaaaagaagccagtgttaatcacttccactgacagaaaccttcccccaagaaaataattgtaa

SEQ ID NO: 8868 - DNA, 424 bp, Cricetulus griseus
gctatccacatccaggaactgacaatctgttgatgttaaatggtcgatcttccctgtttccaatagatgatagcttgttggacgatggtcacagtgatcaagttggtgttttaaattcgcccacatgttattcagctcatcaaaatggagaacgaatagaacgcttctctcgaaaagtttttgttggtgggcttcctccagatattgatgaagatgagatcactgccagtttcagaagatttggacctttggtagtagattggcctcataaagcagaaagcaaatcctattttccaccaaaaggctatgcattcctcctctttcaagaagagagctcggttcaagcactcattgatgcgtgcattgaagaagatggaaaactctacttgtgtgtttccagcctactatcaaggacaaacctgtt

SEQ ID NO: 8869 - DNA, 424 bp, Cricetulus griseus
  modified_base (368)..(368): a, c, t, g, unknown or other
actgtggagatcatgttgtcataataaacacaagacatattgcattttctggaaacaagtgggaacaaaaagtgtactcctcacatactggctacccaggtgggtttcgacaagtaacagctgcacaactgcatctgaaggacccagtggcgattgtgaaattagctacttatggcatgctgcccaaaaacctgcacagaagaacaatgatgcaaaggttgcatctttttccagatgaggatattccagaagatattcttaagaatttagtggaagagcttcctcagccacggaaagtgcctaaacggctggacgagtacacccaagaagagatagaggctttcccaagagtgtgggctccaccggtnatgattatcggctgtaggaaagcggagatggtgaaacaacagcaagagactggatg

SEQ ID NO: 8870 - DNA, 423 bp, Cricetulus griseus
  modified_base (409)..(409): a, c, t, g, unknown or other
ttccaccttgccccactcacacacaccagagttccagacctgctctgacaggaagtaaagctggaggcaccagggtgaggagctgtgcgcctctccaaagaggtggtggcagggtgactatgaactcccagaatggggagttactgccactaggaaaactgagtggaaacacgtgaaaaccaaaaaataaaaaaaaaagtaaaagtgaaaaaaacagaataacaaatttatacaccctttcctgccaggttacaagaaaaaaaaagtataataagcaatgaggagaactggaggtggagagagtgggctccattgtcctttaaaagcctcctgaaagtgctcagtctaaggaccaactaatagatggtagattttaatgaggtctattttgtttgtttttactacggtntctgatgtatatgt

SEQ ID NO: 8871 - DNA, 423 bp, Cricetulus griseus
  modified_base (109)..(109): a, c, t, g, unknown or other
gatctttacccccactgacgcagggacagacagcggcttcaccttctcctccccctaaccttttgcaaccatccccacaggacacggtgactgagataacatcctcatntccccagtcaccccagcaaactcattctactacccacgcctgaagtctttgcctcccattgccaaagtgaccttcgtgcggctacggcagagtcccagggcctttgctccaccttccctggacctggccagcaggggcaatgaaattgttgacagcctttcagttccagagacaccgctggactgcgaggtttccctgtggtcatcctggggattgtgtggaggaccatgtggaaagttgggagccaagagcagaactcgttatgtccgtgttcagcctgctaacaatgggacccctgccctgagcttgaagaa

SEQ ID NO: 8872 - DNA, 423 bp, Cricetulus griseus
ggctgccccgggagacgctggctgtcagagaggagctggatgccctcaagttcctgtgcaaagacctgtgggcagccaccttccaaaagcacatggatggactccgcaccaaccaccaggggacctatgtgctgcaggacaacaattttccactcctcatcaccatgggctcggggtctcagtatctagaggaagctcccaagttcctggccttcacctgcggccttctgtgcggcgccctccacacgctgggcttccagagcctggtcaccgcctctgtgacttccctgcctgcctgtaagttccaggtggtgatccagaagtcctgaggatcccaggcttgccctgccccacctcagccccaggagactggcaccttggccctgcctgagtggtcacctctgcgggggccttgaagcagga

SEQ ID NO: 8873 - DNA, 423 bp, Cricetulus griseus
gaagacagagcagaaacttcagctccagcactgaacttgactacaagcagcattgggagcatcaatatgtctgtggatattgatggcaccacctatacaggtgtgctgtttgcccagaaaccagtggtccacctcattgcaggctctgctccccagagcattggcagcaccagcagcagcagcagctctcactgctcaccaagtcctacctcatcccggggcacccccagtgcagagccctccaccagcctggtccctctgatgagcagcacccagcacccactccctgcctctcctgcagagagtaagggagatcgatgcacaaatttacctcatctcatggagctcacatcaaacaccatctggccagatgttgaatttggaagtgtccatctggccaggctccattcaggttctgctgta

SEQ ID NO: 8874 - DNA, 423 bp, Cricetulus griseus
ctctttcggatcttggatctaagatgaccaagaaaagacggaacaacgggcgagccaaaaagggccgcggccatgtgcagccgatccgctgcacgaactgcgcccggtgcgtgcccaaggacaaggccatcaagaagttcgtcattcggaacatcgtagaggccgctgctgtcagggacatatccgaagccagcgtcttcgacgcctacgttcttcccaagctctatgtcaagctgcattactgtgtgagctgtgctattcatagcaaagtagtcaggaatcgatctcgggaagcccggaaggaccgaacacccccgccacgatttagacctgctggtgctgcaccacgaccgccgccaaagcccatgtaaagagatggttttatgaacacagaaagaaaaaatcaccttggaaaataaaatg

SEQ ID NO: 8875 - DNA, 422 bp, Cricetulus griseus
ccggcctgcagcaagtgcgggagcagacgtgggcccggcagctgttgcaggagatgaagactctcttcttgaataccgagtacctgatgccctttctcctcaaccaaagtggctcccttgtctactacttgaccttggcatcaacagatttgactttagctgtgcccatctgtaactctctggctatcgtcttcacactgattgttgggaaggtccttggagaagatgttggtggaaaacaagcagtggcgggcatggtgctcaccgtcataggaatcacactttgcatcacaagctcagtgaccaagacccaagaccaaccgtcgtcctcttgagtgggccatccccgaccttccgttctgctgtgctcagcagacctggcactgaggtgcaggcagagtgacgcaccagcttgcctctct

SEQ ID NO: 8876 - DNA, 422 bp, Cricetulus griseus
  modified_base (22)..(22): a, c, t, g, unknown or other
gaccccaccgccagaggacccngccagaccgccacagacaggccagcggccaatattgccccagaggcccctgcagccgcaccttgctgcttggcctggcagctcagggttgcccctcctgcctggctctagtggggtcatcatggagactggagaagctgggcctccaggcagggatggggatggggcatgtccggaagggggcctgccccagggagtggacggacagatggggcaggggcccatccctagctcggaaggctatgcgggtgcgccaggctaccctaagtcacctcctgtagccaccccaggggtgccactgcctgccctggtgtccttttcagccggccttacccagaagccttttcctaacgatggaggcgtcgtcctccttaataaggtgctggtaacgatggggatgt

SEQ ID NO: 8877 - DNA, 422 bp, Cricetulus griseus
atttttcttcaatggacagcacatgaaagtggattatgggtctccagatcacactaaatttgtaggaagcttcaaaaaccaaaacaagacttcatggatttgattgaagtcatctaccggggagcaatgaggggaaaacttattgtccagagtcctattgatcccaagaatattcccaaatatgacctcctctatcaagacatttagcacactcacggctgttggagatgaaaagagtcatgggtggaaatgggacctgaacccagagggcctgtggtctggagtccctcagagacatgttcactgccccagcaaagaggtttgatgtgcctgtaatcaatggcccctgcgcagaagccccagtactcccaagaatccaggtgcctgagtgtccattccctgagagcctcagagcagtcagg

SEQ ID NO: 8878 - DNA, 422 bp, Cricetulus griseus
ataaaacagtagcaagtgcctcctctgcccttaacaatgccatggagttaggaagaattaaaagaaaagtccatagttttctagctgtggaaaacttgtatgtgtgcagaatttgtaaacgatgttaaatacgcaatttatctttttgccgactcgttttggacttcttaaatatgtttttaaattgagatatttgtagattcctgaagattaccccttatcacagtgcatgttctatagaaagcgtggccaactctttctgccttacattggattcaggacctcagggcagttagttgaccttcgtttgctcaacaaagctatacctgacctggcaattggtgatgagtgaaatttgagactgcctacaacaggaatagttgtttggcatccacagcatcagtgaagggcagcaatttcat

SEQ ID NO: 8879 - DNA, 421 bp, Cricetulus griseus
gtctgctcatcctggcttgcattgccacagctgtggcctctactgttttgggtgtgagcagcttaatctggcaaaccagtgctttctaccaagtcaagatcaggtccacatgtgactccttacaatctagcacggacagtgagtatgggagagtgcgattcactgatgactcagtctggaagacggagaggtgcaaagaatacctgggcatgatgatgaacctgttcctagcaatctgcatcatgctcaccgttgtctgtatcctgaagattgttgtgtctttggcttccctgggactgagtctccaaagtatgtgtggccggagctcccagaccctggatgaggaagagacagggaaaagcttcttggggggattcaacacctccctccccaacccaaggagattcctggtatcctatga

SEQ ID NO: 8880 - DNA, 421 bp, Cricetulus griseus
tgctaatataataccttcaccatctcatatctatggctcagtgccatggagaccaccagtgccagttgctgggaaggccttccatcatcctgcatatcctggaaccatgcccttggctggaggaatgccaagcggggtgcacaatcagttcatacctctgcaggttacgaaaaaagggttgcaagcagaaagaattttgagactaaggaggcccagagttctcaagccacaccacttcagactagcaagccagggtcttctgaagtcaaaataattccacaagaaagcccatcagtctctttgaagtcctccccagctgctcaacctgtgtcttctcaagtcgacactgcctccaaggccatggagtgacccaccagaaaccagcatcgagctcctcgagaaaggaaatcaaggaaactgg

SEQ ID NO: 8881 - DNA, 421 bp, Cricetulus griseus
agcttaggagatgccgccgaaggggaaagtggttctggaaaaggggggaaaggaggtgcagcctctgggagtgacagtgctgacaagaaggctcagggccctaaaggtggtggcaaatgcagtaaaggtcagacacattctgtgtgaaaaaacatggcaaaatcatggaagccatggaaaagttaaaatctggaatgagattcagtgaagtggccacacaatatagtgaagataaagccaggcaagggggtgacctgggttggatgaccagagggtccatggtaggaccctttcaagaagcacgcaattgccttgcctataagtgggatggataagcctgtgtttacggacccaccagttaagacaaaatttggatatcatattattatggttgaagggagaaaataaaatcacatgaaag

SEQ ID NO: 8882 - DNA, 421 bp, Cricetulus griseus
cttgaagacaaaagacgcattgctaacttaattaaggaactggccagagtaagtgaagaaaaggaagtgacagaggaacggctgaaaactgagcaggaatcctttgagaagaagattcgtcagttggaagaacagaatgaactgatcatcaaagaaagggaaaggctcttcagctacagtatagagaatgtcaagaacttctgagtctctaccagaagtacctatcagagcagcaagaaaagctcactgtgtcactgtcagaacttggtgctgctagagtgcaggagcagcagcataaccaacaggaaaagtactcaccagtcttcgatgatggacctggatggttcctacttgagtgtagccaaaccacaaacctactgtcagaccaaggcaatgcctaagtcagcaacccaggtctcag

SEQ ID NO: 8883 - DNA, 421 bp, Cricetulus griseus
tctgtgctctgcataaagtcagactggagatttttcctttctcttttatcagccatcccttctctatgtattatgaatatcagaacaaagtaaacaaaaacaccttagttttgttttgcctgtactccatgatgcatttttaagaggcatagaagctgaactaattgaaccagtagctacatttttccaaatgaaaattggactgcagaatatgtaaaaaaaatcggtacatgggagaaaaaagacaacttatcatgtaacgtgccaatgttttttttctatgttttgtacaaaagtgtaaacatatatggcaattccatgcacagaaatgcatctaaattatttttgttagacggtaagaaggcttgattggtggggagagctggctttgtattgtattgccgcattgtgtacatgtgat

SEQ ID NO: 8884 - DNA, 420 bp, Cricetulus griseus
cggaaacggcactcggaactctaccacgaactcaaccagaagttccacacttttgaccgctaccgtagccagtcctcaggcaaggagaaacccagccctggggaacgccctggcctgtctcagcacaggaggcatcagagctggagcaccttcaaatccatgacactgggctcactgccccccaagccccgagaacggctggccctgcaccggacagcagcctgggagcccacagaacctccagacggtgacttccagacagaggtgtgagtgccacaccggactgcccactgcacagaaatatatatctattttcacactccactttggaactaccaggagccagcgcccctcccctcccgaggcctgggcaggaggtgcagaggactcagcctggctgggggcagccagactggcagg

SEQ ID NO: 8885 - DNA, 420 bp, Cricetulus griseus
cccgggagaatggctcccgcaaagaagggtggcgagaagaagaagggccgttctgccatcaacgaggtggtgacccgagaatacaccatcaacattcacaagcgcatccatggcgtgggcttcaagaagcgtgctcctcgggcactcaaagaaatccggaaatttgccatgaaggagatggggactccggatgtgcgcattgataccaggctcaataaagccgtctgggccaaaaggaataaggaatgttccataccgtatccgtgtacgtttgtccagaaaacgtaatgaagatgaggactcaccaaacaagctgtacacattggtaacctatgtgcctgttaccacattcaaaaatctacagacagtcaacgtggatgagaactaacctgctgaatgtcaaataaagttggagaactg

SEQ ID NO: 8886 - DNA, 420 bp, Cricetulus griseus
ccatggccgagctgatccagaagaagctgcagggagaagtggagaaataccagcagctgcagaaggacttgagcaaatccatgtcagggaggcagaagctcgaggcacagctaacagaaaataacatcgtgaaggaggaactggccttgctggatggatccaacgtggtcttcaagctcctggggcccgtgcttgtcaaacaggagctaggggaggctcgggccacggtggggaagaggctggactacatcaccgccgaaattaagcgctacgaatcgcagctgcgggaccttgagaggcagtcagagcaacagagggaaacccttgctcagctgcagcaggagttccagcgagcccaggcagcaaaggctcctgggaaggcctgaccccatggaaagggggagaggagggagggctgag

SEQ ID NO: 8887 - DNA, 420 bp, Cricetulus griseus
gtcaagccagaagcagccaccgggatggacgagtttctcatgatctggcaccacaagaccaccatcctcacggacgccaaggagtcgagtaccgtgttcgagctgaagcacatcctggagggcatcctcaagcggcctccgatgtgcagcggctgtacaaggatgaccagctccttgatgatggaaaaactgggcgagtgtggcttcactagccagacagcagggccacaggcccagccacagtgggcctggccttccgagcagatgcctttgaagccctgcgcattgagcccttctccagtcctccagagcttccagatgtgatgaagccacaggattctgcaggcagtgccaatgaacaagctgtgcagtgagggccccaggcccaccacccctctagatacccatttcctcaataaa

SEQ ID NO: 8888 - DNA, 419 bp, Cricetulus griseus
ctccagatttgattatcctggatgtgcagtgcagctgagaatcagtggggtccaatgggaagttctgagaactcccaaggagaataaggttcggtatttaactgtctcctaagccaacttctgctgagcaagtaaatgtctgaattagtaacctggtaggccttgtctttttatgtactgatgtcacacaaggctgaagagccgttctctctgtgaatggctttcatgtccttcactagcaccataggctgtgcctttaaatgcagtaacctataccaacattataacttagctaaggtagccaggcagtggtggtgcatgcctttagttcccagcactcgggaggcagaggcaggggggatctctgtgagttcaaggtcagcctggtttacagagtgagttccagaacagccaaggct

SEQ ID NO: 8889 - DNA, 419 bp, Cricetulus griseus
caagatgggccgcgttcgcaccaagactgtgaagaaggcggcccgggtcatcatcgagaagtactacacgcgcctgggcaatgacttccacaccaacaagcgcgtgtgcgaggagatcgccattatccccagcaagaaactccgcaacaagatagccggctatgtcacgcatctcatgaagaggattcagagaggtcctgtgagaggcatctctatcaagttgcaggaggaagagagagagaggagagataattatgttcctgaggtctcagccctagaccaggagatcattgaagtggatcctgacaccaaggaatgttgaagcttctggacttcggcagtctctccaacctgcaggtcactcagcctacagttggatgaatttcaaaacaccacgtggagtccgtttgaattctgtt

SEQ ID NO: 8890 - DNA, 419 bp, Cricetulus griseus
agcctgtgcgtagtagcccttcttacctttcaaatgagcggcctttcccacctcagccagacctactgtggcagctttgcttatgcctgcccagaaatcttgctgggcttgccctacaaccccttcctgtctgacacctggagcatgggcgtcatcctctacactctagtggtcgcacatctgcccttcgatgacaccaacctcaagaagctgctgagagagacccagaaggaggtcatgttcccaactaacctcagtgtctccctggagtgcaagaacctgatcttccagatgctacgccaagctgccaagcgtgccaacatcctggatgtcctcaaggacccctggatgctcaagttccagtctgagcaacccacgaactgaaatcaggatgctcgaggccatgtgtcagcccacca

SEQ ID NO: 8891 - DNA, 419 bp, Cricetulus griseus
ctgtgctccccttaatctggcttgcctatgactggaacacgcacagtcaagatggtaggcgttcagcttggatacgaaactggaccctctggaagtatttccaaagttacttcccagtaaagctggtgaagacccatgacctttctcccaaacacaactacatcattgtctcccacccccatggtattctcgctcatggtgccttcatcaactttgctactgaagccactggcttttccaggattttcccatctatcactccctgtttagcaaaccttggaagggatcttctggatcccaattgtacgagattatgtgatgtccatgggtatatgtccagtgagtgaactggccctgaagtacaagctgacccagaaaggctcaggcaatgctgtgatcattgtggtgggtggagcttc

SEQ ID NO: 8892 - DNA, 418 bp, Cricetulus griseus
atcaagaaagtcttcactgtgttcaaactgcttttcatattctttctgggcaaggtgatgttctaaatatcgacccgatgaaattctatacacatctctacaaaacgttgtttaaattacatgcaggtgctaccaacgatggtattgagattgtactccactgccttgatgtcatgctaagcaagcgcagaaagcaggtttctcatcagcgagctcttgccttcatcaagcgcctttgtacgcttgctctgcaggttcttccaaattcaagcattggccttttagcaactaccagaatactgatgcatacttttcccagaacggatctgttgcttgataacgagtctcagggcagtggggtgttcctgcctgagctggaggagccagagtttttttttttattttatttaatttattt

SEQ ID NO: 8893 - DNA, 418 bp, Cricetulus griseus
ggtgtttaaagaagatggccaagagtatgcgcaggtgatcaaaatgctgggaaatggacggttggaagcaatgtgtttcgatggtgtgagaaggctatgtcacatcagaggaaagttgagaaaaaaggtttggataaatacatcagacattatattgattggtctgcgagactatcaagataacaaagctgattaaagttaattacataattgtataaatgaagttttccttaaactaagcttaggttaaaaggaaaggagtcacagcttaatgaaaaggcagtttctattttctgaatggaggagtccagaagtagaaacacaataaaatatgttgaatttaaaaaaaaatcttttctttttaatgtgttcattatatctctggtatgtaacaaaaataaatgactagatgatttct

SEQ ID NO: 8894 - DNA, 418 bp, Cricetulus griseus
cagagccgctgatagtcttccagtgcaaattcaccgttgggaatatatgtttccacagtcaaagagaaagaacccaagaccatgaagaagactcccagatgacacaggggtatcagcacatttggaggctccccgtggccccgttctccgacagcgcctaccatttccgagtagctgcaccagatttagcggactgctccacggatcctttttttgctgggattttcttcacagattacttcttttatttttatcgacgttgtaactaatttattcaagtgtgaggacttttaccaaagagaaatacagtatgcagaaatatagttaacagaaactggtatttcttcttgcaacttcctttacctttctgtaaagctctcatatttttgctgaaggaattcttcaggtttgccttcca

SEQ ID NO: 8895 - DNA, 418 bp, Cricetulus griseus
ccaacccgcggggctgctgtcggggccgcacggcgggagggagcccaggggaggcgccctcccgaggccaccgctgctcatgcagaccactcagccatctggctactgatgtcatgagtaacacgacagtgcccaatgccccccaggccaacagtgactccatggtgggctatgtgttggggcctttcttcctcatcaccctggtcggggtggtggtggctgtggtgatgtacatgcagaagaagcagcgggtggacaggctgcgccaccacctgctccccatgtatagctacgaccccgcggaagagctccatgaggctgagcaagagttgctgtctgacgtgggcgaccccaaggtggttcgcggctggcagagcagctaccagcacaagagggtgcccttgctggacatcaagac

SEQ ID NO: 8896 - DNA, 418 bp, Cricetulus griseus
gtggccgactgagtaggaatcgttctgacgcggccgagctgcaacatccaggacaagacatgccaactgccaagcagctagctgacattggctacaagaccttctctgcctccatgatgctcctcactgtgtacgggggttacctctgtagcgtccgagcttaccgttatttccagctgcgcagtgccaggcgccaggctgcagaagaacagaagacatcaggagtcctgtagagcaatggaaagacttcccctgcacatcatccttggcaaggactagggcctcgatggctttcaaacctgctgggctaaagtgctgtggtttctgtggtcccaccagcctatgccattttgacagtttgtggaggctgtcagataaatgggaatgtgagggtgaagtttattacagagattaaata

SEQ ID NO: 8897 - DNA, 418 bp, Cricetulus griseus
gagataagggacagacatgccaaatagggggaaaaaagatctctgtactcttagggatgggagagtgtgcctttaaatttcatgtgcctgagaacctgtactgacaaaagatggagatgctgacagcctcacttagagcaggcaagtgcttctaggggacagggatactttcttttggaaagttggccagtggtagcaatggcactggtttgcttcagtcagctctcctagcctagccttgttctgcagggccctgtatgtcacagaagagacttgggagcctggaaggaaagtgaaagatgtggggccaagggagtgagaggcaggttaatagttttgttgctatggaaactttggggcactgaggacttatactaaaaactcagaaagaaactcaaacttattctagtctaactgg

SEQ ID NO: 8898 - DNA, 417 bp, Cricetulus griseus
gtctctgtcttccttgtgtcctccatctacttggggatagactggttcctcttctgggtcttccagatcccagcccccttccccgaatacgtcactgacttatgtatctgcatcaatagcagcgccaagcccattgtctacttcctggctgggagggacaagtctcagcgcctgtgggaacctctcagggtagtcttccagcgggctctacgggatggtgctgagccaggggacactgctaccagcacacctaatacggtcaccatggagatgcagtgcccctctgggaatgcatcgtgagaggccagtgtctggggcaaggccgcagcaaagagtggccagtagcttccagagacactctgcccaagggcaaaagcagggcagctgcccctgtgtggcctgggagaagagctgcct

SEQ ID NO: 8899 - DNA, 417 bp, Cricetulus griseus
ggataaccatggtaagagtgaatgtatcccatgtgaatctggattctttatgaaccacaataacagtgagtctagctgttttcgctgctctcagtgtcgggatgaccaagaagaggtgtctgaatgcttccagacttctgatcgtgagtgccagtgtaagcagggtacctactgtaactctgaaaactgtgtggagaggtgcctttcatgcagcagctgtcctaaagacaaagtcatcaggcaatgcaatgccacgatgaatacactgtgtgaaatgtcagattcagagtcaggacagtcaggctttcattgtctctgcctgcctaaagctctgaatattgtagttgtcatagctgctgtcatcatcatcattgctgctgtcatcatgattaattaacttttattttattttatttt

SEQ ID NO: 8900 - DNA, 417 bp, Cricetulus griseus
tttgatgctctgttcacagacccagccactgcccgtgcggtgtgatcctggctgagtatctgaacctgccctccatctatctcttcagaggtttcccatgctctctggagcacatgcttggacaaagtccaagccccgcgtcctacgttcccagattctacaccaagttatcagaccacatgacatttcctcaacgggtggccaatttcattgctagcctcttggagaactacttatattattgtctgtattcaaagtacgaagtcatcgcctcagaactcctcaagagagatgtgtccctaccagtcttacaccagaactctctgtggctgttacggtatgactttgtgtttgaatatccccggccagtcatgcccaacatgatcttcattggaggaacgaactgcaagaaaaagg

SEQ ID NO: 8901 - DNA, 416 bp, Cricetulus griseus
tgcagccacagcgctcgcaccacttccacaacgctatctatgtactcctaagtggcgttggtggtctagagatcacacactttgtgctacagaacgcgtcacgtatgttgcccccacaccgtcacagtgcaggcagcactctgactgaggtgtcccaggctgaggaggagttacatagcagccttcgagagctcctggcccgagagcaccctttgtggcactcggcagccatcgtgcccttcctgctattagacaagccagatgtggtcaactgcttccgagaggagatggcaggggaggctttttccctgagcaggagctggcagagcatctggcagagcagctcagctactaccatgttgctggacatgaatttgccatcactggctgcaagcaggtagtagctaaggtcaacc

SEQ ID NO: 8902 - DNA, 416 bp, Cricetulus griseus
ccagcccacaaggaagcaacaggagactggaagggtggcactggccactttgaatcggtccagcctgcagcgactggccattgcccagtcccgggtgctgattgcctcgggggtccccactgtgcctgtaaaaaacttgaatgggtccagccctgtcaaccctgccttggcaggaatcaccgggatcctcatgagtgcagcgggattgcctgtgtgcctcactcggccaccaaagttggtcctccacccaccccctgtcagcagagtgaaataaagtccatcccaggggtctctaacacaagccgcaagaccaccaaaaaacaggccaagaaaggtaaaccccagaggagtgctaaagaataatctgcagaaggtccggcaccccccagaaaactacagttattggaagttggtgg

SEQ ID NO: 8903 - DNA, 416 bp, Cricetulus griseus
tctggtcaacaatgcagccgtgatgaggtgcccacactggaccactgaggatggctttgagatgcagtttggtgtcaaccacctgggccactttctgttgacaaacttgctgttggacaagctgaaggcctccgccccttcgcgcatcatcaacctgtcatccctggctcatgttgctgggcacatagactttgatgacttgaactgggagacgaagaagtatgacaccaaggcggcctactgccagagcaagttggctgttgtcctcttcaccaaggagctgacgccgccggctgcaaggctcaacgctgccttttctggcttcaattattaacttttttttttttttttttttttttacagaggtgtgtgtgtatatgtacatgtatgttgtagtccaggctatactagaactc

SEQ ID NO: 8904 - DNA, 416 bp, Cricetulus griseus
gaagacctcaccctgggccaaggtctctccttgtgccctggcacaggtgatactaactgtcatctctggtctgttttctctattaaggaagacattgtgtctccatggctgtaagaccgtgtgaagcggtttgtgtagtctccacataggtgctgttgccagcaccgccttgccctgaacactggtaatcccaggtgctgtgcttggcagaaaggcgtctcgccagagcgcctgtatgtgcgtgtgagagtgtcctcagcacggccaaaacgcactggctgccttgctcggcatcagcaggacatcatgtgaatagttgtgaccttaccaaactggaactctactattttgtatctttaactttaaagctcctataagtaaaataactaattggtctttaattaaaatatgcattt

SEQ ID NO: 8905 - DNA, 416 bp, Cricetulus griseus
ctggatacaaggagaactacacaagatggttgtgctattgcaatgtaccccagttctgtgacagcctacctcggtatgaaaccacaaaggtgtttgggagaacactgcttcgttcagtcttcaccattatgagacgacaactcctggagcaagccagacaggaaaaagacaaactgcctcttgagaagcgcacgctaatcctcacacatttcccaaagtttctgtccatgttggaagaagaagtgtatagtcaaaactctcctatctgggatcaggattttctctcagcctcttccagaaccagcccactaggaatccaaacagtgatcagtcctcctgttactgggacaggatcattcaattccaactcctcttcccatgagaggatcaatggaggagaacaagtcctggctgca

SEQ ID NO: 8906 - DNA, 416 bp, Cricetulus griseus
tggcactgcacaccgagggagcagcggccccgaggaggagcaactgcgtgcagcagagggtgcagggcgctggaggcgggtgcgtagggcggtagaacgagagcgagagcggcgcgtgcgtttcctgctggaaaccaaagaggccagtggggacccgtggctctgctccaacgggcctgggccgcaagccgagctgcgggagctggagctgcgcattgaggcggcgcgggagcggctgcgcactgcactgctgcggcgcggggagctgcgtgcccgactaggggactgcgccaggctccggccactgcgcctgatgcaggcgcccccacggaaagttgaaggaccacacagctgcgccgtccacgacagtttattctatatacaaacacgactctgtacactgcaattaaatagcg

SEQ ID NO: 8907 - DNA, 416 bp, Cricetulus griseus
caccgaaaggactgttgtcaaaagtcagctgcttccattcaatgctgccttaaacttgagtgcctaaatctgttgattgccaacactaccacttcagtatcccacaaagggctttatgtgccagctcagtgctcctcctctaattctgcggcaccgccgcagctgcgatgtagcctcggtaggtggcttctagagctctaccatgtgcagtggtgcatcttcaaatttatgcatcaaactaaagacctgtccgagtccattttactttcatcagtatactcatgagaagttggatggaccttccccaattgtcttttaacggggtgatgacgtatctctatttgattattacaatgatagtctgtttccaagtgatgcttttgtttgaaccagataaaatttagtgaaactttgta

SEQ ID NO: 8908 - DNA, 415 bp, Cricetulus griseus
tggagctcggggcgcgcggtcgagcatgtcggggcgaggcaagcagggcggcaaggtgcgcgccaaggcgaagtcgcgctcgtcgcgcgcgggcctgcagttccccgtgggtcgcgtgcaccggctgctgcgcaagggcaactacgcggagcgcgtgggcgcgggcgcgccggtgtacctggcggccgtgctggagtacctgacggccgagatcctggagctggcgggcaacgcggcgcgcgacaacaagaagacgcgcatcatcccgcgccacctgcagctggccatccgcaacgacgaggaactcaacaagctgctgggccgggtgaccatcgcgcagggcggcgtcctgcccaacatccaggccgtgctgctgcccaagaagaccgagagccagaaggtgaagagcaagtga

SEQ ID NO: 8909 - DNA, 415 bp, Cricetulus griseus
agttgaggctcagcctccagtcccctctgtgtgccagaagctgacctcaattcaaggttgctcattacagttaatttaggccactgacctggcatctcctatcctgtatgccctccacccatggaagggccactttgttgtgtctgcctgcctttagaatccccagtccttgttcctgcaaccagagatctctctctctctctgcccttttctctttcctgactttcctatcctatgctcctgtcctgtcttcctttggtttttggtctacttttttttatactctgaaacaaaaaaaaatctcaaaaaaaaaaaaaaaaaaaaaaaaaaaaaaaaaaaaaaaaaaaaaaaaaaaaaaaaaaaaaaaaaaaaaaaaaaaaaaaaaaaaaaaaaaaaaaaaaaaaaaaaaaaaaaa

SEQ ID NO: 8910 - DNA, 415 bp, Cricetulus griseus
gcacttttcacagagacaccccatgacatgacagcgcggacaggtgaggatgtggagatggcctgctccttccgaggcagtggctccccatcctactcgctggagatccagtggtggtacctgcgcagccaccgggactggactgacaagcagacatgggcctccaacccgctaaaagcatctcagcaggaggactcggggaaggacgccaccaaaataagtgtggtcaaaggtggtgggcagcaacatctcccacaagctgcggctgtcgcgggtgaagcccactgacgaaggcacctacgagtgtcgcgtgatcgacttcagcgacggcaaggcccggcaccacaaggtcaaggcctacctgcgggtgcagcccggggagaactcggtgctgcagctgcctgatgccgccccc

SEQ ID NO: 8911 - DNA, 415 bp, Cricetulus griseus
aaaaaaactaagagagaccttttgatttttagctgcagaacacattgatccagctcactattcaatgggagggaaagttttgaaaattgctaagctactgcaacccctttatgatgagaacctgctattagaggagagcgtggtctactggggctcttacaagtagaaacatccccaggcctggagaaacttggaacttatggtcctgggccattttatatcaagcctgtttaccactgctctggtagttgacccaagatttgaggaagccctggattttagagcaaaccttcatctggactttctttttatcctgagtaaaaaacccactcacccatccaaaggaggagggaaggcactccggcctccctgagtgaggcctggcttttggattctccacctcagccccgtgtgc

SEQ ID NO: 8912 - DNA, 415 bp, Cricetulus griseus
gccctggagacggtgccgaaggacctgcggcatctgcgggcgtgtttgctgtgttcgttagtcaagactatagaccagtttgaatatgatgggtgtgacaattgcgaagcatacctacaaatgaagggcaacagagagatggtgtatgactgcaccagctcttcctttgacggaatcattgcaatgatgagtccagaagacagctgggtctccaagtggcagcgagtcagtaactttaagccaggtgtatatgctgtgtcagtcactggtcgcctgccccaaggattgttcgggagctgaaaagtcgaggagtggcctacaaatccagagacacagcaataaagacctagctaggtgcagcccacagtgtcttgctttctacttctggcctgtgtttgttttctgtggagctaaa

SEQ ID NO: 8913 - DNA, 415 bp, Cricetulus griseus
  modified_base (389)..(389): a, c, t, g, unknown or other
tttagccggagtgcaaacctgatcacccaccagaggatccacactggcgagaagcctttccagtgtgccgagtgtggcaagagcttcagcaggagccccaacctcatcgcgcatcagcgcacacacacaggtgaaaagccctactcctgccccgagtgtgggaagagctttggcaaccggtccagccttaatactcaccagggaatccacactggaagaaaaaaccctacgcgtgtaaggaatgtggcgaaagcttcagttacaactccaacctgatcagacaccagagaatccacacaggagagaaaccatacaaatgtacagactgcggacaaaaagttcagccagagctcagcgctcatcacccaccggagaacacacacgggganaaaaaaccctaccagtgcagcgagtg

SEQ ID NO: 8914 - DNA, 414 bp, Cricetulus griseus
ccccattccagggtttgagcctgcatcagcccccagcccaaatgttaaactatagccttaagaaatacttggtaggaatatccttaatgagacaaatttttgtaccttttcccccctcaaagttaaaactaatatcctaaattcattaaacttttgaaacaggtgttgcaaaggaagaaaatgtcaccccttatccttaacatatatagtatatttaaaaatgtaaaattgtattgtactaatgtgataattgattatttaatgaaaaagaaaagatggctctttttgcaataagtagataatactgaaacaaatctaagcttacaatgttatagtcttgtgtgtgcagttacattttatatggtcaaccaaatttttttatggaaaagagttcacatttgaaccactgaaatt

SEQ ID NO: 8915 - DNA, 414 bp, Cricetulus griseus
ggcctgctgggaacaggacttctaaaaggcaaacatgtctggaaggctgtggtgcaaggccatttttgctggctataagcgaggtctccggaaccagagagagcacacagctcttctcaaaattgaaggtgtttatgcccgagatgaaacggaattctacttgggcaagagatgtgcttacgtgtataaagcaaaaaacaacacagttacacccgggggcaaaccaaacaaaaccagagtgatctgggggaaagtaaccagggcccatggaaacagtggcatggttcgtgccaaattccgaagcaaccttcctgcaaaagccattggacacagaatccgtgtgatgctgtacccttccaggatttaaactaatgaaaagtaaataaataaaagtggaatttgtgctacttagta

SEQ ID NO: 8916 - DNA, 414 bp, Cricetulus griseus
acgcagggtgtccgtggagctgcaggcagctgcctcagagctgcggggcctcccgggcctgccacccgctgcgcccccgctgctatcgcgcctactggcactgtgccccaacgacacccacagccccggggacccgttgcgcgcgctgctgctgctgaaggcgctgcagggcctgcgtgcagagtggcgtgggcgggaagggcgcgggagggcggggcgcagcggcaggggacaggggacagagggggccatgcgcactgcgtgagctgagcgtagacttgcgcgcagagcggtccgtgctcatccccgagacctaccaggccaacaactgccaaggcgcctgcacgtggccacagtccgaccgcaaccctcggtatgggaaccacgtggtgctcctgctgaagatgcaggctc

SEQ ID NO: 8917 - DNA, 414 bp, Cricetulus griseus
  modified_base (305)..(305): a, c, t, g, unknown or other
tgcacagccaataaaatccatgaggttctaagattctaccaaagcatggaccacaaggacaaggactgcttcatctgctgcatcctctcccatggagacacgggcatcatctacggcactgatgggaaggaagcccccatttatgaactgacatcttatttcactggttcagagtgcccttccctggctggaaacccaaatctttttatcaggcttgccaaggggataactaccagaaagctgtacttgttgagactgactgggaagagatggtcagcttctagacgtggactcatctcaaaagngctatattccagatgaggctgactttctgttggggatggctactgtgaaggagacagaggcaggaggatctctgaattcaaagccaccctggtctacagagctagatct

SEQ ID NO: 8918 - DNA, 413 bp, Cricetulus griseus
taacaaatgagttggtgcagtgttaggtaattgttctactgcttagaaaccactgaaacaaaagcaagcctgtggatttccacctcctttttcatctcagtaaatatcatacacgtaaagcataatggaaaacggcccattaatctcctggagctggcagcgcagtccagggaactgcttttcactaaacagcccattccctggtgtagcacaagaattccctcctgctcatgccagaaactcatgtgtgacaccatccagcctgggggaagtgtggcacccaacccaccgtcaagcagccagttcctaaaatagacctgtgtttgcactgcagcaggaaggccacagagtgctcagaggcagtcaatccactgtggtgggagccggcctcttcccagggctgcctgttccca

SEQ ID NO: 8919 - DNA, 413 bp, Cricetulus griseus
ctggcatgactggatgaatagccagtttggccaaagcctggaactggatggaataatttatcttcgagctactccagagaaatgcctaaatagaatatatttacggggaagagatgaagaacaaggcattcctcttgaatatttagagaaactgcactataaacacgagagctggctccttcatcggacactgaaaaccaactttgattatcttcaagaggtgcctatcctcacactggatgtcaatgaagactttaaagacaagcatgaaagtctggttgaaaaggtcaaagaatttttgagtactttgtgattgtacgggatttaagccaaggtctcactatatagccctagatgacctagaagtcatcatgtagaccaggctgacctgtaattaacttttttttagtttt

SEQ ID NO: 8920 - DNA, 413 bp, Cricetulus griseus
gtgacctatgatgatgtgcatatcagcttcacttgcaaagaatgggctttgctggatccttcccagaagaatctctacaaagatgtgatgctggagacttacagtaaccttgctgctataggctacacatgggaagcccataatattgaagaacattgtcaacgatttagaagacacagaaggcttaaaagaagttatactgaagagaaaccctacaaatgtagtcaatgtggtaaagccttttcacagaggagtcacctccatgctcataaaagaacccatactggagagaaaccctatgaatgcgatcaatggatgcaggcgccatcttgtaatggagaaaaaagaaaaaaaaaaaaaaaaaaaaaaaacaaaaaaaaaaaaaaaaaaaaaaaaagtaataagctgttgtg

SEQ ID NO: 8921 - DNA, 413 bp, Cricetulus griseus
acaaggggtacctggaggtaaagggcaggatctccctagactatcttggtctagtcttcagcttagctttagaatgatgggaacatttcatcagatggaggaaaaggggtcagtgtcctcagtcgatgtcatggcagcagcacttgaggtggaagcttgagaacctcaggggaaatgagggccctgagaattccatggtgagagcaaaaatgacaccgcagggctatgctgcagggacttgaagcaacatcccagaatagcttggactccttccttagacttgcttaaagaccagtttatggctcttgttagcaaagtttttacattgaatttgattattgctgcccttcagtgattccgttttcaaagacatttcagcaattttcctcctggtcctggctctgagcacattt

SEQ ID NO: 8922 - DNA, 412 bp, Cricetulus griseus
gatggccgctctccgctaccgtcgcttccttaagctctgtgaggagtggccggtggacgagaccaaacggggccgggacttgggcgcttacctgcggaagcgggtagcacaggccttttcgggagggagagaacacccaggtggcagaacctgaggcctgtgaccagatgtatgaaagcttagcacgactgcattcaaactactacaaacacaagtaccctcgccccagagacaccagcttcagtggcctgtccgtggaagaatacaaggtgatcctgtccacagacaccatggaagagttccaggagctggataagagcgtgtggaagaaactccaggagaagtttgcaccgaggccagaggagaagcataaagcttgggctcgggtcttgtcccgcccacgtacctgacc

SEQ ID NO: 8923 - DNA, 412 bp, Cricetulus griseus
actcatggcgggcccagtgaaggaccgggaggccttccagagactcagcttcttgtaccaggctgcacattgcgtcctgtcgcagaacccggagaaccaggccctggcgaggttttactgccacacggagaagaccatcgcgaagcggctggtcctgcggcaggacccctcggtgaagaggacgctctgtcgcggctgctcatctctcctcatccccggcctcacctgcacccagcgccagagacgccaaaagggtcttcgctggacagtgcagacctgcctgacatgccagcgcagccagcggttcctcaatgaccccaagcatctgctctggggtgaccgacctgaagcccagctggaaaatcaggcagatttcaaaccatcagaacctctgccaaacatagcccacctc

SEQ ID NO: 8924 - DNA, 412 bp, Cricetulus griseus
gctcgggcaccgtagccatcatgaatgacacagtaacgatccggaccaggaagttcatgactaaccgtctgcttcagaggaaaacagatggtcattgatgtccttcaccctgggaaggcaacagtaccaaagacagaaattcgggaaaagttagccaaaatgtacaaaaccacaccagatgtcatctttgtgttcggattcagaacccacttttggtggcggcaaaacaactggctttggcatgatctatgattctctagattatgcaaagaagaacgagcccaaacacagacttgcaagacatggcctttatgagaagaaaaagacatcccgaaaacaacgtaaggaacgcaagaacagaatgaagaaggtcaggggactgcaaaggccaatgttggtgctggacaaaaag

SEQ ID NO: 8925 - DNA, 412 bp, Cricetulus griseus
cctataaacttccgtccctggccttgcctcgttctttctgtgccgatatcgctcccgccaacatggtgaacgttcctaagacccgccggacgttctgcaagaaatgtggcaagcaccagccccataaagtgacacagtacaagaagggcaaggattctttgtatgcccagggaaagcggcgttatgacaggaaacagagtggctatggtgggcagactaagcctattttccgaaaaaaggctaaaactacaaagaagattgtgctgaggcttgagtgtgttgagcccaactgcagatctaagaggatgctggctattaagagatgcaagcattttgaactgggaggcgataagaagagaaagggccaggtgatccagttctaagctgctcttggtatggagacaataaaatc

SEQ ID NO: 8926 - DNA, 412 bp, Cricetulus griseus
acagatgttttgggttattacattcatgggaggtcagtccatggacatgcagacaccaacatggaagagaatgaacatgaatctcaaaagagaagcggaaaatttgtgcagccaaagaggtttggtacccaacacagatgggcagacttttcagattgcagtttctgatcagatgagacaacactatgacagaattcatgaaacactaacaaggagaaatggccctgccagactactgagttcatcagcaagtacttttgaacaaagtgtaaaagcataccacgcaatgaataagttccttggctccttcattgatcatgttcataaggaaatggattactttataaaagacaagctgctacttgagagggtcctggggatggagttcatggagcccatggagaagagcatc

SEQ ID NO: 8927 - DNA, 412 bp, Cricetulus griseus
cagctttaggtttgagacacttcctaggtgatgttggctgtcacatcattgtttacctggaaagggtggctcggggcctctccatctgcaccagcagtctcctcacagtggtccaagccatcatcatgagccccagaacctcccgggtgggggaggctaagactgaggtctgtagaatgtgtgcttctctcactgctcttcttttggattctcaattccttgatcagcatgaatctcctctattccatcagaaacagaggtacaaacattttacaacagaagtaaaaaataataaaatattgttatatacaaaaaaagaaagtacaagaaaagtaaacaacatgtttcttgccctcatggtcctgagagatgcagtgtttcagagtgccagtgggaggggccagtggctaca

SEQ ID NO: 8928 - DNA, 411 bp, Cricetulus griseus
ctcttcgccgtcttcgccttcgcctcggtctccagcgtgccgctctgccccttccgcctgggctccgccaccctcacgcctcactacggcgcctctttttgggtcacgctggccaccggcatcctgagcctcctcctcggagcggtggtggtgattctgcactacactaagcccagcgctctgcgaacctttctggatcaaagcgacaaagactgtaggggtcaggccaaaggaaactcgcctctcatcttcgataacccgcaacgcaagcagttcgcgaccccagacttaaatattaccactgtcctgtaaggagaacttattccggattcctacctccttgggatcccgcaaacctggacagtgttaagggcgcgcgccccaggagcgctgctgagtctagggaactgc

SEQ ID NO: 8929 - DNA, 410 bp, Cricetulus griseus
cgaggacagtgctgctgccctgggccttctgtatgactactacaaggttcctcgagacaagcgacttctgtctgtgagcaaagcaagcgacagccaagaagaccaagaaaaaagaaactgtctcagcaccggtgaagcccacagcactttggtcggaggcgagaaccgagtgcaggtcctgaagaccgtcccggtgaacctctgcctcagccaggaccacgtggagacctcgaagcgcgagcagtacagcgtgtccatcaccgagagccccgccgtcatccccgtgtcgggcatcaccgtggtgaaagccgaggacttcacgccggtgttcatggggcccccggtgcactatccccgcgccgacggcgaggagcagcgcgtcgttatcttcgagcagactcagtatgacc

SEQ ID NO: 8930 - DNA, 410 bp, Cricetulus griseus
cttccgcaaggcctgcgacctggtgcatgacttcacagatgctgtcatcagggagagacgccgcaccctcaatagccagggtgttgatgaattcgtgaaggccaaggctaagtctaagactttagacttcatcgatgtgctcttgatggccaaggacgaacatggaaaggagctgatgaggacgtccgggcagaggctgacaccttcatgtttggaggccatgacaccacagccagtgggctctcctggatcctgtacaaacctggcgaggcacccagaataccaggagcgctgccggcaggaggtgcgggagctgctgagggaccgagagcctcaggagattgaatgggacgacctggcccagctgcccttcctcaccatgtgcatcaaaggagagtctgcggctgcat

SEQ ID NO: 8931 - DNA, 410 bp, Cricetulus griseus
gttttccagaccagaatgtaattctatggacagttaggaaatctggttaataaattttaaaccaaagggcctttcctttcttcttgtttctgactcttctagtacagcaaattgtttaattgtttattacattgaagtgacttgaagtgaccttttgtgctttaggtgtaagatgctaaaaacaaaacacttgactttgccacatcaatgcctgaattttaaatgctgtcagattacaggaagttacacaggtttcccatggtcagctgctgtacctgatgccttactggtcctttgttgacttgccttaatggtttacacagaagcctgagaggaggggaagcttcctgtgatctgtggaccttagtgaggaggcttaggttcattgcaaagcaagcatatgttctgta

SEQ ID NO: 8932 - DNA, 409 bp, Cricetulus griseus
ggccgcgccgacgcgtcgtgcgcagaggtagcggggttcgtggcggaccgcctgcgcgctgtgcggcttgatctgtcgctgcagggcgtgggggacgcggaaacagcggcggtgctggaagccgctcaggccacgttgctggcagtggtggcgcggctgcgacccgaagaggcgcgcggagccccggacccggtgctgctgcagacgcaggtgcaggagggcttcggttcgctgcggcgctgctacgcgcggggccaggccccgcacccccgccaggccgccttccagggcctcttctgctctacaatttgggctctgtggaagccctgcaggaagttctacggctgcctgccacccttcgtgccctcgccccaccccttcagactgctctggctgttgatgctgcctt

SEQ ID NO: 8933 - DNA, 409 bp, Cricetulus griseus
aagaggtcctggctgaggtagcaggcattctagaacctataggcttgcaggaagaagcagagctgcccgctcggatcctcgaggaatttgtgaggaactctcggaagaaagacaagctgctctgtagccagcttcaggtagtgaacttcctacagaattttctggctcaggaagatactgcccagagcccagacactttggtttctgaagacacaagtcgaaggaaggcaactgaagctaaagaacaatggaaggaactgaaggccacgtaccagcatcacgttgaagccatcaaaatgtgccctgactcaggccataccccaggtagaagaggcccagaggaagtgcttggagctccagaaggcttatgagcatctccaggctaagaagcgagtagttgcagagaaac

SEQ ID NO: 8934 - DNA, 409 bp, Cricetulus griseus
gttttcatgttcagctttagaacccaagttgctgcaagatgcttttattctagttagaccaagcaagtatccacattcttagttcctttgttcacagggtcagggagaacacccctgctgtttcaaagacatgatgtagctaagaacatggccctaccagtgttaaggaacttgtgcggttgagaaacctcagccatggccaggaaagtgggggagtggcactttagtcttgtagtttagccttttggggcttatttactagatataactccctcaaaaaaaggtttatgaaatgctgaacctcaggtttcatagactgtttgtacactaagaattctgcagcagaatatttttaaacatttggtttttgtaagctatatttttgtatatttaattgctattttaaaac

SEQ ID NO: 8935 - DNA, 409 bp, Cricetulus griseus
  modified_base (168)..(168): a, c, t, g, unknown or other
gggcccaaatgcatctgggtatctggttggcaggaacaacgcaaacggagtggacctgaaccgcaacttccccgacctcaacacctacttctactacaacgagaagtatggcggccccaaccaccacttacccctcccagacaactggaaaagtcaggtggaacccgngaccagggccgtgatccagtggattcgctccctaaacttcgttctgtcggccaatctgcatggcgggctgtggtggccaattacccatatgacaagtccctagttaccgaagtcctcaccgcacctccaattcccccacaccagatgaccagctcttccagacgctggccaaggtcatcaatcacgatgtcacttcaggtgaacatgggattacttccgtctgctgcttccgggtacttac

SEQ ID NO: 8936 - DNA, 409 bp, Cricetulus griseus
cgctacaggaagagaatgggaagctgctagcagaacgagacggagtgaagaggcggagtgaggagctggccacagagaaagatgctttgaagcggcagctctgtgagtgcgaacaactcatttgccagcgtgaagcagtcctctcagagcgtacccgccatgcagaaagtctggcccagagtctagaggagtacagaaccactacccaggaactaaggcaagaaatctcgaacctagaggagcagttgagtctgagccaggagggcccagaagagctactgcaaggggctgaggcaggaagagtaggctggatcatggcactgcccccatctctggacttggagatccaggctatccggcaggagagggatgcatcaggtgttggcctctccagtcctctgtgtggagt

SEQ ID NO: 8937 - DNA, 408 bp, Cricetulus griseus
gagcagaaagtatgcctcccaagttcaagcgacacctaaatgatgatgatgtcactgggtctagtgaaaagtgaaaggagaaatcttttggaagatgattcagatgaagaagaggacttttttctacggggaccatctggaccaagatttgggcctagaaatgataaattaagcatgttcagaatcaggtggatgaagttattgatgtaatgcaagaaaatattacaaaggtaattgaaagaggagagagactagatgaactgcaggacaaatcagaaagcttatcggataatgcaactgctttcagcaacagatccaaacaactccgaaggcaaatgtggtggcgtggatgcaaaataaaagccatcatggctttggctgcagctatccttttgctaatgattatca

SEQ ID NO: 8938 - DNA, 408 bp, Cricetulus griseus
aatctgtgacatagtcatgttaaaatgcagatttatcggaatgtactattatactaattgaactggtaagacttttaagagtttcaagtgtactctcttaataagtaatatatatgataaatgaaaacctggaaggtggcattcacacatactaataatggaaagaatttcagtatcttcagtaagtaatggaacacatcttcaatatgagtttgcaccttacagaaaaaattcagggaatcctataaataaaaagatgtttcaaaggaaggcattttactacaagagcagagtaagtatcagtaattaggtggaggaaattcatgtttttaaaacaatattgtttgtttcagaaagtgttgtaaagatttcattgtaacttcatgtgtatattgtctgttgtaaaat

SEQ ID NO: 8939 - DNA, 408 bp, Cricetulus griseus
ccactgaagaagatatccatgacaaatttgctgaatatggggaaataaaaaacatccaccttaacttggacaggcgtacaggatacttgaaggggtagtactctagttgagtatgaaacaatacaaagaggctcaggctgccatggagggactcaatggtcaagatttgatgggtcagccaatcagcgtcgactggtgttttgttcggggtccaccaaagggcaagaggagaggtggccgaagacgaagcaggagtccagaccggagacgtcgttgatagatcctctgttgcccaggtggtctctacacgagtccatttggttatgctgccttgcataaatagggctagggtagaacttgtgtttatatttaatttcttaccctatctacttagtattgctttgagtt

SEQ ID NO: 8940 - DNA, 408 bp, Cricetulus griseus
cacacacacacacacacacacactaaatgtttttctccttgctgttactctccctccactccaaatggcccccaattcaaagggcccctgccttgaagtcccaggcatgagtcctctggccatgaggggaatgtgcttcttgttcttcaagtggctacatcagaacagttccctgtcccaccgtcctttggctgtctcaaacaaacacactgtgacacccaaagatgtttctgagctcttatcccaccccagacatttccatcccctaagtctcctttgaaggaacgtacctaacactgagctagcagactcttgtctgtccttgaacacgtgtgtattattatctttatgaaatgttgtttttacattctgctgttattgccgttcttacatttttgtattgttgac

SEQ ID NO: 8941 - DNA, 408 bp, Cricetulus griseus
cctggcctgggccatgcagacccctcggaccatccctgtgccggtgcccgtgctccgccttcctcggggcctggatggctttagccgaggatttgcccctgatggacgcagggccctcctgaggccaaaagccacagaagtcggagaaggtactcaagaccccccagagtttcaggaacagcgggcccgagcggccctccgtgagcgctacctccgcagcctcctagccatggtgggtcaccctgtgagcttcacgctgcacgaaggcgtgcatgtgaccgcccagtttggagccacagacctggatgtagccaacttctacgtgtcccagctgcagacctcccataggcgtccaggcagaagccctgctccgatgcagtgacatcatttcctattccttcaagctgt

SEQ ID NO: 8942 - DNA, 408 bp, Cricetulus griseus
atcagaaagagtactgaaagtgaaccaaatcaccttcctcaggtgctgctgacaaaaaaacaagcatcatcagacaagggacgatgtctcatagaggagatttctagttcagaaatccaggtggaggttaagaaaccagcttatgaattaaaggttgtaaaggatcagaatgagaaacctctgaaaattgaagtgaaaatagagttacctgggattaactcagtctctctctgtgagcttagtgtttctgaggttgatttattgattgaggtctctgagaagtaccgattattcctgaatcttccagaatcagttaatacagaaatgactacagcaaaatttgtacaaaaataagtctagaattattcattacaatgccattggacaaaaaataaaaaaaaaaaaaaa

SEQ ID NO: 8943 - DNA, 408 bp, Cricetulus griseus
ggaagcagcagcggcggaaggaaaagttaggcagactaagaaaaaacttaaaaaagagagagaagctcttggtgataaggctccaccaaagccagttcccaagaccatcgacaatcagcgagtgtacgatgaaaccacagtggaccccactgatgaagaggtggcttatgatgaagccacggatgagtttgcttcctatttcaacagacagacatctcctaagattctcatcacgacatcggacagacctcacgggagaacagtacgactctgtgagcagctctcaacagttataccagattcacatgtttattacagaagaggactggctctgaaaaaaattatcccacagtgcattgcaagagatttcacagacctgattgttattaatgaagatcgtaaaacacc

SEQ ID NO: 8944 - DNA, 407 bp, Cricetulus griseus
acaaggatggtgaaaaaaaggatttataaataaaatctatgccattcaagaagtctgcattagtgtccagaacatcctagatgaagtggcttcctttggcgaaaggataaagaatactttcaactggactgtcccattcttaagctggctggccattgtagccctctctgtgttcacagttattctgttacttcactcccactgagatacattgttcttgtctggggaattaataaatttaacaaaaaagcttcggagtccatatgcaattgataacaatgaactacttgacttcctttccagagtttccttcagatgtacaagtggtgcagtaccaagaactgaaaccagaccattctcatagcccatataaaaggaagaaaaacaaccttaggctagccagctcc

SEQ ID NO: 8945 - DNA, 407 bp, Cricetulus griseus
gaggagacaacaaaggaaagtaaaccccatggaggtgcctcccgccaacgtgacacaagtcacagagaccagcagaagaatccagggacctccaccacccccataaggcccaatccagggggtgttcatgacactgagatgggcccttgccgaagacacttggattcagtactgcagggcctccagactgagatcttccgaggggtgcgcacggactctacatgcccaattgtgacctcagaggcttctacagaaagcagcagtgtcggtcctctcaggggaatcgccgtggaccttgctggtgtgtggatccgatgggccggcccttgccagtgtctccagatggccatggaagctcacagtgctctggcaagagcagtggctaaagcaggtgggagcctccagga

SEQ ID NO: 8946 - DNA, 407 bp, Cricetulus griseus
tcaagatgtttcagaggagaagaattttagtatgtggcctaaaaattgttcttgtgattattttggtgaagaatgtggttgctttttgtccttgtctgaaaagtctggttaagagattccatgaatctcagtaagagattttgaactttaggcttttaaataagtcttgagaatgtgatagactataggaacttttgaaattggactaaatgcattttggattataatatggctataaacctatggggagccagggagtggaatgtgatggcttgagtaagaatggcccccataggctcctacatttaaatgatgataatggactaaacctctgaaactgtaagccagccccaattaaatattttcctttataaaaaaaaaaaaaaaaaaaaaaaaaaaaaaaaaaa

SEQ ID NO: 8947 - DNA, 406 bp, Cricetulus griseus
gactgtaggaaaatggcggcgtccatagcggcctcggcgttgccaggcgctttcgggcggctggtgtctgtatgtagccgcagcatcctggcaccgtcgggacccggagctgccgccctccggtctgcttctcaaagattcaattcacagagcacttcgtatccacaaggatacgttcctaagacctccctgagctcaccaccctgggaagaagtggttctgccagaccctgttgaagagaccagacatcacacagaggttgtgaggaaggtgaatgagctgattgccacaggccagtatggccggctctttgctgtagtgcactttgccagccaccaatggaaggtgacctcggaggacctgattctaattgaaaatgagttggacatcaagtgtggagagagga

SEQ ID NO: 8948 - DNA, 406 bp, Cricetulus griseus
cgccgctgctgctgcagccgccgccgccgccgcggccgtcacctcgggggtggctcccaagtgacccccgctgccctgcgtccgtgctgtgtacgtgctcgcacgcgccttcctcgcggggagatgcggcaggtgcgcttcgtgctgtccttagtgtccgtccatttcccgggaggggaccgtggagaggccccagcgaggtgggaaagcgaggtttgtgctgcgcttctggcttggaaaagtaggggcaagctctcagactgaagggtgggatccatgcgtggctcgaggacacaagggaaacgggctctttcccctgcggtaccccctccctgcgcccacatgccctttattcatggcagaaagtgacctgatcctgtgtatttgttttatattatttaataac

SEQ ID NO: 8949 - DNA, 406 bp, Cricetulus griseus
atgctcccactgccaggaggctggcgctacgttgggctgctacaacaaaggctgctccttccgataccattacccatgtgccattgatgcagattgtttgctacatgaggagaacttctcggtgaggtgccccaagcacaaggtgagactgtggagataagaaggtggtggacacacgtgatggaatggaatcctcctgctgtacaaccacaccctcaccctaccctaccctgcacccccactgcgcctgcccatgccagcacttccttcccatgttttcacatcacactcaaactggtgacaccacaggaagagaaagacacagatgttggaatggctgtttccatggacacaatctccatagtgacaatagtggggggaggggggaggggtgggttaggtgggg

SEQ ID NO: 8950 - DNA, 405 bp, Cricetulus griseus
ggatggggacgggccgtgctgcggtggatatttagttctttacaaatgaattataccactcgaatgcttctcattcttcagcttgtcagtattaaaatcacttgaagagaaatatgtggctgtcatgaagaaactgcagtttgatacatttgaaatggtttctgaagatgatgatgggaagttgggttttaaagtaaattaccactacatgtctcaggtgaaaaatgccaacgatgccaacagtgctgccagagcccgccgtctggctcaggaagcggtaacgctttcaacctcactgcctctgtcatcgtcttccagttgtttttgtacgctgtgatgaggagcgacttgatatcatgaaggttttaacttttttttttttttttttttttttttactgtagag

SEQ ID NO: 8951 - DNA, 404 bp, Cricetulus griseus
gcaacgcggcggaggcgggagtgagctgcgatcgaaacctccaccatgagtctcctcaataaacccaagagtgagatgaccccagaagagctgcagaagcgggaagaggaggaattcaacactggtcccctctcggtgctcacacagtcggtcaagaacaacacacaagtgctcattaactgtcgaaacaacaaaaagctcctgggacgggtgaaggcctttgataggcattgcaacatggtgctggagaatgtgaaggagatgtggactgaggtccccaagagtggcaagggcaagaagaagtccaagcccgtcaacaaggaccgctacatatccaagatgttcctgcgcggggactctgtcattgtggttctgcggaacccgctcatcgctggcaagtagag

SEQ ID NO: 8952 - DNA, 404 bp, Cricetulus griseus
gggaagcccggatggcggaggtggcccggctgctgggcgagcctctggaggacgaggcgcccgatggcaggccccggtcccgggctggcggcctggcggcgctgccctacctgcgcctccgccacccgctcagcgtcttgggcatcaattaccagcagttcctgcgccactacctggagaactacccgatcgccccgggccggatccaggagctggaggagcgccggcggcgcttcgtggaggcctgccgagcccgggaggccgccttcgacatcgagtacctgcgcaacccccagcgggtagactttgacattttgacgttcaccatagccctgactgcgtccgaggtgatcaaccctctcattgaagaactgggttgcgataagttcatcaaccgagagtga

SEQ ID NO: 8953 - DNA, 403 bp, Cricetulus griseus
ggggagcctgagacccctgacctcgagggcacatcgtccagtgacagtgactcagattacgacgggggcggtcgcctctcgcctcttctgccccaagaccacctcggcctggcggtcttctctgtcctgtgttgtttttggcctgtgggcatcgctgccttctgtctggcccacaagaccaacaaggcttgggccaagggggacttccaaggggcaggggccacgtcccgccgtgccttcctgctgggggtcctggccgtgggtctgggcctgtgcacttacgccgctgccctggtgaccttggctgcctaccttgcctcccgagccccgccctagttgccctccggcccccactgtgaagaggccagaggcccagtgagcccttgagaggaatggatgatct

SEQ ID NO: 8954 - DNA, 403 bp, Cricetulus griseus
gtgcaatgttcctgactgccgagagaaggcctcctgaagacggctatctcttacacaccttctcttcctatctgcccattcgtgatctcacagtggccagttacacctaggagtcactgtgaactagaagaacactgggttggcagagttctactgtgtgagctattttgggattcatcttcagtgaatggagaagatatttgctaaagtacagctgcttccacatcagcttctagaatagcgtgacatgctaaagaagacatttgtcctggtagtttcagtcaggaattaaaaggaacaacatggtatacacttaagatttccacatttccatctccagagatgttcactatctgagaagctaatggagatacccattaatgtgtgcaccaaacatgacaca

SEQ ID NO: 8955 - DNA, 403 bp, Cricetulus griseus
  modified_base (349)..(349): a, c, t, g, unknown or other
aaggaaatattttttggggggggtgccgaagacaaattgataggatcatatgtgtacaatgtatgccttttccttttatgcagagttttgacaatgtttttagtttgtgttttgcatattcacaaaatcatggctccttgttgtatgatctggccttctcaatgcctggtgattttattttatttttttaaagttgttgtatctgactcaatacaataatgtcatcttaaatttttgccccttatttgaatactatagctacaagcaaatactttgttaaattgttatattcagaataaatatggatatagcattgattgtccacctgcaagctctataacaatttacngtagcttgatgcttagccaattttaagtaggaattcaacatatatgacacaggg

SEQ ID NO: 8956 - DNA, 403 bp, Cricetulus griseus
tccagacgctgcaaacagccctggaaaaacacgaacagaattatttgacctaaaaactaaatatgatgaagaaactactgcaaaggctgatgagatcgagatgatcatgactgatcttgaacgagccaaccagagggcagaggtggcacagagagaagcagaggctttaagggaacagctctcatcggccaaccattctctccagctggcctcacagatccagaaggcaggctgactatgaagaggtgagaagagctgaacaccctgaagtccatggaatttgcaccaaaggagcaggaacacaggactctacgaagccactggaggttttactcctggagaagaaccgctcactgcagtctgagaatgccgcgctgcgcatctccaacagtgacctgagcgg

SEQ ID NO: 8957 - DNA, 402 bp, Cricetulus griseus
aggttccttttcactgataccatgtatggattaatgtgagtttggtgtttgatgctgtctctccactggatgtcacacagatggtcatcttttgctcagtgacagagcccagcgtatgtcctacctgtgtgtatgtgctgatgaacaacctacttgtggttatagattttcatacatttaaatgttggagaaaatattgacaattgaaagtaccatgtcatgaatttttattagagtccaaacctacagattgaaaccctgctgcaaacttttaagattacgttttatgattgattgtgtaattatgtgttaggaataaagtaaccaagtgttatcaaaaaaaaaaaaaaaaaaaaaaaaaaaaaaaaaaaaaaaaaaaaaaaaaaaaaaaaaaaaaaaaaa

SEQ ID NO: 8958 - DNA, 402 bp, Cricetulus griseus
cttttgagacctcgcatcgaagatggctcaggcaccaacagtcatcgtgactcaacctggatttgtccgtgctccccaaaattccaactggcagagcagcctgtgtgattgcttcagcgactgcggagtctgcctctgtgggacattttgctttacatgtcttgggtgtcaagtggcagctgacatgaatgaatgctgcttgtgtgggacaacggtggcaatgaggactctctaccgaacccgatacggcattcccggatctatttgtgaggactttatggtcaccctctgctgtcctgtttgctctctgtgccaaatcaagagagacattaaccggaggagagccatgaatgctttctaaggagctggttggtgagagctctcgctgaagcagctgaactc

SEQ ID NO: 8959 - DNA, 402 bp, Cricetulus griseus
taattaaatattgtgatatctccaggtttggtatatgctcatttaatttctatagaaaatttcagttattttacatggctatttgttaaagcacagcataactcagcgggcttgattttaatctacataatcttatacataccacaggctcttatcttgaaatatacttaagagcttaaaagttgctttaccaaaaactatacattgtttcttttatatttatgacttaatgtagaatgtaaatctcttgatcaaaaaaaatgcacaaaaattgttttgtatatgtgtttgagttcactgcactgtatattttttcatttggtacaccagaaatgtattcttcataggtttattcttttaatatgtgaactattaaactttactctggttcctaacattaaa

SEQ ID NO: 8960 - DNA, 402 bp, Cricetulus griseus
aaaactggaagatgcagagagcagtaatccaaatctacagtcccttctttcaacagatgcattaccttcagcatcaaagggatggtccacgtcagaaaactcactgaatgtcatgttagaatcccacatggactgcatgtgaccaggtgccatcccagtagtacagattaagctattaaaaacagaactatttccctgaagttccgtaagtacatagtcaaggtgaaatgtgaagagaatttagtttaaaaacatcctgtagaaagtttataagaaaaccagtatttgagcaaattgtggaatataaatacaactatttttaagtactttctttctctaatgtgttattttatttgttcatgaaactaatctggttaaagtatatatatattattttcttct

SEQ ID NO: 8961 - DNA, 401 bp, Cricetulus griseus
ggtgaactttgggctgtttctcaatataatttgcatcctgctcaggaaactggagccggcacagggtggcctccacacacgggctcagtactggcgactttccaagtcaacacttctccttataccactgtttgggattcattacatcatcttcaacttcttgcctgacagtgctggccttggcatccgcctacccctggagctgggactgggctccttccagggcttcattgttgctgtcctctactgcttcctcaaccaagaggtgaggacggagatttcacgcaaatggtatggccacgatcctgaacttctgccggctcgtaggacctgcactgattggaccacacctccccgatcgagagtgaaggtgctgacctcagagtgctagaccagccatc

SEQ ID NO: 8962 - DNA, 401 bp, Cricetulus griseus
tgtgggaaggccttcactgttctggcacagctcactcggcaccagagcattcatactggggagaagtcttttgagtgtgagcagtgtgggtcagctttcagacttcagtaccaacttactcagcatcagagaattcatactgatgttaaaccctttcagtgcaaggtgtgtgggaaaggctttattcgtggtacaggccttcgaattcacgagagaatccacactggtgagaagccctttcaatgtaaggaatgtggggaggcctttcaatatcattaccaatttcttgggcattttagaattcacactggcaagaatccttatgaatgtacacaatgtggggagtactttactcgaggtgcagatcttaaagtacatcaaagaattcacactgatgagaa

SEQ ID NO: 8963 - DNA, 401 bp, Cricetulus griseus
  modified_base (99)..(99): a, c, t, g, unknown or other
aggaatgctccaaaatggcaagaaatttgattcatccagagacagaaacaaacctttcaagttcagaattggcaaaacaggaagtcatcaaaggttttnaagaaggcgctgcccagatgagcttggggcagagggtgaagctgacctgcactcctgatgtggcatatggagctactggccaccctggtgtcatccctcccaatgctaccctcatctttgacgtggagctgctcaacttagagtgaaggcaggaaggaactcgaggtggctggagatggctcctgctctctgtcctagcctgctctgccactgggatggctcctcctacacagggctcttgatctagtgtgctgacctcactcgcccctcctgttcaaaaaaaaaaaaaaaaaaaaaaaaaa

SEQ ID NO: 8964 - DNA, 401 bp, Cricetulus griseus
gaaaaataatgaattccagaagataacaaataaaggaaggaaaagacccagtttgtcattgacgcaggtcagaaacattttgggtacaactatatgtaagtcttgtggcatgatctatactgcttccaaccctgaagacgaagtgcaacatctccagtaccaccatagatttctggagggaattaaatatgtgggttggaagagagaacgggtagtagcagagtttttgggatgggaagatgtagtgggatgtttaatagcagagcccatcaaacaggccttttcgtgttctgtcagaaccaaatgccactaaagaatcttctagagcttggcagtgtttcagatgtaccagaacctgcaatctgtggaataagtagaatctgggtcttcagattgaaaag

SEQ ID NO: 8965 - DNA, 401 bp, Cricetulus griseus
ctgcagtacttcgccgtgaccaacaacaacatcgagatgctgccaggacgggctgttccagtgcaagaagcttcagtgtctgcttttaggggaaaaaaacagcctaacatatctgtcccctctgggtgggggagctgtcaaacctcacccacctggaactcactgggaattacctggagacactgcctccagagctggaagggtgtcaggccctgaaacggagctgtctgattgttgaggacagtttgctcaatactcttccgctgcctgtgacagaacgtttgcagacgtgcttagacaaatgttgacctagagattagacccagcaaaagcgtttgaaagcagggtcccggggcttaaaggagaaagaattttcctaagttatgtagatgaaaaatggc

SEQ ID NO: 8966 - DNA, 401 bp, Cricetulus griseus
agatagagattttgagggaaagagactactactctggtgagacatcggcttcccgcgtgccttttcagaagaggccttcaagaagacctttcatcctcacacggagcgctgcccaagcacaaatctttggagctgggtacccaagtatggcgactatgacggtgaacgactggtatgagcagcatcagaaatgtacggatttaccatcaggtcaggaagtcgaaaaggaagcatcaccacctgaatcccatagagcatctcagaaagaagagaaggagcaggagcaaaaggaagaagaggaagatgaagacgcccgccacagaatgcagcagtgggatgactggaaggacaccccatcccaggggctatggcaaccgacagaacatgggctaacctcccct

SEQ ID NO: 8967 - DNA, 400 bp, Cricetulus griseus
gaaattaaattccagacaaagctgactatcaacttttcagggatgctttcgtttctcagtggctccacagtggatgtgaacatcacggtccccttggatttgcaccagactgagcctggccaactctcattttccgtgaagagctgccaggctgtattcactgggatccaagtgaatacaggcacgttctccagaatgatggaatcgatggttaaatggtccttgaacatttccttgcccaatatattgtgcccagtggtccgattctggttctacatcatcaaccaacaattgaccgttctgaaaaatattgcctcacttgggatgtcagggaacagcaacttgcccattaccccacagcccatgttgtatgaaccgctcttatcacatggaccttaag

SEQ ID NO: 8968 - DNA, 400 bp, Cricetulus griseus
gagctcacccagcagctggcgcaggccaccggcaagccggcccagtacatcgcagtgcacgtggtcccggaccagctcatgacttttagcggctctagcgacccctgcgccctgtgcagcctgcatagtatcggcaagatcggcggcgcgcagaaccgcacctacagcaagctgctgtgcggcctgctggctgatcgcctgcacatcagcccggaccggatctacatcaattattacgacatgagcgcggccaacgtgggctggaacggctccaccttcgcttgagtgccggcctaacttacctgcgccgccgtttcttggagccttgctgcacgcagcgttctgttttcgtccacccctggcgacgcccaccttccgatcgggagaaataaatggttta

SEQ ID NO: 8969 - DNA, 400 bp, Cricetulus griseus
cgcagacgcggaagcttccggtagccggcgcctgaggccgcgtgggcactagctcgccgcgggtggcaccctttcccaggtctggcctcagcatggccaccctgctcgtgagaagcacggtggcttcgctcatgcatccgctcctacacctgagccgcttcgcggtgaggccccgggccttctcctcattcctcttggggactcttccaagcgccagaccctgcgcagaggcgcgctcacttctctggggccgccccgtgccgcacctgcagcttacacagggcttcaagaccaagggtgtcctcaggaagcgctgcagggactgctacatggtaaagaggcgtgggcgctggttcgtgctctgtaagaccaaccccaggcataagcagaggcaaatgta

SEQ ID NO: 8970 - DNA, 400 bp, Cricetulus griseus
aggagatcaagagcaacaagaccattctgcacttggccgtacaggctgctaacccaccctggttcagttgctgctggggctgccaggggggacctgcgagcctttgtcaatatgaaggcccatgggaacacagccctgcacatggcagctgccctgccccctgggccaccccaggaggccattgtgaggcatctgctggcagctggagcagacccaacgcttcgcaacctagagaacgagcagcccgttcacttgctgcgacctgggccgggccctgaggggctccggcagctgttgaagaggagccgtgcggcacccccaggcttgtcctcttaggactgaaatccagaacctggactgattttccagtccccaccgtcccgtgggacagccagcgtat

SEQ ID NO: 8971 - DNA, 400 bp, Cricetulus griseus
atccgagtcatcatgaagagctctcctgaggtgtccagcatcaaccaggaggcgctggtgctcacggccaaggccacggaactctttgttcagtatctagccacctgttcctacagacacggcagtggcaaaaccaagaaagcactgacatacagtgacttagccagcactgcagaggactcagagtacccttcagtttctctcagatatattaccaaagaagattttagctagtaagtacctgaaaatgctcaaagagaagagggaggaagaagaggaagaagatgacgatggtgaaagtgacattggtgaagttctggcttaagccagcaaggagtggtctcagcctggtgagcaggtgcaagaatagactcacagctgggcagtggtgggcactgca

SEQ ID NO: 8972 - DNA, 400 bp, Cricetulus griseus
agaacttacgaagagcttgcttcaaggtgcccagaattgtgaagacatagtggtggatgcttctttatcttttctggatggttttgtggctgaagggctcagtcagggagcagcaccttacaagccccatcaccagcgccaagaggaacagctttctcagggaaaagttctcaattttgaaccatatggactatcattttcttcatctggcttcactggacgacagtctcctgctggcatttctctgggctcagatatatctggaaatagtgctgaaacgggactgaaagagaggtggtggtggtggtggtggtgcacgcccttaatcccagcactcaagaggcagaggcaggcggatctctgagagaaaccctacgtctcaaaaaaaaaaaaaaaaaag

SEQ ID NO: 8973 - DNA, 399 bp, Cricetulus griseus
ttggctactttaacaaccttaaagcgcactccaggaatatcacctacggcatgaccttttcgtaccaaaccccaacgcaaccagaacttcatcggtttcctcgatgaagttcaagcagccatcattgggcacgaaagctgtgatcttcttgccgttcttgatgagctgaaccctgacacacttccggatagcagaatttggcctgttttggccctcaacccctactttttccagtacaattcccttcgcatgagaggcacctccgaaaggattggccttcagggctgtgcccaagtgggctttcttgtattgtttgtcatgccatttctggtcccgccggtgactgcggagcttcctggcagtacggagaccacgacacttgcccatcttgccggcgcc

SEQ ID NO: 8974 - DNA, 399 bp, Cricetulus griseus
gactttaaacatggacaccgcggattctggtcctggggaatcttcctcactagacgctccagggtcccaggacgatcgactcttcctgattaaaggtggaatttttcctcggttctgcagcagcagcgggaatgctagccggatttgttacaacattatcattagctaaaaagaaaagccctgaatggttcaataagggcactatgagcacatctgcctttccagagagtgggtcttcccttgctcttcgagccctgggctggggatctctttatgcctggtgtggggtcggcgtgatcagctttgcagtctggaaagctttgggagttcacagtatgcaggactttcgaagtaagatgcaatccatattccaacaattcccaagaactccgagtcagc

SEQ ID NO: 8975 - DNA, 399 bp, Cricetulus griseus
  modified_base (391)..(391): a, c, t, g, unknown or other
gaactcgcggatgcggtcgggggcgggccttctgcctctcactaccggccggcggtaagtgcggagtcggaaattgcgccatcggtctgcgccgactctctgcgcgttcgcccccagtgcggaggtgctcggtgctgctatggcttctagcggggtgacggtgagcgcctcgggcgcggccagcgaggcccccgaagttccagacaacgtgggagactggctccgcggtgtctaccgcttcgccacggataggaacgacttcaggaggaacttgatcctcaatttgggactgtttgctgcgggagtttggctggccaggaacttaagtgacattgatttgatggcacctcagccaggggtgtagccaaaataatgtcttcacataaaaaanaaaaaaaa

SEQ ID NO: 8976 - DNA, 398 bp, Cricetulus griseus
aagggctttgtcaaacagtctaaacttctggaacacatgaggacacacacaggggagaagccttttcagtgtcccaagtgtgacaagagtttccgattgaaggctcagctgctcagccatcagggcctgcatacaggcgagagacctttccactgccctgaatgtgataaaaacttccgggaaaggggtcacatgctgaggcaccagcgcatccacaggccccgagaggccctttgcctgtggagactgtgggaaaggttttattataagtccaaactagctgagcacattagagtacacacaaaatcttgccaggttccacatgagcctggcattaagaaaaggcttgtccagctgtttgcaatgatagaggctgactggagttgagggtggggggg

SEQ ID NO: 8977 - DNA, 398 bp, Cricetulus griseus
tgttccgccaagccagtgaccgggaagccgtctatgcctgctttactttctcccactggctagtgtatgccaacagtgccgccaaccccatcatctacaacttcctcagtggcaaatttcgggagcagtttaaggccgccttctcttgctgcttgcctggtttgggtccccgctcctctgccagacacaagtccgtgtctttgcagagccggtgttctgtctccaaagtctctgagcatgtcctgctgaccagcgtcaccacagtgctgtcctaagtgggggcccgcccaggctctgggaggcacagcccagtcctttgcctgggatccgccccagcactcatgaaaagactgctgctgctcagcgagaggttgtgactccagtcctggctttctgcc

SEQ ID NO: 8978 - DNA, 398 bp, Cricetulus griseus
  modified_base (210)..(210): a, c, t, g, unknown or other
cttgtgcctgagccccggtgtccccatctgctgtggagatggatgaggatgggcttcctcttatggggtcaggcatagacctgaccaaggtgccagctattcaacagaaaaaggaccgtggccttttctaaaccagttttgtggttgcacacggtgcagtttctcaaccggttttccacagtttgtgaggagaaactggcagacctttcncttcgtattcaacaaattgaaacaactctcaatattttggatgcaaagctgtcatctatcccaggcctagaggatgtcacagttgaagtgtctcctctaagtgtcactgctgtcccaaatgaatcacattctgaaagcactgcagagcagccacagcaggacaatacacaagactctggaccacagga

SEQ ID NO: 8979 - DNA, 398 bp, Cricetulus griseus
agtttcctcttcattctggtaacatgccggcggcgcctctcgcgccgaacgcaaagtctccccgccgcaggaggaagacccacgctttctggtggtgtttcctgggcatctgcgcagaggcccttctgttcctgctgtctactttatcagatgcctgtgaactacccccagcgtttgcagctatggaactcaaggacgagcctaaaccctactacgaggttggagagacaatacagtatggatgtaaaaagggttacgtttatctgcttccgttctccatggtcgctacctgtgagccgaatcacacatgggtccctatttcagatgacggttgtagttaaagtaaaatgtgctagattacaggacccttcatttggccaagtacactacatagatgg

SEQ ID NO: 8980 - DNA, 398 bp, Cricetulus griseus
gctagtcattttgtcaaatgcatgtagtgacagcccccaaaggactccacacacaagccagggaacacgaactggaaaggtaccccttctctagggacaccaactagaggctctgtagactccaagcccaataccccaaagtaatgctccagtgtcctcgtgtgtgactgtgtgtgtatgcctgtgtctgggatccagggcaaatgtgaattttctttttatttgggagattgttcacaggaaatagtcctctcctctcttgtccttctattgattgtttacaatatttgtacatctatgcaaaatacttgaatgggccatggtgccttgttttttattgttgtttttgtttttttctccttgtttgtatttaattaaaacaaattgtcattagaaaa

SEQ ID NO: 8981 - DNA, 397 bp, Cricetulus griseus
atgactttttaaaagacaagatactctgggtcacatgtacagatgctcttctgggtgccaggccagcagacacagcttggaagaccaagggaaatggggtagaccaccgtgtccacacctagaaagatagctttgggcaggggtggccgtcttggccgcctaccctagctccctggagtttctagaagaactgttggcccatgtgacatatgtgtttcccctttcatgctggtgggtgagtgacagttggtgggggcgggaggtgggacccgagaggatgtataagtacagattttaaaaaaggaactcatttaaacttcctggctcctgttcagatggtggtgaggctcctgtgtgggctgactttctaaaggtcacgccaacaccccccccaccc

SEQ ID NO: 8982 - DNA, 397 bp, Cricetulus griseus
gggtcccctgtggtcacccagcaagccacattcaatggttttgtccaaattctgtagacacttgaactctgttttagggattcttcatcgtgaagaagcagttcagtgctccaaactctgtgtattacgacggtctcttcgtctatagtatttatgttaagattatgcgggtaatagacagtaaaataacccaaccttaaatgaagaccttgtatcacagaatacatctggctatgtgatttttttaatttaaagcaagacttgctttactataaataagtggattaattaaatgcaggcaaaattgtgacgtttttttgggaaagatagcatgctatttgtgtgcaagtacctgtcagtaacacccgccccagtttcttcttaaaaataaaaaaaa

SEQ ID NO: 8983 - DNA, 397 bp, Cricetulus griseus
ctctccatctccagctccctcacatccaaggcccttgtggttcctgcccccgctgcaaagctctacccccaacagcttggatgtcctgagtaagaagaacagcaatgttttctggcagccagaagaaaaggcaataagggtggaaaaggatgagtgtgaggcttgtacagatatgttgaaaacagttgatgggaaaggtgaaaagagacactttgagctggccagctgcctgaaggtcaccgacatactgcctttccctccacctgtggcccggacacagctgctggcagcagagtcctcgaagtgctgcctgcactggtcccttctgccccagaaaagctctatgttctcatccagccccgccaacatccactatcttgccaccttgcagcttttg

SEQ ID NO: 8984 - DNA, 397 bp, Cricetulus griseus
gcctcaccgctgtgtgtctagctcttcctaggactgcttcgcctcggggctcaggtttcaacagacctcttcaagatgccgtctcagatggagcatgccatggaaaccatgatgcttacatttcacagatttgcgggcgataaagactacttaacaaaggaggacctcagagtgctcatggaaagggagttccctgggtttttggaaaatcaaaaggatcccctggctgtggacaaaataatgaaggacctggaccagtgccgagatggcaaagtgggcttccagagctttttatcactggttgcagggctcatcattgcatgcaatgactattttgtagtacacatgaagcagaagggaaagaagtaggccacatggagccctggtcctccctccc

SEQ ID NO: 8985 - DNA, 397 bp, Cricetulus griseus
tgaagaagaccaccggcctgatggggttggctgtgtgcgacactccacacgagaggctaaccattctgtatacaaagattctcgatattatgaaacacttccctaagcatgcagcctatagaaaatacacagaacagatcaccagtgagaagctggacatggtcaaagcggaaccagatgttaaaaaattagaaaacttgcttcagggtggcgaagtagaagaggtgatcattcaggctgaaaacgaactaagcctggcaaggaaaatgttgcagtggaagccatgggagccaccgggtggaagagcctcctgccaaccagtgggaagtggccaatatgatcccagtttctgatggttgatgaagaattatatagtgcaattaaatgttctgttatg

SEQ ID NO: 8986 - DNA, 397 bp, Cricetulus griseus
accatgagttccggtgcgttgcccaaaccccagatgcgcggtctcctggccaggcgcctgcgggttcacatcgtcggcgccttcctcacggccctgggtgtcgccgccgcctataagtttggtgtagctgagcccaggaagaaggcgtatgcagatttctacagggattatgactccatgaaggacttcgaagagatgaaggcggctggaatcttccagagtacaaagtgacttcagaatgtacagaattctttggattgcactcgatagaagttcatcgctgacctatgttcctgaactatgaaacgggaatatgtggactaaggagtaatttatctcaaaaaacaataaacgaacattttataggaaataaaaaaaaaaaaaaaaaaaaaaaaaa

SEQ ID NO: 8987 - DNA, 397 bp, Cricetulus griseus
aaaaagcctatggttgggagaaaatctgcatattgggtgactgttctggggttgtgggtgacagcggagtgaagctgtgctttgaagcagacctgttgatccacgaggcgactctggatgattcccagatggacaaagcaaaagagcatggccacagcacgccacagatggcagcagcatttgcgaagctgtgccgtgccaagaggctggttctgactcacttcagtcagaggtacaaaccgacggccttggctagagaaggggagacagatggcatcgcagaactgaaaaaagcaagctgaggcagtgttaggcctccaagaagtaactctagcagtaggattttatgtgatcggcattccaaatcaagaaatgaaaccagtgctcctgaatgcat

SEQ ID NO: 8988 - DNA, 397 bp, Cricetulus griseus
tacggcccctatgataaccagcggctgctcctggagtacggctttgtctctgtctgcaatcctcacgcctgcgttcctgtcccaggagagacgctggttaagtacctcccagcagcagacaaacaggcgcacaagaagatgtccattctgaaggaccgaggcttttacagaaaatttgacatttggatgggatgggccatcttggaggttgttcacagctctgaagttgctctgtctggaagctgagaaatttatgtcctggaaaaaagtctccttggtgaagtaatctcagatacaaatgagaagacaagcttgggcatggcccagaggatatgctctgacttcatcgaggagactcaggctgtgcttcgcaaggtttctgacttgaaggagggga

SEQ ID NO: 8989 - DNA, 396 bp, Cricetulus griseus
  modified_base (330)..(330): a, c, t, g, unknown or other
ttcagaaaggaactcaactctatgtggcctggaagaagcctaaaacagtcatttactggctggcagaggtgaaagactacaatgtagagatctgcctctcccaggagcatcaagcttaccgctggctagggctggaagaggcctgccagttggctcagttcaatgagatgcaggcaacactccaagaaggacaccacttcctctgctccacaccggtgtgagctgactgcaacacatgcttccatttcacctttgagggtcttctgaaatgaacccatcctccatccagggaaggatgtgctggtccttggcttgaaaaaaaaaaaaaanaaaaaaaaaaaaaaaaaaaaaaaaaaaaaaaaaaaaaaaaaaaaaaaaaaaaaaaaaaaaaaaaaa

SEQ ID NO: 8990 - DNA, 396 bp, Cricetulus griseus
  modified_base (90)..(90): a, c, t, g, unknown or other
  modified_base (219)..(219): a, c, t, g, unknown or other
aacagaagagagtgacaacctcatctgtgtggcatatcgccatcagtttgatgtggtaaatgagagcacaggagtaagcctttaggctgnaccatgtagaggccaacaaggttaattttgttgcagctattgatgtgtatgaagatggagaagccggcctgctcctatgctacaactacagctgcatctataaaaaggtttgcccctttaatggtggcncttttttgcttcaaccctcggcatcggatttccagttctgttggaaccaggctccatatgcaattgtctgcgccttcccatacctcctggccttcaccaccgactccatggagatccgcctggtggtaaatgggaacctggtccacacagcaattgtgccacagctgcagctcgtgg

SEQ ID NO: 8991 - DNA, 396 bp, Cricetulus griseus
gtgtgcggcggaagaagaagaaaaggatgacatgaaaatggagactgaaattaagagaaacaaaaagactcttctagaccaaaatggacagtacccagtatggatgaaccagaggcagagaaaaagactgaaggcaaagagagaagaaaaaacgggggaaagcaaagccaaggcagccaagggcctggcctggtagtaccttaaaaactggaaagcaggctgggcagtgttggtgcaccctttaatcacagcactcaagaggcagaggcaggtggatctctgtgagttcaaggccagcctggtctacagagcaagtgccagaacagccagggctccaaagctacacagagagaacacctgtcaggaaaaaacaaaacaaaacaaaaaaaaaaaaaa

SEQ ID NO: 8992 - DNA, 395 bp, Cricetulus griseus
atgaagaagctgatctccgcagggccattcagcttagtatgcaaggtagttccagaagtatgtctcaagatagtccccagacatccagtaccagtcttacttcagaagagctgcggaagaggagagaagcctactttgaaaagcagcagcagcaggagttagacccacctagacagcttccatatgcttgtgaaagaccgaccccaagttcgaaggggggactgggaaaacagccaaggtgatgcctcgagagaagaagacatgcttcgggcagctgtaaacatgttctttaagaaactgactaaaagaattaatttagaaagcaagaaaaagaaaaaaataataacttccagatgtgaaaagatgagacagtggagtccaaggagacattgtag

SEQ ID NO: 8993 - DNA, 395 bp, Cricetulus griseus
aagatcccatggctggaagttatggtgtgatgggtgatgatggttctatggattacacagtccacgaagcctggaatgaagccaccaatgtgtacttgatagtgatccttgttagctttggtctcttcatgtatgccaagaggaataaaaggaaaattatgagaatctttagtgtgccaccttcagaagaaaccttgtcagagcccaatttttatgacacaatgagcaaaattcgcttaagacaacagttggaaatgcattccatttcaagaaagtatgagtaccaacaaccacagagccaagctgacagcgtgcagctctcgttggaatgaaacttcagactcagcacctgaagtgattaaagttcactgaaaacccaaaaaaaaaaaaaaaaa

SEQ ID NO: 8994 - DNA, 395 bp, Cricetulus griseus
tttggaccgccctccatggggttatgtacaggcgatgaagccacctggttcccagggctctcagagcacctacacggacttgctgtctgtcatagaggagatgggaaaagagatccggcccaccttattgctggtagcaagagtgctatggagcgcctgaagagaggcatcatccatgcacgggcactggtcagagagtgcttggcagagacagaacgcaacgcccgcacgtaacaggaagcaccttggccttttcatcgggacctttccggccactgcagagcacctgcttctccttggccttcaccccaagttgcttcctatcctgggcttcctgtcctgtgtcccttgggggcatcctccaggaaccaggtagcagatcttcctccagttgg

SEQ ID NO: 8995 - DNA, 395 bp, Cricetulus griseus
  modified_base (365)..(365): a, c, t, g, unknown or other
ggcggagaaccatggcagctctggttaccgtgtgcgctggtgtagggaggaaaagcttgacaccggctgcagtctgcctcgcggatcgcggagctcacaccgtgctgtggagaagaggttgttcacagtataaacaggtagccagcaatgaggacctgccaatcccgatggaaaacccctataaggagccccttaagaagtgtatcttgtgcgagaaacaggttgattataagaatatacagcttttgtcccagtttatttctccatttactggatgcatttacggaaggcacataacaggtctttgtggaaagaaacagaaagaaataacaaaagccattaagagagctcagaaaatgggttangccggttacatacaaggatcctgcatatct

SEQ ID NO: 8996 - DNA, 394 bp, Cricetulus griseus
ctcatcgacgtgacactgaatatgcttccactggtcaaaaaagctcgagggcgtgttatcaatgtctccagcattggaggcaggcttgcattcggcggagggggctacactccatccaaatatgcggtggaaggtttcaatgacagcttaaggcgggacatgaaagcttttggtgtgcatgtctcatgtattgaaccaggactgttcaaaacacaactggcagatccaatcaagacaactgaaaaaaactgccgtttggaaacacctgtctccagacatcaagcaacaatatggagaaggctacattagaaaaaagtctaacacaaactgaaaaagtaatacatcctttgtgaacttggacctctctctagtggtagagtgcatggaccacgct

SEQ ID NO: 8997 - DNA, 393 bp, Cricetulus griseus
ggatgagatattcaccaagttattctgttgcttccctatgtcggcaatgagctgaacatgatcatcatgtcttccagatgagcacattgacttgagaacggtggaaaaggaaataacttatgagaaattcatggagtggacaaggctggacaagatggacgaagaaaaggtggaggttttcctcccacggttttaaactggaggagaattatgacatgaaggatgtcctatgcaagctgggcatgactgatgcctttgaggaggacagggcagacttttctggaactgtctttccaaaaaaggccctgtttcctgtcccaaggttgtgcacaagtccttgtggaggtcaacgaggagggcaccagaggctgcagctgccacggctgccattat

SEQ ID NO: 8998 - DNA, 393 bp, Cricetulus griseus
ctagttctagatcacgattgaggtccaactcaaaatggcaacatacttcctttgcccagagaaaagaaataaaaatgaaccaaaggatttttccagggggaaaaaaaagcacagaaggccatgactcagttcttaggtgtgtatgcttttgaacatcttaagaattctagtaaaaatcaagtcttttccagttgcactctatttcaaggaattgttattgttccttttgtcaccattaaaatcagtgttgggaattaaattataatttgagggacaactcttaccccatgagaatgaatgtagacggctaaacgattcttactcagtgtggtgtatatttcaacagggatccttgtaagttgtcatatgccaataaaatgtcctaagtggtaa

SEQ ID NO: 8999 - DNA, 393 bp, Cricetulus griseus
  modified_base (58)..(58): a, c, t, g, unknown or other
  modified_base (138)..(138): a, c, t, g, unknown or other
gcagcagggcctccgggagggccctggggctgctccgcgccctcgtgccgtgactggntccagccggacgttcacacgaaggagcagatgctggagctgctggtgctggagcagttcctgagtgccctccccgcaganacccaggcctgggtgtgcagccgccggccccagagtggggaggaggccgtggcattgctggaggagctctggggcccagcagcctccccagatcggtcctcagcaatgagggcaccccgggatatgacggaaggctcgggggtcactgttggaaaggaagaaagtggggcgattcccgtagggaccggggcgtcggggacagaggcgcccgccgcggggacggcggggacggcggcgcgcccctacaagcaggag

SEQ ID NO: 9000 - DNA, 393 bp, Cricetulus griseus
ggtctgacagtgctttcataagacaaacaaaatctcccaatcagctttagtctaaagtcctaaaggaaactaccattttgaccgtcaggaattgaaatctttagccaagctgataggtgcaattaattatgtctttatgccttaccctaagtggtagctaaagttctcttgctgtttttcttggatgtgttttaactagaacagaactcggggcacagcatccatcacagggatgaaaatggccttgtacagcctgtcattctcattcttggtaataaaaaagcaaaaacaaaaccattgaatccgtactttaaaaaaaagtaaacttgaaaaaaaaaaaaaaaaaaaaaaaaaaaaaaaaaaaaaaaaaaaaaaaaaaaaaaaaaaaaaaaa

SEQ ID NO: 9001 - DNA, 392 bp, Cricetulus griseus
gtacttcatacttaacagacattgtgtggtgggctggcacaattgcaatggctgttggccagattggaaacttcctagcatacaccgcggtccctacagtcctggtgactcccttgggtgcccttggagtaccatttgggtccttcttgggcatggcctgtggatttacaactgtctccgtgggaattgtccttatacaagtgttcaaagaattcaatttaaccttgggagatgaataaatccaatatgaaaacagactaagatgcaacggagggttgggggcttaaagagcaggccttggagggggtctgtggttttgactagatgccaagcagaaaagactctcagtgagagttgcctgtgttctaactaatgatctagtggacaatagg

SEQ ID NO: 9002 - DNA, 392 bp, Cricetulus griseus
ccgcctcagacagcacagcctgactggatcagatgaaggagaagatattccagtgatcccggatctggaagatgtgcaggaggaagatttcgtgctgcaggtggcgtcccctccaagcatccaggtaaacagagtgatgacctaccgtgacctggacaatgacctcatgaagtactcagcctttcagactttggatggagaaattgacctgaagctcctcaccaaagtgctggcgccagagcatgaagttcgagaggatgatgtgggctgggactgggaccatctgtacactgaggtgtcatcagagctcctcacggagtgggacctgctgcgggcagagaaggaagaccctgggggaccatcccaggtatacatgacccagcatcgtcact

SEQ ID NO: 9003 - DNA, 392 bp, Cricetulus griseus
cgagatgcaagccgggaagcctgtcctctattcctatttccgaagctcctgttcatggagagttcgaatagctctggcactgaaaaggcattgactatgaaataagtagcccatcaacctcataaaggatggggggcaacagttctcagaggaatttcagaccctgaatcccatgaaacaagtgccaatcctgaagatcgacggaatcaccattggccagtcactggccatcatggagtacctggaagaaactcggcccaccccacgtctcctgcctcaggacccaaagaaaaaagccattgtgcgcatgatttctgacctcatcgctagtggcatccagcccattcagaacctgtctgtcctgaagcaagtgggacaggagaaccagatgc

SEQ ID NO: 9004 - DNA, 392 bp, Cricetulus griseus
atgatggcagcctgtgacccccgcctacggccgatacctcaccgtggctgccgtcttccgtgggcggatgtccatgaaggaggtggacgagcagatgctgaacgtgcagaacaagaacagcagctactttgtagagtggatccccaacaacgtcaagaccgccgtctgcgacatcccaccacgcggcctcaagatggccgtcaccttcattggcaacagcacggccatccaggagctcttcaagcgcatctccgagcagttcacggccatgttccgccggaaggccttcctgcactggtacaccggcgagggcatggacgagatggagttcactgaagccgagagcaacatgaacgacctcgtctaccgagtaccagcagtaccaggatgcc

SEQ ID NO: 9005 - DNA, 392 bp, Cricetulus griseus
catctgtttgtagataagcctcctaatgattattagaatatttgactcattatactgtaaaattgtttaaccgatacgtttgtctgatgctcgaatataccctgctatgatttgcaatgaaaatgttagtgatttgaaatgtttttccataatacagagcattggtgaataccagaatttaatttccatacttgtacacataggacttttcttcagctgtctactccaggcaagccattccttaaggcatcttgtataattacaaaagaaaaataggcaaatgtagaaacagtttcaatatattttaggattctggtatgtagtgttttgttgaatcctatggctgtcaagaccaattgctatagtttacagttagacatttcatcactttt

SEQ ID NO: 9006 - DNA, 392 bp, Cricetulus griseus
cacacactaccggcacagaggacagaggcgaagacaccggcagagtgaccaataggcactgagtgccggagtagagtggcggggagtcagccaatcggcgaggcgcccctcgtgagtgacctggcatgcagcctacaaacggcccgtgggggcggagcctaggtctcgggccccattgcgagctatgggaggcggctggtggtgggctcgggtcgcgcgcctggcccgcctgcgcttccgggggtcgctgctgccaccgcagcggccccgcagcgggggctcgcgcggatccttcgcccccggccacggcccgcgcgtggggcctcgccgcccccggtgtctgagctcgatcgcgcggacgcctggctcctccgcaaggcacacgaggacag

SEQ ID NO: 9007 - DNA, 391 bp, Cricetulus griseus
cttagataacgccaacaacagcaattataagaatgatgtgatgataagaaaagaggcctatgttcacaagagtgtaatggaagaactgaagagaattattgatgacagtgaaataacaaaagaggacgatgctttgtggccaccccctgacagggttggcagacaggaacttgaaattgtgattggggatgaacacatttcttttaccacatcaaaaataggttctcttattgatgtcaatcaatccaaggatcctgaaggcctccgtgtattttactatttggtgcaggacttgaaatgcttagtgttcagtctcattggacttcatttcaagattaagccaatttgaatgggatacttttgaggttatttatatatttaattaaaggaa

SEQ ID NO: 9008 - DNA, 391 bp, Cricetulus griseus
ggctgaatttgacaaagctgctgaggaggtgaagcgcctcaagacccagccaactgatgaagagatgctcttcatctacagccactttaaacaagccactgtaggtgatgtaaatacagatcggcccgggcttttggacctcaaaggcaaggccaagtgggattcctggaataaacttaaaggaacttccaaggaaagtgccatgaaaacctatgtggagaaagtggaagagctgaagaagaaatacggaatataataagccagatttggtggccagccgcacatgtgacccatgagacccatgaggacataatgccttgttttttcaatgtagataatatggttctgataaattagagccagaattaatcgctgatcctcctccctgtgt

SEQ ID NO: 9009 - DNA, 391 bp, Cricetulus griseus
agcaaggtcgtgaagaaagccgggtccgttgccggggcagtttcttccgccttccagctctgcgggcctcgcggagcctcctgcggcgccatgttgggccagagtgtccggaggttcaccacctccgtggtccgtcgcagccactatgaggagggcccgggaaagaatttgccattttcagtggaaacaagtggcggttactggctatgatgactgtgtactttggatctggatttgccgctcccttctttatagtaaggcaccaactactcaaaaaatgaggatatttaattcatctctctaacagaatgaagattgtttaagagatatgatctgaaaattggattaaactcttgaactcttattactaaataaaattgtaaataaacta

SEQ ID NO: 9010 - DNA, 390 bp, Cricetulus griseus
  modified_base (356)..(356): a, c, t, g, unknown or other
aaaaagaaaatagaaaaaccaaaaaaaagttttataggagactgtcatggagaaaaggactcagtttacttttgccattttcacaggggaaccttttaaaacaatcttcagcagcagacacctttaaccctaataatctcaggccttgatgaaaatactatattttgtagattatggttaaagggagaaaattagttcagtaagataaatatgagctccatttaacttctctccatttaacttctgatatctggtttagcattacatgatgtgttgatcatatgctctgcttttgtctaaagatgcaatagtatcattatcaatttcagaaagatggactgaatatgctttttggngatgaaatctatgtacgatatttatagtgatgtg

SEQ ID NO: 9011 - DNA, 390 bp, Cricetulus griseus
cagctctgcacaaggcatgttttggaggcagggaggtaataatcaatctcttgctggaatttgaagcaaatgctaacattttaacaagaaatggggaatcgccaatttatatgtaccttcagcgcaggtccaatatcagagatgaaatgcttctggctaggctactttatcatacctaccctttaaggctgagcaataagcaagggattctacctgcaggaatcatgcaaccagaattccagttcttaagggaaactctaataaatttaacgaaaaaacctttatccttagaggacatctgtaagagaaacatcagaaatgttttcggtgagaagtacaaaattctaccttgaagcaacatctccctgggaagctatggaactccatata

SEQ ID NO: 9012 - DNA, 389 bp, Cricetulus griseus
gctgcagggacatgctctcctctcttgacaaagagacctttgcctatgatctctccgcagtggtcatgcagtcacgggaaaggggtttgggctcaggacactacacagcctattgctacaacacagagggaggtttttgggtccgactgcaatgactcaaagctggatgtgtgcagtgtcgaggaagtgtgcaaaacccaggcctacatcctttttacactcgaagaacagttcagggcagtgcaagactctcacgaaccccaactccgagctcaggtgcagtccagcagcaaggacgaaggcagaacatacacattcccctgactaggaggcatgcatcaaaatgtccttacatttttcctcttgggacttacagctctaatcagcca

SEQ ID NO: 9013 - DNA, 389 bp, Cricetulus griseus
cgacgacgacgacgacgacgacgacgactcatggcactgtcccttggccctcaaggtgaacccactccctgcttcgcctggacctggaccgcgagccaagaaggaggcggtgaagaccttcattgagacgcagaaagccctgctggctgagatccagaacggctgcaagcgcaacttcgtgctggtgcgcgagcgggagaagcagccgctgcagccggcggcctccatgcccgagatcaccatcaccgcacccggcccctggacgagcctggggacctgccagccgcgggggcacagaatggggcccctggacctggacctggccccgactcggactcggactcggactcggacccggaccgggaggagcaggaggaggaggaggagga

SEQ ID NO: 9014 - DNA, 389 bp, Cricetulus griseus
ttctgtccgagctgtggaaacggactaattgtggaggagggacagcgttgccatcgtttcgcctgcaacacttgcccctacgtgcataatatcacacgcaaggtaacaaaccgaaagtatccaaagctgaaagaagtggatgatgtgcttggtggagcagctgcctgggagaatgtggactctactgcagagccatgtccaaaatgtgaacatccccgtgcctacttcatgcagcttcagacccgttctgcagatgagccaatgactaccttctacaagtgctgcaatgctcagtgtggacatcgctggagagactaagggcaggacttacccagctgcaagcatgaattttgtgtgctgaaggtctttgctgtatgataggaagctga

SEQ ID NO: 9015 - DNA, 389 bp, Cricetulus griseus
cggcggcggcggcacccacagcggcgaccggacgcgagcccaggcgaaagagaacctcagatcaaccgaaacatgtaaaaaagaagatgaccttgacagtctcattaatgaaatatttgaggagcctaactttgataacaagtcttttacaaaaattgaaatccagatcttcaagtaacacatctgtcagagcttccattcaaggcctcggtaaaagttgcagtccagtgtatctcagtggaagcaccattccatgtggaattggaacaaatacttcacagagagcatgtgaccaaactgcgttgtgtagcctgtgactttcggatagtgagctacaatgactatatgtggacgaagtacatgtgattactattcttctagaaacaaca

SEQ ID NO: 9016 - DNA, 389 bp, Cricetulus griseus
  modified_base (364)..(364): a, c, t, g, unknown or other
agaactctatgaatactgcattaaagaaggctatgcagacaaaaacctgattgcaaagtggaaaaagcagggctacgagaatctgtgctgcctacgctgcattcagactcgggacaccaactttgggacaaactgcatttgccgagttccgaaaagcaagctagaagtgggtcgcatcattgagtgcacgcattgtggctgccggggttgctctggctgacacccctctctacattctggactttggacctcgttggctcctgccttattgggctaccctcctcctgaggagctcttctcagagtggtgcctagagaagagacccagagggagcatgggctctacaggtgacctcctcaaaaanaaaaaaaaaaaaaaaaaaaaaaaaa

SEQ ID NO: 9017 - DNA, 388 bp, Cricetulus griseus
tatctatccatatatgcatatgtatatgtataatgtacacagacataatcacaaagcaggtggtcaggagattttcattctaatactcaaaggttcacactattgtgaaaggctttcaaaaagttgcttttcaaagacaatcattttgtttgtttctgttttaatattcttgtgacaaactaaaccggaaaagcagcatgtcagaaatacttttgttctatatagatctctctcttctctgtctctttttttaaatataaaagttcattttattttacctttactgataatgtgaaactctcaaaaatgctctcttttaagtatacagctgtaaactgttcaaagtaaatataacaataaaaaagatacccaaaataaaaaaaaaaaa

SEQ ID NO: 9018 - DNA, 388 bp, Cricetulus griseus
acatgagcccagggactccagggaaagagatggaggcttcaggatcttcttcccagtctgaagaggccagtggaatccacagagaaacagaagaactgactgagaacactgcctgatggcatctgagccagtccccaatgtgaccactgtaaccactgccatacctgagtccagaagacagacgacatgctggaagacaccaggaggccctgcctgggcaataaagagctctttccttccatgcggtctcagtgttggcaccagtgggcaggctctccctctgcagattaacgcatagtctctatggggaaagagagaagggatggtatataagtcagcagaaaggtcctgggacaccattgctcttaggggcaacatgagtcctggg

SEQ ID NO: 9019 - DNA, 388 bp, Cricetulus griseus
gcaacatggagctgcagaggatgattgctaatgtggatactaactccccacgagaggtcttcttccgtgtggcagctgacatgtttgctgatggcaacttcaactggggccgggttgttgcccttttctactttgctagcaaactggtgctcaaggccctgtgtaccaaagtgcccgagctaatcagaaccatcatgggctggacactggacttcctccgagagcggctgcttgtctggatccaagaccagggtggctgggatggcctcctctcatacttcgggacccccacctggcagacagtgactatctttgtggctggagtcctcactgcctcactcacgatctggaagaacatgggctgaggccctgcccgccgtcttggact

SEQ ID NO: 9020 - DNA, 387 bp, Cricetulus griseus
gccgctgctagaacgagtgatcgggtaccaagctggcgctgcgtgagattcgcatccacttatgtcagcgttcgccgggcagccagggtgtgagggatttcatccagcaacgttacgtggatctgaagaaagcgcaccccggccttcccattctaatccgcgaatgttcggaggtgcagcccaagctgtgggcccgctacgctttcggtcaagagaagaatgtgtctctgaacaacctaagtgctgatgaggtaaccagagccctggagaatgtgatgagtggcaaagcatgaaggactgtgagcaagagcaccagaacctgggctctactggactgaatacaatgtggggaaatgtggtctccctttccttataaagcttactgct

SEQ ID NO: 9021 - DNA, 387 bp, Cricetulus griseus
ctgttgggaattgcacctcagccttgaggtggcttgaacgctactattgcttccagggtaaccagttcctgcgcttcaacccagtcacaggagaggtgcctcccagataccctctggatgcccgtgactacttcatgccctgccctggcagaggccatggtagacacagaaatgcaactggtcacaggaatagcacccatcctatgcattcccgctgtagcccagatcctggcttgactgcattaatgtctgaccaccgtggtgccacctatgccttcactggctcccactactggcgtctggactccagccgtgatggttggcatagctggcccattgctcatcactgcccagggcctgcaacagtagatgctgccttttcctggg

SEQ ID NO: 9022 - DNA, 387 bp, Cricetulus griseus
gagtctgaaaatcttaacatcctttgtaagctgtttgggtcattttccctagaagccctcaaaagatttatatgagagatgtaataaggatattatttgggccacaacagaagagaatggagtgctacagcaaggccaaggaagcctaccgcatggggaagaagaatgtggccaccttttatgcccagcagggcagtcttcatgagcagaagatgaaagaagccaaccacccttcgctgctgtggagatcttcgagaaagtcaatgcctctctgttgcctcagaaaagaatttaagcagaatggtggtaagccctatctttctgtcgattacggggagaggaaaccacagccagggaggagttgctcgcatcaagccagctgtcatt

SEQ ID NO: 9023 - DNA, 387 bp, Cricetulus griseus
agaattctggcctcctcctgttgcagcagcaatattttaggatcagtgaacgtgtgcggctttgaacctgatcaggtcaaagtacgggtgaaagacggaaaggtctgtgtgtcagctgagagggagaacaggtacgactgcctcggatccaaaaagtacagttacatgaacatctgcaaagagttcagcttgccgccgtgtgtggacgagaaagacgtgacctactcctacgggctcggcagctgtgtcaagatcgaatctccatgctacccctgcacttccccctgcaacccctgcaacccctgcagtccctgcagcccctgcaacccctgcggaccctgcggaccctgcggaccctgcggaccctgcgacccttgcaacccctgc

SEQ ID NO: 9024 - DNA, 386 bp, Cricetulus griseus
catgagaggactcataccggagagaaaccctatgtgtgtaaacagtgtgggaaagcctttatgtatcacagctctcttcgttgccatgaacgaatccacaggggagagaaaccctatgtgtgcaagttctgtgggaaagcattcgctgatcacagttcccttcgatgccatgaaagaattcacactggtgagaaaccctatgtatgtaaacaatgtggaaatgaaaggattcacagtggagagaaacccatttgtatgtaaaacagtgttgggaaataccgttttatactttaagtgactgtcagagacatgaacaaattcacactggtgagaagccttatatttgcaagcaatgtgggaaagcctttactcgttccagttccctt

SEQ ID NO: 9025 - DNA, 386 bp, Cricetulus griseus
gtctgtactgcctggttttggcgtgtcaacctgacacaagctagagtcatcaaagagaaaggagcctcagctgaggaaatgcctccatgagatccagctgtaaggcatcttctcagttagtgatcaataggggaaagcccagctccagggtgggtggtaccatccctgggctggtggtcctgagttctagaagaaagcagactgagtaagccacaaaaagaaaaccagtaagcagcacccctccatggcatctaaatcagctcctgcctccaggatccagccctgtttaagttcctgtcctgactttcttccatgatgaacagcaatgctgaaagtgtaagcctaataaaccctttcctcccaacttgctttttagtcatggtgtt

SEQ ID NO: 9026 - DNA, 385 bp, Cricetulus griseus
  modified_base (321)..(321): a, c, t, g, unknown or other
tctccgtggaggtaggcctctgccgcaaacatgctccgccagatcctcgggcaagccaagaagcatcccagcttgattccgctcttcgtttttattggagcaggaggaactggagcagcactgtatgtgttgcgcctggcattgttcaacccagatgtcagctgggacaggaaaataaccctgagccttggaacaaactgggtcccaatgaccaatataagttctactcagtgaatgtggactacagcaaactgaagaaagaaggccctgacttctaaaccatgaagttcatcttaaagctgcttacaatgaaggtccctnagaagccatccgcacaattttccacttaaccaggaatactcctctgaatgcatgaaatcatgtt

SEQ ID NO: 9027 - DNA, 385 bp, Cricetulus griseus
taactttattttgaattgaatcctgttgaacttcaagtttgggggttactaaaaaaggctgtgaatttctggagatacagtttaaagattccatataaaatgttcaatatcagatataaagagcttcaaaatgtttaatactaaactatttggaaatagatttgttaactgtgtgtacacaataaaattttatgttttcttctcagaaaaggtcattgaaaccaaactgaacctcttttatagaaaacaatctatgttggatcaatgtactggcctcttattattatttccatgtggcagaaggacctacctgccatttgtccccatgttcactgtgcttactgggaaattattttctccatttgttttcatgaatctccatgac

SEQ ID NO: 9028 - DNA, 385 bp, Cricetulus griseus
tccatggagataatatttggcaggaataagaaagaacagctggagccggtgtcagccacagtgacaggcaagattccaacatggcttcaggggaccctgcttcgaaatgggcctgggatgcacacagtgggggatagcaagtacaaccattggtttgatggcctggcccttctccacagcttctccatcaaagacggggaggtcttctacaggagcaaaatacttgcagagcgatacctacaaacgccaaacattgaggccaaacaaaatcgtaggtgtcagagtttggaacaatggcatacccagacccgtgacaaaaacatcttctccaaagcttctcctacttgtcccacaccatcccagactttcacagacaactgcctga

SEQ ID NO: 9029 - DNA, 385 bp, Cricetulus griseus
ccttccacttctaggaccctcagtttcctcctccagaaaccctccccaatttcccgcctctgacagctgtctttaaatatgcaaactccacccatcctctcagaatcctttgcacaagaaaggccagtggtctccccactcccccacctttgccaatgtctgtgtctgtgactgacttggcttcctcttgtgccatgcttggcatatgtgatcctcgttcgtgccgcccgtggtaatgcgtacagtggcgctgtttgtgtggtctgcaccttgctccaacctccactccttgcctggacttgccccacccctcagcggctctgaaccccaagagaagagtcgggaagacaaaataaacaagcaaaggcccagacaaaaaaaaaaa

SEQ ID NO: 9030 - DNA, 384 bp, Cricetulus griseus
tctttgatgaatcgactcctgtgcagactcgacaacgtctaaacccacctggtgggaagactagtgacatatttgggtccccagtcactgccactgcacccctggcacacccaaacaagcccaaggatcatgttttgctctgtgaaggtgaagactctaaatctgacctgaacgctacaacaaactccacacccaaaggagaacagagcgagaagggaagctcaaaagaagcagaccatgccaaaataccagagcctacacctacagttgacagtcatgagcccagactggggccacgacctcgttcccacaacaaggtcctgaacccaccaggaggcaaatccagcatctccttctattgagaggctcctgctctacctgtaa

SEQ ID NO: 9031 - DNA, 384 bp, Cricetulus griseus
ccaggagaataagaagaagacagtggtggcctttgagactgacatcctcttcctgatacccaccgagatggctctggtccagcacaaaacccatgccaagagtggcaagacctattcttacctgttttcctacccttcacggatgcccatctaccccaaatggatgggagctgaccatgctgatgacctccagtatgtctttggaaagcccttcgccactccattgggctaccgggcccaagacaggactctctccaaggccatgattgcctactggaccaactttgctaggagtggggatcccaacatgggcaactcacccgtgcccacacactggtacccttatacattggagaatggcaactacctggacatcactaagac

SEQ ID NO: 9032 - DNA, 384 bp, Cricetulus griseus
agaggcactcagaatggtccagcgtttgacataccgacgtaggctttcctacaatacagcctccaacaaaactaggctgtctcgaacccctggcaacaggattgtttacctttataccaagaaggttgggaaagcacctaaatccgcatgcggtgtgtgcccaggcagacttcgaggggttcgtgctgtcagaccgaaagttcttatgagactgtctaagacaaagaagcatgtcagcagggcctacggtggctccatgtgtgccaagtgtgtccgtgacaggatcaagcgggctttccttattgaggagcagaaaattgttgtgaaagtgttgaaggcacaagcacagagccagaaagcaaaataaatctgcagtctttttaa

SEQ ID NO: 9033 - DNA, 384 bp, Cricetulus griseus
tcaaaattaagtagcagagtgctggcctaaagccaggcattggtaccgcctgcctttaatcccagcacctgggaggcagaggcaggtgggtctctgtgagtttgaggccagcctggtctccagagccgagtgccaggataggctccaaagctacacagagaaaccctgtctcgaaaaacaaacaaaacaaaacaaaagaatccaaaacaaaagctttaatcccagcacccaggaggtaaggcaggcagatctgagttcgaagccagcctggtctacacagtggaaaaaaaaaaaaaaaaaaaaaaaaaaaaaaaaaaaaaaaaaaaaaaaaaaaaaaaaaaaaaaaaaaaaaaaaaaaaaaaaaaaaaaaaaaaaaaaaaaaaa

SEQ ID NO: 9034 - DNA, 382 bp, Cricetulus griseus
  modified_base (373)..(373): a, c, t, g, unknown or other
atggaggaggatcacttcagcccatgagttctagtctgcactgaacaaaacaagcaagtacctttctcataaccacaaaaacaaaaatttaaactatgattgcctcaagaaatttcagcaatctcacctaaaaattgccccccatggttctgttgcttctataggcatacttgacaaatttcaagatgtgaaaccctgaattctgagtttatcttgagaatgtatatttaaagtcatttttagaattcatacttgaatttctaagtgtgtaatttatatgttttgtaatgtgtttgtatgaattatgagcatgtattttctaagtgtccaagttattggaatgtaatagatattatacatttggtaaaaaaanaaaaaaaaa

SEQ ID NO: 9035 - DNA, 381 bp, Cricetulus griseus
tttttttttttgtttttgttttttgttcttttatttttgtggaccaatgttatgtgaatgctaaagaagggcaggggtaaattagggcttgaatctctcgttctgcatagaccagcaaacttcccctctgcaaggcaggttcacatcacacacctaagagtgtctgcatcggaaacgctagtttgcttcagcccctagtaacctcagggcttggtttgggtattaaaggtagtcagctgaacgttttcatgagtaaatattgtcagccagaaaacagttggtgtcaggtaatgcatatttttttagctttgttttattatttatttttcatttcatttttattgggaatggttttcaaaagaactcttgagttctgctttg

SEQ ID NO: 9036 - DNA, 381 bp, Cricetulus griseus
ggcggcggcgttggctgggccgctgcgctctccacaggcgtgctgtggcggtgggctcgcgctgggatgagcgcgcgctgccgggccgcggagcggagtcatggccagtacagtggtagcggttggactgaccattgctgctgcaggatttgcaggccgttatgttttacaagccgtgaagcatgtggagcctcaagtaaaacaagtttttcaaagcctaccaaaatctgccttcagtggtgggtactatagaggtgggtttgaacccaaaatgacaaaacgcgaggcagcattaatactaggtgtcagccctactgccaataaagggaagatcagggatgctcaccgacggatcatgctcttaaaccacccagacaaggg

SEQ ID NO: 9037 - DNA, 381 bp, Cricetulus griseus
gaagctctcagtgttcctggccgtgatcatctgcctagtgactttcaccctcaccatctttttcctgtatccacgatccattgctgtgtatcctataggcctcaactcctccatggtgacctttgatgaaactcatatacgactcagcatgacgaacatcttgaacatctccaacagcaacttctaccccatcacggtgacaagactgactgcagaggttctccaccagacctctgtggtaggccaggtgaccagcagcctccgcctgcacatccgtcctttggctagtgaacagatgccttacaaagttgccagcagtattctggatgaaaacacatacaaaatctgtgcgcagctgaaagtcaaagtccaccatattct

SEQ ID NO: 9038 - DNA, 381 bp, Cricetulus griseus
tgttggggtgtccaaattttaattctgggagacatttctgggaggtgaaggtaggagagaagcctgaatgggctattggtgtctgcaaagccaatctgtccactgaggcaaggtggtcctctgtccctcggggatgctggaggattgtctggcagggtgactgctttgatgtctcaggagctgattcaaactttcagcaggccacaagagccaaacgcattggcattttcctggactatgagctgggagaggtttccttctatagcatgcccgagaaatctcacatctgtactttcagggacaactttactgggcctgtttgcccttacttctacctaggacttcattcagaacctcttacactctgttctgtcacagatt

SEQ ID NO: 9039 - DNA, 381 bp, Cricetulus griseus
cggcggacctcgctcagattcctgatgtggacatcgactctgatggagtcttcaagtacgtgctgattcgagtccacttagcaccgccctccggggatccgacgacggagtgcaaggaaatcgtgcgtggctacaaatgggctgagtaccatgcggatatctatgacaaagtgtcaggcgagctgcaaaagaatggctatgactgtgagtgcctaggcggtggacgcatctcccatcagagccagaacaggaagatacacgtgtatggctactctatgggttatggtcgtgcccagcactctgtttcaactgagaagatcaaagccatgtatcctgattatgaggtcacctgggctgacgatggctactgaggccctaccc

SEQ ID NO: 9040 - DNA, 380 bp, Cricetulus griseus
  modified_base (319)..(319): a, c, t, g, unknown or other
aggttctgccacagcgagctgtgtccttgatgagcacctgggctttgctccgttttcctgcaccactgatcaggatatgctcagggaactgggtatttgggcttcagaagccagcactgctcttcccaggaatggctgctgctgtggtacaggtggcaggcaggaaggactatcctgctctgcttcccctgcacgagagtgagcttgaagaacagtttgtgaaaggacatggtccagggggccaggccaccaacaaaaccaacaactgtgtagtgctcaaacatgtgccctccggcattgtggtcaagtgccacaaacncgatctgtggatacaaaacagaaagatagctacggtttttttgcttttaaaattgtttatt

SEQ ID NO: 9041 - DNA, 380 bp, Cricetulus griseus
gatcaaaggccaagactcttggaagcaaggtttggttgttaaagacagtccactatgggagagggatttataaccagtccttcctctccagtttgtattttatgtcatcatctactttgatatatttttagaacttgccttttagtttttcttgtttttaggcaatttccaccttgcgtgagtatagtggttttctttgaaatgcagtgaaaattccccagctccttcctagacctttggggagcccttataatggagtcattttagaaaaatcacttcaattagataatggccttttcactgagacattaacatgccctgtgagacctactagctgatctcagaaaggtctaaagtgaactctgaataaagttttctca

SEQ ID NO: 9042 - DNA, 380 bp, Cricetulus griseus
gcagaagctcctttaccgaggtggagggcacctgcacggggaagtatggctttgtaattgctgtcaccaccatcgacaatattggtgctggtgtgatccagccaggccgaggttttgttctttatccagttaagtacaaggctattgttttccggccctttaaaggtgaggtggtggatgctgtggtcactcaggtcaacaaggttggacttttcacagaaattgggcccatgtcctgtttcatctctcgacattccatcccatcagagatggagtttgatccaaactccaacccaccttgttacaagacaatggatgaggacattgtgattcagcaggatgacgagatccgcttgaagattgtggggacacgtgtggac

SEQ ID NO: 9043 - DNA, 380 bp, Cricetulus griseus
ggacctgcagttagctcgcgctcctccgcctaagatgagctccaggggcaagaaacgcgtggtgctgcccacgcgcccggctcctcccacagtggagcagatcctggaggacgtgcgagaggcgcccgcccacgatcctgtttttaccgccctggccccggaagaccccccagatccatccctaagagccgaggaccttgaagcccagcatgagcagatctaccaacagagccgggcctatgtggccatgaatgagcggctgcagcaggcaaaggacacactgaggcagaagttcgagaaccttcggcaggccggtcagaggctagagcaggatgtcagccaggtgacctcagccacctcctagagccaaggacacctga

SEQ ID NO: 9044 - DNA, 380 bp, Cricetulus griseus
aacaccatgaccaagagcaacttggaaaggaaaggatttatttcactcacagttccatgtaacagttcatcatcaaaagcagtgaggacagaaactcaagcagggcagtaacctggaggcaggagctgatgcagaggccattgaggggtactgtttactggcttgctcatcatggcttgctcagcctgctttcttatggaacccaggaccacctgctcagggatggcatcacccacaatgggctgggccctcttccatcaattgctaattaagaaaatgccttacagcaggatcttatggaggcattttctcagttgaggttccctcctttcagatgactctagcttgtgtgtcaagttgacacacaattatccagcaca

SEQ ID NO: 9045 - DNA, 380 bp, Cricetulus griseus
  modified_base (154)..(154): a, c, t, g, unknown or other
  modified_base (241)..(241): a, c, t, g, unknown or other
cacttgtggcaagggcttcggacagcgatatgaccttgtggtacaccagcgcagccacacaggggagaggcccttcccatgcccagagtgcggacgaggcttcacagaccgctcagacctcaccaaacacctgcgcacacacactggggaaaanccttaccactgtgagctgtgtggcaagcgattcacctgcatctccaacctcaatgtgcatttgcgcaatcatgcaggtcataaaccncacaagtgcccagagtgtggcaagtccttcagtgttgcctccaagcttgcactgcacagaaaacacacctaggtgagaggacagcagagtgcacggagtgtggcaaattcttagccacggccggtcactgtcacagcac

SEQ ID NO: 9046 - DNA, 380 bp, Cricetulus griseus
  modified_base (41)..(41): a, c, t, g, unknown or other
cgagaggagcttagcttgcagaatcccatccacacggacangttcaaagcgatcatcacagaagccatttgctcctttattttcctacagcgctctactgcacttccaggaggtccgaaccaagcttcgcatccacttactggctgcactcatcacctttttggcctatgcaggagggagcctcaccggagcactgtttaacccagcactggcactttcgttgcacttcccgtgctttgatgaatctttctatcagttttttgtagtatactggcttgctccttctctaggtgtgctgttgatgatcctgatgttcagctttttccttccatggctgcataacaaccaaatgactaataaaaaggaataaccacacccaa

SEQ ID NO: 9047 - DNA, 379 bp, Cricetulus griseus
ttttcaaggagttggacccaaaaaagtactcagggagctcctccgctggacatcttcgctgcttcaaggcctgggtcacatgctgctgggaatttcatctacccttcgccacgtggtggagggggctgagcggtggcagtggcacaagcagaatcacctccgttcataacgagaaaggctctgagcatgtgccccaagactgtccacaagacatgagagctagaaagcagcatcagatttggggctgcagtgtaccagaggcaactcacccgactccatcgcaactgagcctgtagtacactgccttggttctctagtctgcacattttctgaagctgctgcctgtcttacctacatctcctgcctgcctacttaccct

SEQ ID NO: 9048 - DNA, 379 bp, Cricetulus griseus
cagactattcgagagaaaagaattgtagaagcagcaaacagaaaagagctagactatgaagcaggagacatcccaacagagtgggaagcatggattagaaggacaagaaagactccacctactatggaggaaatactaaagaatgaaaaatacagagaagaaattaaaataaaaagcaaagatttttatgaaaaagataaactgagtaaagaaaccagtgaggaactcttgcctgcacctgctgcaactcaaattaaaggacatgcctctgctccacactttggaaaggaagaaccctcagtggctcccaccagcaactgggaaaacttttcagccgggatcctggatgccagaagatagcaaaagacagaaccaatga

SEQ ID NO: 9049 - DNA, 379 bp, Cricetulus griseus
ctgcggacgagccttcggcggaagttcgtgcctggcgcgccaccgacgcacgcacacgggcgagcgcccgtacgcatgcgccgactgcggcacgcgcttcgctcagagctcggcgctggccaagcaccggcgcgtgcacacgggcgagaagccgcatcgctgcgccgtgtgcggccggcgcttcggccaccgttccaacctggcggagcatgcgcgcacgcatacgggcgagcggccctacccgtgcacggagtgcggccggcgcttccgcctcagctcacacttcatccgccaccgtcgcgcgcatatgcggcgccgcctctacatctgcgcgggctgcgccgagacttcaagctacccgccagtgccacagccgcca

SEQ ID NO: 9050 - DNA, 378 bp, Cricetulus griseus
  modified_base (101)..(101): a, c, t, g, unknown or other
agagtgagtggcactgggctgagcctgtctaattcgtggacaagagggatgctagcatttagaaaggccaggaggaaactcaggatggggaccatctgctntccccaatcccagcgggcaaaggcggcctcggaggtctgcaatgccgactggatggcctcgctcccccctcacctccacaacgtccccctttccaatctggcaatcccaggctcccatgattcattcagctactgggtagatgaaaagtccccagtggggcctgaccaaacccaagctgtcaaacgcctcgcccggatctccttggtaaagaaagctaatgaagaaatggtctgtaactcagaacctgaccttccgggaacagctggaggctgggat

SEQ ID NO: 9051 - DNA, 378 bp, Cricetulus griseus
ggacaacttcaagaattgaacagagaaatcctaagcaagctgcctgaatctgccttccttttcttgttctgtcttcctttggagaacaaggaccaattgaactggtgaactagtttcctccagccgtggatgcctttgacagtatgaccgcagaagataccaccacagcaatgaatagcgatccaacatggggtcctcctccaaggtgccagagggcgtggcaggtgcgcccaatgaggctgcattgttggcactgatggagcgcactggctatagcatggtgcaggagaacgggcagcgccaagtatggtgggccccctcctggctgggagggccccgcatccccagcgaggctgcgaggtcttcgtgggcaagatc

SEQ ID NO: 9052 - DNA, 377 bp, Cricetulus griseus
ttttgtctgtcccgttgtggccatgtcgttctgcagtttcttcggaggcgaggttttccagaattcacttcgagccaggtgtctaatgtgtgtgccaagtgtggctatgagttgttttccagtcgactcaaaatatgcacactcttccccatggccagcgttcactgaaaccatctatgcagacagtgtgaccaagcgccctgagaaaaaccgacctgaagctttaaaggtgtcctgtggcaagtgtggccaatggttgggccacgagttcctgaatgatggccccaagcgggggcaatcccgattctgaatatttagcagctcattgaagttcatccctaaagacagagaagctcctgcctcccaggggcactagg

SEQ ID NO: 9053 - DNA, 377 bp, Cricetulus griseus
ggatgacatagtggtcgtggctcagggctctcaggcctccaggaatgtcagcaatgaccctgatgtcatcaagctgcaagagattccaaccttccagcctcttttaaaagggctcctgagtggacagacatccccaacaaatgccaaactggagaagctggactctcagcaggtgttgcagctctgcctacggtaccaagatcacctgcaccagtgtgcagaagcagttgcttttgatcagaacgctctagtcaagcgaatcaaggagatggatctgtccgtggaaaccctctttgcttcaggagcgccagaaagatacgccaagtatgcggagcagatacagaaggtgaatgagatgtcggccatactgcgccgca

SEQ ID NO: 9054 - DNA, 377 bp, Cricetulus griseus
caggtcccacacagcagcaggtagagagcagactcggcgagctcctgaaatgccggcagcccgcgccgccgaccgcgcttcccgcgcgcgagcagccctcggcacagtctcagggaccctggccactggcaagttcagggccaaggcttgtgttcaatcgagtgaatggcaggggcccctcaccacacccacatccctcgagggaacccaagagacctacacactggcccacgaggagaacgtccgatttgtgtccgaagcctggcagcaggtagagcgacaactggatggcggccctgccgatgagagtgccccacggcctgtgcagtatgtggagaacactcctgatccccggctgcagaactttgtacctattg

SEQ ID NO: 9055 - DNA, 377 bp, Cricetulus griseus
agagctggagagggtcaagaagaagaggcgcttggattcctggacatcctcttgttgccaaaatggagggatgggagcagcttgtctgatgaggacctgcgtgcagaggtggatacattcatgtttgaaaggtcatcgataccacagccagtggaatatcctggattttctatgctctgggccacacacccctgaataccagcagagatgcagggaagaggtgcagagcatcctgggagattgggaacctctgtcacctgggatcacctggaccagatgccctacactaccatgtgcatcaaggaggccctgaggctctacccaccagtaccaattgttagtcgagagctcaacacacctatcaccttcccagatgg

SEQ ID NO: 9056 - DNA, 377 bp, Cricetulus griseus
cctactggtgtttgactacgctgaactcatgggcctcaaacaggtatattaccacgtactgggctgggtgaacctctggccctgaagtctcctcgggccctgaggctcttttcccaccttcgacacccagtatgtgtggaacttctgacagtgctatgggtggtccccacgttgggcacggatcgcctcctcctggctcttctccttaccctctaccttggcttggctcacgggctcgaccagcaagatctccgctaccttcggtcccaattacaaagaaaactccagctcctctccagaccccaggatggggaagcagaatgaggagctattttctacaatgaaaaaaaaaaaaaaaaaaaaaaaaaaaaaaaaaa

SEQ ID NO: 9057 - DNA, 376 bp, Cricetulus griseus
cagtacatggagaagtcaaaaccatggcagaaaatatggtgtgtgatcccgaagcaagacccccttgtgctgtacatgtatggtgctcctcaggatgtcagagcccaggcaaccataccactcctgggctacattgtggatgacatgccaaagagtgcagatctgccacacagcttcagattgacccagtccaagtccgtgcacagctttgccgcggacaatgaggaactgaaacagaaatggctgaaaatcatccttctagctgtcacaggtgagacaccagatggcccaagtgagcatctagacaccttgaacaatctccctggaaccaaagaaaaagtcagaatgactaaactgcaatagctgccggtgtgga

SEQ ID NO: 9058 - DNA, 376 bp, Cricetulus griseus
atggctgaagacatcaagactaaaatcaagaactacaaaactgccccctttgacagccgcttcccaaaccagaaccagaccaagaactgctggcagaactacttggacttccaccgctgcgagaaggccatgactgcgaaggggggtgatgtctccgtgtgtgagtggtaccggcgtgtgtacaagtccctctgccctgtatcatgggtttcagcctgggatgaccgaagagcggaaggcacgtttcctgggaagatctgacctgactccgcccacctctcctcttctctgtccttcccatatagtcaagggggacctgggtatatgatggtccctaccgttgggaccctgaatcatgatgcaactactaataaaa

SEQ ID NO: 9059 - DNA, 376 bp, Cricetulus griseus
cttttttttttatttaagaagaaagaatggaaggagaaaaaaagacaacacgagaaaattagtattttctaccttctgaaattaatggccatgagttcgtatatggtgaactctaagtacgtggaccccaagtttcctccgtgcgaggaatatttgcagggtggctacctaggcgagcaggcagccgattactacggcagcggcgcacagggtgccgacttccagccctcggggctctacccacggcccgacttcggtgagcaacccttcggaggcggcgggccggggcctggctcagcgctgccggcgcggggtcacggacaggagccaagtggcccaggaagtcactacggtgctccgggagagccgtgcccag

SEQ ID NO: 9060 - DNA, 376 bp, Cricetulus griseus
agatttacttgtaaactcatgaaaatctgaatataggggagtgaggtgtggccactaggaatttttctcaatgatcatttgaattttcagtctgattatttgataaaggatatagtatgaaagccaggtgctagtaacagacaaattctgagcccagtatgctttatatactgctagacagggactggtgtgtttacacctatcttttaatttgttaccagtaattttcctgtttcttctctctgatgtatattgtcatgccttgaaataggaagacgtgtgagcagtgtgctgtttgcacagaaatcgcagcactgttttctgaggccagtagtcacatcagagaccactcttccaaactttactcctctccttt

SEQ ID NO: 9061 - DNA, 375 bp, Cricetulus griseus
cggcttgtgacagtgctcgagcacagactgtctcgaagctccgaggagaccatcaagctctgcctgggaagattgttcctggcctactgcagcagcagcttgcagctactgctcacgctgcactcactggaagccctgttctgtagtcacccctctctctgccttctcattgtggatagcctgtcggctttttactggacagaccgcgccagtggaggagagagtgtggccctgcaggaatccactctgaagaagtgttctcagctcctagagaggcttgtcactgagtaccgcttggtgcttttcacaacaacacaaagtctaatgcagaaagcctctgactcagcggagcagcctgcttcctccaagctccca

SEQ ID NO: 9062 - DNA, 374 bp, Cricetulus griseus
tgtccacactggtggaacataggcgcacacacacgggtgagaaaccatttccatgcacccagtgtgacaagcgtttcacacgcctggccaacttgacagtgcaccagagtgtgcattcaggtgagcacgctttccagtgtacccagtgtggctcatgcttcacgcacaagcccagtttcctacgacatctacgcagccactctcaggagaagcgctttacctgtggccagtgtggcaagagcttcacctgtcgctcctggctggtgcgccaccagggtagtcacgcccgctcagcctcctctgccttatgtggcttgtgagaagagctcaccaagctgtgagtcatctgcaagtctccttaaaggtgcagccag

SEQ ID NO: 9063 - DNA, 374 bp, Cricetulus griseus
aaaacccgaagcataccgttacttctccgtgggaggctagaccatcaaaatgagtgttcagtatacaacaagcaaacaaaacaaccacacataacaacctgtggcattacatatttctcatgcaatgtgggtttcttgctaaattctgttatttttacacttgatttatactcttgagatgtttgtcatatgcttcttgtgatacacattgttttttctcaaacatttcaaataaaaccattttcaggtaacaaagagaattacttcagactgggtaattcaaaacactcaaaggtttaagttaaaaatgagtttagactttggaataagactccatactatttttattagttaaacaagtactacaaataaag

SEQ ID NO: 9064 - DNA, 373 bp, Cricetulus griseus
cagttactggcgtgcaaagggttgagcactgacctccagtggaaatcgggatgcagaagtcaactcagactttgcacttaggacgcagtgccaagctcctgcaaggccaggttctaggctggaccctagcttggggtaggggttcaataagcggaagaccgatgtggacttcctgggctgtgcttcctgtggtactggacagtggactatgacctaggactgtgcagccctccacctcctctcctgtcgcctactgtccctgacaagcctacaatgttgtcccccaaggctgtgttgttcttcaccctgctcttgacaaccagttcgctgacccaaggacccgaaagccctctgggtctacactcccccatca

SEQ ID NO: 9065 - DNA, 373 bp, Cricetulus griseus
ctgaaataataaagtccttcataaccacaaaagcccttcaaagactgaactttacctgtgaaattcctgtgaaggacgctcttcaacccttctgcctggctaatgctgcctaccttgggagtcaagaaatgatacatgtgcggaagagagatgatgaaatcataaaggaacatttacctaagctgacattttactatggtaaaacagacggttggtgtccagtaaagtactatgaagacatgaagaaagattttccggaaggcgatatccgactctgtgagaaaggaatagcacatgcctttgtccttggttttaaccaggaggtggctgccatagttgctgactggatgaataataagctgcccaaaatata

SEQ ID NO: 9066 - DNA, 373 bp, Cricetulus griseus
actggagagaagccctttgagtgcaatgtgtgtgggaagcttttactatgttcctcttaccttctacattcacatgcggacacacacgggagagaaaccttatgaatgtaaggagtgtgggaaagcttttgctgtttactcacatctaagtaaacacgtaagaattcacagcggagagaaagcctataaatgtagaagttatggaatagctttcaatagttctcatcttacagaacatataaaaacccttgagataaattctttggttggaaggaatgaagagactgctttaggaagttctattgctttagcagtgcattcaaattcacagtggcaagaaagcttgtcagcataagccatttgtaaagtgatt

SEQ ID NO: 9067 - DNA, 373 bp, Cricetulus griseus
caaatgtggtaaggaatatcacctacaagtaccgagaggacttgtcagcgcatctcatggtggctggttgggaccaacgtgaggggggccaggtatatggaactatgggaggaatgctgatccgacagccttttgccatcggcggttctggcagtacctacatttacggttatgtggactcagcctataaagcaggcatgacccctgaggagtgcaggcgcttcaccacaaatgccatcgctctggccatgaaccgagatggctctagcggggtgtcatctacctggtcaccatcacagccactggtgtggaccatcgagtaatcctgggagatgagctgccaaagttctacgatgagtgacttgtccctaga

SEQ ID NO: 9068 - DNA, 373 bp, Cricetulus griseus
atggctcgcaccaagcagacggcccgcaagtccaccggaggaaaggccccaagcaagcagctagccaccaaggctgcccgcaagaccgcgcccaccacgggaggagtcaagaagcctcaccgctaccgccccggcaccgtggcgctgcgcgagatccgcaactaccagaagagcactgagctgctcataaggaagctcccattccagaggcttgttagggagattgcccaggatttcaagactgatctgcgtttccagagccatgcagtgcttgctcttcaggaggctgcagaggcgtacctggtgggtctcttcgaggacaccaacctgtgcgccatccatgccaagaggtgaccatcatgcccaaggacat

SEQ ID NO: 9069 - DNA, 372 bp, Cricetulus griseus
  modified_base (364)..(364): a, c, t, g, unknown or other
agcccttgtgacagttggaagattttgggatataagcgaagaggtggagttccatcttttgattgctggtctttctgtttggatttttggctggatatggagcctaccgtgtctccaatgacaaacgggatgtcaaagtgtcattgtttacagctttcttcctggccacgataatgggtgtgagattcaagaggtccaagaaataatgcctgctggtctggttgcaggcttaagcctggtgatgatcctgagactggtcctgctgttgctttagcatctagagctcctcaagaaccaaactcccatcattctactgtacctggcagagcaggttcttgcatttcttaggtctaaataaaaaaanaaaaaaaa

SEQ ID NO: 9070 - DNA, 372 bp, Cricetulus griseus
ttttgctgcttgttgggcaacagctgggttgtgatgtttggagttattcactgtgccttacatttttatactttggtttatgcaagctataaaatttatcataaatgggttaaatggtttgttttgttttaagtctctcttacctcttcctactttccagccctgtgtagaattattttcccctctggatcacactccatgatgtcctgttttcttctgatctctcttttataaaactgaacataagccaggtgtggtggtgcactcctgtacacccagccctagggaggctgaggtaggaccatgagttggaggctggcctagactaataaataatataaatataaaaaaaataaaaaaaaaaaaaaaaaa

SEQ ID NO: 9071 - DNA, 372 bp, Cricetulus griseus
gtgcattccacatacctgggctcatcctgcaaatggcaaaatcatgtacattgacatgaattcacttattgtcattcctggtgttccacaccaggagacatgtgtggtcacctaagagtccccgaaaggctatttcagagagaccggccagtgtgtgagaaacaaaatgtcacacacatttagtgactcctgctgtgagagccatgttctctgcctcctgacacgcctgctcaacgtcttctatgctgttttctgttggggtcaatgtgactggaactctggggagcacttgggggggcgggctatttctaagtgggaagcattacactttgcctaatcatgtatttattcctcgattaaagtaaaacataa

SEQ ID NO: 9072 - DNA, 372 bp, Cricetulus griseus
catagagctgctgtcgttccagctcaacctcaagactaacacggttatcaactggttccacaactacaggtccaggatgcgtcgtgagacgcttaccgagggagcacaggatgacacagacttggacccaggtgggggttccggtgtcctggcaccaggccacacccacatagaccccaccccgaagagccctgactcagaggctgaggaccaaaagcccccaatgaagagcctgaagctgcaggaatctaagagtcctgcacccctagatgccccagacagggctctggtgaggattaaacaggaggaggatacagaggtggacgaggacagccagcccctggatggtaggggatccagacagaggacaag

SEQ ID NO: 9073 - DNA, 372 bp, Cricetulus griseus
ttcaaccatttattggagctagaccagcagattaaagccttaaatgagccatgcagtccttatacctggttaacagtggaggtgctgggaaggatctggaagcacctgcctgacatcatcaaggagcgggagcaggagttaaagaaagaagaagctaggcagattaagaactttgaaatgtgtcaggaatttgaacagagtgccagtgccttccttcaatggatccaggagaccagggcttattttctggatggatcattgctcaaggaaacaggaactttggaatcccaactcgaagcaaaataaaaggaagacaaaaaagagatacaggcaatgaaagcgaacatctgactaaagatcgaagacctgggg

SEQ ID NO: 9074 - DNA, 371 bp, Cricetulus griseus
caacaatgaagacaacagtgagccttcagaaactgttcatgatatacagtcatctttaatccttgaggcacccaagggatttagagatgagccgtatgttgaagaacttgtggatgaaccgtttctggacttgggaaagtctttacagttccaacaaaaggaaatggacaccagctcagaagcctgggaaatgcatgaatttctgagccctccactggagggaggggcgaggaaagagagttgttgatgaggaatatgagctctatcaagatcacctccgggccatggagttacacccaccaccaccacacattcaggaggccacacatgccaccttccaggcaggaactccaggctggcacacagtggct

SEQ ID NO: 9075 - DNA, 371 bp, Cricetulus griseus
ggcagcacgcccggaccctgtggtacgacagacccaagtatgttttcatggagttttgtgttgaggacagcaccgacgtgagtgtgctcatcgaggatcaccgcgttgtgttcagctgcaggaacggtgatggagtggaactgtacaacgagattgagttctatgccaaggtgaactccaaggactcccaggataagcgctctggtcgctctattacttgctttgtgaggaaatggaaggagaaggtggcttggccgcggctcaccaaggaggatatcaagcccgtgtggctctctgtggactttgataactggagagactgggaaggagatgatgaagtggagctggcccaagtggagcattacgcagag

SEQ ID NO: 9076 - DNA, 371 bp, Cricetulus griseus
agcttcctaattgtgttgatctgcaatgactccaggctccacacacccatgtatttcttcattggaaacctgtcattcctagatcttgggttgtcttctgtctacacaccaaagatcctagcaacctgtatctctgaagacaagagcatatcctttgctggctgtgtggctcagttcttcttctctgctgcactggactacactgagtgttaccttttggctgccatggcttatgatcgttatgtagccatcgcaaagtttcctctgttttattcacaagccatgtccttaaagctatgtgctatttttagtggcagcttcatatcttggtggcttcattaactctgttatcatcaccaaagactaccttt

SEQ ID NO: 9077 - DNA, 371 bp, Cricetulus griseus
caaccatggaccaggtaatgcagtttgttgagcccagtcggcagtttgtcaaggactcaattcggctggtaaaaagatgcaccaaacccgatagaaaagaattccagaagattgccatggccacagccataggatttgctatcatgggattcattggcttctttgtgaaactcatccatatccctattaataacattattgtgggtggctgagtgctttatcttcgtgggaactagtgaacaaatgagggtgtgagaagctcatgaagtaaaaagttgcctgtatactttgtggtttctttttctttccttccttcccttaagaggttttctattctaaattaaataatttcaaaataacattttttccat

SEQ ID NO: 9078 - DNA, 371 bp, Cricetulus griseus
tgcagggatagctgccccggttgtcttcttcgtggactatgcttctaactgcttatatatggaggaaatcgaagactcagtgactgtaagagattatattcagtccaccatggagactgagaacgacccccagtgcctcttggggcttggccaggagaattgggcagaccctggctaggatgcatgatgaagacctcattcacggggacctcaccacctccaacatgctcctaaaacggcccctggagcagctgcacatcatcctcatcgacttcgggctcagtctttgtttctggactgccagaagataaaggcgtggacctctacgtcctggagaaggccttcctcatctaccaactaagctgcatccc

SEQ ID NO: 9079 - DNA, 370 bp, Cricetulus griseus
cggatgcggcggcggcggcgggcgggcggcggcttctagaagaacaacaggaagtgaagatattactagagactgtgcaggaacagatccggattctgactgatgccagacggtcagaagactacgaactggccagcgtggaaactgaggacagtgcgagcgaaaacacagcctttcttcccctgagtcccacggccaaatcagaacgagaggcacaatttgttttaagaaatgaaattcaaagagactctgtgttaaccaagtgactcgagatgtaggaatctgtgtgttctctgctttgctcaacaggaaagagaggaaattaaatacaaattattatatgcattaatttaagagcatctacttagaa

SEQ ID NO: 9080 - DNA, 370 bp, Cricetulus griseus
aggctcgccggggacaatgacggggtacacaccggatgagaagctgcggctgcagcagctgcgggtgctgagaaggcaatggctgaaggaccaggaactgagcccccgggagcccgtgttgccaccgcgcaagacgtggcccctggagacattctggaataactttctgcgggacggggccctgtggaagaaagtgatctttaagacataccgggccaagtctcttcactgtttctcatgtaattatacctctgtggtttattcactattacgtcaaatatcacgtagctaaaaaaccatatgccatcgttgacacgaagcccaaaaatattcccaggtgatacaattctggagactggagaaagtaatt

SEQ ID NO: 9081 - DNA, 370 bp, Cricetulus griseus
ggtctgttgaaggacgtcggcggcgggagtctgtattttcggtctaagattgaagtcatggctggtgcagaaagtagatagccaattccatttcactggtattaaaaagtaatttcaactcttacactctcacaggtagaatgaattgtgtactggccacatacggaggcattgctttgttggttttattacttcaagttaaggcctaaaaaaaccccaagctgtgaaagcatcgtaaatggattttgaaatgtctaacctcatctattaagtcccatacctgaagaagctgatgtcaactcatcatcatgtaatactcaatttgtacaataaattatgaacctaggaaaaaaaaaaaaaaaaaaaaaaa

SEQ ID NO: 9082 - DNA, 370 bp, Cricetulus griseus
gttttcgctgcggctgctgagcgagggtgcgggtccccgcaggcagtgcacgcccgctgccatggctttccgtaggaggacgaaaaagttacccgctcttcagccaggagttcgtcattcacaaccatgcagacatcggcttctgcttggtgctctgcgtcctcatcgggctcatgttcgaggtcacagccaagactgcctttctatttattttacctcagtataacattagtgtgcctacagcagacagcgagacagtccactaccactacggcccaaaggacctggtcaccatcttgttctacgtcttcatcaccatcatcttgcatgctgtggtacaagagtacatcttagacaaaatcagcaaacg

SEQ ID NO: 9083 - DNA, 369 bp, Cricetulus griseus
  modified_base (360)..(360): a, c, t, g, unknown or other
ggtcagagctgaccaagaagcattcacaagccaagccatggatccacctgcccggaaagaaaaatccaaagttaaagaacctgcctagtggagaagactaagcaagaatctcgcccagctggagtctcacagaattaaacaagacttgtagagaactctgcactgaacttcctgtaggtaacttcaccacactggttcctcctctcagaactggcccagtgcttgctgggtagacttttcatctggaacagcagattttttaaaaaggccttttttctactgtgtgagaaaaatcattgtttctagtgaaactgtgtgtcctccctaaaaataataaaatacagaaaggttaaaaaaaanaaaaaaaaa

SEQ ID NO: 9084 - DNA, 369 bp, Cricetulus griseus
ggggtgggaggcagaggaaggtgagggtaccgcctgtgggccacaaatctctacaagtgcctgttccccaccccaccccagtacccgtccagtcccctcacgcccgccccgagctgctcctaggtctggcccatgggcagaggtgggtcaggggacagggaggggagtcccttgaaaccaaactggaagcccctctctgcctcccagctggggcctcaggggtgggctggagggctgtggtcaagccttattctgtattgggaatggaggggtgggtgggacatgagggagctgctggagaatgtattcgaaacaataaaactttggacctttgaatgcggtgatgtgtcctcggtactgggtgcagcc

SEQ ID NO: 9085 - DNA, 369 bp, Cricetulus griseus
  modified_base (286)..(286): a, c, t, g, unknown or other
gctatttgaaatggcttccattcagtagcttctgtgcctggtcttcagagagatggaggggggagccatcctgctgtgcccagccatgaagccacccaagtagtggagccaggtcataagttattgttcacattaaagaatcatgttccctgtgtacattttaagcaaaggaaacgtctcgggattgtatgggaataaaacttgtttgaaaatttggaatagtgctgctgtcggcttctttttctggtacttgtattttcactatgttaaatgatcttaatatgtnttgggttaacaatacttttgagtttcctgagaacgtaacagaaacaaaaatggtaattgaagtgtgttagtagtctggctgtg

SEQ ID NO: 9086 - DNA, 369 bp, Cricetulus griseus
cgaagatgacgtcggagcgtttcttcgaattcccgtgtctctcggctgctgctgccgaaggaacagggaaaaagcaacaagaaggaacagcaatggcgacactgcaccgcaaagtgcccagtccggaggcgtttctgggcaaaccctggtcctcctggatcgacgccgccaaattacactgcttcgacaatgtagatttagaagaggctggaaaagagggtggcaaaagcagggaggttatgaggcttaataaagaagatatgcacttgtttggccattatccagcacatgatgacttctatctggttgtgtgcagtgcctgtaaccaggtcgtcaagccacaggtcttccagtcacactgtgggagaa

SEQ ID NO: 9087 - DNA, 369 bp, Cricetulus griseus
gcgggatccctctcttcttcatggagctgtccttcggccagtttgcaagccaggggtgcctgggggtctggaggatcagccccatgttcaaaggagtgggctatggcatgatggtggtgtccacatacatcggcatctactacaatgtggtcatctgcatcgccttctactacttcttctcgtccatgacgcacgtgctgccctgggcttactgcaactaacccctggaaccacccctgactgtgccggtgtgctggatgcttccaacctcaccaatggctcccagtccactgccctgtctggcaacctctctcacctgtttatgcagcccagcttctccttggttgtcatctcctgcatcatgtgtgt

SEQ ID NO: 9088 - DNA, 368 bp, Cricetulus griseus
  modified_base (333)..(333): a, c, t, g, unknown or other
  modified_base (351)..(351): a, c, t, g, unknown or other
  modified_base (363)..(363): a, c, t, g, unknown or other
cacatcaaagaggagatccaggcagaggacatcaacggagagatttacgacgagtatgacgaggaagaggatgacccagatgtagattatgggagtgacagcgaaaaccatattgcaggacaagccaactgataagggccaacagactgtggtgtggtgagctgaggacttaaagaagccctagctggtccatccttaccagtggccaagcacattaactttctcatacactgactgttattttaactgttagtcttaaatagttgggacgtcagctgacaaatagacctcagcctcaaaaggctcggaaaggaaagaaagaaagaaagaaanaaagttaaactttttttntttataataatntttat

SEQ ID NO: 9089 - DNA, 368 bp, Cricetulus griseus
gcaagataacagacagttagaggtagggataacagacgaggatggccaaagtgacaaatcgagcaaatcagtggcatggacggtcatggggtaacaattatccacagcagagacaagagccttactatcaacaacagtacggacaatatggtcacaacccgcggcctccctatggttactactaacagaaatgttgtggcttttaacaaaagaccattcattttgataacatgctaaaccttcctttgtcttcttgtagtcatagtttttcattctattttacagaatgggttgttaattgtttagaatttgagacttggaaaaacaaaactgatcttgttagagatgtgatgattgatggcaataaa

SEQ ID NO: 9090 - DNA, 368 bp, Cricetulus griseus
aacaacctggcccacttccccacactgaaatcggtttcccagagcgatagcgatgggctcaattatatccccaagatcgtggaactgaagaccgagttccagaagcggctgttggatttcaaggcctgggagaacgaactcaccctgttcagctccccattctccaccaagattgacagcgttgcccgacgagctccagatggaggtaatcgacctgcagtgcaacacggtgctaaggacaaaagtacgacaaggtgggcatcccggacttctacaagcacctctggagcagctaccccaaatacaggagccactgtgccaagatgctgtccatgttcagcagcacccacatctgtgagcagctcttc

SEQ ID NO: 9091 - DNA, 367 bp, Cricetulus griseus
gactgccagggaccctgaaggcctgcctgtgagttactcactgagtggcgataagagaggttggcttaaaatcgactctgtcaccggggagatatttagcgcggctccgctggacagggaaacagaaaatgtgtatcgggtacaagtggtggccactgaaataggtgggtcctctttgagcaccacggcacatttccacctgactctcacagatgtgaatgacaaccccccacgcctagccaaggagtacacaggcttgttcttctgccatcccctcagtgccacccagagtctcgtttttgaggccaccgatgatgaccagcagtcgttttggaggcctcagttcacatttgcccttggcagagaa

SEQ ID NO: 9092 - DNA, 366 bp, Cricetulus griseus
attcatgttgttataaactatgtatagtatgtatgttttgtgggcgtgtatatacgtaatatatattatatatacattatatatatatatatatgagagagatttagtgacttgatacgggttggtgcaggtaaatttattactgagccaaatgaggcgcataccgagtcagtagttggagtccagggcattcagtgctgtgtgtgatctgcatacatgtatagtgcctatcccatgcagtaagaaccatggctgtcatgccaaatccagcactcacaagtcagagccagcaatatttgatttgtagacaatcagcttgaatttatagattatgactggcaatgattataattctgaatccataac

SEQ ID NO: 9093 - DNA, 366 bp, Cricetulus griseus
caagttgtgcaaagtgagaaagatctttgtgggtccacaaaaggaatcccacatctggtgacccatgatgctcaaactattcgataccctgatcccctcatcaaggtgaatgacaccattcagattgatttggagacaggcaaaataactgacttcatcaagtttgacaccggtaacctgtgtatggtgactgggggtgctaacttgggaagaattggtgtgatcaccaacagagagagacatcctggctcttttgatgtggttcatgtgaaagatgccaatggcaacagctttgccacccggctttccaacatttttgttattggcaagggcaacaagccatggatttctcttccccgaggaaaa

SEQ ID NO: 9094 - DNA, 365 bp, Cricetulus griseus
ttgagattaacgatgtggagctgaagttttaaggaaatgatgtgcttcatttacacgggaaggcgccaaaccttgacaaaatggctgatgatttgctggcagctgctgacaagtatgccctggagcgcttgaaggtcatgtgtgaggatgccctctgcagtaacctctccgtggagaatgctgcagaaattctcatcctggctgacctccacagcgcagatcaactgaaaactcaggcagtagatttcatcaactatcatgcttcggatgtcttggagacctctgggtggaagtcaatggtggtgtcacatccccacttagtggctgaagcgtatcgttctctggcttcagcacagtgccctttc

SEQ ID NO: 9095 - DNA, 365 bp, Cricetulus griseus
tcttcacagacaccatgctccggtgcaagccactgctagctgccgatcgttggggatggaccacagggaggaaggtggtttccaagcaggtacagaggataacagggagccaaaggcctccctgccccctgagaacctcatgagacccccgtactctctgccacccgagctccagcctcccacaaactgctgcctgagcggctgtcctaactgtgtgtgggtaaattacgcagaagctctgctgaggcactaccaggatggtgggcagcaggccctggccatccttgaggagcatgtgactgacgagaacctcaaggccttcctcagaatggagatccgcctcagaatgcaaagtggaggctgag

SEQ ID NO: 9096 - DNA, 365 bp, Cricetulus griseus
gagaccaggagaaggccttaggatttgctgggggagcacagaggggcagtctctattgtcacgctggaacccgtggtccactgaggttccctatgcgaccttcactgagcaccctatgaaatacaccagtgagaagttccttgagatttgcaagttgtctgggttcacatcgaagcttattccagctatcaagagtgctcacaagaattctgctggatctggaagaggagaggaactgatggtgctaacccagcctattctgattgagacctacactgggctcatgtcattcattggaaaccgaaacaaacttggctattccctggctcgggggagtgttggcttttgagactctttgttacaaa

SEQ ID NO: 9097 - DNA, 365 bp, Cricetulus griseus
agaggcaagcagatctctgtgagtttaaggccagcctggtctgcatagagagttccaggacagccagggctacacagagaaaccactgtcttgaaaaacaaacgcttgtaatactggctgatattctcatgggatgattttagttggtttgtctgaagcctagggacaaaaggctcagcttcctcgagtgtatctttgtaaaagaagggctgtatctattttcacagtggtgggtgtgggtggttaagaagtttaaaatcccaacaacagggaagctgacaactgtatggatgggtgcacttaaaattctgtttacataatttagatggaggatgaatatattagccacagaacattaaacagtg

SEQ ID NO: 9098 - DNA, 365 bp, Cricetulus griseus
ctgactgtcctgattggaatcatcacgctttttttccctgaaagttttggagtggctctaccagagaacttggagcagatgcagaaagtgagagggttcagatgtgggaaaaaatcaacagcctctgtggacaaagaagaaaaccccaaagttctagtcactgcattctaataagggttccttggcacttagccaattggaaatcagatgtgtctgatgaactgggaatgatggaacatgcctataatcccagcactctagcgggagagccaggaggatcaggaattcaaggtcatccttggctacatcagaagtgcaagaccagcctggaccccatgcagccctgtctcaacaaaacaaacaaa

SEQ ID NO: 9099 - DNA, 365 bp, Cricetulus griseus
cagtggtactcaaagccttggaagtcaaggaacaggagctccaggaagactgcagcccagcagccctggactccaaccacaatgtgaccccgcctggtgactggtccccatcctgggtcatgtggctggaattaccacagtacttatacaactgtaaagatgtgacactacggaggaatactgcaggaagtctgggcttctgcattgtaggaggttatgaagaatacactgggaactaaacctttttttatcaaatccattgtcgaaggaacaccagcatacaatgatggaagaattagatgtggtgacattcttctcgctgtcaacgggaggagtacgtcgggcatgatacatgcctgcttggc

SEQ ID NO: 9100 - DNA, 365 bp, Cricetulus griseus
  modified_base (11)..(11): a, c, t, g, unknown or other
  modified_base (30)..(30): a, c, t, g, unknown or other
  modified_base (47)..(47): a, c, t, g, unknown or other
  modified_base (60)..(60): a, c, t, g, unknown or other
ctcagtgatgngaagtctctgctggtgagnttcccacttgactgctntccggctctggtncgggtcgatcaagaccacatctgctgtgaagaacctgcagcagctagcccaggatgctgacctggccttgctgcaggttttccagctcgcagctcacctggtatactggggcaaggccgtcatcatctacccattgtgtgagaacaacgtctatgtcctgtctcccaatgccagtgtgtgcctgtactccccactggctgagcagttctctcgacagttcccgtcccatgacctgccatctatcctggctaagttctccttgcctgtttctttgtcggagttcaggagccctctggctccccctg

SEQ ID NO: 9101 - DNA, 364 bp, Cricetulus griseus
cccagtgtaaagactgtggcaaagtctttaagtataatcactttttagcaatccaccagagacgccacactggggaacgacccttcaaatgtaatgagtgtgggaagggctttgcccagaagcactccttgcaggtccacaccaggatgcatacaggggagcggccgtacacctgcaccgtgtgcagcaaggcactgaccaccaagcactcactgctggagcacatgagcctgcactcagggcagaagtcttttacctgtgaccagtgtggaaaatatttcagccagaaaagacagctaaagagccattatcgagtccatacaggaaataaaacaaattttgtcagaaaaaaaaaaaaaaaaaa

SEQ ID NO: 9102 - DNA, 364 bp, Cricetulus griseus
gcagcaatgaggagaccattgccaaagccaagcaaagccgcagtgagaagaaggctcgaaaggcaatgtcgaaactgggcttacggcagattcagggagtcaccaggatcaccatccagaagtccaagaacatcttgtttgtcattgccaagccagatgtcttcaagagccccgcctcggatacctatgtggtctttggtgaggccaagatcgaggacctgtcccagcaggtacacaaagctgcagcagagaaattcaaggtgccctcagagtcctcagccctggtccctgagttggcacctgggccccgggtgaggccacagtgcgaggagcaggaggaagaagatgaggaggtagaggaggc

SEQ ID NO: 9103 - DNA, 364 bp, Cricetulus griseus
catcccaactcctttcctgggtcagtctgtgaggacatcagctcctactttgtggtactaatggcagcggagccgctgacggaactggaggcagccattgagactgtggtcaccactttcttcacatttgcagggcgggaaggacgaaaaggtagcctgagcatcaatgagtttaaggaactggtcaccgagcagttgcctcatttgctaaaggacgtgggctctcttgacgagaagatgaagagcttggatgtgaaccaggactcggagctgaagttcaatgagtactggagactgattggggaactggcgaaggaaatcaggaaggagaaagcttggaaatccggaagaagtaaagcctgct

SEQ ID NO: 9104 - DNA, 363 bp, Cricetulus griseus
tggctgttggagccctggcactggggctctggctgaggctgagacggggtggcaaggatggacctcaaaaacctgggttcttggcaccaatgattccagtggacaagcttccaggcattccaaacctgcagaagacccaggaggacttcagctgattccacctgtaaccctgtcaggctgggtggctaaatggacagacagaaaggcatagggcagtggatccctatggatggaagtctcagttggaagtttgaagcctttttctttgagcccctatattccagaattggctgccagctgaatgctgtctggacttttgatgtcatccttgaggtggaagtccacctgaggaatgtgtataga

SEQ ID NO: 9105 - DNA, 363 bp, Cricetulus griseus
gcatctacggctgcgatgacttccgcactgacccaggggctggagcgaatcccagaccagcttggctacctggtgctgagcgaaggtgccgtactggcgtcatctggggaccttgagaacgatgagcaggcagccagtaccatctcagagctggtcagcacagcctgtggcttccggctgcaccatggcacaaacggtccctttcaagcgcctgtctgtggtctttggtgaacacacgctgctagtgactgtgtctggacagagggtatttgtggtgaagaggcagaaccgaggccgggaacctattgatgtctgagctgcagaaggcactggctggagaagtggtctgtcgctagggcctgt

SEQ ID NO: 9106 - DNA, 363 bp, Cricetulus griseus
  modified_base (295)..(295): a, c, t, g, unknown or other
atggcgctgcgatggggcatcgtgtcagctggcttaatcgcccacgactttaccaccatgctgtgctcactgcctccctcggaacaccaggtagtagcagtggctgcaagggacctgaaccgagcaaaggagtttgccaagaaacacaatatccccaaggcatatggctcctacaaggagctagcaaaggacccagacgtggagatttcgtacattgccacccagcatccccagcacaaatcagcggtgcttctctgcctggcagcgggcaaggctgttctttgcgaaaaacccntgggtgtgaatgcagcagaggttcgggagatggttgaacacactcacacacacacacacacatacaca

SEQ ID NO: 9107 - DNA, 363 bp, Cricetulus griseus
cttgggctcgtagcaatccccctgcctcagcctccttgagtgctgggtttgcagatttgagccaccaccttctgcctgattctgtagtttgcagttcttaaatagataaaggaatagtttgaagaaaataattttcctctgcaatcatttcatgtctgcctaacttaaaatctgttacttccttaagaggagctaacaaaggttatgatgtactcttacatctaactttcataccaactctatacgagtttggatttgtgtacattctgtttttgtgtgtgcttgtctgtgtgccggcagtatttgtatccaatttaacttattttctcaagtattaaaatgtttctttttttatgtatttta

SEQ ID NO: 9108 - DNA, 363 bp, Cricetulus griseus
ggacattgcagtggaggaagacctcaacagcacccctctgttcaaagacctgctagcgctcatgaggcgtgagttccagagagaggacattgctctcaattaccaggatgctgagggggacctggttcggctactgtcagatgaggatgtggaactcatggtgaggcaggtgcgaggcctccctccagaagcgcctcttcacgtggaagctacatgtcactcagaaggacaactacagtgtctacaacacggtgccctgagtcattggggtccctgtggcaaggagggggtgctcagcaaaaggcctatactctctatgaacatgaacacctcagggaggctgggatgaggtgcaaacctcct

SEQ ID NO: 9109 - DNA, 362 bp, Cricetulus griseus
ccccagacagcccgggagctccacagcatcctccaacacaagggccttgtggacaagtttcccttgttcactgctgtgtacaaggtgtgctatgagggccagccagtgggtgaattcattcgctgcctgcagaaccacccagaacacatgtgagtggggccagggccccaggacaggcagctcttttgccccaacgaagacaagccgaagctgtgacacctgtcatcagaatgctctccaggactccccagccaacagggtcctcactgaaggccactgaggacaggaggctgtggggctcagctacatacctggagaataaaggtggtctttctaaagaaaaaaaaaaaaaaaaaaaaaaa

SEQ ID NO: 9110 - DNA, 362 bp, Cricetulus griseus
cctcaagtagcacattggaaagagaattgaagatctcgaaaaggaaataataagagaaaggcaagaaaaccttaggcttgtgaggctgatgcaagataaagaagaaatgatcggaaaactcaaggaggagattgattgttaaataggacctagatgacatagaagatgaaaacgaacaactaaagcaggaaaataaaactcttttgaaagttgttggacagctgacaaggtagaaggctcgaagctcggtgtggagaattaattctgtttttaaactactgattgaatgtcatggctaaggcaaagatgatgttcctgtaatgcaataaatacattgagataactgtatatttatttccaga

SEQ ID NO: 9111 - DNA, 362 bp, Cricetulus griseus
cagagacgtggcctcgggacagcatgtcgttctagcctgttcagccctgaagaaaatgtacagagacatcttgatacgaggaagaagtgatgtgcctttggaagttgatgagtcagcaaaggaaaggctggccggagagcagctcttggtggtctacctctgcgggccatttgagatcatttccagacgcttgttgcaacgaaaaggacattttatgccgcccgagttactgcagtcccagttcagtattctggacgcccccatccaggtcctgaaaacttcatccaagtcagcgtggaccaaaagtcccttggagatggctgatgccatcatggaagcacgtggtctctcacatccagctg

SEQ ID NO: 9112 - DNA, 362 bp, Cricetulus griseus
gggtgttcagtctctagttaactagcttgagcacaggtgcacttcaagctcaggcaagtccctcatgccagcctaaggcgaggatagaaaccccacccaccatcttaatagtggtcccttactgctctgtatgactgtgtgaccactctggttctgcataaaggtgtgacccaactccattctccgtcccttcccccagcagagcgggggcctcccattggctgacctcttgccttaggttcttttgtcagtcgggagaagcctgtccacttagtagcattggagaacttgacagtttgtgaatgtttgtttgctcagagtaacaggagcctttatgccgtttatgcacttaactcttcagc

SEQ ID NO: 9113 - DNA, 362 bp, Cricetulus griseus
aggatggcagcggcaccatcgactttgaggagttcttggtcatgatggtgcgccagatgaaagaggatgcgaaggggaagagcgaagaggagctggcagagtgtttccgcatctttgacaggaacgcagacggctacattgatgctgaggagctggctgagattttccgggcttctggggagcacgtgacagatgaggaaatcgaatccctgatgaaggacggagataagaacaacgatggccgcattgacttcgatgagttcctgaagatgatggaggcgtccagtaaggagccggcctttgcttccacccagatcgcaggtcccccgggcgtggacaactccacccttgccttccccgcc

SEQ ID NO: 9114 - DNA, 362 bp, Cricetulus griseus
ctcctaaaagatgcatcctgacttgtctccacacttgcacaccgaggaatgcaacgccttgattaacttgcttaaggaatgtcacaaaaaatcacaacattctgaaattttttggtcattgcaacgatcttgaccgggaaatgagaaagtgcttgaagaatgagtacacagagaggaggaccaggagcagggagcatggtattgccatgcgaaagaggctttccgatcttccagaggaagctggaaaataggtttactggatgccctgactgggagacctgaagacggctggtagctggaaaaatcccatctttttggtctctacagcccttgaatgaaaagtgacccatgaagagctgaac

SEQ ID NO: 9115 - DNA, 362 bp, Cricetulus griseus
ggggtttggatcgctgcaaggggcggagctggagatggcgtccgcggcggcttgccggcgggcctggagagcagtccgaccaggggctgtctggagcgggctgggggggaagagaggtggcgatttctccgtcgtaccgggcagctcaggtcgcagcctggtaccgtcgaggtcagtcatcgtcactcgcagcggcgccattttgcccaagccggtgaaaatgtcctttggtcttctccgtgtgttctccattgtggtcccctttctctatgttgggacactcattagcaagaactttgccgctctacttgaggaacatgacatttttgttccagaggatgacgacgatgacgattagcagg

SEQ ID NO: 9116 - DNA, 361 bp, Cricetulus griseus
gtctgatagttacatggcttgtgtatcaaagggtacttggtacttagtttgcatttctatcatgattttgtgaatctcttgcatttactttgaatgtcaagttagatcggcctgttttataggccaccttttccttctgatgtgtaaaattattttccatttctttttaaacacccatgttactataggtgtttgcttaaattttactattaagtagttttcattcagtgctatgtggtacatacttaactgttagagcaggactcccaggtttactgttttttactagagatcttagtatttcatcatgtaataatttaccttcctcaaccttctgtgcttcatcattgcatgatatcat

SEQ ID NO: 9117 - DNA, 361 bp, Cricetulus griseus
gactgcgaagtctttccgacagcgcttcaggcagttccagtacacagaagctgctgggcctcatgaagccttcaacaaactctgggagctttgctgtcagtggctgaagccaaagatgcgttctaaggaacaaatcctggaactgcttgtgctagagcaattcctaactattctgcccacagaaatagagacctgggtgagggaacactgcccagacaatagagaaagagttgtgtcactcattgaagacttacagagagagcttgagataccagaaccacagatcgacatggatgacatgctcttggaagaactggcaccagttggaacagtacccatcgccacccaacttgcacctgga

SEQ ID NO: 9118 - DNA, 361 bp, Cricetulus griseus
ggcgcatccaacggcagcttgaaattactggcaagaagacaacagacgaggagctggaagagatgttggagagtggtaaccctgccatcttcacttctggaatcatcgactcgcagatttccaagcaagccctcagtgagattgagggccggcacaaggatatcgtgaggctggagagcagcatcaaggagctccattgacatgtttatggacatcgccatgctgggtggagaatcagggaataaattaattactcaaacaaaaaaaaaagtttaataaaatatctgtgttaacccactaaaaaaaaaaaaaaaaaaaaaaaaaaaaaaaaaaaaaaaaaaaaaaaaaaaaaaaaaaaaaa

SEQ ID NO: 9119 - DNA, 360 bp, Cricetulus griseus
tgttctaaaaagtttaaaaaaaaaaaaaaggcccatcctttccagcattgtgctttctcctcaggcttattggaaaattttactctgttttataccaagcttgtttagtacatttttctatgttttaccacaggttacgatttgaaaacaacaactatttttttaatattccattgttaaactgaatgttaccgtctccactccaacaaccagtgtccttcctcttcctttgttccctgcatgttggaggaagagacccctttgtacatttgtgtttccttcttgctactcttctcctccatcttccctccctgtccttttcttttgatttttctataggaaataaatagctttctgtat

SEQ ID NO: 9120 - DNA, 360 bp, Cricetulus griseus
ggccgccggcgccggcgttccctggcccacggacggtcctccggccggactgtggtgtcctcccaggagcagacacaagcagccccagcctcccaggagcagccgaatcatctccaggctctttaggatatatgtgcgggtggcagcattgaacagtcgggcgagtgtccattggcgcctgaggaatcagagcttcgcacccagggcggactgagacaatcctgcagagatctgcctggctgcccctaggggaggcagaggaacccaagatcaagccaggttcacaacagaaaaagaattacaggcatcaccctccgggcaggggtctgagccactgttccgtgtgtgtgtgtgtgtgtg

SEQ ID NO: 9121 - DNA, 360 bp, Cricetulus griseus
ctaagccggccgcatcttcaaccatggtagcgcccgccgtgttgcgcgctctgcgcaagaacaagaccctacgctacggggtccctatgttgttgctggttgttggaggttcctttggtcttcgtgaattttcacaaatccgatatgacgccgtgaggattaaggttgatcctgaattggaaaaaaaattgaaagagaataaaataactttagagtcagaatatgagaaaataaaggactccacttttgaagactggaagaatattcgaggcccaaggccttgggaagatcctgaacttctccaaggacgaaacccagaaacccttaagcctaaggcagcctgactgtgctcagttcttt

SEQ ID NO: 9122 - DNA, 360 bp, Cricetulus griseus
gtttgagggttccttcaagggacttcctcgcccaaagagcgcaggaactgcaacacagatgcgacaaagcgccagctggacgcgcattatccagtcctggtgggatcgaaacttgggcaaaggaggctccgccccctctcagtgatcttctgctccacattcccggaactctacccgctcccgtcgcccgccatattgggtgtgggcggaagttttccgaagccgtggggataaaaagggggtcgctgtgtccctttaactgggagaactggccaacggctagactcccttccggtgcgtgcaatagccacgaaggggtggttctcgttggaagtttaaaagttttccgcctccccaccc

SEQ ID NO: 9123 - DNA, 359 bp, Cricetulus griseus
ctggtgtggtggacggagagttcctacccaggcatcccctagagctgttggcttctgtggattttcaacctgtccccagcatcataggtttcaacaatgatgagtatggttggatcatccctacggtggtaaacagtgcccagacaataaaggaaataaccagagaaaacctgcaggctgttctgaagaatgcaacagcacaaatgatgttgcctcctgagtgtagtgacctgctaatggaagaatatatgggggacactgaggatccccaaaccctccaaatacagttcacagagatgatgggagacttcatgtttgcgatcccagcactccaagtagcacattttcaacgcccccat

SEQ ID NO: 9124 - DNA, 359 bp, Cricetulus griseus
gaagagagtgatctgcccaattatcgagaagaagctaatagagtgcagtgatgacatcactgacctgttcaacgtgctcatgacgctggagatgcagctggtggagcagctggaggagactataaacatatttgaaagaaacatcactgacatggtgggactatttattgaaaatgtccaaaagtctgatggctcagtgccgggacttggagaaccatcaccacgagaagattctggagatcgccatcaacaccctggagaagatcctcaagaacgagatggatgaggacttgcctgatgatgtgcgggcgtcttttgtgacaagcacaattgttaatgccgtcggggcatcgcatgac

SEQ ID NO: 9125 - DNA, 359 bp, Cricetulus griseus
gaaacctgcgtcttgtcctcacacagcgggactgcgggctccaagtcggggggcgacaagatgttctccctcaagaagtggaacgcggtagccatgtggagctgggacgttgagtgcgatacctgcgccatttgcagggtccaggtgatggatgcctgcctcagatgtcaagccgaaaacaaacaagaggactgtgttgtggtctggggagaatgtaatcattcctttcacaactgctgcatgtctctgtgggtgaaacagaacaatcgctgtcctctctgccagcaggactgggtggtccaaagaattggcaaatgagaggtagtagaaggctttcctggtgtggttgtgaccctgga

SEQ ID NO: 9126 - DNA, 359 bp, Cricetulus griseus
ccattgttgttggtgtggagcttccagtctatgacatcaccaagaagcacctgatactctcaggcctgatgggagacaccgtctctacgcattttctctccagcttcacctgtggtctggtgggagctttggcctcaaaccctgtggatgttgtgagaacgcgtatgatgaatcaaagagtccttcgagatggcggatgctctggctacaaaggtaccttggattgcctattgcagacatggaagaacgaagggtttttgctctatataagggttttggccaaattggttgcgccttggtccttggaatatcattttcttttgacatatgagcagctgaagaaactggacttgtgacca

SEQ ID NO: 9127 - DNA, 358 bp, Cricetulus griseus
gccaccgccaccatgggccgcgagtttgggaatctgacgcggatgcggcacgtgatctcctacagcttgtcacccttcgagcagcgcgccttcccgcacttcttcagcaaaggcatccccaacgtgctgcgccgcactcgcgagcgcatcctgcgcgtggcgccgccatttgtgttgctttatctgatctacacgtgggggaaccaggagtttgagcggtccaaaaggagaatccagccaagtacgcaaacgacaagtgagcagcacacatctggatgacagtttcctgcctttgaaagacccttctctgggagaggagtctacattgtggtatcttgaagacacaataaactactta

SEQ ID NO: 9128 - DNA, 358 bp, Cricetulus griseus
tggaacctgcacagagggtacctctacagggatgtgatgctggagaattagaaaacttacaagtgtgaggagtgtggtaaggtccttagatcttctaaaacactttctatacaccagagacttcacactggagaaaaaccctacaagtgtaaagaatgtcataaggccttacatgctcatcactttttatacaccagaaaaatcatactgatgaaaaaccctataagtgtgaagaatgtggcagatcattttactatccttcaatgctgaagcaacatcaaaagaattcattctggagagaaaccctacaagtgtgaagaatgtggcaaaagctttttatgatccttcgttccttaag

SEQ ID NO: 9129 - DNA, 358 bp, Cricetulus griseus
ccgccatggccaagtacctggcccagatcattgtgatgggtgtgcaggtggtgggcagagcctttgcccgggccctgaggcaggagtttgcagcaagccaggcagctgctgatgctcggggtcgtgctgggcaccagtctgcagctgcatccaacctctccggcccctccaggaggcccagcagattctcaacgtctccaagctgaaccctgagcaggtccagaagaattatgagcacctatttaaggtgaacgataaatctgtgggtggctccttctacttgcagtcaaaggttgtccgtgcaaaggaacgcctagatgaggaactccgaatacaagaccaagaagacagagagaaa

SEQ ID NO: 9130 - DNA, 357 bp, Cricetulus griseus
  modified_base (70)..(70): a, c, t, g, unknown or other
  modified_base (99)..(99): a, c, t, g, unknown or other
aacggcttgtacctgctgaggatggccagaggcttgctgatgatcttggttttgagtctttgaggccagngccaaggagaatatcaatgtgaagcaagngtttgagcgcctggtggacaccatctgtgagaagatgactgagtccctggaacccagctctagcgtgggcagcacggaaagggcccagctcttggagataccccaccccccagcctagcagctgcggctgttaagggtggcccttgacctgcccacacctgctcaggtccaccagcttggccttgaacctgcctgtgaactgactgtagccaaggatacaggcaggtctgtagttgtcagacaaaaaaaaaaaaaaaa

SEQ ID NO: 9131 - DNA, 357 bp, Cricetulus griseus
ctgccatcatgaagctgcttgcaatggttgtactgctcgtcaccatctgtagcctggaaggggctttggttcgcagacaggcggaggagcccggtctgcaaagcctgttcagtcagtattttcagagcatgactgactatggcaaggacttgatggagaaggccaagagctcggagattcagacccaagccaaggcttactttgaaaagacacaagagcagctgacacccctggtcaagaaagctagtactgatctgatgaacttcttgagcaactttatgaaccttgagaaaccagctcctgctgctaagtgaggcgtcagacagcagtcttcctatcctagctgccccaccggcc

SEQ ID NO: 9132 - DNA, 357 bp, Cricetulus griseus
atgaacaagagagtttaggaagttgcaattcagtgcttggagacagtttttaagatcagttcagaagatacacatctagcagttttcacagcctttgacagaaatgttcacaaacaccgtctgtaagaatgacattctgcccctttccaactcagtacctgaagatgtgggaaaggctgatcaattgaaagatgaaggcaataaccacatgaaagaggaaaattacactgctgcagtggattgttacacacaggccatagaattggaccccaataatgcggtttattattgtaacagggctgctgctcaaagcaaattaagtcactacacagatgcaatgaggtaggggacagcacc

SEQ ID NO: 9133 - DNA, 357 bp, Cricetulus griseus
aagcacctactccagcaagggtggacagccatactgcaacatctgcagagtgtgtgaaggttatttcaggttcaagaagccttgctccccgaccagcaacgcagagtgtgagtgcacagagggactccactgccttgggacccaagtgtgcctggtgcgaaaaggactgcaagccgggtcaagagttaacaaatcagggttgtaaaaactgtgactttgggacattcaatgatcagagtggtggtggcacctgccgaccctggacaaactgctctctggacggaaaacttgagcttaagaaggggaccaaagagacggatgtggaatttaattaatttttttttttttttacttaag

SEQ ID NO: 9134 - DNA, 357 bp, Cricetulus griseus
  modified_base (119)..(119): a, c, t, g, unknown or other
atctttccttcaatgacacatctgtcactgttgtgtggtatgataaaattaggccacatctggacagattctccaccctggatctgtgtggtgtgacgccagtttttgtcagaccggtntaaaacctttgacccctatggaccacgatggctatctttaattgcacagtatgatctgagtcatttaagcaaggctgccatgattggctgtgatagacttgtccgggtattctgtctaaatcctggactcctggtggggctatggcagaagggtgacggactggcttttgtcatggcaaatcttcattttcatcgcctcgtggagagaagcacattaggctcaatcactctcccctat

SEQ ID NO: 9135 - DNA, 356 bp, Cricetulus griseus
tgcttctctggagacaactttctgatagtgttgttaaaaggccaacctagtgttgcagaagtttgcacatgcaacgatatattaattaccagtgtttaaaactggtttagcagaatgtatatttttctctctctgccttttgaattttacttataatgacagaaaaagtattgagccattttaatgacttttttataaattatatttatactaatctataatgaagggtgtttttattaaaaaagtcgattttataattctccagctgatgccaaatgttagtatcacaaaccaccaaatgtatgtgcagtgtgtattatggatcaatagactcaacttgctttccaataaattgt

SEQ ID NO: 9136 - DNA, 356 bp, Cricetulus griseus
gcttctcaggatggatgtcactcgcctactcctggccaccctagtgggcttcttatgcttccttgccatctacagccacatggtacctgaggagacactcagagatgacaggagtctgaggagcaactcctccatgaactcattggatttctcttctgtttctatcgtggcactgaacaagaaatccaagaagatcaacagaaaagaagccgagaagcagaagagatcgtccaagaaaaaggcctcgacgaagaaggtggcacggcccccgccacccacgccctgcgtggccacccgagaccagctgcaagccgcctgccacccgcctgctgcgacccgtgccgcctcctgccagt

SEQ ID NO: 9137 - DNA, 356 bp, Cricetulus griseus
acttcagggacacgcttgggtggccaaacttctgttggagtgagcaccctggaaccggagcagaccctctcacccaggatgcaggagaagcacctgcacatcagagtgaaactgctggatggcactgtggaagtatttgacattgagcctaagtgtgatggacaggtcttactgacacaagtgtggaagcatctgaacctgattgaatgtgactactttggtctggagtttaagaatgtccagtcctactggatttggcttgaacccatgaagcccatcattaggcaagtacgaaggccaaagaatgcagttcttcgtctggcagtacttaaagacagaaaaaaaaaaaaaaaaaa

SEQ ID NO: 9138 - DNA, 356 bp, Cricetulus griseus
gcgctttgaggaggagctagggcgggaggcggctggcggcggtcaaccagatggtggacgagctgattgagtgcggccacacagcggcggccaccatggctgagtggaaggacgggctgaacgaggcctgggccgaactgttggagctcatgggcactcgggcccagctgctcgctgcctctcgggagctgcataagttcttcagtgatgcccgagagcttcaagggcagattgaggagaagcggaggcggctgccccgcttgaccgcaccacctgagcccagacccagtgccagctccatgcagaggacccctgcgagccttcgagcacgacctgcagcttctcgtgtcccaggt

SEQ ID NO: 9139 - DNA, 355 bp, Cricetulus griseus
gctggagctctggttccgcttcgtgtttgtggttctcaccttcatcgttcacctttgcctgtttgcacattccctgcgcaagttctccatgagagactggggcatcgagcagaaatggatgtctgtcctcctgccgctgctgctgctctacaacgacccgttcttcccgctctccttcctggtgaacagctggctcccagggatgctggatgacttcttccagtctctgttcctttgtgccctgctgctcttctggctgtgcgtgtatcatgggatacgggtccagggagaaagaaaatgcttaactttctatttgcctaaattcttcatcgttaggactgttgtggctggcttc

SEQ ID NO: 9140 - DNA, 355 bp, Cricetulus griseus
ctggcggggctgtggggactcccgtggagatggcttgcgccgccgcgcggtccccggccgaccaggacaggtatatttgtatctaccccgcttatttaaataataagaagaccatagccgaggggaggcggattcccataagtaaggctgtagaaaaccctactgctactgagattcaggatgtctgttcagcagttggactgaatgcatttctggaagaaaaacaaatgtactccagagagtggaaccgtgatgttcagtacagaggcagagttcgggtacagctcagacaggaagatggcagcctgtgtcttgtacagttcccatcacgtaagtcagtgatgctatatgtagc

SEQ ID NO: 9141 - DNA, 355 bp, Cricetulus griseus
ctcatagatgaccggccggacatcacaggggctgagcccacaccccagctgggagcacatcctcttcacctcctgccacaatcatcacctgcagctgaagccccctcgccggagactccactcgtgggcagatgactggaaggccatcctggatagcaagcggccccgctgagggctgtgctatgactctctcctggtccagtgtggggcttgaagctcatgactggacggcaaacagcctgctgagggctgtgctttagttcctggcacttcctggaggatcccaatggactgtctggtcaggacaacttcttgacacactccccttttcctggctcagcaaggccttaacctg

SEQ ID NO: 9142 - DNA, 355 bp, Cricetulus griseus
ctttggcctcggcggcagaagcaagatgacgaaaggaacgtcatcctttggaaagcgtcgcaataagacgcacacgttgtgccgccgctgtggctctaaggcctaccatcttcagaagtccacctgtggcaaatgtggctaccctgctaagcgcaagagaaagtataactggagtgccaaggctaagaggcgaaacactaccgggactgggcggatgcggcacctaaaaattgtctatcgaagattcagacatggattccggtgaagggacaacacctaaacccaagagggcagctgttgcagcatccagttcatcttgaggtatttcagtcagtacaataaaaataaatgttct

SEQ ID NO: 9143 - DNA, 354 bp, Cricetulus griseus
gggtcatcacaacatgaagaactatatgtgacatgccatgtcttgtgccctgagctgaatttgttcaggcagcttgcaaagccttgtgggtacaggctgcagcaacagagctgttcacaggccatgcagggcccagcagtttgctttgtctaaccatctatttccttaaagaaaaagattcccaagcaggcttccacgaacagcaagcacttactcatctctcttttagcctttcctcttaatggatgtgaactgtgccgtgggtaaatcatttgtatttcttaagcgttctgtatgactaacaggtattaagtcactgggtatgtgtataactaatgtaactgtccttttaaa

SEQ ID NO: 9144 - DNA, 354 bp, Cricetulus griseus
gcaggtggcggcatccagagatggcagaccaggcccgcatgccctacaccaaatgctgttattcatgaggtgcagcgctttggggatatttgccattctcagcaggccgcagagcatgcctgggggagcccctggcccgcatggagctcttcctcttcttcacctgcctcctgcagcgctttagcttctcggtgcctgatggacagccgcagcccagtgaccatggggtctttgcaatgccccgttgccccctccccctaccagctctgtgctgtactgcgccagcagggtcactaattccagtcctgctctgttgctaggactgaaccctgcacaataaactagtcttgtggc

SEQ ID NO: 9145 - DNA, 354 bp, Cricetulus griseus
cttttttttttttttttttttttatttattggtttttcgatcactggttgtgtgaaagtgaagatctttttctggcttttctattaacattccttttactcctaaacagcatggcctttaaaagttagagaactatcaaacttttaattgtacattactttttgtcagtttctgtgtgctgtatttacccaacaaatatatttaaaacgttgtaaaaacataatttaattattgatagtataaagagaatactttcctatgaaaatattgatattaacagtactatctgtaaagagttataaagtttcaaaggggatttttgaataaaattaaagactttaaaaagaaagaaaa

SEQ ID NO: 9146 - DNA, 354 bp, Cricetulus griseus
gtcaagtctatctccatgacaactttcactgaacctgaagtcctgttcctccagtctcgtggaaatgaggtgtgccgcaagatctggctgggtctttttgacgctcggacatcattgataccagattccagggaccctcagaaagtgaaggagtttctccaagaaaagtacgagaaaaagagatggtacgtaccccggagcaagtcaaagggccctcttacagcagaggcggtgcctccacccctgtccagggctccgtcccggaaggaaaacccgtgcggacacttctgggagaccctgtgccatctctctctgatgctgcttcctcttcgagccagtctgccaaccagtcgc

SEQ ID NO: 9147 - DNA, 353 bp, Cricetulus griseus
ggggcgacattgctgtgggaataggagatacaacttggcccaccacgtgcttcaggctggccctggtccaccaacaaccaccacgcagaggcctacaacaacctagctgtgctggagatgcgaaagggtcacattgaacaggcaagagcactcttacaaactgcatcgtcgttagcgccccatatgtatgagccacattttaattttgcaacagtctctgataagattggagatcttcagagaagctatgttgctgctcagaagtctgaggcggcattcccagagcacgtggacacaaagcacttaattaagcagttaaagcaacactttgctatgctctgataagttcttgg

SEQ ID NO: 9148 - DNA, 353 bp, Cricetulus griseus
ctttgcaaggctgtgggacggcagttctgtgctacccaggcctatgagggcagtcgcactgatgagctatcagtgcctgcaggggcacgtgtgtatgtgctggaaacctcagaccgcggctggtggctgtgcaggtacaacggacgggtaggcctgtttcctgcagtgctgctgcaacctgaagggctgggctccctcctgggcaggccagggctcccagatagtgggaaggaagacaaggtgaccaaggacaggattgttccccctgtagtaccaagtcgcccctgtatgagtgccatccagagccgatgctgctccatcacctgcagggcactgggacaggaccaaaggac

SEQ ID NO: 9149 - DNA, 353 bp, Cricetulus griseus
cgacaaggccagcgacccccatctggggaaaccctctcccctgaagactgtgaactggagacccaggatatgtttccagataccatccattcccggggccatcatggtccggctgagaggaccccctctgagatccagtttcaccaagtaaaatttggcgcccctcgccggaaggagacagatcctctcaatgaaccgtgggaggaggaatggacgctgctgggaaaagaggaactgagtgggagcttgttgcagtcagtccaggaggccctggaggaaaggagcctgactattcggccagccttagaactccaggagctggattccccagatgatgccatgggaaccaccaa

SEQ ID NO: 9150 - DNA, 353 bp, Cricetulus griseus
aacagagagtctgctcatctctgcacataaggaccaagtgctatctaaacatgagttcccaccagcagaagcagccctgcactgcaccccctcagctgcaacagcatcaggtgaaacagccttgccagccaccaccccaggaaccctgtggccccaaaaccaaggatccctgcaaccccaaggttcctgagccctgccagcctaaggtgcctgagccctgccagcctaaggtgcctgagccctgccagcctaaggtgcctggagccctgccagcctaaggtgccagagccctgcccagcctaaggtcgccagagccctgccagcctaaggtgcctgagccctgccacccaagg

SEQ ID NO: 9151 - DNA, 352 bp, Cricetulus griseus
  modified_base (325)..(325): a, c, t, g, unknown or other
ctgctgcaagaactgtagtgcgggtgagtttgtccaggagtcctgcacaatcccccacaccctaggacaatgtgagaagtgtcatccagggacattcacagaggctggtaatggcctagagtcttgcataccttgttccagctgtggaaaagaccaggaaaaagtggctgattgctctgccaccagtgaccggaaatgccagtgccgaatgggtcatttctattctgaccccggatccagtgagttctgccgccagtgtaccaagtgtccccagggagtccctgtcctccagagatgcaactccacatcgaacacagtgtgtttnttttatttattttattttatttattta

SEQ ID NO: 9152 - DNA, 352 bp, Cricetulus griseus
atggacagtgaggtacaacgggatggaaggatcttggatttgattgatgacgcttggcgggaagacaagctaccatacgaggatgttgcaatcccactgagcgagcttccagagcctgagcaggacaacggcggcaccacagagtctgtgaaagaacaggagatgaagtggacagacctggccttgcagtgcctccatgagaacgtcccacctgctggaaactgacactaggttcctttcccttggatggagttttcaaaaatacgtagataaagcatgtttcttctctgtctccgaattcagatctttgcataataaatcaacactacaaaaataggaaaaaaaaaaaaaa

SEQ ID NO: 9153 - DNA, 352 bp, Cricetulus griseus
cgcggcgcgatgccggggcggcacgtttcgcgagtccgctccttgtacaagcgcatcttgcagctgcaccgggctctgcccccggacctcaaagccctgggtgaccagtacgtgaaggacgagttcaggagacataaaactgttggctctggcgaggcccagcgtttcttgcaagaatgggaggcctatgctgctgtgttatggcaacaagctaaggatagcagacaaagttcaacaggaaaagcttgttttggcacctctctcccggaagaaaaactcaatgactttcgtgatgagcagattggacaattgcaagagctgatgacaagaagctactaaacccaatcggcag

SEQ ID NO: 9154 - DNA, 351 bp, Cricetulus griseus
agagagtacagcaacaacatggtcatcattgacctctgctttttcagctgtcagagcctcctgaaggactctgccaccctcagcttcctcagggaaagcaagtttgatgctctgttcacagacccagccatgccctgcggtgtgatcctggctgagtatctgaacctgccctccatctatctcttcagaggtttcccatgctctctggagcacatgcttggacaaagcaatttcattgctagccctcttggagaactacttatattattgtctgtattcaaagtacgaagtcatcgcctcagaactcctcaagagagatgtgtccctaccagtcttacaccagaactctct

SEQ ID NO: 9155 - DNA, 351 bp, Cricetulus griseus
  modified_base (104)..(104): a, c, t, g, unknown or other
cagagtctgcacagcttccactgcttctgctgggtgggtgtgcatagtgcatcatgcactgggtctgtgtgcttgtgcctgagacatgctcaccatagcctctntcccctatgtggggatgaggatgtgcttgtttgcagtggccaggacagattgtttttgcccttgtgcctagttaagagctttcaaaagtacaatgacatttttgatactttgttataataaatgctttgttgacctcagatttccctccaaaatgccttaattttgtggcctgtgtctcattgggtagaagcttcctccatgtgcagtctttcatttacattttatttgtttgttcattcattcatt

SEQ ID NO: 9156 - DNA, 350 bp, Cricetulus griseus
gttcatcctaaaagaatcttattctgtgatgagagggaaggtggggagtgggggggggtcacaaaagtggaagggaaacccattttattttcttacatgaagttagtatctgttagctccctgcctttcatggtgagctcaaatcattagctgttcattctgcttgtagaatccatgcagagatgtctgtaggtcagtggcatattagcagcctccctcagccagttcctggctcatacgtacacagtcccgtttgctgttcatcattaaccatctccatcgccccccaaaccccctgtgagacacaaaatataccactgtgctgccacaaggtcaagtccaatcgcctc

SEQ ID NO: 9157 - DNA, 350 bp, Cricetulus griseus
  modified_base (319)..(319): a, c, t, g, unknown or other
acaggagataaaccctacaagtgtgaagtatgtggcaaggccttccgtgctccatcagtactttctgtgcacaggagaattcatacaggagaaacaccctacatgtgtgaagtctgtggcaaagccttccgttgcccatcattactttccaaacacaagagaattcatacaggtgaaaaactctacaaatgtgaggtatgtggtaaggccttccattgtccatcattgctttctaaaacacaagagaattcatacaggagagaaacaccacaagtgtaaagaatgtggtctggccttctattgtccatcatcactttcngaacacaaaagattcatacaggtgagaaacc

SEQ ID NO: 9158 - DNA, 350 bp, Cricetulus griseus
gggtagcagcaggctgctggtgggccgtcctgggtggtgcagattgtgctggggcttctgagtgtggttctgggtggaatgctctacatctgccattatttagccatgaacacctcaggtgcccccttctggactgggatcgtggctatgatggctggatctgttgccttccttcacaagaaacggggtggtacctgctgggccctgttgaggacccttcttgtgctgatgaatttctgcatgtctgtggctgccattgttcttggagcttgtgagttcaatgtttaccgatactatctcagagatgatgtctgtgtgagctactcttcaaatcactggcccaccaagcc

SEQ ID NO: 9159 - DNA, 350 bp, Cricetulus griseus
  modified_base (325)..(325): a, c, t, g, unknown or other
agatggaagcactatggatttccttttattgagaatatcgtgccttacatttttatactttggtttatgcaagctataaaatttatcataaatgggttaaatggtttgttttgttttaagtctctcttacctcttcctactttccagccctgtgtagaattattttcccctctggatcacactccatgatgtcctgttttcttctgatctctctttttataaaactgaacataagccaggtgtggtggtgcactcctgtacacccagccctagggaggctgaggtaggaccatgagttggaggctggcctagactaataaaaaanataaatctataaaaaaaaaaaaaaa

SEQ ID NO: 9160 - DNA, 350 bp, Cricetulus griseus
ttgaagaaagccattctggatgacatggtgaggttggggaaagaaagcggactctattcttttgaacaggttaaagctattcacatccattctgacatgttctcagttcaaaatggtttgctgacaccaacactaaaggctaagagacccgagctgagagagtacttcaaaaaacaaatagaagagctttactcaatcttccatgtgaagctcaaggagggttcttctcaatccaatgaactttgcagcaatattatagttattcttgaaacaaaggaacaagagtgacgcagctgaaaatgaacgagcacccgattttgcgactgagcctttcctgacccaagaagtct

SEQ ID NO: 9161 - DNA, 349 bp, Cricetulus griseus
tctgaaggaactgtgagacttttagatccccagaccaacactgagatagcaaactaccctatctacaagatcctcttctgtgtcagagggcatgatgggactcctgagagtgactgttttgcattcactgaaagtcactataatgcagagctctttaggatacatgtctttcgctgtgaaatacaagaagctgtaagccggatactttacagttttgccactgccttccgccgtactgccaagcagaccctactctcagccactgcctcgccgcagactcctgacagtgacatctttaccttctctgtgtctttagaaataaagaagatgatggtaaaggttattttag

SEQ ID NO: 9162 - DNA, 349 bp, Cricetulus griseus
gagatcctgttgggctacctttggggcaccagtggctagtagcactgggctaaatgggccactgcctcgagagaatgggcccctggaagagctgcagtaatgggacacaggctggaggggaggtcgcggcttgagcctcattcacaaggggtgacaggagagagaaggctgcccctcccttccttcgggttggcgtccaagggccaggtggccaagggccattgtcccctggagcctgatacacctcctcatctggaaatcccaaacacccagaggacaaatttccatggagcagccatggctctgggtcagcgacaaaaaaaaaaaaaaaaaaaaaaaaaaaaaaaaa

SEQ ID NO: 9163 - DNA, 348 bp, Cricetulus griseus
cactaaagctgcccgcaagagcgtcggccggccacgggcggcgtcaagaagccgcaccgctaccggcccggcaccgtggcgctgcgcgagatccggcgctaccagaaatccaccgagctgctgatccgcaagctgccgttccagcgcctggtgcgcgagatcgcgcaggactttaagaccgacctgcgcttccagagctcggccgtcatggcgctgcaggaggcgagcgaggcctacctggtggggctgttcgaggacaccaacctgtgcgccatccacgccaagcgcgtcaccatcatgcccaaggacatccagctggcccgccgcatccgcggggagcgggcctaa

SEQ ID NO: 9164 - DNA, 348 bp, Cricetulus griseus
atggaaggggtcatagtctctgggtctaacttctggccatgtgccactgagaacctcaaagttaagagggtgccatttcatcgcagacaaatgatagtttgaagggttaagttcttttgaagtgttacatcatgctggaacctgcaaatgagtactttttctagtaaggagagaaaatatgtgtatttttatataatatctaaagttatatttcaggtgtaatgttttctgtgcaaaatattgtaaattatgtttgtgctatagtatttgactaaaaaatatttaaaaaatgtctcactgttgacatatttaatgttttaaatgtacagatgtatttaactgctgcac

SEQ ID NO: 9165 - DNA, 348 bp, Cricetulus griseus
cttcctgtcgcggccaccatcggagaggagcagccatggccctgcactatcccatggctgtgggcctcaacaagggccacaaggtgacgaagaatatcaacaagccgaggctcgggcgcctcaccaagcacaccaagttggttcgtggtacgggacatgatctgggaggtgtgcagcttcgcgccctatgagcggcgtgccatggagctgctcaaggtgtccaaggacaagtgcgcactcaagttcatcaagaagcaggtgggcactcacatccaagccaagaggaagcgcgaggagcctagcaacaggctggcggccatgcagaaggcggcggccaagaaggactga

SEQ ID NO: 9166 - DNA, 348 bp, Cricetulus griseus
gccggttttccccaaggacagggcgtgtgcagaggcgtgggcccgagggggttatgcagctgagaaggaggagcgtcgccagtgggagagcagggaacacaagaagatcacagacagcctggaagccttggccatgatcaagcggcgggctgaggaacgaaagaaggccagagaaagaggggagacacccctgccagacagtgaggagagtacccccaccagccctaaggctcaggaagagccacccatggaaagaaacacagcagaagatggaaattggtttgtgaaggaaagctttgaggccaaagatgaactattcccagagaagccaaagcgaagaagaggagc

SEQ ID NO: 9167 - DNA, 348 bp, Cricetulus griseus
aattcacactggagagaaaccttacaaatgtgaagaatgtggaaagacttttaatgttctctcaacactttctaaacaccagaggattcacactggagagaaaccttacaaatgtgaagaatgtggcatggcctttaatgttcgctgcattctttctaaacaccagaggacccatactggagaaaaaccctacaaatgtaaagattgtggcaaagcttttaactgttcttccagccttcaccaacaccagcaaatacacagaggagagaaactctacaaatgtgatgattgtgaccaggcgtttagctgttcttcttacctatataagcatcggcgaatccatagtgg

SEQ ID NO: 9168 - DNA, 347 bp, Cricetulus griseus
gcaggagttcttaacagaagccttgcctgtcggcctcattggaatgaactgtgttttgatgaaacagtatattgagtttgtagctgacagattgcttgtagaacttggattctcaaaggtttttcaggcagaaaatccctttgattttatggaaaacatttcgttagaagggaaaacaaatttctttgagaagcgagtttctgagtatcagcgctttgcagtcatggcggaaaccacagataatgtcttcaccctggatgcagatttttagagccctcttttttttttccttttggtcataatttaaaataaagtttaatgaaagaaaaaaaaaaaaaaaaaaaaaa

SEQ ID NO: 9169 - DNA, 347 bp, Cricetulus griseus
caagctgataatgcacaacaaggctgactatgcctataatggaggccagtaactgcgtgctccaaggaggtgccagccagcagtttcttttcccagtattttttcccctgccccctagttcgcagaggtattatagtgaggtaaaagattaggataaggttcctgggatccagatagaaacgtttatttctgtgtagtcttagctatgcactggttatcccgactagcctgactgtccaggcacagctgtgtcactgagaagatgcaggctgcgccagcctgaggctaccagctgttctgcaggttcctgggtgccgtgggcatctgaaagcccctcgcttactccc

SEQ ID NO: 9170 - DNA, 346 bp, Cricetulus griseus
gttacctttggtaattgcagctttgtacattattgcatgaaacataccaaaataatacctcacctaaaggtttaacttaaatactgtagagaaggtctcaggctatagtgtttgcctcttcaggtgccattgatactgcctaatacagtgccacttgctctgggaagatccataactcttagttgtgttgaatgtaggacatgttctcctgtgttacacagatctcatgaagaatgacaaaaccagcatttaaagaacagcttgtgtagttgtagcaaatcaataataagtgtccttcaaggatgaacatgtattattttgtattttgcaagtaaaacttaacatt

SEQ ID NO: 9171 - DNA, 346 bp, Cricetulus griseus
gcctggactgaagtggcaactgggcctccttgggattggtcagaagggtttcctgggctggtcctcacagggaccccttcttaccactctccctgctcttaaccctttccactttccatttcaaaaatggctcaggatccagtccagagttctaggggatagatccacaagcttatgtcccttctctagggtgtcttcctggacttactgttggcagctgttcttgcccccaaagcaagggtgtcattcctctgtggacactggtctcccctaaccttcctctacccccagcatcaggtcaggatcagtgctctggcaatgaggcttatgagggctggtcctcaga

SEQ ID NO: 9172 - DNA, 346 bp, Cricetulus griseus
cctcataaactagacacattgtcacaaagaataaaaagtaacaaaaaggacgtccatactgggaaaaagatacaatcaagatgcttggactacagaaggcacatagccctcaaattacacaagaacatcccttcagtgaacgaaaagttgaaagtggttaaacacttgatacgaatccagcccctgaagctgccacaaggacttcccacagaagagaccatgtctagcacgtgcctcaagagcaatggggaattggtggtacagtggcaatctaaagcctgtggagcaggaagccaagtcctgattgccacccagctgcaggttacaagttgcagttactgaggaa

SEQ ID NO: 9173 - DNA, 240 bp, Cricetulus griseus
cttcgccgtcaaggcgaacagcgaagcctgcagggacggactgcgggcgcaggaagagtgcagcaacaccactcgcctgctgcagcgccagctcacccgctcccaggacaacctggctcaggcagaggcgcaggcaagcacctgcaaccggaccgtggtgacccttcaagattccctggagaagaaagtgtctcagatccaggagaagcaggctctgatccaggagcggaaaaataaaat

SEQ ID NO: 9174 - DNA, 346 bp, Cricetulus griseus
  modified_base (88)..(88): a, c, t, g, unknown or other
atgcattaaagaattgacagtaccccactcaatgttgctgtgaccggagagactggagcagggaaatccagcttcatcaatgcctganaggggttgggcatgaagaggaaggtgcagctgaaactggagtggtggaaacgaccatggagagacgtccatacaaacaccacaatattcccaatgtggtgatttgggacctgcctggtattggaagcacaaatttcccacccaaagactatctggagaaaatgaaattcaatgagtatgacttcttcatcattgtttctgccacacgctttaagaaaactaaaaactaaaaaaaaaaaaaaaaaaaaaaaaaaaaaaa

SEQ ID NO: 9175 - DNA, 346 bp, Cricetulus griseus
aaataaaaaataaaaaaaataaaaaaaaaaggtaacaacatgctgtaccccaaggaggacaaggagaaccgcatcctgcttgccggaactgcgattaccagcaggaggccgataacagctgcatttacgtcaacaagatcacacacgaagtggacgagctgacccagatcatcgcagacgtgtcccaggaccccacgctgccgcggacggaggaccacccctgcccagaagtgtggccacaaggaggccgtgttcttccagtcccacagtgcccgagcggaggacgccatgcgcctgtactatgtgtgcaccgccccacactgccggccaccgctggacagagtga

SEQ ID NO: 9176 - DNA, 346 bp, Cricetulus griseus
  modified_base (11)..(11): a, c, t, g, unknown or other
gttccatgcancgggcctactgctgctctaggactcccctacatgaaccagccccagacacagctgcagcctcaggttcctggccagcaaccagcgcagcctccagcccaccagcagatgaggactctcaatgccctaggaaacaaccccatgagtattccagcaggtggaataacaacagatcagcagccaccaaacttgatttcagaatcagctcttccaacatccttgggggccaccaatccactaatgaatgatggctcgaactctggtaacattggaagcctcagcacgatacctactgcagcacctccttccagcaccggtgttcgaaaaagctggcatg

SEQ ID NO: 9177 - DNA, 346 bp, Cricetulus griseus
tggaactctctctggagaccaggctggcctcaaactcacaaagatcctcctgcctctgcctcccgagtgctgtgattaaaggtgtgtatccagcctcgcttgtctttaccagtatggtggcatttctaaaagcaccctacctcacaggaattctgagagaattatatgtgtatggagtatttgctacatgcccaacatgggaactgccttctgaatgctcaagttttaacatttattatttttaaagcctcataagcagtttagaagccattcacatttggtacaaactgtagctcaaacaaactccactttgaaactctgatggcctaagcaaatccttttaact

SEQ ID NO: 9178 - DNA, 345 bp, Cricetulus griseus
  modified_base (327)..(327): a, c, t, g, unknown or other
accagatggctcctataatgatcctggagcctgctgatggttgcctctgcgaccagccagtgctcatctccgtgcacggcctggcccccgagcagcccgtcacgctgcgcgcggccctgcgagacgagaaaggcgcgctcttccgcgcccacgcgcgctaccgcggcgacgcccagggcggcctggacctggcgcgcgcgccctcgctgggcggcagcttcgccgggatcgagcccatggggctgctctgggccaggatgaccacaactggaagagcgagttctatgccaatgagatctccaaacgcttagaggcccatgggaaggngaagccccagatcatctg

SEQ ID NO: 9179 - DNA, 345 bp, Cricetulus griseus
  modified_base (333)..(333): a, c, t, g, unknown or other
cctgacaggcttcaaccaccggcccatggtcacctgcaaccaagccaggagcgctctaccacccagcggccctcctcgggctccaggtccccactgagatcctcttggaggcagaagtactttaattctcaagagtcctgcaagtctggacagtggatccagggcccagcagaaagctgtgttgttccagctgtagccacttgggctctgaggctggatcttccctgtgccactgtgggcattagatctaggggtgtggcacttctctagtgcttcccataatgcaccttgtcccccccagtcttcaacttcattcctctaaacaaaaaaaanaaaaaaaaaaaa

SEQ ID NO: 9180 - DNA, 345 bp, Cricetulus griseus
gctgcagctatcaattccggatcgctctgctcggggacgccgcggtgggcaagacgtcactgctgcagcgctacgtggcgggctctcgggggccggtggagccggagcccgagcccactgtgggcgtggagttctacagccgcgagctgttgctgccccccgggctgcggatcaagctgcagctctgggacaccgcgggtcacgagcgcttcaggtgcatcacccgatccttctaccggaacctggtggcgttctgttggtctttgatgtgaccaacagggagtcctttgaacacatccaggcttggcaccaggaggtcgtatcctctcagggccctgacaaggt

SEQ ID NO: 9181 - DNA, 345 bp, Cricetulus griseus
cagccaccatcacctttagattcaaggatgtccgaaaaacccattcccagtcaccaaggggatgccgatttccacctggaaactccattttccaacacccccggcattccagatctcccagccctctggataagcctcctcttcaagaaaggttccagcctcattctcagtctacgtgggagaagatccatgagagtgtatgcagcctcctgacatcccacagagcccacccaaaggaagattttaatccctgagacaaattatatctgttcaagaccaagctgcccaatgaagacattcccacagcatggacagagatatttttaactactatctcatggaaca

SEQ ID NO: 9182 - DNA, 345 bp, Cricetulus griseus
  modified_base (333)..(333): a, c, t, g, unknown or other
ttttccaaagaaattagaccaaaactttcttcttgagaagaagtgttgaagttttggtagagtattccttttttgtgtttggacagggctggtcgtcctgctgtcccgaaagaaccagccagctctttgatctgccgtgttccaaactctccgttggggacgtttgcatctcgcttcaccctcaagaacctgaagaatggctctagttaaaaggccagcccgtggaccctgccagtgtcctgctgaagcacgcaaagaccgacagcctggctggcagcagacacagatacgccgagcaaagaaacggaatctttttttttttttttttttttntttttttaagag

SEQ ID NO: 9183 - DNA, 345 bp, Cricetulus griseus
aatagaataattcaaaaggaaccagtttatagcagacaattaagagctgggaccagagactgtcaaacacaagaaaagatatgtctttattagcagctctagcaaatttgatttgctgtattttatacaaattgtttagaatgagttttgagacttagaagggaaatatagcacaagacttctataattactatacttaaattatgctttatgtggggactgggaaatgtatgtttacattgcttatatctgatcacttttgtatttgttgatttaaaacctgtgggtcttttttatcactcttaatataacttttataatcttttaaaataaactctcttaatt

SEQ ID NO: 9184 - DNA, 345 bp, Cricetulus griseus
tcagtgaggaaactttgaactctgacattcagaaactgaaggagaaacgggacatgctggacaaggagatttcccagttagtaaaagaaggctaccgtgtgggtgagctggaggaccatatcgctctcctccatgagtacaatgacatcaaggatgtggcacagatgctgctgggaaagctggctctgacccgaggtgtcaccaccaaggagttatatccagattttggtctagacctgagtgactgagcagagagtctggcagatttttatctacggcccacagggacaagtggatggggaacatgaaaaacacagagacccagacagtacattcgtatagttt

SEQ ID NO: 9185 - DNA, 344 bp, Cricetulus griseus
cccgggacatccctgtgaatcccatgtgcatttaccgctctccaaccaagaaggccactgacgaagatggcctagagaagaaggtcccggaggccaccaaccgtagggtctgggaactgtccaaggccaattctcaatttgccaccaccttctatcagcacctggcagactccaagaatgacaatgacaacattttcttgtcacccttgagtatctccacagcttttgctatggccaagctgggtgcctgtaatgacactctcaagcagctgatggaggtttttaaatttgataccatctcggagaaaacatctgatcagatccacttcttctttgccaaactg

SEQ ID NO: 9186 - DNA, 344 bp, Cricetulus griseus
caaatcgtggccctcctacaaacaaggataccaagcaacaacagtcgctggttggtggacacagggggacaccgggggtacgtgccagctggaaaacttcagctataccaccatattgttcccagtgagaaggagctcagaggccagacggggatacatgaagactgctggctttcaactccagagcccacccaaccctctgtccccactgtcccaaccatgacccaggtggtggcagtgtacccttttgtggccaggagcacgcatgaactgagtctaaaggcaggccagcctgtgacaatcctagaagcccaagacaagaaggggaacccagaatggagcct

SEQ ID NO: 9187 - DNA, 343 bp, Cricetulus griseus
aagaccacgttctccacaacaaggtctccattataggaaccggagtcggtcggcatggcctgtgccatcagcatcatagcaaaggcttggctgatgaggttgcccttgttgactgtaatgaagataaaatgaagggtgagacgatggatctccagcacggcagtgtcttcatgaaaatgccaaatattgtttgcagcaaagatttccttgtcactgccaactcacagatagtgattgtcacagcaggtgcacgccaggcaaaagacgaaacgcgcctaaatttagtccagcgaaacgtaaccatctttaagctgatggttgccgatattatcaagcacagccc

SEQ ID NO: 9188 - DNA, 343 bp, Cricetulus griseus
gccgcatcgactgtcagcgtcactgtggtatcttccagtaccagaccatctcctgcatcaactgcacagactcgcatgtggtctgctttggctactactgcaagtcatcggcacagtgggaatcagctgtacagggccttctgagttacataaaatacctggcacaaacaggatataggctcgagaaccaccccagcctttctttcaccgagaataaaggtgtctggaaccgcagcacctggctaacctgaccttggaaagcgcctctgagtgtctgacccagcactgacagcggctgctcgcccccagcctcggtgggggccaggactcaactgcactgttg

SEQ ID NO: 9189 - DNA, 343 bp, Cricetulus griseus
ctttccagtggtgacgacctccctacgagaacatgcctctcgcaaaggatctccttcatccctctccagaagaggaaaagaggaaacacaagaaaaagcgcctggtgcagagccccaattcctactttatggatgtgaagtgcccaggatgctataaaatcaccacggtctttagccatgcacaaacggtagtcttgtgtgttggctgctccactgtcctctgtcagcccacaggcggaaaagcaaggctgacagaaggatgctccttcaggaggaagcagcactgaaaagcacctgattcaagatgagtgggaaccatcccaaataaacacattttggatat

SEQ ID NO: 9190 - DNA, 343 bp, Cricetulus griseus
  modified_base (78)..(78): a, c, t, g, unknown or other
ttgtgagcgagggacctggaggtgtcctgtgtgcataaacagccctgctcgaggggtctggaggtggatcagtatatntggggcatcctcaatgccatccaacactccgagtttgaagaggtcaccattgaccccacatgcagctggcggccagtgcccatcaagtcagacctcacatcaaggacgaccctgatggcatcccctcaaagcggttcaaaaccatgagccccagccagatgatcatgcccaatgtcatggagatgattgctgctctgggccctggcccatctccctacccgcttcctcctcctcctgggagcaccagttccaacgactacagcag

SEQ ID NO: 9191 - DNA, 342 bp, Cricetulus griseus
gccaagatgatgtgtggagcgccgtccgccacgcagccggccacggccgagacgcaggagatctccgacacggtgaaatcccagcttgaagagaaagagaatcagaagttcaccgtctttaaagccgtatccttcaggcaacaggtggtggctggcatcaacttctttatcaaggttgatgttggtgacgaaaaatttgtgcacttgagggtgttcaagccccttccccatgaaaacaagcccttgaccctgtcttcctaccagatcaacaaaaatcgacatgacgatctgaccttcttctgattctgcagcccctttgcagactataaaaaaaaaaaaaaa

SEQ ID NO: 9192 - DNA, 342 bp, Cricetulus griseus
acacagtctcacacagccgcttataatgggctctcggggccatttgtaataacagctgcaattccctggatagagggagttgatttcctcctccccacctccccagctgtgccagctcgcctttgtaagtgaaggaaccgagtagaaaatgtgaccctccaaatggaaaagctgcaggcttttgctgttgtgtttggtgatgtgcttggaaattctgttcactctgagcgaccgtttcgttttagtttatggagtcagtgggcttgttgagcatccagatgtggctattgaccaatctaacacttcgcaccgaagtgactggaattgtggctgtcctgatta

SEQ ID NO: 9193 - DNA, 342 bp, Cricetulus griseus
  modified_base (290)..(290): a, c, t, g, unknown or other
ctcggactaccgaagcaagctcgcccagatccgacacatctaccactcggagctggagaagtacgagcaggcatgcaaatgagttcacgacccacgtcatgaacctgctgagggagcagagccgcactcgccccgtggcccccaaggagatggagcgcatggtcagcatcatacatcgcaaattcagtgccatccagatgcagctgaagcagagcacctgcgaggccgtcatgatcctgcgttctcgcttcctggaccgccagacggaaacgccgcaacttcagcaaacnggccaccgaggtcctgaatgagtacttctactcccacctgacgtaaccctta

SEQ ID NO: 9194 - DNA, 342 bp, Cricetulus griseus
tcaggcatccgtagagttcacttgtgagacctgtggcaagtccttcaagaggaagaatcatctggaggtgcaccggcgcacacacacaggagagacacccctgcagtgtgagatttgcgggtaccagtgccggcagcgcgcatcgcttaactggcacatgaagaagcacacagcagaggtgcagtacaactttacgtgcgagcgctgtggaaagcgctttgagaagctggacagcgtcaagttccacacgctcaaaagccacccggaccacaagcccacctgacccacccgcgcccacggacctcagcctctatttatttgtactcttgggcatcgtgtcca

SEQ ID NO: 9195 - DNA, 342 bp, Cricetulus griseus
gatgaacaaaatggagcaatatctgatttctcaggaaaagcattttgttttcttcctttgcctcctggtgaggaaagcagaacagggcttccagttcatatcagtggcttctttggcttgactgacaaccgcaggagcattaaatggagagagctggaccaatggagagaccctgcagccttgtggaatgaattccttattgggaatgttgttcccaaagcttatgctactctgatcctagattcaataaaacgcctggagacagaaaagagctctgatttccccttgtccattgatgccatctacaaactttggcctgaggccagcaaagtcaaggcacac

SEQ ID NO: 9196 - DNA, 342 bp, Cricetulus griseus
tcgccgcgcgcgtccgcggaggcccggcctgtgagggctccggatccggctgcgagggtagttaacaatgagtctgcggaaacaaactcctagtgacttcttaaagcagatcattggacggccagttgtggtgaaactcaactctggagtggattatcgaggggtcctggcctgcctggatggctacatgaacatagcactggaacagacggaagagtatgtaaatggacagctgaagaataagtacggcgatgcattcatccgaggaaacaatgtgctgtatataagtacacagaagagacggatgtgaagataccaggagcagctcttcagagttggata

SEQ ID NO: 9197 - DNA, 342 bp, Cricetulus griseus
tggatggtcttcccccagagaagtggccccagctgctcaaggaactctgcagcacacacattcctactctgttctgccccagactcgttctggaagttctggttgtgctccggggcatcagctcccaatgccaacgtgtatctgaccaggtcactacctctttgcagctgagacacaggcagtgggtagagcacaagctgcgctcaaggcagcggcagaactatctgcgcatgctcaacagcgttaaactcttgtctcctgtgcttcacctgactttgttgctccttgcactggaagtggtcagtgtacatgctgttttcatgtgaacaaaaaaaagttaat

SEQ ID NO: 9198 - DNA, 342 bp, Cricetulus griseus
gcggccagcggcttgcggcaggctgctgcggcaggcagcacctcggtgaagcccattttcagtcgcgacctgaacgaggccaagcggagggtgcgcgagctctaccgcgcttggtatcgggaggtgccgaacactgtgcacttattccagctggacatcaccgtgaaacagggacgggataaagtccgagaaatgttcatgaagaatgctcatgtcacagaccccagagtagttgatctcctggtcattaagggaaagatggagctccaggaaaccatccatgtgtggaagcagcggacacacattaatgcggttcttccatgaaacagaaacaccgaggcc

SEQ ID NO: 9199 - DNA, 342 bp, Cricetulus griseus
ggtgcgactagctgggttcctgggaaggagactgctgagcagcaacgctgcctcgggcaagagcaatgcgggccagtgctggaactgcggcagcgctgggggtgtggagagtggggatgggttcttctgcgaacactgccgcgccttgcagccacctgacccgactcgggactacttcagcctcatgaattgccaccgatccttcagggttgatgtcatgaagcttcagcacaggtaccagcaactgcagcgtctcgtccacccagatttcttcagccaaaagtctcagactgaaaaacacttctcagagaagcattcgacctggtgaatgatgcctataag

SEQ ID NO: 9200 - DNA, 341 bp, Cricetulus griseus
  modified_base (331)..(331): a, c, t, g, unknown or other
gacaggttatctgtgtcacactcaaggtcctccagcatctagttgtgtcagcggagatggtgggcgaagcgctggtgccttattaccgtcagattctcccaattctgaacatctttaagaacatgaatgtgaactccggggatggcatcgactatagccagcagaagagggagaacattggcgacctgatccaggagacattggaagccttcgagcgttatgggaggggaggatgccttcatcaacatcaagtacatggtacccacctatgagtcatgcttgctgaactgacagggcagctgcagaagggatccctcccctggtcgccacngtcatctgtc

SEQ ID NO: 9201 - DNA, 341 bp, Cricetulus griseus
ccatagaagaacttctcttttatttgggatccaagacgccttggtccccagtgcccattcaataaactgtggccaagctagatattcaccctgatcaaacatgggaccagataagcaggcatccgggattaaaatcccagcaggataaaggggggaggggggcaaacacaaggaagtgctagaacaagtgttaggcactgtctccagcaacccccaaattcctgcctgtagctaggagacttccatcggggctctaggcctcccggacccggcccaagaggccagcattctcctggcgaagggctcggtagtcctcacagatcttcctccaggttcgctca

SEQ ID NO: 9202 - DNA, 341 bp, Cricetulus griseus
gttttacaggttcattccagtggtgacacacgcctttaatcccagcacttgagaagcataggcaggcggatctctgtgagttcgaggccagcctggtctacagagagaagagaggtccgggacagccagggctgttacacagagaaactctgtctcagaaaaaaaaaaaaaaaaaaaaaaaaaaagttaatagtggcacatgcctttaatcccagcacttgggaggcagaagcagacagatctccgagttcaaggccagcttggtctatagagttagttccaggacagccagggctacacagagaaactctatctccccccaaaaccccccccaaaaaaaa

SEQ ID NO: 9203 - DNA, 341 bp, Cricetulus griseus
cctccctcggcataccttcgggctggtacagagcaagctcttccccgtctacttccacgtctccttgggctgtgccctcatcaatctctgcatcttggctccacagcgagcctggatccacctctcactctgggaggccagtcagcttgctctactgcctactgagcctcacactggccaccatcaatgcccgttggctggaggcccgcaccacggccgtcatgtcttctctctgcaacctgggctgcctgctgagcaatgggctctgccttgctggccttgctctggggctccggagcctctaacatgggccctatgtgtcaataaatgcttctttagga

SEQ ID NO: 9204 - DNA, 341 bp, Cricetulus griseus
  modified_base (7)..(7): a, c, t, g, unknown or other
  modified_base (162)..(162): a, c, t, g, unknown or other
acaaaanaaaaaaagtaattaacaagcaaagggcaatgaggcaaggcatccaagttgtctttctttccatcctgtctgtcagtttccctgaaaaaaaatcatattccagtgcctatccgtgggatccttcacgctctttaacattaaccagaaaccaaaagnttaacttgcctcactctgcccaccctatggcccttccgacacttgcagataactcctctccctcccgccccgtcccccaatgcacacacgcacacgccagtggtgggctcccccgatggcatatccaacagggtccacatggtggtgacattgccatgacctgtggttccccatgcaag

SEQ ID NO: 9205 - DNA, 340 bp, Cricetulus griseus
tggccaggccttcattcgtccatcagactttctatacacaagaataattcacacaggagagaaaccctacaagtgtgagtatgtggccaggccttcgttcgtccatcagactttctatacacaagaaattcacataggacagaaaccctaaatgtgtgaagtatgtggcaaggccttcagttattcaccaggactgtctgtacacaggagcgttcatacaggagagaaaccctacaagtctgaagtatgtagcaaagccttccatttttcgtcactacttgcaatacacaagagcagtcatgcaggagagaagcctagaaatgtgaaatgtgttgaaaga

SEQ ID NO: 9206 - DNA, 340 bp, Cricetulus griseus
aaggacaatggcgatcctcctaggtctgccactgtcactcttcaagtgctggtggtggatggcttctctcagccctacctgcctctgcctgaggtggtgcgcgaccctgagcgcagcaatgagaacttactcacgctgtacttggtcattgccctggcatctgtgtcttcgctcttcctcttgtctgtgctgctgttcgtgggtgtgaggctgtgcaggagggccagggcggcctctctgagtggctgctctgtgcccgagggacactttcctggacacctggtggatttcagcggtgaggggaccctgtcccagagctaccagtatgaggtgtgtttga

SEQ ID NO: 9207 - DNA, 339 bp, Cricetulus griseus
gaccaccttcctcaagggccaccccctaatcacaacccaggtccccttgggccatgtctgtccccagtacccccggtcagggtcatggcctgtgagccaccggccttggtggagctggtggcggctgtgaggcaggtgggtgaccagctgcagaggctgactcagatcctggaacgagaccggcaggaacgccaagtcctggggctgggcctggtccagttggtagaggctgcccagggcctggggcagctgaccgagactgtaaaagagactggcagaagccgccgggccccagcacacctgtgcccaccttcaccaccacggaggaggagaggcctc

SEQ ID NO: 9208 - DNA, 339 bp, Cricetulus griseus
tgtttgcgttttctcgtcatgtctggccgcggcaagcaaggtggcaaggcccgcgccaaggggccaaggtcgcggtcgtcccgcgccgggctgcagttcccggtggggcgcgtgcaccggctgctgcgcaagggcaactacgcggagcgcgtgggcgccggcgcgcccgtgtacatggcggccgtgctggagtacctgacggccgaaatcctggagctggcgggcaacgcggcccgcgacaacaagaagacgcgcatcatcccgcgccacctgcagctggccatccgcaacgacgaggagctcaacaagctgctgggcaaagtgacgatcgcgcagggc

SEQ ID NO: 9209 - DNA, 339 bp, Cricetulus griseus
aaaactgaaatcatatgtttctgatgttattgacaatcaccgtaaagactgggaccctaatgagccaagagacttcattgatgctttcctcaaggaaatgacaaaagtacccagacaatactacaagtttcaaagaagaaaacctcatctgcagcactctggaccttttcctcgctggaacagagacaacatccaccacactgcgctgggctctgctctacatggccctctacccagaagtccaagaaaaagtacaggctgaaaattgacagagtgattggcctaggagaaacagcccagcctggctgaccgagactccatgccctacaccaatgctgt

SEQ ID NO: 9210 - DNA, 339 bp, Cricetulus griseus
ctttttttttttttatttctttcagatctgattcctgaatctgttttatttctctgcgtaaagaaccctgcacaggtagaataaaaactaaaacaaaataaatatatgaatattcatgtaaaactgtcctttctaatgaacaattatacacaatgtacaatttcatgttcactgggtgggcttacaaaaatgtatcattcccaactaaaaatgcaccaaaatggttccatgcaaacttatccaaagtgaccaaaaatacagagggaaacctgactgagcagtttctgcttttttgtacaatcacagaaaaataaaacatctaatttctttgtttcattt

SEQ ID NO: 9211 - DNA, 339 bp, Cricetulus griseus
gcagactctgatctggtgtaataagtgtgagaagcaggtccactcttgtcggaaatccatggattgtggggagcgcaggatagaggtgcatcgcatggaagacatggtcctggactgccagctcagttggcatcacgcttctgagggacttacggagtacagtttttacaaggtttgggggaacagttctgagaccttgatgtccaaggggaaagaaccctacatgaccaagacgatggtgggtccagaggatgccggcaactaccgctgcgaactgggaaccatcaatgctggtcctgccactattatccattttcgtgtcatagtattaccccaaag

SEQ ID NO: 9212 - DNA, 339 bp, Cricetulus griseus
caagggctcattgagatatgccaagggtcagagtcagaccatggcaacactgaaaggcctagtgcagaagggagtgaaagtggatctggggatccctttggagctgtgggacgagcccagtgtggaggtcacactcctcaagaagcagtgtgagacaatgctggaggaatttgaagatgttgtgggagactggtacttccaccaccaggagcagtccctacagcactttctctgtgaaggccatgtacttccagcctctgaaactgcttgtctacaggaaacctggactgggaaggagaagagcagtgatgggcatgaggaagcagaagaggaggagga

SEQ ID NO: 9213 - DNA, 339 bp, Cricetulus griseus
ctccatctctcctctctcattttctttgattcttggaaacccagggaggcctgtagcaaggatcattgtaagaatgatgtacgtcatggtctgggtttccaaaactactccacatacagtgactcaagaggaacctgcctgggaatggtttcagaaccatgaacctttctgttctgtgattgtgaaacactgattttgtaaaccccaaatgaagaactgtttaaaggggatctattttgtgtgtttttgaaacttaggtgcaatgtcccctggaagaagctcaagaactgtatacgctcaatgacattttaaataaagtactatatatgtatatataaa

SEQ ID NO: 9214 - DNA, 338 bp, Cricetulus griseus
aagctggaggccaaggtgcgcgagctggaggcagagcttgatgcggagcagaagaagcacgctgaggccctcaaaggtgttcgcaaacatgagcgccgggtcaaggagcttgcataccaaacagaggaggacaggaagaacctggctcgcatgcaggacctggtggacaagctgcagagcaaggtcaagagctataagcgccagtttgaggaggccgagcagcaggccagcaccaacctggcaaagtaccgcaaggcccagcatgagctggatgatgctgaggagcgagcagacatggcagagacccaggctaacagctgcgggcaaggtccagggat

SEQ ID NO: 9215 - DNA, 338 bp, Cricetulus griseus
gactattctgacacctggtacttggtactcctgcctccattctcccatgtcagggaacattatggaccctagtactttggaccctgagaattcaccagaagtacatggatttttatatgtgtgtggttatttgggttttttatatatgtgttcattttcatgtaactgtgaactaaaacgtagtatctcctggtagcccaagggtcttttacctgttctaggtcccttggaggctgaaaaagtgtgaaccttgcttgtctggccctctgaaaaggactgaggagagatgcttcagaaatggagcacaggtgtggaattaaagcaatggaaagcagata

SEQ ID NO: 9216 - DNA, 338 bp, Cricetulus griseus
ggagatggaggcgaacccggcggccagtgggaccgacggcgtccgcgagcggggaggccgtccggagctggcgggagggagcagaaccgagaggagcggcctcagtgcgggacgaacgggctcccgaaacactcctactggctggatctctggctcttcctcctgttcgacctggtgttgttcatcttcgtgtacctcttgccctgactgctttgccgagacatcaagaatgtgcttttctggagtgaatcctgaatacagacttactgaatgaagaggatttccagcagctgaatttcagacctctagaaataaaactaagaaaaaaaaaaaagtta

SEQ ID NO: 9217 - DNA, 338 bp, Cricetulus griseus
tcacggacaagatggtacccccggttcaggtctctccgctgatcaagctcggccgatactcagccctggtcctcggcatggcctacggcgctaaacgctacagttacctaaaaccccgggcagaagaggagaggagggtggcagcggaggaaaagaagagactagatgagctgaagcggatcgagagagaactggcagaaggtgacaccatactcaagtgatgcagagcccatgagcttgcctgtccttagccgctgaggatgaataaagcttcattgtgtgaaaaaaaaaaaaaaaaaaaaaaaaaaaaaaaaaaaaaaaaaaaaaaaaaaaaaaaa

SEQ ID NO: 9218 - DNA, 338 bp, Cricetulus griseus
agaaagcctgacccacacttgcagcccacactcaggtgctaagggatacggtgcacagacagacactgccacagtggaggaagtgttactgttcacagagcaggccaaagaggaaccgagccctccatttcagagacactctgagaccaaggagcaaagtgtgctcgccctgggaggagacaaggaaatccatcagatctttgaggaccttgataagaaattagcagtgagctctaggttcttcatcccggagggctgcgttcagagatgggcagctgaaatggtggtagcccttgacgccctgcacagagaggggattgtgtgccgcgatctagaac

SEQ ID NO: 9219 - DNA, 337 bp, Cricetulus griseus
  modified_base (329)..(329): a, c, t, g, unknown or other
gggctggggctgctggggctgctggcctctggctctggcctggactgcttgaggcttggagagacccagaaggatctgaagaggcggttgcttatcctaggagggctcctgctctggacttcgggcgtgatggtcctggttcctgtctcctgggtggcccacatgacagtagaggagttctgggatgagactctgcctgagattgtgcccaggtgggagtttggggaggcccttttccttggctggtttgctggcttctgccttgtgttaggaggtgtctgcttcactgtgcagcctgctcaagcccagcctcctccagcctcgggccnctatgcag

SEQ ID NO: 9220 - DNA, 337 bp, Cricetulus griseus
caggtgagaagccgtatcattgcaactgggacggctgcggctggaagttcgcgcgctcggacgagctaacccgccattaccgcaagcacacaggccacaggcccttccagtgccacttgtgcgaccgtgccttctccaggtccgaccacctggccctgcatatgaagcgacatatgtagcctgggtagacccaactaccccatgcgcggccgtggcgggtcccacgcgccgggcacggttcctttgcaaactgactgctatttattggaccctggaggagtgggccggggccagtgtggcccacaggacattgactctgccggccagttctggcccc

SEQ ID NO: 9221 - DNA, 337 bp, Cricetulus griseus
atggcttccctagcccggaattttgggtaccccgcctgcagatcggcggcccaattaggtggcaggtggctgcaacccagggtctggatggggctcgcggacgcctggggcctcccctcccttcagccagcccgtggccgcacgcgcgggaacgagtaccagcccagcaacatcaaacgcaagcacaagcacggctggatccgccggctgagcaccccggccggcgtgcaggtcatcctccgccgcatgctgaagggccgcaagtccctgagccactgaggagcctcgacgggcccgcggggaatagactcggacgccgatggaattgcccgagggc

SEQ ID NO: 9222 - DNA, 337 bp, Cricetulus griseus
caaacaatgtgatagcactgagaactcttaggccttattttcccacttcagtacaaaggtagctcatgaacaacttttttcaaagtttagctttaatgacaaacatcttttacatcatcagtctttcttcaaaataaaatggctgtgcatgaacaatttcaaacaggaggtaccacggtgcttcttcaatacaatgcattcaatatactaggtccctggggatggccactgatgtacacgctgaagcagtaatgtaagtctgtaagccactgctcctgaacactaccactcttcaaagtctgcaaagaaaaaagaaaaggtaatttaaattgagaac

SEQ ID NO: 9223 - DNA, 336 bp, Cricetulus griseus
agggcactgtgggttccagcagcaactaagaattttcaagttcagactggccttgaactccctgtgtaactgaagataaccttgaactcctgatcttcctgcttcaacttcccaagtgctgggattacagacttgggccactatacttggctctttttggtttttgtttgagacagatctttctatgtagccctggctgttctgaactcatggcattcctcctgcctcagcatctcaagtactggaatcaccgatgtgtgtttaacacacacacacacacacacacacacacacacacacacacacacacacacacacacacacacacacgggatt

SEQ ID NO: 9224 - DNA, 336 bp, Cricetulus griseus
ggttgtcatggagtcgtggggaccggctcgcgcatgcgcctgctgacccgcggggcttggtggtggtggtgcagcggcgaccctggccgtagagcaaccatacgcaaagactatttgtgatccagattccagcccactgaaacatggagaggaaacatccagagagagccctcgaagactctctgccaagccaggccgaggcacagaggtgaaaagagtagctcgaccgctcggcgtggtggctcctgactcagacaaggactctggttttatgggagctcagaatgcttgagctccgcagagcagatggagtcagaggacttgctgagtgcttgg

SEQ ID NO: 9225 - DNA, 336 bp, Cricetulus griseus
gtgcagctatgggcccgccgagcggaaagatcaatcgtccccggacggagctgaagaagaagttgttcaagcgccgcagagtgctgagcagggatcggcgacggaagcgccaggtggtcggcgccgtgatagacgaagggctgactacgaggcaccacctcaagaagcgggcgtccagtgcacgggccaacatcacgctatccgggaagaagcgcaggaaactcctgcagcaaatccgccttgcccagaaagaaaagcatccatggaagtggaagccccctcaagacaaccaggactagtgagccacagcccaaacgacaaaagaagataaaagct

SEQ ID NO: 9226 - DNA, 336 bp, Cricetulus griseus
caaccaatagaatttatcctgaagatgagatccagagaaaccgtttgtcagaggaggagatccgaaacatccctatgttttctgcatataacccaggggaaccgaacaaggtgctatacttgaagaaccttagtcctcgggtgaaagaaagagaccttatctcattattcgctcggttccaggagaaaaaaggaccacccattcagtttcaaatcatgagtggacgcatgaggggacaggctttcatcacctttcccaataaattttttttatttaagatatatttatttattttgaactcaggacctctggaagagcagtcagtgctcttaacct

SEQ ID NO: 9227 - DNA, 335 bp, Cricetulus griseus
caacaagatgggcaagcgcttacagacaatgacaaaacgctatgaagccctggagcatcgacgcatgctggaagtagaaggcttcaagacagacattaaggttcttcgacagaagctgagagacctggagcaaatgctctataaggcaacagtgaatacccgggaaaaccaggaccttgccattctgtgtgaagttcgtgacagcaatagacgagcacataagatacagggcgagctgaaggccctcaagtctaaggtgttcggtctggagaatgatctcaggctgtgttgatgtctactttaagttcacgttcacccttggctatatggtgagt

SEQ ID NO: 9228 - DNA, 335 bp, Cricetulus griseus
tgcagccactcgtgcaggaccaagttccgccatgccgaagtgccccaagtgcgacaaggaggtgtatttcgccgagcgggtgacatcactaggcaaggactggcatcgtccctgcctaaagtgtgagaaatgtgggaagacactgacctctgggggccatgccgagcatgaaggcaagccctactgcaaccatccctgctactcagccatgtttgggcccaaaggctttgggcgaggtggagccgagagccacactttcaagtagacccaggttgtggaaactcccctaccgcccaggcacctgccaggccttaaccctagacatcagggctctc

SEQ ID NO: 9229 - DNA, 335 bp, Cricetulus griseus
cttttaatgtgttgcctccttttctacatgtcattaacaaactcatcagaattcagagacaaatggcctcattacctgagaatgttttattttacatgtagtgaaaagagacaaccaaagaagtttttgctctgaagaaaaggaaatggactaattataatattttatgtatcagtaggtccatttattaagtgctgtcctgataatagagtttaaaaagctgagccaaggtgatagtggtacacacctttaatcccaacacacgggaggcagaggcaggtggatctctgagttcaagggcagcctggtaataaaaattggcattctcaacccag

SEQ ID NO: 9230 - DNA, 335 bp, Cricetulus griseus
gctcttatctcaggtacaaggtcaagatgtggaggaagatgtgccctcttcaagaatcagctgccccaagggatcccgagcctatggctcctattgctatgccttgtttaggattgctaaatcatggtttgatgctgatttggcctgccagaaacggccctcaggacaccttgtgtctgtgctcaacagatctgaggtcttccttcgtatcctccatgaattaaaagcagtgtgaataatggtcaatctgtgtggattgggctccatcgacccaacgctgggacaagaacccaatggaggtggatggggagtggagtaatggctgatgtgatgaa

SEQ ID NO: 9231 - DNA, 334 bp, Cricetulus griseus
caaaagctccagcagctgaaagctcagagtccaaacctgagccagctctagcagtgaagaagatagagaaagacaagaagcccccacctggtaaggtcagcaaacctccacctgctgagtctgaaagtgctctgctcacccacaagccggataagatcaccaaagttgaggcgaactgccctctctgcaaaactgaactcaacataggctctcaggacgccccccaacttcaacacctgcacagaatgcaagagtcaagtgtgcaatctctgtggatttaacccaacaccccacttgactgagcacacacacacacacacacacacacacacac

SEQ ID NO: 9232 - DNA, 334 bp, Cricetulus griseus
cccttctccacagggtctgtctgggttgttctggcttaggtcctgctgcatagcaaaggcttccagactgcagccagactgcccagagctgtcctctacagggtagtagtgtgggcagctctccctcgcagagcagtgccctgccccataccctggccagaggagaagagagtgtactctgtagccactgtggggctcctgcctgcaggcagggctgggagaaacagggccggtgggctgtacagggaatattttgtaacttgctggagtgaatggaaatggggtgattctaagttattgttgccaaagacatgtaaagtatattgttgcgttt

SEQ ID NO: 9233 - DNA, 334 bp, Cricetulus griseus
acgcagtgccagctttgctgtgggcaatgcagcctaccaggctggtcccttgggacctgccctggcagctgcagtgcccagtatgacccagctgcttggagatcctcaggatggtatccggcgcaatgctgcatcagctctgggcaatctgggacctgaaggattgggcaaggaactattacagtgccaagtaccccagaggctcctagatatggcatgtggacttaattaaatttttaagaaacgaaaaaaaaaaaaaaaaaaaaaaaaaaaaaaaaaaaaaaaaaaaaaaaaaaaaaaaaaaaaaaaaaaaaaaaaaaaaaaaaaaaaaaaa

SEQ ID NO: 9234 - DNA, 334 bp, Cricetulus griseus
agtaactttgttgtgtacacaagagagctggatggcatagataaagtcttcattgtgattttgaattttggagaatcatcaactctgctaaatctacaggaaatcatctcaggtcttcctacgaaacttagaataagattaagtactaactcggcctccaaaggcagtgaggttgacacacaagccatttctctggagaagggagaaggactcatcttggaacacagcatgacgactctccaccaccaccaagcagctctcagagacagatgctttgtctccaatcgtgcatgctattccagcacactggacattctgtataccctgtgttagg

SEQ ID NO: 9235 - DNA, 334 bp, Cricetulus griseus
  modified_base (13)..(13): a, c, t, g, unknown or other
gtgaaggacgctnacggggtccgtcctgccgctacaagaagatcctgggcaccttccagaagctcaagagcatgtcccgggcctttgagcaccaccgtgtggaccggaacacggtggcgctgaccacgcccatcgcggagctgctcatcgtggctcccgaaaagctggcggaggtgggggagttcgacccgtccaaggagcgcctgctggagtactcccgccgctgcttcctggcgctggacgacgagactctcaagaaggtgcaggctctcaagaagagcaagctgcttctgcccatcacctaccgcttcaagcggtgatgctgccgccccgc

SEQ ID NO: 9236 - DNA, 333 bp, Cricetulus griseus
gagctatgttcttgttgttcaccagaggacacacactaggagaaaagccctacgagtgcagccagtgtggcaagaccttcaggcagagctcctgcttcactcagcatcagaggacccacactggagagaagccctatgagtgtaaccagtgtgggaaaaccttcagcctgagtgctcgacttatcgtccaccagcgaactcatactggggaaaaaccttacaagtgcaaccagtgtgggaaagcatttattagcagttctaagcgcagtaggcaccaggctactcacagtgatgagtcttgtaagtcctgattagttcagagtctgagcgtga

SEQ ID NO: 9237 - DNA, 333 bp, Cricetulus griseus
atcacccctcagaacatctttgcacctgaattcttcctcaagttgctggtgagcaacagaggagtcgacacgagcacatactgtgactaccagctcatctttgtgctgcacatgcatggactaccgctcagcggcaagcggtcactcttcattgtcattgtgtccatcagcctgctcgtgggcctggtggtcttctacatcctgttcctcctcctgtggccccacatcgtgagggcctggatctcgctgcgctggaagattaacaacatcatggcctcagagtcctactacacatacgctacctccaacccagccttcagtttccagtctcac

SEQ ID NO: 9238 - DNA, 333 bp, Cricetulus griseus
  modified_base (46)..(46): a, c, t, g, unknown or other
cctgccggattttcaccgtgccctgtgctgctacatgaacttgacnggggcccagagccattgtctgcatgtgtctgctgagaagatgctagaccatgctaccttcaccctctatgagttttggcaggatgaagcctcctggagaaaggcaccagcagtcgccctgcagcaaggccttccagcgtaccctcattgatcacctgcaggtcccggacaccctcaccactgtgttcttcccagcctcctggtggattgtgaataataactgagtcgggtctgcttaagctggtgactctccagccccgcctatcattctagagcctcctgcattgg

SEQ ID NO: 9239 - DNA, 333 bp, Cricetulus griseus
cgctgccgcgtccgcgggaaaccacccagccccacaccctggagcgggcgcaagatgaagtctaccactcgagaacgcagcaaccaccagagacacctggccaattctgggggctgggtccccgtcaaagagtacagccccgagtaccagggagctgacatggctgaaatagatgcccgcctgaaggctttgcaagaatacatgaacaggctggacacgcggtcatgaccctggagaggtggtaccctgatttcccattctgccatccgtgggtctggtgtggaggcaacgcccctccatgctccacacctctaggtgctcctggagtctcag

SEQ ID NO: 9240 - DNA, 332 bp, Cricetulus griseus
gtcaaacggcgggtcccaggcctccaccaactcaccaagcttcgtttcctgcaaactgaggacagctgggtcccaacctcaccagacacaggcctagaccccctcacagttcgacgtcacgtgcctgcagtgtgggtgctactcagtcgggaccccttggaccccagtgaatgtggctaccaacccccgggagcgcccccaggcctgggctccatacctagctgtggtcccagaccccgaagaagggctcgggacacccggtcctgaagacctgctgagcctgactgtactctagacctgattctctgtgccttctgtaagaagggcttgtg

SEQ ID NO: 9241 - DNA, 332 bp, Cricetulus griseus
  modified_base (288)..(288): a, c, t, g, unknown or other
gaggtcggccccgcgggagggacacgccgcccatgctctctgccgccagaagggctctccagctcctctccagcccccatcccggcaacgaggaggggcgactctgcttcgaaggtcatcagcgcgcaggaagccttgcccggccgcgcggagccgatcccccgtggcagccaaacaccatgtcagtggcaacagaacggttgaacctttcccagaggaacacagatggctgtatttggaatgggctgcttctggggggctgagcgcaagttctggctcttgaaaggngtgtattggtaataaaaaaaaaaaaaaaaaaaaaaaaaaaaaaa

SEQ ID NO: 9242 - DNA, 332 bp, Cricetulus griseus
atggtcatagaggtcagttcaaatgaggaggagaaagtaccatttcagagaatgaaaatgtggaaagctggatgctactgggatgtgagggagatgataaagacaatgacatccttctcaaccttgtggggatgtgaaaacactgatgctgaaggggaagatgatgtaaactggttcatcagtgacaaagacatcgaggccaagataggcaataacagatcatctggaagattgaccaaccgatattatacagccaacaaaaatgtcacatgtagaaattgtgataaacgtggccatttgtcaaaaaactgccccttaccacaaaagtccgg

SEQ ID NO: 9243 - DNA, 331 bp, Cricetulus griseus
aagcagatcctagtactgggcttggatggagcaggaaagaccagtgtcctccactcaatggcttccaacagagtgcagcacagcttggaacctacccaaggttttcacgaagtttgcatctacactgaaacaggcagatagagttcctggagattggtggcagtgagccattccgctcctactgggatacgtacctgcccaagggatggctactgatctttgtggtggattcggctgaccacaaacggttacctgaagccaagaaatgccttcatcagctaattgaaccaaacccagagctccctctggtcgtgttttgccaacaaacagg

SEQ ID NO: 9244 - DNA, 331 bp, Cricetulus griseus
atgaagccagtgcccatgtttccacttttgatgatggggaccaggaattaaggtcaacgtacaagtgccaaaattttgtttctcttgtggatatttaccctacaatgcttgatattgctggcattgctctgcctcagactctcagtggatactctttgttgatgctgtcatcagaggcacctgcagatgaacagatgcgcaaaaacccaacgtcaaccttgggtctaagtgaattccatggatgcaatgcaaatgcctccacctacatgctacgaactggtcaatggaagtatatcgcctactctgatggtgcttctgtgcaccctcagct

SEQ ID NO: 9245 - DNA, 330 bp, Cricetulus griseus
gcaccttaaagacgtgatcctactgacagccattgttcaggtgctcagctgcttctccctctacatctggtccttctggcttctggctccaggtcgggccctttacctcttgtgggtaaatgtgctgggcccctggttcacagcagacagtggatccccagcaccagagcacaatgaaaaacgacaacgccgacaggagcggcggcagatgaagcggttatagccatcattattttggccacagactgctgggcgctggttggttctattaggctgcatggcccaatgcctggagcagcgagggcctagattaagggcaaaagcagcctg

SEQ ID NO: 9246 - DNA, 330 bp, Cricetulus griseus
tgtgttctgggcttaccctctctctatttttaattcagagtattttatccccatcagcgccattgtaattcttgctcttctccttgggattgtttttcttactgtttattatggcgtttttcacccaaacagaaatatagaagcacagcacgatgaaactgatggaaaatcagtacagagagattgtagaatgagatattttctaatggactgagttgtgaatttatgagaaatgttttagtttttgttttctcaccaagtaaagaaatgtctcttatatacatgcattgtttcttatttttgtcacctttgacttgaagtgagttatgg

SEQ ID NO: 9247 - DNA, 330 bp, Cricetulus griseus
cttgagagactcaaaagtacccttcaaaccctggaattggagcagtgcaacttgaaggaccctcatttcaatgccatcttgcctgctctgacccaatgctcccagcttaccaagatcaatttctatcgtaatgatatctctctgcttgtcctgaagaaccttctacatcacacagccaagatgagaaggctgacccaggagctgtatcccgcccctctggaatgctatgactactttacaatacttagagacaaatttatacaactatgtcctgaactgctggatatactcagggtagaaaggcagcccaggaaagtctcctttgctaca

SEQ ID NO: 9248 - DNA, 330 bp, Cricetulus griseus
ctactgtcatctctcaccgaggccaccaggtcagtgagcccagtttctgcaaagtggaatcagactgagcatgaaggagatttgctgggaccagtgcctgggattcctcaactcccacaatccttgtgtgttagccttagtttacctgaggctttgcctgctcaagaagcttggacagtctgccatttcggccatatcttatgaggttcctgccccccaaaacttggactgctcattggcctgccatgttccactcagctttagtccccagaggacagttgttacatctcgctgccaatgtttttaatttgtcttttttttttttctttc

SEQ ID NO: 9249 - DNA, 330 bp, Cricetulus griseus
  modified_base (305)..(305): a, c, t, g, unknown or other
tccatggaggatacaacttccatccttccgaagcttaagcgaaactctaatgcctatggcattggggccctggccaagtcatcgttctcagggatctcgagaagcatgaaggaccatgtgacaaagcctacagccatggggcaagggcgggtggcccacatgattgagtggcagggctgggggaaggccccaacaattcagccacaacacagccacgaggctgtgcgcagggatacagatgcttactctgacctcagcgatggcgagaaggaggctcgtttcctagcaggtggtcgcaaaaaaanaaaaaaaaaaaaaaaaaaaaaaaaa

SEQ ID NO: 9250 - DNA, 330 bp, Cricetulus griseus
cgccacggccgatacctcaccgtggctgccgtcttccgtgggcggatgtccatgaaggaggtggacgagcagatgctgaacgtgcagaacaagaacagcagctactttgtagagtggatccccaacaacgtcaagaccgccgtctgcgacatcccaccacgcggcctcaagatggccgtcaccttcattggcaacagcacggccatccaggagcaaggcctttctgtcactggttcaccggcgagggcatggacgagatggagttcaccgaggctgagagtaacatgaacgacttggtgtctgagtaccagcagtatcaggacgccacgg

SEQ ID NO: 9251 - DNA, 329 bp, Cricetulus griseus
ggctgggctccagttccccgtcggccgcatcgggcgcttcctcaagaagggtcgctacgcccagcgcgtcggctccggcgcccccgtctacctcgccgccgtcctcgagtacctcgcagcagaggtcctggagctcgccggcaacgccgccaaggacaacaagaagtcccgcatcgtgccacgccacctgcttctcgccatccgcaacgacatggagctcggaaagctgctcgccggggtcaccatcgcccacggcggcgtcctccccaacatccagtccgtgctgctccccaagaagaccgcccctacgaaaaaaaaaaaaaaaagtt

SEQ ID NO: 9252 - DNA, 329 bp, Cricetulus griseus
gggcctcacatccactcctggaccaacggcagcctcactactctgcttttggctctgtgggtgagtggcttcgagccatcaagatgggaagatatgaggaaagttttgcagcagctgggttcggctcctttgaggtggtcagccagatctctgcagaggacctgctccgtattggagtcactctagcaggacaccagaagaaaatcttggccagtgtgcagcatatgaagtcccaagctaagccaggagcccctggtgggacaggaggaccagcccaacagttctgacctccaaggactcaccacaactttttttttttaataaataaa

SEQ ID NO: 9253 - DNA, 329 bp, Cricetulus griseus
  modified_base (311)..(311): a, c, t, g, unknown or other
gtagaaaatatgataaaaatggaaatcttgatccttggtggtctgtggactcagaagaaaagtttaaggaaaaaacaaagtgcatgattaaccagtatagcaactattattggaagaaagctggcttaaacgtaaaggggaagaggaccctgggagaaaatattgctgataatggaggtcttcgagaagcttttagggcttacaggaaatggataaatgaccgaagacaaggagttgaagagcctctcctaccaggcatcaccttcacaaacaaccagctcttcttcctgagttatgctcatgtacttttnttttcttttcttttcttt

SEQ ID NO: 9254 - DNA, 329 bp, Cricetulus griseus
gttaagagcaccaattgctcttccagaggtcctgagttcaattcccagcaaccacatggtggctcacaaccatccataatgagatctggtgccctctcctggctgccacacacacacacacaataaaaacaacagtaattacagcactggggctggagagatggctcagaggttaagagcactgactgctcttccagaggtcctgagttcaattcccagcaaccacatggtggctcacaaccatctataatgagatctggtgcccttttggtgtgcaggcatacatggaggcagaatgttgtatacataataaataaaatctttaaaaa

SEQ ID NO: 9255 - DNA, 329 bp, Cricetulus griseus
caagaactatggaataagaggtcctgtttttaaaaggaactgccgctatctctgaaagacttccaaagaatgttagagcacagtacataacatccctgccctgctcccactacccactccccaaagcccacccccgtgtgcaactgacactcctatccagtctatgctctgcctttcagcccacatcatgtgtagtgtccatcttgtgaagccctgttatgccacacagtgtagccatgccccctgcagctagtcatagtgaaccccaccctaaggccccttgagtgccagctctctcacatgtacttggtccaactgtaggtgactgg

SEQ ID NO: 9256 - DNA, 328 bp, Cricetulus griseus
  modified_base (124)..(124): a, c, t, g, unknown or other
gctgctgaagtacctggagttggggaagtcgactctgctgctctcagaccccccaaaggcatatgtgacccatcatcctggatataaaggtgatgtcaccctgaggtgctgggccatgggcttntaccctgctgacatcaccctgacctggcagagggaggaggaagaacagactcaggacatggagctggtggagaccagaccttctggggatggaaccttccagaagtgggcagctgtggtggtgccttctggggaggagcagaaatacacatgccatgtgcaccatgagcggctgcctgagcccctcaccctgagatgggagcct

SEQ ID NO: 9257 - DNA, 328 bp, Cricetulus griseus
tttggcttaagtgagactgaggacatcccttcccggttcagggcagcctgtcagcagcaagcagtgactgtaagcctgcaagaggatagagccttgatgacccttccaggggatacctctgcactagcctttgacctctccaaggtgcccagcccagaggcaacccccaagctacaggctttgactctcagcctggcagagcgtgtgtacaacctagagaagcgactagcagctgcagaagagatcgccactagtcccaggaagaatacccatccagcgggccctcaactcttcttaccagaacttgatcaccagagaggcagctctg

SEQ ID NO: 9258 - DNA, 328 bp, Cricetulus griseus
  modified_base (322)..(322): a, c, t, g, unknown or other
ggacagcccggagcctgtagctacggatcataaccctgtcaggccgctccgacgctgcccgggctgccactgtctgacgctgctgcacgtgcccatcgacgtctacctggccatgggcgggagccctcgggcccgtgccacctgagtgcgcctgcgcacggcagctccgcaggagccgggcaggacgaggccagccgcgggccaccacgctgaggtcgcacgcgccgagcacgagacaatgatgcacattttaaaattaaaagaaatgatgcacattttaattaaagacacagcataaactagttctttcctaaaaaaaaanaaaaaa

SEQ ID NO: 9259 - DNA, 327 bp, Cricetulus griseus
  modified_base (217)..(217): a, c, t, g, unknown or other
  modified_base (274)..(274): a, c, t, g, unknown or other
gctcttgatgacccctcatctctggaccagctgcagcagatatggtccacctggagcccgcatccgaagcagcccctggtactcgtgggcaacaagtgtgacctagtgacgactgctggagatgctcacactgctgcagcaatcctggctcacaagtgggagcccccttgtgaagacctcagccaagacccggcaaggtgtagaggaagcctttacnctgcttgtccatgagattcagagggcccaggaggctgtggctgagccaagcaggganaagacccgacaccacaaagccgtgtgtagctgtggctgctctgtagcctgaag

SEQ ID NO: 9260 - DNA, 325 bp, Cricetulus griseus
cttctcctcttctgggtctacagcagctgcatcgaggattcccacagaggttccatagggctccgaattgctttggccatctcagctattgccatcttcctgatattagtgtctgcctgtatacttcgatttggcaccagttctctctgcaattccatcatctccttgaaccatacaattagttgctctgaagcccagaaatcctcatggacaccccctggaactgctgtgcagttttactccaacctacaaaacgctgaaacctcttcttgggtgaatctggtactgtggtgtctggccttgatgctccaggtcgtgcagtgca

SEQ ID NO: 9261 - DNA, 325 bp, Cricetulus griseus
gcatcatctccaacatagcatcctgctgctactccatcctgaaggtcaagaatgcaggaatgacactaaaggccaagggtgcctctggctcatttcctcctgaagctgcacgttggctctgctaccgagccttcctgctcaagctggctggtcattctgtcacctacaagtgtctcctgggaccactcaggacagcccaaaacagctgtgccggaagctcccaagggcaacaatggccatccttgaggctgcagctgacccagccctgagcacagactttcagaccattttggactaaccccgctccttcagctggatgaacatg

SEQ ID NO: 9262 - DNA, 325 bp, Cricetulus griseus
tcctttggggtcctcttcaaagcaacttctgactcatgcttttaggaacagatatactggtttaaaagatgacacaggaccacaaagccaatgttatgggttagtaacagagtaacagtcacatccaacagaggatgtgtcacctctagggaacattccacaaatgaggtgggatttgtaatcaacaatgcaaatgaatatgtttttatgaataaataacttatttcttatatggccaaggatggtgagatgatttcattctatagttgtagtgaataagacactatgcaggtaaagacaagattgcatttaaaataatcaatgt

SEQ ID NO: 9263 - DNA, 325 bp, Cricetulus griseus
gagactgtggccatggaggaagccagcggcttccggaaggagctggtgagcaaactactgcatctgcacttcagggactgcaagacaaaagtcagtggggatgcactacagctcatggcggagctcctgaggatcttcgtactagaagccgctgcccgcggggtctgccaggcccaggcagaggacctggatgttgtggatgtggaccagctggagaaggtgcttcctcagctgctcctggacttctagaggttatacccgtggcctgcaaagtccaggatgaattcaaccagcattgttagtataaaccaaaatcaataaatca

SEQ ID NO: 9264 - DNA, 324 bp, Cricetulus griseus
taggcccaagagttgaccaggccttctccagggccattctggaaaagtctgagcttccagccttctctgagggtccctatggacccaaggagtcttctgaggctggagatcatagaagcagtggagagaatatggggaccgcctgagggagggccagaggactgctgactctgtgccctccatactgatggctgtatgacctggggcaggacgtcccacctctctgtgcctcagcatcctcatttgtaaatggggatctctgaaactttcccgcccacctacctcacaggctgtagtgaggacccagggagtttgatgtagaaa

SEQ ID NO: 9265 - DNA, 324 bp, Cricetulus griseus
tcagaacttccagctcctcggacctggcttccagctgcttctcatgctgtgtcttcgggttgcattggtctgaagtgaactcacagccggccagccatgaactggaaggttcttgaacacgtgcccctgctgctgtatatcttggcagcaaaaaccctgatcctctgcctggcctttgcgggtgtgaaaatgtaccaaaggaaaagcctggaagccaaactgcaagccgataagaagcagcgatcagagaagaaagagaactgaagaaacatcagagatctttctatttaaatgtcagcgttgggtggactccagcagagaaga

SEQ ID NO: 9266 - DNA, 324 bp, Cricetulus griseus
gtacaacattatgaaaagctgctggcactggagtgagaacagtcgccccttgcctggagagctgctcttgcgcctagaagctgcctctagatctgcaaatgacaaggctgtgttgcaagtgccagagttagtggtgcctgagctgtatgcagatgtggctggcatcagagcagagagcttttactacagctacaccactatcctttaaagatgtcctcagacaagtgacttggaatcagtttcttcaagaacagagggaaggaactttctatgggccacaaagggagaaaaaggacatggatctgggcacgaatgaataccttc

SEQ ID NO: 9267 - DNA, 324 bp, Cricetulus griseus
  modified_base (198)..(198): a, c, t, g, unknown or other
ggtagttcccggtctcaggctcagcggtgcactagcccagctatcctagtgaccttttgcgccctgctttggatctcgaacctagtgcaggcgcaggaccaggataccgatacgcagttggaggctgactgtgaagtatgtaaagcgttcttaaaccgattctacaactccttgctcaccagaggagtagacttttcngtggacaccatagaggaagagttggccagcttttgcttggatgccaaaggaaaagaaagccacctgtgttattatctaggagccagcaaagattcagccaccaagatcctaggtgaagtcacacgt

SEQ ID NO: 9268 - DNA, 324 bp, Cricetulus griseus
tgtgtgtgtgtgtgtgtgtgtgtgtgtgtgtgtgtgtgtgtgtgtgtatgaggtgatgcagtgaacgattttgttctggtatgatgtattgccttgccacatgcccaacggcatggaaccaaatgatcatggactggaatgttcaaaactgtgaatcaacacacaactttttgttataagttgattaactcgggtattgtgttgtagtgatgaaaagctgaccaacacaatgttgtacctgcatgcctacacacccaacctccattcccaagactataagtcttacatttaatgatagctcctggcacgaggtgggttcttagg

SEQ ID NO: 9269 - DNA, 324 bp, Cricetulus griseus
tttgtgacttccaccatggcgtaccgcggccagggccagaaggtgcagaaggtgatggtgcagcccatcaacctcatcttcagatacctgcaaaataggtctcggattcaggtgtggctatatgagcaagtaaatatgcggatagagggttgtattattggctttgatgagtacatgaacctcgtattagatgatgcagaagagattcactctaaaacaagtcaaggaaacaactgggtcggatcatgttgaaaggagacaatattactctgctccaaagtgtttccaactagtttttttaaagttttaaaaaaaaaaaaaaaa

SEQ ID NO: 9270 - DNA, 323 bp, Cricetulus griseus
gagcccatgaccgtgagctcagaccagatggccaagctgcgtagtctattcgccagcacggagaatgagcccccggtgcctctggtggggaattggcgccccccgcagccggtcaagggtagggtggtgagggcctctttcaagtgaggtcccgggtttgccctctgcaggaaagaaaacctgccctgaagagtcgcctgcctctccctggtgctctgtgctctaagctattttccaacactctgaaagaaaaagacgcagtcacatgaaaccgcaatgccttttgacattatctaacccagaagcatgaatttcactcctaa

SEQ ID NO: 9271 - DNA, 323 bp, Cricetulus griseus
  modified_base (50)..(50): a, c, t, g, unknown or other
aacagcggacagctctttatctacatgcagtcggtgaccagctcgttggngccccctgtcaccgccatcttcgtcctgggcatcttctggaggagggccaatgagcagggagccttttggggtctgatggccgggcttctggtgggtgctctgaggctggtcctggaattcctgtacccggagcccccctgcggtcagacagatgagcggccagccctcctccgcagtgtgcactacttgcattttgccatcgccctgttcctcctcacttgtgctgtagtggccgctgggagcctactgagtccacccctcagcaaagacag

SEQ ID NO: 9272 - DNA, 323 bp, Cricetulus griseus
gacatagctggggatgaagacaaccgcaagtggatgagagagaatgttcccggggaaaagaagcctcagaatgggatccctttgcctcctcagatcttcaacgaagagcaatactgcggggattttgactctttcttctctgcaaaagaagaaaatattatttattcattccttggtttggctcccctccagggtcaaaggtgacaaagtctgaggaagcttcttcccttcccaatggagatgtggccggagaggcagaaggcgctgcagagggaacagagcaggccgaaggaagtggggaaaacaagtcacacaaagaggac

SEQ ID NO: 9273 - DNA, 323 bp, Cricetulus griseus
ctcggttttgaatgtaaatcaggcaacatgaccttcttgattagaagcaaaaccaacacttcctttagacctccagagttggtcctcacctatgacatgtggctgcaagcattcctagggtttttcagggtcttgctcctgcctgaatggatgacattggccctagaggtcatggaccttaacatcttaactaaagtcatccttgggagcaagtctaaggcttgtggaggaaggccgaagcagttcttggcactgccattcatcacatatcaacttgatgcaaaggggttagctgattgctgcaagtccacatggccaccaaa

SEQ ID NO: 9274 - DNA, 322 bp, Cricetulus griseus
cagcctgcaaaaagcatgagctgtatgtgagcttccaggacctgggatggcaggactggatcattgcacccaaaggctatgctgccaactactgtgacggagagtgttccttcccactcaatgcacacatgaatgccaccaaccacgccatcgtacagaccttggttcaccttatgaatcctgagtatgtccccaaaccatgttgtgcaccaactaagctgaatgccatctcggttctttactttgatgataactccaacgtcatcttagaaaaaatcaggaatatggttgtgagagcttgtggatgccattaagctgaagc

SEQ ID NO: 9275 - DNA, 322 bp, Cricetulus griseus
  modified_base (273)..(273): a, c, t, g, unknown or other
gacgatgacgtcttcatccatgttcccaacgtgcttgagttcctggagggttgggatcctgcccaggacctcttagtgggggatgtcatccaccaggcccagcctaacaggaacaacaaagtcaaatacttcatccccttctccatgtacagggcccaccactatccaccttatgcaggaggaggaggctatgttatgtcccagactactgtgaggcgtcttcacacagccatggaagaggtagaactcttccctatcgatgatggtttttgngggaatgtgcctgaaaagctggggtgacccccacacaccatgctggctt

SEQ ID NO: 9276 - DNA, 322 bp, Cricetulus griseus
tgaagccgtcctaccgcaatgccatcaccgtgcccttcaaggcctggggcaagtttggaggcgccttctgtcggtatgcagatgagatgaaagaaatccaggagcgacagagggataagctgtatgagcgacgcggtgggggcagcggcggcggcgacgagtcggagggcgaggaagtggatgaggattgaaacggcagcttcccgtactggcctcccccaccccaccacccatccccttggctagacagtcccctttcctactcgtccccagtgagctagtggagagggatcaggggaggccgcagacggagaaaacaaaa

SEQ ID NO: 9277 - DNA, 322 bp, Cricetulus griseus
ctatgatccagatacagtggaacttatgacctggataaagaggcaagccccagttgcagctgtgtttgcaggaagtccacagttaatgggtgtgattaagctgtgtactgggtggatggtgacgagcctgccactttatagtgatgatgaccttcttaggagaaatgaaaacatttaccagatctattcaaagcgatctgctgaggacatttataaaatactgacatcttataaagctaactacctaattgtagaagatgccatctgcaatgagatgggaaccacgagaggctgcagggttaagcttatagatgttgccaat

SEQ ID NO: 9278 - DNA, 322 bp, Cricetulus griseus
tttattgatcagcattgataggagtttgatataaaaatcaggcctgtggaatgtgagggggtgtgggtccaccccctcaggtggaagcactggggctgagtggcacggaatcatgtgcctggctatcttcacctctgtgagggtagtaacaggatctgcacatacagccacttggaggggtgaggtcgctgagattctctactccttggcaatggcaaagggcttctccacttcgatcttgccacagtctgcaatgatcacatccttcaggggcttgtcccgactgtctgtcttagtgctctccaccttcctcactacatcc

SEQ ID NO: 9279 - DNA, 322 bp, Cricetulus griseus
ttctactgcaagtcacacctcactgtacatcagagaactcacacaggtgagaagcaaagacatcacacaggtgagaagccctatgaatgtaaagactgtgggaaagcctttcagtgcaaatatgaactcactcgacatcagagaacacatacaggtgagaagccttatgtatgtctagaatgcaagaaagctttctacaccaagtcagatctcactcgacatctgaaaacacatgcaggtgacaaaccctgaatataaagggtacagtaaagcttgacacaataagtccgtccttaactggcatcagagaacacatatgaaa

SEQ ID NO: 9280 - DNA, 322 bp, Cricetulus griseus
caagagggactttgtggatgtggctgaagctaagaggaccatgaaaaggattcccattgccatgaactggaaagagttacttccccgacctctggacactgaatttcggcaccattaccaagttccagctaagattcctgaactgcaggattttagtttcaaatatggatgctactcaagtctgcctgttgcttcccagggtctagtgcccttccgtgctgcacagctacatacggaaccaggagcgcacaaagaagcagaccacctacgcgagtgactacgggaaagcctgcctggacttcttgatgatcttagactcatt

SEQ ID NO: 9281 - DNA, 322 bp, Cricetulus griseus
gtactacgtgcccgatgccgaccagtggactagcgtggcccctatgcgcgccggccagtcggaggccggctgctgcctgctggagaggaagatctacatcgtgggtggctacaactggaggctgaacaatgtcacgggcattgtgcaggtgtacaacaccgagacagacgagtgggagagagacctgcacttccccgagtcctttgcaggcatcgcttgcgcagctgtcctgcttccccgcgctggtcacgggaggtagctctgatccaggcctggctgtgttccccacgagtgtcgggccccacttctggggtccccacct

SEQ ID NO: 9282 - DNA, 320 bp, Cricetulus griseus
gtgcggggatgcgatctgcagtgatggccctcgctgtccgagtcgtgtattgtggagcttgaggctacaagcccaagtatctccagctcaaggagaagctagaacgggagttccctggatgcctggacatttgtggtgaggggactccccaggtcactgggttctttgaagtgacagtagccgggaagttggttcactccaagaagagaggtgatggctatgtagacacagaaagcaagtttcggaaactggtgaccgccattaaagctgccctggctcagtgccagtgaaccctggaggcagggtcctgggacctcctg

SEQ ID NO: 9283 - DNA, 320 bp, Cricetulus griseus
acctacttcaccatgctcaagaccatctgtgtggaagtggagcatgggctgctgccaagggaagagtggcaggccaaggtggccggtagcgaagccagcgacactgagaatgaagctgttgaggcagaggaagctgaagacgagagggtctctggggagctggacctagaagcccagtttcatctgcacttctccagcctccatcacatccttacccaccttacccacaaagcccaggaagtgacaaggaaataccaggaaatgacaggacaggtcctgtaggcctccaactctaaggaagatcactttaccctgagaga

SEQ ID NO: 9284 - DNA, 320 bp, Cricetulus griseus
cagagcccttgcttaggcacatgcgtgtggcttcagagattgtggtacccacagtctgcgtcctctccatcctcattgctgccctgctgctaacactccttctcaggagccacggctgagataggatctcatctccaccttcatctttcagacaaccttcaggatcatgcttcttttctgcttcaaaattcacttgatgtctatattttaggatctgaaaattacctgtttcttccccccacctttttggtttgtgctgggatttaagaatcagaaaataaaataaacataaataaaatgaaagtgacctgtaatctcaa

SEQ ID NO: 9285 - DNA, 320 bp, Cricetulus griseus
  modified_base (103)..(103): a, c, t, g, unknown or other
catctctttgcttctagagccttccgttgtccatgaatgcataaacacctaagagaaaacagggatgtcttgctagccatatattttctcagtagcatagaancgatagctggaatctactagaaccttctaacacacttgctactgtgcagtcaagaacggaagatgtaatgatgctaaactgaataaatgatgtgtatgtgtgagtttttgtgtctgtacattgttgtgtctgtgtactcttagacctggtgttctgggtccattacaaactatataagcatcctctaatttttcttacattaaaaattctacctact

SEQ ID NO: 9286 - DNA, 320 bp, Cricetulus griseus
aattgagagccttaaaatttttttggtcattccttgaagaacttagtactccagaaggaaaataggcaatggaaaatccactgtaaattccagaagaaactgaaggaactgggcagattgaatactaaagctctgagtctgctgtctcttctaaatgtatatcagaagaaacatctggttgagattttgtcataccacaactgtgattcacaaactcgaaatgctccagaaatggactgccttattaggcttcaggctcagaatatacagcagcgacacatagtctttctaacagagaagactatcaagatggtttccag

SEQ ID NO: 9287 - DNA, 320 bp, Cricetulus griseus
  modified_base (84)..(84): a, c, t, g, unknown or other
aaaaaattaaaaaaaaaaaaaaaaaagttaaaaagtgtgtaagagtgtgtgtgtgtgttctttctcctttcctttcttctctcnctttttttttaacttcctcatattatgttcagatgatcatactgtcaaggtttgtgtacattactgaaaatttgtattgtataaagcttttgcattacaaggctgtacagggtcattttgacagtaactggtattttcctttgcatcttatgttgcattgccaatttctagtgtatcgagtttggaagtataatatactctaattaaaaaaaggttggctaataaaaaaaaaaaaa

SEQ ID NO: 9288 - DNA, 320 bp, Cricetulus griseus
tctccaggatcttgatgtctctgtcgaatgggctggggctgctggggctgctggcctctggctctggcctggactgcttgaggcttggagagacccagaaggatctgaagaggcggttgcttatcctaggagggctcctgctctggacttcgggcgtgatggtcctggttcctgtctcctgggtggcccacatgacagtagaggagttctgggatgagactctgcctgagattgtgcccaggtgggagtttggggaggcccttttccttggctggtttgctggcttctgccttgtgttaggagggtgtctgcttcactgt

SEQ ID NO: 9289 - DNA, 319 bp, Cricetulus griseus
taaatcgggccagggctcggtcgttcgagctgggagttgtgtcgtcgataaattcgaggggaattagagccgcagtcacgatgattgaggttgtttgcaacgaccgtctcggaaagaaagtccgcgtcaagtgcaacaccgatgacaccatcggggacttgaagaaactgatagcagcccaaactggcacccgctggaataagatcgtccttaaaaaatggtacacgatttttaaggaccacgtgtctctgggagattatgaaatccatgatgggatgaacctggagctttattaccaatagacgggaatccttctcct

SEQ ID NO: 9290 - DNA, 319 bp, Cricetulus griseus
tttagacctagctcctggaggttccgatgattggatctatgatttgggcatcaaatactcatttacgattgaactgcgagacaaaggcagatacggattcttgctacccgagagatacattaaacctacttgttcagaagctctggctgcagtctccaaaatgtttggcatgtcgtcaggaacgtttaatgcccttgcctctgctcggggtgttttatttactaatctcagcaacacccaattgtgaacttagctttctaagtttaatcagttaccttggtttgtctaaagaataaaatcataacactttgagcttaag

SEQ ID NO: 9291 - DNA, 319 bp, Cricetulus griseus
cgccatgaacagcgtcggggaggcttgcactgacatgaagcgcgaatacgaccaatgcttcaaccgctggtttgccgagaagttcctcaaaggggacggctccggggacccgtgcaccgacctcttcaaacgctaccaacagtgtgtccagaaagcaataaaggagaaagagattcctatagaaggactggagttcatgggccatggcaaagaaaagcctgaaaactcctcttgacctgcatgtcactaggaagatgtcagtaaactgagaggcctctggattttgccagcaaaagttgtgaagctagccaagggattc

SEQ ID NO: 9292 - DNA, 318 bp, Cricetulus griseus
cagagacatggtgacgaggtgcaacaatgttggtgtccgtatttatgtggacgctgttattaatcacatgtgtggcgcaggtggtggcgcaggaacaagcagtacttgtggaagttactacaatgctaataacagggattttccatcagttccatactctggttgggattttaatgatggtaaatgtaatggagaaatttctaactacaatgacgctaatcaggtcagaaattgtcgtctgtctggacttctggatcttgcactcgagaaagattacgttcgttccaaggtggctgaatatatgaaccgtctcattga

SEQ ID NO: 9293 - DNA, 318 bp, Cricetulus griseus
  modified_base (279)..(279): a, c, t, g, unknown or other
gacatggtgttcctgggtgactttaatgctgactgcaagtatgtaaaggcccaggactgggtttcaatccgcctgcgcagcagtgaggtctttaaatggctcatcccagacagtgcggacaccacagtgggcaactcagactgtgcctacgaccggattgtagtgagcggtgctcatctgcctaagagcctgaaggcccagtcagcctctgttcacaactttcaggaggaatttggcctagatcagacccaggctcttgccatcagtgaccattttccngtggaagtgaccttcaagtctcactgacagctatggcct

SEQ ID NO: 9294 - DNA, 318 bp, Cricetulus griseus
acacacacacacacacacacacacacacacacacacacacacacacaacaacttgttaaaagcaacagaacctattacatacagcacaaaagcgagaaaagtatgttccatgccacagtggccactgagactgaattctttagagtgaaggtgtttgatatttccctgaaggcgaagttcatcaaaagcaatgtcattaccatctcagattatttcggttgcaatgggttcataaatatttacagtgcctccagtgtgtcagaggtaaatgttaaccaatcaatgattatctcaactgcactgatgcaaagagccaat

SEQ ID NO: 9295 - DNA, 318 bp, Cricetulus griseus
  modified_base (244)..(244): a, c, t, g, unknown or other
gtgcacagcccatggaaactggactgaattgccagaatgcagggaagtaaaatgccccttcccgtcgaggccagacaatgggttcgtgaattatcctgcaaaaccagtgcttctttataaggataaagccacttttggttgccatgaaacatacaacctggaccggcccacgaagaagtggagtgcaccgaagatggggaaactggtcctccctgccgagctgtaaagccaaccttgcaaaatnaccaattaagaaagccacagtgctgtacctaggagaaagagtgaagatccaggagcagtttaagaacggaatga

SEQ ID NO: 9296 - DNA, 317 bp, Cricetulus griseus
ctacttccgttacctgggctcactgaccaccccgaactgtgacgagacggtcgtctggactgtgttcaaggaacccattaagctccacaaagaccagatcctcaaattctccacggagctgtactatgacgaagggaagaagctgcctatgaaggacaacgtgaggcccctgcagcagctaggaaaccgccaggtgttcaggtcccacgccccaggacagctgctgtctttacccctgaccaccctgttggtccctacactcacatgcctggtgaccagcttcctccaatgacagaccacttcctggatatgtgacc

SEQ ID NO: 9297 - DNA, 316 bp, Cricetulus griseus
ggagcgactctatttccacttcacggagggcggcggcccagtaatggtaggaggggacgcagatgctcagtccaaagccttgctgggagtctgtgagggcccagctacggaggcctatgtcctgatactggatccacactactggggcactccgaaaaacagtagtgagctgcaagctgctgggtgggtgggctggcgaaaggtaagcagtgtctttgattccagttccttctacaacccctgcttgaccagacgtacctgactcaacacaaccctgcctgcacgagttcaatgccaacttggtctaccagtcaag

SEQ ID NO: 9298 - DNA, 315 bp, Cricetulus griseus
tttcccgtggtccaaaggctcagccatccagggctagcagccctcttggccttctgctctgccccaggccctgtgatatttattgtagttaaaggcaacggatttggggtgggagaagagggtctggcgaggtgggaattgggaggggcaaggggcacagagctgtggcagggggggtcctagtagttatgtgtaaatatctgtacagtgggctgcccctgcattctctgtccacttgtgtgcattgattttagacttctccacttagtggagactctgtgaaattgtctgatggtctgtgtggaagaaaagaaa

SEQ ID NO: 9299 - DNA, 315 bp, Cricetulus griseus
  modified_base (304)..(304): a, c, t, g, unknown or other
acaattgcaagattcgagtgtgactcctgattgctttggaagcttggtgactgtccagctgaacacttccagctgctgggtgtggtggccacctatccctggcggctgcagaccactctctgtagactttactggttttcctttctaattttcccagactggtggcttggggtttggaagcggtccaagagaagggagtgagtcttcccaccctcactgcagcgttggggaacaaagagcaatgtgaagatgctccccaggatttcctcttcctgtcctgctccccacatcagaaaaaaaaaanaaaaaaaaaaa

SEQ ID NO: 9300 - DNA, 313 bp, Cricetulus griseus
gaggaggagctactgaacaagaggatgatgaagtactgggccaactttgcaagacatgggaaccccaacagcgagggtctaccctactggcccatgttggaccatgatgagcagtacctgcagctgaacatccagcctgctgtgggccaagccttgaaggccagaaggctgcagttctggaccaagactctgccccagaagatccaggagctaaagaggtcacagaacatgcacaaagaactatagggccctatgtgaggaatggtgtgttagcttggctgctgatagagtcagcttgaggttcccaaaacat

SEQ ID NO: 9301 - DNA, 313 bp, Cricetulus griseus
ccctgacaccctcacgagtcatggatggcaagaggatttcttcctatgatgacaggttcatggtgaagctggctgaagagacggatgggatcattgtctccaatgaccagttccgggatctggcggaggagtctgacaagtggatggcgatcatcagagagcgcctgctgcccttcacctttgtgggaaacctcttcatggtcccagatgacccactggggcgaaatggccccaccctggatgagttcctgaagaagacagtcaggaaacagggctctgctaagactccccagccctccaggggccccacaga

SEQ ID NO: 9302 - DNA, 313 bp, Cricetulus griseus
  modified_base (276)..(276): a, c, t, g, unknown or other
  modified_base (291)..(291): a, c, t, g, unknown or other
gatgtgtgtgggacgtgtgtgaagaaggagtaccccaatcgggggaacacctgtctggagaatggatcgttcttattgaacttcataggctgtgcggtgtgcaataagctagattttatgctgatcacaaacagaaccctgaaagaggaagatggagaagaaatagttacctatgaccatctatgcaagaattgtcatcatgtaatagccagacatgagtatacatttcagtatcatggatgaatttcaggagtacaccatgctgtgtctattgtntggtaatgaaaaaanaaaaaaaaaaaaaaaaaaaaaa

SEQ ID NO: 9303 - DNA, 313 bp, Cricetulus griseus
aagacctgcaggcacaaggaattcttcgggttgttcaaccacatcgtgctgggagatgatcctgaggtcaacagtgggaagccagccccagacatattcctctcctgtgcacggaggttcaatcccactcctgccccagacatgtgcctcgtctttgaagatgctcccaatggagtggaggcagctctcgcagctgggatgcaggttgtcatggttcccgatgaaaacctgagtcgagacttaacaagaaaggccacagtggtgctgcattccctggaggacttcaagcctgagctgtttggtctgcctgcct

SEQ ID NO: 9304 - DNA, 313 bp, Cricetulus griseus
cagattgcactggaatatggccaggcaatgacagtccgagtgtgcaagatggatggagaggtaatgcctgtggtcgtcgtacagaatgccacggtcttggacctgaagaaggctatccagagatacatgcagctcaagcaggagcgggaaggaggcattcagcacatcagctggtcatatgtgtggcggacgtaccatctgacttcagctggggagaaggctcacagaggacaggaagaagctcagggattatggcatccggaatcgagatgaggttccttatcaagaagcttaggcagaagtgaaccccaga

SEQ ID NO: 9305 - DNA, 312 bp, Cricetulus griseus
tgtggcacagctctatacaacaatctgctgtggagcaactggtccatagacgccctttccagggtggtcatcatggaggagttcccactgccgcagactccacgctacatggacacctttaatgacacttctgtccactggttccctctgctgaagctggagggacttcccaggaacctgtggggcatctcaggaagaacctgactaccaggactgcgaggacctggagatcatcaggaaacagacaggctgagctcagctggcatagcaggacagtatctgccacctgggccaggagccatgctgcagacc

SEQ ID NO: 9306 - DNA, 312 bp, Cricetulus griseus
ccagaggtagccgtggctaccgagcccgcggcgccctcccttgtggatcgatacttcactcgctggtataaagcggatgtcaaaggaaaacccagtgaggaccactgtatactacaacactccaaccgaatatgtgtcatcacgctggcaggatctcaccccgttcttcaaagtggcaaaactattaaaagtatttcctatcagatcagtaccaactgtagcagacttcagaacaaagtatctgggaaatttaagcgggggcacagtttttaacagaactcgcacctctgtgtaagattcactgctctgatg

SEQ ID NO: 9307 - DNA, 312 bp, Cricetulus griseus
  modified_base (306)..(306): a, c, t, g, unknown or other
caggtatggatctctggcgggtgttcttaaccttggcactggcggtctccatcgacgcattttctggaaatggggttaaaccagctactcttggcagagttcccccaattctgcaaagaattaatccaagcctggggacaagttcttctgggaagcctcaattcaccaagtgccgttcacctgaactggagacattttcatgttactggacagaaggagattatcatgacttaaagatcccaggatctatacagctattctatgctagaagaaaataaataatttaaattttaaaaattaaaaaanaaaaaa

SEQ ID NO: 9308 - DNA, 312 bp, Cricetulus griseus
tcatcaccttgtgtgacaagacgatttttacaatttgctttgctcctaccaacattatactcgtaattcaccatgcaaactactactactacaacactgatagcttgtattttatgtatctcatagctttctgggtagcctgaatagttgtctagacccattcctttattttgtcatgtcaaaaattgtagatcagcttacttcttagtcaacaatggcaagatcatcttagagaacaaagaaagatattagtgaaaatatacatgcttgggctgacttgtgcatggcaccaacagctcaatttttaatttt

SEQ ID NO: 9309 - DNA, 312 bp, Cricetulus griseus
gccgactccaccgggcactgagcctcagacagggccgtgagaagtccaggtcgcagggccttgatggcatggaaggactggaggtctctgctcaggagcgactgccagggaccctgggagacacagagcagctgatccaaagccagagagaaggccgccagcgatggctgaggcaataccaaacaggtaaggagaaggtggaagagcttgtcgccagcttcccagtgtgaccctgaatcgaccagcctccccagagacctcattgaacaccaacagctagagcggctgtgattgtccctcactccaccggct

SEQ ID NO: 9310 - DNA, 311 bp, Cricetulus griseus
atgtccggacgcggtaagggaggcaaggggctcggcaagggcggcgccaagcgccacaggaaggtcctccgcgacaacatccagggcatcaccaagccggcgatccggcgcctggccaggaggggcggcgtcaagcgcatctccgggctcatctacgaggagacccgcggcgtcctcaagatcttcctcgagaacgtcatccgcgacgccgtcacctacaccgagcacgcccgccgcaagaccgtcaccgccatggacgtcgtctatgcgctcaagcgccagggccgcaccctctacggcttcggcggcta

SEQ ID NO: 9311 - DNA, 311 bp, Cricetulus griseus
ggcggcgggatggctgggccggcggcggcggcggtacgaggcgcgcgctcggggtcccggtcgcgaggaggaggaggatgtggcgcgcggaggggaaatggctgccgaaaacaagccggaagagcgtttcccaaagtgtattctgcggaactagcacctactgtgttctcaacaccgtgccacctatagaagatgatcatgggaacagcaatagtagtcatgtaaaaatctttttaccgaaaaagctgcttgaatgtctcccgaaatgttcaagtttacccaaagagaggcaccgctggaacactaatgag

SEQ ID NO: 9312 - DNA, 311 bp, Cricetulus griseus
  modified_base (302)..(302): a, c, t, g, unknown or other
atgtcggattccctggcagtgtgtgaagtggacccggagctaaaggaaaagctgaggaaattccgctttcgaaaagagaccgacaatgcagccatcataatgaaagtggacaaagcccgccagatggtggtgctggaagaagaaatccagaatgtttccccagaagaactcaggttggagttgccagagagacagcccagatttgtgatctacagctacaagtacttgcatgacgatggcagggtgtcctatccttgtgcttcatcttctccagccctgtcgggctgcaagcctgagcaacngatgatgta

SEQ ID NO: 9313 - DNA, 310 bp, Cricetulus griseus
caagggtagtgtggccactgaggccctgaaggacccggaggtatgcacagaccctgcccagctaaccacacacgccatgggggtgaacatctacaaggaaggccaggatgtggccctgaagccagactcagagtacccagagtggctattccacatgaacttgggtccccccaaaaaactggaggagctggaacccgaatccccagagtactggcggctgttgcgcaagcagaacatctggcgtcacaaccggctaagcaagaacaagaaactataagtgcgtggatgggacacctcacaggaagctgcc

SEQ ID NO: 9314 - DNA, 309 bp, Cricetulus griseus
agagaggtcagcagagactcctgctcagttgcaatctaaagaggtggttgaacataagacttattccacgactaccaagtcctctgcagaggtacagctacctatggaagctttcccaggccagatggctgatgcacagcttcctgcccaggtaccagcgacgccatgtgtgtgtggactgtgggcgccgcttcacctacccttctttactagtcaaccaccggctctcacactcgggtgagcgacccttcccctgcccagagtgcggcatgcgcttcaagagaaagttcgcagtggaaactcacaaat

SEQ ID NO: 9315 - DNA, 309 bp, Cricetulus griseus
agtaccagagattcaccatgattcttcagaggatcttcaggctctcctctgtccttcggtcggcagtctatgtgcatttgaggaggaacattggggttacagcagtggactatttaataaggaacttgactcccattcagaaacttcttcgtggacaagataagagagtacaaatcaaaagcgacaaacaatctggaggacctgttgatactggccctgagtatcaccaagagctggagagagagctttttaagcttaaaacagatgtttggtaaagagacatggatacgttcctaccttcaaatttga

SEQ ID NO: 9316 - DNA, 308 bp, Cricetulus griseus
ctacaatggacacatcaagagtctatgtcaatgtaaagacctttaggaccccaggacacaagtgtgcatcacctccatctcttcccccagatgccagtcagtgcccacactggcataggttggccctgaactcggctgtgttgggctgattcttcttgtcttgaacctgattggactcagtatctcagtgcgattcttgatggagaaaccaccaatcgaaaagcacggtgtggctgatcaagagaacaggactgaaccaacagggagatcagccatgctaaagtgtaccaagagactggcatctacac

SEQ ID NO: 9317 - DNA, 308 bp, Cricetulus griseus
gaagctcaggcctctggagaagcaggggcccatggagtcccggaacctctggcaagaagtcactcattacttgcggcttggggacatcgatgcagccacagagcataaacggcgcctggaggagaagcagaggatggaggaacggaaacgggagacccttcgcacaccatggcagcccaagtacttcatcccggagggtgatggctgggtgtacttcaaccccctctggaagacacactgatgggtggaggtgcagtgctgccctcaataggcctggttttgtaggaattaaagtggtacagtatcaa

SEQ ID NO: 9318 - DNA, 308 bp, Cricetulus griseus
catctgaaattcaaatgatgacactgcccccaggtcagtttgtgatcacagacagtagtgtggcaactcctgtcacttctgggcaagtgaaagcagtgactccgggtcattatgtgttatcagaaagtcaaccagaattggaggaaaagcaagcctctaccctctccggcgcagtccaggttcagccctctgcacacagtgactccctggactccacgagccccagccaacagcagaccacacagtatatcatcacaaccactaccaatgggaatgggagcagtgaagtgcacatcaccaagccgtag

SEQ ID NO: 9319 - DNA, 308 bp, Cricetulus griseus
caagatggcggacaaagagaaaagaagaaagaaagcatcttggacctatctaagtacattgacaagaccatccgagtgaagttccagggtggccgggaagccagcgggatcctgaaagggtttgacccactgctcaacctggtgctggatggaaccattgagtacatgagagaccctgatgaccagtacaagctgacagaagacacacggcagctggggcttgtggtgtgccgaggcacctcagtggtgctcatctgcccacaggatggcatggaggctatccccaaccccttcgtgcagcagcagga

SEQ ID NO: 9320 - DNA, 307 bp, Cricetulus griseus
catcagcttcgtggaagacctcagcaggaaataccactttgaatgttgtagccaagagcagtgtcaggagtggatggaggctcttcgccgggccagctatgagtacatgcgacaaagcctcatcttctacaggaatgagatcaggaagatgacaggcaaggaccccttggagcagtttggcatctctgaggaggccaggttccaactgaatagcctgcctagagacgagcagacttgtactggctcccagctaggtgtgttggactgaccttcccttgggcccctggctgtcttgggaggtgttttt

SEQ ID NO: 9321 - DNA, 307 bp, Cricetulus griseus
  modified_base (247)..(247): a, c, t, g, unknown or other
gaagcgcaccccagatcactgtctcagggctttgtgggcgctgaactccatctgagcccaccgtgtgcccctaggccagttggcaaggggtggctcttgagggcttttatacccttcattagctgacgttggattttgtatgcatttttatattgtctctaagtgtcagaactataatttattcatttctttgtgtgtgtgtgtgtgtgtgtgccaagaaacaggctctgggcctgcctctgccggngctgccagcctgtgtgcttgtgggaacacattgtacctgagctgacaggtaccaataaag

SEQ ID NO: 9322 - DNA, 307 bp, Cricetulus griseus
gaactggttctggagaagtccttgcatcgctctgttctcaagcctcttcgacctatcctagttgcccgcctgcggcggcgtctttccgcagatggttcccttggccgcctagctgagggcttccacctggccccggacccaggggacctggagccctcgggtcccacctgcccctctcctacccagtggagacggaacaggtgcgccagaaactgcttcagttgcttggcacctattcacctactgcccagatcaagtggctcctgcaggcctgcaagttgctctacacagccctgaaaacccaggc

SEQ ID NO: 9323 - DNA, 307 bp, Cricetulus griseus
gggacatcctctcccagttccacaggaagacaaaggtttcacagtcttcatttcgctcacaactccaaatccatgatgctgctatggaggacacaggggtgtatcagtgcgaagtggaaggttatgacagaaattccctctacacaaatggtccagccagggtatcctgccacctctaaccgtttgaggattactgtcaccttcccagagagcaaactgagagtgaactcaagcagtcaggtccaacgagctctccatcagctccagcacgcatatagagtggtgccatcttgtcccgaactgctgg

SEQ ID NO: 9324 - DNA, 307 bp, Cricetulus griseus
tcttgaggtaaaagaaactaggaagacaaaaaaataaccttcgttccatgaggaaagaacagaagagaatgtgagcacttgagagcagctgaccaccggaagttggtgagcagatttttccccccctttggccaactttcaagcaaagaatgaggaagagacataaacttagatccttcccctcttatagccctcaataccatcatggagacagtgttcaaggtctgagtggggcataaaaatcacagaaaagaagtctctatagttcttataggattcctctaccacagaacctggagtgcttttc

SEQ ID NO: 9325 - DNA, 307 bp, Cricetulus griseus
aagaccgtgcatgttccaaggttcaagaatcagaggtggttctcaacatggctgctgactcctacatctacaaactgggtgtgtttgatgatgagatggtcatcaaagggtttatcattgcagaagtcatggaaactggtgacaaggcagccactgatatgaccctgtctttcctgtaccctgcgttctctgtcgagatgccagacacatgcaagattagctggccacttaccatcaagtgctccttcaagacaccctgcccatccctttgactgacatcaggttctcagtggaaagtctggccctc

SEQ ID NO: 9326 - DNA, 306 bp, Cricetulus griseus
aacagaacagagcagcttccaatacaccgagctgcctatgagggacattatcttgctctgaaatatctccatcccagtaacatccaaacatgcaatccggaaaaagtggcctaactccagttcactcagcagcagatggacaaaataactcagtgcctggaactgctcattgataacgggtttgatgtcaatgccctgcttgctgaccacatttcccagagctatgacgaccagagaaagactgcactttattttgctgtctctaacaatgacatccactgcacagaagtccttctggctgcaggt

SEQ ID NO: 9327 - DNA, 306 bp, Cricetulus griseus
  modified_base (175)..(175): a, c, t, g, unknown or other
  modified_base (224)..(224): a, c, t, g, unknown or other
atccaggccagtggaccacaaattgctcagccaaacgccattctggaaaaggtcttcactgctataacaaagcatcctgatgagaagcgattggaagggctctccaagcagctggactgggatgttaggagcattcagcgctggtttcgacagagacgcaaccaggaaaaacccngcaccctgaccaggttctgcgagagcatgtggcgattttccttttaccnctatgtatttatctatggagtccggttcttaaaacagaccccttggttgtggaatacaagacactgctggtataactcccct

SEQ ID NO: 9328 - DNA, 306 bp, Cricetulus griseus
  modified_base (105)..(105): a, c, t, g, unknown or other
cttcttccaactgcctccttcctcccctcgacagggagttagacttacaggagtgacggggatgcaccccggtgggcttcttgctcaggccccaggcctttttcnccaaggcctcgcgccttccccagcctaggacgccaacttctccccaccctgggagccccacatcctctcacagaggtcgaggcaatttccagagaagttttcagggctgaggctttggctccccctacccttgatatttgaacccccaaatatttttggactggcataaagagggactgagttcctgctgtcccaccccat

SEQ ID NO: 9329 - DNA, 305 bp, Cricetulus griseus
actcagccctgccccgctgcgcttggtcgccagtcctcgggggtcatcttgagcggggtcccctgtcccccctcccgtgtctcgtgtcccacggggcctcccggcccccgtgctatggcggtgtctgtgcccaagggtcagggacgctgcactgcgttcccagttttcctctgcctctggggtttgcatggggaaatccctctgtcaactatgccgctgggtgacgtggcgtggggagaggacggacagcggggagccccctcaccccgactcttaaaggagtgtgccaccaacaaaaaaaaaaa

SEQ ID NO: 9330 - DNA, 305 bp, Cricetulus griseus
tggtccacgcaccaggaagctaaagaagaaaaagaatgagaagggagacaagcggccgaggacggcgttcacggccgagcagctgcagagactcaaggcggagttccaggcaaaccgctacatcacggagcagcggcgacagaccctggcccaggagctcagcctgaacgagtcccagatcaagatctggttccaaaacaagcgtgccaagatcaagaaagccacgggcatcaagaacggcctggcgctgcacctcatggcccaaggactgtacaaccattcgaccaccacggtccaggacaaag

SEQ ID NO: 9331 - DNA, 305 bp, Cricetulus griseus
ccaaaggtaaatatctgtatctattaggacattttatacatagacctcagttgagatgtatacttagcaaaattatttttaaattgaaacagcacagtaaataggtaatataaaacgccccttggattttgcttcctgtgtaaatctattgtatgattacaccagttataattttagctattaaatcataaaggtccaattgtttcacaaagccagtttgagatgggctgcattccattttgtatatagtttgaattatatatgaatcacccttcttctggccacctctgcctcgtcttagtatt

SEQ ID NO: 9332 - DNA, 305 bp, Cricetulus griseus
agcatgagcggcttgggcgcagccggtggggctgccggccctgccccgccggcacaggaggagggcatgacatggtggtaccgctggctgtgccgtctggcgggcgtgctgggggccgtgtcctgtgccatctctggactcttcaactgtgtcaccatccaccctctgaatatcgcagccggtgtgtggatgatcatgaacgccttcatcctattgttatgcgaggcgcccttctgctgccagttcgtggagtttgtcaaatacagtagctgagaaggtggaccgggctacgctcctggcagaag

SEQ ID NO: 9333 - DNA, 305 bp, Cricetulus griseus
cagagtacagggcccaagagctgcgtcattacctacctggcccaagtggatcccaaaggctctttacccaagtgggtagtgaataaatcatctcagttcctggctcccaaggccatgaagaagatgtacaaggcctgcatcaagtatcccgagtggaagcagaaacaccagccgcacttcaagccatggctgcacccggagcagagcccattgcccagcttggcattgtcagagctatcagtgcaacacgcggactccctggagaatattgatgagagtacagtgacagagagccgcgaggagcg

SEQ ID NO: 9334 - DNA, 304 bp, Cricetulus griseus
ccaagctagaggcttttgcagaaggctctggagcccacaggccagagtggggaggccgtgaaggagctctactcccagcttggtgagaagttggagcagttggaccatcgaaagcccagtcctacccaagctgcagagacgccagccctggagctgcctcttcccaatgtgcctgctccagctccactgtgaggctctatggaactgtttagtggtagtgcccctatggaaggaggcctagtcggctaggagtgcagggtgtgctgagggttgttccttggcaaggtattctctcctctaagtt

SEQ ID NO: 9335 - DNA, 304 bp, Cricetulus griseus
gatggcggtctccaccgtagtctcgaggcgcgtcaagcgcaaggcgccgcgcgccttcctcaggcgcaccttcaagcagaagaagccgcacctccgcctggagacggcctgcgacctcctgattcatttgaattgcttactgtttgtacatcgattggcagaagaatccaggacaaatgcttgtgaaaataaatctgaagttatcaaaaaggatcatgtaatggctgcatcaaaggtaattctgaagaagagcagaggttagaagtcaacacttgtttaagaattatatgatgtattaatttaa

SEQ ID NO: 9336 - DNA, 303 bp, Cricetulus griseus
gggttgcgtcgccgggcatggcggcatggggcccggcttccactgtgcctctgctccgcgggagccacgggcttcctctgctgaactgtgtacatcggatgtttgcctcccagactgacggggagctcaaagtgacccaggttctcaaagaaaagtttcctcgagccacagctatcaaagtcacagacatctcaggaggctggtggggcgatgtacgagattaaaattgaatcagaagaatttaaagagaagaggactgtccagcagcaccagatggtacaatcaggcactgaaagaagagat

SEQ ID NO: 9337 - DNA, 303 bp, Cricetulus griseus
tttttttttttttggttcatttttaaggcttccctcagccaactgaagtactcacaatatcccctcgtgtctctgtcagtcaaggttgacaccccaccctctttggactagtgtgtctagctgtatttaatacctcaaagtcagtgtggccctgggggcacgttggggcaagagcgtgggggtgcgctgttgacacggcattcagcaaggtttggttttaggatgccgatggtcacccccccatcccctgcatcttccctctgtcgtctgcctgtgatacacaccgatggcaataaatttttt

SEQ ID NO: 9338 - DNA, 302 bp, Cricetulus griseus
tgacgctgccgtcctcaagcgacgaggctacatcatggggagtaaacttgggagagggctcatatgccaaagtcaaatccgcctactctgagcgcctaaagttacaacgtggcggtcaagatcatcgatcgcaagaaagcccccacggacttcctggagaaattccttccccggagattgagatcctggccatgctaaaccaccgctctattgtcaagacctatgagatctttgagacatcagatggcaaggtctacattgtcatggagcttggggtccagggtgacctcctggaattcatc

SEQ ID NO: 9339 - DNA, 302 bp, Cricetulus griseus
tcttccttgagttcacgtcgtgatggagactcctcttgagaaggccttgaccaccatggtcaccactttccataaatattcagggagagagggtagcaagctgaccctgagtaggaaagaactgaaggagttgatcacgacagaattgagtcttgcagagaagatgaaggagagcagcattgacaacttgatgaagagcctggacaagaacagcgaccaggagatcgacttcaaggagtactctgtgttcctgaccacactgtgcatggcctacaatgacttcttcctagaggacaacaaat

SEQ ID NO: 9340 - DNA, 302 bp, Cricetulus griseus
tctccctcttcactcagtatacgccctacaccctggcaggaggcaagatctggggatgagcaggagaaaaacaactatgcagacaaagtgtttgactgcatcgaggcctacgacccctggcttcaagagttctgtgctggccagagacatcctccaccccacgggatctagagagaatcttcgggcttcctggagggaacatattccacggtgccatgtccctggaccagctctactttgcccgtccagtcgccccaacactctggctacagatgccctattcagggcctgtacctctgtgg

SEQ ID NO: 9341 - DNA, 302 bp, Cricetulus griseus
aaggggctggagagatggctcagaggttaagagcactgactgctcttccagaggtcctgagttcaattcccagcaaccacatggtggctcacaaccatccattatgagatctggtgcccttttctggtgtgcatggctcagtggtagagcccctgcctggaatcccccagaaaggctgggtgtggctcagtagtagagcccctgcctggaatcccccagtgaggggctggggtgtggctcagtggtagagccctgcctagaatccccaagggaggagcctgggggtgtggctcagtgggaga

SEQ ID NO: 9342 - DNA, 302 bp, Cricetulus griseus
tgcctgccacaagaccaagactgttcggtattttagaagtagggattttgtagtgaagcagctagtggtatttctaggaagctatgacttgtaaccaaatgctggatttttaatgctgagatgtgtttcctcacctgaatttgctggagacaccaggccttgcttacactggatgtaagtaggactgggagtcctggccatgcacatgcaacataactgtttggggacttttctataaggattatgttctgttgatcaacgccaataaagtaatttgaaccaagaaaaaaaaaaaaaaaaaa

SEQ ID NO: 9343 - DNA, 301 bp, Cricetulus griseus
tgatctagtgtgactctttagtggtgttttgaaaagggtatttaattttaactttttaagttcttgcacattatttgaaatagttaatataaatatgtaattgtgtttactgtttattgtattctaagttaatgtggaaccatatgaataatttcatttaaatccacccataaatttgctttttgtggtctttctttacacagaaataatccaattgaaaaataattttgcttatgtattattttatttgcttgaggagggcattctattttcttacaaggactgttgttgctaagcaaat

SEQ ID NO: 9344 - DNA, 301 bp, Cricetulus griseus
gcaggagctgcatggggctctggcccaaggcctgcaggaattgcagaagacactgagggacagtgaggagctccaacaggcccgtaccactcgctgcctgcagctgttggcccaggaaatccgggacagcaagaagttcctgtgggaggaactggagttggtgcgggaagaagtgactttcatctatcagaagctccaggcccaggaggatgagatctcagagaacctcttgaatatccagaagatgcagaaaacacaggtgaagtgccgaaaggttctgaccaagatgaaacagcaaggc

SEQ ID NO: 9345 - DNA, 301 bp, Cricetulus griseus
  modified_base (19)..(19): a, c, t, g, unknown or other
atggccggacgcgcccgcngccggctgctgctgctgctgctgctcgccctgcaaggcagctgcctggccttcagaagcccacttttctgtcttcaagaggtttaaagagactaccagatcattttccaatgaatgccttggaaccaccagacctgtaactccaattgattcatctgattttgcactggatattcgcatgcctggggttacccctaaagagttggttttttggttttggttttggtttggtttgcattaaaaaaaaaaaaaaaaaaaaaaaaaaaaaaaaaaaaaaaaaaaa

SEQ ID NO: 9346 - DNA, 301 bp, Cricetulus griseus
ggcggtcgagtcatcgctcccaagaaggcgcgcgtcgtgcagcagcaaaagctgaagaagaccctggaagtggggatccggaagaagattgagcatgacgtggtgatgaaagccaactccagcctgcctaagaagctcacactgctgaagggtgcatcaaagaagaaaggggccaccacgcccagcaagacaccatcctaaaggcactgggactttacaggtgaccccacaggctggctggacttgaagaggaccctgctccagtcctgatggcacctgggacagcaatgggcaggtgatg

SEQ ID NO: 9347 - DNA, 301 bp, Cricetulus griseus
gtcctacaggtagaactcttaaggtctgcaattaaagcctgcggcctggagggctacttgtgtactccacatgcacactctccaaggctgaaaaccaggatgtgatcagtgagatcttaacctccaacagtaccatcatgcccgtggatattagtgcaatagcaaggacttgctcccaagatttcacctttgcccccactggccagcaatgcagtctcttggtgattcctgaaaaggacaaagcctggggtccaatgtttgtagccaaactgaagaaaagccatgagtacaggaaaatggc

SEQ ID NO: 9348 - DNA, 300 bp, Cricetulus griseus
  modified_base (65)..(65): a, c, t, g, unknown or other
tcgcagcccaacatgtacggcctggccgcctacacggcgccgctcagcagctgcctgccgcagcngaagcgctacgcggcgcctgagttcgagccccaccccatggcgagcaacggcggcggcttcgccagcgccaacctgcagggcagcccggtgtacgtgggtggcaacttcgtcgactccatggcgcccgcgtcggggccggtcttcaatctgggccacctctctcacccatcttcggccagcgtggactacagctgcgccgcgcaaatccctggcaaccaccaccacggaccgtgc

SEQ ID NO: 9349 - DNA, 300 bp, Cricetulus griseus
gctggtctctggcagaggatcatatcaacttcaccattgggcgccagtcctatactctgaggcagctggacaatgccgtgtctgctttcaggcacattttaatcaatgaaagcaaacagtctgctgctcagcaaggggccttcctcagagagtatctttatgtttataagaatgtaaatcagctgtcaccagatcggccctttaccacagcttcccttacatacattaacagttcagcaactacgggttttcttggccatgacagacgaccagcagagtagggaaaaacagcagctactc

SEQ ID NO: 9350 - DNA, 299 bp, Cricetulus griseus
ctggaacaggagcagtggggcctgtcccgggagcttcgtcagactctgctgtcactcagcatcttccagcggctagatggggccctgctgtgtctcctgcagcagcccctgcccaagagtccagtccacagaaggcctccctgttgctgtttttgtaatgaagtccagaccactgaactgcccaccagcagcctcaacagcctggaaagcttggctcccctctccgggcctgggactctccccagcccagaacatgctcctgctaagcactctggaaggaggaggacgaacaggaaggg

SEQ ID NO: 9351 - DNA, 299 bp, Cricetulus griseus
ggcaggaggagggggaactggacagagtgccctgtctgtacagcagcctagcctctgacagctggagtgacccggacagtctgctcagctgcgtgcgcctggccattgcagatgagcagaagaaagtggtatggacagaagagagcccctgctgaggcccagacctggctggggactgtgacctccactctgctgtcagtgttgtcagcaaacaagcctgcttccttccctggcctgggtttgaccggcatgtgctcacagcagtcaaggtgtaaatgaacaacaccacaatcacacag

SEQ ID NO: 9352 - DNA, 299 bp, Cricetulus griseus
tgtggttggtgacgggggtggaaagttgaactccacttctgaagacagaaggtctggagatggtggaaggtggcaccagggtcccttggactggcttctgtgcttatgaccaagaccaaacgtgggcctgggtggctgtggcctgtcctaaggagaaatgagaagagcccaaatctctgagtgcccctccctatctccctgtactcttctgtcttccatagtatttattttattagtatttaatttgtattgtttcaatggtttctgctaagtctgtatcactgtgatgatttgagaca

SEQ ID NO: 9353 - DNA, 299 bp, Cricetulus griseus
tgcatcaatatgatccacatcagccccctgaactgcactgaggggctcttcaaagcagcaggacagctgcttaaaaccaaggctgtgctgattacctatgggccctttgcagtcaatgggaagatctctccccagagcaatgtggactttgacctgaccctcagatgcaggaacccagagtggggccttcgtgacacagccctcttagaagaactaggccaggccaatggcttggtcctggagaggatggtggacatgccagccaacaacaaaatgcctgattttccggaaagaatagc

SEQ ID NO: 9354 - DNA, 299 bp, Cricetulus griseus
ctgaccatgaggaacactaaaattcaactggacgcatagcactttgttccccaagcacatggcgcttccatctccaggagacatgctgaatccagaatagcacagggggcatttctcttgacatcctctctctctttcccctaaaggccaatcttggtctgcagctgcattgcagaaagcagtggtgccttgtgcgaacaggctgcttctaactaacctccccacctacccctcaaggtgtgagcctttctcccagggaccaccatcaaggttcatgtcctcaaacgcaggctgacctt

SEQ ID NO: 9355 - DNA, 298 bp, Cricetulus griseus
gtgatgctgtacgaaacaaatgccgtgaaatgctgacttttggccctgcaaacggaccacgaccacaaggctgttggtgtaagactgcgagcatctgtcagctcagatcgaggagtgcatcttcctggatgtgggaaacacagatatgaagtacaagaaccgcgtgcggagccggatctccaacctgaaagatgccaagaaccctggcctgcggcgaaaacgtgctgtgtggtgccattacaccccagcagatagctgtgatgacatcagaggagatggccagtgatgagctgaagga

SEQ ID NO: 9356 - DNA, 298 bp, Cricetulus griseus
gctctgcaccatgcctgggggcgtgccctggtccgcctacttgaaaatgctctcctccagcctcctggccatgtgcgccggggcccaggtggtgcactggtactaccggcctgacctgacaatacctgaaattcccccaaagcctggagaacaacggagcttttgggactgaaagagaaacaccacaaacctcaggtttcacagcagtagaaacttcaagatgcaactctgccaggaatgctgagattattttacatacatatttttaaatgtatttaaatttaaactacttcttaaa

SEQ ID NO: 9357 - DNA, 298 bp, Cricetulus griseus
attgtagtcagccctgataaaaacgacgcaatagaatgaggcggggagaaaccagatttccacacaggaagggacttctctgagttgttgccgaggcttgccgcttttccttgaaaacatggttctaagccaaggctatggtgggctcacctgtaatcctagtgttagtgaattcaaggccaggcccggggaacttaatgagaccccgtctctaaataaaaacaaaacagttgatcccagactactgaaccgtatcatggctttgaatttgaacttaaaagagaaacaaaaaaaaaaa

SEQ ID NO: 9358 - DNA, 297 bp, Cricetulus griseus
cttaaagaagctgccgctgaactggaatctgagttctgcagagtttctccccttggatctgctactaaaccaagtcaagatctactctcagaagcatcgcaagaatatatagacatttttaaagaaaaaatacacaatctgctgaatttaaaaaccagcacttgagaagcagaggcaggtagatctcccaagttcaaggacagccagggctacatgtctcacacagaaaaaggaagtcattatgaaacttactattttgcacaaataatatatattaatatatgtgtctaaaatata

SEQ ID NO: 9359 - DNA, 297 bp, Cricetulus griseus
cacgggccccatgctgcttcgcctgttctacgtaatcactgggctcagcggcctgatctcgctctacttcctcatccgggcttttagactcaagaagccacagcgaaggcggtatgggcttctgaccaacacagaggagcaggaagagatggcctctctggacagcgaggaagagactgtctttgaaaccaggaatctgagatgatgttgtggtggggatggcaggcgcaagaacaagagagatgtgttctctgggctctggtgtcaacattcccggatggagcctgcacagcccct

SEQ ID NO: 9360 - DNA, 297 bp, Cricetulus griseus
ttactacagctccagataaaagaaacagaaattgctagaagaaaatgtcagtgactttcaaaaaaaagaatatgatgctgtggctgagaaagctggtaaagtagaagctgaggttaaacggttacatgataccatcatagaaatcaacaaccgaaaactcaagacccaacaaaacaaactggatatgataaacaagcaactggatgaatgtgcttctgctattactaaagcccaagtagcaatcaagactgctataaaataactttttctaagtagaaaaaaaaaaaaaaaaaaaaa

SEQ ID NO: 9361 - DNA, 297 bp, Cricetulus griseus
gggaccatggccgatcctcgcgtgaggcagatcaagatcaagacaggcgtggtgaagcggttggtcaaagaaaaagtgatgtatgagaaagaggcaaagcaacaagaagaaaagattgaaaaaatgaaggctgaagatggtgaaaactacgccattaagaagcaggcagaaatcctgcaagagtcccggatgatgatcccagattgccagagacggttagaggctgcatatactgatcttcagcaaatattagaaagtgaaaaaagacttggaacaaagctgaggagtaataaagaa

SEQ ID NO: 9362 - DNA, 296 bp, Cricetulus griseus
ttttcagacaacatggttcatagtattgagtgggtgacggtggtgcacaccttttaatctccagggctagggagacagaggcaggaggatctctgaattcaaaagccaccctggtctacagagcaccttgttgatggcacagctggtcccttggcgggcagccacactggtagctgggaccagacgggaaaggtcagctcgagcagccagaacatgtgcgacagagacatcagattctggagtcagaagtcctcggattgggaacagcactgccttcatggcctctccttggccct

SEQ ID NO: 9363 - DNA, 296 bp, Cricetulus griseus
gtcgggcccaacggatcccgcagacttcctcctttccctgtggctgagttctaaagagaaggtcaggtccagggctctctcccatgctgcatcccactcagaccagatacctgacatctgggagacctcatgtttggcagttgcgacaggggcagggtgtcctaaaaggagcactgatcttgcagttcaagggaagagagctcagagtcctttcttgttcccaaagtgtggctgtgggcaggacactacatatttgaatgtcagcgttctctatggaaagctgtcttgtgtgtgtg

SEQ ID NO: 9364 - DNA, 296 bp, Cricetulus griseus
tccccctagatcttataagaccacgagatacataccagtttttcgtggagcaacatggtttgaaagtttttaaaacattggatacagcatttttttctactggaaaattggttttaggaccctatgaagaaaaaggaaagcagcatgttggccaagatatattggttttttatgttaactttggtgaacttttatgtaccttacatgaaacaccatatatgataactactggtgattcattctatgttccttcaggtaatcattacaacattaaaaacctcttgaatgtggaaagt

SEQ ID NO: 9365 - DNA, 296 bp, Cricetulus griseus
acctgtgactggcgtaaagcaacaaacatcatctcatcgatcaagaaccagaaaacctgcaggtgctgctgggccatagcagcagcggacaacattgaggccctgtggcgtatcaaaacacaacattttgtggaagtctctgtgcaggagctgctggactgtgagcgctgtggaaatggctgcgatggtggcttcgtgtgggatgcatatatgactgtcctcaacaacagtggcctggccagtgaaaaggattacccattcaaggggtaccccaacccccatgggtgcctagccaa

SEQ ID NO: 9366 - DNA, 295 bp, Cricetulus griseus
gaggaggaggaggaggaaaaccatgatggtcaggatgatactcttgagggtcaagaagtaacagaagagttactttaattctcattattattaagtgcaagaatgtcaagaaactacatagagatatgtttatgacttcattaagtcatgctaattacaaatctaaacatatactgctcaaaataatgtatctagaaatatgtattagtgtaagatcagaattgcatttaagatgttggtgacaatggctttatcacataggcttagagcttaacttaaaatgatgcaaatctta

SEQ ID NO: 9367 - DNA, 295 bp, Cricetulus griseus
  modified_base (251)..(251): a, c, t, g, unknown or other
cccccatggatccaggtcctgagggaagacagtgtgacactgaagtgtgaagggacccacagccctgggaactattccacccagtggctccacaatgggagatccatccggagccaggtccagcccagctacacgtttaaagcctcaagcaatgacagtggagaataccagtgtcaaatggggcagaccagcctcagcgaccctgtacatctggggagtgatttccgactggctgctgctccagacccctnaactggtgtttgagggaaggggagacccatcaagttgaggtgcc

SEQ ID NO: 9368 - DNA, 295 bp, Cricetulus griseus
  modified_base (242)..(242): a, c, t, g, unknown or other
  modified_base (274)..(274): a, c, t, g, unknown or other
tggtagagcacttgccttgcatgcatgaagcccggaggggcgtcgagacacagaccttgcgcacgcgcagcacagctccccattgagcccccctcccccagcctgggtttccgctgttgaccacgaggtggcactgcatctctctgtccgagccagacacttctgctaggaaggatgacagcagcacccaaacccagacactcagcaaagatgacccccgttctagggacaccagaaaaacngcagcagcagcagcaacaacaacaaaaaccanggcagcaagcggaagcagctg

SEQ ID NO: 9369 - DNA, 295 bp, Cricetulus griseus
aaggctttaactagacttctgtgattcatatggtttgatttgcaataaaccaacagtttgggttctccactatctgaacacatctggtgcaagctgtgagagtagaattattggtgtctatgctacaaaagctgatgggacagatgccattgacaagcagctgggaggaagaattcacagtaaaagtatcttcaaaagagaggcgggaaataatgttcagtacatttggagctattactcggtagccgagttgaagaaaatgatggacgcctttgatgcctgggaaggaaaaggt

SEQ ID NO: 9370 - DNA, 295 bp, Cricetulus griseus
  modified_base (59)..(59): a, c, t, g, unknown or other
agcaaccagtgatcttcctgggcgcagatgtcactcacccacctgctggtgatgggaanaagccctccattgctgctgttgtaggtagtatggatgcccatccaagcagatactgtgccacagtaagagttcagagaccccggcaggaaatcatccaggacttggcctccatggtccgggaactgctcatccaattttataagtcaacccgattcaaacctactcgcattatctttatcggatggtgttcagaaggacaatttagaccacctccaaaagacccaccaatttttct

SEQ ID NO: 9371 - DNA, 295 bp, Cricetulus griseus
ctggagagaaaccttacaaatgcaatgaatgtgacaaatgctttattcgtaaagcccaccttagacgacatcagagaatccacacgggagagaaaccttacaaatgctctgaatgtgacaaatgctttatccagaaagccaaatcttagaacacatcagaaaatccatacaggagagaaaccttataaatgcaattactgtgacaaatgctttatccagaaagaccacctttcgaactcaagaactcacacaggcgagaaaacctttcaaatgcagtgaatgtgacaaatctttt

SEQ ID NO: 9372 - DNA, 294 bp, Cricetulus griseus
caactcaggtcccaaatctgcatctttcagatagcttcttgttgtggaaacttgagtcagaatccagactttttgacagcaaagaagtctgggaaatgtagtttttctcttccagcctcagccacacagaaagttagcatggaggtggagcaggcccatccacaatttccttgccacagcatccgactgtgaagaactcaggagaaatccatggatccacctcaaggccttgactttgaagcagagctgctaaagatgtcctgttccatggctctgtccctgcctgtccctgcc

SEQ ID NO: 9373 - DNA, 294 bp, Cricetulus griseus
gctaagctaacctctgaccccactgatattcctgtggtctgtttagaatcagataatgggaacattatgatccagaaacacgatggcatcacagtggcagtgcacaaaatggcctcttgacatctcatgcctgttcttcagcagcctgtcatagggattcagtccttcctgtgtcagttaacttgtaaaactattaaagttccagaggctaggccattcacctagtgtccaatgtggacttccttatttatatgacaaccagttaccaaggtattagttaaaaggatcatagtt

SEQ ID NO: 9374 - DNA, 293 bp, Cricetulus griseus
  modified_base (222)..(222): a, c, t, g, unknown or other
gatgatgatgacgaagacgacgatgatgatgacgacgacgatgatgactagttgctatggcaaccacctaccagccccacttgctctttacacgtgccttcctaccctccacgcacttccctgagctcctcgggacactaggtcattctttactatagggccgactgtggtctgtatacagggtgcttgaggtcctggtctccttcactggtgagaaaaggngctgcttttcctgagataccagcccagttctttcatctctcctgcttctatcctataccttatccgtatct

SEQ ID NO: 9375 - DNA, 293 bp, Cricetulus griseus
aaacaggagcgagcagcccttgtcagcacgctggaagcagcgtgggcctgcagctatttgtgtactggtctgtgtgggggccgcgggtgctgatgacaggccaggttcccagtggctcgcccccacctgtgggcgacaggacagatctttaagtctctcagcagtggagaaggccccagacagtgtcccaggcagcgtcataccttcctgaaggatctcggtcaccctgctgccttggagacatagccccctcctcccaggacagagccaccggttcctttctgacctgggga

SEQ ID NO: 9376 - DNA, 293 bp, Cricetulus griseus
gctccgctcccgtcgggctccggacgcgctcgtcgtcgtggtggagacttgtccttcctctggcccgtcgtcaccatggtgaagctgagcaaagaagccaagcagaggctgcagcagctcttcaagggcggccagtttgcgatccgctggggatttattcctctcgtgatttacctgggatttacgaggggtgcagatcctggaatgcctgaaccttcagttttaagcctgctttggggataaaggactcatcatctggatttggaagccatccaacatggaagtgtatcctc

SEQ ID NO: 9377 - DNA, 293 bp, Cricetulus griseus
tcttattcctgtaaattatgaaggaaaatgtgtcatagacaaagtcactcgcaaccagtgccaggaatgtcgctttaagaaatgcatctatgttggcatggcaacagacttggtgctggatgacagcaagaggctagccaagcggaagctgatagaggagaaccgtgagaagaggcggcgagaagagctgcagaaatcaattgggcacaaaccagaacccacagatgaggaatggggcacaaatagcttctctctctctctcactctctctctctcccctctctctctccctc

SEQ ID NO: 9378 - DNA, 292 bp, Cricetulus griseus
catcccgatgccagccaccagggatgaggccggtggccgaagcaccgaaggaagcagctaccaccaccgcccagtcccaccaccacttccaccatgctgcccacccaggggggcgtccctcctgcagcacgtgggtggggaccaccgtgggcactcagaggaaggggttgatgagcagccagggactccggcaccagcgctgtcagagctgaaggctgtgatctgctggctgcagaagggactgccctttatccttattcttctggccaagctgtagttttcagcacaagct

SEQ ID NO: 9379 - DNA, 292 bp, Cricetulus griseus
agtgccttggcttgtactttgaaacaaattagccagctttctggcttactggaaccagagcactgctgatgtgaccgtgtcccacaggcattatacacaaaagtttaaccagcgtaaatgccaaacaaatagtatgaggagtgtactttttaagtatattaatttatttgagttcagatatttttaaaatataaaaaactggttgtattttttaaaagctataattcttgtagacattctgtgggtaaaaatttgattgtgcatattaaaaaagtcaccaatggtttgcaat

SEQ ID NO: 9380 - DNA, 292 bp, Cricetulus griseus
  modified_base (160)..(160): a, c, t, g, unknown or other
agagatgccagaagggccatccgtgaggaagtttcaccatcttgtctccccttttgtgggccagaaggtagtcaagactgggggcagcagtaagaagctatgccccgactccttccagtctctatggctccaggatgcccaggtgcatggaaaaaaattnttccttcggtttgatcctgatgaggagatggagctactcggcagcagcccacagcctgtacaaggagtacagcagaaagaggccatggatccagagctggccttgctgcccaatgctcaggaaacttctgca

SEQ ID NO: 9381 - DNA, 291 bp, Cricetulus griseus
gggcttgtgcttgctaggcaagcactctaccactgagctaaactcccagcccttttaaaatgtttttattatgaggcagagttttgctaaattacattctgcctcagtctcctgagcagctgggattactggccttctgttgccagacctgacttgaagctactatcttaatccttaaataaaaagataatctgaagtaaaaaaaaaaaaaaaaaaaaaaaaaaaaaaaaaaaaaaaaaaaaaaaaaaaaaaaaaaaaaaaaaaaaaaaaaaaaaaaaaaaaaaaaaaaaa

SEQ ID NO: 9382 - DNA, 291 bp, Cricetulus griseus
ctgtagttctccagaaactatagcaacttgagtcaatgattggagttgttttatccctgagatgtaagctgggtggctcttcattctgggaaggtcttcacttacctgcatctcctggcatgatctcagaaactggagataagatgttccagaaatcatgggatcttacctataacaggatcttccagagagaatggatgtgtgtgtgtgtgtgtgtgtgtgtgtgtgtgtgtgtgtgtgtgtgtgtgtgtgtgtgggggaataataaataaataaagaaaagaaaaaaaa

SEQ ID NO: 9383 - DNA, 291 bp, Cricetulus griseus
atgaactcgaatgccatcgtgtttataacttcttatgtgagctgactaatctctcccgtaagatgcagactgttgtctgtaacaaaccaggaagtgccagaaaactagagttaaggattagactgttctgtaggaatgtcctacttgatcactggacacaaacgaagtgattctgcatttttggttgactagaatattaaaaccatggccaatggtaaatcaggcaagattgctctatattatctttggaccaacatctcctcaagatgggcaggtgatttggcaggaaat

SEQ ID NO: 9384 - DNA, 291 bp, Cricetulus griseus
agcatgtctaccagacaaataagcagaaactggaaaaaactgatggaaccaagttttctgagtggaatatagaaatctctgaaggaacaggcttgccattgcacactgatgactgttgtgtgtcagggaagagagccagcggtaatgggacagtctccccctcctcattgtctccacacaggagaactgctgagctaaagacagagactggaaccctcatgttttggccacagaagaacatcacagaacagtgttactctgagaactctgtatctagagagcatacacttc

SEQ ID NO: 9385 - DNA, 291 bp, Cricetulus griseus
acagagactgaacggtgcatcgagtccctgattgctgttttccaaaagtacagtgggaaggatgggaacagctgccagctctccaaaactgagttcctcactttcatgaacacggagctggccgccttcacaaagaaccagaaggaccctggtgtcctggaccgcatgatgaagaagctggatctcaacagcgatgggcagctagatttccaagagtttctcaaccttattggtggcttagctttagcttgccatgagtccttcctgaaggcttcccagaagcgtgtctaa

SEQ ID NO: 9386 - DNA, 291 bp, Cricetulus griseus
ttgaatgggaagatgatttgcctcgggcagagggcctgggagccagtgaggcagctgagcggctgggccggggttgtgtgtgggatgtggctggagaggacggtcatcgctggagagtgttccgaactgggcagcgagagcagcgagtggacatgaccaccatcgagccctataagagagtgctgtctcatggaggttaccatggtgatggcctcaatgctgtcatcctctttgcttcctgctatctaccccgaagcagcattacccaactacacctatgtcatggaacac

SEQ ID NO: 9387 - DNA, 290 bp, Cricetulus griseus
ctcagcctgctcctcttctgaccagaaacctaaattgagtgactcaggaaggccagtagggcaggaacacagaggaacagccaggagtcctgcccatcaacaaggcacagggaactaacccagtactcttttggccccatctgcatcaacactaaacagctgcaaactccctgcctctccccctcgcaagtgaacactctcctgaagattgccctttgcaactgcacccacctgcaagccagatgaatctagaatgaatttttgcaaatgaatgtaacaaaaaaaaaaaa

SEQ ID NO: 9388 - DNA, 290 bp, Cricetulus griseus
tctccaaataacataaaaaaacaacatactggggagaaaccatatgcatgtaatcagtgtgataaaacctttgcacatcacaattatctccgaatacatgaaagaacacatactggagagaaaccctatgaatgtactcaatgtggtaaaacctttgcacatcacagtagccttcaaatacataaaagaacacatgcgacaggaaaccctgtgaatacaagcactgtggttaaacctttgcatgtaacagtagtcttcgaagtcttgagacaaaatcatactggagagaa

SEQ ID NO: 9389 - DNA, 289 bp, Cricetulus griseus
gcctgcacctccatccttctccggtgaagcatcctccaatccaaagtctccgagcacaagttaccagatgtgagaatgggagactattcttcagcctacccaggaatgagtatcaaaccatggaggtgaagaacaactcaattgccatcacctgtgatgggctttatctcatctacatgaagggctcctttttccaggaggtcaagatcaaccttcatttccggaagggtcgaagtcccatctctatgcccatgctgaacaatggtcaaagggtggacttcactatggt

SEQ ID NO: 9390 - DNA, 287 bp, Cricetulus griseus
ttgccaagagcaagtcaaaaaccattctggtgagactagtgagccaagctgggacaggtttctccttcaaccacaagagaagccgactccgagagaagctgactcttctgcattatgatccaattgtgaacaaaaaagttctctttgtggaacagaaaaaaatacgctccctctaagtggattgaaaatgaatttgactcatgaatgagaagacccaggatgaggccccggctcagaaacctgcagtgtgtgctgaagaagaggaagcgcacagcatggcctcgggg

SEQ ID NO: 9391 - DNA, 287 bp, Cricetulus griseus
cctgcggcggctgtgccggactgtgaatgtggtgccagtgatcgctcgggctgacagcctgaccattgaagaaagagacgccttcagaagcaggatccagcaaaatctgaaaactcactgcatcgatgtgtatccacagaagtgtttcgatgaggatgtcaacgaccagctccttaacagtaagatccgggagcagatcccttttgctgtggtcggggctgaccgagagcatgtggtgaatgggaggtgtgtcctgggccggaagaccaaatggggcatcattgaag

SEQ ID NO: 9392 - DNA, 286 bp, Cricetulus griseus
ctcacccgtcccaatcaccaccaccatcataatcaccattcacacaagcactctcatttacagcttcctgttggtactgtgaacaaacggccaagtgatccaaaacatagcagccagagcagcagcaccttagcacacaagacttatagcttgtctaatactttgtcttcatcttcgagctctacacgtaagaggggtcccccagaagagacaggggcagcagtgtttgatcatccagccaagattgccaagagtactaaatcctcttccttgaatttccccttcc

SEQ ID NO: 9393 - DNA, 286 bp, Cricetulus griseus
ggctccccattagagggtgccctgttgctgttgtcagtgacctgcctctgcagttagccacacccagtgggcatctagccccatgtgtttctgacaaatggcatatttgcacttggtggtcttgcatggattaacttctaaaagactagaatctagtcctaaaaccaccatttatctcccttttaaatgttttattatggatctatagtcagtgaattgccataaacttaagtctgagtcacctcaggctagaccatgtttttaaaaggacaacttagcaaagtaa

SEQ ID NO: 9394 - DNA, 285 bp, Cricetulus griseus
aaggctgaccacacagatgaaatccgctttgtctttggaggcccctttctgaacagtgatatcgtcatgtttgaggaagccactgaggaagaggagtcgctaagcaggaagatgatgaaatactgggctaactttgccaggagcggcaatcctaatggggaccgcctgcctctgtggccagtctacgaccaggacgagcggtacctgatgctggatttgaacattagcatgggacagagactgaaagatcggagagtggaattttggacggataccctccccctg

SEQ ID NO: 9395 - DNA, 285 bp, Cricetulus griseus
ctgaagcgtcgtacaaccaagctgaagggtctgatccgcctggtcaagcactggtaccaactgtgtaaggagaagctggggaaccattgcctccacagtatgccctggaactgctcacagtctatgcctgggaacgtgggagtagattcactgagttcaacacagccgagggcttcaggacagtcttggaactggtcaccaactacaggcagcttcgaatctactggacagagtattatgactttcaagaccaggaggtctccaactacctgcacagtcagctca

SEQ ID NO: 9396 - DNA, 284 bp, Cricetulus griseus
tgaccttcccgcggccggtcccggctgaggcgactctgaaagcccccccagcggtcctgcccgacgcgccgcgctcgcgacaccatggtggcgtactggcggcaggccggactcagctatatccggttctcccagatctgtgcgaaggcagtgagggatgccctgaagaccgagttcaaggccaacgctgagaagacttctgggagcagcataaagatcgtgaaggtgaagaaggagtagtcgaccctgactgaagcatgaactgctgagccttgaaggtgaag

SEQ ID NO: 9397 - DNA, 284 bp, Cricetulus griseus
ttagcccgccgtacggaagcctgcgaggggagggtggcatccactccccaagtccggtgccccgatgcccagcgccaacgccagccgcaagggtcaggagaagccgcgggagatcgtggacgcggcggaagattatgctaaagaaagatatggggtgtcctctatgatacaatcccaaagaaaaaccagacagtagttttggtccgagttaaagacttgacagtaacaaaaggctgatgatgttgtttgggtccgtgcaagagttcatacaagcagagcaaaag

SEQ ID NO: 9398 - DNA, 283 bp, Cricetulus griseus
atggcggctaacgcgaccaccaacccgtctcagctcctgccgctagagctcgtggacaagtgtataggatcaagaattcacattgtgatgaagagtgataaagaaattgttggtacacttctaggatttgatgactttgtcaatatggtgttggaagatgtcacagagtttgaaattacaccagaaggaagaaggattacaaaattagatcagattttactaaatggaaataatataacgatgctggttcctggaggagaagggcctgaagtatgaatggatt

SEQ ID NO: 9399 - DNA, 283 bp, Cricetulus griseus
catgggctatatgctggttagggaattcagcaaggatctgtgattatagaccatgcccactggggagaggggcgggggaccagcacctcaggagcacctactgtgtgccaggcactttatacctcctccccgcgtgtctatccagtctgctgggctgacagtgaggcattcaggttaagggactcacatgcccacagcggacctaccaggtgcagtggggactctaagagagagagagagagagagagagagagagagagagagagagagagagagagagaga

SEQ ID NO: 9400 - DNA, 283 bp, Cricetulus griseus
  modified_base (252)..(252): a, c, t, g, unknown or other
tgccccctccccactgaccctacatcccaggctgccgcctgccatttcaggatgaaaggggagacccctgtgaacagcactatgagtattggccaagcacgcaagatggtggaacagcttaagattgaggccagcttgtgccggataaaggtgtccaaggcagcagcagacctgatgacttactgtgatgcccacgcttgtgaggaccccctcatcactcctgtgcccacttcggaaaaccccttccggganaagaagttcttctgtgccctcctctgaagag

SEQ ID NO: 9401 - DNA, 282 bp, Cricetulus griseus
acatcttcaccaccctattcaccctattcaccatgctcactttggatgactggtccctcatctacatggacagcagggcacagggggcctggtatatcatccccattctcatgatttacatcatcatccagtacttcatcttcctcaacctggtgattgctgtcctagtagataacttccagatggctcttctcaaaggcctagagaaagtgaagctagagaaagcggcccgggtccatgagaagttgttggatgactctctgacagagctcaaccaagcag

SEQ ID NO: 9402 - DNA, 282 bp, Cricetulus griseus
caggggacctagtgataaagcctacagccatgacctggaacctgaaggtgaagatgctggggggtgacgagttcctggtgcccctgactaactccatgacgttatcgggactgaagaggcagattttccacaagactggtgttccagctttccagcaacgcttggcccatgaaagtggcaacatgctacaagagaacattgccctcatcagccagggcctgggccctgacagcattgtcatgttgattgtacagaattgcaacaccctttgagcatcctggt

SEQ ID NO: 9403 - DNA, 282 bp, Cricetulus griseus
tctgaggatcagcagacatcccaggtatatgagacatgattgctgttctcctcctagtcatcctctgcttggaagtcaactcaacttttacaatactaggttccagtttggatgttgaatggcatgaatggaagacaaaacatgggaaaacatatgacgagaatgaagaaaatctgaggagagcggtgtgggagaagaattttaaaatgattgagctgcataactgggaatacctacaggggaagcatgacttcaccatggacaatgaatgtcctttggtga

SEQ ID NO: 9404 - DNA, 281 bp, Cricetulus griseus
ttctagaagctgaacctggtggccttctcaccagccgaggcttcatccgtctcccaatgttgggctacatctaccgagtgtccagtgtcagcagtgatgagatctggctctgagggtgaggcataaggcccaggtggcttgtgaacttcccagggcacccaaccccagtgtctccttcaagccttcctctgcctggtcatgttgtgaccatgaagaagatatgccactgccacatggccctcctggtaggggtatcctgtgggtcatgcatgatgtatttc

SEQ ID NO: 9405 - DNA, 281 bp, Cricetulus griseus
tgtgcatcttatgtccagtttaggaagattgtgttcgctttgatcttgaactttacaatgaagctgtgaagatttatcaatgagttacctcagttttttcctttagggcttatacaacatgaatgaacttcttgaaatttttatgactgccagtgagcaacattgaaagttttttaaagaagactccttcagttggagtgagagactcctctaatatctcatatttaatttgctcttttgtatgtattatgttgtaaatctattatgtaacagtttacaac

SEQ ID NO: 9406 - DNA, 281 bp, Cricetulus griseus
agtgctgaggaagccagtctgctgagagagagggcaggccttgcatccaagtctttacagggcaaagccatcctgagaatgtagccaaatgataagggaacatttgaccaagagatgtcatttgtgaattcaaaggcctgtcctgcctctgtaagagcaggaggaattatgccatgttctgtcatggtttaaatactatactttcagtttattttaaattgttcacctatctcaaaaaaaaaaaaaaaaaaaaagtttatatataataataaataaataaa

SEQ ID NO: 9407 - DNA, 281 bp, Cricetulus griseus
ggctgaccttctcccatctgtctttgacagtttcaggaacagtggctacttttatgatccaattgaaagagacattgagataggattccttccatggctaatgaatgaagttgaaaaaactatggaacactgcatggtgggaagaactgtgcttgacatgctgatccgtgaagtggttgaaagaaggctaaacaattatgagcataaggaagacacacagccctctatgaggtcggatgatgtgtttcgtggtcctaacacagtggcagatccctcggtga

SEQ ID NO: 9408 - DNA, 281 bp, Cricetulus griseus
ttgctgctaaattacaattgttcctcactctgatgaggcaggaacttggcttccaaagagaagtgtttgctacggactggcagtgggcgaggaggtgtcatagtcttcaggcatgtccaaccttttgacattgtgacttgaagcctgagaactgaaagttataagtgagtttacagttttgtgctgggacacattcctagctattctgaggcatgtgcagcttgcaagccatggttcatatatgcctggcaggttgtctgtgagatggaacaggagacgga

SEQ ID NO: 9409 - DNA, 280 bp, Cricetulus griseus
ggtcgcacgctctgctgccatgaaggtgaagattaagtgctggaatggtgtggccacgtggctctgggtagccaacgatgagaactgtggcatctgcaggatggcgtttaatggctgctgtccagactgtaaggtgcctggcgacgactgccccctggtgtgggggcagtgctcacactgtttccacatgcactgcatcctcaagtggctgaacgcgcagcaggtgcagcagcactgccccatgtgccggcaagagtggaagttcaaagagtgaggcccg

SEQ ID NO: 9410 - DNA, 279 bp, Cricetulus griseus
cctaactactttatgaatgaaccaacattttatacatctgatggtgttcctttcactgcagctgacccagattaccaagagaagtatcaggagttacttgaaagagaggactttttccagattatgaagaaaatggaacagatttatccggggctggtgacccatacttggatgatattgatgatgagatggacccagagattgaagaagcttatgaaaattttttttttttttttttttttttttttttttaaagtttatacgtctgtgtctgcttat

SEQ ID NO: 9411 - DNA, 279 bp, Cricetulus griseus
cttttatatttttctttgtacagaggtcatgtattctgatgtaaaatatgtacagtattaatgtcaaccatctctttaaagttagcctataaatattgttgtataatttctttggtcagaaacatttggattaagccaggtcacctaagtcaggactttcttcagtgccatgtagcaaaccaactctctttagtcttttcaatagcaaagaatttacagaatgtagcttcatttttcaatttcacctgggggctccccattactcttctgggacccaga

SEQ ID NO: 9412 - DNA, 278 bp, Cricetulus griseus
tttaaaataaattgttacaaaatagattttagaaaataagttacaaactatagtaaaaggctccccttccacaggcaaccttcccacctgtggtatgctttgaatatgcctctccctgggttagaatctgcctatcccagcactgtggcagagcctggccctggaagaacacggtgacaaaagcttgggaaggagatccttcatggatacagacacgaagactacatcatgtccttcttgacaaagaaaccagatcagggtcctcttcatgggaagag

SEQ ID NO: 9413 - DNA, 277 bp, Cricetulus griseus
ccgcgaccggccgcggtcatgagtcggcccagccggctgcagaggcagattctgagcctgtaccgagagctgctgcgcgccgggcgcgggaagccgggcgccgaggcgcgggtgcgggccgagttccggcagcacgccggccttccgcgctccgacgtgctgcgcatcgagtatctgtaccgccggggaaagcgccagctgcagctgctgcgttccggccacgccacggccatgggcatcttcgtgcgcccgcggggcccgacggaggaggccggcg

SEQ ID NO: 9414 - DNA, 276 bp, Cricetulus griseus
tctgttttggtttgcttttgttaaggacatatgaagttttttggctgtgagcaagaatgacttaattagaaacttgaaatttgttaaatttagaaaaatgttaactgtcaaagtgaatgtttttgtggtttccctcaaactactttataatatacctcaaagattaccaatgttgctttgcagataaaagactaaataggtatgcagaattaatagtctgaatctgttatgtagtctgacttcaataaaactcaaaatttcttaaaaaaaaaaaaa

SEQ ID NO: 9415 - DNA, 276 bp, Cricetulus griseus
ctgcgctcgttttcgcggctcttggcccccgcccggcttccgagctgcgctccaacacggtcaaagttctatgtccgggagccgcccaatgccaaacctaactggctggaagttgggctgaccttgggcactacaattttcctgtgggtttatctcatcaaacaacatgatgaagatgttttggagtataaaagaagaaatggattggaataaactttggagatattaatatagtctgctgcatatgatgattgtggccattcttctggattcacc

SEQ ID NO: 9416 - DNA, 276 bp, Cricetulus griseus
gtgtaacatgtatgtgcatgacctgtccagaatgtgcaaagctaggactcagcagaaagggccgagccccattgctgacgggtcaacaggctgccggagttggacttgtgacttttggctttcagcctttggaccccagggtttgcactaatggctttgtcatccaatcagatctgtctccccttcggcttcctctcctactttgcagctttgctgattttaactgcttcattcttctgcttcttggtatctttcttttgaaataaaagcacaata

SEQ ID NO: 9417 - DNA, 275 bp, Cricetulus griseus
ccaaagtgtcctccaaagtgtccccctaagtgcccccctgtgtcatcgtgctgcagcctggggtctggaggctgtggttccagctctgggggctgctgtggttccagctctggaggctgctgcagctctgggggtggtggctgctgcctgagccaccacagggcccccgcagatctcttcgtcgccatcgtcacagctctggatgctgtagcagtggtggcagcagtggctgctgtggaagcagtggctgctgtggcagcagtggtggcaggcag

SEQ ID NO: 9418 - DNA, 275 bp, Cricetulus griseus
  modified_base (237)..(237): a, c, t, g, unknown or other
gctggctgagaagatacttcaaggccttctgtaaaggcttcttcgtggcagtgcctgtggcagtcactttcttggatcgggtggcctgcgtggcacgagtggaaggggcgtcgatgcagccctctttgaatcctggtgaagccagtcctcagatgtggtacttttgaaccactggaaagtgaggaactttgaagtgcatcgtggtgacattgtgtcattggtgtctcctaaaaaccngaacagaagatcataaagagagtgattgctcttgaagg

SEQ ID NO: 9419 - DNA, 275 bp, Cricetulus griseus
ttccgcgagtgcctgcttcgcttggcggccttcgcgcacgacgccagcccggccgcccgctcccagcttttctccgcgctgcacggccaccggcgccccaaaccgccccggccagaggctgtagatccagggctcccagcaccgcgcccgccgctggaccctgcttcacccatccttggccccgccgcgctgcaccagcgcccccaagtgcaccagggcccccctagtccccgctgcgcttggtccccatcccgctgctccccccgcgccgggga

SEQ ID NO: 9420 - DNA, 274 bp, Cricetulus griseus
ttggttggttgtttggttggttggttggtttggttttccatacaggggtttctctctgtaaccctggctgtcctagaacttgctctatagaccaggctggcctcgaactcacagagatccacctgcctctacctcctgagtgctgggactaaagatgcaccatcactgcccagcgttttagggtgtgtgtgtgtgtgtgtgtgtgtgtgtgtgtgtgtgtgtgtattgttcgggtagggtgtgtgtgtgtgtgtgtgtgtgtgtgtgtgtgtgt

SEQ ID NO: 9421 - DNA, 274 bp, Cricetulus griseus
atgacaactaagaagaatgtgccggtgtccaaggttgcccataagtgctttgtggaggtcaatgaggaaggcacagaagcagcagcgaccactgccgtgatcaggaatgcccggtcttgcagaatagaaccaaggttctgtgctgaccacccgttccttttcttcatctggcaccacaaaaccagcagcatcttgttctgtggcaggttctcttctccataacgtgtgtgtgtgtgtgtgtgtgtgtgtgtgtgtgtgtgtgtgtgtgtaaaac

SEQ ID NO: 9422 - DNA, 273 bp, Cricetulus griseus
caccggatgatacacacgggagaaaagcctttccagtgcagcgagtgtggcatgtccttcagccagaaagccttcctggttaagcatttccgaattcacaccggggagggcccttcaggtgcggcgagtgcggcaaggccttcaagacataacatctcctggttccacgagtgcacaccggagaaacgcctttcacctgcagccagtgtgggaaataatggactaaacctttgaaactgtaagccagacccaattaaatgttttcctttataa

SEQ ID NO: 9423 - DNA, 273 bp, Cricetulus griseus
tgcctcccacggtgctgacactgaagcagttcatgagaaggcaacaagttctcctcctctacagaaagattttgcgagccattaggcaagttccaagcgattctgaccggaagtaccttcaggactgggccagggaagaattcaaaagaacaaaatgccacagaagaggatacaatacgaatgatgattactcaaggcagtatgcagctaaaggaactagaaaggacacttgcgttagcaaaatcttaatggaaaccataacattggagctgt

SEQ ID NO: 9424 - DNA, 273 bp, Cricetulus griseus
gcaagtctccacctctgtggctccacttcccctgcacagaccgcacactgaagcgtgtgggccatcgcacttgcctttggaacgaccagctttatctggttgggggttttggtgaggacggcaagacagctagcccacaggtttgcatcctggaactcttcgtctaaagaacgtcagaaaggcacatggccaagcctgtttcggcaaacccacacagcgttctcgtcagagctcctgccccacttcaaatacttattaaattccaatctgaga

SEQ ID NO: 9425 - DNA, 273 bp, Cricetulus griseus
acagaactttgaaaacaaccgagtttccttgacactgtatacctttgaagaagggagaaggatgttcccgtctctgcccaccctgacggtcctcatcccgctggtctcactggcaggcctgttctactccgccactgtggaggaaggattccctcagggctgcaccagcgccagcagcctgtgtttctacagcctgctcttgccggtcacggtgccagtgtacgtgttcttccacctgtggacctggatggggctgaagctcttcagacataa

SEQ ID NO: 9426 - DNA, 272 bp, Cricetulus griseus
ctacacaggtcatgaccttttcagcagcccccggtgactactgtgggcagtgtccagccatggccagagccgccagcgccagcgccagcgcagggctcccacactccgccagggctgcttcacctgctggtgctggtgtccatcagctgcgcactgctgcagctcttcacctggtcccggttcacgctgcacgggcgacgcctacgcgtggtcaaggcccagagacagaacctggcacagatccatacactggacattaagacagtgtgaga

SEQ ID NO: 9427 - DNA, 272 bp, Cricetulus griseus
gggcggaggagccccgcaccttccacccggagctgctgcggtgcctggtgtgcccgctctccaagaagccgcttagatatgaagcatcgacaaatgagttgattaatgaagagttgggaatagcgtatccaatcattgatgggatccctaatatgataccacaggcagcaaggacaatacgtcaaaataagaagcaagaagaagttgagcaacattagaccatgattgttaaaagcctaactactgacttctaatactgtgtacctttaaca

SEQ ID NO: 9428 - DNA, 272 bp, Cricetulus griseus
gtgtgggctacgccgggccacgggggacagcgggacgtgagcgtcgtggtggagggcaccggactggacaccgtggtggtggctggcgacgtgttcgagcgccttggggacgaggactcctggcaggccctgagcgaagacccaggagctcagcagcggagccgggagaggattctgcgtgtggctgatgtggtggtgcctggtcacggagaccccttccgggtggtcagggaagagtgaggagtgaggaggatttggatgtgaagacaagg

SEQ ID NO: 9429 - DNA, 272 bp, Cricetulus griseus
gagcaggcacggtctcgacatgcagaacgacgccggcgagttcgtggaccctgtaccgtgcccgcggaaatgctccgcgagcaaccgcatcattggcgccaaggaccacgcgtccatccagatgaatgtggccgaggttgacaggtgcacgggccgctttaatggtcagtttaaaacctatgccatctgcggggccattcgcaggatgggcgagtccgatgattccattctccgactggctaaggctgatggaattgtctcaaagaactttt

SEQ ID NO: 9430 - DNA, 271 bp, Cricetulus griseus
attcaagtccagtcaatccggtggtctctttgatgtcagcatcggcggccaggaggttggtcgcatgaagatcgagctgtttgcagacgtggtgcctaagacggcagagaacttcaggcaattctgcactggagagttcagaaaagatggtgttccaataggatacaaaggaagcaccttccatagggtcataaaggatttcatgattcagggtggagattttgttaatggagatggtactggagttgctagcatttaccgaggcccattt

SEQ ID NO: 9431 - DNA, 270 bp, Cricetulus griseus
tacccaacatggccgtacaagcaaggacccacttgcagtgactgcccaaaagatgacaggtgtctcaacaatctctgcgttaacccacaaagagaccacgtctcacgttctggtaactatccaggaagacccatctatctacgtaacagatacacatctctctttctcattgttaaggcagtatgtctgatactgtctgttatagttaccattttggtaaagcacaaataccctaatttagttcttttggactaatgccattgttggggg

SEQ ID NO: 9432 - DNA, 270 bp, Cricetulus griseus
gtgactcctggtaccgggaggtcaaagccgtggtgcagcagcagcaagcgcgtcccatctggaccgcggaggaccagctggagggctcatccgaggacctggacctaccgggccgcagcctggacgccagctccggggacctcagctgtgacagtcgggccaacagcgactatgaggacacagacggcgtctacacggacggcgagggcagcgggccccaggacgccgatgaggaaccccgatcccagctctggcccggtcctcggagcc

SEQ ID NO: 9433 - DNA, 270 bp, Cricetulus griseus
tggattggagttggaagtaaatgtttttatttttctgaaaaagtggaaaactggacatccagccagaccttttgcatggcacaaggagtccagctagctagatttgacagcccggaggagctggaatttctggagaggtacaaggggaagcatgaccactggatcggcctccacagaaagtcctcagagcaccattggatgtggacagacggcactgaatataacaacttgacttccccccgaggagaaggagagtgtgcctacctgagt

SEQ ID NO: 9434 - DNA, 270 bp, Cricetulus griseus
accaagaaattctaagtttgaatatgcagagattgaatattgcctctgcccctatcggggtcttctaccctggtacgtcgtatataaactgtattaaaactggggtttcttaccagttgctgtactttgtatatagaatttttataaattgtatgcgtcagaaataatttattttaaaaagaaattaaaaggtttaaatctgcaccaatgttgcatcacccccatccaagaaatgtataggacacattggtcaccaggaacccactcctg

SEQ ID NO: 9435 - DNA, 270 bp, Cricetulus griseus
ggcagtctccaaacagaaccacctccattcacaacaagagccagctaaaagctccacctttccccatcttccccttgttaccctagttacactgggactttggagcagagcaccatggggactccaaatgatcaggcagtgctgcaggccatcttcaaccccaacacaccatttggagatgtcattgacttggacctggaagaagcaaagaaagaagatgaagatggagttttccctcaagaacagttggagcagtccaaagctctggag

SEQ ID NO: 9436 - DNA, 269 bp, Cricetulus griseus
gggcgagtttgtagatgatggaactgaaacacacttcagtgttgggaaccatgactgttacataaaagctgtcagcagcgggaagagaagagaagggattatccacacactcattgtggataacagggagatcccagagctccctcagtgactgctggttagtgggttctgagctgaagaggagacatcaggactttctaatggctgtggtaattaaatgtgttcactgtgtacatattggtagatttagtctgcaatgttttattttt

SEQ ID NO: 9437 - DNA, 268 bp, Cricetulus griseus
gaccaacagtgccttgccctgttccgggtggccgtggacaagcaccaggctctgctgaaggcagcgatgagtgggcaggggatcgaccggcacctctttgcactctacgtcacgtcccgattcctccacatgccatcgcccttcctgactcaggtccagtcgcagcagtggccactgtccaccagccagatcccggtgcaacagatgcacctgtttgacgtccacaattatccggattatgtttcggctggaggtggatttgggcctg

SEQ ID NO: 9438 - DNA, 268 bp, Cricetulus griseus
gccgtaaacctggcacacaacggaagagtgtgcagcacatggggtgacttccactataagaccttcgatggttacatgttccgtttccctggcctctgtaactatgtcttctcttcacactgtggggccacctacgaggacttcaacatccaactgcgtcgtggtcttgagggttccaggcccatggtcactcatgtggtcctcagggcccaggggctggtaattgagctgtccaatggctctgtactggtcgacggacagcggtgag

SEQ ID NO: 9439 - DNA, 268 bp, Cricetulus griseus
gctgctgtctccctcaggagtctcctgcagttgtaaactgtggccacaccgaaccaatggacccacgagctctggggactcctccctctttgattcgtgtagcaaattagggataaaaggtttgatctttttgacacttttctttttacaggcttcttgcagtttttaggaaccgcctcttgaaccgtgcatgtattatagcagccaggtgtctttgtgctttctgatcatagtcatgtaactacctgtaaatacattttctatttta

SEQ ID NO: 9440 - DNA, 160 bp, Cricetulus griseus
ggctggagagatggctcagaggttaggcgcaccggctgctcttccagaggtcctgagttcaattcccagcaaccacacggtggctcacaaccatccgtaatgagacctggcgccctcttctggtgtgcagatatacatggaagcagaatgttgcatgcat

SEQ ID NO: 9441 - DNA, 267 bp, Cricetulus griseus
gtgtggcttgtgacctgctgtgggttcaggagactcgccactctacgacctagactacaagatattacagttgcactgatggcttgcagctacaggaagaacacagttgatttgccccccagcttcaggacttacgttcatgctcagtcctaccccacagatgagcttgttattcaggccatctgctcagcaccagtcctgtcctgaccatctgataaggaaggaaggaaggaaggaaggaaggaaggaaggaaggaaggaaggaag

SEQ ID NO: 9442 - DNA, 267 bp, Cricetulus griseus
agcttttcgtcctactataaaggaggatttgagcaaaaatgagtaggcgagaagctagtcttattttaggtttgtaagcccatctgctggcaaggccaagattagaacagcacacaagagaattatgattttgaaccatccagacaaaggtggatctccttacttagcatccaaaataaatgaagcaaaggacttgctagaatcgtccaccaaacttaaatgatgctgaaagggacttcactcctcaaaaaaaaaaaaaaaaaaaaa

SEQ ID NO: 9443 - DNA, 267 bp, Cricetulus griseus
aaacatggaaagacaggtcgaaaacagtctcctgtgcggattttcaccaacattccaccaacaaaataatccttcctacagaagaaggatacagattttgttccctctgccagagatatgtttctcttgagaatcagcacttgtgtgcattgtaattcttgcacatccaaggatggcaggaaatggagccattgctttctctgcaaaaagtgtgtgaagccttcctggacccattgtagcacctgcaatcgctgtgcaactcccaga

SEQ ID NO: 9444 - DNA, 266 bp, Cricetulus griseus
ccaatgggaaggacatagaggaacggaaaagggctcctcatgggctgcaagaggacccagctcccgagctggaccggtttgaagaattggtgaaggaaatccaggacaggaaagaattcttggctgccatggaggctcttggacagggcaagcaatacagaggaatgatactggctgaaatctcccagaaactacaggaaatggaggaaattgaccgcagtaggagtgagaagcttaggaaggctcttgccaccacttaatccaag

SEQ ID NO: 9445 - DNA, 266 bp, Cricetulus griseus
atggctacagggtttatttggttcaagatactcacttgtaattataccaaaaaattaggagtttgttcgctgttaatttctttgtggggtcagcaggagcctctcagctctttcgtatatggagatataatacaagaactcaaaagctaaaggaatcaagagttcctgatcacctgaacaatccaatgtggacagaaacattggaacctagtttatttaattattgataaggtgatgatatctgttctgataacatttgaaaagaa

SEQ ID NO: 9446 - DNA, 265 bp, Cricetulus griseus
ccccaaacctagaagaacaaacgcttattctatttgtacaagaaagaatcacttactgttaaagtcgacgtgaacaacatagacacatttaggtctacttctagatattctgcagagagacaggtatcacatgatttggttgctgttggcagaaaaaatgacaattttcatccagtatttcaacatcttgactcacctcagaatcaaacaaacctacagaagaatttactcaggaaatcataacaataatccatgaagttaaagc

SEQ ID NO: 9447 - DNA, 265 bp, Cricetulus griseus
tattccctggttgactggtgagacacacacacacacacacacacacacacacacacacactttgttgattgggttacctcgctctagaatggtttcttctagttccatccattttcctgcaaatttcaagattccattgtttttttcttgctgagtagtaccccattgtgtaaatgtaccacattttctctatccattcttcggttgagggccatctaggctgcttccagtttctggctattacaaataatgctgctaagaacat

SEQ ID NO: 9448 - DNA, 265 bp, Cricetulus griseus
  modified_base (14)..(14): a, c, t, g, unknown or other
ctcaccagaagtangtttttggtctgtgctgaagtgcccttgttgtatcgggcagtgcctggcagagtgctggcatgtgatcggttgcaggtactgctgtgtgccaacagcagaggcacagaaaagcgaagggtatttgtgggtgggctccaggctgccccaagatgcttctttggagtcaacagtgaagcactacctgcctcttatcaccctgatcttgccaatcccctggtcagagtggctggcacttttctttgagacaggg

SEQ ID NO: 9449 - DNA, 265 bp, Cricetulus griseus
ctctctctctctctctctctctcctccctccctcccctcctcctcctctctctctctctctctctctctctctctatatatatatatatatatatatatatatatatatatatatatatacatatatatatatatatacacacacacacacacacacacacacacacacacacacatatatatatatatatatatatatatatatatagagagagagagagagagagagagagagagggagagggagaccgtggggagagggaga

SEQ ID NO: 9450 - DNA, 265 bp, Cricetulus griseus
ctctaggccttttaggaagcatggagttgtcctttggccacgtacatgcgaatctacaagaagggtgacattgtagacatcaagggaatgggcactgttcaaaaaggaatgccccataaatgttaccatggcaaaacaggaagagtctacaatgtcacccagcatgcctgggcatcattgtaaacaagcaagttaagccatatgaattcatggcctaatgtaacaaaaagaaaataaaagacctggactagtaaaaaaaaaaaag

SEQ ID NO: 9451 - DNA, 264 bp, Cricetulus griseus
accctgaagaacctcaagagggctttcttttgtttttgttttcttctttaaattgctgtaaaagtccctttggccactgatatccggtggtaagtttggtttagaaactggggtttgtaacatactgttttacaactccaagatcatctggaatgatattttgtatatatatataaatactgtgtaaagttttaattcagccaaccttttgaaaattgctgctgttttaaattataaaactatatttatgctttatagaaaata

SEQ ID NO: 9452 - DNA, 264 bp, Cricetulus griseus
caccacaaaagtcctcctcgggcaggacgagcctctcatccatgtctttgcgaagaacctggtatcgtttgtgtctcaagaagcaggaaacagagctgtcctcctggccatggctgtgaaggacaagagcatggaggggctgaaggccttgaaggaggtgatccggacatgccaggtgtggtgacctgcagtcagcagggcatgacagtgggatctggcggacgctcagcaggatctgtgagacccttctttcgagtgccagga

SEQ ID NO: 9453 - DNA, 264 bp, Cricetulus griseus
aatagctttctggttctgtttgccccactccatgggcctgaagaatggactctcatgttcaggattcatcagagattcttgggcagtaacttacgaatactgcctgtccacaacacagtcaacgctgttgaccttatgtgcacgatagctaagactacctccaagccaaccatagacagcatctgctatagaatgataacaaccaaagcttacatcatagagcaaagccctgttggagaacactccaaaagataaaactgagta

SEQ ID NO: 9454 - DNA, 264 bp, Cricetulus griseus
ggtgcttgtgagggaactttggcttgttctacctgtcaccttatctttgaggatcatatatatgagaagttagatgccatcactgatgaggagaatgacatgcttgacctggcttatggactaacagacaggtcacggttgggctgccaagtctgtctgaccaaagctatggacaatatgactgttcgtgtgcctgaggcaggtggcagatgtcagacagtctattgacatgagcaagaattcctaaagataacaaataaaaag

SEQ ID NO: 9455 - DNA, 262 bp, Cricetulus griseus
aatggaggaatcagtgctcctattgtacaggactttgcaccccgagtaattgtgatgtatgtgatcgctcttcttgctttcctgttctacatttccaaagttccagaacggtactttccaggacagctaaactacctcggatcaagccaccagatctggcatatccttgcagtagtgatgttatactggtggcatcagtcaacagtatatgtcatgcagtacagacacagcaagccttgccctgactatgtttcgcacctgt

SEQ ID NO: 9456 - DNA, 262 bp, Cricetulus griseus
aggctgtgctcattctgagcaaggaaggaagggagtgagggagggaggaagcgaaggaaggaaggaaggaaggaaggagagacaaggaagaaaggaaggaaggaaggaaggagagacagggaaggcatggtggcacacacctttagtcccagtgctcaggaggcagaggcagtcggatctctgtgagttcaaagccagcctggtctacagagctaggtgcaggacagccagcgctatacagagataccctgtctcaaaaaac

SEQ ID NO: 9457 - DNA, 262 bp, Cricetulus griseus
ctctttgacaaggccaacaagcaccactttttgcacagcctggccctgttagcggtaccccattgcagaaagcccctctgggcaggattactgctagcttctggaactaccttattctgtaccagcttttactaccaggctctgagtggagacactagcatccagattgtgggtcctgttggaggaagtctgctcatcttgggctggcttgccttggctttttgatgtctcttgtttaattacccagtcccgggcttttctg

SEQ ID NO: 9458 - DNA, 261 bp, Cricetulus griseus
  modified_base (207)..(207): a, c, t, g, unknown or other
tgaccaggaagatgtagttttagataaaagactgaagtattacagatatcctcggtcagtttggaattatcctgtaaggattccagtatcaatctccacagaatggcatggatataaaaagaaggaccatactatcagtgttggcaaagatgttaacagcgatgtagtaattcacaaagatgacaacaaagaactgaggcccccttntccatactggacaatggtggagcgagacaatgccatcccctccacctcctcctc

SEQ ID NO: 9459 - DNA, 261 bp, Cricetulus griseus
tgacattttattgacaataatatttaaatagtgtaattttgtaaattttatgaaaaatttacataatatcaaaatgcacacagaaaagccaatcatgtaatgaatatgcttgaagcagatgtatctttgatttatgacaaaatatgcattgaattatattttgatgatattctgtttcatcaaattgctatgagctatgtggaatctgacactggaaaatgtactaggaaaactttatatcactcaggattgggaattctg

SEQ ID NO: 9460 - DNA, 261 bp, Cricetulus griseus
tcttttccagacaattctgtgatacaaaaccatgtctaaagagatgcatttgatttcttggtaatgcagtggcagagtatgaagttaccgttgaagaggagcaaagagaatttgggctatccatcttacatagattcttcaaagagaagtcagaagtccccttaccagagatacctatagctgttgtgaaagaatgtaaatggaatctgaaggagaattcctcctctaaaaatgttttcgaggaatgtgctagatttgtct

SEQ ID NO: 9461 - DNA, 260 bp, Cricetulus griseus
cagccctccaagtatcctggtcacactttccttgtccagtctgcagttctccagagtcacagccacagctgcatcatgtgggccctgggcttcctgctccgattcctcgccatgcaacctgtggcaaaggtggactccaagggtgcctggtgctacgactcccaagatccaacgtgcggccctacacactggaaggagctagcacctgcttgtgggggcccagcccagtcccctgtcaacattgaccttcgattggtcca

SEQ ID NO: 9462 - DNA, 260 bp, Cricetulus griseus
cagagagtgctcctcacctggcttttcacattgctcttcctgatcatgttggtgttgaaactggatgagaaggcaccttggaactggttcctcatatttattccagtctggatatttggacactatcctccttgtcatgctgtattgtgaaaatggctggacggtgtaagtctggctttgacccccgacatggatcacacaatattaaaaaagaaagcctggtacctcattgcaatgttacttaagttagccttctgcct

SEQ ID NO: 9463 - DNA, 260 bp, Cricetulus griseus
ctgggcccagttctgggggcaaagatgcctgccctccacattgaggatctgtcggaaaaggaaaagctgaagttggaggttgagcaacttcgcaaagaagttaagttgcagagacaacaggtgtctaaatgttctgaagaaataaagaactacatcgaagaacgttctggagatgatcccctggtgaagggaattccagaagacaagaatccctttaaagaaaagggcagctgtgtcatttcctaagaaactctggggga

SEQ ID NO: 9464 - DNA, 259 bp, Cricetulus griseus
tactttgtcttttgcagaactggtagaggattatgagcactatattaaagaggggttagagaaacctgtggaaattatcaggcactacacggggcccggggctcagactgtaaatcctcagaatggttttgtgagaaatagagtttccgaagacagagcacagatattggcgagtagtagccagtctggggactcagagagtgagagtgattcttgcagctcaaggacttcttcccagagcaaaggcaataagtcttac

SEQ ID NO: 9465 - DNA, 259 bp, Cricetulus griseus
attgttcctgaaagagaaactcaaccaagagaaacaacatgaaatggctgattctacaggacatacgtcccagggtctgttgacattcagggaagtgactgtggacttctcccaggaggagtgggaacgcatggactcagctcagaggactctgtacattgatgtgatgctggagaattataacaaccttgtctttgtggggaactattgcaaatccgatcctgtccatcagcatgtgaagactgaaaaggagtcttgt

SEQ ID NO: 9466 - DNA, 258 bp, Cricetulus griseus
gatcgcaagtcctacagctggaaacagcggctcttcatcatcaacttcatctccttcttctcggcgctggctgtctatttccggcacaacatgtattgtgaggctggagtgtataccatctttgccatcctggagtacactgttgtcctcaccaacatggcgttccacatgacagcctggtgggacttcggaaacaaagagctgctaataacctctcagcccgaggaaaagagattctgaacctatctctgatgctgg

SEQ ID NO: 9467 - DNA, 258 bp, Cricetulus griseus
ctgatgggccaatgggtagcgctgggcccacggtgcgtgtcaactgcaagctgccatctgtgcagctgcagcggatcatcgcaggtgtggacatcgtgctcctctgctttatgaacctcatcatcctcgtcaacctcatccacctcttcatcttccgcaagagcaacttcatcttgacaaactacacaaggtggcatcaagacgcgccggcagtggcggcgctcacagttctgcgacatcaacatcctggccatgttc

SEQ ID NO: 9468 - DNA, 258 bp, Cricetulus griseus
ttgagttctctccagaagagagggaatgtttggagcctgctcagtggaatctgtacagggatgtgatgttggagaattacagccaccttgatttcctgggtcttgctgtgcctaagccacacctggtgacatttctggagcaaaaaacaagagccttcaggtgtaaaagagacaagcagcagccactgtgcaccaggaacaacacccaatgattgcctctgcctcccaagtgctgggaatgaaagcgtgtgtcaccac

SEQ ID NO: 9469 - DNA, 258 bp, Cricetulus griseus
tcttcaaatgcataaaggagacacactggagagaaaccttatgaatgtaatcagtgtggtaaagcctttgcccgctacagtcaacttcaaattgcataaaaggagacatactggagagaaaccctatgaatgtaatcagtgtgataaagccttttctcatcagagttaacttcaactacatgaaagaactcatactggagagaaaccctatgaatgtaatcagtgtggtaaaacctttgcacaataacagacatcttc

SEQ ID NO: 9470 - DNA, 258 bp, Cricetulus griseus
cagagatggttctgctgatttgggagcagctgaggaagaattgtggcagttttaacctgactttgcaaaggacctgaagccatggcagaacactctggtggaaaccacagatgaagtgtgtcatgaggctatgagatgggtggcccacttgcaagcccacgggaacacctcattctatcagctttactgaaagccttcagctttcaggatatacaaggactgtatctcctgactgatggaagccagacacaagctgca

SEQ ID NO: 9471 - DNA, 256 bp, Cricetulus griseus
gatggctcaaggaatgaaacacctgttttgacaagtgaagcctctgacttagaaagggaaataaatgaacccattgaagggtcttatgtggaaagatttgtacagtattcagaagaatctgttccggttactcaaaggatcctggattatttgaagtcatggactggtgggcctgggccagaatcatgatcagctgctgaattcagaaaacaaggacttgactcagtgtttgatagatgccttgatttccatttca

SEQ ID NO: 9472 - DNA, 256 bp, Cricetulus griseus
agccccacaaggacttctgaaagatgtctcctacccacttcgtgcgctcttaaccctctaagtgctgctagccagggcctgtaagccaggcagaccacagcttgaaggaccagccttgacccctgtggctgaagacagtgcaggacaggcctctgcacttccactcatgtcatacctgtgcctgccacctgacacctaggctttactggaattcaggttttgagactgagaggttttcgttattgttcttttccac

SEQ ID NO: 9473 - DNA, 256 bp, Cricetulus griseus
gtttgtgctggagaacagtaagccgtagtaggataagcatgaatgtccctttgccaagagcagcatccagctgacagtgttgctgtgtgagctgcttcatggttggggagccttgctccgagacagcccaggacttctcacccatgttcttcagccaagaccatagtttccatgagcttttctgtgtggctatccagctgctgaataaaacctggaaggaatgcgggcaacacaggaggattttgacaaggtaatg

SEQ ID NO: 9474 - DNA, 256 bp, Cricetulus griseus
aagctctggagaagaaagagaaagaagctgcatttggaaagaatgcaaagggggaacattccagcccgtgttagagctgtcacttatcacctggaggacctgaggaggcgacagagaatcatcaatgaactgaagaaggcccaatgggggtagctctgagtctacatctgagctcccagtacttgaagatggctgtggattcctcggcaccactgaataccttgacgaggaagaagagagggcaacctatgcacag

SEQ ID NO: 9475 - DNA, 255 bp, Cricetulus griseus
gggcaggtggagagcgcccagtttccagagtatgatgacctctactgcaagtactgctttgtgtatggccaggactgggcccccacggcgggtctggaggagggggatctcacagatcgcatccaagagccaagatgtacggcaagcactggtgtggaacttccccatcgatgtcaccttttaaaagtaccaacccctatggctggccacagatcgtgctcagtgtttgtcagcaaaaaaaaaaaaaaaaaaaaa

SEQ ID NO: 9476 - DNA, 255 bp, Cricetulus griseus
ctaccctgaggatcattttggtgtgcaccatgtcaaccttgaaggagttattgaaacagctcctgatagccaggcgtttggcacagttcatgtctaccctgacaaaatgctactgaaagggagaggcagggttccagacagaattatgaattacaagagggaagaagttttgtgtttttaagtctcattgtcttgtctgttgtagaatgacattattttgtgtcttactctattgcaaacaaagttaaattctca

SEQ ID NO: 9477 - DNA, 255 bp, Cricetulus griseus
ctcctactgatatcccacctgagactgaagaagagtcacctggttgtagcctgaaggatgtcactaatatactgatgcatcctgtagtgaaaaattaggaaaacttttctctgtctccgagaaggcatgaagacagcccagcagtgtctctgcctaagcgcaggtgtactgccatcacaagctataaagagccaacacttgctttcgaaactaagaagaggggaccctttcacagacttgtgtttcttgaattct

SEQ ID NO: 9478 - DNA, 255 bp, Cricetulus griseus
tcttcaagtcactcactgcctcccagagccccatctcctaaggttctgggcccttggcttctcagaggagttaactgtggagttacacacactgtgtgactgtaacttagcgtggcctgtgtccgatgtgaatgtgactgtggccatggtcccctaatttggacgatggctggtgcaaagagaggacacaagacaaccagctcgttcttcttcctggtggagcatgtggctgaaggagtcatactgagagtgaga

SEQ ID NO: 9479 - DNA, 254 bp, Cricetulus griseus
gatcccctacatcgagaaggacagccccctgctcaaggattacagcggcttcctggccgagatgaagcgggtgttcgggtgggcctttgttccaagaatagctccccaggctcccgctgctgtccctgtagggcctggctctggagagcaccaggcctccctgtgctgacagccctgcccctcccatgaacatttggactctcccccgggtctccaactgcaagatgggctcctgtcacataatggacagatca

SEQ ID NO: 9480 - DNA, 254 bp, Cricetulus griseus
tgggaagtatttggtctgagttattttaacctccacttagatttgctctttctattcagctggctagatgctcctgagagattattttaaattttagataaattgtgtagaatatgttaacctgcatcatttttagcatgcacgtgttaaaaataacatggaagtgtagctgtataatacagaggagaaatgataggttgcccaaagtttgagaaaactggaacctattttaggagtctcttttggcaaaagaa

SEQ ID NO: 9481 - DNA, 254 bp, Cricetulus griseus
atacgaaaagaccggagaggagggaggatgctgaaaacacaagcgccagagagatgacttggaaggcagaaacgaaatgggccttcaggagacatgagggccgccaacctttggccaagtcctcttgtgattaagcacactaagaagaacagccctgccttgtccttgacagctgaccaaatggtcagtgccttgttggatgctgaaccgcccttaatctattctgtttttttttttttttgtagagtttaaaa

SEQ ID NO: 9482 - DNA, 253 bp, Cricetulus griseus
gagcggagactgggagcaactgcgcaagagctatgcggctgctgggaggtgctctgagatacacaggaaatgaggtgaggagctcaccaacagcccacaaagaccttcctggctgacagggccaagcagcaactccttgtggccttggtctctgccttctcatctcggcagctgcccagggcccctcctgctgcccctgcaactgcatcttctactagcctgtgcaataaaaaaaaaaaaaaaaaaaaaaaaa

SEQ ID NO: 9483 - DNA, 252 bp, Cricetulus griseus
cttcccactgagccagatggtgggcacccagccctcaaggaacccccatcccagggtggagggctcaggctggagctgctatatgggggagggcatgcttctgtccccataaggcacgtagcttcctgcaggccctgccctgccctgttccaggccgggccttcagcatgttggccccaagccccggtgctgtccagacccttctccctcaagccctgccctgccaaatgtgaaattctgccaacgccccca

SEQ ID NO: 9484 - DNA, 252 bp, Cricetulus griseus
ctttgacccagaaaactctcagaagaggtcacctctggcttttattcccttctctgcagggcccaggaactgcataggacagactttcgccatgaacgagatgaaggtggcgctggcgctgacactgctgcgtttccgcatcctgcccgacaacaaggagccccgcaggaagccggaattgatcctgcgagcagagggcgggctggtggctggcgggtggagccccagagcacacagtgacccctacgcctg

SEQ ID NO: 9485 - DNA, 252 bp, Cricetulus griseus
catggcggcgctggggactcggctgtgcagtgtccggaggttgcactgcagtgccgcggctcgggccggcagccagtggcgactacagcagggactggctgccagcccttctggctatgggcccctcacggagcttcctgactggactttcgccgatggccgtcctgctcccccaatgaagggccaacttcgaagacaagctcagcgggagaagcttgcaagacgagttgtactgctgacacaagaaatgga

SEQ ID NO: 9486 - DNA, 251 bp, Cricetulus griseus
tgctgttgctccagcagcaagcacttcttcaagagaaagtgaatcagctcaaagaacaactctgcaagaatacaaaacagatgccatggtgaagaatttgtatgttgaaaatgcacagttgttgaaagctttggaaatgactgaacagcgccagaaaacagcagagaagaaaattacctcctagaggagaagatcgccagcccaccattgtcaggaacttggcaccagcaccactggcttctacacctcct

SEQ ID NO: 9487 - DNA, 250 bp, Cricetulus griseus
caacaaaacataactttaataccaatatgagtaacaatataacaaatattaaacaaatcttaatagcatggcaaggaagagcttgacagcagctttgagactgggctttctggcggaagacaggagaatccccctattttagctccagatgttctatttctaataaactataattattttgtatgattcttacaactagattctaggcataattcagaataatgtggaaataaatactatatataataca

SEQ ID NO: 9488 - DNA, 249 bp, Cricetulus griseus
ctctccctgctactgacagaagaagaaagctgcaatcagcatccagtccttctggagagcctatctggttcgctgtgaccctgagattcaggagctgcggcagtggcagaagaagctgcgtgaggacaagcacatccgccagcgtgtgaagatcttctgggctaaacaagaacacaaaatgaaatgtaaaatggaggacgaggaagtgcctgctgccccagtgccgccatctccttaactgatgtcagt

SEQ ID NO: 9489 - DNA, 249 bp, Cricetulus griseus
ggaagccttgatgctggagcacttcttctggagggatcctgtactcctggcagtttcccacttcaatgcctgagctggggactccgtgaagactactcccgaggaggctactgcatgatgtcagtcacccacccagcgctctgccggcgcgtggcactgcgtcattgcctggccctgattgcactgtcgacggctgcccccgtcctagacatcaccacgtgggccttccccatcatctcctccccatca

SEQ ID NO: 9490 - DNA, 248 bp, Cricetulus griseus
ggcggctctggctgtgctgggcagggggtagtgttactgtttaggggttgttttagtcttaattttcctttctagcttcccattgccggccagtgagtacgctgtaaccccctgaggccatgtcaggagacgcagccgcggagcaggcagctgagtatgtcccagagaaggtgaagaaagcggaaaagaaattagaagagaatccatatgaccttgatgcttggagcattctcattcgagaggcacag

SEQ ID NO: 9491 - DNA, 248 bp, Cricetulus griseus
acaattattttctctggcaacaaatgagatgtggcgatcaggagacagtgaagtataccaaatgggggacgtgagtcaaaagacaacatggcacagaatatcagtgtttcgaccaggcctcagagatgtggcataccagtatgtagaaaaaggggggctcgcatatttgtggaagggaaagtggactatggtgaatacatggataaaaataatgtgaggcggcaagcgacaacaatcatagctgataa

SEQ ID NO: 9492 - DNA, 247 bp, Cricetulus griseus
ggtacaaacgcaggtatcagtcattccaggaagtcacccacggatttggagatccgatctatttctgtgaatgcgtccactgctaccaaggtcaacacggtgtcaccaagcacagacttcacccgtagtccagataacatgaccatttctcctttctttggacccacagacacaaaagtctctcaggtgcccagccagtcccgactcaacattagcaaacaactactgaacaaaaccaagcgtccca

SEQ ID NO: 9493 - DNA, 247 bp, Cricetulus griseus
  modified_base (228)..(228): a, c, t, g, unknown or other
agcctgattgtcagaggccagatggttggacgggttaacttggatcagctggaacagatgaaggaaaagatggagagttccagcagcgatgatgaggacaaggatgacgaaatgagcagcaaagctgaagacaagagagctgatgagattttctgaccgaggggctggtgtgaacactgagaagcgatttccatgtgaattctgtggacgggcattctcttattaaanaacaaaacaaaaaaaaaag

SEQ ID NO: 9494 - DNA, 247 bp, Cricetulus griseus
cgttctcattattttgtattttattgagcactcgtcatgttccggccccctcgactcccaatgactgcattacccacgcccactcccatccctggatctttgggaaaagcttcataatcacatacggtcctaaagacacatgatataaggacacacctcttggggacccgtggagtgtttgatctttggccagtctgtccctggcaaactaacagaaatatatatgtttatatatatatatatatat

SEQ ID NO: 9495 - DNA, 246 bp, Cricetulus griseus
cgggtccgtgtctcagctgacgccatgctccgagccctactgggctccaagcacaaggtatccatggacctacgagccaacctcaagtctgtgaagaaagaagacacagagaaggagcggcccgtggaggtgggagattggaggaagaatggtggaggccatgtctggcatggaaggccgcaagaagatgttcgatgctgccaagtccccaactcacagtagagattggcttgctgtatggcactc

SEQ ID NO: 9496 - DNA, 245 bp, Cricetulus griseus
ggaggccagtataagattcagatctttgaaaagggtgactttagtggccaaatgcatgaaacaacagaagactgcccttccatcatggagcaatttcacatgcgagagatcaactcctgtaaggtactagaaggcgcctggattttccatgagctacccaactaccgtggcagacagtatcttctggacaagaaggaataccggaagccatcgattggggtgcaacatctcctgctcgtccagtc

SEQ ID NO: 9497 - DNA, 244 bp, Cricetulus griseus
taaatcattcagtggtgtcctggactgtgggaactgttccagaatctttcatgtggaaaaactcatgaacaccaacttagtattcataatggtggaaagcaaagtgacatgtccctgtgacacacggctgctcatgcaagcagagcagacttctgacggtccagatccttgtgatatggttaagcaacccagataccgaaaagggcctgatgtctgctttgataacaatgtcctggtaaggatt

SEQ ID NO: 9498 - DNA, 244 bp, Cricetulus griseus
tccttctgaaaaatattacatgttttattctcccatccccaaagggcggtttatccagaaaccaagaaaataaaaatcaatcagaataaactcaaagggagaaacccatccactcactaccaggcaggcaggccagcagcccacctccacctcaggaggtccccagagacccctgcccaccgcaaacaggggaggtcagggaggggctgggagggcactgaatcaactatgtcttcattacgag

SEQ ID NO: 9499 - DNA, 243 bp, Cricetulus griseus
gagggcatggctcctgtgcttgctgctgttagccttggtcctcccaggagcttccagccgagcccaccagcactccatggaaacacgaacccctgacatcaatccagcctggtacacaggccgtgggatcaggcctgtgggccgcttcggcaggaggagggtagccctgagggatgtcaccgtacctggcctgcggtgccggctaagctgcctcacgctggatggaggtgccaagtcctctca

SEQ ID NO: 9500 - DNA, 243 bp, Cricetulus griseus
attttttaaaaagatttatttatttattaattatgtatacaacattctgcttccatgtatatctgcacaccagaagagggaaccagatctcataacggatggtggtgagccaccatgtggttgctgggaattgaactcaggacctctggaagagcagccagtgctcttaacctctgagccatctctccaggtttgtcttggttggtttggtttggtttggtttggtttggtttggtttggttt

SEQ ID NO: 9501 - DNA, 243 bp, Cricetulus griseus
gaattaccccaggtatcaatcacatctacatggtggactgcaagacactaacaggacagcagcctcaagtcacttttcagttttgaagcaattgacagtgttgaacttgaccaattgcataaggattagtgatgctggcctgaggcaatttcttgatggttctgtgagtgtgaagataagagaactcaatttgaataactgctcccttgtgggcgatcccgccattgtgaaactgtcagagcg

SEQ ID NO: 9502 - DNA, 243 bp, Cricetulus griseus
cttctaggtgtgaccatgcccttggggtaccagtgtcgagggtacacccagtgtgaaccctgtgtgaacatgggcatgagtgcaagggcatgcatgccatactatgggcagatgtgtattcaaggttatgtctgccccgcctccccaaggcagccttgtacaggcagccaacctacccatcttgaattcccatggacagctctgctcatggtctgaggctgtacttgtgtagtacttctcacc

SEQ ID NO: 9503 - DNA, 242 bp, Cricetulus griseus
  modified_base (226)..(226): a, c, t, g, unknown or other
ctgtgtgggaaggaattcaaccggatgcacaacctgatgggtcatatgcacctgcactcggacagcaagcccttcaagtgcctctactgccccagtaagttcaccctgaaggggaacctgacccgccacatgaaggtcaagcatggagtcatggagcgaggccttcatgctcaaggtctgggtaggggacgactattcaacaataaaacacaaaaaaaaaaaaaanaaaaaaaaaaaaaaaa

SEQ ID NO: 9504 - DNA, 241 bp, Cricetulus griseus
cagcaagggcacaaaccaggctgggcaccttcttggccatggaacagctgctgcagcaagcagggactgagtgcactgtggacgtcttcaacgtggccctgaagcagtcacaggcctgtggcctcatgaccccaacactggagcagtatatctacctctacaaatgtctgaacagtgcactgctggatggcatgcactgagttggagagtgtcctgtaccctactaggcaccatgtcccag

SEQ ID NO: 9505 - DNA, 241 bp, Cricetulus griseus
gtgtcctgggcctctggggtctctgtccagtaaataagccatgagcagggaggacagagtctccttatactgtcaaattgccaacagccatccattgtttcttttcctttatctttcttccttttcttttctttaaaaaaaaaaaaaaaaaacacccgctgatgtttctttgcaagtggaggtttcatgtttcatcaggtagggaccaggagggaattcagaggatcactcaagagcacac

SEQ ID NO: 9506 - DNA, 241 bp, Cricetulus griseus
acacacacacacacacacacacacacacacagacacacacctctgagctacctgtgctggctcccaggtgctggtttggtgcacacctttagtcccagcacttgggaggaagaggaaggaagatctctgagttcaagaccagcctggtctacagagcaaattccaggacagcctccagaagctacacagagaaaccctgtctcaaaaaaacaaacaaacaaaccaaaacaaaacaaaaaaa

SEQ ID NO: 9507 - DNA, 240 bp, Cricetulus griseus
acagcctgtctgagaaccagtccctgctgcggatgccgccctgggtgaacatctggctgctgggttccatctgcctgtccatgtccctccacttcctcatcctctatgttgaccccctgccgatgatcttcaagctacgggccctggactttacccaatggctcatggtcctcaagatctcacttccagtcattgggctagatgagcttctcaagttcattgctcggaactatctggagg

SEQ ID NO: 9508 - DNA, 240 bp, Cricetulus griseus
gagaccgtggcccagtagagcccttagtgtgagacttgcaggggcggtggccatggaggccgtgctaaacgagcttgtgtctgtggaggatctgaagaattttgaaaggaagtttcagtctgagcaggcagctggctctgtatccaaaaagcacacagtttgagtatgcctggtgcctggtgcgaaagcaaaatacaatgacgacatccgtagaggcatcatgctcctggaggagttgtt

SEQ ID NO: 9509 - DNA, 240 bp, Cricetulus griseus
cgctatatctgctccaagcctgccctgtatcgaaggttctaacataccagcctctcgagctggctgagctacaggcggagctgaagcaggaaggggatccctgtggccatgggcaagctcctggacatcctagatgcccagtgcatcaccttcacaactgccgcagcccgaaaggagaagctgaaacagaagcgacggcagcccctgggcagaaagaaaaaggaatcagaaatgataggc

SEQ ID NO: 9510 - DNA, 240 bp, Cricetulus griseus
ccatgggcaagcagaacagcaagctgcggcctgaggtgctacaggacctgcgggaacacacggagttcaccgaccacgagctgcaggagtggtacaagggcttcctcaaggactgtcccaccggccacctgacagtggatgaattcaagaagatctacgccaacttcttcccctacggtgatgcctccaagttcgccgagcacgtcttccgcacctttgacaccaacagcgatggcacca

SEQ ID NO: 9511 - DNA, 239 bp, Cricetulus griseus
agagatttgtatctgaaatgaataacctgcagaaagagatggagctgttagccaagagccaatatgaaacctctgcacggaataaacagcaggagctgagactaatagctgagccgaaaaatgagacaggagctagaaaatcggtgtgcggaatttgaagaaactatcagacacctgaagaggtgtaaaagaagcaacagagaataaactaaaagaagccaagtgtggagtcagagcag

SEQ ID NO: 9512 - DNA, 239 bp, Cricetulus griseus
taggagtcctaccctgagggctcccactgggggctggttctgtgtagacatacttgtcttctaggggagccgtggggcatggtggccagttgctccagctcctggtagccccatatatccaccctagggacccctctaccctttacattaggaagtgctagtagacaccccagaaagagtttgacacagctgctacaggataagggggtatctggcatctgacatgcctttctttgcct

SEQ ID NO: 9513 - DNA, 238 bp, Cricetulus griseus
ctgaaggtctctgacatcatccacttaaaagcagtcaacgtgctcaacttcacacgtctggcgttttcttcttgctccctttgttggtcatgatcgggtgctacgtggtcatcacccacagcctgctgcgcgggcagacctcccagctgaagcccgcggtgaaggagaagtccatccggatcatcttcacactgctggtgcaggtgctcctctgcttcgtgcccttccacatctgctt

SEQ ID NO: 9514 - DNA, 238 bp, Cricetulus griseus
ctcactgatctggattctgcctcttgccaaagcagaggggcctgccatcctctccccacactacctgtccctgagctgcatgcccaccaaccacgcctacctgaggacaaaggcttgcactgtctgcactcccctctcctggccccttacctcccctggccagtctgtggctgcctgaggaaggaaggacccgcttcctgttgttggtgctaacccctttgtaatcccagtacccccc

SEQ ID NO: 9515 - DNA, 238 bp, Cricetulus griseus
cagaccattgcagccatctcggaggtgacttttcgacagtgcgaaaattttgccaaagaccttgaaatgtttgccagacatgcaaaaagaagcacagtcaccactgaggacgtgaagctcttagccaggcggagtaattcactgctaaaatacatcaccgagaaaaatgaagagattgctcagcttaacctagagcgaaaggccaaagaaaaaacggaagccagaggatgagaacagg

SEQ ID NO: 9516 - DNA, 238 bp, Cricetulus griseus
aatatccaccaggaaaacgaagaaatggatcagcccctgcagaatggacaagaagatcgccctttgggaggaggtgatggccaccagcctgcagcaaacaaccacaacacaaccacaaccgaagaggacaggctcgccggcttgcccctaactttcgatgggccatacccaataggcagattcatgatgggttggtggagatggagatgatatggaaatgttcatggaggagatgaga

SEQ ID NO: 9517 - DNA, 238 bp, Cricetulus griseus
atggagaccagaagagggcatcagatacttaaaattagttaaaaatatataaaataggggctggagagatggctcagaggttaagagcactggctgctcttccagaggtcctgagttcaattcccagcaaccacatggtggctcacaaccatctgttatgagatctggtgccctcttctggtgtgcagatatacatgcaagcagaacgttgtataaataataaataaaatctttaaaa

SEQ ID NO: 9518 - DNA, 237 bp, Cricetulus griseus
tcagttgctccatcacgtgatcccagtttggatgctgaatggcaggaatggaagatgaaatttggaaaatcctacagccagaatgaagaaggacacagaagagcactgtgggaggaaaagaagaaaaaattgagaagcacaatttggaatatgagcagggcaagaccagctactctctgagcctgaatcaatttagtgatcttacagatgaagaattcaggggaaaattgctgtgga

SEQ ID NO: 9519 - DNA, 237 bp, Cricetulus griseus
aggtacttcaggtcatgccttctgacagcttcttcttctccattgtccgagacccagcggctctagcccgctctgccttctcctattataagtcaacctcatcggccttccgaaaggcaccgtctttggctgccttcctgtccaatcctcaagccttctacagacccgggggccgtggcaaccactatgcccgaaacttactttggttcgactttggtttgcccttccccccagaga

SEQ ID NO: 9520 - DNA, 237 bp, Cricetulus griseus
  modified_base (172)..(172): a, c, t, g, unknown or other
aggatcgccgcgatggccgcccagggagaggccgcaggtccaattcaagctcgtcctggtgggcgacttccaccgaaagaagaatcttcagtactatgacttcgttgccatgcctgctcttgccccacctgagggctgaaggagatgaatgggcttcggagtgaatgtggcngttaaacacacaccttcatttttttgtatttcataaaaaaaaaaaaaaaaaaaaaaaaaaaaaaa

SEQ ID NO: 9521 - DNA, 236 bp, Cricetulus griseus
tgagatctatggtgctgtggccaagtggctcacaaaaatagaggtcccgaaaactgagcagacctttgaagaacgcttgatcctcaaagctttcttgctaaaagtttgtcaatgcctattccccccatcttctatgtggcttttttcaagggggaggtttgtggggtagaccctggaagctatgtctatgtgttcgatggttaccgcatgggaagagtgtgctcccggaggctgtc

SEQ ID NO: 9522 - DNA, 236 bp, Cricetulus griseus
ccagcacatcatcagtgacattctgaaaaatgcagtatagtagatctttgcctgtgttgctcgctcttacagcactgaccctgagttgcatgttttgtactatattgaaaaatatgttttattttccttaaagttgtgatattatgtttgaaattgtacatactttaagtgatgtagttttgacaggttttatttggttgatataattttatattaaaagagaatgctgctttcac

SEQ ID NO: 9523 - DNA, 236 bp, Cricetulus griseus
tgtaaggatgatcggagacatcctgctgtttgggacgctgctgatgaacgccggcgccgtgctcaacttcaaactgaaaaagaaagacacgcaaggcttcggggaggagtcgagggagcccagtacaggagacaacatccgggagttcctactgagcctgaggtacttccggatcttcatcgccctgtggaatgtgttcatgatgctgtgcatgactgtagtgtttggctcttgag

SEQ ID NO: 9524 - DNA, 236 bp, Cricetulus griseus
aggaaagctgctaacagggagtgcaaacagcccaagagaaagaagtgtgtcacagtcaacaaagctgaaaggagttggagatctgaagagaacttttgacatcagacatggagatgcagagtttggagtttgcccagctggttttgaatcttgctttgatccagtgtttcctcactaaaataaaaataaataaataaataaataattaaaataaaaaaaaaaaaaaaaaaaaaaaa

SEQ ID NO: 9525 - DNA, 235 bp, Cricetulus griseus
cttccttctgcttccttgacccagccctgcacactcttcctctccccaccgtgccctactccctgtccccaggcattctggggaccaagatgttgggcacaaatcaggatcctatatggtgctggcctgttcataactgggaactgtatgaaaaggggaatgaatgctctgtggtctatttaatctgcttccttctgaaggagtctgggtatgatgagagattccagaaggatct

SEQ ID NO: 9526 - DNA, 234 bp, Cricetulus griseus
ctgtgtatctgtggacaacctgagggggcttgagcagccgccctcagaaggcctgaggcgatggtggcaggagcccctgggcgatagctgcttttctcagactgccaagaggtgacagcagcctaccgacaagccctaggaatctgttcaaagctcagctgaagatgcgaggtagtgccctagtttggggtgagctctgagagggtttgcagaggaaccctagataggattcct

SEQ ID NO: 9527 - DNA, 234 bp, Cricetulus griseus
gtgaaggtcctgctgggcagggtcttgcacctttcttcttggccttatatttaaatccctatgcaattaatgttttatattcgcattttttaaaaaaaaatcgttacattttaagtgattcttatatgtagcacctattgcttttgtgagtaaatgaattgagaattttgtactgtgatttgtgttcactgccccaattcctcgaacccattgaagccttgctgtgctgtgaaa

SEQ ID NO: 9528 - DNA, 234 bp, Cricetulus griseus
ctgtgtacaagtatgtaccctacggtcctgtgatggaggtgctgccctacctcgtcccgacgttgcccttggagaaacagcaagcatcattgaagggtgctcagcgagagaggcagctgctatggcaggagctccggcaggcggctgcgcactggcaacctcttccaccatccagcctagtcactgcaatgaccatgcccacacctactccactcaacctgttacctctggggc

SEQ ID NO: 9529 - DNA, 234 bp, Cricetulus griseus
ggagatgggggcagtgtggacagtggtcctgttggtaagccagcggatcgaaacttgagtttgtttgtactttttggcgacaaaacccagtctaaggcggacgatgaggaggtaaacatgaaagtggtggtgcttgtggtccctatatttcttgtccttttactgtgtgctctgatgctgatcgcctacctctggtccgaagtacaagaagcagtatctccagggagttcatca

SEQ ID NO: 9530 - DNA, 234 bp, Cricetulus griseus
gtggtccaggatgtgctctttgaaaccctgcagacagacgaggggctgcagagtgtgctggtgctgagtggagccgacggcgagcagacccggctctgcgtgcaggaggtggaaaccctttcccctggactgacggagccagccgccactggctcacccggacagaaactcctcatcatccgcagcgctccagcggctgacctgctggacaacggcggcagcgctgcaggaggc

SEQ ID NO: 9531 - DNA, 234 bp, Cricetulus griseus
tgctgatgtgaacgtcagggactctgatgacaacagtcccctacatattgctgctctgaacaaccatccagacatcatgaatctccttattaaatcaggtgcacatttgatgcaatgagcactgttgtgataacaccagcattcatttagcttgatatcattgtgctctcattggctaaagcattgtaagcatcaaatttgcagggttggtttcccagtatttaatataaatat

SEQ ID NO: 9532 - DNA, 234 bp, Cricetulus griseus
ctgttgtgcatgcagttggaccgccacatcagcacccatatccgggagagcccgcaggccaccggaccaaactcaaggacctagccacccagacctacatccgctggcaggacctgctggctcactgtcagccccagggccagtacttcagcccttggaaagacatttaaagtgataaggacaaagtggcccaaggctctggactccagcaggaagagaactgtaggaggtgaa

SEQ ID NO: 9533 - DNA, 233 bp, Cricetulus griseus
acagggaaatgtgggcctcctcctcctattgacaatggagacatcacctccttccctctgtatacgcaccattatcatcagttgaatatcagtgccagtccttgtaccaactgcagggcaacaagaaaataacatgtagaaatggagagtggtctgagccaccaaaaatgtttacatgcatgtgtcatatcagaggaaattattaaaaagacataacataacttacagatgga

SEQ ID NO: 9534 - DNA, 233 bp, Cricetulus griseus
  modified_base (222)..(222): a, c, t, g, unknown or other
tttagaggaggccttgggaggatagagtcttaggagggatagggcagaaactgctgggtcatttgaactcaccagacacaccatcctgatcctttctgctttgtcccagtggtgatgagaaatgacacctctgccacattcccatgccaggtcaccctggttaaactccagccacctccccaatgttcaaaataaaacaatggtttactcggaaaaaaaaanaaaaaaaaaaa

SEQ ID NO: 9535 - DNA, 233 bp, Cricetulus griseus
tgatggttcaggacgggaacgtggaaggtgcatacaggatcctgaccagaatcctcgctactgatgggcttaccgaagtcataaatcgaaggcgctattatgagaaaccctgccgccgccgccagcgggagagctatgaaacatgccggaggatctacaacatggagatggctcgaaagattaacttcttgatgcggaagaaccgggcagatccgtggcagggcagctaaggc

SEQ ID NO: 9536 - DNA, 233 bp, Cricetulus griseus
gcatcgcaaactgagggagttggagcaagagtctgcacggcaggagctgcagatccagagctttgagaatgaccttgctgagatccgcgctgacaagcacaacctggagaccattctgagcagcctaccagagcaatgtgccagctagaccctggcacaccctccccaccttgctgttcctgcccactccccataggtgtcccgggtcggccttctgtgtgctcatgtgaatg

SEQ ID NO: 9537 - DNA, 233 bp, Cricetulus griseus
tgggctagtggaagaaagtgacaaagctcaagtttgtgtaccagatatggaagtcatctgttgctgggccccacagccccaggccaggatccctagtctctagccatttcttggcagaatcttgttcagccttgaccccagccaaggtcctgacccatttctagtcctgaccctgaaccctgctacacttgggtagagagggcaggcaaggtcatctgtaagatatggagccc

SEQ ID NO: 9538 - DNA, 232 bp, Cricetulus griseus
cacttggagagcgaagacttggagaaacagaatgcagctctccgaaaggagatcaaacaactcacagaggagctgaagtacttcacatccgtgctgagcagccacgaacccctgtgctccgtgctggccagcggcaccccttcacctcccgaggtggtatacagtgcccacgccttccaccagcctcacaccagctcgccacgcttccagccctgaacttccagacaggaag

SEQ ID NO: 9539 - DNA, 232 bp, Cricetulus griseus
  modified_base (16)..(16): a, c, t, g, unknown or other
cagtccctctgctganggctgcttagaccattccctggaccgtgctaaacaccgggcaagcgaaaatgccacaggcttttctctttgatgtgatttatgaagcatatcaacagtgtagtgactatgacttggaatttggaacagagtgcttgcagttggccctaaagtactgtcacacaaaagcaaaacttttagaagggtcccctgacctctctcaggtcagctgttcttg

SEQ ID NO: 9540 - DNA, 231 bp, Cricetulus griseus
tgaagagaccagaggaaggccatcctttaatcctagtacccgggaggcagagataggcaaatctttatgagttcgaggccagcctggtctttaaagagagttccaggacagcaaggggctacacagagaaaccctgtcttaaccccccccccaaaaaaagcctttactcccagcactcaggaggcagaggcaggcagatcgctgcattcgaggccagcctgatctacagag

SEQ ID NO: 9541 - DNA, 231 bp, Cricetulus griseus
gccaaatgggtcgtggggaaggtaattggtacagccatggtaaagactgctaaagtaagagcgaccagacttgttttggatccctacttgctaaagtacttcaacaagcggaagacctactttgcccatgatgcccttcagcaatgctgtgtcggggacatcgtgctcctcagagctctgcccgctgcacgatcaaagcatgtgaaacatgaactggctgagatcattttc

SEQ ID NO: 9542 - DNA, 231 bp, Cricetulus griseus
agatgtccagtccccacgcgccaagcctgctcagcaggtgccttctctggttctgtggaatgagcaagagtgggccaggaagtcctccacctactagtgaggaggtggctgcaacaactaggcagctggaggacatcagtgaggaccctcgctgggcccgtgtcgtcaacctcaacgccctgctcatgatgactgtggctgtgttcctctggggcttttatgcataaagtc

SEQ ID NO: 9543 - DNA, 230 bp, Cricetulus griseus
cgccaagtatacctgctccttctgtggcaagaccaagatgaagagacgagctgttggcatctggcactgtggttcctgcatgaaaacagtggctggtggggcctggacctacaacactacatctgctgtcacagtgaagtctgccatcagaagactgaaggaattgaaagaccagtagaagtgtgactgcctgagacctgcctagccactagaaataaatgggttaatta

SEQ ID NO: 9544 - DNA, 230 bp, Cricetulus griseus
gtagtttaaaatggggttcagctctggacagaggatattaggaatgtaaaagaattatcttctgaggtaaaagtttactttggcttaaaagagagaaagtgtattagtcactattttaaagtcattgcttattttttttggaatggaagcattattgagtttctcaaaagaaaattttattaatgattatggctatttgtattcttatgatgttagccttgaacacagct

SEQ ID NO: 9545 - DNA, 230 bp, Cricetulus griseus
taccggaaacttgccctgaagaaccacccgttgaagtcaaatgagccatctgcaccagagatattcaagcaaatagcagaagcctatgatgtgctgagcgaccctgtgaagagaggcatctacgacaagtttggcgaggaaggcctgaaaggtgggattcctctggagtttggatcccagactccatggacaacattactatcctaaaaaaaaaaaaaaaaaaaaaaaaa

SEQ ID NO: 9546 - DNA, 230 bp, Cricetulus griseus
agaggcgacctgtatcacggagatgtcgatgatgatggcttgctggaagcagaatgaattccgcgacgaggcgtgcagaaaagagatccaggacttcttcgattgttcttccagggctcagaaagctgggaagatgagatcaatccaggagactctggaacagtctgcgagtttacctccccacaaaatgaccaagttgttacaaagatttcccaacaaatctcacctca

SEQ ID NO: 9547 - DNA, 229 bp, Cricetulus griseus
cctcctgtggattacagggacagatggaagtcagtcccttcaccctgcatgtctgtagcattaggagaaggcatggctcctgctgcaaacactgtgaatgctgctgagaacctccctccatggatggctttttattttgagaaagaaaaaaaaacacatatatatatatatatatatatatatctgtgggtgttttgtttgagaatattttctttctaaatgtctttct

SEQ ID NO: 9548 - DNA, 229 bp, Cricetulus griseus
atttaccaccttttatgctaaaacaaaatctcttattagtcaatccatggctctttccaaaccctgaggactataaccatctaatgggttatgacaaaccattcacttttgaatgtagaagttagtgaacagaaactgcatgaggatgaaaaatgaatctgttttttgtttttgtttaaatgtcatgtgtatttcggtgtataatgttacctatattttattattgtta

SEQ ID NO: 9549 - DNA, 229 bp, Cricetulus griseus
  modified_base (215)..(215): a, c, t, g, unknown or other
ttttttttttttgtttgttgttgttgttgttgttgtagggttagggtttttttgttgttgttgagaccaggcaggccttgaattcataaagatccatctgtctcttactcccgaatgctgggattaaaggcgtatgccatctacaccttaaggccagcctgagctacatgagaccatatctcaaaaaacaaaaaaaaaaaaaaaaaaaaaaaaanaaaaaaaaaaaaaa

SEQ ID NO: 9550 - DNA, 228 bp, Cricetulus griseus
ccaaagtgcccagagccttgtcctcctccaaagtgcccagagccttgtcctcctccaaagtgcccagagccttgtcctcctccaaagtgcccagagccttgtcctccccccaaatgtcctgagccttgtcctcctcagccatgccagcagaaatgccctcctgtgcaacctcctccatcctgtcagcagaagtgcccacccaagagcaagtgagtgcttcaacagtca

SEQ ID NO: 9551 - DNA, 228 bp, Cricetulus griseus
gccagaggcaggcctgagtcttctcctctggtcccagctctgctgctcactgttgtgtgacttcaagcaggtcactggctctctctgagcctcagtctccacatctgtacaaatgggaacattatccctgccctgcctacctcacagggctgttgtgaggaattgatgagatgatgtatgtgaaacactttgtaatctgtaaagcgctgtgcacatgtaagaaaaaaa

SEQ ID NO: 9552 - DNA, 226 bp, Cricetulus griseus
cctaagaccagcctcgatctctagcagcagcattagcagtcaacaaagaacagcatggacaagagtgctccaggagtcatcgggaccccaggcctcagccgcacactctgggcttgtctttgggagccatcagcagggcattggtggctttgaggcacccaatcaagatgagttttgacaaggccctggcaagcatgagctggagggagctggcttggaactagaa

SEQ ID NO: 9553 - DNA, 225 bp, Cricetulus griseus
ctcccgcagccacctcccgcaggccatttccactgaggagaaagaatcagcgatgtctgctgtccagaacctccactctttggacccctttgctgatgcaactaagggtgatgacctgcttcctgctggcactgatgattatatccatataagaattcaacagaaaaacgccaggaagacccttactactgtccaagggattgctgacgattatgataaaaagaa

SEQ ID NO: 9554 - DNA, 225 bp, Cricetulus griseus
aatttctcaagtcttcaaaatagctacaaatcaagaaaagtttatttctattgagtgaatactttggacacattttgacataatatttgaagtatgattttttaaaagattatttagtactaattttgaatggatttttaaatttcagattattagctgctgacaatggtagaggtattttttttaaatcatcaatggaatttttctatttctttcctttttttt

SEQ ID NO: 9555 - DNA, 224 bp, Cricetulus griseus
ccacactacctcccacctcgtgtccccagtgcccaccttcaaccagcccagcctactggagtgtaggtactgaatcccaaggatcccaggacctgctctgtgatctagattccctcttccagggagtaccacccaacaagagcatctatgatgtgtgggtcagccacccttgggatctggcggctcctgccccaggctggctgctctcgtggtacagcctgtaa

SEQ ID NO: 9556 - DNA, 223 bp, Cricetulus griseus
ctggtagatgaagccctgggggccggtggctgcggaggctgcaggatgtgtgtgaagactagaagctgtgttcacctcagagttcctagaggccgccgcatgaaagctgtccaggcagggccctcatatctctagaggagggacagcaccaccctgtgtcagcccatggggaacctttgttctcagctgcccactgatgagaaatgccagtgaggtcatcctc

SEQ ID NO: 9557 - DNA, 223 bp, Cricetulus griseus
gagattgagcatcaggatttcatggatgagcaaagacgactaaagaagctccgtggaaaggagaaaccaaggaaaggagaagggaaaagagctacaaaaaaaagaatagaataagctcatcaaggaagaaattgcttcctcgatgattaagaaagtgtatctcgctatcttttcacatattagaggaacacaaccttcctcagtagacatcaaccccatgttc

SEQ ID NO: 9558 - DNA, 223 bp, Cricetulus griseus
gggtcttgcaaggggctctgtatgtacccagggtacttggcccaacccccaattctagccatggggcttctccactgggctcctgtagtcctcaagtccctggcctccaccttaccaggtgccacttctcagaaggccactgcccaggcccccaggccgccccttcgtggccagagactggttaaagccccccagtgcctccttgtgcatagaacttcctctg

SEQ ID NO: 9559 - DNA, 222 bp, Cricetulus griseus
tcccgtccgtgtcccgccgacgggcgactggatgccctcgcccaccgtggctgtccagggcagccttgcctgagctcaaaatgaactatatgcccggcaccgccagcctcatcgaggacatcgacaaaaagcacttggcctgctacgagatggaaggacacttataggttttctaagaagcatcgatcagtttgctaacttagtgctgcatcaaaactgtgg

SEQ ID NO: 9560 - DNA, 222 bp, Cricetulus griseus
gagagggagccactgaagaagttcccaggtgatgttaatccagttaccaaagaaaaaggcggaccccggggcccggagcctacacgatatggagactgggaacggaaaggacgctgtatcgacttttaagtcacacattcttccactgcagagtcattttctgaatgaccttactgcacactgttttctttctctatatcctttaagtcatgtgattttcat

SEQ ID NO: 9561 - DNA, 221 bp, Cricetulus griseus
gactgtcatcacaacctacaagaacctgcagcatcatggctacaacacatacaccttcctagacctgaacctggacctctccaagttcaggatgccgcagccctcgtcaggacgagagtcacctcgacactgagctcagctcacggtggccccgtctcggtcctgtgaattcattgcctatgagaataaagagtcacaaagtgacaaaaaaaaaaaaaaaa

SEQ ID NO: 9562 - DNA, 221 bp, Cricetulus griseus
  modified_base (198)..(198): a, c, t, g, unknown or other
atggcgtccagtgacgggaagccggggagcgttttcgatcaccacgtgcagacggccgtgtgtgactcgcgggccagggtaccggggagggccgacgccctcgcgccgtcaaggtgaagtttatctcatcaagtttgtgaaattacaaagtgcaagggtagctaagaaaaagatggatggcacaggcaaaaaaaaaanaaaaaaaaaaaaaaaaaaaaaaa

SEQ ID NO: 9563 - DNA, 221 bp, Cricetulus griseus
  modified_base (162)..(162): a, c, t, g, unknown or other
cagtgtggaaaagccttcagtcattccacttcattgcagatacacgagagaacccacactggagagaagccctacgaatgcaaggagtgtgggagagccttcatctgtcccagttccttccgaattcatgaaataggtcacactcacacagaagaaaaaccntataagtgtcagcaatgtggaaagcctacagtcatcctcgttcacttcgaaggcacgaa

SEQ ID NO: 9564 - DNA, 221 bp, Cricetulus griseus
gagaacaagaagaaggaagaatgaatgctcctttggtaaatgcttcccagcatctggtaacattcagggatgtgtctgtggacctctcccaggaggaatgggaatgtctagactgtgctcagagggctttgtacgtggatgtgatgttagagaattaccgcaatctagtctttgtagggaaccgatgcatatgtcataattatgagaatgtcttggatcaa

SEQ ID NO: 9565 - DNA, 220 bp, Cricetulus griseus
gttctcaacctgtaggtcacgacccctttggggattgaatgaccctttcacaggggtagcctaagaccataggaaaatacagatatttacattacaattcataacagtagcaaaattacagttatgacgtagcaatgaaaataattctatggctggaggtcaccacaacatgaggaactgtattaaagggtcacagcattaggaaggttgagaaccactg

SEQ ID NO: 9566 - DNA, 219 bp, Cricetulus griseus
aagccaggggagacctgggtgccttcagcagaggtcagatgcagaaaccgtttgaggatgcatcgtttgctctacggacagggggagatgagtgggccagtgttcacagattcgggcatccatatcatcctgcgcacagaaatgaggacaggcaactggccggcctactcaggctgccaagcagtccatggaccgccccttcctgctactgtcacacag

SEQ ID NO: 9567 - DNA, 219 bp, Cricetulus griseus
agggtcagtctcggctcagtgaaaagttcctggaagaaccacaccctctgatgttccagaagctccaggagcagatcttcaatctcatgaagtatgacagctacagccgattcttgaagtcttgtttttgaaacacaactgtactgatgaagaggaagaagagcctcccgacgctcaaaccgcagctaaacgtgcttccagaatttacaacacatgagc

SEQ ID NO: 9568 - DNA, 218 bp, Cricetulus griseus
ccactgagtcccaggagagcaacctttggggcaaggggtggggcaggagtcaggatgggggttggcacaggccacctgtgcagggacaaggaaaacatccgctggaggtgagccaggctgtgttcctgcagtgcaggcaggtggcagagtgaggaagtgagtacattccggggctgagtcaccccagagctgcccactttccccagatgggacagagc

SEQ ID NO: 9569 - DNA, 218 bp, Cricetulus griseus
catccaagaaaatcctcactaaacggcaagaccaagaatgtagggagtgtgggaagaccttctttgaccattggtccctcatccgccaccacagaactcacactgggagagaagccctatgactgtcctgagtgtagggaaggtcctttcaggtacaaaggagcactctcagtagacatctgatttcccacacaggagagctcacgagacatcagaga

SEQ ID NO: 9570 - DNA, 218 bp, Cricetulus griseus
ttaactttttttcttttttactttctaacaagttttctttctttttttttttttgttttttttgttttttttttttgagacagggtttctctacatagccttggagcctatcctagaactcactctggagaacaatgctggcctcgaacccacagagatccacctgcctctgcctcccaagtgcggggattaaagaggtgcgccaccaacacccggcc

SEQ ID NO: 9571 - DNA, 217 bp, Cricetulus griseus
gcccagcaagatgtcatcatggtcctaaagttcccttcaaactctcctgtcacccatgttgcagccaacacccagccaggtttggcaactcctgctgtcatcactgtcactgctaacaggctctttgctgtaaacaagtggcacaaccttcctgctcaccaaggtgctgtacaagaccagccataccagctgccagtggaaatcgatcctctcatag

SEQ ID NO: 9572 - DNA, 216 bp, Cricetulus griseus
taaatgccaaagtcttaatgtaaatgactgtataccaccatagagaatgtatatactgctaatggctgagttgcttattttcatgaataaagattagcaagaaacttttaagtcatctttctttgaaaatgttcaaatttttcatgttttaggcatgaggagctagcttggtctagtgaaaaagaaataaaagatttaaagaagaaaaaaaaaaaa

SEQ ID NO: 9573 - DNA, 216 bp, Cricetulus griseus
tggccatgtgtcctggtatcaacatggcagccgtcaggcagtttcaagcacagctgccccaggtgacctgcatccagtctcgcttcgtgggaggggctgacctgaccctaacactttgaggccaggtcagtaactatctctgaagtttatcttccttgaccagtatagccctagcccaggcctctggacctgattttgccccagtacctcctacct

SEQ ID NO: 9574 - DNA, 215 bp, Cricetulus griseus
ccaaagccttaatttatctgaaaggatacccagagttatattgacggatatcctgcgaacggagttaggaagaaaatacttaaagatctcacctataactgaggccagtttgagtggtacagccaacctgaagtcagagcaactttcttcatcatctgatggcagcttagagtcttgtcagaatgtaaatcatcacaagagctttttgctgaaag

SEQ ID NO: 9575 - DNA, 215 bp, Cricetulus griseus
atccataaaagaaagaccatacaggagagaaagcctttgaatgtaagcaatgtggtaaaacctttgcaaagaagagtcatcttctcattcatgaaaaaattcatactggggagaaaccctatgaatgcaatcaatgtggtaaagcttttgcatgtagcagtaatcgtcacaggcatgaaaagatgtcatactggagagaaaccttatgaatgtaa

SEQ ID NO: 9576 - DNA, 215 bp, Cricetulus griseus
  modified_base (11)..(11): a, c, t, g, unknown or other
  modified_base (208)..(208): a, c, t, g, unknown or other
acttttttttntttttttgagacgaggggctgtcctggaacttgctctgtagaccaggctggcctccagctcagaaatccacctgcctttgcctcccaagtgctgggattagaggtgtgtgttacaatgcccagctgcaccttttttttttcttttttttaattaagtatttatttaataaataaatttagtaaacaagaaaaaaaanaaaaaaa

SEQ ID NO: 9577 - DNA, 214 bp, Cricetulus griseus
  modified_base (20)..(20): a, c, t, g, unknown or other
ttttttgttttgtttgtagnttgttgtttttactttatcctgggtttccccatctcaagccaatctgagaggaggaaaagagcattggccaatgtttactaagcactttacgctccttggaagagaaggtgatgtgtaatttacgaaagctatttctacagctgggactcaggatattagtcaatggagccatctaaaaggtaaaaaaaaaaaa

SEQ ID NO: 9578 - DNA, 213 bp, Cricetulus griseus
cctacgaagtgtcctaccgaattggagaggatggctccatctgtgtgctgtatgaagcctcaccagcaggaggtagcactccaaacaacagcaccaaacgcgcacaaatggtagacagcagaagtctatggatggatcatcttattaatggatggataaatttgaatttttgctttgggtgggctcctcttggggatggattatggaatttaa

SEQ ID NO: 9579 - DNA, 213 bp, Cricetulus griseus
cagcttggctggaaggggcgtctgcgtggatgggatggggacgccgggggaggggctgggtcgctgttcccatgcccctgatccggggtgtccccgagagcctggcatccggggagagcgcgggggctggtcttccggctctggacctggctaaagctcaaagggagcatggagtactaggaggtaaactgaggcaacggctagggctgcagc

SEQ ID NO: 9580 - DNA, 213 bp, Cricetulus griseus
ttagggttactattgctgtgatggaacaccatgaccaaaagcaagttgggaaagaaagtgtttacttggcttacacttccacaccatagtccatcactgaaggaagtcagggcaagaactcaacagggcaggatcctggaggcaggagccgatgcagaggccatggaggtgtgctgcttactggcttgttcctcagggcttggtcagcctgct

SEQ ID NO: 9581 - DNA, 213 bp, Cricetulus griseus
agaaaacattgacattctctttggccaagaaacctgtgaacctctacactgtccacgacggggctgttcacactgtccagaggtcacccttctacaacgacatcatcctcacttattgggggatggaatgtggccatctggaaggaagaggtcatgactggacctctccttcagacatgctgtgcaccgaagaggtacacggcagggcactgg

SEQ ID NO: 9582 - DNA, 213 bp, Cricetulus griseus
cacacacacacacacacacacacacacacacacactacacattttttctttctttctttctttctttctttcttggttttttgagacagggtttctctgtgtagtctttggagcctatcctggcactcgctctggagaaccaggctggcctcgaactcacagagatccacctgcctctgcctcccaagagctgggattaaaggcgtgcgccac

SEQ ID NO: 9583 - DNA, 213 bp, Cricetulus griseus
caaagaatgggcaacccccagacatcttcaatccagagcacttttttggagaatggacaatttaagaagagagaatcttttctgcctttttcaatgggaaagcggagcttgccttgggagaacaattggccaggtctgaactctttatttcttcactgctcttgtgcaaaaatttaccttcaagcctccagtcaatgagaagctgagcctgaa

SEQ ID NO: 9584 - DNA, 212 bp, Cricetulus griseus
tcccagaccgaggcatccctgtcgccgtctgctaagtccacccctctgtacttaccgtatacccagtgctcctatgaaggccgcttcgaggacgatcgctccgacagctcctccagcttactgtcccttaagttcaggtcagaggaacgtcctgtgaagaaacgcaaggtacggagctgtcacctccagaaaaagaagctgcggctgctgga

SEQ ID NO: 9585 - DNA, 212 bp, Cricetulus griseus
ggcctgaagagcaggagaggagtgtgcttgttccattggggaaaccagcccaaggcctgagcaggtcacctgaccctcacactagctcttcactcccacagataatggctgcattactgccaactgacagtgtaaccctgtgcacctttgaaaagattttggttttgaattgctgctttgaatatttgttatattaaagttataattgttgt

SEQ ID NO: 9586 - DNA, 212 bp, Cricetulus griseus
gcccagcttcagataacccctacctgcagctctctcaggaggaagatgacctggagatggagtctgtagtgacaacatcaggagtgatggagaatatgaagaaagtcaggaaagtaaccaatggtgttgtggagccccagggtgactgggaaggcactgcgtgatagaacccactctgaggatgcaactgtcaatgaaaactaacttattca

SEQ ID NO: 9587 - DNA, 211 bp, Cricetulus griseus
ggcagtggtggcccacgcctttaaatcccagcacttcagagacagacagaggcaggcagatccctctgagttcaaggccagccttggtctacagagttgagttccaggacagccagaactatacagagaaaccctgtctcaaaaaacaaaacaaaaactccaacacacacacacacacacacacacacacacacacacacactcgataacc

SEQ ID NO: 9588 - DNA, 211 bp, Cricetulus griseus
  modified_base (15)..(15): a, c, t, g, unknown or other
  modified_base (202)..(202): a, c, t, g, unknown or other
cttttagttaaaaanaaaaaagtagagagagagagagagagagagagagtgtgtgtgtgtgtgtgtgtgtgtgtgggctgtcctggaactcactctgtagaccaggctggcctcgaactcagggaacctcctgcctctgtctcccaagtgctgggattaaaagtgtgtgccaccaccacccagctgcagtttctaaaaaaanaaaaaaaag

SEQ ID NO: 9589 - DNA, 210 bp, Cricetulus griseus
tgtgtcttgtgtgggacaattcataatgtagttcctagaccacttttgcaattgttcttgtcaccaaatgtgtttggacattgctgtgcagttgtggggcaggggtgggaggaaggtaaggcaagaacattgttggtcttttttgttgtttaccttctccaagactgggatggtctggctgactcgatccagatgcaataaaatattgca

SEQ ID NO: 9590 - DNA, 210 bp, Cricetulus griseus
ttccgttgcatatattcccttcagtggttctcaacgtcctaatgctgtgacccttcaatacagttcatgttgtggtgatccccaaaccataaaattattacactgctacttcataactgtaattttgctactgttatgaattgtaaatatttagtgttttccgatagccttaggtgacccctgtgaaagggtcatttgacccataaaggg

SEQ ID NO: 9591 - DNA, 210 bp, Cricetulus griseus
gagaaaccttatgaatgcaatcagtgtggtaaagccttttcttggcacgctagtcttcaaacaaaaggacacatactggagagaaaccttatgaatgcaatcagtgtgggaaaaccttcgcacaatcaaagtactcttcaaaatgacataaaaagaacacacactggagagaaaaccctatagaatgtaaatcagtgtggtaaagccttt

SEQ ID NO: 9592 - DNA, 210 bp, Cricetulus griseus
ctgcagcatcgaggctctgccagccaacctgttgctggtgcgtctgctggatggtgtgcgctccgggcagaactcctggaaacggggctcctttcgcaggcctcgcatactgaccttgcaggacagcaggaaaagcaagaccagccccagaagtctacaggccagccctttccggctggtgcccagtgttaggatccacatggatggggt

SEQ ID NO: 9593 - DNA, 210 bp, Cricetulus griseus
ctaaagtctgccttaaatctgccatggcccatgaccccatctcccctgtgctctctgatccacacttggacactgtggaccagcggcttctgaatgtccttgccactgtcaagcagtgtactgaccagtttgggatggacactgtgctggtggaagacaggatgccgctctcccacttggtaacctctcaacgtgaaacaggtggaactg

SEQ ID NO: 9594 - DNA, 209 bp, Cricetulus griseus
gcactgggccctgctgacgctggctttagtgaacctgcttttgtctgctgcctgctccatgggcctcctccttgccgtgtcgctcactattgccaatggtggccgccgccttattgctgactgccatccaggactgctggatccttctataccactggaccaggggcctggacacacggactgctcctttgatcccacaaggatttatg

SEQ ID NO: 9595 - DNA, 209 bp, Cricetulus griseus
ctcgtccagctgtgcggtgtcaggggcgtccgggtgtctgcctcccgcccgctcccgcatcttcaagatcatcgtgataggagactcgaacgtgggcaagacatgcctgacttaccgcttctgcgccggccgcttccccgaccgcaccgaggccacgagtcggggtggacttccgagagcgagccgtggagatcgatggcgagcgcatc

SEQ ID NO: 9596 - DNA, 208 bp, Cricetulus griseus
ttgcttttataccactttattccaacctgagcacctcaatataaaactaaaccctggtgaactgttttccttactaattttgagttattgtaaaatgtacaagttctgctagcagattgacacttaaacagattaaatcatctgacacatggtagatttcatataatggaaatacctaaaataattagtgcaacatactgatcaaaat

SEQ ID NO: 9597 - DNA, 208 bp, Cricetulus griseus
ctctcctttctgtactagaggacaaggggtaaaatgttgggtgtcaaccctgggggcctcagagccccatgttctgcccagaagtatgtgaaatctcttggtgactttttgtgatgtgggatcttttgcataggtctgctatgaaattatgttacaatgaaatacccgtggaaataaagtttactattaagaacaaaaaaaaaaaaaa

SEQ ID NO: 9598 - DNA, 208 bp, Cricetulus griseus
tggcggcgaacgaggacggactgccatgaaggcctcaggcacgcttcgggagtacaaggtggtggggcgctgcttgcccaccccgaagtgccacacaccacctctttatcggatgcgcatcttcgctccaaaccatgtggtggccaagtcgcgattctggttattttgtgtctcagctagaaagaaaatgaagaagtcagtccgggga

SEQ ID NO: 9599 - DNA, 208 bp, Cricetulus griseus
gtgagtgtgtggctcactgagctgtgtgtgtgtgtgtgtgtgtgtgtgtgtgtgtgtgtgtgtgtgtgtgtgtgtttttcgagacagggtttctctgtgtagctctggctatcctggaaatcactctgtagaccaggctggccttgaactcatagagatccacctgtctctgctcccaagtgctgggattaaaggtgtgcacccccac

SEQ ID NO: 9600 - DNA, 207 bp, Cricetulus griseus
gtttcaaacccagtggatattcttgacctacgaccgagttattggggagtggctgcaatttggattctgctcgattccggctgtccatggatggggtcctaggggagcatggagactccagtgtgcctcgtgtggagtcggagtgaatgtagctggtgtctccatctaataaagttacactgcacccataaaaaaaaaaaaaaaaaa

SEQ ID NO: 9601 - DNA, 207 bp, Cricetulus griseus
gaggtttcctttgagagtccagattcttgtgacctaacccctcctccacagcagccagaggtcattgaaaactttatgtgtgaacaagactcctgggccaaggacctgatcgtgtcagccttgcttctgattcagtaccacctggcccagggaggcagaatggatgctcagagcttcctggaagctgctgccagcaccaacttcccc

SEQ ID NO: 9602 - DNA, 207 bp, Cricetulus griseus
gagtgccaccgtgcccgcgctctgcgccatgctcgtgtgcctgcgcgacctggagcggccggaggaggccttcgccgtgggcgagcgcgcgctgcaacgcctgcgggcccgcgagagccaccgctactacgcgccgctgctggacgccatggtgcgcttggcctatgcgctgggcaaggacttcgcgtccttgcagagcaggctgga

SEQ ID NO: 9603 - DNA, 206 bp, Cricetulus griseus
gcataatctccaagatctcccttcctaaaaggtcgctgccccagcgggccaataaaccagggtagagggacatggatgcaggatctcaggcctattacccaagctagtgccgcagagtggagttgggaggtcccctctgcgagttccagtgggcaacgaagcatatgctaatgtcccactgtgtgtggaagcaggccggatcctcc

SEQ ID NO: 9604 - DNA, 205 bp, Cricetulus griseus
tcttcatcccgagctgcgacgaggatggctactaccggaagatgcagtgtgaccagagcagcggtgactgctggtgtgtggaccagctgggcctggagctgactggcacgcgcacgcatgggagccccgactgacgtgtgtgtgtgtgtgtgtgtgtgtgtgtgtgtgtgtgtgtgtgagagagagagagagagagagagagaga

SEQ ID NO: 9605 - DNA, 205 bp, Cricetulus griseus
ttaaatttatttttttttgtttgtttgttttgttttgttttgttttgttttttttgagacagggtttctctgtgtagctttggtgcctgtcctggaactcgctctgtagaccaggctggcctcgaactcacagagatctgcctgcctctgcctcctgagtgctgggattaaaggcgtgcaccaccaaagcccggctcacttgttt

SEQ ID NO: 9606 - DNA, 205 bp, Cricetulus griseus
gggaggtagtagaagaagccctggatgtgtgtgagaagtggggagagacgccaccactgcagcccaaacacatgcgggaggcggtgcggaggttgaagtccaaggggcaaatccccagctctaagcacaagaaaatcgtcttcttctagatctgacccggaatggcccagacctctcacagttgggcttctgcaccggtgctttg

SEQ ID NO: 9607 - DNA, 204 bp, Cricetulus griseus
actctggagtactggctggttagagttcaactgagggggtgagtctagcttccccatgatccacagggtaaattttgtatttgtttgaagtgccattcttagaacatccaaaggaatcaggattccatggttcaaggttggtcagagtctgggtagcagtctcgatgtctgtgctttgctggctccactttgcccagcagtgct

SEQ ID NO: 9608 - DNA, 204 bp, Cricetulus griseus
catggatttcaaccagttagaagcattcttgactgctcagaccaaaaacaaggtggcatcacctgtgaacaagctgcagtcatttccaagttttggaagagccataagacaagaatccgagagagccttgtgaaccagagccgctgggacaatggactgcggggcctgagctggagagttgacggcaagtctcagtcaaggcac

SEQ ID NO: 9609 - DNA, 203 bp, Cricetulus griseus
gaaccccaacagcgagggtctaccctactggcccatgttggaccatgatgagcagtacctgcagctgaacatccagcctgctgtgggccaagccttgaaggccagaaggctgcagttctggaccaagactctgccccagaagatccaggagctaaagaggtcacagaacatgcacaaagaactatagggccctatgtgaggaa

SEQ ID NO: 9610 - DNA, 202 bp, Cricetulus griseus
gtgtgtgtctgtgtgtgtgtgtgtgtgtgtgtgtgtagccaggcagtggtggcacacaccttcaatcccagcacttggaagacagaagcagccagatctccatgagttccaaggccagcctggtctacagagtgagttccagaacagccaaggctacacagaaaaaacctagtttaaaaaacaaaacaaacaaacaaacaaa

SEQ ID NO: 9611 - DNA, 202 bp, Cricetulus griseus
tttgttttggattttttgtttgtttgtttttgttttttgagacagggcttcgctgtgtaacagccctggctgtcctggaactagctctgtagaccaggctggcctcaaactcagagatctacaggcctctgcctcccgagtgctgggatcaaaggcatgcaccaccaccacccagcctcattaactacttttaaatttccag

SEQ ID NO: 9612 - DNA, 202 bp, Cricetulus griseus
tgagccgccgccgaggactcagctgcctccccctcgagccccctccgcttcccgacgctccgtccttgcaattgagttagaatttcccctcctgtcccttgtcacaagtttaaaaacctcaacagcttgtataatgtaaccatttggggtccgcttttaacttggacctagtgtaactccttcatgcaataaactgaaaaga

SEQ ID NO: 9613 - DNA, 202 bp, Cricetulus griseus
ttcattgttcctgaaagagaaactcaaagaagcaaaacagtaagaaatggctaattctccagtaaatatatcacagggtgtgttgacattcagagatgtagcagtgcacttctcccagaaggagtggcaatgcctggactctgctcagagggctttgtgcattgatgtgatgttggagaattacagcaacctggtcttgtgg

SEQ ID NO: 9614 - DNA, 201 bp, Cricetulus griseus
tttgtttgtttgtttgtttcgagacagggtttctctgtgtagcggttgacctggaactcactctgtagaccagaggcatgcaccaccatgcccagcttttttttttttggagacagggtttttttgggataacagctttggcttgccccttggaatttgctctgtagaccaggctggccttgaactcacagagatctgcct

SEQ ID NO: 9615 - DNA, 201 bp, Cricetulus griseus
gggaggttaggacttggggagtgctctgtctgcatgtacgccttcatgctaaaacaaggcatcaaatcccattacagatgcttgtgagacaccatgtggttgctgagaattgaactcaggacctctggaagagcagccagtagttaaccactgagccatctctccagcccttttctaattaattttttttcaagcttaatt

SEQ ID NO: 9616 - DNA, 200 bp, Cricetulus griseus
ttttactctttattcctaaaattgtgtagtaagtgtgtaggacattgtgccagctaaaatctcatctcagaatacttttgacttgaaaattgtttcttctctgtctactttgtaaccaaatgcaatcagcgtgcctttcaatttatttagcttattattacttaagttaaacttagggctgtagaatagttaagggcaag

SEQ ID NO: 9617 - DNA, 200 bp, Cricetulus griseus
cagtggttctcaacctttaggttacggcccctttgggtgttgaatgaccctttcacagggacaggggtcacctaagaccataggaaaacacagatatttacattacaattcataacagtagcaaaattacagttatgacatagcaacgagaataattttatggctggaggtcaccacgacatgaggaactgtattaaaag

SEQ ID NO: 9618 - DNA, 199 bp, Cricetulus griseus
  modified_base (191)..(191): a, c, t, g, unknown or other
tttttcttctttcttcttctttttttttttttgttttttcgagacagggtttctctgtgtagccctggctgtcctggaactcactctgtagaccaggctggtctagaactcagagatccacctgcctctgcctcccaagtgctgggattaaaggcgtgcaccaccactgcccctctaaattaaaaaaaaanaaaaaaaa

SEQ ID NO: 9619 - DNA, 199 bp, Cricetulus griseus
ttttgtgattgggttacctcgctcagaatggtttcttctagttccatccattttcctgcaaatttcaagattccattgtttttttctgctgagtagaactccattgtgtaaatgtaccacattttctctatccattcttcggttgaggggcatctaggctgcttccagtttctggctattacaatagtgctgctatgaa

SEQ ID NO: 9620 - DNA, 198 bp, Cricetulus griseus
ggggctggagagatggctcagaggttaagagcgccgactgctcttctagaggtcctgagttcaattcccagcaaccacatggtggctcacaaccatctgttataagatctggtaccctcttctggtgtgcagatatacatggaagcagaatgttgtatacataataaataaataaactcttaaaaaaaaaaaaaaaaa

SEQ ID NO: 9621 - DNA, 198 bp, Cricetulus griseus
agatcgcctggtctcgggaattcctcaaatattttggaactttttttggcattgccaccatctctttagcagctggagcaataaagcaaaagaagccagcctttctctttccctatcgttccactcagctttatcttcacctaccagtatgacctaggcctatggaacacttctaacaaagaatgaaagtgaagctga

SEQ ID NO: 9622 - DNA, 198 bp, Cricetulus griseus
agcctctatcacgtgctggggtcctccgcctcagatggaggacccgagtctgagaaggatgatgaagaagtcctttgaggcagctgtgtcctctgcccaggccaggcccatctgtataccctgcccaatgcccccctgctccccaactccagctaccaccaacttccctgcgcctctgccccgggccaggatgtccag

SEQ ID NO: 9623 - DNA, 196 bp, Cricetulus griseus
ctgtcaagatcaagaagaacaaggataatgtgaagttcaaggttcgctgcagcaggtacctttacactctggttatcacagacaaagagaaggctgagaagttgaaacagtccctgccccctggtttggcagtgaaggagctgaaatgaaccagacttctgcgtttgactattaaaaaccctaaaagtaaaaaaaa

SEQ ID NO: 9624 - DNA, 196 bp, Cricetulus griseus
ccaagagaggacactgtccaacctgctgagctgcctgcagcctgtgcagtgtccttcagttttcccagctttgtgagctgtcactcatgctgggggtgggctctggtgatgcagctgtctttaagtctgttcctgtaagtaacccctaactcatgctcctgtaagttagccaaactaaaattgattagctcatcaa

SEQ ID NO: 9625 - DNA, 196 bp, Cricetulus griseus
atccctccctaagaggctcggcccagaggactccgcccccttgatctgcctgttgcccctgtcacagagccaggaaataaaagccccgtggtcagagatggaaggagtcccctgaggaggagcctgctagaaagaagagaagcaggcatatgaccaaaaacctggacccccagacccccatctcccgagtcaccca

SEQ ID NO: 9626 - DNA, 196 bp, Cricetulus griseus
ttaagaacaaatgttgaaagacctaagagcaatggtgctgaatacttttttaagccacagttttaactgtcttagttaaagcagcattattgattattttaaattcattttttaaaaattaggaatttcaagtatagcaactttgaaactggaatgaatgagtgtttattttctattaataaaaacaaactgtgac

SEQ ID NO: 9627 - DNA, 195 bp, Cricetulus griseus
ctccccaagtctgtggactggagagaaaaaaggttgcgtgactcccgtgaagaatcagggacacagtgtggttcttgttgggctttttagcgcttgtggggccctagaaggacagatgtaattgctgggtatttttggtagtggttttttgtttgtttgttttggttggttggttggttttgttttttgagacag

SEQ ID NO: 9628 - DNA, 195 bp, Cricetulus griseus
  modified_base (130)..(130): a, c, t, g, unknown or other
ctggtattctccttcctctataaggtggtgcaggtcttctccgagtactttaaggagctggaggaggagagcatccgggacaacttcgtcatccatctacgagctgctggacgagctcatggactttggntacccccagaccacggacagcaagatcctgcaggagtacatcactcaggaaggccacaagctgga

SEQ ID NO: 9629 - DNA, 194 bp, Cricetulus griseus
tgcaagatcgctgctctcatcactgctgctgcatgcacggtcattcttgtcattgttgtgcccatctgcacgatgaagtcctgaacccatggacacagcattacatgtggctcatgacttccactgtcttcttcttctggatttcagaagctcactttagtgtggctagtagtttgttgaaatagaagaaaaaa

SEQ ID NO: 9630 - DNA, 194 bp, Cricetulus griseus
gagacagcttggcttccaagagggggtgtccatggaggtgctggagaggaatcccaatggctggtggtactgccagatcctggatgaggtgaagcccttcaagggctgggtgccctccaactaccttgagaagaagaactaacagcactgggtccttccagactcagtgtgctgctctggctgccactgaatga

SEQ ID NO: 9631 - DNA, 194 bp, Cricetulus griseus
ggtggtgttttgtttgttttgtttttttaaattaaccgtacatgttctatgtgtgcatatttgttcaaactttagtcaagttatttcatacagatgtttaatacttaagttattgtgctcttttctgttatgtattctgattttcaaggattactttttgtattctgaaaaaaaataacatttgaacttagcat

SEQ ID NO: 9632 - DNA, 194 bp, Cricetulus griseus
  modified_base (190)..(190): a, c, t, g, unknown or other
ggtgatgcgtgtgtgtgtgtgtgtgtgtgtgtgtgtgtgtgtgtgtgtgtgtgtgtgacaagcaggtggatctctgtgagtttgaggctaacctggtctatagagcgagtgccaggatatgctccaaagctacacagagaaaccctgtctcaaaaccaattaataactttttttttttctttcaacaaanaatt

SEQ ID NO: 9633 - DNA, 194 bp, Cricetulus griseus
gcagcagagttggagtcggctgggtttggagaggctgaagagtgaactgatggcccttggactgaaggtgcgggggcgcaccctgcaggagcgtgcagccaggctcttctctgtcaggggccgtggcaaaggagcacattgacccagctctgtttgccaagccttcaaaagggaagaaagaaaatgaatttcct

SEQ ID NO: 9634 - DNA, 193 bp, Cricetulus griseus
gtggagaagctggtcttccacatgcgcgcacagcacttcatcttcatgtgcccgcgctgcggcaagcagttcaaccacagcagcaacctcaaccgccacatgaacgtgcaccgcggcgtcaagtcgcactcgtgcgctgcggcaagtgcttcacgcagaagtccacgctgcacgaccacctcaacctgcactc

SEQ ID NO: 9635 - DNA, 193 bp, Cricetulus griseus
tctggcctccacaggcacctgtgcacacaaatgctgggactctttagtacagttcctcatgtggtggtgaacccccaaccattaaaattatttttgttgcatttcataactgtaattttgctgttgttatgaatcgtgatgtaagtatctgtgttttccaatggctgtaggtgacccctgtgaaagggtcatt

SEQ ID NO: 9636 - DNA, 193 bp, Cricetulus griseus
aagaacctgaggctgtggtttccgtactcggttcgtggcttcgagaccacccgcaggacttccgggatccccctgcccatcagaacctgggcagtgtccgaatctttctgggctgggcagccccaggaggtcagaagccagggaagcagagaaacttctagaggatttcttggaggaggcagaggaggagcag

SEQ ID NO: 9637 - DNA, 192 bp, Cricetulus griseus
ggtagccaccctcattcaagtggtcgcccctcccccccaccaaactggctgccttgggcctctcctctaccccttagttcacaccttgatttcactccacccctctggcttcaaagctcaggcaaagctgctcagaatccagctggggccagcttccccttctcagctctcacctcagtgtgaatggaggga

SEQ ID NO: 9638 - DNA, 191 bp, Cricetulus griseus
  modified_base (32)..(32): a, c, t, g, unknown or other
  modified_base (168)..(168): a, c, t, g, unknown or other
ttcagaatcaagcgattcctggccaagaaacngaagcaaaatcgtcctattcctcagtggattcggatgaaaaccggtacaaaatcaggtacaactccaagagaagacactggaggagaaccaagctgggcctgtaaggattcatacaatcaatggcaggacttgagngtttgtactgaatcatgatcaat

SEQ ID NO: 9639 - DNA, 190 bp, Cricetulus griseus
cagaggaggcaaagtgggacaggtggatgtagagaagctgcagggaggacggcaagataaagtcccccagttcttcaaagctgatcatcagaagtgaccaacacaagatgctgcagagaaaggaaaggcaggagaagcagagtccagccttgtgggtgtggcctccttcccgcttctcttcttgtcaaga

SEQ ID NO: 9640 - DNA, 190 bp, Cricetulus griseus
aataaagaaaataaaataattacaaaaaaaaagtgtgtgtgtgtgtgtgtgtgtgtgtgtgtgtgtgtgtgtgtgtaaagatgttatttttgaaaaacacatgcttgagttggaaaaaatgcaacatctcaagctttcactgcaacatttcctggaaagacagcaacctcccctccctggggcccggccc

SEQ ID NO: 9641 - DNA, 189 bp, Cricetulus griseus
tccgaacattgccctccctgaggagcagccacattccagctcacagtgtgctcctctgcattaagaggcaaagatatgattcattgacttaatcaagttttgattgtatctttaattatttaaattgcaattgagtagatacattggtgctgctactgtgtgagtgtgtgtatgtgtgtatgtgtgtgt

SEQ ID NO: 9642 - DNA, 189 bp, Cricetulus griseus
gagccaggtagtggtggcacatgcctttaatcccagcactcaggaggcagaggcaggcagatttctgagtttgaggccagcctggtctacagagtgagttccaggacagccagggctacacagagaaaccctgtcttgaaaaacaaaacaaaacaaaacaaaacaaaacaaaaaaacaaaaacaacaaa

SEQ ID NO: 9643 - DNA, 188 bp, Cricetulus griseus
gcaagctggatcaaaggatctttgtggagcaggttcgagactgcatggacaatggttacctgcttccctccaagaagattggctctgctgctttctccagggtctacctggcctatgcaacacgtgaacgcatgaagcacaatcctaagctatcctctgacttgcgaggcaagaatcacattatggtg

SEQ ID NO: 9644 - DNA, 188 bp, Cricetulus griseus
ctttaatcccagtactcaggaggcataagtaggtggatctctgtgagtttgaggccagcctgatctacagagtgagttccaggacagccagggctacacagagaaatcctgtctcgaaaaaccaaaccaaaccaaacaaaacaaaacaaaaacccaaacaacaacaaagaaaacaaacaacaacaaac

SEQ ID NO: 9645 - DNA, 187 bp, Cricetulus griseus
tgcttatttctatgaaagtgatgactccgttgaagcaggagtgaaggctccttactcaggtgagatggacttgctgggagagatcctggatacgctgagcacacacagctccgatcaagggaaagctggacagctgcaaaagcctggatttctcagatccatggatgacattgattacaaacctacg

SEQ ID NO: 9646 - DNA, 187 bp, Cricetulus griseus
tgtaagaagtccttcacccagcgcatatccctcattctgcacgaaagaagccacacgggggagaagccctatgagtgcagcgagtgtgggaaggccttcagtagtggctccgacctcatccgacatcagagaagccattactttggagaaaccgtacgaatgtaaaaaaggatttcagagacaggga

SEQ ID NO: 9647 - DNA, 187 bp, Cricetulus griseus
tggtggtgcacgcctttgatcccagcactggggaggcagaggcagacggatctctgtgagttcgaggccagcctggtctccagagcgagtgccaggataggctccaaaactacacagagaaaccctgtctccaaaaaccaaaaccacaaaaaaaaacaaaacaaaacaaaacaaaaacaaaacaaaa

SEQ ID NO: 9648 - DNA, 187 bp, Cricetulus griseus
aactgtgttactttttggacaagctgtgcatttgtacgtggactgacatgatgtgaatgcccccgtcccatgtagtgtgtggtgctctgtctagagaagagaaatgaatgtttctactttgctggcttacacacaggctgtttacaagtgctagctcgaaagtctgcacttgtctcagctttgcgtt

SEQ ID NO: 9649 - DNA, 186 bp, Cricetulus griseus
ttggttctgtccttacgattgttttgtcgtggcgattgtgtcgttatactctctcttgtttgaaataatgcttgacaattcagaaattaaccaatgatgtgctgtggaatgtgatggttgtcttcatatagtcgcacagttttccctttttatgcaaatatttgtaatcttcatcttgcacacaca

SEQ ID NO: 9650 - DNA, 186 bp, Cricetulus griseus
  modified_base (32)..(32): a, c, t, g, unknown or other
tgccatcccctggctggtggtcctaggtttcntaaaaaagcagggtgtgcaagccagtaagcagctcccctccatggcctctacatcagctcctggctccatgttcctgccctgtgtgagttgctgccctgactgcctgcgattgtgaacagtgatatggaagtgtaagccaaataaaccctttcc

SEQ ID NO: 9651 - DNA, 186 bp, Cricetulus griseus
tcctgcgctctgcccatgtggaaggtgacagctttcatcggcaacagcattgttgtggcccagatggtatgggaggggctgtggatgtcctgtgtggtccagagcactggccagatgcagtgcaaggtgtatgactcgctactagcactgccccaggacctacaagccgtcaagagcctctgtgtc

SEQ ID NO: 9652 - DNA, 186 bp, Cricetulus griseus
ggatcttagtaagagcccaaagactatgaaaaagctgctgccgaagcgcaagcctgaacggaaaccttcagacgagggagtttgctgtgcgcaagagcacagctgctctcgaagaagatgcacagatcctgaaggtcatcgaagcgtactgcacaagtgcgaagacgaggcagaccctgaactcaa

SEQ ID NO: 9653 - DNA, 186 bp, Cricetulus griseus
tggtgttccagaaccaggtggtggagctcatcctacagcagtgcacggacatcttcccgcctcactgactgtggaccctgggtggctgaggccatgaggctggacctcctctgaggctctccacctcccaccccgctgcactgtgacttctgccacccctcgattcgggagggtacgatcgacccc

SEQ ID NO: 9654 - DNA, 185 bp, Cricetulus griseus
  modified_base (5)..(5): a, c, t, g, unknown or other
ttttnttttttttttttttttggtttttcgagacagggtttctctgtggcttttggaggctgtcctggaactagctcttgtagaccaggctggtctcgaactcacagagatccgccagcctctgcctcctgagtgctgggattaaaggcgtgtgccaccacgaagacatttccaaactcacttta

SEQ ID NO: 9655 - DNA, 183 bp, Cricetulus griseus
ttttttttttttttagttttgttttgtttttctttgttttcttcgtagacagggtttctctgtgcattggaggctatcctggaactcgctctgtagaccaggctggcctcgaaatcacacagagatccgcctgcctctgcctcccaagtgctgggattaaaggcgtgagccaccactgcccgg

SEQ ID NO: 9656 - DNA, 183 bp, Cricetulus griseus
ggccagacgggaattccagaccagtgttgtttcccgggacattgacacagctgccaagttcattggtgctttcctcatcctcttcgccatgtgaggctccatggggtcagccagccatccctgctgcttcgactccatgccagtcctggtgctggagtgtgctaagctttaccattaaacaac

SEQ ID NO: 9657 - DNA, 183 bp, Cricetulus griseus
  modified_base (42)..(42): a, c, t, g, unknown or other
gagaaaccctatgaatgtaatcagtgtgggaaagcctttgcncggcacagcactcttcaaaagcatagaaggacacatactggagagaaaccctatgaatgtaatcagtgtggtaaagtcttaccacagtagtcttcaattacataaaaggacacataatggatagataccgtaggaaagtaa

SEQ ID NO: 9658 - DNA, 183 bp, Cricetulus griseus
agacttaggtttcagatttcctccagccttcctgtgtggatgtgagctctgtggatggctattcctactccttggtgtgcctgtagcgtccccagagtagggtcttaggcatagtaccagaacagccttcccagagcctttgttccaccccgacccttcacccctagagaggccgtggccact

SEQ ID NO: 9659 - DNA, 183 bp, Cricetulus griseus
tgttgattcctgacacatggtctggctttgggtttgaagggcaagggtggcttgtgagcacatccagccgtcagaccccgcttctgtcatctctgtatctcccctgcttcccagccccatgggtttggagtctgactgggtgaaggtgccacaggtgtgcttttgaaaccaacagcacctagc

SEQ ID NO: 9660 - DNA, 183 bp, Cricetulus griseus
ggcccagcagagtctggcaccgagaagcaggccacccagaggaattggccaaagggcaagaggcacaagcggaagaaccagggcaggaggtcctggacttgcaggaagatggtgagcaaagctcatgagagttggggagccaggctatggaggggagaactcagtcaagagtcttctgtgtgg

SEQ ID NO: 9661 - DNA, 182 bp, Cricetulus griseus
aagatcatctaccgacggtacgcgggcctctacttctgcatctgtgtggacgtcaatgacaacaatctggcctacctcgaggccatccataacttcgtggaagtgttaaatgagtatttccacaatgtctgtgaactggacctggtgttcaacttctacaaggtttacacggtggtagatga

SEQ ID NO: 9662 - DNA, 181 bp, Cricetulus griseus
cttggccaccatagagttggggtgctctgggtgcggagtttgggtttgcggggtggaatatgacgccgttgccaaaagcttgcggtttttgatctggattacacgctctggcctttctgggttgatacacacgtggaccctccgttccacaagagcagcgatgggactatacgggataggc

SEQ ID NO: 9663 - DNA, 180 bp, Cricetulus griseus
gcatgacacagcattcataggtccaagcactttttgtttctggaccagtattttaacagcttcgttgacgaatatattgtactttggattgccctggtcttctctttctttgatttgattcgttactgtgtcagtgttttgcaatcagattgcctctcacctgcatatacatgtcttcag

SEQ ID NO: 9664 - DNA, 180 bp, Cricetulus griseus
gccaggacatagcagaggatcgccgaagcctcctgcacctgagttctagactaaacggggctctgcgccaggagcagaattttgctgatcgcttcctccctgatgacgaggccgcccaagcactgggcaagacctgctgggacgcgctggtcagccccctggtgcagaacatcacctctc

SEQ ID NO: 9665 - DNA, 179 bp, Cricetulus griseus
agctagctggctgtatatctttccctaaaccagtccattgttaccacatagtggttttacttctagttttaatatttcagtactaagtaacattaaaatgtttactgtgtgcaagggtgtttgaagtgcttaggactacaggtggttagtactattgtgtcgtgtatcactgaaactga

SEQ ID NO: 9666 - DNA, 179 bp, Cricetulus griseus
  modified_base (29)..(29): a, c, t, g, unknown or other
ccaactgagctatatcccacttttttttnttttttttcgtggttccgagacagggtttctctgtgtagctttggagcatatcctggaactcactctatagaccaggctaaccctcaaactcacagagatccacctgcctctgcctcccaagtgctaggattaaaggcatgtgccaccac

SEQ ID NO: 9667 - DNA, 178 bp, Cricetulus griseus
ccctttcacaggggtcacctaaaaccatcagaaaacacagatacttacattacgattcataacagcagcaaaattacagttatgaaatagcaacaaaaataattttatggttgggggtcaccacaacatgaggaactgtattaaagggtcacagcattaggaaggtttagaaccactg

SEQ ID NO: 9668 - DNA, 176 bp, Cricetulus griseus
gcaggaatggctgccccgtccatgaaggaaaggcaggtgtgctggggcgcgcgagacctgtactggcggtgtctcgacgacaacgcggaggacgcggctcggtgccggcagctgaggagctcgttcgaggccagctgcccccagcagtggataaaatattttgacaaaagaagaga

SEQ ID NO: 9669 - DNA, 175 bp, Cricetulus griseus
tgggcaatgtggatgaatgtggtaaaaagttagtagaggttgtccagaaggtgtagagacgaagcaattgcagcttgcagagctggggcccccttctctgtaattggaaacacaatcagccgcataactcagcagaatggtttgcaagtctgtccacattttgtgggacatggga

SEQ ID NO: 9670 - DNA, 175 bp, Cricetulus griseus
ggctgggctcagtcctgaggaagaagagaccctcagctggggtcacgcccctgtctctgaggggacacagtggccccggggctcctgatccagcctggcaggggctgcactcatctcccaggactcagccttctccctgaacggttccagatctatctcaggagggcggagagaa

SEQ ID NO: 9671 - DNA, 175 bp, Cricetulus griseus
gcgcccctggcggtggtggtgcgcgagggactgcccagcgcccccactcgggtcacggccacgccgctgagcagctccgctgtgctggtggcctgggagaggcctgagctgcacagcgagcaaatcattggattctcccttcactaccaaaaggcaaggggagtggacaacgtgg

SEQ ID NO: 9672 - DNA, 175 bp, Cricetulus griseus
ctgtaatatagtttctacatcgacttaagcctaggagcagagggcagcccattgtcaacaggctcccatttcaacccagctcctatgtactaaggcagccagtgtaacccagggcttaaaaacagatcgtctaaacatatcactaagaatacttttatagagtgaatgagaggca

SEQ ID NO: 9673 - DNA, 174 bp, Cricetulus griseus
gatggttcagcagttaagagcatcggctacttttccagaggacccaggtccaactcccagcacccacatggcaactcacaactgtctgtaactccagttccactctctctctctcacacacacacacacacacacacacacacacacacacacacacaaacaaacaaacaaaca

SEQ ID NO: 9674 - DNA, 174 bp, Cricetulus griseus
ttctttttctttttttttgtttttgtttgtttgttttttgttttagacacagagtctcttctctgtagcttttgctgtcgtggaactcactgtgtagaccaggctggcttcgaactcagagaatccgcctgcctctacctcctaagtgctgggattaagacgtatgtgccacca

SEQ ID NO: 9675 - DNA, 173 bp, Cricetulus griseus
tttttaactttttttttggttttggtttttttttttttgagacaggatttctctgtgtagccctgactgtcctggaacttgctctttagaccaggctagccttgaactcagagatccacccgcctctgcctcctgagtgctaggattaaaggtgtgtgcactaccactgccca

SEQ ID NO: 9676 - DNA, 173 bp, Cricetulus griseus
tttttcttttcttttctttctttttttttttttttccagacagggtttctctgtggttttggaggctgtcctggaactcactcttgtagaccaggctggtcttgaactcagagatctgcctgcctctgcctcccaagtgctgggattaaaggcgtgtgacaccaatgcccggc

SEQ ID NO: 9677 - DNA, 173 bp, Cricetulus griseus
  modified_base (24)..(24): a, c, t, g, unknown or other
ggtcctggaggcatccagatgganagggggcaacgcgctggtggtactgcgcagcccgctctggccaggcctcaccttctaccacgctccccgcaccaagaactatggctacatttatgtgggcacgggtgagaacatggaattgccttcatgctgtaggaggggcagtctgg

SEQ ID NO: 9678 - DNA, 173 bp, Cricetulus griseus
ttctagaacagtagttctcaaccttcctaatgctttgaccctttaatacagttcctcatgttgtggtgaaccccaaccatcaagtgactttcattgtgacttcataactgtaattttgctgctgctatgaatcatgaggtaattatctgctatgcaggatatctgataactga

SEQ ID NO: 9679 - DNA, 173 bp, Cricetulus griseus
gagtttaagcgaaagcacaagaaggacatcagcgagaacagagcacaggcaaggagaacaagatccactatcaccaacgacaagggccgcttgagcaaggaggatattgaacgcatggtccaggaagctgagatatatatatatatatatatatatatggatattcaatatat

SEQ ID NO: 9680 - DNA, 173 bp, Cricetulus griseus
tttttgtttgtttgtttggttggttggttgttttgttttttcgagacagggtttctctgtgtagctttggctatcctggaactcactttgtagaccaggctggtctcaaactcagagatccacctgcctctgcctcccaagtgctgggattaaaggagtgcgccaccaccgcc

SEQ ID NO: 9681 - DNA, 172 bp, Cricetulus griseus
  modified_base (166)..(166): a, c, t, g, unknown or other
ccagttttgtgcattaaccctttttgtaaagatgatttctaatactggtttcaaatgcaaggcaataattatgttgcatctgtgaacattggcaggttcgtgtaaatgaagtgtgaagcttctcaaaacagcaataactgaaaaattaattgagatattaaaaaanaaaaaa

SEQ ID NO: 9682 - DNA, 172 bp, Cricetulus griseus
gggggcgtggctcagtggtagagcccctgcctagaatccccccagtgaggggctggggggcgtggctcagtggtagaccccctgcctagaatcccccaatgaggggccggggcgtggctcagtggtggagcccctgcctagaatcccccagtgaggggctgggggtgtggct

SEQ ID NO: 9683 - DNA, 172 bp, Cricetulus griseus
tccgcctcaaaggaaagtggatcagatcccagactggagcaagattaccattcgaagtatcgatcaggatgggagccacatagaggggcagacactgtctccactaaatcctcggacagtgatgtaagtgacgcatccgcgctttcaaggactagtagtacctctcgtttca

SEQ ID NO: 9684 - DNA, 171 bp, Cricetulus griseus
  modified_base (159)..(159): a, c, t, g, unknown or other
tgtgccttgtatggatataacttctccacgtcccccaaactggctgccagtcctgagaaaattgtttcttcccaaggaagtttcttggggtcctcaccaagtgggaccatgactgatagaaagaaagaaaggaagaaagaaagaaagaaagaaagaaanaaaaaaaaaaag

SEQ ID NO: 9685 - DNA, 171 bp, Cricetulus griseus
caggctggagagatggctcagaggttaagagcactggctgctcttccagaggtcctgagttcaattcccagcaaccacatggtggctcacaaccatctataatgagatctggtgccctcttctggcctgcaggcatacatgcaggcagaatactgtatacataataaataa

SEQ ID NO: 9686 - DNA, 170 bp, Cricetulus griseus
acgcgggcctgtcgaccctgtcgggctctggccatggaactcagcgccgactacctccgcgagaagctgcagcgggacctggaggcagaccatgtggtggtggaggacacgactctcaaccgttgcgcgaccagcttccgagtcctggtggtgtcggctaagttcgaggg

SEQ ID NO: 9687 - DNA, 169 bp, Cricetulus griseus
ctcctgggcctaccccacaccctgttcgaagctcagactcctatgctgtgattgacctcaagaagaccgtggccatgtccaacctgcagagggctttgccccgagatgatggcactgtcaggaagactagacacaacagtacggacctgcctctgtagagctggtcctc

SEQ ID NO: 9688 - DNA, 169 bp, Cricetulus griseus
cagccctgacaccactacctggaagggccagaatggtcgcaccttcaaagtgggcaacttcccggcttcagcagtgacactaccagacttggggcttcgccagccacctgtccagcccatggaggctcccctgcccggggagacagattccgaggaagcatagatgggg

SEQ ID NO: 9689 - DNA, 168 bp, Cricetulus griseus
ccaaagagggagagctcgtcccaaccgtacagggctagttcgtaacagccatgctgggagagctaataatgaccacttagggagacttcatcgtggccgtgtaaggagagctcataacaaccgtacatggagaagctagctaattgcactgaaccatacttaggagca

SEQ ID NO: 9690 - DNA, 168 bp, Cricetulus griseus
gtattcaatagtgtatctcatagatacagacaaggcaagcagaaatgagctgtttaatagtgtttaatgttgatgtgcagagaaaaagtgtattacttaaagatactataccatatgttttgtatatcattaaatctttaaaagaaattaaatttattcttgtttaca

SEQ ID NO: 9691 - DNA, 167 bp, Cricetulus griseus
cagtggttctcaaccttcctaatgctgcaaccatttaatacaattcctcatgttgtgacaaccccaaccataaaattatttcattgctacttcataactgtcattttgctactgttatgaaacataatgtaaatatctgatatgcaggatatctgatatgcaacccc

SEQ ID NO: 9692 - DNA, 166 bp, Cricetulus griseus
actttttttttttttttggtttttcgagacagggtttctctgtgtagctttggagcctatcctggcactcgctccggagaccaggctggccttgaactcacagagatccacctgcctctgcctcccgagtgctgggattaaaggcgtgcgccaccaacgcccggct

SEQ ID NO: 9693 - DNA, 166 bp, Cricetulus griseus
ttttatttatatgattattattatttggaaccgctagtggcttagctctagaaccctaattttggttttagtttggttggttttttataacatattaacttttattatggtcatgtgaccttttcgtgtacaaagtttttgaacgaatttcattcctgtctaaatc

SEQ ID NO: 9694 - DNA, 166 bp, Cricetulus griseus
ccctgctgacatcaccctgacctggcagagggaggaggaagaacagactcaggacatggagctggtggagaccagaccttctggggatggaaccttccagaagtgggcagctgtggtggtgccttctggggaggagcagaaatacacatgccatgtgcaccatgag

SEQ ID NO: 9695 - DNA, 165 bp, Cricetulus griseus
gagcggcctcccgaaaagccacggaagcatgacagtggtgctgctgacctggagcgggtcactgactatgcggaggagaaggagatccagagttcgaatctggagacggctatgtccgtcattggagacagacggtccagggagcaaaaggcaaaacaggagcgg

SEQ ID NO: 9696 - DNA, 165 bp, Cricetulus griseus
gaagagcctgggtccctctcggaggactcctgggactccccggcccccagggaccagcagaggggccggacacacccccagcagggaggcagggcaggtgtaggccggacatcccgaggctggggaggatggtgctggggagcagcttcgaggaggaactggggg

SEQ ID NO: 9697 - DNA, 164 bp, Cricetulus griseus
ttttgtttttgtttttttggtttttggtttttggagacagggtttctctgtgagtttttggagcctatcctggcactcgctctggagaccaggctggcctcgaactcacagagatccgtctgcctctgcctccccagtgctgggatcaaaggcgtgcaccacca

SEQ ID NO: 9698 - DNA, 163 bp, Cricetulus griseus
ccttttctcatcacagtactcttcaaatgcataaaagaacacatactggagagaaaccctatgagtgtaatcagtgtggaaagtcgtttacaaatcaaagtattcttcaaaaacataaaagaacacatactggagagaaaccctatgaatgtaatcagtgtgg

SEQ ID NO: 9699 - DNA, 163 bp, Cricetulus griseus
tttgttttgttttgttttgtttttttaaacaggctttctctgtgctttgaagcctgtcctggaactcactctgcagaccaggctggtctagaactcatagagatctggctgcctctgcctcccaagtgctgggattgaaggtgtgtgccaccactgcctggct

SEQ ID NO: 9700 - DNA, 162 bp, Cricetulus griseus
gtttttgtgttgttgttaatttggtttggttttggttattcgagacaggtatttctctgtgtacgccctggctgtcctggaactacactctgtagatccaggctggcctggaactcacagagacctgcctgcctctgcctcctgagtactagggattaaagg

SEQ ID NO: 9701 - DNA, 161 bp, Cricetulus griseus
cttttttttttttgttttgttttgttttgttttgttttgttttttttgagacagggtatctctgtatagcgctggctgtcctagcacctagctctgtagaccaggctggctttgaactcacagagatccgactgcctctgcctcctgagcactgggactaa

SEQ ID NO: 9702 - DNA, 160 bp, Cricetulus griseus
tttttttttttttggttttttgagacagggtttctctgtggctttggaggctgtcctggaactagctcttgtagaccaggctggtctcaaattcaaagatctgcctgtctctacctcccgagtgctgggataaaaggggtatgctatcatggcccggctg

SEQ ID NO: 9703 - DNA, 159 bp, Cricetulus griseus
ctttttgtgtgtttgttttgtttttttcagatagggtttctgtgttagacctcctggaacaggagttatagttgtgagctaacatgtgggtgctgggaattgaaccttggtccgaactcagggcctcacacatgccaggcacacattctaccactgagc

SEQ ID NO: 9704 - DNA, 158 bp, Cricetulus griseus
gggcatggatttacattacaaaggtgtccacagtgtattagtgacattcttccattgacatttagagtgaaatattttaagccccccaaaaaagattttttttaagggcatttaaatattgttggcattcttgtggttcctttaaatgcctttgcctc

SEQ ID NO: 9705 - DNA, 157 bp, Cricetulus griseus
aatcactgtgggtaaaaaccttttgctatgtaaaagtaatcttcaaatacatgaaagaagtcatacttggagagaagaccttatgagtgtaatcagtgtggtaaagccttttgctcagcacagttatctttcaaaggcataaaagaacacatactgg

SEQ ID NO: 9706 - DNA, 156 bp, Cricetulus griseus
tttttgtttgtttttttcagacagggtttctctgtggctttggaggctgtcctggaactagcacttgtagaccaggctggtctcaaactcaacagagatctgcctgcctctacctcccgagtgctgggattaaaggagtacggcatcaatgcccag

SEQ ID NO: 9707 - DNA, 155 bp, Cricetulus griseus
aaagaaaataattgtaaaaaaaaaaaaaaagttattaattaaatacagaatagttacatttttgtttttggaactggagctagagacggttgtgaaagcaaagaaaagacaaaaacaaagaccaaaaaaaaaattttattaagttaacttttttt

SEQ ID NO: 9708 - DNA, 155 bp, Cricetulus griseus
tttttattttttgttttttcgagacagggtttccctgtgtggctttggagcctatcctggcactggctctggagaccaggctggcctcgaactcacagatctgcctgcctctgcctcctgagtgctgggattaaaggtgtgcgccaccaacgccc

SEQ ID NO: 9709 - DNA, 155 bp, Cricetulus griseus
gccgggtcagtgatagcacacgcctttaatcccagcacgcgggaggcagaggcaggaggatctcttgaatttgaggccagcctggtctacaagagcgacttccaggacagccaaggctacacagaaaaaccctgttggaaacaacaaaaagaaaa

SEQ ID NO: 9710 - DNA, 155 bp, Cricetulus griseus
gagatgaaggtggcgcttggtcgtctgacactgctgcgttttccgcgtcctgctggatgacaaggagccccgcagggcagccggagctgatcctgcgttgcagagggtgggctgtggctgcgggtggagcccctgagctcgggtgcacagtgacc

SEQ ID NO: 9711 - DNA, 154 bp, Cricetulus griseus
ttggaactgcagatagcgaaagcgtggctttagcatggaagtgggacagtatatatttgtaaattgtccctcaatttccttcctggagtggcatcccttcactctgacctctgtctccagaggaagagtttttctcaattcatatccgagcagc

SEQ ID NO: 9712 - DNA, 153 bp, Cricetulus griseus
aaaattaagctgggtgtggtggtgcatgcctttaatcccagcactcgggaggcagaggcaggtagatctcggagtttgaggccagcctggtctacaaagtgagttccaggacagccagtgctatacagagaagccctgtcttgaaaaaaaaaa

SEQ ID NO: 9713 - DNA, 153 bp, Cricetulus griseus
gagctactgagggtctaagtccgggcagcccaagagtgtggtaggtaacggtcgcgcaaagggtcatttcgtcgctgggaagggacggccctcgcccgcggtgatggtggttagcaagatgaacaaagatgcacagatgagagcagcgattaa

SEQ ID NO: 9714 - DNA, 152 bp, Cricetulus griseus
gcttactgaatgagggtgttgaaagtatgtagatcatttttccacgtgtctgatctctgactcaagtggtaggcacaaacagaaagcagaaattttcagggcacatagctaggacatggtactgcttgctgccagaatcagatgtgttagaa

SEQ ID NO: 9715 - DNA, 152 bp, Cricetulus griseus
cagcaaggaggatctgcgggaggtgctgagtgagtatccacaggcccaggctgtcatggaggagaagggccgtgagatcttactcaaaatgaaataaaattggatgtgaatgctgaagcagctgagattgctctccaggaggccacagagtc

SEQ ID NO: 9716 - DNA, 150 bp, Cricetulus griseus
tctgaagaaaaaaaaagcctttggagagatggctcagtggttaagagcaccgactactcttccagaggacccaagtccaactcccagaacccacatggcaactcacaactgtctgtaactccagttccagggaatctaacaccctcacac

SEQ ID NO: 9717 - DNA, 150 bp, Cricetulus griseus
cttgactcgagacgttgatgtggttagaccaaacgtcgtgaaacaccctctgacccaggaagtaaaagagtgtggtggcatcgtcccggttcccctggaagaaaagctgtattcaacaaagaggagaaagaagtaagaagatctcccaga

SEQ ID NO: 9718 - DNA, 150 bp, Cricetulus griseus
ccttccaccagcaccaccaagtcgccccaagtccatcgatgacagcgagatggagagccccgttgatgacgtgttctatcctgggacaggccgctctccagcagctggcagcagccagtctagcggatggcccaacgacgtggatgcagg

SEQ ID NO: 9719 - DNA, 150 bp, Cricetulus griseus
aaataaataaatctaaaaaaaaaaaaaaaaagcgcacacctttaatcccagcactctgaaggcagagacaagcagatctccgagttcaaggccagcatggtctatagagcgaaattccaggacagccaaggcttcacagagaaaccctgt

SEQ ID NO: 9720 - DNA, 149 bp, Cricetulus griseus
ctgctgctgttgctggccaccagccaccaggctacagggtcaattgtggccagctgcgctgtcagtgcctgaagaccctaccaaggattgattttgaggacttccagagcttaaataaaaaacttgttaaaacaaaaaaaaaaaaaaaa

SEQ ID NO: 9721 - DNA, 120 bp, Cricetulus griseus
ttcaattcccagcaaccacatggtggctcacaaccatccgttatgagatctggtgccctcttctggtgtgcagatatacatggaagcagaatgttgtatatataataaataaataaataa

SEQ ID NO: 9722 - DNA, 149 bp, Cricetulus griseus
tagggacctggagtggcctggtcctaccctctggcctatggactcctcctccggccaccagtgttgcccctctccctttttaaacaaatacccttgtttgtaatccttagatgcttgagaataaacccttcccttttcttctgaaaaaa

SEQ ID NO: 9723 - DNA, 149 bp, Cricetulus griseus
cgatgaggtcaccaccaaagctagagagagagagagagagagagagagagagagagagagagagtctgtagaccagggctggctttgaactcacagagatccgactgcctctgcctcctgagcactgggactaaaggtgtgtgccacca

SEQ ID NO: 9724 - DNA, 148 bp, Cricetulus griseus
attgttttttttgagacagggtttctctatatagttctggctgtcctggaactccctctgtagaccaggctggtctcaaactcagggaacctcctgcctctgtctcccaagtgctgggattaaaagcgtgtgccaccaccacccagct

SEQ ID NO: 9725 - DNA, 145 bp, Cricetulus griseus
taaaataatgttatttaaaaaataaaaaaaaaagttaattaattacagacagttgtgagtcaccatgtggttgctgggaactgaacctgcgtcttctgggagagcagctagtgctcttaaccactgagccatctctccagcccca

SEQ ID NO: 9726 - DNA, 145 bp, Cricetulus griseus
ttttgttttgttttgttttgtttttcgagacagggtttctctgtgtagctttggagcctatcctggcactcggctctggagaccaggctggcctcaaactcacagagacccacctgcctctgcctcccaggtgctgggattaaag

SEQ ID NO: 9727 - DNA, 144 bp, Cricetulus griseus
agcgccatcttccttgggactcctgcgccatgagagcgaagtggaggaagaagcgtatgcgcaggctgaagcgcaagagaagaaagatgaggcagaggtccaagtaaacctgcgggtgcacccagcgaggccgaggagcggaag

SEQ ID NO: 9728 - DNA, 144 bp, Cricetulus griseus
tccgtcagccttctacctgctcccagagcggccagccaccctcatcctttatgaggaccttgtgcacatcctcctaggctctccaggtgcctgtataaacgtggctgtacatagaaagatctattgtgggagagcaggaggggc

SEQ ID NO: 9729 - DNA, 144 bp, Cricetulus griseus
ttttttttttgtttttgtttttgttttttccagacagtttctctatgtgaaacagccctggctgtcctggaactcactttgtagaccaggctggccttgaactcacagagatccacctgcctctgcctcccgaatgctgagatt

SEQ ID NO: 9730 - DNA, 144 bp, Cricetulus griseus
tgagcaagaaatggggcttccgccctaattccagttggaggcctcctctgcccctgctgtactggcttgccttcctgctggaaactgtgagcttcctgctgcgtccaatctacaattaccagcctccctttaaccgccatttgg

SEQ ID NO: 9731 - DNA, 143 bp, Cricetulus griseus
gctacactataaatgctgggccctctctgggactcctcttggatatcctgttgttgccctgtgtcctggagatcttgcagctttgggtctgcagaactgactccttcacatcctccagcagatcatagatggggtgatgttgg

SEQ ID NO: 9732 - DNA, 143 bp, Cricetulus griseus
atagctgcccagaagtcatccttaggaggtagcaggcatcagataagcaagcacttcccatctcctgcacctctcatggagaagatgggccaaacacagctaggacatttagttttgaaaccaaagcagccatggcatctcac

SEQ ID NO: 9733 - DNA, 143 bp, Cricetulus griseus
aggagcctggtggcggtggagcacgccattaatcccagcactgggaagacagaagcaggtagatctccctgaattacagggccagactagtctacagagtgagttcaagaagagcccatccttcaataaaaaaaaaaaagtta

SEQ ID NO: 9734 - DNA, 143 bp, Cricetulus griseus
acagacttcatgtgttggaaagacatgtttttttttttttacattaacttttgagtttgaggcaagcctggtctacagagtgagttccaggacagccaggattgttacatagagaaaccctgtctcaaaaaaaaaaaaaaaaa

SEQ ID NO: 9735 - DNA, 142 bp, Cricetulus griseus
ttcctgctcactaacctggtgagggtagacagacgattctcctggagagtgaacttggaggctttagctcagcacttggacaagattctgaccttccacaacaatgtgaatcctacttgggcgaactctctttcttcattgg

SEQ ID NO: 9736 - DNA, 141 bp, Cricetulus griseus
ttcgagtcagggtttctctgtgcagctttggagcctatcctggcactctctctgtagaccagggtggcctcgaactcagagacccgcctgcccctgcctcctgagtgctaggattaaaggcgtgctccaccaatgcccggc

SEQ ID NO: 9737 - DNA, 141 bp, Cricetulus griseus
ttgttcacattcagaatgttgcagaacacaagagcatgaacatttagaaaagccaagcctcacttggattctggaacagacagctagtttagtgaaacagctgggagtgtcagtagacgtattacagcacctgagacaact

SEQ ID NO: 9738 - DNA, 140 bp, Cricetulus griseus
aagagttcacacacacacacacacacacacacacacacacacaactcagtagacctaggctggcctcagactcccagattatctgcctgcctctacctcctgagtgctgggattagaggcgtgtgccaccatcacccagc

SEQ ID NO: 9739 - DNA, 140 bp, Cricetulus griseus
tttttcaagacagggtttctctgtgtagctttggagcctatcctggaactagctctggagaccaggctggccttgaactcacagagatccgactgcctctgcctcctgagcactgggacctaaaggtcgtgtgccaccat

SEQ ID NO: 9740 - DNA, 139 bp, Cricetulus griseus
ccaagcagtggtggtactggcctttaatcccagcactagggaggcagaggcaggcaaatctcttgtgagttcaagaccagcctgatctccagagcgagtgccaggataggctccaaagctacacagagaaaccctgtct

SEQ ID NO: 9741 - DNA, 139 bp, Cricetulus griseus
accttagcgacaatactcgtgggggatcctggtatgagggtgctgtgtgaggccctccggcatccaggctgtaacattcagagactgtaggttggggcgctgtggactttcccatcaatgctgtttcgacatactcctc

SEQ ID NO: 9742 - DNA, 139 bp, Cricetulus griseus
  modified_base (112)..(112): a, c, t, g, unknown or other
  modified_base (133)..(133): a, c, t, g, unknown or other
gcatgcctttaatcccagcatttgggaggcagaggaaggacaatttcagtgagtttgaagacagtatggtctacaaagcaaattccaggacaggcagaaaaacaaaaaaaanaaaaaaaaaaacaaaaaaaanaaaaaa

SEQ ID NO: 9743 - DNA, 138 bp, Cricetulus griseus
ttttgggggggggggttcgagacagggtttctctgtggctttggaggctgtcctggaactagctcttgtagaccatgctggtctcaaactcacagagatctgcctgcctctgcctccctagtgctggtatcaaaggcg

SEQ ID NO: 9744 - DNA, 138 bp, Cricetulus griseus
tgcatagagtggctgctgaagtacctggagttggggaagtcgactctgctgctctcagacccccaaacggcatatgtgacccatcatcctggatataaaggtgatgtcaccctgaggtgctggggccatgggcttcta

SEQ ID NO: 9745 - DNA, 137 bp, Cricetulus griseus
taaaccaggtgctggtggtgcacacctttaatcccagcactggggaggcagaggcaggcagatctctgagttaaaggccagtctggtctacagagcaaattccaggaccagctagggctacacagagaaaccttgtc

SEQ ID NO: 9746 - DNA, 136 bp, Cricetulus griseus
ggcagaggcaggcagatctctgtgagttccaggccaacttggtgtagagagttctgggctagcaaggactacacagtgagaccctgtctcaaaacaaaacaaataaatagttttggtttaaaagaaaaaaaaaaaa

SEQ ID NO: 9747 - DNA, 136 bp, Cricetulus griseus
tggctggcaaggcacacaggctgagtgcggaggagcgggaccagctgctgccaaatctgagggctgtggggtggaatgaactgggaaggccgggatgccatcttcaaacagttccattttaaagacttcaacaggg

SEQ ID NO: 9748 - DNA, 136 bp, Cricetulus griseus
gagcctgagcctgagcctgagccccagtgggagtcccagccagaaaccaagcctgagccagagccagagcctgagcctgagccccaggggagtcccagccagaaaccgagccagagcctgagcctgagccggagcc

SEQ ID NO: 9749 - DNA, 136 bp, Cricetulus griseus
tgctgtagagctgtttctttctgtggaaaatagtggatccatcttgctttttgccttatataaaagcctacagttgtaaaagtgtgagaaactgtggcttctcaataaataattattcaaatgtcaaaaaaaaaaa

SEQ ID NO: 9750 - DNA, 135 bp, Cricetulus griseus
tgtcagtggggcaggtggggtgcctatgggaggcagggtgggccaggttccaaggaacatacagctggcatcatcccttgtgtagcaaggatgctcccgcccgtagtttagggccaggtgccagcttgatccact

SEQ ID NO: 9751 - DNA, 134 bp, Cricetulus griseus
gaagaaggcactagatctcattatagatggttgtgagccaccatgtggttgctgggaattgaactcaggatggtctggaagaacagtcagtgctctcaaatctacctgagccatctctccagcccccagccctg

SEQ ID NO: 9752 - DNA, 133 bp, Cricetulus griseus
  modified_base (45)..(45): a, c, t, g, unknown or other
agcacgctgtccaagtgctgccatgccatggtggcgctcatctancccttcagctggcagcacacctacatcccccgtgttgccgcctgccatgattgacatagtgtgctcacccacgccctttctcatcggg

SEQ ID NO: 9753 - DNA, 132 bp, Cricetulus griseus
cctgagcgcaagtactccgtctggattggcggctccatcctggcctcgctctccaccttccagcagatgtggaatcagcaagcaggagtacgacgagtcaggcccctcatcgtgcaccgcaaatgcttctag

SEQ ID NO: 9754 - DNA, 132 bp, Cricetulus griseus
  modified_base (123)..(123): a, c, t, g, unknown or other
ttacagacagttgtgagtcaccatgtggttgctgggaactgaacctgcgtcttctgggagagcagctagtgctcttaaccactgagccatctctccagcccttttcctagacttaaaaaaaanaaaaaaaaa

SEQ ID NO: 9755 - DNA, 132 bp, Cricetulus griseus
tgcctgcacaccagaagagggcaccagatctcattacggatggttgtgggccaccatgtggttgctgggagttgaacttaggacctctggaggagcagccactgctcttagcctctgcgccatccctctagc

SEQ ID NO: 9756 - DNA, 131 bp, Cricetulus griseus
gtggcaccatctatgagtatgggccctcaccattgatggggaagaatacattccttttaagcagtatgcaggaaaatatgtcctctttgtcaacgtagccagttactgaggtctaacagaccaataccttg

SEQ ID NO: 9757 - DNA, 129 bp, Cricetulus griseus
gatctggatgtagaaactcagctcctccagcactatgtctgcctgtgtgtcaccatgcttttacccatgctgataatggactaaacctttgaaacagtaagtgagacccaattaaatgttttcctttat

SEQ ID NO: 9758 - DNA, 128 bp, Cricetulus griseus
ggaactgtgtgttcatatgtctgtgcgctcagagtggagagattctgctgtgctgtgtttgctgcagagcccaattcttggcgcgtggaaggcagctgtgtgaagaggtttaccacagaggaatgggt

SEQ ID NO: 9759 - DNA, 127 bp, Cricetulus griseus
cggggctggagagatggctcagaggttaagagcactgactgctcttccagaggtcctgagttcaattcccagcaaccacatggtggctcacaacgcatctataatgagatcaggtgccctcttctgg

SEQ ID NO: 9760 - DNA, 126 bp, Cricetulus griseus
  modified_base (46)..(46): a, c, t, g, unknown or other
atatttatatatgtatacttttagtttttcaagacagggtttctcngtagcttcagagcctgccctggaactcactctggagaccaggctggtctcaaacacagaaatccgcctgcctctgcctcc

SEQ ID NO: 9761 - DNA, 126 bp, Cricetulus griseus
gggagcagaggcaggagggatctctgtgagttggaggccagcctggtcttcagagcgagttctagggcagccagggctacacagagacaccctgtcttgagaaagccaaacacaaaacaaaacaaa

SEQ ID NO: 9762 - DNA, 125 bp, Cricetulus griseus
ggcggtggtggagcacacctttaatcccagcacttcagaggtaaaggcagacggacctctgtgagtttgaggccatcttggtctacagagcgagttccaggacagccagagctacacagagaaac

SEQ ID NO: 9763 - DNA, 124 bp, Cricetulus griseus
tcacagctcactcaacatcagcgaactcacactggagaaaccttatgaatgtaaggaatgtgggaaggccttagtcatggctctcaacttactctacatcagagaatccatacaggtgagaagc

SEQ ID NO: 9764 - DNA, 124 bp, Cricetulus griseus
gcaactctctggaggatgttgagctcaccccagggctgtcaagagagatcattcgtttcctcttggagcagcctgtaatgaaagactcctagctgttatttctgcaaaaaaaaaaaaaaaaaaa

SEQ ID NO: 9765 - DNA, 122 bp, Cricetulus griseus
ggtggcacacaccttttaaattccagcattcaggaggcagaggcaggcagatctctgtgagttggatgacagcatgctcttacagcagttccaggacagccaggactacacagagaaaccct

SEQ ID NO: 9766 - DNA, 122 bp, Cricetulus griseus
catctgcctgccgtcccgcccagctgtaccactgggtggagatgcggaccaagatgcgtatcatggggtttccggggcacagccatcaggccgctgaacgaggaggcagcggcagagctggg

SEQ ID NO: 9767 - DNA, 122 bp, Cricetulus griseus
tcttataaaggaaaacatttaattggggtggcttacagtttcagaggtttagtttattgttatcatggcgggaagcaaggcagtgtgcaggcagacatggtgctggagaaggagctgagagt

SEQ ID NO: 9768 - DNA, 121 bp, Cricetulus griseus
gccctgggctgtcctggaagtcactctgtagaccaggaccaaattgaatttcagagattccacctgcctcttcctcccaagtgctgggattttttttttttttttgttgttgatagttgtt

SEQ ID NO: 9769 - DNA, 121 bp, Cricetulus griseus
gcagcacctcgttcacggacagccgggtcaggcctcatcgagcagggactcttcgacccgagcctggaggacatcgcgagggccgagagcatcttcgaggccacagcccggaaccgcatcg

SEQ ID NO: 9770 - DNA, 121 bp, Cricetulus griseus
agagagacagacagctgagcaatgtagccctggctggcccggaactctttacataaacaaggttggccttaaactcacagagccacctgcctctgccttctaaatgctaggattaaaggca

SEQ ID NO: 9771 - DNA, 121 bp, Cricetulus griseus
aagagtgtggcaaatgttttttctcatcttcatcccttagaaaacatcaaaggaatcactgtgaggacactccttacaagtgtgcagagtgtggcaggtgttacagttcatgctggagaga

SEQ ID NO: 9772 - RNA, 19 nt, Artificial Sequence
  Description of Artificial Sequence: Synthetic oligonucleotide
auuacucugaauuacaacc

SEQ ID NO: 9773 - RNA, 19 nt, Artificial Sequence
  Description of Artificial Sequence: Synthetic oligonucleotide
aaucgaaucguuuucacuc

SEQ ID NO: 9774 - RNA, 19 nt, Artificial Sequence
  Description of Artificial Sequence: Synthetic oligonucleotide
aaaacgaucaugcaauauc

SEQ ID NO: 9775 - RNA, 19 nt, Artificial Sequence
  Description of Artificial Sequence: Synthetic oligonucleotide
agaaacauaguacaucacc

SEQ ID NO: 9776 - RNA, 19 nt, Artificial Sequence
  Description of Artificial Sequence: Synthetic oligonucleotide
gacgauaaaauacaugggg

SEQ ID NO: 9777 - RNA, 19 nt, Artificial Sequence
  Description of Artificial Sequence: Synthetic oligonucleotide
auuuguaugagaccagacc

SEQ ID NO: 9778 - RNA, 19 nt, Artificial Sequence
  Description of Artificial Sequence: Synthetic oligonucleotide
acugauauuuaauuggagg

SEQ ID NO: 9779 - RNA, 19 nt, Artificial Sequence
  Description of Artificial Sequence: Synthetic oligonucleotide
aauuuugaggcgcuucacc

SEQ ID NO: 9780 - RNA, 19 nt, Artificial Sequence
  Description of Artificial Sequence: Synthetic oligonucleotide
aaaguuaagccguucuugg

SEQ ID NO: 9781 - RNA, 19 nt, Artificial Sequence
  Description of Artificial Sequence: Synthetic oligonucleotide
uguaccauuguagauaugg

SEQ ID NO: 9782 - RNA, 19 nt, Artificial Sequence
  Description of Artificial Sequence: Synthetic oligonucleotide
uuaagugacuuuaaaaugu

SEQ ID NO: 9783 - RNA, 19 nt, Artificial Sequence
  Description of Artificial Sequence: Synthetic oligonucleotide
uguaucauuuguaugagac

SEQ ID NO: 9784 - RNA, 19 nt, Artificial Sequence
  Description of Artificial Sequence: Synthetic oligonucleotide
aaugcaucauaccaaucac

SEQ ID NO: 9785 - RNA, 19 nt, Artificial Sequence
  Description of Artificial Sequence: Synthetic oligonucleotide
uugauaugagcacugagag

SEQ ID NO: 9786 - RNA, 19 nt, Artificial Sequence
  Description of Artificial Sequence: Synthetic oligonucleotide
uuuguaugagaccagaccu

SEQ ID NO: 9787 - RNA, 19 nt, Artificial Sequence
  Description of Artificial Sequence: Synthetic oligonucleotide
uugacucaaauuuugaggc

SEQ ID NO: 9788 - RNA, 19 nt, Artificial Sequence
  Description of Artificial Sequence: Synthetic oligonucleotide
ugugcaaugaaaacuauaa

SEQ ID NO: 9789 - RNA, 19 nt, Artificial Sequence
  Description of Artificial Sequence: Synthetic oligonucleotide
cauaaguauaggaauacgc

SEQ ID NO: 9790 - RNA, 19 nt, Artificial Sequence
  Description of Artificial Sequence: Synthetic oligonucleotide
uugugagcaaaccaaaacc

SEQ ID NO: 9791 - RNA, 19 nt, Artificial Sequence
  Description of Artificial Sequence: Synthetic oligonucleotide
aaguaugugagauuugggu

SEQ ID NO: 9792 - RNA, 19 nt, Artificial Sequence
  Description of Artificial Sequence: Synthetic oligonucleotide
ucuauaaagcgaucuaucc

SEQ ID NO: 9793 - RNA, 19 nt, Artificial Sequence
  Description of Artificial Sequence: Synthetic oligonucleotide
caaagaacgaacacgaaac

SEQ ID NO: 9794 - RNA, 19 nt, Artificial Sequence
  Description of Artificial Sequence: Synthetic oligonucleotide
uuuaagaaggaaagcuccg

SEQ ID NO: 9795 - RNA, 19 nt, Artificial Sequence
  Description of Artificial Sequence: Synthetic oligonucleotide
uugugauaaauuaggauca

SEQ ID NO: 9796 - RNA, 19 nt, Artificial Sequence
  Description of Artificial Sequence: Synthetic oligonucleotide
aagacuuaaguuguuauug

SEQ ID NO: 9797 - RNA, 19 nt, Artificial Sequence
  Description of Artificial Sequence: Synthetic oligonucleotide
agaucuauagcucggcugg

SEQ ID NO: 9798 - RNA, 19 nt, Artificial Sequence
  Description of Artificial Sequence: Synthetic oligonucleotide
aacccgggaagcuaaauuc

SEQ ID NO: 9799 - RNA, 19 nt, Artificial Sequence
  Description of Artificial Sequence: Synthetic oligonucleotide
ucauaauuucguuaaggag

SEQ ID NO: 9800 - RNA, 19 nt, Artificial Sequence
  Description of Artificial Sequence: Synthetic oligonucleotide
ugugaagccaugcuaaaug

SEQ ID NO: 9801 - RNA, 19 nt, Artificial Sequence
  Description of Artificial Sequence: Synthetic oligonucleotide
aguaugacacacuagaaau

SEQ ID NO: 9802 - RNA, 19 nt, Artificial Sequence
  Description of Artificial Sequence: Synthetic oligonucleotide
uuugcaagugucauucuag

SEQ ID NO: 9803 - RNA, 19 nt, Artificial Sequence
  Description of Artificial Sequence: Synthetic oligonucleotide
agcuacauuagcuuuaaug

SEQ ID NO: 9804 - RNA, 19 nt, Artificial Sequence
  Description of Artificial Sequence: Synthetic oligonucleotide
uguaauuagugauuugucu

SEQ ID NO: 9805 - RNA, 19 nt, Artificial Sequence
  Description of Artificial Sequence: Synthetic oligonucleotide
aagguauucagagaaucgg

SEQ ID NO: 9806 - RNA, 19 nt, Artificial Sequence
  Description of Artificial Sequence: Synthetic oligonucleotide
aaguauaggaauacgcaac

SEQ ID NO: 9807 - RNA, 19 nt, Artificial Sequence
  Description of Artificial Sequence: Synthetic oligonucleotide
uucguuaaggagcagaaaa

SEQ ID NO: 9808 - RNA, 19 nt, Artificial Sequence
  Description of Artificial Sequence: Synthetic oligonucleotide
ucuaguauuuugauaugag

SEQ ID NO: 9809 - RNA, 19 nt, Artificial Sequence
  Description of Artificial Sequence: Synthetic oligonucleotide
aguuaagccguucuuggac

SEQ ID NO: 9810 - RNA, 19 nt, Artificial Sequence
  Description of Artificial Sequence: Synthetic oligonucleotide
uaauuugccuaauucagca

SEQ ID NO: 9811 - RNA, 19 nt, Artificial Sequence
  Description of Artificial Sequence: Synthetic oligonucleotide
uauaggaauacgcaaccug

SEQ ID NO: 9812 - RNA, 19 nt, Artificial Sequence
  Description of Artificial Sequence: Synthetic oligonucleotide
uaauacucgaaccauucga

SEQ ID NO: 9813 - RNA, 19 nt, Artificial Sequence
  Description of Artificial Sequence: Synthetic oligonucleotide
guaugugagauuugggugg

SEQ ID NO: 9814 - RNA, 19 nt, Artificial Sequence
  Description of Artificial Sequence: Synthetic oligonucleotide
uuaauacucgaaccauucg

SEQ ID NO: 9815 - RNA, 19 nt, Artificial Sequence
  Description of Artificial Sequence: Synthetic oligonucleotide
ugcacaauuaauacugucu

SEQ ID NO: 9816 - RNA, 19 nt, Artificial Sequence
  Description of Artificial Sequence: Synthetic oligonucleotide
auuacaacccuccaaagau

SEQ ID NO: 9817 - RNA, 19 nt, Artificial Sequence
  Description of Artificial Sequence: Synthetic oligonucleotide
agcacuaugugaucucucc

SEQ ID NO: 9818 - RNA, 19 nt, Artificial Sequence
  Description of Artificial Sequence: Synthetic oligonucleotide
cuggcauacaaucucaugc

SEQ ID NO: 9819 - RNA, 19 nt, Artificial Sequence
  Description of Artificial Sequence: Synthetic oligonucleotide
aacgaucaaagcaagacug

SEQ ID NO: 9820 - RNA, 19 nt, Artificial Sequence
  Description of Artificial Sequence: Synthetic oligonucleotide
acuacugaguauaauuugc

SEQ ID NO: 9821 - RNA, 19 nt, Artificial Sequence
  Description of Artificial Sequence: Synthetic oligonucleotide
accaauaugaggauuaaag

SEQ ID NO: 9822 - RNA, 19 nt, Artificial Sequence
  Description of Artificial Sequence: Synthetic oligonucleotide
aguaugugagauuugggug

SEQ ID NO: 9823 - RNA, 19 nt, Artificial Sequence
  Description of Artificial Sequence: Synthetic oligonucleotide
cuacauuagcuuuaaugcg

SEQ ID NO: 9824 - RNA, 19 nt, Artificial Sequence
  Description of Artificial Sequence: Synthetic oligonucleotide
ucuugauggaaccaguuaa

SEQ ID NO: 9825 - RNA, 19 nt, Artificial Sequence
  Description of Artificial Sequence: Synthetic oligonucleotide
aauuaggaucaccgaaagg

SEQ ID NO: 9826 - RNA, 19 nt, Artificial Sequence
  Description of Artificial Sequence: Synthetic oligonucleotide
aauagaguaaucaugccau

SEQ ID NO: 9827 - RNA, 19 nt, Artificial Sequence
  Description of Artificial Sequence: Synthetic oligonucleotide
uaugcaacacucagguagg

SEQ ID NO: 9828 - RNA, 19 nt, Artificial Sequence
  Description of Artificial Sequence: Synthetic oligonucleotide
auaggaauacgcaaccugc

SEQ ID NO: 9829 - RNA, 19 nt, Artificial Sequence
  Description of Artificial Sequence: Synthetic oligonucleotide
aagaucuauagcucggcug

SEQ ID NO: 9830 - RNA, 19 nt, Artificial Sequence
  Description of Artificial Sequence: Synthetic oligonucleotide
agaaguaugugagauuugg

SEQ ID NO: 9831 - RNA, 19 nt, Artificial Sequence
  Description of Artificial Sequence: Synthetic oligonucleotide
ugacgauaaaauacauggg

SEQ ID NO: 9832 - RNA, 19 nt, Artificial Sequence
  Description of Artificial Sequence: Synthetic oligonucleotide
auuagcuuuaaugcgauug

SEQ ID NO: 9833 - RNA, 19 nt, Artificial Sequence
  Description of Artificial Sequence: Synthetic oligonucleotide
ugucauucuagcacuaugu

SEQ ID NO: 9834 - RNA, 19 nt, Artificial Sequence
  Description of Artificial Sequence: Synthetic oligonucleotide
ucccggaucaaucagcuca

SEQ ID NO: 9835 - RNA, 19 nt, Artificial Sequence
  Description of Artificial Sequence: Synthetic oligonucleotide
uuaauaugugcauuucacu

SEQ ID NO: 9836 - RNA, 19 nt, Artificial Sequence
  Description of Artificial Sequence: Synthetic oligonucleotide
ugaggauuaaagacuuaag

SEQ ID NO: 9837 - RNA, 19 nt, Artificial Sequence
  Description of Artificial Sequence: Synthetic oligonucleotide
uaugugcuagaucuuacga

SEQ ID NO: 9838 - RNA, 19 nt, Artificial Sequence
  Description of Artificial Sequence: Synthetic oligonucleotide
aacaugacuauaucuacuu

SEQ ID NO: 9839 - RNA, 19 nt, Artificial Sequence
  Description of Artificial Sequence: Synthetic oligonucleotide
agcaacuuaauagggaggg

SEQ ID NO: 9840 - RNA, 19 nt, Artificial Sequence
  Description of Artificial Sequence: Synthetic oligonucleotide
auaauuugccuaauucagc

SEQ ID NO: 9841 - RNA, 19 nt, Artificial Sequence
  Description of Artificial Sequence: Synthetic oligonucleotide
ucgaacuauaaaagagagg

SEQ ID NO: 9842 - RNA, 19 nt, Artificial Sequence
  Description of Artificial Sequence: Synthetic oligonucleotide
uuagcuuuaaugcgauuga

SEQ ID NO: 9843 - RNA, 19 nt, Artificial Sequence
  Description of Artificial Sequence: Synthetic oligonucleotide
aucgaaucguuuucacucc

SEQ ID NO: 9844 - RNA, 19 nt, Artificial Sequence
  Description of Artificial Sequence: Synthetic oligonucleotide
agcggauuagcugugacac

SEQ ID NO: 9845 - RNA, 19 nt, Artificial Sequence
  Description of Artificial Sequence: Synthetic oligonucleotide
guagugacuuaucacaccc

SEQ ID NO: 9846 - RNA, 19 nt, Artificial Sequence
  Description of Artificial Sequence: Synthetic oligonucleotide
auugagaauacaucgucga

SEQ ID NO: 9847 - RNA, 19 nt, Artificial Sequence
  Description of Artificial Sequence: Synthetic oligonucleotide
uuaccauugauugaagacu

SEQ ID NO: 9848 - RNA, 19 nt, Artificial Sequence
  Description of Artificial Sequence: Synthetic oligonucleotide
uaugguaauauuuccucgu

SEQ ID NO: 9849 - RNA, 19 nt, Artificial Sequence
  Description of Artificial Sequence: Synthetic oligonucleotide
auagggacgaaguucauaa

SEQ ID NO: 9850 - RNA, 19 nt, Artificial Sequence
  Description of Artificial Sequence: Synthetic oligonucleotide
uuacagcauaucuauagcu

SEQ ID NO: 9851 - RNA, 19 nt, Artificial Sequence
  Description of Artificial Sequence: Synthetic oligonucleotide
ugcuaccaaaguaacuagg

SEQ ID NO: 9852 - RNA, 19 nt, Artificial Sequence
  Description of Artificial Sequence: Synthetic oligonucleotide
uucaaacgaucaaagcaag

SEQ ID NO: 9853 - RNA, 19 nt, Artificial Sequence
  Description of Artificial Sequence: Synthetic oligonucleotide
ugauuaauuaagucaugac

SEQ ID NO: 9854 - RNA, 19 nt, Artificial Sequence
  Description of Artificial Sequence: Synthetic oligonucleotide
ugucuugcacaauuaauac

SEQ ID NO: 9855 - RNA, 19 nt, Artificial Sequence
  Description of Artificial Sequence: Synthetic oligonucleotide
agaaauacaaucggcagca

SEQ ID NO: 9856 - RNA, 19 nt, Artificial Sequence
  Description of Artificial Sequence: Synthetic oligonucleotide
aucauagugauuucuucug

SEQ ID NO: 9857 - RNA, 19 nt, Artificial Sequence
  Description of Artificial Sequence: Synthetic oligonucleotide
uauucagacuguuacguuc

SEQ ID NO: 9858 - RNA, 19 nt, Artificial Sequence
  Description of Artificial Sequence: Synthetic oligonucleotide
ucaugcaauaucuggaauc

SEQ ID NO: 9859 - RNA, 19 nt, Artificial Sequence
  Description of Artificial Sequence: Synthetic oligonucleotide
aaccgaacauucuugcugu

SEQ ID NO: 9860 - RNA, 19 nt, Artificial Sequence
  Description of Artificial Sequence: Synthetic oligonucleotide
accgaaaggauuuggaaga

SEQ ID NO: 9861 - RNA, 19 nt, Artificial Sequence
  Description of Artificial Sequence: Synthetic oligonucleotide
aauuucguuaaggagcaga

SEQ ID NO: 9862 - RNA, 19 nt, Artificial Sequence
  Description of Artificial Sequence: Synthetic oligonucleotide
gacuguaaggccugggugc

SEQ ID NO: 9863 - RNA, 19 nt, Artificial Sequence
  Description of Artificial Sequence: Synthetic oligonucleotide
aaacgaucaugcaauaucu

SEQ ID NO: 9864 - RNA, 19 nt, Artificial Sequence
  Description of Artificial Sequence: Synthetic oligonucleotide
auaaagguagcagguacac

SEQ ID NO: 9865 - RNA, 19 nt, Artificial Sequence
  Description of Artificial Sequence: Synthetic oligonucleotide
ugaucucuccaagaaauag

SEQ ID NO: 9866 - RNA, 19 nt, Artificial Sequence
  Description of Artificial Sequence: Synthetic oligonucleotide
acacuauacacuuuccacu

SEQ ID NO: 9867 - RNA, 19 nt, Artificial Sequence
  Description of Artificial Sequence: Synthetic oligonucleotide
aaagcuccgagcaaugcag

SEQ ID NO: 9868 - RNA, 19 nt, Artificial Sequence
  Description of Artificial Sequence: Synthetic oligonucleotide
ugucaugaaugaaugggcu

SEQ ID NO: 9869 - RNA, 19 nt, Artificial Sequence
  Description of Artificial Sequence: Synthetic oligonucleotide
cuuauacacucaaagcaac

SEQ ID NO: 9870 - RNA, 19 nt, Artificial Sequence
  Description of Artificial Sequence: Synthetic oligonucleotide
uuuaugucagucuguuggc

SEQ ID NO: 9871 - RNA, 19 nt, Artificial Sequence
  Description of Artificial Sequence: Synthetic oligonucleotide
uuauguuaacagauucuac

SEQ ID NO: 9872 - RNA, 19 nt, Artificial Sequence
  Description of Artificial Sequence: Synthetic oligonucleotide
uacgcaaccugccaaagaa

SEQ ID NO: 9873 - RNA, 19 nt, Artificial Sequence
  Description of Artificial Sequence: Synthetic oligonucleotide
uguugauuaggaauaguuu

SEQ ID NO: 9874 - RNA, 19 nt, Artificial Sequence
  Description of Artificial Sequence: Synthetic oligonucleotide
gauucaguacugcucuuag

SEQ ID NO: 9875 - RNA, 19 nt, Artificial Sequence
  Description of Artificial Sequence: Synthetic oligonucleotide
aauuuguuucagugcagga

SEQ ID NO: 9876 - RNA, 19 nt, Artificial Sequence
  Description of Artificial Sequence: Synthetic oligonucleotide
ucuuacgaacugcagacaa

SEQ ID NO: 9877 - RNA, 19 nt, Artificial Sequence
  Description of Artificial Sequence: Synthetic oligonucleotide
caaacgaucaaagcaagac

SEQ ID NO: 9878 - RNA, 19 nt, Artificial Sequence
  Description of Artificial Sequence: Synthetic oligonucleotide
uacugauauuuaauuggag

SEQ ID NO: 9879 - RNA, 19 nt, Artificial Sequence
  Description of Artificial Sequence: Synthetic oligonucleotide
auaaguauaggaauacgca

SEQ ID NO: 9880 - RNA, 19 nt, Artificial Sequence
  Description of Artificial Sequence: Synthetic oligonucleotide
ugauauuuaauuggaggac

SEQ ID NO: 9881 - RNA, 19 nt, Artificial Sequence
  Description of Artificial Sequence: Synthetic oligonucleotide
auucagacuguuacguucc

SEQ ID NO: 9882 - RNA, 19 nt, Artificial Sequence
  Description of Artificial Sequence: Synthetic oligonucleotide
auucgaacagcuuccuguc

SEQ ID NO: 9883 - RNA, 19 nt, Artificial Sequence
  Description of Artificial Sequence: Synthetic oligonucleotide
uuuguguaaguuuggcugu

SEQ ID NO: 9884 - RNA, 19 nt, Artificial Sequence
  Description of Artificial Sequence: Synthetic oligonucleotide
accuuuuggugaucgaggg

SEQ ID NO: 9885 - RNA, 19 nt, Artificial Sequence
  Description of Artificial Sequence: Synthetic oligonucleotide
uuauacacucaaagcaacu

SEQ ID NO: 9886 - RNA, 19 nt, Artificial Sequence
  Description of Artificial Sequence: Synthetic oligonucleotide
uguuguaucaguugacuuu

SEQ ID NO: 9887 - RNA, 19 nt, Artificial Sequence
  Description of Artificial Sequence: Synthetic oligonucleotide
uauuggagcuuauuugugu

SEQ ID NO: 9888 - RNA, 19 nt, Artificial Sequence
  Description of Artificial Sequence: Synthetic oligonucleotide
uucacauggacguguacca

SEQ ID NO: 9889 - RNA, 19 nt, Artificial Sequence
  Description of Artificial Sequence: Synthetic oligonucleotide
ugcucuuaguaagugauca

SEQ ID NO: 9890 - RNA, 19 nt, Artificial Sequence
  Description of Artificial Sequence: Synthetic oligonucleotide
acuuucuggguuuacauua

SEQ ID NO: 9891 - RNA, 19 nt, Artificial Sequence
  Description of Artificial Sequence: Synthetic oligonucleotide
uuaucuaggaagucacuaa

SEQ ID NO: 9892 - RNA, 19 nt, Artificial Sequence
  Description of Artificial Sequence: Synthetic oligonucleotide
aucgguuugaaacauuaaa

SEQ ID NO: 9893 - RNA, 19 nt, Artificial Sequence
  Description of Artificial Sequence: Synthetic oligonucleotide
ucaauagaguaaucaugcc

SEQ ID NO: 9894 - RNA, 19 nt, Artificial Sequence
  Description of Artificial Sequence: Synthetic oligonucleotide
gucuaauccuaucaacucc

SEQ ID NO: 9895 - RNA, 19 nt, Artificial Sequence
  Description of Artificial Sequence: Synthetic oligonucleotide
caccgaaaggauuuggaag

SEQ ID NO: 9896 - RNA, 19 nt, Artificial Sequence
  Description of Artificial Sequence: Synthetic oligonucleotide
aaacuauuggugugucaug

SEQ ID NO: 9897 - RNA, 19 nt, Artificial Sequence
  Description of Artificial Sequence: Synthetic oligonucleotide
aucgaacuauaaaagagag

SEQ ID NO: 9898 - RNA, 19 nt, Artificial Sequence
  Description of Artificial Sequence: Synthetic oligonucleotide
auacuuagaucugacuggg

SEQ ID NO: 9899 - RNA, 19 nt, Artificial Sequence
  Description of Artificial Sequence: Synthetic oligonucleotide
gaacaugugugcaauugag

SEQ ID NO: 9900 - RNA, 19 nt, Artificial Sequence
  Description of Artificial Sequence: Synthetic oligonucleotide
agcaacuauaaucuaguau

SEQ ID NO: 9901 - RNA, 19 nt, Artificial Sequence
  Description of Artificial Sequence: Synthetic oligonucleotide
uguaugagaccagaccucc

SEQ ID NO: 9902 - RNA, 19 nt, Artificial Sequence
  Description of Artificial Sequence: Synthetic oligonucleotide
agaucuaccagccaaccuu

SEQ ID NO: 9903 - RNA, 19 nt, Artificial Sequence
  Description of Artificial Sequence: Synthetic oligonucleotide
auaauggggcaucuuccgg

SEQ ID NO: 9904 - RNA, 19 nt, Artificial Sequence
  Description of Artificial Sequence: Synthetic oligonucleotide
gaggauuaaagacuuaagu

SEQ ID NO: 9905 - RNA, 19 nt, Artificial Sequence
  Description of Artificial Sequence: Synthetic oligonucleotide
aguaagcucuaccaaagaa

SEQ ID NO: 9906 - RNA, 19 nt, Artificial Sequence
  Description of Artificial Sequence: Synthetic oligonucleotide
gacucaaauuuugaggcgc

SEQ ID NO: 9907 - RNA, 19 nt, Artificial Sequence
  Description of Artificial Sequence: Synthetic oligonucleotide
aagcgaucuauccacugga

SEQ ID NO: 9908 - RNA, 19 nt, Artificial Sequence
  Description of Artificial Sequence: Synthetic oligonucleotide
ucgaacugaaccaauugua

SEQ ID NO: 9909 - RNA, 19 nt, Artificial Sequence
  Description of Artificial Sequence: Synthetic oligonucleotide
ugagaaagagucacuuagu

SEQ ID NO: 9910 - RNA, 19 nt, Artificial Sequence
  Description of Artificial Sequence: Synthetic oligonucleotide
uucaauacuuuaugcgcca
